United States Patent Application Publication US 2014/0004565 A1 - sequence listing, part 51

SEQ ID NO: 1202175 - RNA, 19 nt, Artificial Sequence
  Description of Artificial Sequence: Synthetic oligonucleotide
gaccacguccgaguggaga

SEQ ID NO: 1202176 - RNA, 19 nt, Artificial Sequence
  Description of Artificial Sequence: Synthetic oligonucleotide
accucguaacgccccugug

SEQ ID NO: 1202177 - RNA, 19 nt, Artificial Sequence
  Description of Artificial Sequence: Synthetic oligonucleotide
caggucaguuagugcuagc

SEQ ID NO: 1202178 - RNA, 19 nt, Artificial Sequence
  Description of Artificial Sequence: Synthetic oligonucleotide
cugcugcgucuaauggaag

SEQ ID NO: 1202179 - RNA, 19 nt, Artificial Sequence
  Description of Artificial Sequence: Synthetic oligonucleotide
guacugcgagguuguugag

SEQ ID NO: 1202180 - RNA, 19 nt, Artificial Sequence
  Description of Artificial Sequence: Synthetic oligonucleotide
agggcccucugguaguaau

SEQ ID NO: 1202181 - RNA, 19 nt, Artificial Sequence
  Description of Artificial Sequence: Synthetic oligonucleotide
gugccgggaucucguagcc

SEQ ID NO: 1202182 - RNA, 19 nt, Artificial Sequence
  Description of Artificial Sequence: Synthetic oligonucleotide
ucccgugcacuuccucccu

SEQ ID NO: 1202183 - RNA, 19 nt, Artificial Sequence
  Description of Artificial Sequence: Synthetic oligonucleotide
gagcgugcgcagccgugcc

SEQ ID NO: 1202184 - RNA, 19 nt, Artificial Sequence
  Description of Artificial Sequence: Synthetic oligonucleotide
gauccagugccauccccgu

SEQ ID NO: 1202185 - RNA, 19 nt, Artificial Sequence
  Description of Artificial Sequence: Synthetic oligonucleotide
ggggucaucggguccuagc

SEQ ID NO: 1202186 - RNA, 19 nt, Artificial Sequence
  Description of Artificial Sequence: Synthetic oligonucleotide
ugcugucguuuuccacaca

SEQ ID NO: 1202187 - RNA, 19 nt, Artificial Sequence
  Description of Artificial Sequence: Synthetic oligonucleotide
gucaucggguccuagcuuu

SEQ ID NO: 1202188 - RNA, 19 nt, Artificial Sequence
  Description of Artificial Sequence: Synthetic oligonucleotide
ccgcgugcauccaaauggg

SEQ ID NO: 1202189 - RNA, 19 nt, Artificial Sequence
  Description of Artificial Sequence: Synthetic oligonucleotide
ugcuuuccuuugcacucuu

SEQ ID NO: 1202190 - RNA, 19 nt, Artificial Sequence
  Description of Artificial Sequence: Synthetic oligonucleotide
uacuucccucguuuaccau

SEQ ID NO: 1202191 - RNA, 19 nt, Artificial Sequence
  Description of Artificial Sequence: Synthetic oligonucleotide
cgaccuuacugagugagag

SEQ ID NO: 1202192 - RNA, 19 nt, Artificial Sequence
  Description of Artificial Sequence: Synthetic oligonucleotide
caaaagaagucccgucccu

SEQ ID NO: 1202193 - RNA, 19 nt, Artificial Sequence
  Description of Artificial Sequence: Synthetic oligonucleotide
ccaccguacucuccaaaag

SEQ ID NO: 1202194 - RNA, 19 nt, Artificial Sequence
  Description of Artificial Sequence: Synthetic oligonucleotide
ccgaguggagacucucccg

SEQ ID NO: 1202195 - RNA, 19 nt, Artificial Sequence
  Description of Artificial Sequence: Synthetic oligonucleotide
aggcucguuuacacagcgg

SEQ ID NO: 1202196 - RNA, 19 nt, Artificial Sequence
  Description of Artificial Sequence: Synthetic oligonucleotide
cugccgucgguaaagugcu

SEQ ID NO: 1202197 - RNA, 19 nt, Artificial Sequence
  Description of Artificial Sequence: Synthetic oligonucleotide
uucccucguuuaccauaca

SEQ ID NO: 1202198 - RNA, 19 nt, Artificial Sequence
  Description of Artificial Sequence: Synthetic oligonucleotide
ugccaccgcggggugaucu

SEQ ID NO: 1202199 - RNA, 19 nt, Artificial Sequence
  Description of Artificial Sequence: Synthetic oligonucleotide
cccggaguuugcuaaagga

SEQ ID NO: 1202200 - RNA, 19 nt, Artificial Sequence
  Description of Artificial Sequence: Synthetic oligonucleotide
cacguccgaguggagacuc

SEQ ID NO: 1202201 - RNA, 19 nt, Artificial Sequence
  Description of Artificial Sequence: Synthetic oligonucleotide
guuccucggcucacugucc

SEQ ID NO: 1202202 - RNA, 19 nt, Artificial Sequence
  Description of Artificial Sequence: Synthetic oligonucleotide
cucaggucaguuagugcua

SEQ ID NO: 1202203 - RNA, 19 nt, Artificial Sequence
  Description of Artificial Sequence: Synthetic oligonucleotide
ucuucgucuuggccacauu

SEQ ID NO: 1202204 - RNA, 19 nt, Artificial Sequence
  Description of Artificial Sequence: Synthetic oligonucleotide
gaagucccgucccucugcu

SEQ ID NO: 1202205 - RNA, 19 nt, Artificial Sequence
  Description of Artificial Sequence: Synthetic oligonucleotide
ggcccucugguaguaauac

SEQ ID NO: 1202206 - RNA, 19 nt, Artificial Sequence
  Description of Artificial Sequence: Synthetic oligonucleotide
cgugccgggaucucguagc

SEQ ID NO: 1202207 - RNA, 19 nt, Artificial Sequence
  Description of Artificial Sequence: Synthetic oligonucleotide
agccaccguacucuccaaa

SEQ ID NO: 1202208 - RNA, 19 nt, Artificial Sequence
  Description of Artificial Sequence: Synthetic oligonucleotide
gccgucgguaaagugcucc

SEQ ID NO: 1202209 - RNA, 19 nt, Artificial Sequence
  Description of Artificial Sequence: Synthetic oligonucleotide
gccgucagggccacucucg

SEQ ID NO: 1202210 - RNA, 19 nt, Artificial Sequence
  Description of Artificial Sequence: Synthetic oligonucleotide
aacgccccugugaagcaua

SEQ ID NO: 1202211 - RNA, 19 nt, Artificial Sequence
  Description of Artificial Sequence: Synthetic oligonucleotide
cuauccacuuugcaggcuu

SEQ ID NO: 1202212 - RNA, 19 nt, Artificial Sequence
  Description of Artificial Sequence: Synthetic oligonucleotide
gcacagcagcaucauggug

SEQ ID NO: 1202213 - RNA, 19 nt, Artificial Sequence
  Description of Artificial Sequence: Synthetic oligonucleotide
gcuuggcuacauccggaug

SEQ ID NO: 1202214 - RNA, 19 nt, Artificial Sequence
  Description of Artificial Sequence: Synthetic oligonucleotide
ggagccacugcgcuuuaaa

SEQ ID NO: 1202215 - RNA, 19 nt, Artificial Sequence
  Description of Artificial Sequence: Synthetic oligonucleotide
cugucguuuuccacacaaa

SEQ ID NO: 1202216 - RNA, 19 nt, Artificial Sequence
  Description of Artificial Sequence: Synthetic oligonucleotide
cucggcucacugucccgug

SEQ ID NO: 1202217 - RNA, 19 nt, Artificial Sequence
  Description of Artificial Sequence: Synthetic oligonucleotide
ugccgggaucucguagccc

SEQ ID NO: 1202218 - RNA, 19 nt, Artificial Sequence
  Description of Artificial Sequence: Synthetic oligonucleotide
acgccccugugaagcauac

SEQ ID NO: 1202219 - RNA, 19 nt, Artificial Sequence
  Description of Artificial Sequence: Synthetic oligonucleotide
cauggccuucacagggcca

SEQ ID NO: 1202220 - RNA, 19 nt, Artificial Sequence
  Description of Artificial Sequence: Synthetic oligonucleotide
gccaaguuauuuaacugcu

SEQ ID NO: 1202221 - RNA, 19 nt, Artificial Sequence
  Description of Artificial Sequence: Synthetic oligonucleotide
acgcucauacucacuuccu

SEQ ID NO: 1202222 - RNA, 19 nt, Artificial Sequence
  Description of Artificial Sequence: Synthetic oligonucleotide
gccaccguacucuccaaaa

SEQ ID NO: 1202223 - RNA, 19 nt, Artificial Sequence
  Description of Artificial Sequence: Synthetic oligonucleotide
auuuccccugccgucggua

SEQ ID NO: 1202224 - RNA, 19 nt, Artificial Sequence
  Description of Artificial Sequence: Synthetic oligonucleotide
ucucuuccgcgugcaucca

SEQ ID NO: 1202225 - RNA, 19 nt, Artificial Sequence
  Description of Artificial Sequence: Synthetic oligonucleotide
cauccccguuccacucuac

SEQ ID NO: 1202226 - RNA, 19 nt, Artificial Sequence
  Description of Artificial Sequence: Synthetic oligonucleotide
guaaaucuccagggcccuc

SEQ ID NO: 1202227 - RNA, 19 nt, Artificial Sequence
  Description of Artificial Sequence: Synthetic oligonucleotide
ccucguaacgccccuguga

SEQ ID NO: 1202228 - RNA, 19 nt, Artificial Sequence
  Description of Artificial Sequence: Synthetic oligonucleotide
caccgcggggugaucucug

SEQ ID NO: 1202229 - RNA, 19 nt, Artificial Sequence
  Description of Artificial Sequence: Synthetic oligonucleotide
gggucaucggguccuagcu

SEQ ID NO: 1202230 - RNA, 19 nt, Artificial Sequence
  Description of Artificial Sequence: Synthetic oligonucleotide
cgucguugagcagauuggc

SEQ ID NO: 1202231 - RNA, 19 nt, Artificial Sequence
  Description of Artificial Sequence: Synthetic oligonucleotide
gcgugcgcagccgugccgg

SEQ ID NO: 1202232 - RNA, 19 nt, Artificial Sequence
  Description of Artificial Sequence: Synthetic oligonucleotide
cggguccuagcuuugucug

SEQ ID NO: 1202233 - RNA, 19 nt, Artificial Sequence
  Description of Artificial Sequence: Synthetic oligonucleotide
ccguucgugugcacgggug

SEQ ID NO: 1202234 - RNA, 19 nt, Artificial Sequence
  Description of Artificial Sequence: Synthetic oligonucleotide
acccuccuagugguguggu

SEQ ID NO: 1202235 - RNA, 19 nt, Artificial Sequence
  Description of Artificial Sequence: Synthetic oligonucleotide
cccguuccacucuacgcuc

SEQ ID NO: 1202236 - RNA, 19 nt, Artificial Sequence
  Description of Artificial Sequence: Synthetic oligonucleotide
ccauacaguacugcgaggu

SEQ ID NO: 1202237 - RNA, 19 nt, Artificial Sequence
  Description of Artificial Sequence: Synthetic oligonucleotide
ugccgucgguaaagugcuc

SEQ ID NO: 1202238 - RNA, 19 nt, Artificial Sequence
  Description of Artificial Sequence: Synthetic oligonucleotide
uggcuacauccggaugauc

SEQ ID NO: 1202239 - RNA, 19 nt, Artificial Sequence
  Description of Artificial Sequence: Synthetic oligonucleotide
agccgugccgggaucucgu

SEQ ID NO: 1202240 - RNA, 19 nt, Artificial Sequence
  Description of Artificial Sequence: Synthetic oligonucleotide
cuccuaguggugugguuau

SEQ ID NO: 1202241 - RNA, 19 nt, Artificial Sequence
  Description of Artificial Sequence: Synthetic oligonucleotide
cccuguuuacgugaccuca

SEQ ID NO: 1202242 - RNA, 19 nt, Artificial Sequence
  Description of Artificial Sequence: Synthetic oligonucleotide
cccucguuuaccauacagu

SEQ ID NO: 1202243 - RNA, 19 nt, Artificial Sequence
  Description of Artificial Sequence: Synthetic oligonucleotide
ggaagcccggaguuugcua

SEQ ID NO: 1202244 - RNA, 19 nt, Artificial Sequence
  Description of Artificial Sequence: Synthetic oligonucleotide
ccuccccgccgucagggcc

SEQ ID NO: 1202245 - RNA, 19 nt, Artificial Sequence
  Description of Artificial Sequence: Synthetic oligonucleotide
gucaccgaccuuacugagu

SEQ ID NO: 1202246 - RNA, 19 nt, Artificial Sequence
  Description of Artificial Sequence: Synthetic oligonucleotide
cucuacgcucauacucacu

SEQ ID NO: 1202247 - RNA, 19 nt, Artificial Sequence
  Description of Artificial Sequence: Synthetic oligonucleotide
gguaaaucuccagggcccu

SEQ ID NO: 1202248 - RNA, 19 nt, Artificial Sequence
  Description of Artificial Sequence: Synthetic oligonucleotide
cgcucauacucacuuccuc

SEQ ID NO: 1202249 - RNA, 19 nt, Artificial Sequence
  Description of Artificial Sequence: Synthetic oligonucleotide
uccuaguggugugguuauu

SEQ ID NO: 1202250 - RNA, 19 nt, Artificial Sequence
  Description of Artificial Sequence: Synthetic oligonucleotide
cucuuccgcgugcauccaa

SEQ ID NO: 1202251 - RNA, 19 nt, Artificial Sequence
  Description of Artificial Sequence: Synthetic oligonucleotide
ccuaguggugugguuauua

SEQ ID NO: 1202252 - RNA, 19 nt, Artificial Sequence
  Description of Artificial Sequence: Synthetic oligonucleotide
cggaugauccuuucccaga

SEQ ID NO: 1202253 - RNA, 19 nt, Artificial Sequence
  Description of Artificial Sequence: Synthetic oligonucleotide
uagcgucuucuaggcugcu

SEQ ID NO: 1202254 - RNA, 19 nt, Artificial Sequence
  Description of Artificial Sequence: Synthetic oligonucleotide
ccuccuaguggugugguua

SEQ ID NO: 1202255 - RNA, 19 nt, Artificial Sequence
  Description of Artificial Sequence: Synthetic oligonucleotide
caccucguaacgccccugu

SEQ ID NO: 1202256 - RNA, 19 nt, Artificial Sequence
  Description of Artificial Sequence: Synthetic oligonucleotide
ccgugccgggaucucguag

SEQ ID NO: 1202257 - RNA, 19 nt, Artificial Sequence
  Description of Artificial Sequence: Synthetic oligonucleotide
caccgaccuuacugaguga

SEQ ID NO: 1202258 - RNA, 19 nt, Artificial Sequence
  Description of Artificial Sequence: Synthetic oligonucleotide
acaguacugcgagguuguu

SEQ ID NO: 1202259 - RNA, 19 nt, Artificial Sequence
  Description of Artificial Sequence: Synthetic oligonucleotide
gaccucauggcagcuucuu

SEQ ID NO: 1202260 - RNA, 19 nt, Artificial Sequence
  Description of Artificial Sequence: Synthetic oligonucleotide
guggagcgugcgcagccgu

SEQ ID NO: 1202261 - RNA, 19 nt, Artificial Sequence
  Description of Artificial Sequence: Synthetic oligonucleotide
cgcagcacgagggcagggg

SEQ ID NO: 1202262 - RNA, 19 nt, Artificial Sequence
  Description of Artificial Sequence: Synthetic oligonucleotide
cuacauccggaugauccuu

SEQ ID NO: 1202263 - RNA, 19 nt, Artificial Sequence
  Description of Artificial Sequence: Synthetic oligonucleotide
cuuccgcgugcauccaaau

SEQ ID NO: 1202264 - RNA, 19 nt, Artificial Sequence
  Description of Artificial Sequence: Synthetic oligonucleotide
acguccgaguggagacucu

SEQ ID NO: 1202265 - RNA, 19 nt, Artificial Sequence
  Description of Artificial Sequence: Synthetic oligonucleotide
caggcucaggucaguuagu

SEQ ID NO: 1202266 - RNA, 19 nt, Artificial Sequence
  Description of Artificial Sequence: Synthetic oligonucleotide
cccugccgucgguaaagug

SEQ ID NO: 1202267 - RNA, 19 nt, Artificial Sequence
  Description of Artificial Sequence: Synthetic oligonucleotide
ccgaccuuacugagugaga

SEQ ID NO: 1202268 - RNA, 19 nt, Artificial Sequence
  Description of Artificial Sequence: Synthetic oligonucleotide
gcuccgcagcacgagggca

SEQ ID NO: 1202269 - RNA, 19 nt, Artificial Sequence
  Description of Artificial Sequence: Synthetic oligonucleotide
guacagcguuucugcuugu

SEQ ID NO: 1202270 - RNA, 19 nt, Artificial Sequence
  Description of Artificial Sequence: Synthetic oligonucleotide
cguucgugugcacggguga

SEQ ID NO: 1202271 - RNA, 19 nt, Artificial Sequence
  Description of Artificial Sequence: Synthetic oligonucleotide
gcucguuuacacagcggcu

SEQ ID NO: 1202272 - RNA, 19 nt, Artificial Sequence
  Description of Artificial Sequence: Synthetic oligonucleotide
ggucaucggguccuagcuu

SEQ ID NO: 1202273 - RNA, 19 nt, Artificial Sequence
  Description of Artificial Sequence: Synthetic oligonucleotide
ccguuccacucuacgcuca

SEQ ID NO: 1202274 - RNA, 19 nt, Artificial Sequence
  Description of Artificial Sequence: Synthetic oligonucleotide
cgguaaagugcuccaaggu

SEQ ID NO: 1202275 - RNA, 19 nt, Artificial Sequence
  Description of Artificial Sequence: Synthetic oligonucleotide
ccuguuuacgugaccucau

SEQ ID NO: 1202276 - RNA, 19 nt, Artificial Sequence
  Description of Artificial Sequence: Synthetic oligonucleotide
caggcccucccagccccac

SEQ ID NO: 1202277 - RNA, 19 nt, Artificial Sequence
  Description of Artificial Sequence: Synthetic oligonucleotide
cgucuaauggaagcccgga

SEQ ID NO: 1202278 - RNA, 19 nt, Artificial Sequence
  Description of Artificial Sequence: Synthetic oligonucleotide
cagccaccguacucuccaa

SEQ ID NO: 1202279 - RNA, 19 nt, Artificial Sequence
  Description of Artificial Sequence: Synthetic oligonucleotide
gccaccgcggggugaucuc

SEQ ID NO: 1202280 - RNA, 19 nt, Artificial Sequence
  Description of Artificial Sequence: Synthetic oligonucleotide
caucggguccuagcuuugu

SEQ ID NO: 1202281 - RNA, 19 nt, Artificial Sequence
  Description of Artificial Sequence: Synthetic oligonucleotide
ggucauggccggaagucuu

SEQ ID NO: 1202282 - RNA, 19 nt, Artificial Sequence
  Description of Artificial Sequence: Synthetic oligonucleotide
cugcgagguuguugagagu

SEQ ID NO: 1202283 - RNA, 19 nt, Artificial Sequence
  Description of Artificial Sequence: Synthetic oligonucleotide
uccccgccgucagggccac

SEQ ID NO: 1202284 - RNA, 19 nt, Artificial Sequence
  Description of Artificial Sequence: Synthetic oligonucleotide
caguuagugcuagcgucuu

SEQ ID NO: 1202285 - RNA, 19 nt, Artificial Sequence
  Description of Artificial Sequence: Synthetic oligonucleotide
gggcccucugguaguaaua

SEQ ID NO: 1202286 - RNA, 19 nt, Artificial Sequence
  Description of Artificial Sequence: Synthetic oligonucleotide
ggacgccccaggguuccuc

SEQ ID NO: 1202287 - RNA, 19 nt, Artificial Sequence
  Description of Artificial Sequence: Synthetic oligonucleotide
cgugcgcagccgugccggg

SEQ ID NO: 1202288 - RNA, 19 nt, Artificial Sequence
  Description of Artificial Sequence: Synthetic oligonucleotide
gggccuccccaggaaggga

SEQ ID NO: 1202289 - RNA, 19 nt, Artificial Sequence
  Description of Artificial Sequence: Synthetic oligonucleotide
ggagacucucccggcuccu

SEQ ID NO: 1202290 - RNA, 19 nt, Artificial Sequence
  Description of Artificial Sequence: Synthetic oligonucleotide
cgccgucagggccacucuc

SEQ ID NO: 1202291 - RNA, 19 nt, Artificial Sequence
  Description of Artificial Sequence: Synthetic oligonucleotide
gcugccaccgcggggugau

SEQ ID NO: 1202292 - RNA, 19 nt, Artificial Sequence
  Description of Artificial Sequence: Synthetic oligonucleotide
cugccaccgcggggugauc

SEQ ID NO: 1202293 - RNA, 19 nt, Artificial Sequence
  Description of Artificial Sequence: Synthetic oligonucleotide
gcgcagccgugccgggauc

SEQ ID NO: 1202294 - RNA, 19 nt, Artificial Sequence
  Description of Artificial Sequence: Synthetic oligonucleotide
gccgugccgggaucucgua

SEQ ID NO: 1202295 - RNA, 19 nt, Artificial Sequence
  Description of Artificial Sequence: Synthetic oligonucleotide
ccucggcucacugucccgu

SEQ ID NO: 1202296 - RNA, 19 nt, Artificial Sequence
  Description of Artificial Sequence: Synthetic oligonucleotide
cccguucgugugcacgggu

SEQ ID NO: 1202297 - RNA, 19 nt, Artificial Sequence
  Description of Artificial Sequence: Synthetic oligonucleotide
ccacguccgaguggagacu

SEQ ID NO: 1202298 - RNA, 19 nt, Artificial Sequence
  Description of Artificial Sequence: Synthetic oligonucleotide
ccgucccucugcuuuccuu

SEQ ID NO: 1202299 - RNA, 19 nt, Artificial Sequence
  Description of Artificial Sequence: Synthetic oligonucleotide
cguuccacucuacgcucau

SEQ ID NO: 1202300 - RNA, 19 nt, Artificial Sequence
  Description of Artificial Sequence: Synthetic oligonucleotide
ccaccgcggggugaucucu

SEQ ID NO: 1202301 - RNA, 19 nt, Artificial Sequence
  Description of Artificial Sequence: Synthetic oligonucleotide
cccuccuaguggugugguu

SEQ ID NO: 1202302 - RNA, 19 nt, Artificial Sequence
  Description of Artificial Sequence: Synthetic oligonucleotide
ccgccgucagggccacucu

SEQ ID NO: 1202303 - RNA, 19 nt, Artificial Sequence
  Description of Artificial Sequence: Synthetic oligonucleotide
ccccugccgucgguaaagu

SEQ ID NO: 1202304 - RNA, 19 nt, Artificial Sequence
  Description of Artificial Sequence: Synthetic oligonucleotide
cgggguggucauggccgga

SEQ ID NO: 1202305 - RNA, 19 nt, Artificial Sequence
  Description of Artificial Sequence: Synthetic oligonucleotide
gaauauacggccaaaaugg

SEQ ID NO: 1202306 - RNA, 19 nt, Artificial Sequence
  Description of Artificial Sequence: Synthetic oligonucleotide
gauuauagaauauacggcc

SEQ ID NO: 1202307 - RNA, 19 nt, Artificial Sequence
  Description of Artificial Sequence: Synthetic oligonucleotide
gaugcuaagucccagaacc

SEQ ID NO: 1202308 - RNA, 19 nt, Artificial Sequence
  Description of Artificial Sequence: Synthetic oligonucleotide
uccugagucaaccagauag

SEQ ID NO: 1202309 - RNA, 19 nt, Artificial Sequence
  Description of Artificial Sequence: Synthetic oligonucleotide
aaucccguacaauucaucg

SEQ ID NO: 1202310 - RNA, 19 nt, Artificial Sequence
  Description of Artificial Sequence: Synthetic oligonucleotide
uauacggccaaaauggucc

SEQ ID NO: 1202311 - RNA, 19 nt, Artificial Sequence
  Description of Artificial Sequence: Synthetic oligonucleotide
aaauccuguaacuagugug

SEQ ID NO: 1202312 - RNA, 19 nt, Artificial Sequence
  Description of Artificial Sequence: Synthetic oligonucleotide
ugauuauagaauauacggc

SEQ ID NO: 1202313 - RNA, 19 nt, Artificial Sequence
  Description of Artificial Sequence: Synthetic oligonucleotide
agaauauacggccaaaaug

SEQ ID NO: 1202314 - RNA, 19 nt, Artificial Sequence
  Description of Artificial Sequence: Synthetic oligonucleotide
aauucuagcaaugaccucu

SEQ ID NO: 1202315 - RNA, 19 nt, Artificial Sequence
  Description of Artificial Sequence: Synthetic oligonucleotide
aagguuugcaccgacaauc

SEQ ID NO: 1202316 - RNA, 19 nt, Artificial Sequence
  Description of Artificial Sequence: Synthetic oligonucleotide
auguagaggaaucuugggc

SEQ ID NO: 1202317 - RNA, 19 nt, Artificial Sequence
  Description of Artificial Sequence: Synthetic oligonucleotide
aucuuaggcacuuuggcac

SEQ ID NO: 1202318 - RNA, 19 nt, Artificial Sequence
  Description of Artificial Sequence: Synthetic oligonucleotide
auugagacuucugacaacc

SEQ ID NO: 1202319 - RNA, 19 nt, Artificial Sequence
  Description of Artificial Sequence: Synthetic oligonucleotide
agauucagaaaacaaaacu

SEQ ID NO: 1202320 - RNA, 19 nt, Artificial Sequence
  Description of Artificial Sequence: Synthetic oligonucleotide
aaaccucuuaaugaugggc

SEQ ID NO: 1202321 - RNA, 19 nt, Artificial Sequence
  Description of Artificial Sequence: Synthetic oligonucleotide
cacaauucuagcaaugacc

SEQ ID NO: 1202322 - RNA, 19 nt, Artificial Sequence
  Description of Artificial Sequence: Synthetic oligonucleotide
uuauccaaauauucgagca

SEQ ID NO: 1202323 - RNA, 19 nt, Artificial Sequence
  Description of Artificial Sequence: Synthetic oligonucleotide
gauaauugagacuucugac

SEQ ID NO: 1202324 - RNA, 19 nt, Artificial Sequence
  Description of Artificial Sequence: Synthetic oligonucleotide
uuaucuuaggcacuuuggc

SEQ ID NO: 1202325 - RNA, 19 nt, Artificial Sequence
  Description of Artificial Sequence: Synthetic oligonucleotide
aaauauucgagcaaauccu

SEQ ID NO: 1202326 - RNA, 19 nt, Artificial Sequence
  Description of Artificial Sequence: Synthetic oligonucleotide
ucuagcaaugaccucucgg

SEQ ID NO: 1202327 - RNA, 19 nt, Artificial Sequence
  Description of Artificial Sequence: Synthetic oligonucleotide
aaaggugucggcuugccga

SEQ ID NO: 1202328 - RNA, 19 nt, Artificial Sequence
  Description of Artificial Sequence: Synthetic oligonucleotide
uuuuguacgaugauguuuu

SEQ ID NO: 1202329 - RNA, 19 nt, Artificial Sequence
  Description of Artificial Sequence: Synthetic oligonucleotide
guaaccugcaaacugggag

SEQ ID NO: 1202330 - RNA, 19 nt, Artificial Sequence
  Description of Artificial Sequence: Synthetic oligonucleotide
ucaauaaucccaucauccc

SEQ ID NO: 1202331 - RNA, 19 nt, Artificial Sequence
  Description of Artificial Sequence: Synthetic oligonucleotide
agauagaugcaugggagcc

SEQ ID NO: 1202332 - RNA, 19 nt, Artificial Sequence
  Description of Artificial Sequence: Synthetic oligonucleotide
ugauccgccaauuaugaca

SEQ ID NO: 1202333 - RNA, 19 nt, Artificial Sequence
  Description of Artificial Sequence: Synthetic oligonucleotide
ugaaguugacucacuagag

SEQ ID NO: 1202334 - RNA, 19 nt, Artificial Sequence
  Description of Artificial Sequence: Synthetic oligonucleotide
gaugccuacaggauuaucc

SEQ ID NO: 1202335 - RNA, 19 nt, Artificial Sequence
  Description of Artificial Sequence: Synthetic oligonucleotide
aauugagacuucugacaac

SEQ ID NO: 1202336 - RNA, 19 nt, Artificial Sequence
  Description of Artificial Sequence: Synthetic oligonucleotide
auugcuugauuauagaaua

SEQ ID NO: 1202337 - RNA, 19 nt, Artificial Sequence
  Description of Artificial Sequence: Synthetic oligonucleotide
aauucugucucuggguaac

SEQ ID NO: 1202338 - RNA, 19 nt, Artificial Sequence
  Description of Artificial Sequence: Synthetic oligonucleotide
uaugauccgccaauuauga

SEQ ID NO: 1202339 - RNA, 19 nt, Artificial Sequence
  Description of Artificial Sequence: Synthetic oligonucleotide
ugacaguuaucuuaggcac

SEQ ID NO: 1202340 - RNA, 19 nt, Artificial Sequence
  Description of Artificial Sequence: Synthetic oligonucleotide
gucaauaaucccaucaucc

SEQ ID NO: 1202341 - RNA, 19 nt, Artificial Sequence
  Description of Artificial Sequence: Synthetic oligonucleotide
uuaagguuugcaccgacaa

SEQ ID NO: 1202342 - RNA, 19 nt, Artificial Sequence
  Description of Artificial Sequence: Synthetic oligonucleotide
ucccguacaauucaucggc

SEQ ID NO: 1202343 - RNA, 19 nt, Artificial Sequence
  Description of Artificial Sequence: Synthetic oligonucleotide
uguacgaugauguuuucau

SEQ ID NO: 1202344 - RNA, 19 nt, Artificial Sequence
  Description of Artificial Sequence: Synthetic oligonucleotide
aacuggacgaagugagcac

SEQ ID NO: 1202345 - RNA, 19 nt, Artificial Sequence
  Description of Artificial Sequence: Synthetic oligonucleotide
ucucuaccaaccaugaauc

SEQ ID NO: 1202346 - RNA, 19 nt, Artificial Sequence
  Description of Artificial Sequence: Synthetic oligonucleotide
ucaucggcagggaacaaag

SEQ ID NO: 1202347 - RNA, 19 nt, Artificial Sequence
  Description of Artificial Sequence: Synthetic oligonucleotide
acugguaaccugcaaacug

SEQ ID NO: 1202348 - RNA, 19 nt, Artificial Sequence
  Description of Artificial Sequence: Synthetic oligonucleotide
gaaguugacucacuagagc

SEQ ID NO: 1202349 - RNA, 19 nt, Artificial Sequence
  Description of Artificial Sequence: Synthetic oligonucleotide
aauugcuugauuauagaau

SEQ ID NO: 1202350 - RNA, 19 nt, Artificial Sequence
  Description of Artificial Sequence: Synthetic oligonucleotide
cugguaaccugcaaacugg

SEQ ID NO: 1202351 - RNA, 19 nt, Artificial Sequence
  Description of Artificial Sequence: Synthetic oligonucleotide
uaucuuaggcacuuuggca

SEQ ID NO: 1202352 - RNA, 19 nt, Artificial Sequence
  Description of Artificial Sequence: Synthetic oligonucleotide
aauucaucggcagggaaca

SEQ ID NO: 1202353 - RNA, 19 nt, Artificial Sequence
  Description of Artificial Sequence: Synthetic oligonucleotide
uuauagaauauacggccaa

SEQ ID NO: 1202354 - RNA, 19 nt, Artificial Sequence
  Description of Artificial Sequence: Synthetic oligonucleotide
ugauguuuucaucagccau

SEQ ID NO: 1202355 - RNA, 19 nt, Artificial Sequence
  Description of Artificial Sequence: Synthetic oligonucleotide
gugugucucccauauaagg

SEQ ID NO: 1202356 - RNA, 19 nt, Artificial Sequence
  Description of Artificial Sequence: Synthetic oligonucleotide
auaacugguaaccugcaaa

SEQ ID NO: 1202357 - RNA, 19 nt, Artificial Sequence
  Description of Artificial Sequence: Synthetic oligonucleotide
aauauucgagcaaauccug

SEQ ID NO: 1202358 - RNA, 19 nt, Artificial Sequence
  Description of Artificial Sequence: Synthetic oligonucleotide
acaauucuagcaaugaccu

SEQ ID NO: 1202359 - RNA, 19 nt, Artificial Sequence
  Description of Artificial Sequence: Synthetic oligonucleotide
ucguccaaagcauaguggu

SEQ ID NO: 1202360 - RNA, 19 nt, Artificial Sequence
  Description of Artificial Sequence: Synthetic oligonucleotide
cauagguucuccugguagg

SEQ ID NO: 1202361 - RNA, 19 nt, Artificial Sequence
  Description of Artificial Sequence: Synthetic oligonucleotide
ucggucuucuggaugggcg

SEQ ID NO: 1202362 - RNA, 19 nt, Artificial Sequence
  Description of Artificial Sequence: Synthetic oligonucleotide
gauccgccaauuaugacag

SEQ ID NO: 1202363 - RNA, 19 nt, Artificial Sequence
  Description of Artificial Sequence: Synthetic oligonucleotide
acagcuaucugugugauau

SEQ ID NO: 1202364 - RNA, 19 nt, Artificial Sequence
  Description of Artificial Sequence: Synthetic oligonucleotide
caccauauaacugguaacc

SEQ ID NO: 1202365 - RNA, 19 nt, Artificial Sequence
  Description of Artificial Sequence: Synthetic oligonucleotide
augguggucguccaaagca

SEQ ID NO: 1202366 - RNA, 19 nt, Artificial Sequence
  Description of Artificial Sequence: Synthetic oligonucleotide
uagaauauacggccaaaau

SEQ ID NO: 1202367 - RNA, 19 nt, Artificial Sequence
  Description of Artificial Sequence: Synthetic oligonucleotide
uccuagucucacauacugg

SEQ ID NO: 1202368 - RNA, 19 nt, Artificial Sequence
  Description of Artificial Sequence: Synthetic oligonucleotide
uucaaaccucuuaaugaug

SEQ ID NO: 1202369 - RNA, 19 nt, Artificial Sequence
  Description of Artificial Sequence: Synthetic oligonucleotide
aaggucggcaccuccaaga

SEQ ID NO: 1202370 - RNA, 19 nt, Artificial Sequence
  Description of Artificial Sequence: Synthetic oligonucleotide
caacagguucuauaucugg

SEQ ID NO: 1202371 - RNA, 19 nt, Artificial Sequence
  Description of Artificial Sequence: Synthetic oligonucleotide
cuggguuacauccugaaga

SEQ ID NO: 1202372 - RNA, 19 nt, Artificial Sequence
  Description of Artificial Sequence: Synthetic oligonucleotide
ucugauaauugagacuucu

SEQ ID NO: 1202373 - RNA, 19 nt, Artificial Sequence
  Description of Artificial Sequence: Synthetic oligonucleotide
uccucgucaccauauaacu

SEQ ID NO: 1202374 - RNA, 19 nt, Artificial Sequence
  Description of Artificial Sequence: Synthetic oligonucleotide
cauugaaucugcuuccauc

SEQ ID NO: 1202375 - RNA, 19 nt, Artificial Sequence
  Description of Artificial Sequence: Synthetic oligonucleotide
cacauguagaggaaucuug

SEQ ID NO: 1202376 - RNA, 19 nt, Artificial Sequence
  Description of Artificial Sequence: Synthetic oligonucleotide
uauccaaauauucgagcaa

SEQ ID NO: 1202377 - RNA, 19 nt, Artificial Sequence
  Description of Artificial Sequence: Synthetic oligonucleotide
caauucaucggcagggaac

SEQ ID NO: 1202378 - RNA, 19 nt, Artificial Sequence
  Description of Artificial Sequence: Synthetic oligonucleotide
acuggacgaagugagcacc

SEQ ID NO: 1202379 - RNA, 19 nt, Artificial Sequence
  Description of Artificial Sequence: Synthetic oligonucleotide
acuagugugucucccauau

SEQ ID NO: 1202380 - RNA, 19 nt, Artificial Sequence
  Description of Artificial Sequence: Synthetic oligonucleotide
gucggcaccuccaagaucc

SEQ ID NO: 1202381 - RNA, 19 nt, Artificial Sequence
  Description of Artificial Sequence: Synthetic oligonucleotide
gauacgggcauuuggccac

SEQ ID NO: 1202382 - RNA, 19 nt, Artificial Sequence
  Description of Artificial Sequence: Synthetic oligonucleotide
uacauccugaagaugccga

SEQ ID NO: 1202383 - RNA, 19 nt, Artificial Sequence
  Description of Artificial Sequence: Synthetic oligonucleotide
accucucggacaucaaaac

SEQ ID NO: 1202384 - RNA, 19 nt, Artificial Sequence
  Description of Artificial Sequence: Synthetic oligonucleotide
agucgggccacagaguccc

SEQ ID NO: 1202385 - RNA, 19 nt, Artificial Sequence
  Description of Artificial Sequence: Synthetic oligonucleotide
gugucucccauauaaggcc

SEQ ID NO: 1202386 - RNA, 19 nt, Artificial Sequence
  Description of Artificial Sequence: Synthetic oligonucleotide
ccuagucucacauacuggg

SEQ ID NO: 1202387 - RNA, 19 nt, Artificial Sequence
  Description of Artificial Sequence: Synthetic oligonucleotide
cucagcgcgcuccacaugg

SEQ ID NO: 1202388 - RNA, 19 nt, Artificial Sequence
  Description of Artificial Sequence: Synthetic oligonucleotide
caugauaggcgcgcgaccg

SEQ ID NO: 1202389 - RNA, 19 nt, Artificial Sequence
  Description of Artificial Sequence: Synthetic oligonucleotide
caaccuuccuuguuaagug

SEQ ID NO: 1202390 - RNA, 19 nt, Artificial Sequence
  Description of Artificial Sequence: Synthetic oligonucleotide
uuacauccugaagaugccg

SEQ ID NO: 1202391 - RNA, 19 nt, Artificial Sequence
  Description of Artificial Sequence: Synthetic oligonucleotide
ggauuauccaaauauucga

SEQ ID NO: 1202392 - RNA, 19 nt, Artificial Sequence
  Description of Artificial Sequence: Synthetic oligonucleotide
auacggccaaaaugguccc

SEQ ID NO: 1202393 - RNA, 19 nt, Artificial Sequence
  Description of Artificial Sequence: Synthetic oligonucleotide
gagauacgggcauuuggcc

SEQ ID NO: 1202394 - RNA, 19 nt, Artificial Sequence
  Description of Artificial Sequence: Synthetic oligonucleotide
ucgaugguaacauccaauu

SEQ ID NO: 1202395 - RNA, 19 nt, Artificial Sequence
  Description of Artificial Sequence: Synthetic oligonucleotide
cacuagagcuuucaucugc

SEQ ID NO: 1202396 - RNA, 19 nt, Artificial Sequence
  Description of Artificial Sequence: Synthetic oligonucleotide
aagacauaauugcuugauu

SEQ ID NO: 1202397 - RNA, 19 nt, Artificial Sequence
  Description of Artificial Sequence: Synthetic oligonucleotide
acugggcucguucaugaag

SEQ ID NO: 1202398 - RNA, 19 nt, Artificial Sequence
  Description of Artificial Sequence: Synthetic oligonucleotide
cuccuagucucacauacug

SEQ ID NO: 1202399 - RNA, 19 nt, Artificial Sequence
  Description of Artificial Sequence: Synthetic oligonucleotide
guuaccccagacuuucugc

SEQ ID NO: 1202400 - RNA, 19 nt, Artificial Sequence
  Description of Artificial Sequence: Synthetic oligonucleotide
agauacgggcauuuggcca

SEQ ID NO: 1202401 - RNA, 19 nt, Artificial Sequence
  Description of Artificial Sequence: Synthetic oligonucleotide
ucgagcaaauccuguaacu

SEQ ID NO: 1202402 - RNA, 19 nt, Artificial Sequence
  Description of Artificial Sequence: Synthetic oligonucleotide
augcaugggagccuguucu

SEQ ID NO: 1202403 - RNA, 19 nt, Artificial Sequence
  Description of Artificial Sequence: Synthetic oligonucleotide
auuauagaauauacggcca

SEQ ID NO: 1202404 - RNA, 19 nt, Artificial Sequence
  Description of Artificial Sequence: Synthetic oligonucleotide
agcaaugaccucucggaca

SEQ ID NO: 1202405 - RNA, 19 nt, Artificial Sequence
  Description of Artificial Sequence: Synthetic oligonucleotide
uauucgagcaaauccugua

SEQ ID NO: 1202406 - RNA, 19 nt, Artificial Sequence
  Description of Artificial Sequence: Synthetic oligonucleotide
agcauaguggucaguuacc

SEQ ID NO: 1202407 - RNA, 19 nt, Artificial Sequence
  Description of Artificial Sequence: Synthetic oligonucleotide
uaaguuggccccuccugag

SEQ ID NO: 1202408 - RNA, 19 nt, Artificial Sequence
  Description of Artificial Sequence: Synthetic oligonucleotide
ugggcuauaugcucugcca

SEQ ID NO: 1202409 - RNA, 19 nt, Artificial Sequence
  Description of Artificial Sequence: Synthetic oligonucleotide
ucccgaucuggaaaggugu

SEQ ID NO: 1202410 - RNA, 19 nt, Artificial Sequence
  Description of Artificial Sequence: Synthetic oligonucleotide
aaggcucgaugguaacauc

SEQ ID NO: 1202411 - RNA, 19 nt, Artificial Sequence
  Description of Artificial Sequence: Synthetic oligonucleotide
aauauacggccaaaauggu

SEQ ID NO: 1202412 - RNA, 19 nt, Artificial Sequence
  Description of Artificial Sequence: Synthetic oligonucleotide
gagacuucugacaaccuuc

SEQ ID NO: 1202413 - RNA, 19 nt, Artificial Sequence
  Description of Artificial Sequence: Synthetic oligonucleotide
uauaacugguaaccugcaa

SEQ ID NO: 1202414 - RNA, 19 nt, Artificial Sequence
  Description of Artificial Sequence: Synthetic oligonucleotide
cuagucgggccacagaguc

SEQ ID NO: 1202415 - RNA, 19 nt, Artificial Sequence
  Description of Artificial Sequence: Synthetic oligonucleotide
auauacggccaaaaugguc

SEQ ID NO: 1202416 - RNA, 19 nt, Artificial Sequence
  Description of Artificial Sequence: Synthetic oligonucleotide
uggguuacauccugaagau

SEQ ID NO: 1202417 - RNA, 19 nt, Artificial Sequence
  Description of Artificial Sequence: Synthetic oligonucleotide
ugaugcuaagucccagaac

SEQ ID NO: 1202418 - RNA, 19 nt, Artificial Sequence
  Description of Artificial Sequence: Synthetic oligonucleotide
aguuaccccagacuuucug

SEQ ID NO: 1202419 - RNA, 19 nt, Artificial Sequence
  Description of Artificial Sequence: Synthetic oligonucleotide
ucuuaagguuugcaccgac

SEQ ID NO: 1202420 - RNA, 19 nt, Artificial Sequence
  Description of Artificial Sequence: Synthetic oligonucleotide
ccggcuaagaagauggugc

SEQ ID NO: 1202421 - RNA, 19 nt, Artificial Sequence
  Description of Artificial Sequence: Synthetic oligonucleotide
cauaguggucaguuacccc

SEQ ID NO: 1202422 - RNA, 19 nt, Artificial Sequence
  Description of Artificial Sequence: Synthetic oligonucleotide
uccaauuucuucugauaau

SEQ ID NO: 1202423 - RNA, 19 nt, Artificial Sequence
  Description of Artificial Sequence: Synthetic oligonucleotide
agguuugcaccgacaaucc

SEQ ID NO: 1202424 - RNA, 19 nt, Artificial Sequence
  Description of Artificial Sequence: Synthetic oligonucleotide
ucccauauaaggccuugaa

SEQ ID NO: 1202425 - RNA, 19 nt, Artificial Sequence
  Description of Artificial Sequence: Synthetic oligonucleotide
auucgagcaaauccuguaa

SEQ ID NO: 1202426 - RNA, 19 nt, Artificial Sequence
  Description of Artificial Sequence: Synthetic oligonucleotide
cacaggauacagcagccac

SEQ ID NO: 1202427 - RNA, 19 nt, Artificial Sequence
  Description of Artificial Sequence: Synthetic oligonucleotide
caauaaucccaucauccca

SEQ ID NO: 1202428 - RNA, 19 nt, Artificial Sequence
  Description of Artificial Sequence: Synthetic oligonucleotide
augauguuuucaucagcca

SEQ ID NO: 1202429 - RNA, 19 nt, Artificial Sequence
  Description of Artificial Sequence: Synthetic oligonucleotide
ugcuugauuauagaauaua

SEQ ID NO: 1202430 - RNA, 19 nt, Artificial Sequence
  Description of Artificial Sequence: Synthetic oligonucleotide
augauccgccaauuaugac

SEQ ID NO: 1202431 - RNA, 19 nt, Artificial Sequence
  Description of Artificial Sequence: Synthetic oligonucleotide
auaggcgcgcgaccgagag

SEQ ID NO: 1202432 - RNA, 19 nt, Artificial Sequence
  Description of Artificial Sequence: Synthetic oligonucleotide
uauagaauauacggccaaa

SEQ ID NO: 1202433 - RNA, 19 nt, Artificial Sequence
  Description of Artificial Sequence: Synthetic oligonucleotide
uaacuagugugucucccau

SEQ ID NO: 1202434 - RNA, 19 nt, Artificial Sequence
  Description of Artificial Sequence: Synthetic oligonucleotide
auugucaauucugucucug

SEQ ID NO: 1202435 - RNA, 19 nt, Artificial Sequence
  Description of Artificial Sequence: Synthetic oligonucleotide
accgagagacagcugccgg

SEQ ID NO: 1202436 - RNA, 19 nt, Artificial Sequence
  Description of Artificial Sequence: Synthetic oligonucleotide
auagaauauacggccaaaa

SEQ ID NO: 1202437 - RNA, 19 nt, Artificial Sequence
  Description of Artificial Sequence: Synthetic oligonucleotide
gcuugauuauagaauauac

SEQ ID NO: 1202438 - RNA, 19 nt, Artificial Sequence
  Description of Artificial Sequence: Synthetic oligonucleotide
acguaugcgccuccugccg

SEQ ID NO: 1202439 - RNA, 19 nt, Artificial Sequence
  Description of Artificial Sequence: Synthetic oligonucleotide
auagaugcaugggagccug

SEQ ID NO: 1202440 - RNA, 19 nt, Artificial Sequence
  Description of Artificial Sequence: Synthetic oligonucleotide
ugaccucucggacaucaaa

SEQ ID NO: 1202441 - RNA, 19 nt, Artificial Sequence
  Description of Artificial Sequence: Synthetic oligonucleotide
uccuguaacuagugugucu

SEQ ID NO: 1202442 - RNA, 19 nt, Artificial Sequence
  Description of Artificial Sequence: Synthetic oligonucleotide
uccuuguuaaguggagggc

SEQ ID NO: 1202443 - RNA, 19 nt, Artificial Sequence
  Description of Artificial Sequence: Synthetic oligonucleotide
uugcuugauuauagaauau

SEQ ID NO: 1202444 - RNA, 19 nt, Artificial Sequence
  Description of Artificial Sequence: Synthetic oligonucleotide
cucuaccaaccaugaaucc

SEQ ID NO: 1202445 - RNA, 19 nt, Artificial Sequence
  Description of Artificial Sequence: Synthetic oligonucleotide
ucccaucaccgagauacgg

SEQ ID NO: 1202446 - RNA, 19 nt, Artificial Sequence
  Description of Artificial Sequence: Synthetic oligonucleotide
uaagguuugcaccgacaau

SEQ ID NO: 1202447 - RNA, 19 nt, Artificial Sequence
  Description of Artificial Sequence: Synthetic oligonucleotide
cacggggucaauaauccca

SEQ ID NO: 1202448 - RNA, 19 nt, Artificial Sequence
  Description of Artificial Sequence: Synthetic oligonucleotide
ucacuagagcuuucaucug

SEQ ID NO: 1202449 - RNA, 19 nt, Artificial Sequence
  Description of Artificial Sequence: Synthetic oligonucleotide
gaauccggugauguucugc

SEQ ID NO: 1202450 - RNA, 19 nt, Artificial Sequence
  Description of Artificial Sequence: Synthetic oligonucleotide
cacguaugcgccuccugcc

SEQ ID NO: 1202451 - RNA, 19 nt, Artificial Sequence
  Description of Artificial Sequence: Synthetic oligonucleotide
ucauugaaucugcuuccau

SEQ ID NO: 1202452 - RNA, 19 nt, Artificial Sequence
  Description of Artificial Sequence: Synthetic oligonucleotide
cauugcaggcacguaugcg

SEQ ID NO: 1202453 - RNA, 19 nt, Artificial Sequence
  Description of Artificial Sequence: Synthetic oligonucleotide
aggaaucuugggcuauaug

SEQ ID NO: 1202454 - RNA, 19 nt, Artificial Sequence
  Description of Artificial Sequence: Synthetic oligonucleotide
guuacauccugaagaugcc

SEQ ID NO: 1202455 - RNA, 19 nt, Artificial Sequence
  Description of Artificial Sequence: Synthetic oligonucleotide
ucgucaccauauaacuggu

SEQ ID NO: 1202456 - RNA, 19 nt, Artificial Sequence
  Description of Artificial Sequence: Synthetic oligonucleotide
cuggacgaagugagcaccc

SEQ ID NO: 1202457 - RNA, 19 nt, Artificial Sequence
  Description of Artificial Sequence: Synthetic oligonucleotide
aucaccgagauacgggcau

SEQ ID NO: 1202458 - RNA, 19 nt, Artificial Sequence
  Description of Artificial Sequence: Synthetic oligonucleotide
ggucguccaaagcauagug

SEQ ID NO: 1202459 - RNA, 19 nt, Artificial Sequence
  Description of Artificial Sequence: Synthetic oligonucleotide
aaguuggccccuccugagu

SEQ ID NO: 1202460 - RNA, 19 nt, Artificial Sequence
  Description of Artificial Sequence: Synthetic oligonucleotide
gguaaguuggccccuccug

SEQ ID NO: 1202461 - RNA, 19 nt, Artificial Sequence
  Description of Artificial Sequence: Synthetic oligonucleotide
ccacacaucccauaguuuc

SEQ ID NO: 1202462 - RNA, 19 nt, Artificial Sequence
  Description of Artificial Sequence: Synthetic oligonucleotide
auucuagcaaugaccucuc

SEQ ID NO: 1202463 - RNA, 19 nt, Artificial Sequence
  Description of Artificial Sequence: Synthetic oligonucleotide
uugagacuucugacaaccu

SEQ ID NO: 1202464 - RNA, 19 nt, Artificial Sequence
  Description of Artificial Sequence: Synthetic oligonucleotide
ugauaggcgcgcgaccgag

SEQ ID NO: 1202465 - RNA, 19 nt, Artificial Sequence
  Description of Artificial Sequence: Synthetic oligonucleotide
cuuaagguuugcaccgaca

SEQ ID NO: 1202466 - RNA, 19 nt, Artificial Sequence
  Description of Artificial Sequence: Synthetic oligonucleotide
ugguggucguccaaagcau

SEQ ID NO: 1202467 - RNA, 19 nt, Artificial Sequence
  Description of Artificial Sequence: Synthetic oligonucleotide
gcgaccgagagacagcugc

SEQ ID NO: 1202468 - RNA, 19 nt, Artificial Sequence
  Description of Artificial Sequence: Synthetic oligonucleotide
aucccuucggcuucauagu

SEQ ID NO: 1202469 - RNA, 19 nt, Artificial Sequence
  Description of Artificial Sequence: Synthetic oligonucleotide
gccuagucgggccacagag

SEQ ID NO: 1202470 - RNA, 19 nt, Artificial Sequence
  Description of Artificial Sequence: Synthetic oligonucleotide
guacaggagcccaugacca

SEQ ID NO: 1202471 - RNA, 19 nt, Artificial Sequence
  Description of Artificial Sequence: Synthetic oligonucleotide
caucggcagggaacaaagg

SEQ ID NO: 1202472 - RNA, 19 nt, Artificial Sequence
  Description of Artificial Sequence: Synthetic oligonucleotide
accaucuuuggcaaucccu

SEQ ID NO: 1202473 - RNA, 19 nt, Artificial Sequence
  Description of Artificial Sequence: Synthetic oligonucleotide
cgagauacgggcauuuggc

SEQ ID NO: 1202474 - RNA, 19 nt, Artificial Sequence
  Description of Artificial Sequence: Synthetic oligonucleotide
ucccuucggcuucauaguc

SEQ ID NO: 1202475 - RNA, 19 nt, Artificial Sequence
  Description of Artificial Sequence: Synthetic oligonucleotide
ggucaauaaucccaucauc

SEQ ID NO: 1202476 - RNA, 19 nt, Artificial Sequence
  Description of Artificial Sequence: Synthetic oligonucleotide
cuggaaaggugucggcuug

SEQ ID NO: 1202477 - RNA, 19 nt, Artificial Sequence
  Description of Artificial Sequence: Synthetic oligonucleotide
uucggcuucauagucucua

SEQ ID NO: 1202478 - RNA, 19 nt, Artificial Sequence
  Description of Artificial Sequence: Synthetic oligonucleotide
uccgccaauuaugacaguu

SEQ ID NO: 1202479 - RNA, 19 nt, Artificial Sequence
  Description of Artificial Sequence: Synthetic oligonucleotide
cauaugauccgccaauuau

SEQ ID NO: 1202480 - RNA, 19 nt, Artificial Sequence
  Description of Artificial Sequence: Synthetic oligonucleotide
acaggauuauccaaauauu

SEQ ID NO: 1202481 - RNA, 19 nt, Artificial Sequence
  Description of Artificial Sequence: Synthetic oligonucleotide
acaguuaucuuaggcacuu

SEQ ID NO: 1202482 - RNA, 19 nt, Artificial Sequence
  Description of Artificial Sequence: Synthetic oligonucleotide
guacgaugauguuuucauc

SEQ ID NO: 1202483 - RNA, 19 nt, Artificial Sequence
  Description of Artificial Sequence: Synthetic oligonucleotide
auauucgagcaaauccugu

SEQ ID NO: 1202484 - RNA, 19 nt, Artificial Sequence
  Description of Artificial Sequence: Synthetic oligonucleotide
ccaucaccgagauacgggc

SEQ ID NO: 1202485 - RNA, 19 nt, Artificial Sequence
  Description of Artificial Sequence: Synthetic oligonucleotide
gccuccuagucucacauac

SEQ ID NO: 1202486 - RNA, 19 nt, Artificial Sequence
  Description of Artificial Sequence: Synthetic oligonucleotide
uuguuaaguggagggcaug

SEQ ID NO: 1202487 - RNA, 19 nt, Artificial Sequence
  Description of Artificial Sequence: Synthetic oligonucleotide
caaucccguacaauucauc

SEQ ID NO: 1202488 - RNA, 19 nt, Artificial Sequence
  Description of Artificial Sequence: Synthetic oligonucleotide
auagguucuccugguaggu

SEQ ID NO: 1202489 - RNA, 19 nt, Artificial Sequence
  Description of Artificial Sequence: Synthetic oligonucleotide
gggucuaggagauugucaa

SEQ ID NO: 1202490 - RNA, 19 nt, Artificial Sequence
  Description of Artificial Sequence: Synthetic oligonucleotide
cccauaguuucccagcccc

SEQ ID NO: 1202491 - RNA, 19 nt, Artificial Sequence
  Description of Artificial Sequence: Synthetic oligonucleotide
ugccuacaggauuauccaa

SEQ ID NO: 1202492 - RNA, 19 nt, Artificial Sequence
  Description of Artificial Sequence: Synthetic oligonucleotide
ucggcuucauagucucuac

SEQ ID NO: 1202493 - RNA, 19 nt, Artificial Sequence
  Description of Artificial Sequence: Synthetic oligonucleotide
gggugguccggcuaagaag

SEQ ID NO: 1202494 - RNA, 19 nt, Artificial Sequence
  Description of Artificial Sequence: Synthetic oligonucleotide
ggugguccggcuaagaaga

SEQ ID NO: 1202495 - RNA, 19 nt, Artificial Sequence
  Description of Artificial Sequence: Synthetic oligonucleotide
uagucgggccacagagucc

SEQ ID NO: 1202496 - RNA, 19 nt, Artificial Sequence
  Description of Artificial Sequence: Synthetic oligonucleotide
agcuaucugugugauauuu

SEQ ID NO: 1202497 - RNA, 19 nt, Artificial Sequence
  Description of Artificial Sequence: Synthetic oligonucleotide
caacuggacgaagugagca

SEQ ID NO: 1202498 - RNA, 19 nt, Artificial Sequence
  Description of Artificial Sequence: Synthetic oligonucleotide
uucaucggcagggaacaaa

SEQ ID NO: 1202499 - RNA, 19 nt, Artificial Sequence
  Description of Artificial Sequence: Synthetic oligonucleotide
ucucccauauaaggccuug

SEQ ID NO: 1202500 - RNA, 19 nt, Artificial Sequence
  Description of Artificial Sequence: Synthetic oligonucleotide
aaccugcaaacugggagaa

SEQ ID NO: 1202501 - RNA, 19 nt, Artificial Sequence
  Description of Artificial Sequence: Synthetic oligonucleotide
guggucguccaaagcauag

SEQ ID NO: 1202502 - RNA, 19 nt, Artificial Sequence
  Description of Artificial Sequence: Synthetic oligonucleotide
cucuucggaaggcucgaug

SEQ ID NO: 1202503 - RNA, 19 nt, Artificial Sequence
  Description of Artificial Sequence: Synthetic oligonucleotide
uacaggagcccaugaccac

SEQ ID NO: 1202504 - RNA, 19 nt, Artificial Sequence
  Description of Artificial Sequence: Synthetic oligonucleotide
gagguaaguuggccccucc

SEQ ID NO: 1202505 - RNA, 19 nt, Artificial Sequence
  Description of Artificial Sequence: Synthetic oligonucleotide
uuuguacgaugauguuuuc

SEQ ID NO: 1202506 - RNA, 19 nt, Artificial Sequence
  Description of Artificial Sequence: Synthetic oligonucleotide
agguaaguuggccccuccu

SEQ ID NO: 1202507 - RNA, 19 nt, Artificial Sequence
  Description of Artificial Sequence: Synthetic oligonucleotide
caauucuagcaaugaccuc

SEQ ID NO: 1202508 - RNA, 19 nt, Artificial Sequence
  Description of Artificial Sequence: Synthetic oligonucleotide
cccaucaccgagauacggg

SEQ ID NO: 1202509 - RNA, 19 nt, Artificial Sequence
  Description of Artificial Sequence: Synthetic oligonucleotide
uugccgagguaaguuggcc

SEQ ID NO: 1202510 - RNA, 19 nt, Artificial Sequence
  Description of Artificial Sequence: Synthetic oligonucleotide
gaccucucggacaucaaaa

SEQ ID NO: 1202511 - RNA, 19 nt, Artificial Sequence
  Description of Artificial Sequence: Synthetic oligonucleotide
ugugugccgggcccgggcu

SEQ ID NO: 1202512 - RNA, 19 nt, Artificial Sequence
  Description of Artificial Sequence: Synthetic oligonucleotide
accaaccaugaauccggug

SEQ ID NO: 1202513 - RNA, 19 nt, Artificial Sequence
  Description of Artificial Sequence: Synthetic oligonucleotide
aggcucuucggaaggcucg

SEQ ID NO: 1202514 - RNA, 19 nt, Artificial Sequence
  Description of Artificial Sequence: Synthetic oligonucleotide
ccgagauacgggcauuugg

SEQ ID NO: 1202515 - RNA, 19 nt, Artificial Sequence
  Description of Artificial Sequence: Synthetic oligonucleotide
gcacguaugcgccuccugc

SEQ ID NO: 1202516 - RNA, 19 nt, Artificial Sequence
  Description of Artificial Sequence: Synthetic oligonucleotide
ugucggcuugccgagguaa

SEQ ID NO: 1202517 - RNA, 19 nt, Artificial Sequence
  Description of Artificial Sequence: Synthetic oligonucleotide
cccauauaaggccuugaac

SEQ ID NO: 1202518 - RNA, 19 nt, Artificial Sequence
  Description of Artificial Sequence: Synthetic oligonucleotide
cucucggacaucaaaacuu

SEQ ID NO: 1202519 - RNA, 19 nt, Artificial Sequence
  Description of Artificial Sequence: Synthetic oligonucleotide
agccccauaugauccgcca

SEQ ID NO: 1202520 - RNA, 19 nt, Artificial Sequence
  Description of Artificial Sequence: Synthetic oligonucleotide
caaaggcucuucggaaggc

SEQ ID NO: 1202521 - RNA, 19 nt, Artificial Sequence
  Description of Artificial Sequence: Synthetic oligonucleotide
caucagccauugcaggcac

SEQ ID NO: 1202522 - RNA, 19 nt, Artificial Sequence
  Description of Artificial Sequence: Synthetic oligonucleotide
acauacugggcucguucau

SEQ ID NO: 1202523 - RNA, 19 nt, Artificial Sequence
  Description of Artificial Sequence: Synthetic oligonucleotide
agggugguccggcuaagaa

SEQ ID NO: 1202524 - RNA, 19 nt, Artificial Sequence
  Description of Artificial Sequence: Synthetic oligonucleotide
gccgagguaaguuggcccc

SEQ ID NO: 1202525 - RNA, 19 nt, Artificial Sequence
  Description of Artificial Sequence: Synthetic oligonucleotide
uggaaaggugucggcuugc

SEQ ID NO: 1202526 - RNA, 19 nt, Artificial Sequence
  Description of Artificial Sequence: Synthetic oligonucleotide
gucccgaucuggaaaggug

SEQ ID NO: 1202527 - RNA, 19 nt, Artificial Sequence
  Description of Artificial Sequence: Synthetic oligonucleotide
accccagacuuucugcaau

SEQ ID NO: 1202528 - RNA, 19 nt, Artificial Sequence
  Description of Artificial Sequence: Synthetic oligonucleotide
gcauaguggucaguuaccc

SEQ ID NO: 1202529 - RNA, 19 nt, Artificial Sequence
  Description of Artificial Sequence: Synthetic oligonucleotide
ccaaauauucgagcaaauc

SEQ ID NO: 1202530 - RNA, 19 nt, Artificial Sequence
  Description of Artificial Sequence: Synthetic oligonucleotide
cuccugccguacaggagcc

SEQ ID NO: 1202531 - RNA, 19 nt, Artificial Sequence
  Description of Artificial Sequence: Synthetic oligonucleotide
caugggagccuguucugca

SEQ ID NO: 1202532 - RNA, 19 nt, Artificial Sequence
  Description of Artificial Sequence: Synthetic oligonucleotide
uaccccagacuuucugcaa

SEQ ID NO: 1202533 - RNA, 19 nt, Artificial Sequence
  Description of Artificial Sequence: Synthetic oligonucleotide
ugccuagucgggccacaga

SEQ ID NO: 1202534 - RNA, 19 nt, Artificial Sequence
  Description of Artificial Sequence: Synthetic oligonucleotide
gaaggcucgaugguaacau

SEQ ID NO: 1202535 - RNA, 19 nt, Artificial Sequence
  Description of Artificial Sequence: Synthetic oligonucleotide
gggcuauaugcucugccac

SEQ ID NO: 1202536 - RNA, 19 nt, Artificial Sequence
  Description of Artificial Sequence: Synthetic oligonucleotide
ugugcccggaugugcuucu

SEQ ID NO: 1202537 - RNA, 19 nt, Artificial Sequence
  Description of Artificial Sequence: Synthetic oligonucleotide
gaugggcgcauugagggcu

SEQ ID NO: 1202538 - RNA, 19 nt, Artificial Sequence
  Description of Artificial Sequence: Synthetic oligonucleotide
ucgccaguagcugccuuca

SEQ ID NO: 1202539 - RNA, 19 nt, Artificial Sequence
  Description of Artificial Sequence: Synthetic oligonucleotide
acgaagugagcacccuuuu

SEQ ID NO: 1202540 - RNA, 19 nt, Artificial Sequence
  Description of Artificial Sequence: Synthetic oligonucleotide
gguuugcaccgacaauccc

SEQ ID NO: 1202541 - RNA, 19 nt, Artificial Sequence
  Description of Artificial Sequence: Synthetic oligonucleotide
agucucuaccaaccaugaa

SEQ ID NO: 1202542 - RNA, 19 nt, Artificial Sequence
  Description of Artificial Sequence: Synthetic oligonucleotide
augauaggcgcgcgaccga

SEQ ID NO: 1202543 - RNA, 19 nt, Artificial Sequence
  Description of Artificial Sequence: Synthetic oligonucleotide
uggggucuaggagauuguc

SEQ ID NO: 1202544 - RNA, 19 nt, Artificial Sequence
  Description of Artificial Sequence: Synthetic oligonucleotide
gauagaugcaugggagccu

SEQ ID NO: 1202545 - RNA, 19 nt, Artificial Sequence
  Description of Artificial Sequence: Synthetic oligonucleotide
ccguacaauucaucggcag

SEQ ID NO: 1202546 - RNA, 19 nt, Artificial Sequence
  Description of Artificial Sequence: Synthetic oligonucleotide
gcaccgacaaucccguaca

SEQ ID NO: 1202547 - RNA, 19 nt, Artificial Sequence
  Description of Artificial Sequence: Synthetic oligonucleotide
augcuaagucccagaacca

SEQ ID NO: 1202548 - RNA, 19 nt, Artificial Sequence
  Description of Artificial Sequence: Synthetic oligonucleotide
uggacgaagugagcacccu

SEQ ID NO: 1202549 - RNA, 19 nt, Artificial Sequence
  Description of Artificial Sequence: Synthetic oligonucleotide
uugugcccggaugugcuuc

SEQ ID NO: 1202550 - RNA, 19 nt, Artificial Sequence
  Description of Artificial Sequence: Synthetic oligonucleotide
caucaccgagauacgggca

SEQ ID NO: 1202551 - RNA, 19 nt, Artificial Sequence
  Description of Artificial Sequence: Synthetic oligonucleotide
gacaguuaucuuaggcacu

SEQ ID NO: 1202552 - RNA, 19 nt, Artificial Sequence
  Description of Artificial Sequence: Synthetic oligonucleotide
cucauugaaucugcuucca

SEQ ID NO: 1202553 - RNA, 19 nt, Artificial Sequence
  Description of Artificial Sequence: Synthetic oligonucleotide
acaaucccguacaauucau

SEQ ID NO: 1202554 - RNA, 19 nt, Artificial Sequence
  Description of Artificial Sequence: Synthetic oligonucleotide
cuuguuaaguggagggcau

SEQ ID NO: 1202555 - RNA, 19 nt, Artificial Sequence
  Description of Artificial Sequence: Synthetic oligonucleotide
ucucacauacugggcucgu

SEQ ID NO: 1202556 - RNA, 19 nt, Artificial Sequence
  Description of Artificial Sequence: Synthetic oligonucleotide
agucggucuucuggauggg

SEQ ID NO: 1202557 - RNA, 19 nt, Artificial Sequence
  Description of Artificial Sequence: Synthetic oligonucleotide
cauagucucuaccaaccau

SEQ ID NO: 1202558 - RNA, 19 nt, Artificial Sequence
  Description of Artificial Sequence: Synthetic oligonucleotide
gucuaggagauugucaauu

SEQ ID NO: 1202559 - RNA, 19 nt, Artificial Sequence
  Description of Artificial Sequence: Synthetic oligonucleotide
acggggucaauaaucccau

SEQ ID NO: 1202560 - RNA, 19 nt, Artificial Sequence
  Description of Artificial Sequence: Synthetic oligonucleotide
accgagauacgggcauuug

SEQ ID NO: 1202561 - RNA, 19 nt, Artificial Sequence
  Description of Artificial Sequence: Synthetic oligonucleotide
ugcuuucccucccgggcuu

SEQ ID NO: 1202562 - RNA, 19 nt, Artificial Sequence
  Description of Artificial Sequence: Synthetic oligonucleotide
ccuuguuaaguggagggca

SEQ ID NO: 1202563 - RNA, 19 nt, Artificial Sequence
  Description of Artificial Sequence: Synthetic oligonucleotide
ggaugggcgcauugagggc

SEQ ID NO: 1202564 - RNA, 19 nt, Artificial Sequence
  Description of Artificial Sequence: Synthetic oligonucleotide
ggcuaucucuugugcccgg

SEQ ID NO: 1202565 - RNA, 19 nt, Artificial Sequence
  Description of Artificial Sequence: Synthetic oligonucleotide
agucaaccagauagaugca

SEQ ID NO: 1202566 - RNA, 19 nt, Artificial Sequence
  Description of Artificial Sequence: Synthetic oligonucleotide
gcauuuggccacauguaga

SEQ ID NO: 1202567 - RNA, 19 nt, Artificial Sequence
  Description of Artificial Sequence: Synthetic oligonucleotide
gucggcuugccgagguaag

SEQ ID NO: 1202568 - RNA, 19 nt, Artificial Sequence
  Description of Artificial Sequence: Synthetic oligonucleotide
aucagccauugcaggcacg

SEQ ID NO: 1202569 - RNA, 19 nt, Artificial Sequence
  Description of Artificial Sequence: Synthetic oligonucleotide
accgacaaucccguacaau

SEQ ID NO: 1202570 - RNA, 19 nt, Artificial Sequence
  Description of Artificial Sequence: Synthetic oligonucleotide
ugccgaagucggucuucug

SEQ ID NO: 1202571 - RNA, 19 nt, Artificial Sequence
  Description of Artificial Sequence: Synthetic oligonucleotide
agggcugcacugaugcuaa

SEQ ID NO: 1202572 - RNA, 19 nt, Artificial Sequence
  Description of Artificial Sequence: Synthetic oligonucleotide
gcaaugaccucucggacau

SEQ ID NO: 1202573 - RNA, 19 nt, Artificial Sequence
  Description of Artificial Sequence: Synthetic oligonucleotide
gacgaagugagcacccuuu

SEQ ID NO: 1202574 - RNA, 19 nt, Artificial Sequence
  Description of Artificial Sequence: Synthetic oligonucleotide
uaggcgcgcgaccgagaga

SEQ ID NO: 1202575 - RNA, 19 nt, Artificial Sequence
  Description of Artificial Sequence: Synthetic oligonucleotide
ccaucaucccacagccuug

SEQ ID NO: 1202576 - RNA, 19 nt, Artificial Sequence
  Description of Artificial Sequence: Synthetic oligonucleotide
uaugcgccuccugccguac

SEQ ID NO: 1202577 - RNA, 19 nt, Artificial Sequence
  Description of Artificial Sequence: Synthetic oligonucleotide
ccaugauaggcgcgcgacc

SEQ ID NO: 1202578 - RNA, 19 nt, Artificial Sequence
  Description of Artificial Sequence: Synthetic oligonucleotide
ggggucuaggagauuguca

SEQ ID NO: 1202579 - RNA, 19 nt, Artificial Sequence
  Description of Artificial Sequence: Synthetic oligonucleotide
ccgaagucggucuucugga

SEQ ID NO: 1202580 - RNA, 19 nt, Artificial Sequence
  Description of Artificial Sequence: Synthetic oligonucleotide
caucugcucauagguucuc

SEQ ID NO: 1202581 - RNA, 19 nt, Artificial Sequence
  Description of Artificial Sequence: Synthetic oligonucleotide
ggaaggcucgaugguaaca

SEQ ID NO: 1202582 - RNA, 19 nt, Artificial Sequence
  Description of Artificial Sequence: Synthetic oligonucleotide
caauuaugacaguuaucuu

SEQ ID NO: 1202583 - RNA, 19 nt, Artificial Sequence
  Description of Artificial Sequence: Synthetic oligonucleotide
ggaguaguaaggguuuccu

SEQ ID NO: 1202584 - RNA, 19 nt, Artificial Sequence
  Description of Artificial Sequence: Synthetic oligonucleotide
cucuuaagguuugcaccga

SEQ ID NO: 1202585 - RNA, 19 nt, Artificial Sequence
  Description of Artificial Sequence: Synthetic oligonucleotide
gauaggcgcgcgaccgaga

SEQ ID NO: 1202586 - RNA, 19 nt, Artificial Sequence
  Description of Artificial Sequence: Synthetic oligonucleotide
ggccacauguagaggaauc

SEQ ID NO: 1202587 - RNA, 19 nt, Artificial Sequence
  Description of Artificial Sequence: Synthetic oligonucleotide
gggcucguucaugaaguug

SEQ ID NO: 1202588 - RNA, 19 nt, Artificial Sequence
  Description of Artificial Sequence: Synthetic oligonucleotide
gcugcccucagcgcgcucc

SEQ ID NO: 1202589 - RNA, 19 nt, Artificial Sequence
  Description of Artificial Sequence: Synthetic oligonucleotide
ggcucgaugguaacaucca

SEQ ID NO: 1202590 - RNA, 19 nt, Artificial Sequence
  Description of Artificial Sequence: Synthetic oligonucleotide
cccaugauaggcgcgcgac

SEQ ID NO: 1202591 - RNA, 19 nt, Artificial Sequence
  Description of Artificial Sequence: Synthetic oligonucleotide
gagcgcugggccgcagagc

SEQ ID NO: 1202592 - RNA, 19 nt, Artificial Sequence
  Description of Artificial Sequence: Synthetic oligonucleotide
ccguacaggagcccaugac

SEQ ID NO: 1202593 - RNA, 19 nt, Artificial Sequence
  Description of Artificial Sequence: Synthetic oligonucleotide
aggugucggcuugccgagg

SEQ ID NO: 1202594 - RNA, 19 nt, Artificial Sequence
  Description of Artificial Sequence: Synthetic oligonucleotide
ucaccgagauacgggcauu

SEQ ID NO: 1202595 - RNA, 19 nt, Artificial Sequence
  Description of Artificial Sequence: Synthetic oligonucleotide
ggcacguaugcgccuccug

SEQ ID NO: 1202596 - RNA, 19 nt, Artificial Sequence
  Description of Artificial Sequence: Synthetic oligonucleotide
ccgacaaucccguacaauu

SEQ ID NO: 1202597 - RNA, 19 nt, Artificial Sequence
  Description of Artificial Sequence: Synthetic oligonucleotide
gcagcacaacuggacgaag

SEQ ID NO: 1202598 - RNA, 19 nt, Artificial Sequence
  Description of Artificial Sequence: Synthetic oligonucleotide
cucccauauaaggccuuga

SEQ ID NO: 1202599 - RNA, 19 nt, Artificial Sequence
  Description of Artificial Sequence: Synthetic oligonucleotide
guaugcgccuccugccgua

SEQ ID NO: 1202600 - RNA, 19 nt, Artificial Sequence
  Description of Artificial Sequence: Synthetic oligonucleotide
cccgaucuggaaagguguc

SEQ ID NO: 1202601 - RNA, 19 nt, Artificial Sequence
  Description of Artificial Sequence: Synthetic oligonucleotide
auccgccaauuaugacagu

SEQ ID NO: 1202602 - RNA, 19 nt, Artificial Sequence
  Description of Artificial Sequence: Synthetic oligonucleotide
auacgggcauuuggccaca

SEQ ID NO: 1202603 - RNA, 19 nt, Artificial Sequence
  Description of Artificial Sequence: Synthetic oligonucleotide
gaggaaucuugggcuauau

SEQ ID NO: 1202604 - RNA, 19 nt, Artificial Sequence
  Description of Artificial Sequence: Synthetic oligonucleotide
augggcgcauugagggcug

SEQ ID NO: 1202605 - RNA, 19 nt, Artificial Sequence
  Description of Artificial Sequence: Synthetic oligonucleotide
gcgcgcgaccgagagacag

SEQ ID NO: 1202606 - RNA, 19 nt, Artificial Sequence
  Description of Artificial Sequence: Synthetic oligonucleotide
ggucggcaccuccaagauc

SEQ ID NO: 1202607 - RNA, 19 nt, Artificial Sequence
  Description of Artificial Sequence: Synthetic oligonucleotide
auucaucggcagggaacaa

SEQ ID NO: 1202608 - RNA, 19 nt, Artificial Sequence
  Description of Artificial Sequence: Synthetic oligonucleotide
augcgccuccugccguaca

SEQ ID NO: 1202609 - RNA, 19 nt, Artificial Sequence
  Description of Artificial Sequence: Synthetic oligonucleotide
cccgggcuuucucacugcc

SEQ ID NO: 1202610 - RNA, 19 nt, Artificial Sequence
  Description of Artificial Sequence: Synthetic oligonucleotide
ugggcgcauugagggcugc

SEQ ID NO: 1202611 - RNA, 19 nt, Artificial Sequence
  Description of Artificial Sequence: Synthetic oligonucleotide
ccauaguuucccagcccca

SEQ ID NO: 1202612 - RNA, 19 nt, Artificial Sequence
  Description of Artificial Sequence: Synthetic oligonucleotide
aggcacguaugcgccuccu

SEQ ID NO: 1202613 - RNA, 19 nt, Artificial Sequence
  Description of Artificial Sequence: Synthetic oligonucleotide
gccacauguagaggaaucu

SEQ ID NO: 1202614 - RNA, 19 nt, Artificial Sequence
  Description of Artificial Sequence: Synthetic oligonucleotide
uugcaccgacaaucccgua

SEQ ID NO: 1202615 - RNA, 19 nt, Artificial Sequence
  Description of Artificial Sequence: Synthetic oligonucleotide
gccguacaggagcccauga

SEQ ID NO: 1202616 - RNA, 19 nt, Artificial Sequence
  Description of Artificial Sequence: Synthetic oligonucleotide
ccauaugauccgccaauua

SEQ ID NO: 1202617 - RNA, 19 nt, Artificial Sequence
  Description of Artificial Sequence: Synthetic oligonucleotide
cccguacaauucaucggca

SEQ ID NO: 1202618 - RNA, 19 nt, Artificial Sequence
  Description of Artificial Sequence: Synthetic oligonucleotide
cucuuaaugaugggcucuu

SEQ ID NO: 1202619 - RNA, 19 nt, Artificial Sequence
  Description of Artificial Sequence: Synthetic oligonucleotide
augaccucucggacaucaa

SEQ ID NO: 1202620 - RNA, 19 nt, Artificial Sequence
  Description of Artificial Sequence: Synthetic oligonucleotide
ccgccaauuaugacaguua

SEQ ID NO: 1202621 - RNA, 19 nt, Artificial Sequence
  Description of Artificial Sequence: Synthetic oligonucleotide
ccucucggacaucaaaacu

SEQ ID NO: 1202622 - RNA, 19 nt, Artificial Sequence
  Description of Artificial Sequence: Synthetic oligonucleotide
gcaggcacguaugcgccuc

SEQ ID NO: 1202623 - RNA, 19 nt, Artificial Sequence
  Description of Artificial Sequence: Synthetic oligonucleotide
gguggucguccaaagcaua

SEQ ID NO: 1202624 - RNA, 19 nt, Artificial Sequence
  Description of Artificial Sequence: Synthetic oligonucleotide
gcuuuuguacgaugauguu

SEQ ID NO: 1202625 - RNA, 19 nt, Artificial Sequence
  Description of Artificial Sequence: Synthetic oligonucleotide
caccgacaaucccguacaa

SEQ ID NO: 1202626 - RNA, 19 nt, Artificial Sequence
  Description of Artificial Sequence: Synthetic oligonucleotide
gccccauaugauccgccaa

SEQ ID NO: 1202627 - RNA, 19 nt, Artificial Sequence
  Description of Artificial Sequence: Synthetic oligonucleotide
ggucuaggagauugucaau

SEQ ID NO: 1202628 - RNA, 19 nt, Artificial Sequence
  Description of Artificial Sequence: Synthetic oligonucleotide
gcuaucucuugugcccgga

SEQ ID NO: 1202629 - RNA, 19 nt, Artificial Sequence
  Description of Artificial Sequence: Synthetic oligonucleotide
cuucggcuucauagucucu

SEQ ID NO: 1202630 - RNA, 19 nt, Artificial Sequence
  Description of Artificial Sequence: Synthetic oligonucleotide
gcgcauugagggcugcacu

SEQ ID NO: 1202631 - RNA, 19 nt, Artificial Sequence
  Description of Artificial Sequence: Synthetic oligonucleotide
cgcgcgaccgagagacagc

SEQ ID NO: 1202632 - RNA, 19 nt, Artificial Sequence
  Description of Artificial Sequence: Synthetic oligonucleotide
cggaaggcucgaugguaac

SEQ ID NO: 1202633 - RNA, 19 nt, Artificial Sequence
  Description of Artificial Sequence: Synthetic oligonucleotide
ggacgaagugagcacccuu

SEQ ID NO: 1202634 - RNA, 19 nt, Artificial Sequence
  Description of Artificial Sequence: Synthetic oligonucleotide
ccucuuaaugaugggcucu

SEQ ID NO: 1202635 - RNA, 19 nt, Artificial Sequence
  Description of Artificial Sequence: Synthetic oligonucleotide
ggucccgaucuggaaaggu

SEQ ID NO: 1202636 - RNA, 19 nt, Artificial Sequence
  Description of Artificial Sequence: Synthetic oligonucleotide
gugucggcuugccgaggua

SEQ ID NO: 1202637 - RNA, 19 nt, Artificial Sequence
  Description of Artificial Sequence: Synthetic oligonucleotide
ccgcagagcugcccucagc

SEQ ID NO: 1202638 - RNA, 19 nt, Artificial Sequence
  Description of Artificial Sequence: Synthetic oligonucleotide
cuugugcccggaugugcuu

SEQ ID NO: 1202639 - RNA, 19 nt, Artificial Sequence
  Description of Artificial Sequence: Synthetic oligonucleotide
ccugcuuuuguacgaugau

SEQ ID NO: 1202640 - RNA, 19 nt, Artificial Sequence
  Description of Artificial Sequence: Synthetic oligonucleotide
cccuucggcuucauagucu

SEQ ID NO: 1202641 - RNA, 19 nt, Artificial Sequence
  Description of Artificial Sequence: Synthetic oligonucleotide
ccccauaugauccgccaau

SEQ ID NO: 1202642 - RNA, 19 nt, Artificial Sequence
  Description of Artificial Sequence: Synthetic oligonucleotide
ggccgcagagcugcccuca

SEQ ID NO: 1202643 - RNA, 19 nt, Artificial Sequence
  Description of Artificial Sequence: Synthetic oligonucleotide
caccaagggugguccggcu

SEQ ID NO: 1202644 - RNA, 19 nt, Artificial Sequence
  Description of Artificial Sequence: Synthetic oligonucleotide
ccuagucgggccacagagu

SEQ ID NO: 1202645 - RNA, 19 nt, Artificial Sequence
  Description of Artificial Sequence: Synthetic oligonucleotide
gcgcgaccgagagacagcu

SEQ ID NO: 1202646 - RNA, 19 nt, Artificial Sequence
  Description of Artificial Sequence: Synthetic oligonucleotide
cagcuaucugugugauauu

SEQ ID NO: 1202647 - RNA, 19 nt, Artificial Sequence
  Description of Artificial Sequence: Synthetic oligonucleotide
caccgagauacgggcauuu

SEQ ID NO: 1202648 - RNA, 19 nt, Artificial Sequence
  Description of Artificial Sequence: Synthetic oligonucleotide
cgagguaaguuggccccuc

SEQ ID NO: 1202649 - RNA, 19 nt, Artificial Sequence
  Description of Artificial Sequence: Synthetic oligonucleotide
ccccaugauaggcgcgcga

SEQ ID NO: 1202650 - RNA, 19 nt, Artificial Sequence
  Description of Artificial Sequence: Synthetic oligonucleotide
cucacauacugggcucguu

SEQ ID NO: 1202651 - RNA, 19 nt, Artificial Sequence
  Description of Artificial Sequence: Synthetic oligonucleotide
cgaugguaacauccaauuu

SEQ ID NO: 1202652 - RNA, 19 nt, Artificial Sequence
  Description of Artificial Sequence: Synthetic oligonucleotide
gggcgcauugagggcugca

SEQ ID NO: 1202653 - RNA, 19 nt, Artificial Sequence
  Description of Artificial Sequence: Synthetic oligonucleotide
gugguccggcuaagaagau

SEQ ID NO: 1202654 - RNA, 19 nt, Artificial Sequence
  Description of Artificial Sequence: Synthetic oligonucleotide
cgcgaccgagagacagcug

SEQ ID NO: 1202655 - RNA, 19 nt, Artificial Sequence
  Description of Artificial Sequence: Synthetic oligonucleotide
cccauaugauccgccaauu

SEQ ID NO: 1202656 - RNA, 19 nt, Artificial Sequence
  Description of Artificial Sequence: Synthetic oligonucleotide
ccgggcuuucucacugccu

SEQ ID NO: 1202657 - RNA, 19 nt, Artificial Sequence
  Description of Artificial Sequence: Synthetic oligonucleotide
gugugccgggcccgggcuu

SEQ ID NO: 1202658 - RNA, 19 nt, Artificial Sequence
  Description of Artificial Sequence: Synthetic oligonucleotide
ccaaagcauaguggucagu

SEQ ID NO: 1202659 - RNA, 19 nt, Artificial Sequence
  Description of Artificial Sequence: Synthetic oligonucleotide
gugccgggcccgggcuuuc

SEQ ID NO: 1202660 - RNA, 19 nt, Artificial Sequence
  Description of Artificial Sequence: Synthetic oligonucleotide
cguaugcgccuccugccgu

SEQ ID NO: 1202661 - RNA, 19 nt, Artificial Sequence
  Description of Artificial Sequence: Synthetic oligonucleotide
ccacagcuaucugugugau

SEQ ID NO: 1202662 - RNA, 19 nt, Artificial Sequence
  Description of Artificial Sequence: Synthetic oligonucleotide
ggcgcgcgaccgagagaca

SEQ ID NO: 1202663 - RNA, 19 nt, Artificial Sequence
  Description of Artificial Sequence: Synthetic oligonucleotide
ccgagguaaguuggccccu

SEQ ID NO: 1202664 - RNA, 19 nt, Artificial Sequence
  Description of Artificial Sequence: Synthetic oligonucleotide
gcucuucggaaggcucgau

SEQ ID NO: 1202665 - RNA, 19 nt, Artificial Sequence
  Description of Artificial Sequence: Synthetic oligonucleotide
gugcccggaugugcuucuu

SEQ ID NO: 1202666 - RNA, 19 nt, Artificial Sequence
  Description of Artificial Sequence: Synthetic oligonucleotide
ccgggcuuucuggucucuu

SEQ ID NO: 1202667 - RNA, 19 nt, Artificial Sequence
  Description of Artificial Sequence: Synthetic oligonucleotide
cccgggcuuucuggucucu

SEQ ID NO: 1202668 - RNA, 19 nt, Artificial Sequence
  Description of Artificial Sequence: Synthetic oligonucleotide
acuuauaaauguuagacca

SEQ ID NO: 1202669 - RNA, 19 nt, Artificial Sequence
  Description of Artificial Sequence: Synthetic oligonucleotide
uugagcagaaaauaugugg

SEQ ID NO: 1202670 - RNA, 19 nt, Artificial Sequence
  Description of Artificial Sequence: Synthetic oligonucleotide
aaagguuacauccgcaaag

SEQ ID NO: 1202671 - RNA, 19 nt, Artificial Sequence
  Description of Artificial Sequence: Synthetic oligonucleotide
aaaggagugacuuaggauu

SEQ ID NO: 1202672 - RNA, 19 nt, Artificial Sequence
  Description of Artificial Sequence: Synthetic oligonucleotide
gauaucuaaauguaaucag

SEQ ID NO: 1202673 - RNA, 19 nt, Artificial Sequence
  Description of Artificial Sequence: Synthetic oligonucleotide
ucaguaugaagauaggacc

SEQ ID NO: 1202674 - RNA, 19 nt, Artificial Sequence
  Description of Artificial Sequence: Synthetic oligonucleotide
caaaggaucaaaaugugag

SEQ ID NO: 1202675 - RNA, 19 nt, Artificial Sequence
  Description of Artificial Sequence: Synthetic oligonucleotide
uuuacucaagaugugaagg

SEQ ID NO: 1202676 - RNA, 19 nt, Artificial Sequence
  Description of Artificial Sequence: Synthetic oligonucleotide
ugaauaauuccacuuauaa

SEQ ID NO: 1202677 - RNA, 19 nt, Artificial Sequence
  Description of Artificial Sequence: Synthetic oligonucleotide
aaauguuagaccaccuugc

SEQ ID NO: 1202678 - RNA, 19 nt, Artificial Sequence
  Description of Artificial Sequence: Synthetic oligonucleotide
ucugccauauguacaaugg

SEQ ID NO: 1202679 - RNA, 19 nt, Artificial Sequence
  Description of Artificial Sequence: Synthetic oligonucleotide
cauagguaagccaucaagg

SEQ ID NO: 1202680 - RNA, 19 nt, Artificial Sequence
  Description of Artificial Sequence: Synthetic oligonucleotide
uucaguaugaagauaggac

SEQ ID NO: 1202681 - RNA, 19 nt, Artificial Sequence
  Description of Artificial Sequence: Synthetic oligonucleotide
agaaucgguuguuagauuc

SEQ ID NO: 1202682 - RNA, 19 nt, Artificial Sequence
  Description of Artificial Sequence: Synthetic oligonucleotide
gaagcuaugaccaaagcac

SEQ ID NO: 1202683 - RNA, 19 nt, Artificial Sequence
  Description of Artificial Sequence: Synthetic oligonucleotide
ucaacaaauaugccaaaug

SEQ ID NO: 1202684 - RNA, 19 nt, Artificial Sequence
  Description of Artificial Sequence: Synthetic oligonucleotide
acacaaauaagccguggcc

SEQ ID NO: 1202685 - RNA, 19 nt, Artificial Sequence
  Description of Artificial Sequence: Synthetic oligonucleotide
aacgaaugaguacaggugu

SEQ ID NO: 1202686 - RNA, 19 nt, Artificial Sequence
  Description of Artificial Sequence: Synthetic oligonucleotide
auagguaagccaucaaggg

SEQ ID NO: 1202687 - RNA, 19 nt, Artificial Sequence
  Description of Artificial Sequence: Synthetic oligonucleotide
acaacuguaaaggagugac

SEQ ID NO: 1202688 - RNA, 19 nt, Artificial Sequence
  Description of Artificial Sequence: Synthetic oligonucleotide
aguaacagagacucccacc

SEQ ID NO: 1202689 - RNA, 19 nt, Artificial Sequence
  Description of Artificial Sequence: Synthetic oligonucleotide
ugagcagaaaauauguggu

SEQ ID NO: 1202690 - RNA, 19 nt, Artificial Sequence
  Description of Artificial Sequence: Synthetic oligonucleotide
agguauaauauucaagugu

SEQ ID NO: 1202691 - RNA, 19 nt, Artificial Sequence
  Description of Artificial Sequence: Synthetic oligonucleotide
uuacucaagaugugaaggg

SEQ ID NO: 1202692 - RNA, 19 nt, Artificial Sequence
  Description of Artificial Sequence: Synthetic oligonucleotide
ucgaucuuaacggagacag

SEQ ID NO: 1202693 - RNA, 19 nt, Artificial Sequence
  Description of Artificial Sequence: Synthetic oligonucleotide
ggugauaagaacaacaggc

SEQ ID NO: 1202694 - RNA, 19 nt, Artificial Sequence
  Description of Artificial Sequence: Synthetic oligonucleotide
uugaccuacauuaacucca

SEQ ID NO: 1202695 - RNA, 19 nt, Artificial Sequence
  Description of Artificial Sequence: Synthetic oligonucleotide
aagguuacauccgcaaagc

SEQ ID NO: 1202696 - RNA, 19 nt, Artificial Sequence
  Description of Artificial Sequence: Synthetic oligonucleotide
ucuuaacggagacagaagu

SEQ ID NO: 1202697 - RNA, 19 nt, Artificial Sequence
  Description of Artificial Sequence: Synthetic oligonucleotide
uggacggauacuucuaugg

SEQ ID NO: 1202698 - RNA, 19 nt, Artificial Sequence
  Description of Artificial Sequence: Synthetic oligonucleotide
ugacgaguguguaaaacag

SEQ ID NO: 1202699 - RNA, 19 nt, Artificial Sequence
  Description of Artificial Sequence: Synthetic oligonucleotide
uccgcaaagcuaaagaggu

SEQ ID NO: 1202700 - RNA, 19 nt, Artificial Sequence
  Description of Artificial Sequence: Synthetic oligonucleotide
uuuuacucaagaugugaag

SEQ ID NO: 1202701 - RNA, 19 nt, Artificial Sequence
  Description of Artificial Sequence: Synthetic oligonucleotide
acauagguaagccaucaag

SEQ ID NO: 1202702 - RNA, 19 nt, Artificial Sequence
  Description of Artificial Sequence: Synthetic oligonucleotide
aauauucaaguguuuuccu

SEQ ID NO: 1202703 - RNA, 19 nt, Artificial Sequence
  Description of Artificial Sequence: Synthetic oligonucleotide
aacaccagcugaauaauuc

SEQ ID NO: 1202704 - RNA, 19 nt, Artificial Sequence
  Description of Artificial Sequence: Synthetic oligonucleotide
aguucaguggaguucaaug

SEQ ID NO: 1202705 - RNA, 19 nt, Artificial Sequence
  Description of Artificial Sequence: Synthetic oligonucleotide
uggugauaagaacaacagg

SEQ ID NO: 1202706 - RNA, 19 nt, Artificial Sequence
  Description of Artificial Sequence: Synthetic oligonucleotide
agcuaaagaggucaugauc

SEQ ID NO: 1202707 - RNA, 19 nt, Artificial Sequence
  Description of Artificial Sequence: Synthetic oligonucleotide
aacugcaccaugaauguuc

SEQ ID NO: 1202708 - RNA, 19 nt, Artificial Sequence
  Description of Artificial Sequence: Synthetic oligonucleotide
ucuccaacaaaccacgguc

SEQ ID NO: 1202709 - RNA, 19 nt, Artificial Sequence
  Description of Artificial Sequence: Synthetic oligonucleotide
aacaaaccacgguccaagc

SEQ ID NO: 1202710 - RNA, 19 nt, Artificial Sequence
  Description of Artificial Sequence: Synthetic oligonucleotide
augaguguucucuugagca

SEQ ID NO: 1202711 - RNA, 19 nt, Artificial Sequence
  Description of Artificial Sequence: Synthetic oligonucleotide
augcuagauaucuaaaugu

SEQ ID NO: 1202712 - RNA, 19 nt, Artificial Sequence
  Description of Artificial Sequence: Synthetic oligonucleotide
acgaguguguaaaacaggc

SEQ ID NO: 1202713 - RNA, 19 nt, Artificial Sequence
  Description of Artificial Sequence: Synthetic oligonucleotide
uuaacggagacagaaguga

SEQ ID NO: 1202714 - RNA, 19 nt, Artificial Sequence
  Description of Artificial Sequence: Synthetic oligonucleotide
uaugaagauaggaccagac

SEQ ID NO: 1202715 - RNA, 19 nt, Artificial Sequence
  Description of Artificial Sequence: Synthetic oligonucleotide
uguaaaggagugacuuagg

SEQ ID NO: 1202716 - RNA, 19 nt, Artificial Sequence
  Description of Artificial Sequence: Synthetic oligonucleotide
aagaugugaagggaaaaug

SEQ ID NO: 1202717 - RNA, 19 nt, Artificial Sequence
  Description of Artificial Sequence: Synthetic oligonucleotide
uguucucuugagcagaaaa

SEQ ID NO: 1202718 - RNA, 19 nt, Artificial Sequence
  Description of Artificial Sequence: Synthetic oligonucleotide
uguccaaaccaaauugucu

SEQ ID NO: 1202719 - RNA, 19 nt, Artificial Sequence
  Description of Artificial Sequence: Synthetic oligonucleotide
agaauaaaugaugccaaag

SEQ ID NO: 1202720 - RNA, 19 nt, Artificial Sequence
  Description of Artificial Sequence: Synthetic oligonucleotide
aauguuagaccaccuugca

SEQ ID NO: 1202721 - RNA, 19 nt, Artificial Sequence
  Description of Artificial Sequence: Synthetic oligonucleotide
guagagaugagaccugaag

SEQ ID NO: 1202722 - RNA, 19 nt, Artificial Sequence
  Description of Artificial Sequence: Synthetic oligonucleotide
uagcacaacuguaaaggag

SEQ ID NO: 1202723 - RNA, 19 nt, Artificial Sequence
  Description of Artificial Sequence: Synthetic oligonucleotide
aggaaucaguaguuaacac

SEQ ID NO: 1202724 - RNA, 19 nt, Artificial Sequence
  Description of Artificial Sequence: Synthetic oligonucleotide
uccuugguagagaugagac

SEQ ID NO: 1202725 - RNA, 19 nt, Artificial Sequence
  Description of Artificial Sequence: Synthetic oligonucleotide
aaagugacgaguguguaaa

SEQ ID NO: 1202726 - RNA, 19 nt, Artificial Sequence
  Description of Artificial Sequence: Synthetic oligonucleotide
ugucuuuccagucucccac

SEQ ID NO: 1202727 - RNA, 19 nt, Artificial Sequence
  Description of Artificial Sequence: Synthetic oligonucleotide
uauaaauguuagaccaccu

SEQ ID NO: 1202728 - RNA, 19 nt, Artificial Sequence
  Description of Artificial Sequence: Synthetic oligonucleotide
ugccauauguacaauggaa

SEQ ID NO: 1202729 - RNA, 19 nt, Artificial Sequence
  Description of Artificial Sequence: Synthetic oligonucleotide
gcacaaucaacacaaacag

SEQ ID NO: 1202730 - RNA, 19 nt, Artificial Sequence
  Description of Artificial Sequence: Synthetic oligonucleotide
agcacaaucaacacaaaca

SEQ ID NO: 1202731 - RNA, 19 nt, Artificial Sequence
  Description of Artificial Sequence: Synthetic oligonucleotide
cucauguuuagcacaacug

SEQ ID NO: 1202732 - RNA, 19 nt, Artificial Sequence
  Description of Artificial Sequence: Synthetic oligonucleotide
gacggauacuucuauggug

SEQ ID NO: 1202733 - RNA, 19 nt, Artificial Sequence
  Description of Artificial Sequence: Synthetic oligonucleotide
cauccgcaaagcuaaagag

SEQ ID NO: 1202734 - RNA, 19 nt, Artificial Sequence
  Description of Artificial Sequence: Synthetic oligonucleotide
uguugaauggaagagccuc

SEQ ID NO: 1202735 - RNA, 19 nt, Artificial Sequence
  Description of Artificial Sequence: Synthetic oligonucleotide
caaaccacgguccaagcac

SEQ ID NO: 1202736 - RNA, 19 nt, Artificial Sequence
  Description of Artificial Sequence: Synthetic oligonucleotide
uuagcacaacuguaaagga

SEQ ID NO: 1202737 - RNA, 19 nt, Artificial Sequence
  Description of Artificial Sequence: Synthetic oligonucleotide
auguggugagcacucuugc

SEQ ID NO: 1202738 - RNA, 19 nt, Artificial Sequence
  Description of Artificial Sequence: Synthetic oligonucleotide
ucgguuguuagauucugca

SEQ ID NO: 1202739 - RNA, 19 nt, Artificial Sequence
  Description of Artificial Sequence: Synthetic oligonucleotide
ugaugggagauaaggaaaa

SEQ ID NO: 1202740 - RNA, 19 nt, Artificial Sequence
  Description of Artificial Sequence: Synthetic oligonucleotide
ugagguacuugaguaacag

SEQ ID NO: 1202741 - RNA, 19 nt, Artificial Sequence
  Description of Artificial Sequence: Synthetic oligonucleotide
ugcuagauaucuaaaugua

SEQ ID NO: 1202742 - RNA, 19 nt, Artificial Sequence
  Description of Artificial Sequence: Synthetic oligonucleotide
aaugugagaugaguguucu

SEQ ID NO: 1202743 - RNA, 19 nt, Artificial Sequence
  Description of Artificial Sequence: Synthetic oligonucleotide
gauccgguaccuucuauug

SEQ ID NO: 1202744 - RNA, 19 nt, Artificial Sequence
  Description of Artificial Sequence: Synthetic oligonucleotide
augacccuaacaaacacag

SEQ ID NO: 1202745 - RNA, 19 nt, Artificial Sequence
  Description of Artificial Sequence: Synthetic oligonucleotide
uguuccaaguucaguggag

SEQ ID NO: 1202746 - RNA, 19 nt, Artificial Sequence
  Description of Artificial Sequence: Synthetic oligonucleotide
aggaagaaucgguuguuag

SEQ ID NO: 1202747 - RNA, 19 nt, Artificial Sequence
  Description of Artificial Sequence: Synthetic oligonucleotide
aaguguuuuccuugguaga

SEQ ID NO: 1202748 - RNA, 19 nt, Artificial Sequence
  Description of Artificial Sequence: Synthetic oligonucleotide
caacgaaugaguacaggug

SEQ ID NO: 1202749 - RNA, 19 nt, Artificial Sequence
  Description of Artificial Sequence: Synthetic oligonucleotide
uaaaggagugacuuaggau

SEQ ID NO: 1202750 - RNA, 19 nt, Artificial Sequence
  Description of Artificial Sequence: Synthetic oligonucleotide
agugacgaguguguaaaac

SEQ ID NO: 1202751 - RNA, 19 nt, Artificial Sequence
  Description of Artificial Sequence: Synthetic oligonucleotide
uccuggagguccuuuaagc

SEQ ID NO: 1202752 - RNA, 19 nt, Artificial Sequence
  Description of Artificial Sequence: Synthetic oligonucleotide
aaauaagccguggccgaac

SEQ ID NO: 1202753 - RNA, 19 nt, Artificial Sequence
  Description of Artificial Sequence: Synthetic oligonucleotide
cuuaacggagacagaagug

SEQ ID NO: 1202754 - RNA, 19 nt, Artificial Sequence
  Description of Artificial Sequence: Synthetic oligonucleotide
acauccgcaaagcuaaaga

SEQ ID NO: 1202755 - RNA, 19 nt, Artificial Sequence
  Description of Artificial Sequence: Synthetic oligonucleotide
auaucuaaauguaaucaga

SEQ ID NO: 1202756 - RNA, 19 nt, Artificial Sequence
  Description of Artificial Sequence: Synthetic oligonucleotide
uaggauuggugauaagaac

SEQ ID NO: 1202757 - RNA, 19 nt, Artificial Sequence
  Description of Artificial Sequence: Synthetic oligonucleotide
aucaaaaugugagaugagu

SEQ ID NO: 1202758 - RNA, 19 nt, Artificial Sequence
  Description of Artificial Sequence: Synthetic oligonucleotide
caugaauguuccaaguuca

SEQ ID NO: 1202759 - RNA, 19 nt, Artificial Sequence
  Description of Artificial Sequence: Synthetic oligonucleotide
gaucuuaacggagacagaa

SEQ ID NO: 1202760 - RNA, 19 nt, Artificial Sequence
  Description of Artificial Sequence: Synthetic oligonucleotide
uauggugugugucccauua

SEQ ID NO: 1202761 - RNA, 19 nt, Artificial Sequence
  Description of Artificial Sequence: Synthetic oligonucleotide
aauaagccguggccgaacu

SEQ ID NO: 1202762 - RNA, 19 nt, Artificial Sequence
  Description of Artificial Sequence: Synthetic oligonucleotide
uagaccaccuugcaggaaa

SEQ ID NO: 1202763 - RNA, 19 nt, Artificial Sequence
  Description of Artificial Sequence: Synthetic oligonucleotide
guuacauccgcaaagcuaa

SEQ ID NO: 1202764 - RNA, 19 nt, Artificial Sequence
  Description of Artificial Sequence: Synthetic oligonucleotide
gauauuggcuuuccaucug

SEQ ID NO: 1202765 - RNA, 19 nt, Artificial Sequence
  Description of Artificial Sequence: Synthetic oligonucleotide
ggugccguaagucacauga

SEQ ID NO: 1202766 - RNA, 19 nt, Artificial Sequence
  Description of Artificial Sequence: Synthetic oligonucleotide
auaguagauguuguaaagu

SEQ ID NO: 1202767 - RNA, 19 nt, Artificial Sequence
  Description of Artificial Sequence: Synthetic oligonucleotide
uucuccaacaaaccacggu

SEQ ID NO: 1202768 - RNA, 19 nt, Artificial Sequence
  Description of Artificial Sequence: Synthetic oligonucleotide
uggaaucucugugaucagg

SEQ ID NO: 1202769 - RNA, 19 nt, Artificial Sequence
  Description of Artificial Sequence: Synthetic oligonucleotide
acaaauaagccguggccga

SEQ ID NO: 1202770 - RNA, 19 nt, Artificial Sequence
  Description of Artificial Sequence: Synthetic oligonucleotide
uggucaguaaggagaauaa

SEQ ID NO: 1202771 - RNA, 19 nt, Artificial Sequence
  Description of Artificial Sequence: Synthetic oligonucleotide
uguucagggagggacagcu

SEQ ID NO: 1202772 - RNA, 19 nt, Artificial Sequence
  Description of Artificial Sequence: Synthetic oligonucleotide
uaugaccaaagcaccgcug

SEQ ID NO: 1202773 - RNA, 19 nt, Artificial Sequence
  Description of Artificial Sequence: Synthetic oligonucleotide
auaaauguuagaccaccuu

SEQ ID NO: 1202774 - RNA, 19 nt, Artificial Sequence
  Description of Artificial Sequence: Synthetic oligonucleotide
guaaaggagugacuuagga

SEQ ID NO: 1202775 - RNA, 19 nt, Artificial Sequence
  Description of Artificial Sequence: Synthetic oligonucleotide
agcagaaaauaugugguga

SEQ ID NO: 1202776 - RNA, 19 nt, Artificial Sequence
  Description of Artificial Sequence: Synthetic oligonucleotide
cacacaacgaaugaguaca

SEQ ID NO: 1202777 - RNA, 19 nt, Artificial Sequence
  Description of Artificial Sequence: Synthetic oligonucleotide
auccgcaaagcuaaagagg

SEQ ID NO: 1202778 - RNA, 19 nt, Artificial Sequence
  Description of Artificial Sequence: Synthetic oligonucleotide
cuccaacaaaccacggucc

SEQ ID NO: 1202779 - RNA, 19 nt, Artificial Sequence
  Description of Artificial Sequence: Synthetic oligonucleotide
ugcaccaugaauguuccaa

SEQ ID NO: 1202780 - RNA, 19 nt, Artificial Sequence
  Description of Artificial Sequence: Synthetic oligonucleotide
ccaagcacuguguacaagg

SEQ ID NO: 1202781 - RNA, 19 nt, Artificial Sequence
  Description of Artificial Sequence: Synthetic oligonucleotide
agugccuguaaagugacga

SEQ ID NO: 1202782 - RNA, 19 nt, Artificial Sequence
  Description of Artificial Sequence: Synthetic oligonucleotide
gacgaguguguaaaacagg

SEQ ID NO: 1202783 - RNA, 19 nt, Artificial Sequence
  Description of Artificial Sequence: Synthetic oligonucleotide
aaucgguuguuagauucug

SEQ ID NO: 1202784 - RNA, 19 nt, Artificial Sequence
  Description of Artificial Sequence: Synthetic oligonucleotide
uacuugaguaacagagacu

SEQ ID NO: 1202785 - RNA, 19 nt, Artificial Sequence
  Description of Artificial Sequence: Synthetic oligonucleotide
uccgguaccuucuauuguc

SEQ ID NO: 1202786 - RNA, 19 nt, Artificial Sequence
  Description of Artificial Sequence: Synthetic oligonucleotide
cacaguaguucugagguac

SEQ ID NO: 1202787 - RNA, 19 nt, Artificial Sequence
  Description of Artificial Sequence: Synthetic oligonucleotide
caguccaccaagugugugg

SEQ ID NO: 1202788 - RNA, 19 nt, Artificial Sequence
  Description of Artificial Sequence: Synthetic oligonucleotide
ccacuuauaaauguuagac

SEQ ID NO: 1202789 - RNA, 19 nt, Artificial Sequence
  Description of Artificial Sequence: Synthetic oligonucleotide
gugacgaguguguaaaaca

SEQ ID NO: 1202790 - RNA, 19 nt, Artificial Sequence
  Description of Artificial Sequence: Synthetic oligonucleotide
gaaucucugugaucagggc

SEQ ID NO: 1202791 - RNA, 19 nt, Artificial Sequence
  Description of Artificial Sequence: Synthetic oligonucleotide
gaaugaguacaggugucag

SEQ ID NO: 1202792 - RNA, 19 nt, Artificial Sequence
  Description of Artificial Sequence: Synthetic oligonucleotide
ccuucuauugucuuuccag

SEQ ID NO: 1202793 - RNA, 19 nt, Artificial Sequence
  Description of Artificial Sequence: Synthetic oligonucleotide
gaguguguaaaacaggcau

SEQ ID NO: 1202794 - RNA, 19 nt, Artificial Sequence
  Description of Artificial Sequence: Synthetic oligonucleotide
agaauaaaucugccauaug

SEQ ID NO: 1202795 - RNA, 19 nt, Artificial Sequence
  Description of Artificial Sequence: Synthetic oligonucleotide
ccauauguacaauggaagc

SEQ ID NO: 1202796 - RNA, 19 nt, Artificial Sequence
  Description of Artificial Sequence: Synthetic oligonucleotide
caguaugaagauaggacca

SEQ ID NO: 1202797 - RNA, 19 nt, Artificial Sequence
  Description of Artificial Sequence: Synthetic oligonucleotide
ugaucagggcucuuugccu

SEQ ID NO: 1202798 - RNA, 19 nt, Artificial Sequence
  Description of Artificial Sequence: Synthetic oligonucleotide
aaugaugccaaaggaucaa

SEQ ID NO: 1202799 - RNA, 19 nt, Artificial Sequence
  Description of Artificial Sequence: Synthetic oligonucleotide
gaacucauuacuguccgga

SEQ ID NO: 1202800 - RNA, 19 nt, Artificial Sequence
  Description of Artificial Sequence: Synthetic oligonucleotide
agcugaauaauuccacuua

SEQ ID NO: 1202801 - RNA, 19 nt, Artificial Sequence
  Description of Artificial Sequence: Synthetic oligonucleotide
guaaucagaauggugagcu

SEQ ID NO: 1202802 - RNA, 19 nt, Artificial Sequence
  Description of Artificial Sequence: Synthetic oligonucleotide
caacaaaccacgguccaag

SEQ ID NO: 1202803 - RNA, 19 nt, Artificial Sequence
  Description of Artificial Sequence: Synthetic oligonucleotide
cauauguacaauggaagca

SEQ ID NO: 1202804 - RNA, 19 nt, Artificial Sequence
  Description of Artificial Sequence: Synthetic oligonucleotide
cuagggugccguaagucac

SEQ ID NO: 1202805 - RNA, 19 nt, Artificial Sequence
  Description of Artificial Sequence: Synthetic oligonucleotide
acaacaggccacuugucaa

SEQ ID NO: 1202806 - RNA, 19 nt, Artificial Sequence
  Description of Artificial Sequence: Synthetic oligonucleotide
agagaucuggcuacaaaug

SEQ ID NO: 1202807 - RNA, 19 nt, Artificial Sequence
  Description of Artificial Sequence: Synthetic oligonucleotide
auaugccaaaugaaaagca

SEQ ID NO: 1202808 - RNA, 19 nt, Artificial Sequence
  Description of Artificial Sequence: Synthetic oligonucleotide
aauccuggagguccuuuaa

SEQ ID NO: 1202809 - RNA, 19 nt, Artificial Sequence
  Description of Artificial Sequence: Synthetic oligonucleotide
cuguaaagugacgagugug

SEQ ID NO: 1202810 - RNA, 19 nt, Artificial Sequence
  Description of Artificial Sequence: Synthetic oligonucleotide
ugcugacaugcugauauug

SEQ ID NO: 1202811 - RNA, 19 nt, Artificial Sequence
  Description of Artificial Sequence: Synthetic oligonucleotide
acggauacuucuauggugu

SEQ ID NO: 1202812 - RNA, 19 nt, Artificial Sequence
  Description of Artificial Sequence: Synthetic oligonucleotide
gaaucaguaguuaacacuu

SEQ ID NO: 1202813 - RNA, 19 nt, Artificial Sequence
  Description of Artificial Sequence: Synthetic oligonucleotide
acaaaccacgguccaagca

SEQ ID NO: 1202814 - RNA, 19 nt, Artificial Sequence
  Description of Artificial Sequence: Synthetic oligonucleotide
uggaggugcccacacaaau

SEQ ID NO: 1202815 - RNA, 19 nt, Artificial Sequence
  Description of Artificial Sequence: Synthetic oligonucleotide
uccgcauuggggagaauaa

SEQ ID NO: 1202816 - RNA, 19 nt, Artificial Sequence
  Description of Artificial Sequence: Synthetic oligonucleotide
cuugguagagaugagaccu

SEQ ID NO: 1202817 - RNA, 19 nt, Artificial Sequence
  Description of Artificial Sequence: Synthetic oligonucleotide
gaugggagauaaggaaaag

SEQ ID NO: 1202818 - RNA, 19 nt, Artificial Sequence
  Description of Artificial Sequence: Synthetic oligonucleotide
agcccaccugcugacaugc

SEQ ID NO: 1202819 - RNA, 19 nt, Artificial Sequence
  Description of Artificial Sequence: Synthetic oligonucleotide
uaaucagaauggugagcug

SEQ ID NO: 1202820 - RNA, 19 nt, Artificial Sequence
  Description of Artificial Sequence: Synthetic oligonucleotide
uaacggagacagaagugau

SEQ ID NO: 1202821 - RNA, 19 nt, Artificial Sequence
  Description of Artificial Sequence: Synthetic oligonucleotide
agcuaugaccaaagcaccg

SEQ ID NO: 1202822 - RNA, 19 nt, Artificial Sequence
  Description of Artificial Sequence: Synthetic oligonucleotide
agcagauaaacagguauaa

SEQ ID NO: 1202823 - RNA, 19 nt, Artificial Sequence
  Description of Artificial Sequence: Synthetic oligonucleotide
uacuguccggaucccuggg

SEQ ID NO: 1202824 - RNA, 19 nt, Artificial Sequence
  Description of Artificial Sequence: Synthetic oligonucleotide
ugcagcaagcuccaacaua

SEQ ID NO: 1202825 - RNA, 19 nt, Artificial Sequence
  Description of Artificial Sequence: Synthetic oligonucleotide
gaugacccuaacaaacaca

SEQ ID NO: 1202826 - RNA, 19 nt, Artificial Sequence
  Description of Artificial Sequence: Synthetic oligonucleotide
aauauguggugagcacucu

SEQ ID NO: 1202827 - RNA, 19 nt, Artificial Sequence
  Description of Artificial Sequence: Synthetic oligonucleotide
auccuggacggauacuucu

SEQ ID NO: 1202828 - RNA, 19 nt, Artificial Sequence
  Description of Artificial Sequence: Synthetic oligonucleotide
auaggaccagacaaaugag

SEQ ID NO: 1202829 - RNA, 19 nt, Artificial Sequence
  Description of Artificial Sequence: Synthetic oligonucleotide
aucgguuguuagauucugc

SEQ ID NO: 1202830 - RNA, 19 nt, Artificial Sequence
  Description of Artificial Sequence: Synthetic oligonucleotide
aagcagauaaacagguaua

SEQ ID NO: 1202831 - RNA, 19 nt, Artificial Sequence
  Description of Artificial Sequence: Synthetic oligonucleotide
caaauguggaggcugaacu

SEQ ID NO: 1202832 - RNA, 19 nt, Artificial Sequence
  Description of Artificial Sequence: Synthetic oligonucleotide
cuucuaugguguguguccc

SEQ ID NO: 1202833 - RNA, 19 nt, Artificial Sequence
  Description of Artificial Sequence: Synthetic oligonucleotide
aggaaauguccaucaacaa

SEQ ID NO: 1202834 - RNA, 19 nt, Artificial Sequence
  Description of Artificial Sequence: Synthetic oligonucleotide
aagaaucgguuguuagauu

SEQ ID NO: 1202835 - RNA, 19 nt, Artificial Sequence
  Description of Artificial Sequence: Synthetic oligonucleotide
auguuuagcacaacuguaa

SEQ ID NO: 1202836 - RNA, 19 nt, Artificial Sequence
  Description of Artificial Sequence: Synthetic oligonucleotide
uggccgaacucauuacugu

SEQ ID NO: 1202837 - RNA, 19 nt, Artificial Sequence
  Description of Artificial Sequence: Synthetic oligonucleotide
ugaccuacauuaacuccau

SEQ ID NO: 1202838 - RNA, 19 nt, Artificial Sequence
  Description of Artificial Sequence: Synthetic oligonucleotide
caucgaucuuaacggagac

SEQ ID NO: 1202839 - RNA, 19 nt, Artificial Sequence
  Description of Artificial Sequence: Synthetic oligonucleotide
ugccuguaaagugacgagu

SEQ ID NO: 1202840 - RNA, 19 nt, Artificial Sequence
  Description of Artificial Sequence: Synthetic oligonucleotide
uuguuagauucugcagucc

SEQ ID NO: 1202841 - RNA, 19 nt, Artificial Sequence
  Description of Artificial Sequence: Synthetic oligonucleotide
augucaaccagguccgcau

SEQ ID NO: 1202842 - RNA, 19 nt, Artificial Sequence
  Description of Artificial Sequence: Synthetic oligonucleotide
gauuggugauaagaacaac

SEQ ID NO: 1202843 - RNA, 19 nt, Artificial Sequence
  Description of Artificial Sequence: Synthetic oligonucleotide
gguuguuagauucugcagu

SEQ ID NO: 1202844 - RNA, 19 nt, Artificial Sequence
  Description of Artificial Sequence: Synthetic oligonucleotide
auaagccguggccgaacuc

SEQ ID NO: 1202845 - RNA, 19 nt, Artificial Sequence
  Description of Artificial Sequence: Synthetic oligonucleotide
uccggaucccuggggaugg

SEQ ID NO: 1202846 - RNA, 19 nt, Artificial Sequence
  Description of Artificial Sequence: Synthetic oligonucleotide
aucuuaacggagacagaag

SEQ ID NO: 1202847 - RNA, 19 nt, Artificial Sequence
  Description of Artificial Sequence: Synthetic oligonucleotide
ccaugaauguuccaaguuc

SEQ ID NO: 1202848 - RNA, 19 nt, Artificial Sequence
  Description of Artificial Sequence: Synthetic oligonucleotide
agauccgguaccuucuauu

SEQ ID NO: 1202849 - RNA, 19 nt, Artificial Sequence
  Description of Artificial Sequence: Synthetic oligonucleotide
ggaccagacaaaugagaag

SEQ ID NO: 1202850 - RNA, 19 nt, Artificial Sequence
  Description of Artificial Sequence: Synthetic oligonucleotide
aguuaacacuuccaacaua

SEQ ID NO: 1202851 - RNA, 19 nt, Artificial Sequence
  Description of Artificial Sequence: Synthetic oligonucleotide
gugccuguaaagugacgag

SEQ ID NO: 1202852 - RNA, 19 nt, Artificial Sequence
  Description of Artificial Sequence: Synthetic oligonucleotide
guggcucauguuuagcaca

SEQ ID NO: 1202853 - RNA, 19 nt, Artificial Sequence
  Description of Artificial Sequence: Synthetic oligonucleotide
aaaccacgguccaagcacu

SEQ ID NO: 1202854 - RNA, 19 nt, Artificial Sequence
  Description of Artificial Sequence: Synthetic oligonucleotide
acgaaugaguacagguguc

SEQ ID NO: 1202855 - RNA, 19 nt, Artificial Sequence
  Description of Artificial Sequence: Synthetic oligonucleotide
cuuuaagcucuggguaugc

SEQ ID NO: 1202856 - RNA, 19 nt, Artificial Sequence
  Description of Artificial Sequence: Synthetic oligonucleotide
caggaaucaguaguuaaca

SEQ ID NO: 1202857 - RNA, 19 nt, Artificial Sequence
  Description of Artificial Sequence: Synthetic oligonucleotide
guaugcuagauaucuaaau

SEQ ID NO: 1202858 - RNA, 19 nt, Artificial Sequence
  Description of Artificial Sequence: Synthetic oligonucleotide
aagcccaccugcugacaug

SEQ ID NO: 1202859 - RNA, 19 nt, Artificial Sequence
  Description of Artificial Sequence: Synthetic oligonucleotide
cccaccucaaguuccaaag

SEQ ID NO: 1202860 - RNA, 19 nt, Artificial Sequence
  Description of Artificial Sequence: Synthetic oligonucleotide
agguuacauccgcaaagcu

SEQ ID NO: 1202861 - RNA, 19 nt, Artificial Sequence
  Description of Artificial Sequence: Synthetic oligonucleotide
ugcaggaaauguccaucaa

SEQ ID NO: 1202862 - RNA, 19 nt, Artificial Sequence
  Description of Artificial Sequence: Synthetic oligonucleotide
auaguagaagauguuuauu

SEQ ID NO: 1202863 - RNA, 19 nt, Artificial Sequence
  Description of Artificial Sequence: Synthetic oligonucleotide
gagugacuuaggauuggug

SEQ ID NO: 1202864 - RNA, 19 nt, Artificial Sequence
  Description of Artificial Sequence: Synthetic oligonucleotide
cugugaucagggcucuuug

SEQ ID NO: 1202865 - RNA, 19 nt, Artificial Sequence
  Description of Artificial Sequence: Synthetic oligonucleotide
aggaugacccuaacaaaca

SEQ ID NO: 1202866 - RNA, 19 nt, Artificial Sequence
  Description of Artificial Sequence: Synthetic oligonucleotide
gcaccaugaauguuccaag

SEQ ID NO: 1202867 - RNA, 19 nt, Artificial Sequence
  Description of Artificial Sequence: Synthetic oligonucleotide
gacuuaggauuggugauaa

SEQ ID NO: 1202868 - RNA, 19 nt, Artificial Sequence
  Description of Artificial Sequence: Synthetic oligonucleotide
ugacccuaacaaacacagu

SEQ ID NO: 1202869 - RNA, 19 nt, Artificial Sequence
  Description of Artificial Sequence: Synthetic oligonucleotide
acuuaggauuggugauaag

SEQ ID NO: 1202870 - RNA, 19 nt, Artificial Sequence
  Description of Artificial Sequence: Synthetic oligonucleotide
aagugacgaguguguaaaa

SEQ ID NO: 1202871 - RNA, 19 nt, Artificial Sequence
  Description of Artificial Sequence: Synthetic oligonucleotide
ggagaauaaaugaugccaa

SEQ ID NO: 1202872 - RNA, 19 nt, Artificial Sequence
  Description of Artificial Sequence: Synthetic oligonucleotide
auccgguaccuucuauugu

SEQ ID NO: 1202873 - RNA, 19 nt, Artificial Sequence
  Description of Artificial Sequence: Synthetic oligonucleotide
gguauaauauucaaguguu

SEQ ID NO: 1202874 - RNA, 19 nt, Artificial Sequence
  Description of Artificial Sequence: Synthetic oligonucleotide
uuacuuuuauugggcugga

SEQ ID NO: 1202875 - RNA, 19 nt, Artificial Sequence
  Description of Artificial Sequence: Synthetic oligonucleotide
guggccgaacucauuacug

SEQ ID NO: 1202876 - RNA, 19 nt, Artificial Sequence
  Description of Artificial Sequence: Synthetic oligonucleotide
aagugccuguaaagugacg

SEQ ID NO: 1202877 - RNA, 19 nt, Artificial Sequence
  Description of Artificial Sequence: Synthetic oligonucleotide
uccacacugcaggaaucag

SEQ ID NO: 1202878 - RNA, 19 nt, Artificial Sequence
  Description of Artificial Sequence: Synthetic oligonucleotide
ccgaacucauuacuguccg

SEQ ID NO: 1202879 - RNA, 19 nt, Artificial Sequence
  Description of Artificial Sequence: Synthetic oligonucleotide
agcagaauccuggacggau

SEQ ID NO: 1202880 - RNA, 19 nt, Artificial Sequence
  Description of Artificial Sequence: Synthetic oligonucleotide
cuaguggcucauguuuagc

SEQ ID NO: 1202881 - RNA, 19 nt, Artificial Sequence
  Description of Artificial Sequence: Synthetic oligonucleotide
gacucccaccuuuggaauc

SEQ ID NO: 1202882 - RNA, 19 nt, Artificial Sequence
  Description of Artificial Sequence: Synthetic oligonucleotide
cacccgggccacaauguag

SEQ ID NO: 1202883 - RNA, 19 nt, Artificial Sequence
  Description of Artificial Sequence: Synthetic oligonucleotide
agauaggaccagacaaaug

SEQ ID NO: 1202884 - RNA, 19 nt, Artificial Sequence
  Description of Artificial Sequence: Synthetic oligonucleotide
auacuucuauggugugugu

SEQ ID NO: 1202885 - RNA, 19 nt, Artificial Sequence
  Description of Artificial Sequence: Synthetic oligonucleotide
guggucaguaaggagaaua

SEQ ID NO: 1202886 - RNA, 19 nt, Artificial Sequence
  Description of Artificial Sequence: Synthetic oligonucleotide
aagcaccgcugcagcaagc

SEQ ID NO: 1202887 - RNA, 19 nt, Artificial Sequence
  Description of Artificial Sequence: Synthetic oligonucleotide
aaaaggcuagggugccgua

SEQ ID NO: 1202888 - RNA, 19 nt, Artificial Sequence
  Description of Artificial Sequence: Synthetic oligonucleotide
cagagaucuggcuacaaau

SEQ ID NO: 1202889 - RNA, 19 nt, Artificial Sequence
  Description of Artificial Sequence: Synthetic oligonucleotide
auguucagggagggacagc

SEQ ID NO: 1202890 - RNA, 19 nt, Artificial Sequence
  Description of Artificial Sequence: Synthetic oligonucleotide
gcuagggugccguaaguca

SEQ ID NO: 1202891 - RNA, 19 nt, Artificial Sequence
  Description of Artificial Sequence: Synthetic oligonucleotide
gcuaugaccaaagcaccgc

SEQ ID NO: 1202892 - RNA, 19 nt, Artificial Sequence
  Description of Artificial Sequence: Synthetic oligonucleotide
gccuguaaagugacgagug

SEQ ID NO: 1202893 - RNA, 19 nt, Artificial Sequence
  Description of Artificial Sequence: Synthetic oligonucleotide
aucgaucuuaacggagaca

SEQ ID NO: 1202894 - RNA, 19 nt, Artificial Sequence
  Description of Artificial Sequence: Synthetic oligonucleotide
cugccauauguacaaugga

SEQ ID NO: 1202895 - RNA, 19 nt, Artificial Sequence
  Description of Artificial Sequence: Synthetic oligonucleotide
uuacauccgcaaagcuaaa

SEQ ID NO: 1202896 - RNA, 19 nt, Artificial Sequence
  Description of Artificial Sequence: Synthetic oligonucleotide
ggcaucaguccaccaagug

SEQ ID NO: 1202897 - RNA, 19 nt, Artificial Sequence
  Description of Artificial Sequence: Synthetic oligonucleotide
gugacuuaggauuggugau

SEQ ID NO: 1202898 - RNA, 19 nt, Artificial Sequence
  Description of Artificial Sequence: Synthetic oligonucleotide
uaacagagacucccaccuu

SEQ ID NO: 1202899 - RNA, 19 nt, Artificial Sequence
  Description of Artificial Sequence: Synthetic oligonucleotide
ugucaaccagguccgcauu

SEQ ID NO: 1202900 - RNA, 19 nt, Artificial Sequence
  Description of Artificial Sequence: Synthetic oligonucleotide
aagagccucucuaguggcu

SEQ ID NO: 1202901 - RNA, 19 nt, Artificial Sequence
  Description of Artificial Sequence: Synthetic oligonucleotide
ucccaccuuuggaaucucu

SEQ ID NO: 1202902 - RNA, 19 nt, Artificial Sequence
  Description of Artificial Sequence: Synthetic oligonucleotide
cucuaguggcucauguuua

SEQ ID NO: 1202903 - RNA, 19 nt, Artificial Sequence
  Description of Artificial Sequence: Synthetic oligonucleotide
agaaaggauaguagauguu

SEQ ID NO: 1202904 - RNA, 19 nt, Artificial Sequence
  Description of Artificial Sequence: Synthetic oligonucleotide
gguuacauccgcaaagcua

SEQ ID NO: 1202905 - RNA, 19 nt, Artificial Sequence
  Description of Artificial Sequence: Synthetic oligonucleotide
gcuagauaucuaaauguaa

SEQ ID NO: 1202906 - RNA, 19 nt, Artificial Sequence
  Description of Artificial Sequence: Synthetic oligonucleotide
ggauuggugauaagaacaa

SEQ ID NO: 1202907 - RNA, 19 nt, Artificial Sequence
  Description of Artificial Sequence: Synthetic oligonucleotide
uacaaauguggaggcugaa

SEQ ID NO: 1202908 - RNA, 19 nt, Artificial Sequence
  Description of Artificial Sequence: Synthetic oligonucleotide
cuccaucgaucuuaacgga

SEQ ID NO: 1202909 - RNA, 19 nt, Artificial Sequence
  Description of Artificial Sequence: Synthetic oligonucleotide
uguccggaucccuggggau

SEQ ID NO: 1202910 - RNA, 19 nt, Artificial Sequence
  Description of Artificial Sequence: Synthetic oligonucleotide
aggcaaagauccgguaccu

SEQ ID NO: 1202911 - RNA, 19 nt, Artificial Sequence
  Description of Artificial Sequence: Synthetic oligonucleotide
gaaucgguuguuagauucu

SEQ ID NO: 1202912 - RNA, 19 nt, Artificial Sequence
  Description of Artificial Sequence: Synthetic oligonucleotide
gccguaagucacaugaaga

SEQ ID NO: 1202913 - RNA, 19 nt, Artificial Sequence
  Description of Artificial Sequence: Synthetic oligonucleotide
ccaacauagguaagccauc

SEQ ID NO: 1202914 - RNA, 19 nt, Artificial Sequence
  Description of Artificial Sequence: Synthetic oligonucleotide
ccguaagucacaugaagaa

SEQ ID NO: 1202915 - RNA, 19 nt, Artificial Sequence
  Description of Artificial Sequence: Synthetic oligonucleotide
ugaagcccaccugcugaca

SEQ ID NO: 1202916 - RNA, 19 nt, Artificial Sequence
  Description of Artificial Sequence: Synthetic oligonucleotide
caaguguguggaggugccc

SEQ ID NO: 1202917 - RNA, 19 nt, Artificial Sequence
  Description of Artificial Sequence: Synthetic oligonucleotide
ccaucgaucuuaacggaga

SEQ ID NO: 1202918 - RNA, 19 nt, Artificial Sequence
  Description of Artificial Sequence: Synthetic oligonucleotide
gaccuacauuaacuccauc

SEQ ID NO: 1202919 - RNA, 19 nt, Artificial Sequence
  Description of Artificial Sequence: Synthetic oligonucleotide
ccaaguucaguggaguuca

SEQ ID NO: 1202920 - RNA, 19 nt, Artificial Sequence
  Description of Artificial Sequence: Synthetic oligonucleotide
uuagaccaccuugcaggaa

SEQ ID NO: 1202921 - RNA, 19 nt, Artificial Sequence
  Description of Artificial Sequence: Synthetic oligonucleotide
guugaauggaagagccucu

SEQ ID NO: 1202922 - RNA, 19 nt, Artificial Sequence
  Description of Artificial Sequence: Synthetic oligonucleotide
cuaugaccaaagcaccgcu

SEQ ID NO: 1202923 - RNA, 19 nt, Artificial Sequence
  Description of Artificial Sequence: Synthetic oligonucleotide
guuccaaguucaguggagu

SEQ ID NO: 1202924 - RNA, 19 nt, Artificial Sequence
  Description of Artificial Sequence: Synthetic oligonucleotide
guccgcauuggggagaaua

SEQ ID NO: 1202925 - RNA, 19 nt, Artificial Sequence
  Description of Artificial Sequence: Synthetic oligonucleotide
gaccugaagcuaugaccaa

SEQ ID NO: 1202926 - RNA, 19 nt, Artificial Sequence
  Description of Artificial Sequence: Synthetic oligonucleotide
cgguuguuagauucugcag

SEQ ID NO: 1202927 - RNA, 19 nt, Artificial Sequence
  Description of Artificial Sequence: Synthetic oligonucleotide
caacuguaaaggagugacu

SEQ ID NO: 1202928 - RNA, 19 nt, Artificial Sequence
  Description of Artificial Sequence: Synthetic oligonucleotide
ccuuuaagcucuggguaug

SEQ ID NO: 1202929 - RNA, 19 nt, Artificial Sequence
  Description of Artificial Sequence: Synthetic oligonucleotide
ggacggauacuucuauggu

SEQ ID NO: 1202930 - RNA, 19 nt, Artificial Sequence
  Description of Artificial Sequence: Synthetic oligonucleotide
caaauaagccguggccgaa

SEQ ID NO: 1202931 - RNA, 19 nt, Artificial Sequence
  Description of Artificial Sequence: Synthetic oligonucleotide
guauaauauucaaguguuu

SEQ ID NO: 1202932 - RNA, 19 nt, Artificial Sequence
  Description of Artificial Sequence: Synthetic oligonucleotide
cacuugucaaagguuacau

SEQ ID NO: 1202933 - RNA, 19 nt, Artificial Sequence
  Description of Artificial Sequence: Synthetic oligonucleotide
cagucucccaccucaaguu

SEQ ID NO: 1202934 - RNA, 19 nt, Artificial Sequence
  Description of Artificial Sequence: Synthetic oligonucleotide
ccagguccgcauuggggag

SEQ ID NO: 1202935 - RNA, 19 nt, Artificial Sequence
  Description of Artificial Sequence: Synthetic oligonucleotide
ggcuagggugccguaaguc

SEQ ID NO: 1202936 - RNA, 19 nt, Artificial Sequence
  Description of Artificial Sequence: Synthetic oligonucleotide
cgcauuggggagaauaaaa

SEQ ID NO: 1202937 - RNA, 19 nt, Artificial Sequence
  Description of Artificial Sequence: Synthetic oligonucleotide
gccguggccgaacucauua

SEQ ID NO: 1202938 - RNA, 19 nt, Artificial Sequence
  Description of Artificial Sequence: Synthetic oligonucleotide
caguccacacugcaggaau

SEQ ID NO: 1202939 - RNA, 19 nt, Artificial Sequence
  Description of Artificial Sequence: Synthetic oligonucleotide
agccaucaaggggauguua

SEQ ID NO: 1202940 - RNA, 19 nt, Artificial Sequence
  Description of Artificial Sequence: Synthetic oligonucleotide
cagcaacccaauuuuccau

SEQ ID NO: 1202941 - RNA, 19 nt, Artificial Sequence
  Description of Artificial Sequence: Synthetic oligonucleotide
gccacuugucaaagguuac

SEQ ID NO: 1202942 - RNA, 19 nt, Artificial Sequence
  Description of Artificial Sequence: Synthetic oligonucleotide
cacgguccaagcacugugu

SEQ ID NO: 1202943 - RNA, 19 nt, Artificial Sequence
  Description of Artificial Sequence: Synthetic oligonucleotide
cccuaacaaacacaguagu

SEQ ID NO: 1202944 - RNA, 19 nt, Artificial Sequence
  Description of Artificial Sequence: Synthetic oligonucleotide
agguccgcauuggggagaa

SEQ ID NO: 1202945 - RNA, 19 nt, Artificial Sequence
  Description of Artificial Sequence: Synthetic oligonucleotide
guguugaauggaagagccu

SEQ ID NO: 1202946 - RNA, 19 nt, Artificial Sequence
  Description of Artificial Sequence: Synthetic oligonucleotide
ggacuucaggagcuuagau

SEQ ID NO: 1202947 - RNA, 19 nt, Artificial Sequence
  Description of Artificial Sequence: Synthetic oligonucleotide
gguagagaugagaccugaa

SEQ ID NO: 1202948 - RNA, 19 nt, Artificial Sequence
  Description of Artificial Sequence: Synthetic oligonucleotide
ccgcaaagcuaaagagguc

SEQ ID NO: 1202949 - RNA, 19 nt, Artificial Sequence
  Description of Artificial Sequence: Synthetic oligonucleotide
cauuacuguccggaucccu

SEQ ID NO: 1202950 - RNA, 19 nt, Artificial Sequence
  Description of Artificial Sequence: Synthetic oligonucleotide
ccguggccgaacucauuac

SEQ ID NO: 1202951 - RNA, 19 nt, Artificial Sequence
  Description of Artificial Sequence: Synthetic oligonucleotide
cgaaugaguacagguguca

SEQ ID NO: 1202952 - RNA, 19 nt, Artificial Sequence
  Description of Artificial Sequence: Synthetic oligonucleotide
ggugagcacucuugcuucu

SEQ ID NO: 1202953 - RNA, 19 nt, Artificial Sequence
  Description of Artificial Sequence: Synthetic oligonucleotide
ggagugacuuaggauuggu

SEQ ID NO: 1202954 - RNA, 19 nt, Artificial Sequence
  Description of Artificial Sequence: Synthetic oligonucleotide
cagguccgcauuggggaga

SEQ ID NO: 1202955 - RNA, 19 nt, Artificial Sequence
  Description of Artificial Sequence: Synthetic oligonucleotide
cggauacuucuauggugug

SEQ ID NO: 1202956 - RNA, 19 nt, Artificial Sequence
  Description of Artificial Sequence: Synthetic oligonucleotide
cauuaacuccaucgaucuu

SEQ ID NO: 1202957 - RNA, 19 nt, Artificial Sequence
  Description of Artificial Sequence: Synthetic oligonucleotide
caggagcuuagauggcuuu

SEQ ID NO: 1202958 - RNA, 19 nt, Artificial Sequence
  Description of Artificial Sequence: Synthetic oligonucleotide
ccuguaaagugacgagugu

SEQ ID NO: 1202959 - RNA, 19 nt, Artificial Sequence
  Description of Artificial Sequence: Synthetic oligonucleotide
gggugccguaagucacaug

SEQ ID NO: 1202960 - RNA, 19 nt, Artificial Sequence
  Description of Artificial Sequence: Synthetic oligonucleotide
cgaucuuaacggagacaga

SEQ ID NO: 1202961 - RNA, 19 nt, Artificial Sequence
  Description of Artificial Sequence: Synthetic oligonucleotide
gcacccgggccacaaugua

SEQ ID NO: 1202962 - RNA, 19 nt, Artificial Sequence
  Description of Artificial Sequence: Synthetic oligonucleotide
ccgguaccuucuauugucu

SEQ ID NO: 1202963 - RNA, 19 nt, Artificial Sequence
  Description of Artificial Sequence: Synthetic oligonucleotide
ccagacaaaugagaagcuu

SEQ ID NO: 1202964 - RNA, 19 nt, Artificial Sequence
  Description of Artificial Sequence: Synthetic oligonucleotide
ccgcauuggggagaauaaa

SEQ ID NO: 1202965 - RNA, 19 nt, Artificial Sequence
  Description of Artificial Sequence: Synthetic oligonucleotide
cguggccgaacucauuacu

SEQ ID NO: 1202966 - RNA, 19 nt, Artificial Sequence
  Description of Artificial Sequence: Synthetic oligonucleotide
ggcaaagauccgguaccuu

SEQ ID NO: 1202967 - RNA, 19 nt, Artificial Sequence
  Description of Artificial Sequence: Synthetic oligonucleotide
ccggaucccuggggaugga

SEQ ID NO: 1202968 - RNA, 19 nt, Artificial Sequence
  Description of Artificial Sequence: Synthetic oligonucleotide
gguccgcauuggggagaau

SEQ ID NO: 1202969 - RNA, 19 nt, Artificial Sequence
  Description of Artificial Sequence: Synthetic oligonucleotide
uggaguaccuuuuagaggg

SEQ ID NO: 1202970 - RNA, 19 nt, Artificial Sequence
  Description of Artificial Sequence: Synthetic oligonucleotide
uauccuuaggccaaggccg

SEQ ID NO: 1202971 - RNA, 19 nt, Artificial Sequence
  Description of Artificial Sequence: Synthetic oligonucleotide
agaaaugacagaugcaagg

SEQ ID NO: 1202972 - RNA, 19 nt, Artificial Sequence
  Description of Artificial Sequence: Synthetic oligonucleotide
uaugccaucaucuguacag

SEQ ID NO: 1202973 - RNA, 19 nt, Artificial Sequence
  Description of Artificial Sequence: Synthetic oligonucleotide
aacaccacuagcugcaggg

SEQ ID NO: 1202974 - RNA, 19 nt, Artificial Sequence
  Description of Artificial Sequence: Synthetic oligonucleotide
auuguuucauuucugaugu

SEQ ID NO: 1202975 - RNA, 19 nt, Artificial Sequence
  Description of Artificial Sequence: Synthetic oligonucleotide
cuaauauccucucuaaccc

SEQ ID NO: 1202976 - RNA, 19 nt, Artificial Sequence
  Description of Artificial Sequence: Synthetic oligonucleotide
ucaguagcuauccuuaggc

SEQ ID NO: 1202977 - RNA, 19 nt, Artificial Sequence
  Description of Artificial Sequence: Synthetic oligonucleotide
aguggaguaccuuuuagag

SEQ ID NO: 1202978 - RNA, 19 nt, Artificial Sequence
  Description of Artificial Sequence: Synthetic oligonucleotide
gagaucauugcccacuggg

SEQ ID NO: 1202979 - RNA, 19 nt, Artificial Sequence
  Description of Artificial Sequence: Synthetic oligonucleotide
gguuguugagcacagaacg

SEQ ID NO: 1202980 - RNA, 19 nt, Artificial Sequence
  Description of Artificial Sequence: Synthetic oligonucleotide
auaaugguccuuuugccag

SEQ ID NO: 1202981 - RNA, 19 nt, Artificial Sequence
  Description of Artificial Sequence: Synthetic oligonucleotide
aacgcuuugccagugagag

SEQ ID NO: 1202982 - RNA, 19 nt, Artificial Sequence
  Description of Artificial Sequence: Synthetic oligonucleotide
guuccggucauugugaucg

SEQ ID NO: 1202983 - RNA, 19 nt, Artificial Sequence
  Description of Artificial Sequence: Synthetic oligonucleotide
uaacccuaacuuaacaagc

SEQ ID NO: 1202984 - RNA, 19 nt, Artificial Sequence
  Description of Artificial Sequence: Synthetic oligonucleotide
cuaacccuaacuuaacaag

SEQ ID NO: 1202985 - RNA, 19 nt, Artificial Sequence
  Description of Artificial Sequence: Synthetic oligonucleotide
ucugauguguggcagugag

SEQ ID NO: 1202986 - RNA, 19 nt, Artificial Sequence
  Description of Artificial Sequence: Synthetic oligonucleotide
acacgcuagagccauaagg

SEQ ID NO: 1202987 - RNA, 19 nt, Artificial Sequence
  Description of Artificial Sequence: Synthetic oligonucleotide
ugucuuagguguaaaugcc

SEQ ID NO: 1202988 - RNA, 19 nt, Artificial Sequence
  Description of Artificial Sequence: Synthetic oligonucleotide
ugggucacacgcuagagcc

SEQ ID NO: 1202989 - RNA, 19 nt, Artificial Sequence
  Description of Artificial Sequence: Synthetic oligonucleotide
cacgcuagagccauaaggc

SEQ ID NO: 1202990 - RNA, 19 nt, Artificial Sequence
  Description of Artificial Sequence: Synthetic oligonucleotide
ucgaaaaugcgcucaaucu

SEQ ID NO: 1202991 - RNA, 19 nt, Artificial Sequence
  Description of Artificial Sequence: Synthetic oligonucleotide
ucuugcaggaggcauggag

SEQ ID NO: 1202992 - RNA, 19 nt, Artificial Sequence
  Description of Artificial Sequence: Synthetic oligonucleotide
cuauccuuaggccaaggcc

SEQ ID NO: 1202993 - RNA, 19 nt, Artificial Sequence
  Description of Artificial Sequence: Synthetic oligonucleotide
cuaaugccaguuuaacucc

SEQ ID NO: 1202994 - RNA, 19 nt, Artificial Sequence
  Description of Artificial Sequence: Synthetic oligonucleotide
aguagcuauccuuaggcca

SEQ ID NO: 1202995 - RNA, 19 nt, Artificial Sequence
  Description of Artificial Sequence: Synthetic oligonucleotide
auugugaucgugcuccgag

SEQ ID NO: 1202996 - RNA, 19 nt, Artificial Sequence
  Description of Artificial Sequence: Synthetic oligonucleotide
gaaccagcuugucauaugc

SEQ ID NO: 1202997 - RNA, 19 nt, Artificial Sequence
  Description of Artificial Sequence: Synthetic oligonucleotide
aacccuaacuuaacaagcg

SEQ ID NO: 1202998 - RNA, 19 nt, Artificial Sequence
  Description of Artificial Sequence: Synthetic oligonucleotide
acuccaaccugcuugaggu

SEQ ID NO: 1202999 - RNA, 19 nt, Artificial Sequence
  Description of Artificial Sequence: Synthetic oligonucleotide
ugauguguggcagugaggu

SEQ ID NO: 1203000 - RNA, 19 nt, Artificial Sequence
  Description of Artificial Sequence: Synthetic oligonucleotide
ccuaauauccucucuaacc

SEQ ID NO: 1203001 - RNA, 19 nt, Artificial Sequence
  Description of Artificial Sequence: Synthetic oligonucleotide
uuaacaagcggcagcuaug

SEQ ID NO: 1203002 - RNA, 19 nt, Artificial Sequence
  Description of Artificial Sequence: Synthetic oligonucleotide
aaugaaugagaaaggcaag

SEQ ID NO: 1203003 - RNA, 19 nt, Artificial Sequence
  Description of Artificial Sequence: Synthetic oligonucleotide
ucucgauggagcaugcucu

SEQ ID NO: 1203004 - RNA, 19 nt, Artificial Sequence
  Description of Artificial Sequence: Synthetic oligonucleotide
uacuuugacaaagacgaug

SEQ ID NO: 1203005 - RNA, 19 nt, Artificial Sequence
  Description of Artificial Sequence: Synthetic oligonucleotide
uuuagaggggcauccauuc

SEQ ID NO: 1203006 - RNA, 19 nt, Artificial Sequence
  Description of Artificial Sequence: Synthetic oligonucleotide
gaacgcucgauaauggucc

SEQ ID NO: 1203007 - RNA, 19 nt, Artificial Sequence
  Description of Artificial Sequence: Synthetic oligonucleotide
aacuuaacaagcggcagcu

SEQ ID NO: 1203008 - RNA, 19 nt, Artificial Sequence
  Description of Artificial Sequence: Synthetic oligonucleotide
ugcccauuagcacugggca

SEQ ID NO: 1203009 - RNA, 19 nt, Artificial Sequence
  Description of Artificial Sequence: Synthetic oligonucleotide
ugaguggaguaccuuuuag

SEQ ID NO: 1203010 - RNA, 19 nt, Artificial Sequence
  Description of Artificial Sequence: Synthetic oligonucleotide
caagcggcagcuaugaguc

SEQ ID NO: 1203011 - RNA, 19 nt, Artificial Sequence
  Description of Artificial Sequence: Synthetic oligonucleotide
cagaugcuaagcuuccugg

SEQ ID NO: 1203012 - RNA, 19 nt, Artificial Sequence
  Description of Artificial Sequence: Synthetic oligonucleotide
aagcugucccguuccaggg

SEQ ID NO: 1203013 - RNA, 19 nt, Artificial Sequence
  Description of Artificial Sequence: Synthetic oligonucleotide
uguccuaauauccucucua

SEQ ID NO: 1203014 - RNA, 19 nt, Artificial Sequence
  Description of Artificial Sequence: Synthetic oligonucleotide
aguucccuagucuugccag

SEQ ID NO: 1203015 - RNA, 19 nt, Artificial Sequence
  Description of Artificial Sequence: Synthetic oligonucleotide
gaaaaugcgcucaaucuca

SEQ ID NO: 1203016 - RNA, 19 nt, Artificial Sequence
  Description of Artificial Sequence: Synthetic oligonucleotide
aucguaucagcauccaaca

SEQ ID NO: 1203017 - RNA, 19 nt, Artificial Sequence
  Description of Artificial Sequence: Synthetic oligonucleotide
guggaguaccuuuuagagg

SEQ ID NO: 1203018 - RNA, 19 nt, Artificial Sequence
  Description of Artificial Sequence: Synthetic oligonucleotide
acuuugacaaagacgauga

SEQ ID NO: 1203019 - RNA, 19 nt, Artificial Sequence
  Description of Artificial Sequence: Synthetic oligonucleotide
uguaaaugcccaccccagc

SEQ ID NO: 1203020 - RNA, 19 nt, Artificial Sequence
  Description of Artificial Sequence: Synthetic oligonucleotide
uccaaccugcuugaggugg

SEQ ID NO: 1203021 - RNA, 19 nt, Artificial Sequence
  Description of Artificial Sequence: Synthetic oligonucleotide
acccuaacuuaacaagcgg

SEQ ID NO: 1203022 - RNA, 19 nt, Artificial Sequence
  Description of Artificial Sequence: Synthetic oligonucleotide
cuugucauaugccaucauc

SEQ ID NO: 1203023 - RNA, 19 nt, Artificial Sequence
  Description of Artificial Sequence: Synthetic oligonucleotide
uucucgauggagcaugcuc

SEQ ID NO: 1203024 - RNA, 19 nt, Artificial Sequence
  Description of Artificial Sequence: Synthetic oligonucleotide
aaaugcccaccccagcuga

SEQ ID NO: 1203025 - RNA, 19 nt, Artificial Sequence
  Description of Artificial Sequence: Synthetic oligonucleotide
agguguaaaugcccacccc

SEQ ID NO: 1203026 - RNA, 19 nt, Artificial Sequence
  Description of Artificial Sequence: Synthetic oligonucleotide
agaggaacgcucgauaaug

SEQ ID NO: 1203027 - RNA, 19 nt, Artificial Sequence
  Description of Artificial Sequence: Synthetic oligonucleotide
gaggugguuaccccagccg

SEQ ID NO: 1203028 - RNA, 19 nt, Artificial Sequence
  Description of Artificial Sequence: Synthetic oligonucleotide
uaaaugcccaccccagcug

SEQ ID NO: 1203029 - RNA, 19 nt, Artificial Sequence
  Description of Artificial Sequence: Synthetic oligonucleotide
accugcuugaggugguuac

SEQ ID NO: 1203030 - RNA, 19 nt, Artificial Sequence
  Description of Artificial Sequence: Synthetic oligonucleotide
aaaaugcgcucaaucucac

SEQ ID NO: 1203031 - RNA, 19 nt, Artificial Sequence
  Description of Artificial Sequence: Synthetic oligonucleotide
agcugaaccuaguggcagc

SEQ ID NO: 1203032 - RNA, 19 nt, Artificial Sequence
  Description of Artificial Sequence: Synthetic oligonucleotide
ucgccaguaaaccucuaga

SEQ ID NO: 1203033 - RNA, 19 nt, Artificial Sequence
  Description of Artificial Sequence: Synthetic oligonucleotide
uuuuagaggggcauccauu

SEQ ID NO: 1203034 - RNA, 19 nt, Artificial Sequence
  Description of Artificial Sequence: Synthetic oligonucleotide
cucgaaaaugcgcucaauc

SEQ ID NO: 1203035 - RNA, 19 nt, Artificial Sequence
  Description of Artificial Sequence: Synthetic oligonucleotide
uaauauccucucuaacccu

SEQ ID NO: 1203036 - RNA, 19 nt, Artificial Sequence
  Description of Artificial Sequence: Synthetic oligonucleotide
aagggcaaaugaaugagaa

SEQ ID NO: 1203037 - RNA, 19 nt, Artificial Sequence
  Description of Artificial Sequence: Synthetic oligonucleotide
ggugaggauacuuugacaa

SEQ ID NO: 1203038 - RNA, 19 nt, Artificial Sequence
  Description of Artificial Sequence: Synthetic oligonucleotide
ugugaguugucuguccagc

SEQ ID NO: 1203039 - RNA, 19 nt, Artificial Sequence
  Description of Artificial Sequence: Synthetic oligonucleotide
ugcgcugugaagaucccgu

SEQ ID NO: 1203040 - RNA, 19 nt, Artificial Sequence
  Description of Artificial Sequence: Synthetic oligonucleotide
auccauucugguuggaagu

SEQ ID NO: 1203041 - RNA, 19 nt, Artificial Sequence
  Description of Artificial Sequence: Synthetic oligonucleotide
ccuugcuucucccagaacc

SEQ ID NO: 1203042 - RNA, 19 nt, Artificial Sequence
  Description of Artificial Sequence: Synthetic oligonucleotide
ugauuguuucauuucugau

SEQ ID NO: 1203043 - RNA, 19 nt, Artificial Sequence
  Description of Artificial Sequence: Synthetic oligonucleotide
uuguugagcacagaacgcu

SEQ ID NO: 1203044 - RNA, 19 nt, Artificial Sequence
  Description of Artificial Sequence: Synthetic oligonucleotide
uggucaguagcuauccuua

SEQ ID NO: 1203045 - RNA, 19 nt, Artificial Sequence
  Description of Artificial Sequence: Synthetic oligonucleotide
ugggugguugaucguauca

SEQ ID NO: 1203046 - RNA, 19 nt, Artificial Sequence
  Description of Artificial Sequence: Synthetic oligonucleotide
cucuagauacucagccagg

SEQ ID NO: 1203047 - RNA, 19 nt, Artificial Sequence
  Description of Artificial Sequence: Synthetic oligonucleotide
ucuagauacucagccaggu

SEQ ID NO: 1203048 - RNA, 19 nt, Artificial Sequence
  Description of Artificial Sequence: Synthetic oligonucleotide
aguugguucucauccagaa

SEQ ID NO: 1203049 - RNA, 19 nt, Artificial Sequence
  Description of Artificial Sequence: Synthetic oligonucleotide
gaugagucgcuggaguacc

SEQ ID NO: 1203050 - RNA, 19 nt, Artificial Sequence
  Description of Artificial Sequence: Synthetic oligonucleotide
gaguggaguaccuuuuaga

SEQ ID NO: 1203051 - RNA, 19 nt, Artificial Sequence
  Description of Artificial Sequence: Synthetic oligonucleotide
gugccgaggaugcagauca

SEQ ID NO: 1203052 - RNA, 19 nt, Artificial Sequence
  Description of Artificial Sequence: Synthetic oligonucleotide
uccgcugugaguugucugu

SEQ ID NO: 1203053 - RNA, 19 nt, Artificial Sequence
  Description of Artificial Sequence: Synthetic oligonucleotide
guugaucguaucagcaucc

SEQ ID NO: 1203054 - RNA, 19 nt, Artificial Sequence
  Description of Artificial Sequence: Synthetic oligonucleotide
aucauugcccacuggggca

SEQ ID NO: 1203055 - RNA, 19 nt, Artificial Sequence
  Description of Artificial Sequence: Synthetic oligonucleotide
uggaguaccuuuggugagg

SEQ ID NO: 1203056 - RNA, 19 nt, Artificial Sequence
  Description of Artificial Sequence: Synthetic oligonucleotide
uaacaagcggcagcuauga

SEQ ID NO: 1203057 - RNA, 19 nt, Artificial Sequence
  Description of Artificial Sequence: Synthetic oligonucleotide
cugggaugagaaccuacgg

SEQ ID NO: 1203058 - RNA, 19 nt, Artificial Sequence
  Description of Artificial Sequence: Synthetic oligonucleotide
gcacagaacgcuuugccag

SEQ ID NO: 1203059 - RNA, 19 nt, Artificial Sequence
  Description of Artificial Sequence: Synthetic oligonucleotide
agcacagaacgcuuugcca

SEQ ID NO: 1203060 - RNA, 19 nt, Artificial Sequence
  Description of Artificial Sequence: Synthetic oligonucleotide
gaggaacgcucgauaaugg

SEQ ID NO: 1203061 - RNA, 19 nt, Artificial Sequence
  Description of Artificial Sequence: Synthetic oligonucleotide
uacggggucacugugccca

SEQ ID NO: 1203062 - RNA, 19 nt, Artificial Sequence
  Description of Artificial Sequence: Synthetic oligonucleotide
ugaaccuaguggcagccua

SEQ ID NO: 1203063 - RNA, 19 nt, Artificial Sequence
  Description of Artificial Sequence: Synthetic oligonucleotide
uggccagcucgaaaaugcg

SEQ ID NO: 1203064 - RNA, 19 nt, Artificial Sequence
  Description of Artificial Sequence: Synthetic oligonucleotide
ggaaguuccccgcuaagug

SEQ ID NO: 1203065 - RNA, 19 nt, Artificial Sequence
  Description of Artificial Sequence: Synthetic oligonucleotide
caucaagcugucccguucc

SEQ ID NO: 1203066 - RNA, 19 nt, Artificial Sequence
  Description of Artificial Sequence: Synthetic oligonucleotide
cuggccugagaucauugcc

SEQ ID NO: 1203067 - RNA, 19 nt, Artificial Sequence
  Description of Artificial Sequence: Synthetic oligonucleotide
guaccuuuggugaggauac

SEQ ID NO: 1203068 - RNA, 19 nt, Artificial Sequence
  Description of Artificial Sequence: Synthetic oligonucleotide
agccuaaugccaguuuaac

SEQ ID NO: 1203069 - RNA, 19 nt, Artificial Sequence
  Description of Artificial Sequence: Synthetic oligonucleotide
cugguacaggcccugguag

SEQ ID NO: 1203070 - RNA, 19 nt, Artificial Sequence
  Description of Artificial Sequence: Synthetic oligonucleotide
cuuagguguaaaugcccac

SEQ ID NO: 1203071 - RNA, 19 nt, Artificial Sequence
  Description of Artificial Sequence: Synthetic oligonucleotide
agaaccuacggggucacug

SEQ ID NO: 1203072 - RNA, 19 nt, Artificial Sequence
  Description of Artificial Sequence: Synthetic oligonucleotide
ugcgcucaaucucacucug

SEQ ID NO: 1203073 - RNA, 19 nt, Artificial Sequence
  Description of Artificial Sequence: Synthetic oligonucleotide
agaugcuaagcuuccuggu

SEQ ID NO: 1203074 - RNA, 19 nt, Artificial Sequence
  Description of Artificial Sequence: Synthetic oligonucleotide
aauauccucucuaacccua

SEQ ID NO: 1203075 - RNA, 19 nt, Artificial Sequence
  Description of Artificial Sequence: Synthetic oligonucleotide
cugguuggaaguuccccgc

SEQ ID NO: 1203076 - RNA, 19 nt, Artificial Sequence
  Description of Artificial Sequence: Synthetic oligonucleotide
uucugguuggaaguucccc

SEQ ID NO: 1203077 - RNA, 19 nt, Artificial Sequence
  Description of Artificial Sequence: Synthetic oligonucleotide
agccauaaggcaaggguag

SEQ ID NO: 1203078 - RNA, 19 nt, Artificial Sequence
  Description of Artificial Sequence: Synthetic oligonucleotide
uacgcugccaguuccgguc

SEQ ID NO: 1203079 - RNA, 19 nt, Artificial Sequence
  Description of Artificial Sequence: Synthetic oligonucleotide
ugguugaucguaucagcau

SEQ ID NO: 1203080 - RNA, 19 nt, Artificial Sequence
  Description of Artificial Sequence: Synthetic oligonucleotide
aaccuacggggucacugug

SEQ ID NO: 1203081 - RNA, 19 nt, Artificial Sequence
  Description of Artificial Sequence: Synthetic oligonucleotide
uaugagucagggagcccug

SEQ ID NO: 1203082 - RNA, 19 nt, Artificial Sequence
  Description of Artificial Sequence: Synthetic oligonucleotide
uggaugguggguagcucgc

SEQ ID NO: 1203083 - RNA, 19 nt, Artificial Sequence
  Description of Artificial Sequence: Synthetic oligonucleotide
cguaucagcauccaacacc

SEQ ID NO: 1203084 - RNA, 19 nt, Artificial Sequence
  Description of Artificial Sequence: Synthetic oligonucleotide
aaccuugggaccacaguca

SEQ ID NO: 1203085 - RNA, 19 nt, Artificial Sequence
  Description of Artificial Sequence: Synthetic oligonucleotide
ugugggucacacgcuagag

SEQ ID NO: 1203086 - RNA, 19 nt, Artificial Sequence
  Description of Artificial Sequence: Synthetic oligonucleotide
gguguaaaugcccacccca

SEQ ID NO: 1203087 - RNA, 19 nt, Artificial Sequence
  Description of Artificial Sequence: Synthetic oligonucleotide
cuggaguaccuuuggugag

SEQ ID NO: 1203088 - RNA, 19 nt, Artificial Sequence
  Description of Artificial Sequence: Synthetic oligonucleotide
gucgcuggaguaccuuugg

SEQ ID NO: 1203089 - RNA, 19 nt, Artificial Sequence
  Description of Artificial Sequence: Synthetic oligonucleotide
cucgggagcggaugagucg

SEQ ID NO: 1203090 - RNA, 19 nt, Artificial Sequence
  Description of Artificial Sequence: Synthetic oligonucleotide
ucguaucagcauccaacac

SEQ ID NO: 1203091 - RNA, 19 nt, Artificial Sequence
  Description of Artificial Sequence: Synthetic oligonucleotide
cccuaacuuaacaagcggc

SEQ ID NO: 1203092 - RNA, 19 nt, Artificial Sequence
  Description of Artificial Sequence: Synthetic oligonucleotide
uguugagcacagaacgcuu

SEQ ID NO: 1203093 - RNA, 19 nt, Artificial Sequence
  Description of Artificial Sequence: Synthetic oligonucleotide
uggaaguuccccgcuaagu

SEQ ID NO: 1203094 - RNA, 19 nt, Artificial Sequence
  Description of Artificial Sequence: Synthetic oligonucleotide
ccucuagauacucagccag

SEQ ID NO: 1203095 - RNA, 19 nt, Artificial Sequence
  Description of Artificial Sequence: Synthetic oligonucleotide
ugaucguaucagcauccaa

SEQ ID NO: 1203096 - RNA, 19 nt, Artificial Sequence
  Description of Artificial Sequence: Synthetic oligonucleotide
cugauguguggcagugagg

SEQ ID NO: 1203097 - RNA, 19 nt, Artificial Sequence
  Description of Artificial Sequence: Synthetic oligonucleotide
ugcuugaggugguuacccc

SEQ ID NO: 1203098 - RNA, 19 nt, Artificial Sequence
  Description of Artificial Sequence: Synthetic oligonucleotide
aggggugaaugcuccucac

SEQ ID NO: 1203099 - RNA, 19 nt, Artificial Sequence
  Description of Artificial Sequence: Synthetic oligonucleotide
gguugaucguaucagcauc

SEQ ID NO: 1203100 - RNA, 19 nt, Artificial Sequence
  Description of Artificial Sequence: Synthetic oligonucleotide
gcuggaguaccuuugguga

SEQ ID NO: 1203101 - RNA, 19 nt, Artificial Sequence
  Description of Artificial Sequence: Synthetic oligonucleotide
ucgggagcggaugagucgc

SEQ ID NO: 1203102 - RNA, 19 nt, Artificial Sequence
  Description of Artificial Sequence: Synthetic oligonucleotide
uggagcaugcucugugggu

SEQ ID NO: 1203103 - RNA, 19 nt, Artificial Sequence
  Description of Artificial Sequence: Synthetic oligonucleotide
agaggggcauccauucugg

SEQ ID NO: 1203104 - RNA, 19 nt, Artificial Sequence
  Description of Artificial Sequence: Synthetic oligonucleotide
cucgccaguaaaccucuag

SEQ ID NO: 1203105 - RNA, 19 nt, Artificial Sequence
  Description of Artificial Sequence: Synthetic oligonucleotide
aguuccggucauugugauc

SEQ ID NO: 1203106 - RNA, 19 nt, Artificial Sequence
  Description of Artificial Sequence: Synthetic oligonucleotide
gauggcgggagcugcgcug

SEQ ID NO: 1203107 - RNA, 19 nt, Artificial Sequence
  Description of Artificial Sequence: Synthetic oligonucleotide
ccugggaugagaaccuacg

SEQ ID NO: 1203108 - RNA, 19 nt, Artificial Sequence
  Description of Artificial Sequence: Synthetic oligonucleotide
uggguagcucgccaguaaa

SEQ ID NO: 1203109 - RNA, 19 nt, Artificial Sequence
  Description of Artificial Sequence: Synthetic oligonucleotide
acgcuagagccauaaggca

SEQ ID NO: 1203110 - RNA, 19 nt, Artificial Sequence
  Description of Artificial Sequence: Synthetic oligonucleotide
gaugcaagggcaaaugaau

SEQ ID NO: 1203111 - RNA, 19 nt, Artificial Sequence
  Description of Artificial Sequence: Synthetic oligonucleotide
aggccaaggccgguuacgc

SEQ ID NO: 1203112 - RNA, 19 nt, Artificial Sequence
  Description of Artificial Sequence: Synthetic oligonucleotide
aggaacgcucgauaauggu

SEQ ID NO: 1203113 - RNA, 19 nt, Artificial Sequence
  Description of Artificial Sequence: Synthetic oligonucleotide
aacgcucgauaaugguccu

SEQ ID NO: 1203114 - RNA, 19 nt, Artificial Sequence
  Description of Artificial Sequence: Synthetic oligonucleotide
auaugccaucaucuguaca

SEQ ID NO: 1203115 - RNA, 19 nt, Artificial Sequence
  Description of Artificial Sequence: Synthetic oligonucleotide
guguaaaugcccaccccag

SEQ ID NO: 1203116 - RNA, 19 nt, Artificial Sequence
  Description of Artificial Sequence: Synthetic oligonucleotide
aggccgguuacgcugccag

SEQ ID NO: 1203117 - RNA, 19 nt, Artificial Sequence
  Description of Artificial Sequence: Synthetic oligonucleotide
cacuggccucaucugaggg

SEQ ID NO: 1203118 - RNA, 19 nt, Artificial Sequence
  Description of Artificial Sequence: Synthetic oligonucleotide
guaaaugcccaccccagcu

SEQ ID NO: 1203119 - RNA, 19 nt, Artificial Sequence
  Description of Artificial Sequence: Synthetic oligonucleotide
cugcuugaggugguuaccc

SEQ ID NO: 1203120 - RNA, 19 nt, Artificial Sequence
  Description of Artificial Sequence: Synthetic oligonucleotide
agaugcaagggcaaaugaa

SEQ ID NO: 1203121 - RNA, 19 nt, Artificial Sequence
  Description of Artificial Sequence: Synthetic oligonucleotide
gugggucacacgcuagagc

SEQ ID NO: 1203122 - RNA, 19 nt, Artificial Sequence
  Description of Artificial Sequence: Synthetic oligonucleotide
gguagcucgccaguaaacc

SEQ ID NO: 1203123 - RNA, 19 nt, Artificial Sequence
  Description of Artificial Sequence: Synthetic oligonucleotide
ucgugcuccgaguccuggg

SEQ ID NO: 1203124 - RNA, 19 nt, Artificial Sequence
  Description of Artificial Sequence: Synthetic oligonucleotide
uuaggccaaggccgguuac

SEQ ID NO: 1203125 - RNA, 19 nt, Artificial Sequence
  Description of Artificial Sequence: Synthetic oligonucleotide
cccuagucuugccagaugc

SEQ ID NO: 1203126 - RNA, 19 nt, Artificial Sequence
  Description of Artificial Sequence: Synthetic oligonucleotide
uuaccccagccgcugugcc

SEQ ID NO: 1203127 - RNA, 19 nt, Artificial Sequence
  Description of Artificial Sequence: Synthetic oligonucleotide
guuacgcugccaguuccgg

SEQ ID NO: 1203128 - RNA, 19 nt, Artificial Sequence
  Description of Artificial Sequence: Synthetic oligonucleotide
cugugaguugucuguccag

SEQ ID NO: 1203129 - RNA, 19 nt, Artificial Sequence
  Description of Artificial Sequence: Synthetic oligonucleotide
aggugaguggaguaccuuu

SEQ ID NO: 1203130 - RNA, 19 nt, Artificial Sequence
  Description of Artificial Sequence: Synthetic oligonucleotide
cuucuugugcaggugagga

SEQ ID NO: 1203131 - RNA, 19 nt, Artificial Sequence
  Description of Artificial Sequence: Synthetic oligonucleotide
gugaucgugcuccgagucc

SEQ ID NO: 1203132 - RNA, 19 nt, Artificial Sequence
  Description of Artificial Sequence: Synthetic oligonucleotide
accuacggggucacugugc

SEQ ID NO: 1203133 - RNA, 19 nt, Artificial Sequence
  Description of Artificial Sequence: Synthetic oligonucleotide
auggagggaaaagaacaga

SEQ ID NO: 1203134 - RNA, 19 nt, Artificial Sequence
  Description of Artificial Sequence: Synthetic oligonucleotide
ugggcuaggagccggucuu

SEQ ID NO: 1203135 - RNA, 19 nt, Artificial Sequence
  Description of Artificial Sequence: Synthetic oligonucleotide
ugguuggaaguuccccgcu

SEQ ID NO: 1203136 - RNA, 19 nt, Artificial Sequence
  Description of Artificial Sequence: Synthetic oligonucleotide
caagggcaaaugaaugaga

SEQ ID NO: 1203137 - RNA, 19 nt, Artificial Sequence
  Description of Artificial Sequence: Synthetic oligonucleotide
cacuaggaggacccagaag

SEQ ID NO: 1203138 - RNA, 19 nt, Artificial Sequence
  Description of Artificial Sequence: Synthetic oligonucleotide
cucgauggagcaugcucug

SEQ ID NO: 1203139 - RNA, 19 nt, Artificial Sequence
  Description of Artificial Sequence: Synthetic oligonucleotide
ccuaacuuaacaagcggca

SEQ ID NO: 1203140 - RNA, 19 nt, Artificial Sequence
  Description of Artificial Sequence: Synthetic oligonucleotide
uugaucguaucagcaucca

SEQ ID NO: 1203141 - RNA, 19 nt, Artificial Sequence
  Description of Artificial Sequence: Synthetic oligonucleotide
gcuagagccauaaggcaag

SEQ ID NO: 1203142 - RNA, 19 nt, Artificial Sequence
  Description of Artificial Sequence: Synthetic oligonucleotide
cauaaggcaaggguagcca

SEQ ID NO: 1203143 - RNA, 19 nt, Artificial Sequence
  Description of Artificial Sequence: Synthetic oligonucleotide
gugguugaucguaucagca

SEQ ID NO: 1203144 - RNA, 19 nt, Artificial Sequence
  Description of Artificial Sequence: Synthetic oligonucleotide
guagcuauccuuaggccaa

SEQ ID NO: 1203145 - RNA, 19 nt, Artificial Sequence
  Description of Artificial Sequence: Synthetic oligonucleotide
uccugucuuagguguaaau

SEQ ID NO: 1203146 - RNA, 19 nt, Artificial Sequence
  Description of Artificial Sequence: Synthetic oligonucleotide
ccugucuuagguguaaaug

SEQ ID NO: 1203147 - RNA, 19 nt, Artificial Sequence
  Description of Artificial Sequence: Synthetic oligonucleotide
cuuaacaagcggcagcuau

SEQ ID NO: 1203148 - RNA, 19 nt, Artificial Sequence
  Description of Artificial Sequence: Synthetic oligonucleotide
ucccuagucuugccagaug

SEQ ID NO: 1203149 - RNA, 19 nt, Artificial Sequence
  Description of Artificial Sequence: Synthetic oligonucleotide
ugagugccaccauguugag

SEQ ID NO: 1203150 - RNA, 19 nt, Artificial Sequence
  Description of Artificial Sequence: Synthetic oligonucleotide
guuccccgcuaagugaucc

SEQ ID NO: 1203151 - RNA, 19 nt, Artificial Sequence
  Description of Artificial Sequence: Synthetic oligonucleotide
agcuugucauaugccauca

SEQ ID NO: 1203152 - RNA, 19 nt, Artificial Sequence
  Description of Artificial Sequence: Synthetic oligonucleotide
ggagcggaugagucgcugg

SEQ ID NO: 1203153 - RNA, 19 nt, Artificial Sequence
  Description of Artificial Sequence: Synthetic oligonucleotide
cgauaaugguccuuuugcc

SEQ ID NO: 1203154 - RNA, 19 nt, Artificial Sequence
  Description of Artificial Sequence: Synthetic oligonucleotide
guaaaccucuagauacuca

SEQ ID NO: 1203155 - RNA, 19 nt, Artificial Sequence
  Description of Artificial Sequence: Synthetic oligonucleotide
gcaggagguggucaguagc

SEQ ID NO: 1203156 - RNA, 19 nt, Artificial Sequence
  Description of Artificial Sequence: Synthetic oligonucleotide
uuacgcugccaguuccggu

SEQ ID NO: 1203157 - RNA, 19 nt, Artificial Sequence
  Description of Artificial Sequence: Synthetic oligonucleotide
cuagagccauaaggcaagg

SEQ ID NO: 1203158 - RNA, 19 nt, Artificial Sequence
  Description of Artificial Sequence: Synthetic oligonucleotide
gcuauccuuaggccaaggc

SEQ ID NO: 1203159 - RNA, 19 nt, Artificial Sequence
  Description of Artificial Sequence: Synthetic oligonucleotide
accuaguggcagccuaaug

SEQ ID NO: 1203160 - RNA, 19 nt, Artificial Sequence
  Description of Artificial Sequence: Synthetic oligonucleotide
gaugcuaagcuuccugguu

SEQ ID NO: 1203161 - RNA, 19 nt, Artificial Sequence
  Description of Artificial Sequence: Synthetic oligonucleotide
ucacaggcguccuccaguu

SEQ ID NO: 1203162 - RNA, 19 nt, Artificial Sequence
  Description of Artificial Sequence: Synthetic oligonucleotide
gagcggaugagucgcugga

SEQ ID NO: 1203163 - RNA, 19 nt, Artificial Sequence
  Description of Artificial Sequence: Synthetic oligonucleotide
agcaaugcuggagcgggca

SEQ ID NO: 1203164 - RNA, 19 nt, Artificial Sequence
  Description of Artificial Sequence: Synthetic oligonucleotide
aaguccagggauggcacua

SEQ ID NO: 1203165 - RNA, 19 nt, Artificial Sequence
  Description of Artificial Sequence: Synthetic oligonucleotide
gcuaagugauccuggccug

SEQ ID NO: 1203166 - RNA, 19 nt, Artificial Sequence
  Description of Artificial Sequence: Synthetic oligonucleotide
ucgcuggaguaccuuuggu

SEQ ID NO: 1203167 - RNA, 19 nt, Artificial Sequence
  Description of Artificial Sequence: Synthetic oligonucleotide
ugacagaugcaagggcaaa

SEQ ID NO: 1203168 - RNA, 19 nt, Artificial Sequence
  Description of Artificial Sequence: Synthetic oligonucleotide
cgaaaaugcgcucaaucuc

SEQ ID NO: 1203169 - RNA, 19 nt, Artificial Sequence
  Description of Artificial Sequence: Synthetic oligonucleotide
ggaacgcucgauaaugguc

SEQ ID NO: 1203170 - RNA, 19 nt, Artificial Sequence
  Description of Artificial Sequence: Synthetic oligonucleotide
uccccgcuaagugauccug

SEQ ID NO: 1203171 - RNA, 19 nt, Artificial Sequence
  Description of Artificial Sequence: Synthetic oligonucleotide
agcucgaaaaugcgcucaa

SEQ ID NO: 1203172 - RNA, 19 nt, Artificial Sequence
  Description of Artificial Sequence: Synthetic oligonucleotide
gagcccugaucuugcagga

SEQ ID NO: 1203173 - RNA, 19 nt, Artificial Sequence
  Description of Artificial Sequence: Synthetic oligonucleotide
gaaccuacggggucacugu

SEQ ID NO: 1203174 - RNA, 19 nt, Artificial Sequence
  Description of Artificial Sequence: Synthetic oligonucleotide
aggggcauccauucugguu

SEQ ID NO: 1203175 - RNA, 19 nt, Artificial Sequence
  Description of Artificial Sequence: Synthetic oligonucleotide
acugaaccagcuugucaua

SEQ ID NO: 1203176 - RNA, 19 nt, Artificial Sequence
  Description of Artificial Sequence: Synthetic oligonucleotide
aaccuaguggcagccuaau

SEQ ID NO: 1203177 - RNA, 19 nt, Artificial Sequence
  Description of Artificial Sequence: Synthetic oligonucleotide
guagcucgccaguaaaccu

SEQ ID NO: 1203178 - RNA, 19 nt, Artificial Sequence
  Description of Artificial Sequence: Synthetic oligonucleotide
cccauuagcacugggcagc

SEQ ID NO: 1203179 - RNA, 19 nt, Artificial Sequence
  Description of Artificial Sequence: Synthetic oligonucleotide
gagcaugcucuguggguca

SEQ ID NO: 1203180 - RNA, 19 nt, Artificial Sequence
  Description of Artificial Sequence: Synthetic oligonucleotide
uaccuuuuagaggggcauc

SEQ ID NO: 1203181 - RNA, 19 nt, Artificial Sequence
  Description of Artificial Sequence: Synthetic oligonucleotide
ccuacggggucacugugcc

SEQ ID NO: 1203182 - RNA, 19 nt, Artificial Sequence
  Description of Artificial Sequence: Synthetic oligonucleotide
gucgugcccauuagcacug

SEQ ID NO: 1203183 - RNA, 19 nt, Artificial Sequence
  Description of Artificial Sequence: Synthetic oligonucleotide
uucccuagucuugccagau

SEQ ID NO: 1203184 - RNA, 19 nt, Artificial Sequence
  Description of Artificial Sequence: Synthetic oligonucleotide
agcuauccuuaggccaagg

SEQ ID NO: 1203185 - RNA, 19 nt, Artificial Sequence
  Description of Artificial Sequence: Synthetic oligonucleotide
gguacaggcccugguaggc

SEQ ID NO: 1203186 - RNA, 19 nt, Artificial Sequence
  Description of Artificial Sequence: Synthetic oligonucleotide
agcggaugagucgcuggag

SEQ ID NO: 1203187 - RNA, 19 nt, Artificial Sequence
  Description of Artificial Sequence: Synthetic oligonucleotide
ugucccguuccagggguga

SEQ ID NO: 1203188 - RNA, 19 nt, Artificial Sequence
  Description of Artificial Sequence: Synthetic oligonucleotide
cagucagcccuggaccagg

SEQ ID NO: 1203189 - RNA, 19 nt, Artificial Sequence
  Description of Artificial Sequence: Synthetic oligonucleotide
gguuacgcugccaguuccg

SEQ ID NO: 1203190 - RNA, 19 nt, Artificial Sequence
  Description of Artificial Sequence: Synthetic oligonucleotide
ggugaaugcuccucaccuc

SEQ ID NO: 1203191 - RNA, 19 nt, Artificial Sequence
  Description of Artificial Sequence: Synthetic oligonucleotide
caaggguagccaggcagac

SEQ ID NO: 1203192 - RNA, 19 nt, Artificial Sequence
  Description of Artificial Sequence: Synthetic oligonucleotide
uagcuauccuuaggccaag

SEQ ID NO: 1203193 - RNA, 19 nt, Artificial Sequence
  Description of Artificial Sequence: Synthetic oligonucleotide
ggggugaaugcuccucacc

SEQ ID NO: 1203194 - RNA, 19 nt, Artificial Sequence
  Description of Artificial Sequence: Synthetic oligonucleotide
gggugaaugcuccucaccu

SEQ ID NO: 1203195 - RNA, 19 nt, Artificial Sequence
  Description of Artificial Sequence: Synthetic oligonucleotide
acagucagcccuggaccag

SEQ ID NO: 1203196 - RNA, 19 nt, Artificial Sequence
  Description of Artificial Sequence: Synthetic oligonucleotide
gugguuaccccagccgcug

SEQ ID NO: 1203197 - RNA, 19 nt, Artificial Sequence
  Description of Artificial Sequence: Synthetic oligonucleotide
gcagaggaacgcucgauaa

SEQ ID NO: 1203198 - RNA, 19 nt, Artificial Sequence
  Description of Artificial Sequence: Synthetic oligonucleotide
ccagcgaggucuuggcuag

SEQ ID NO: 1203199 - RNA, 19 nt, Artificial Sequence
  Description of Artificial Sequence: Synthetic oligonucleotide
cacacgcuagagccauaag

SEQ ID NO: 1203200 - RNA, 19 nt, Artificial Sequence
  Description of Artificial Sequence: Synthetic oligonucleotide
uuccccgcuaagugauccu

SEQ ID NO: 1203201 - RNA, 19 nt, Artificial Sequence
  Description of Artificial Sequence: Synthetic oligonucleotide
cugcgcugugaagaucccg

SEQ ID NO: 1203202 - RNA, 19 nt, Artificial Sequence
  Description of Artificial Sequence: Synthetic oligonucleotide
gguugugggagcugaaccu

SEQ ID NO: 1203203 - RNA, 19 nt, Artificial Sequence
  Description of Artificial Sequence: Synthetic oligonucleotide
accccagccgcugugccug

SEQ ID NO: 1203204 - RNA, 19 nt, Artificial Sequence
  Description of Artificial Sequence: Synthetic oligonucleotide
uccaggggugaaugcuccu

SEQ ID NO: 1203205 - RNA, 19 nt, Artificial Sequence
  Description of Artificial Sequence: Synthetic oligonucleotide
cuucccucgggagcggaug

SEQ ID NO: 1203206 - RNA, 19 nt, Artificial Sequence
  Description of Artificial Sequence: Synthetic oligonucleotide
cagcugaugguacaugagu

SEQ ID NO: 1203207 - RNA, 19 nt, Artificial Sequence
  Description of Artificial Sequence: Synthetic oligonucleotide
cuguacagucaggugcuuc

SEQ ID NO: 1203208 - RNA, 19 nt, Artificial Sequence
  Description of Artificial Sequence: Synthetic oligonucleotide
cugcugguucugaagucca

SEQ ID NO: 1203209 - RNA, 19 nt, Artificial Sequence
  Description of Artificial Sequence: Synthetic oligonucleotide
ugguuaccccagccgcugu

SEQ ID NO: 1203210 - RNA, 19 nt, Artificial Sequence
  Description of Artificial Sequence: Synthetic oligonucleotide
ggaugagucgcuggaguac

SEQ ID NO: 1203211 - RNA, 19 nt, Artificial Sequence
  Description of Artificial Sequence: Synthetic oligonucleotide
gcuaguaccugggaugaga

SEQ ID NO: 1203212 - RNA, 19 nt, Artificial Sequence
  Description of Artificial Sequence: Synthetic oligonucleotide
cugggugguugaucguauc

SEQ ID NO: 1203213 - RNA, 19 nt, Artificial Sequence
  Description of Artificial Sequence: Synthetic oligonucleotide
uccgaguccugggcuagga

SEQ ID NO: 1203214 - RNA, 19 nt, Artificial Sequence
  Description of Artificial Sequence: Synthetic oligonucleotide
ucgauggagcaugcucugu

SEQ ID NO: 1203215 - RNA, 19 nt, Artificial Sequence
  Description of Artificial Sequence: Synthetic oligonucleotide
gaaccuaguggcagccuaa

SEQ ID NO: 1203216 - RNA, 19 nt, Artificial Sequence
  Description of Artificial Sequence: Synthetic oligonucleotide
aguugucuguccagccuca

SEQ ID NO: 1203217 - RNA, 19 nt, Artificial Sequence
  Description of Artificial Sequence: Synthetic oligonucleotide
caggggugaaugcuccuca

SEQ ID NO: 1203218 - RNA, 19 nt, Artificial Sequence
  Description of Artificial Sequence: Synthetic oligonucleotide
cuacggggucacugugccc

SEQ ID NO: 1203219 - RNA, 19 nt, Artificial Sequence
  Description of Artificial Sequence: Synthetic oligonucleotide
gaaugcuccucaccucgcu

SEQ ID NO: 1203220 - RNA, 19 nt, Artificial Sequence
  Description of Artificial Sequence: Synthetic oligonucleotide
cacuguguccuaauauccu

SEQ ID NO: 1203221 - RNA, 19 nt, Artificial Sequence
  Description of Artificial Sequence: Synthetic oligonucleotide
uaccccagccgcugugccu

SEQ ID NO: 1203222 - RNA, 19 nt, Artificial Sequence
  Description of Artificial Sequence: Synthetic oligonucleotide
cagcuaguaccugggauga

SEQ ID NO: 1203223 - RNA, 19 nt, Artificial Sequence
  Description of Artificial Sequence: Synthetic oligonucleotide
agcgaggucuuggcuagcu

SEQ ID NO: 1203224 - RNA, 19 nt, Artificial Sequence
  Description of Artificial Sequence: Synthetic oligonucleotide
cauguugagcucugauugu

SEQ ID NO: 1203225 - RNA, 19 nt, Artificial Sequence
  Description of Artificial Sequence: Synthetic oligonucleotide
ggucgugcccauuagcacu

SEQ ID NO: 1203226 - RNA, 19 nt, Artificial Sequence
  Description of Artificial Sequence: Synthetic oligonucleotide
gcaucaagcugucccguuc

SEQ ID NO: 1203227 - RNA, 19 nt, Artificial Sequence
  Description of Artificial Sequence: Synthetic oligonucleotide
agcucgccaguaaaccucu

SEQ ID NO: 1203228 - RNA, 19 nt, Artificial Sequence
  Description of Artificial Sequence: Synthetic oligonucleotide
gcagccuaaugccaguuua

SEQ ID NO: 1203229 - RNA, 19 nt, Artificial Sequence
  Description of Artificial Sequence: Synthetic oligonucleotide
cugugggucacacgcuaga

SEQ ID NO: 1203230 - RNA, 19 nt, Artificial Sequence
  Description of Artificial Sequence: Synthetic oligonucleotide
ugacuucccucgggagcgg

SEQ ID NO: 1203231 - RNA, 19 nt, Artificial Sequence
  Description of Artificial Sequence: Synthetic oligonucleotide
gcugaaccuaguggcagcc

SEQ ID NO: 1203232 - RNA, 19 nt, Artificial Sequence
  Description of Artificial Sequence: Synthetic oligonucleotide
cuuuuagaggggcauccau

SEQ ID NO: 1203233 - RNA, 19 nt, Artificial Sequence
  Description of Artificial Sequence: Synthetic oligonucleotide
gagcuuccgcugugaguug

SEQ ID NO: 1203234 - RNA, 19 nt, Artificial Sequence
  Description of Artificial Sequence: Synthetic oligonucleotide
acgcugccaguuccgguca

SEQ ID NO: 1203235 - RNA, 19 nt, Artificial Sequence
  Description of Artificial Sequence: Synthetic oligonucleotide
agucagcccuggaccaggg

SEQ ID NO: 1203236 - RNA, 19 nt, Artificial Sequence
  Description of Artificial Sequence: Synthetic oligonucleotide
gcacugaaccagcuuguca

SEQ ID NO: 1203237 - RNA, 19 nt, Artificial Sequence
  Description of Artificial Sequence: Synthetic oligonucleotide
gggucgugcccauuagcac

SEQ ID NO: 1203238 - RNA, 19 nt, Artificial Sequence
  Description of Artificial Sequence: Synthetic oligonucleotide
ggggucgugcccauuagca

SEQ ID NO: 1203239 - RNA, 19 nt, Artificial Sequence
  Description of Artificial Sequence: Synthetic oligonucleotide
cagauggcgggagcugcgc

SEQ ID NO: 1203240 - RNA, 19 nt, Artificial Sequence
  Description of Artificial Sequence: Synthetic oligonucleotide
cuaagugauccuggccuga

SEQ ID NO: 1203241 - RNA, 19 nt, Artificial Sequence
  Description of Artificial Sequence: Synthetic oligonucleotide
cgcuggaguaccuuuggug

SEQ ID NO: 1203242 - RNA, 19 nt, Artificial Sequence
  Description of Artificial Sequence: Synthetic oligonucleotide
ugagucgcuggaguaccuu

SEQ ID NO: 1203243 - RNA, 19 nt, Artificial Sequence
  Description of Artificial Sequence: Synthetic oligonucleotide
cuuaggccaaggccgguua

SEQ ID NO: 1203244 - RNA, 19 nt, Artificial Sequence
  Description of Artificial Sequence: Synthetic oligonucleotide
cacugcuccugucuuaggu

SEQ ID NO: 1203245 - RNA, 19 nt, Artificial Sequence
  Description of Artificial Sequence: Synthetic oligonucleotide
aguuccccgcuaagugauc

SEQ ID NO: 1203246 - RNA, 19 nt, Artificial Sequence
  Description of Artificial Sequence: Synthetic oligonucleotide
auacuuugacaaagacgau

SEQ ID NO: 1203247 - RNA, 19 nt, Artificial Sequence
  Description of Artificial Sequence: Synthetic oligonucleotide
gaucccguccaggccuggc

SEQ ID NO: 1203248 - RNA, 19 nt, Artificial Sequence
  Description of Artificial Sequence: Synthetic oligonucleotide
uuccggucauugugaucgu

SEQ ID NO: 1203249 - RNA, 19 nt, Artificial Sequence
  Description of Artificial Sequence: Synthetic oligonucleotide
agcccugaucuugcaggag

SEQ ID NO: 1203250 - RNA, 19 nt, Artificial Sequence
  Description of Artificial Sequence: Synthetic oligonucleotide
ccagauggcgggagcugcg

SEQ ID NO: 1203251 - RNA, 19 nt, Artificial Sequence
  Description of Artificial Sequence: Synthetic oligonucleotide
ccaguuccggucauuguga

SEQ ID NO: 1203252 - RNA, 19 nt, Artificial Sequence
  Description of Artificial Sequence: Synthetic oligonucleotide
auggcgggagcugcgcugu

SEQ ID NO: 1203253 - RNA, 19 nt, Artificial Sequence
  Description of Artificial Sequence: Synthetic oligonucleotide
aaggccgguuacgcugcca

SEQ ID NO: 1203254 - RNA, 19 nt, Artificial Sequence
  Description of Artificial Sequence: Synthetic oligonucleotide
agcuaguaccugggaugag

SEQ ID NO: 1203255 - RNA, 19 nt, Artificial Sequence
  Description of Artificial Sequence: Synthetic oligonucleotide
aaugcccaccccagcugau

SEQ ID NO: 1203256 - RNA, 19 nt, Artificial Sequence
  Description of Artificial Sequence: Synthetic oligonucleotide
gccuaaugccaguuuaacu

SEQ ID NO: 1203257 - RNA, 19 nt, Artificial Sequence
  Description of Artificial Sequence: Synthetic oligonucleotide
acggggucacugugcccag

SEQ ID NO: 1203258 - RNA, 19 nt, Artificial Sequence
  Description of Artificial Sequence: Synthetic oligonucleotide
ccccgcuaagugauccugg

SEQ ID NO: 1203259 - RNA, 19 nt, Artificial Sequence
  Description of Artificial Sequence: Synthetic oligonucleotide
guaccuuuuagaggggcau

SEQ ID NO: 1203260 - RNA, 19 nt, Artificial Sequence
  Description of Artificial Sequence: Synthetic oligonucleotide
guguccuaauauccucucu

SEQ ID NO: 1203261 - RNA, 19 nt, Artificial Sequence
  Description of Artificial Sequence: Synthetic oligonucleotide
cauuagcacugggcagccc

SEQ ID NO: 1203262 - RNA, 19 nt, Artificial Sequence
  Description of Artificial Sequence: Synthetic oligonucleotide
augagucagggagcccuga

SEQ ID NO: 1203263 - RNA, 19 nt, Artificial Sequence
  Description of Artificial Sequence: Synthetic oligonucleotide
ggcagaggaacgcucgaua

SEQ ID NO: 1203264 - RNA, 19 nt, Artificial Sequence
  Description of Artificial Sequence: Synthetic oligonucleotide
agggagcccugaucuugca

SEQ ID NO: 1203265 - RNA, 19 nt, Artificial Sequence
  Description of Artificial Sequence: Synthetic oligonucleotide
cacagaacgcuuugccagu

SEQ ID NO: 1203266 - RNA, 19 nt, Artificial Sequence
  Description of Artificial Sequence: Synthetic oligonucleotide
gccgcugugccugugccug

SEQ ID NO: 1203267 - RNA, 19 nt, Artificial Sequence
  Description of Artificial Sequence: Synthetic oligonucleotide
gguucucgauggagcaugc

SEQ ID NO: 1203268 - RNA, 19 nt, Artificial Sequence
  Description of Artificial Sequence: Synthetic oligonucleotide
gccauaaggcaaggguagc

SEQ ID NO: 1203269 - RNA, 19 nt, Artificial Sequence
  Description of Artificial Sequence: Synthetic oligonucleotide
ggaguaccuuuggugagga

SEQ ID NO: 1203270 - RNA, 19 nt, Artificial Sequence
  Description of Artificial Sequence: Synthetic oligonucleotide
gccagcgaggucuuggcua

SEQ ID NO: 1203271 - RNA, 19 nt, Artificial Sequence
  Description of Artificial Sequence: Synthetic oligonucleotide
aggugccgaggaugcagau

SEQ ID NO: 1203272 - RNA, 19 nt, Artificial Sequence
  Description of Artificial Sequence: Synthetic oligonucleotide
gagucgcuggaguaccuuu

SEQ ID NO: 1203273 - RNA, 19 nt, Artificial Sequence
  Description of Artificial Sequence: Synthetic oligonucleotide
ccgcuaagugauccuggcc

SEQ ID NO: 1203274 - RNA, 19 nt, Artificial Sequence
  Description of Artificial Sequence: Synthetic oligonucleotide
cuaccagagcuuccgcugu

SEQ ID NO: 1203275 - RNA, 19 nt, Artificial Sequence
  Description of Artificial Sequence: Synthetic oligonucleotide
gggccagcgaggucuuggc

SEQ ID NO: 1203276 - RNA, 19 nt, Artificial Sequence
  Description of Artificial Sequence: Synthetic oligonucleotide
ucccguuccaggggugaau

SEQ ID NO: 1203277 - RNA, 19 nt, Artificial Sequence
  Description of Artificial Sequence: Synthetic oligonucleotide
gaccacagucagcccugga

SEQ ID NO: 1203278 - RNA, 19 nt, Artificial Sequence
  Description of Artificial Sequence: Synthetic oligonucleotide
guuuaacuccaaccugcuu

SEQ ID NO: 1203279 - RNA, 19 nt, Artificial Sequence
  Description of Artificial Sequence: Synthetic oligonucleotide
cacaggcguccuccaguug

SEQ ID NO: 1203280 - RNA, 19 nt, Artificial Sequence
  Description of Artificial Sequence: Synthetic oligonucleotide
augagucgcuggaguaccu

SEQ ID NO: 1203281 - RNA, 19 nt, Artificial Sequence
  Description of Artificial Sequence: Synthetic oligonucleotide
uaccugggaugagaaccua

SEQ ID NO: 1203282 - RNA, 19 nt, Artificial Sequence
  Description of Artificial Sequence: Synthetic oligonucleotide
uggcagccuaaugccaguu

SEQ ID NO: 1203283 - RNA, 19 nt, Artificial Sequence
  Description of Artificial Sequence: Synthetic oligonucleotide
cauugugaucgugcuccga

SEQ ID NO: 1203284 - RNA, 19 nt, Artificial Sequence
  Description of Artificial Sequence: Synthetic oligonucleotide
ccauuagcacugggcagcc

SEQ ID NO: 1203285 - RNA, 19 nt, Artificial Sequence
  Description of Artificial Sequence: Synthetic oligonucleotide
agaucccguccaggccugg

SEQ ID NO: 1203286 - RNA, 19 nt, Artificial Sequence
  Description of Artificial Sequence: Synthetic oligonucleotide
ggagguggucaguagcuau

SEQ ID NO: 1203287 - RNA, 19 nt, Artificial Sequence
  Description of Artificial Sequence: Synthetic oligonucleotide
guugagcacagaacgcuuu

SEQ ID NO: 1203288 - RNA, 19 nt, Artificial Sequence
  Description of Artificial Sequence: Synthetic oligonucleotide
gcagccccgagguguguug

SEQ ID NO: 1203289 - RNA, 19 nt, Artificial Sequence
  Description of Artificial Sequence: Synthetic oligonucleotide
gcacuaggaggacccagaa

SEQ ID NO: 1203290 - RNA, 19 nt, Artificial Sequence
  Description of Artificial Sequence: Synthetic oligonucleotide
gcgaggucuuggcuagcug

SEQ ID NO: 1203291 - RNA, 19 nt, Artificial Sequence
  Description of Artificial Sequence: Synthetic oligonucleotide
cgcuagagccauaaggcaa

SEQ ID NO: 1203292 - RNA, 19 nt, Artificial Sequence
  Description of Artificial Sequence: Synthetic oligonucleotide
gcggcagcuaugagucagg

SEQ ID NO: 1203293 - RNA, 19 nt, Artificial Sequence
  Description of Artificial Sequence: Synthetic oligonucleotide
cugugcccaggaggugagg

SEQ ID NO: 1203294 - RNA, 19 nt, Artificial Sequence
  Description of Artificial Sequence: Synthetic oligonucleotide
ggugccgaggaugcagauc

SEQ ID NO: 1203295 - RNA, 19 nt, Artificial Sequence
  Description of Artificial Sequence: Synthetic oligonucleotide
cagaggaacgcucgauaau

SEQ ID NO: 1203296 - RNA, 19 nt, Artificial Sequence
  Description of Artificial Sequence: Synthetic oligonucleotide
guccuuuugccaggguugu

SEQ ID NO: 1203297 - RNA, 19 nt, Artificial Sequence
  Description of Artificial Sequence: Synthetic oligonucleotide
gcuaugagucagggagccc

SEQ ID NO: 1203298 - RNA, 19 nt, Artificial Sequence
  Description of Artificial Sequence: Synthetic oligonucleotide
ccguuccaggggugaaugc

SEQ ID NO: 1203299 - RNA, 19 nt, Artificial Sequence
  Description of Artificial Sequence: Synthetic oligonucleotide
cugaaccagcuugucauau

SEQ ID NO: 1203300 - RNA, 19 nt, Artificial Sequence
  Description of Artificial Sequence: Synthetic oligonucleotide
gacuucccucgggagcgga

SEQ ID NO: 1203301 - RNA, 19 nt, Artificial Sequence
  Description of Artificial Sequence: Synthetic oligonucleotide
uggcgggagcugcgcugug

SEQ ID NO: 1203302 - RNA, 19 nt, Artificial Sequence
  Description of Artificial Sequence: Synthetic oligonucleotide
aggugcucacaggcguccu

SEQ ID NO: 1203303 - RNA, 19 nt, Artificial Sequence
  Description of Artificial Sequence: Synthetic oligonucleotide
cugggcuaggagccggucu

SEQ ID NO: 1203304 - RNA, 19 nt, Artificial Sequence
  Description of Artificial Sequence: Synthetic oligonucleotide
cugcagggauuuggccagc

SEQ ID NO: 1203305 - RNA, 19 nt, Artificial Sequence
  Description of Artificial Sequence: Synthetic oligonucleotide
gcggugaggcugguacagg

SEQ ID NO: 1203306 - RNA, 19 nt, Artificial Sequence
  Description of Artificial Sequence: Synthetic oligonucleotide
gcggaugagucgcuggagu

SEQ ID NO: 1203307 - RNA, 19 nt, Artificial Sequence
  Description of Artificial Sequence: Synthetic oligonucleotide
gcuccgaguccugggcuag

SEQ ID NO: 1203308 - RNA, 19 nt, Artificial Sequence
  Description of Artificial Sequence: Synthetic oligonucleotide
caccacuagcugcagggau

SEQ ID NO: 1203309 - RNA, 19 nt, Artificial Sequence
  Description of Artificial Sequence: Synthetic oligonucleotide
gccgaggaugcagaucaca

SEQ ID NO: 1203310 - RNA, 19 nt, Artificial Sequence
  Description of Artificial Sequence: Synthetic oligonucleotide
ccgguuacgcugccaguuc

SEQ ID NO: 1203311 - RNA, 19 nt, Artificial Sequence
  Description of Artificial Sequence: Synthetic oligonucleotide
ccgaguccugggcuaggag

SEQ ID NO: 1203312 - RNA, 19 nt, Artificial Sequence
  Description of Artificial Sequence: Synthetic oligonucleotide
cugcacugcuccugucuua

SEQ ID NO: 1203313 - RNA, 19 nt, Artificial Sequence
  Description of Artificial Sequence: Synthetic oligonucleotide
gggagcggaugagucgcug

SEQ ID NO: 1203314 - RNA, 19 nt, Artificial Sequence
  Description of Artificial Sequence: Synthetic oligonucleotide
gcgcugugaagaucccguc

SEQ ID NO: 1203315 - RNA, 19 nt, Artificial Sequence
  Description of Artificial Sequence: Synthetic oligonucleotide
ggucacacgcuagagccau

SEQ ID NO: 1203316 - RNA, 19 nt, Artificial Sequence
  Description of Artificial Sequence: Synthetic oligonucleotide
cuccugucuuagguguaaa

SEQ ID NO: 1203317 - RNA, 19 nt, Artificial Sequence
  Description of Artificial Sequence: Synthetic oligonucleotide
uguuggcggugaggcuggu

SEQ ID NO: 1203318 - RNA, 19 nt, Artificial Sequence
  Description of Artificial Sequence: Synthetic oligonucleotide
caguuccggucauugugau

SEQ ID NO: 1203319 - RNA, 19 nt, Artificial Sequence
  Description of Artificial Sequence: Synthetic oligonucleotide
caggcguccuccaguuggu

SEQ ID NO: 1203320 - RNA, 19 nt, Artificial Sequence
  Description of Artificial Sequence: Synthetic oligonucleotide
gggucacacgcuagagcca

SEQ ID NO: 1203321 - RNA, 19 nt, Artificial Sequence
  Description of Artificial Sequence: Synthetic oligonucleotide
acgcucgauaaugguccuu

SEQ ID NO: 1203322 - RNA, 19 nt, Artificial Sequence
  Description of Artificial Sequence: Synthetic oligonucleotide
guucucgauggagcaugcu

SEQ ID NO: 1203323 - RNA, 19 nt, Artificial Sequence
  Description of Artificial Sequence: Synthetic oligonucleotide
cggcagcuaugagucaggg

SEQ ID NO: 1203324 - RNA, 19 nt, Artificial Sequence
  Description of Artificial Sequence: Synthetic oligonucleotide
gucagggagcccugaucuu

SEQ ID NO: 1203325 - RNA, 19 nt, Artificial Sequence
  Description of Artificial Sequence: Synthetic oligonucleotide
cugaaccuaguggcagccu

SEQ ID NO: 1203326 - RNA, 19 nt, Artificial Sequence
  Description of Artificial Sequence: Synthetic oligonucleotide
guuggcggugaggcuggua

SEQ ID NO: 1203327 - RNA, 19 nt, Artificial Sequence
  Description of Artificial Sequence: Synthetic oligonucleotide
aggcguccuccaguugguu

SEQ ID NO: 1203328 - RNA, 19 nt, Artificial Sequence
  Description of Artificial Sequence: Synthetic oligonucleotide
gugcugggugguugaucgu

SEQ ID NO: 1203329 - RNA, 19 nt, Artificial Sequence
  Description of Artificial Sequence: Synthetic oligonucleotide
ggcaucaagcugucccguu

SEQ ID NO: 1203330 - RNA, 19 nt, Artificial Sequence
  Description of Artificial Sequence: Synthetic oligonucleotide
ggcagccuaaugccaguuu

SEQ ID NO: 1203331 - RNA, 19 nt, Artificial Sequence
  Description of Artificial Sequence: Synthetic oligonucleotide
cggaugagucgcuggagua

SEQ ID NO: 1203332 - RNA, 19 nt, Artificial Sequence
  Description of Artificial Sequence: Synthetic oligonucleotide
ggcgggagcugcgcuguga

SEQ ID NO: 1203333 - RNA, 19 nt, Artificial Sequence
  Description of Artificial Sequence: Synthetic oligonucleotide
cuagcugugcugggugguu

SEQ ID NO: 1203334 - RNA, 19 nt, Artificial Sequence
  Description of Artificial Sequence: Synthetic oligonucleotide
ccgcugugccugugccugc

SEQ ID NO: 1203335 - RNA, 19 nt, Artificial Sequence
  Description of Artificial Sequence: Synthetic oligonucleotide
gccgguuacgcugccaguu

SEQ ID NO: 1203336 - RNA, 19 nt, Artificial Sequence
  Description of Artificial Sequence: Synthetic oligonucleotide
ggccagcgaggucuuggcu

SEQ ID NO: 1203337 - RNA, 19 nt, Artificial Sequence
  Description of Artificial Sequence: Synthetic oligonucleotide
ccgagguguguuggcggug

SEQ ID NO: 1203338 - RNA, 19 nt, Artificial Sequence
  Description of Artificial Sequence: Synthetic oligonucleotide
gggcaucaagcugucccgu

SEQ ID NO: 1203339 - RNA, 19 nt, Artificial Sequence
  Description of Artificial Sequence: Synthetic oligonucleotide
gucacacgcuagagccaua

SEQ ID NO: 1203340 - RNA, 19 nt, Artificial Sequence
  Description of Artificial Sequence: Synthetic oligonucleotide
cccgagguguguuggcggu

SEQ ID NO: 1203341 - RNA, 19 nt, Artificial Sequence
  Description of Artificial Sequence: Synthetic oligonucleotide
ccugcacugcuccugucuu

SEQ ID NO: 1203342 - RNA, 19 nt, Artificial Sequence
  Description of Artificial Sequence: Synthetic oligonucleotide
ggccgguuacgcugccagu

SEQ ID NO: 1203343 - RNA, 19 nt, Artificial Sequence
  Description of Artificial Sequence: Synthetic oligonucleotide
gcucgaaaaugcgcucaau

SEQ ID NO: 1203344 - RNA, 19 nt, Artificial Sequence
  Description of Artificial Sequence: Synthetic oligonucleotide
cgcucgauaaugguccuuu

SEQ ID NO: 1203345 - RNA, 19 nt, Artificial Sequence
  Description of Artificial Sequence: Synthetic oligonucleotide
ccucaccugcacugcuccu

SEQ ID NO: 1203346 - RNA, 19 nt, Artificial Sequence
  Description of Artificial Sequence: Synthetic oligonucleotide
ccuuaggccaaggccgguu

SEQ ID NO: 1203347 - RNA, 19 nt, Artificial Sequence
  Description of Artificial Sequence: Synthetic oligonucleotide
gcugccaguuccggucauu

SEQ ID NO: 1203348 - RNA, 19 nt, Artificial Sequence
  Description of Artificial Sequence: Synthetic oligonucleotide
gcucgccaguaaaccucua

SEQ ID NO: 1203349 - RNA, 19 nt, Artificial Sequence
  Description of Artificial Sequence: Synthetic oligonucleotide
gggcagccccgaggugugu

SEQ ID NO: 1203350 - RNA, 19 nt, Artificial Sequence
  Description of Artificial Sequence: Synthetic oligonucleotide
cgggagcggaugagucgcu

SEQ ID NO: 1203351 - RNA, 19 nt, Artificial Sequence
  Description of Artificial Sequence: Synthetic oligonucleotide
aacacagucaacuuuuggc

SEQ ID NO: 1203352 - RNA, 19 nt, Artificial Sequence
  Description of Artificial Sequence: Synthetic oligonucleotide
agaacagucagucacaaag

SEQ ID NO: 1203353 - RNA, 19 nt, Artificial Sequence
  Description of Artificial Sequence: Synthetic oligonucleotide
auagaagucuaguugaaac

SEQ ID NO: 1203354 - RNA, 19 nt, Artificial Sequence
  Description of Artificial Sequence: Synthetic oligonucleotide
cucaauaaguagaaaagcg

SEQ ID NO: 1203355 - RNA, 19 nt, Artificial Sequence
  Description of Artificial Sequence: Synthetic oligonucleotide
gaagugguaaugcugauag

SEQ ID NO: 1203356 - RNA, 19 nt, Artificial Sequence
  Description of Artificial Sequence: Synthetic oligonucleotide
ucauguaggacaaggagcc

SEQ ID NO: 1203357 - RNA, 19 nt, Artificial Sequence
  Description of Artificial Sequence: Synthetic oligonucleotide
uuuucgaucacugucaugu

SEQ ID NO: 1203358 - RNA, 19 nt, Artificial Sequence
  Description of Artificial Sequence: Synthetic oligonucleotide
uucgguacagggaagaacc

SEQ ID NO: 1203359 - RNA, 19 nt, Artificial Sequence
  Description of Artificial Sequence: Synthetic oligonucleotide
aguagaaaagcgaugaagg

SEQ ID NO: 1203360 - RNA, 19 nt, Artificial Sequence
  Description of Artificial Sequence: Synthetic oligonucleotide
gguuaagcaacacagagag

SEQ ID NO: 1203361 - RNA, 19 nt, Artificial Sequence
  Description of Artificial Sequence: Synthetic oligonucleotide
acggucauaauucucuccc

SEQ ID NO: 1203362 - RNA, 19 nt, Artificial Sequence
  Description of Artificial Sequence: Synthetic oligonucleotide
agcaagggaaaguaagugc

SEQ ID NO: 1203363 - RNA, 19 nt, Artificial Sequence
  Description of Artificial Sequence: Synthetic oligonucleotide
aacucaauaaguagaaaag

SEQ ID NO: 1203364 - RNA, 19 nt, Artificial Sequence
  Description of Artificial Sequence: Synthetic oligonucleotide
augacggcagaacauauac

SEQ ID NO: 1203365 - RNA, 19 nt, Artificial Sequence
  Description of Artificial Sequence: Synthetic oligonucleotide
gaacacaaugcccaguggg

SEQ ID NO: 1203366 - RNA, 19 nt, Artificial Sequence
  Description of Artificial Sequence: Synthetic oligonucleotide
guagcaauucgguacaggg

SEQ ID NO: 1203367 - RNA, 19 nt, Artificial Sequence
  Description of Artificial Sequence: Synthetic oligonucleotide
uuucgaagggccaaggccc

SEQ ID NO: 1203368 - RNA, 19 nt, Artificial Sequence
  Description of Artificial Sequence: Synthetic oligonucleotide
ugucauguaggacaaggag

SEQ ID NO: 1203369 - RNA, 19 nt, Artificial Sequence
  Description of Artificial Sequence: Synthetic oligonucleotide
aucuugacaauuccaggcc

SEQ ID NO: 1203370 - RNA, 19 nt, Artificial Sequence
  Description of Artificial Sequence: Synthetic oligonucleotide
aacauauuccuagugcccg

SEQ ID NO: 1203371 - RNA, 19 nt, Artificial Sequence
  Description of Artificial Sequence: Synthetic oligonucleotide
aaucugacccuccaagaag

SEQ ID NO: 1203372 - RNA, 19 nt, Artificial Sequence
  Description of Artificial Sequence: Synthetic oligonucleotide
agcuggagaacacaaugcc

SEQ ID NO: 1203373 - RNA, 19 nt, Artificial Sequence
  Description of Artificial Sequence: Synthetic oligonucleotide
acggcggucagacagaagg

SEQ ID NO: 1203374 - RNA, 19 nt, Artificial Sequence
  Description of Artificial Sequence: Synthetic oligonucleotide
auauacugaacauauuccu

SEQ ID NO: 1203375 - RNA, 19 nt, Artificial Sequence
  Description of Artificial Sequence: Synthetic oligonucleotide
aaacguagaggauagcaau

SEQ ID NO: 1203376 - RNA, 19 nt, Artificial Sequence
  Description of Artificial Sequence: Synthetic oligonucleotide
ugauagaguuuauauaggu

SEQ ID NO: 1203377 - RNA, 19 nt, Artificial Sequence
  Description of Artificial Sequence: Synthetic oligonucleotide
acagucaacuuuuggcacc

SEQ ID NO: 1203378 - RNA, 19 nt, Artificial Sequence
  Description of Artificial Sequence: Synthetic oligonucleotide
guaagugagggagaaaagg

SEQ ID NO: 1203379 - RNA, 19 nt, Artificial Sequence
  Description of Artificial Sequence: Synthetic oligonucleotide
aaggccacaaacguagagg

SEQ ID NO: 1203380 - RNA, 19 nt, Artificial Sequence
  Description of Artificial Sequence: Synthetic oligonucleotide
aauaaguagaaaagcgaug

SEQ ID NO: 1203381 - RNA, 19 nt, Artificial Sequence
  Description of Artificial Sequence: Synthetic oligonucleotide
cuucgaaggaagcucaugc

SEQ ID NO: 1203382 - RNA, 19 nt, Artificial Sequence
  Description of Artificial Sequence: Synthetic oligonucleotide
aaagcgaugaaggauucca

SEQ ID NO: 1203383 - RNA, 19 nt, Artificial Sequence
  Description of Artificial Sequence: Synthetic oligonucleotide
uuauacagcaaggggaaag

SEQ ID NO: 1203384 - RNA, 19 nt, Artificial Sequence
  Description of Artificial Sequence: Synthetic oligonucleotide
ugcucauggauguaccagg

SEQ ID NO: 1203385 - RNA, 19 nt, Artificial Sequence
  Description of Artificial Sequence: Synthetic oligonucleotide
cuuggagguagcaauucgg

SEQ ID NO: 1203386 - RNA, 19 nt, Artificial Sequence
  Description of Artificial Sequence: Synthetic oligonucleotide
agaguuuauauagguaggg

SEQ ID NO: 1203387 - RNA, 19 nt, Artificial Sequence
  Description of Artificial Sequence: Synthetic oligonucleotide
ucgaaggaagcucaugcug

SEQ ID NO: 1203388 - RNA, 19 nt, Artificial Sequence
  Description of Artificial Sequence: Synthetic oligonucleotide
guuucgaagggccaaggcc

SEQ ID NO: 1203389 - RNA, 19 nt, Artificial Sequence
  Description of Artificial Sequence: Synthetic oligonucleotide
aguuucgaagggccaaggc

SEQ ID NO: 1203390 - RNA, 19 nt, Artificial Sequence
  Description of Artificial Sequence: Synthetic oligonucleotide
cugauagaguuuauauagg

SEQ ID NO: 1203391 - RNA, 19 nt, Artificial Sequence
  Description of Artificial Sequence: Synthetic oligonucleotide
ucuugacaauuccaggccc

SEQ ID NO: 1203392 - RNA, 19 nt, Artificial Sequence
  Description of Artificial Sequence: Synthetic oligonucleotide
aaaaggacacaagacuucu

SEQ ID NO: 1203393 - RNA, 19 nt, Artificial Sequence
  Description of Artificial Sequence: Synthetic oligonucleotide
gaguuuauauagguagggg

SEQ ID NO: 1203394 - RNA, 19 nt, Artificial Sequence
  Description of Artificial Sequence: Synthetic oligonucleotide
agaaaguagacuugauaga

SEQ ID NO: 1203395 - RNA, 19 nt, Artificial Sequence
  Description of Artificial Sequence: Synthetic oligonucleotide
uuuggcaccuuuccagucc

SEQ ID NO: 1203396 - RNA, 19 nt, Artificial Sequence
  Description of Artificial Sequence: Synthetic oligonucleotide
agaagucuaguugaaacug

SEQ ID NO: 1203397 - RNA, 19 nt, Artificial Sequence
  Description of Artificial Sequence: Synthetic oligonucleotide
ucggggaucacuuuucuuc

SEQ ID NO: 1203398 - RNA, 19 nt, Artificial Sequence
  Description of Artificial Sequence: Synthetic oligonucleotide
gagaauaggagagcaguag

SEQ ID NO: 1203399 - RNA, 19 nt, Artificial Sequence
  Description of Artificial Sequence: Synthetic oligonucleotide
ugguuaagcaacacagaga

SEQ ID NO: 1203400 - RNA, 19 nt, Artificial Sequence
  Description of Artificial Sequence: Synthetic oligonucleotide
aaaguagacuugauagaag

SEQ ID NO: 1203401 - RNA, 19 nt, Artificial Sequence
  Description of Artificial Sequence: Synthetic oligonucleotide
aagucauacagguggguaa

SEQ ID NO: 1203402 - RNA, 19 nt, Artificial Sequence
  Description of Artificial Sequence: Synthetic oligonucleotide
agaauaggagagcaguaga

SEQ ID NO: 1203403 - RNA, 19 nt, Artificial Sequence
  Description of Artificial Sequence: Synthetic oligonucleotide
aacguagaggauagcaauc

SEQ ID NO: 1203404 - RNA, 19 nt, Artificial Sequence
  Description of Artificial Sequence: Synthetic oligonucleotide
gguaagugagauucaagag

SEQ ID NO: 1203405 - RNA, 19 nt, Artificial Sequence
  Description of Artificial Sequence: Synthetic oligonucleotide
ucaugucugaccaccguga

SEQ ID NO: 1203406 - RNA, 19 nt, Artificial Sequence
  Description of Artificial Sequence: Synthetic oligonucleotide
caacucaauaaguagaaaa

SEQ ID NO: 1203407 - RNA, 19 nt, Artificial Sequence
  Description of Artificial Sequence: Synthetic oligonucleotide
uucccaauacaaagcacug

SEQ ID NO: 1203408 - RNA, 19 nt, Artificial Sequence
  Description of Artificial Sequence: Synthetic oligonucleotide
agacaaauaggcagucacc

SEQ ID NO: 1203409 - RNA, 19 nt, Artificial Sequence
  Description of Artificial Sequence: Synthetic oligonucleotide
acaaacguagaggauagca

SEQ ID NO: 1203410 - RNA, 19 nt, Artificial Sequence
  Description of Artificial Sequence: Synthetic oligonucleotide
gagagcuugguuaagcaac

SEQ ID NO: 1203411 - RNA, 19 nt, Artificial Sequence
  Description of Artificial Sequence: Synthetic oligonucleotide
aggugguaccucuuggagg

SEQ ID NO: 1203412 - RNA, 19 nt, Artificial Sequence
  Description of Artificial Sequence: Synthetic oligonucleotide
aauucucuccccaguuucg

SEQ ID NO: 1203413 - RNA, 19 nt, Artificial Sequence
  Description of Artificial Sequence: Synthetic oligonucleotide
cacgggauuuucuuggccc

SEQ ID NO: 1203414 - RNA, 19 nt, Artificial Sequence
  Description of Artificial Sequence: Synthetic oligonucleotide
augcugauagaguuuauau

SEQ ID NO: 1203415 - RNA, 19 nt, Artificial Sequence
  Description of Artificial Sequence: Synthetic oligonucleotide
ggagguagcaauucgguac

SEQ ID NO: 1203416 - RNA, 19 nt, Artificial Sequence
  Description of Artificial Sequence: Synthetic oligonucleotide
aaagggugcuacagguccc

SEQ ID NO: 1203417 - RNA, 19 nt, Artificial Sequence
  Description of Artificial Sequence: Synthetic oligonucleotide
accaguugagaaccccagc

SEQ ID NO: 1203418 - RNA, 19 nt, Artificial Sequence
  Description of Artificial Sequence: Synthetic oligonucleotide
agggccagaaaguagacuu

SEQ ID NO: 1203419 - RNA, 19 nt, Artificial Sequence
  Description of Artificial Sequence: Synthetic oligonucleotide
auacagguggguaagugag

SEQ ID NO: 1203420 - RNA, 19 nt, Artificial Sequence
  Description of Artificial Sequence: Synthetic oligonucleotide
gcuugguuaagcaacacag

SEQ ID NO: 1203421 - RNA, 19 nt, Artificial Sequence
  Description of Artificial Sequence: Synthetic oligonucleotide
uggguaagugagauucaag

SEQ ID NO: 1203422 - RNA, 19 nt, Artificial Sequence
  Description of Artificial Sequence: Synthetic oligonucleotide
uccaagaagugguaaugcu

SEQ ID NO: 1203423 - RNA, 19 nt, Artificial Sequence
  Description of Artificial Sequence: Synthetic oligonucleotide
gaguaagugagggagaaaa

SEQ ID NO: 1203424 - RNA, 19 nt, Artificial Sequence
  Description of Artificial Sequence: Synthetic oligonucleotide
gaauaggagagcaguagac

SEQ ID NO: 1203425 - RNA, 19 nt, Artificial Sequence
  Description of Artificial Sequence: Synthetic oligonucleotide
cccacaaaagacaaauagg

SEQ ID NO: 1203426 - RNA, 19 nt, Artificial Sequence
  Description of Artificial Sequence: Synthetic oligonucleotide
gaacauauuccuagugccc

SEQ ID NO: 1203427 - RNA, 19 nt, Artificial Sequence
  Description of Artificial Sequence: Synthetic oligonucleotide
aucaugucugaccaccgug

SEQ ID NO: 1203428 - RNA, 19 nt, Artificial Sequence
  Description of Artificial Sequence: Synthetic oligonucleotide
ucucuccccaguuucgaag

SEQ ID NO: 1203429 - RNA, 19 nt, Artificial Sequence
  Description of Artificial Sequence: Synthetic oligonucleotide
ucggcaucuugacaauucc

SEQ ID NO: 1203430 - RNA, 19 nt, Artificial Sequence
  Description of Artificial Sequence: Synthetic oligonucleotide
auucgguacagggaagaac

SEQ ID NO: 1203431 - RNA, 19 nt, Artificial Sequence
  Description of Artificial Sequence: Synthetic oligonucleotide
acuugauagaagucuaguu

SEQ ID NO: 1203432 - RNA, 19 nt, Artificial Sequence
  Description of Artificial Sequence: Synthetic oligonucleotide
ugagagagcuugguuaagc

SEQ ID NO: 1203433 - RNA, 19 nt, Artificial Sequence
  Description of Artificial Sequence: Synthetic oligonucleotide
caaagaggacuguggaggc

SEQ ID NO: 1203434 - RNA, 19 nt, Artificial Sequence
  Description of Artificial Sequence: Synthetic oligonucleotide
guagaaaagcgaugaagga

SEQ ID NO: 1203435 - RNA, 19 nt, Artificial Sequence
  Description of Artificial Sequence: Synthetic oligonucleotide
cauggguugaaggugguac

SEQ ID NO: 1203436 - RNA, 19 nt, Artificial Sequence
  Description of Artificial Sequence: Synthetic oligonucleotide
ugagaauaggagagcagua

SEQ ID NO: 1203437 - RNA, 19 nt, Artificial Sequence
  Description of Artificial Sequence: Synthetic oligonucleotide
agaaaagcgaugaaggauu

SEQ ID NO: 1203438 - RNA, 19 nt, Artificial Sequence
  Description of Artificial Sequence: Synthetic oligonucleotide
ggugcuacaggucccagcc

SEQ ID NO: 1203439 - RNA, 19 nt, Artificial Sequence
  Description of Artificial Sequence: Synthetic oligonucleotide
ggaaaguagagcccacagg

SEQ ID NO: 1203440 - RNA, 19 nt, Artificial Sequence
  Description of Artificial Sequence: Synthetic oligonucleotide
aaagucauacaggugggua

SEQ ID NO: 1203441 - RNA, 19 nt, Artificial Sequence
  Description of Artificial Sequence: Synthetic oligonucleotide
ugauagaagucuaguugaa

SEQ ID NO: 1203442 - RNA, 19 nt, Artificial Sequence
  Description of Artificial Sequence: Synthetic oligonucleotide
agcacaaaguagucuugag

SEQ ID NO: 1203443 - RNA, 19 nt, Artificial Sequence
  Description of Artificial Sequence: Synthetic oligonucleotide
uggcucggcaucuugacaa

SEQ ID NO: 1203444 - RNA, 19 nt, Artificial Sequence
  Description of Artificial Sequence: Synthetic oligonucleotide
cucggaaccaguugagaac

SEQ ID NO: 1203445 - RNA, 19 nt, Artificial Sequence
  Description of Artificial Sequence: Synthetic oligonucleotide
cucuccccaguuucgaagg

SEQ ID NO: 1203446 - RNA, 19 nt, Artificial Sequence
  Description of Artificial Sequence: Synthetic oligonucleotide
gacggucauaauucucucc

SEQ ID NO: 1203447 - RNA, 19 nt, Artificial Sequence
  Description of Artificial Sequence: Synthetic oligonucleotide
gcgaugaaggauuccacgg

SEQ ID NO: 1203448 - RNA, 19 nt, Artificial Sequence
  Description of Artificial Sequence: Synthetic oligonucleotide
uucgaaggaagcucaugcu

SEQ ID NO: 1203449 - RNA, 19 nt, Artificial Sequence
  Description of Artificial Sequence: Synthetic oligonucleotide
acgggauuuucuuggcccg

SEQ ID NO: 1203450 - RNA, 19 nt, Artificial Sequence
  Description of Artificial Sequence: Synthetic oligonucleotide
ugguagagaaagucaacau

SEQ ID NO: 1203451 - RNA, 19 nt, Artificial Sequence
  Description of Artificial Sequence: Synthetic oligonucleotide
cuuacgacccagccagucc

SEQ ID NO: 1203452 - RNA, 19 nt, Artificial Sequence
  Description of Artificial Sequence: Synthetic oligonucleotide
acuaacacagucaacuuuu

SEQ ID NO: 1203453 - RNA, 19 nt, Artificial Sequence
  Description of Artificial Sequence: Synthetic oligonucleotide
gaagcucaugcugggaaag

SEQ ID NO: 1203454 - RNA, 19 nt, Artificial Sequence
  Description of Artificial Sequence: Synthetic oligonucleotide
gagauucaagaguccauuc

SEQ ID NO: 1203455 - RNA, 19 nt, Artificial Sequence
  Description of Artificial Sequence: Synthetic oligonucleotide
ggaagaacccagcaggcug

SEQ ID NO: 1203456 - RNA, 19 nt, Artificial Sequence
  Description of Artificial Sequence: Synthetic oligonucleotide
aguaagugcaggggcacuc

SEQ ID NO: 1203457 - RNA, 19 nt, Artificial Sequence
  Description of Artificial Sequence: Synthetic oligonucleotide
acgcugacggucauaauuc

SEQ ID NO: 1203458 - RNA, 19 nt, Artificial Sequence
  Description of Artificial Sequence: Synthetic oligonucleotide
agcagcaacacacggcggu

SEQ ID NO: 1203459 - RNA, 19 nt, Artificial Sequence
  Description of Artificial Sequence: Synthetic oligonucleotide
ggaaaggacuaacacaguc

SEQ ID NO: 1203460 - RNA, 19 nt, Artificial Sequence
  Description of Artificial Sequence: Synthetic oligonucleotide
agcuugguuaagcaacaca

SEQ ID NO: 1203461 - RNA, 19 nt, Artificial Sequence
  Description of Artificial Sequence: Synthetic oligonucleotide
agcgcaagccuccagcaca

SEQ ID NO: 1203462 - RNA, 19 nt, Artificial Sequence
  Description of Artificial Sequence: Synthetic oligonucleotide
ucuuggcccgggcugguag

SEQ ID NO: 1203463 - RNA, 19 nt, Artificial Sequence
  Description of Artificial Sequence: Synthetic oligonucleotide
agucauacagguggguaag

SEQ ID NO: 1203464 - RNA, 19 nt, Artificial Sequence
  Description of Artificial Sequence: Synthetic oligonucleotide
ugagauucaagaguccauu

SEQ ID NO: 1203465 - RNA, 19 nt, Artificial Sequence
  Description of Artificial Sequence: Synthetic oligonucleotide
ggcaaggccacaaacguag

SEQ ID NO: 1203466 - RNA, 19 nt, Artificial Sequence
  Description of Artificial Sequence: Synthetic oligonucleotide
gagguagcaauucgguaca

SEQ ID NO: 1203467 - RNA, 19 nt, Artificial Sequence
  Description of Artificial Sequence: Synthetic oligonucleotide
gaaggugguaccucuugga

SEQ ID NO: 1203468 - RNA, 19 nt, Artificial Sequence
  Description of Artificial Sequence: Synthetic oligonucleotide
gagagagcuugguuaagca

SEQ ID NO: 1203469 - RNA, 19 nt, Artificial Sequence
  Description of Artificial Sequence: Synthetic oligonucleotide
gauagaguuuauauaggua

SEQ ID NO: 1203470 - RNA, 19 nt, Artificial Sequence
  Description of Artificial Sequence: Synthetic oligonucleotide
aaccccagccugcucuguc

SEQ ID NO: 1203471 - RNA, 19 nt, Artificial Sequence
  Description of Artificial Sequence: Synthetic oligonucleotide
ggcaucuugacaauuccag

SEQ ID NO: 1203472 - RNA, 19 nt, Artificial Sequence
  Description of Artificial Sequence: Synthetic oligonucleotide
cucaaaggcugagaauagg

SEQ ID NO: 1203473 - RNA, 19 nt, Artificial Sequence
  Description of Artificial Sequence: Synthetic oligonucleotide
acagggcuuguaugaugcc

SEQ ID NO: 1203474 - RNA, 19 nt, Artificial Sequence
  Description of Artificial Sequence: Synthetic oligonucleotide
ugaaggauuccacgggauu

SEQ ID NO: 1203475 - RNA, 19 nt, Artificial Sequence
  Description of Artificial Sequence: Synthetic oligonucleotide
ucuccccaguuucgaaggg

SEQ ID NO: 1203476 - RNA, 19 nt, Artificial Sequence
  Description of Artificial Sequence: Synthetic oligonucleotide
aguaagugagggagaaaag

SEQ ID NO: 1203477 - RNA, 19 nt, Artificial Sequence
  Description of Artificial Sequence: Synthetic oligonucleotide
aggagggguugcugcaagc

SEQ ID NO: 1203478 - RNA, 19 nt, Artificial Sequence
  Description of Artificial Sequence: Synthetic oligonucleotide
gacacguccggcaccaggc

SEQ ID NO: 1203479 - RNA, 19 nt, Artificial Sequence
  Description of Artificial Sequence: Synthetic oligonucleotide
cucggcagggaagucaugc

SEQ ID NO: 1203480 - RNA, 19 nt, Artificial Sequence
  Description of Artificial Sequence: Synthetic oligonucleotide
cuugagagagcuugguuaa

SEQ ID NO: 1203481 - RNA, 19 nt, Artificial Sequence
  Description of Artificial Sequence: Synthetic oligonucleotide
ugacggcagaacauauacu

SEQ ID NO: 1203482 - RNA, 19 nt, Artificial Sequence
  Description of Artificial Sequence: Synthetic oligonucleotide
cauggauguaccaggccuc

SEQ ID NO: 1203483 - RNA, 19 nt, Artificial Sequence
  Description of Artificial Sequence: Synthetic oligonucleotide
caaacguagaggauagcaa

SEQ ID NO: 1203484 - RNA, 19 nt, Artificial Sequence
  Description of Artificial Sequence: Synthetic oligonucleotide
ccaguugagaaccccagcc

SEQ ID NO: 1203485 - RNA, 19 nt, Artificial Sequence
  Description of Artificial Sequence: Synthetic oligonucleotide
gauagcaaucugacccucc

SEQ ID NO: 1203486 - RNA, 19 nt, Artificial Sequence
  Description of Artificial Sequence: Synthetic oligonucleotide
ugacacucucaaacagggc

SEQ ID NO: 1203487 - RNA, 19 nt, Artificial Sequence
  Description of Artificial Sequence: Synthetic oligonucleotide
uucgaagggccaaggcccc

SEQ ID NO: 1203488 - RNA, 19 nt, Artificial Sequence
  Description of Artificial Sequence: Synthetic oligonucleotide
gaagucuaguugaaacuga

SEQ ID NO: 1203489 - RNA, 19 nt, Artificial Sequence
  Description of Artificial Sequence: Synthetic oligonucleotide
cucggcaucuugacaauuc

SEQ ID NO: 1203490 - RNA, 19 nt, Artificial Sequence
  Description of Artificial Sequence: Synthetic oligonucleotide
caaggccacaaacguagag

SEQ ID NO: 1203491 - RNA, 19 nt, Artificial Sequence
  Description of Artificial Sequence: Synthetic oligonucleotide
acguagaggauagcaaucu

SEQ ID NO: 1203492 - RNA, 19 nt, Artificial Sequence
  Description of Artificial Sequence: Synthetic oligonucleotide
ucgguacagggaagaaccc

SEQ ID NO: 1203493 - RNA, 19 nt, Artificial Sequence
  Description of Artificial Sequence: Synthetic oligonucleotide
ucuucgaaggaagcucaug

SEQ ID NO: 1203494 - RNA, 19 nt, Artificial Sequence
  Description of Artificial Sequence: Synthetic oligonucleotide
aagugguaaugcugauaga

SEQ ID NO: 1203495 - RNA, 19 nt, Artificial Sequence
  Description of Artificial Sequence: Synthetic oligonucleotide
agcaguagacagcccacca

SEQ ID NO: 1203496 - RNA, 19 nt, Artificial Sequence
  Description of Artificial Sequence: Synthetic oligonucleotide
cuuggcucggcaucuugac

SEQ ID NO: 1203497 - RNA, 19 nt, Artificial Sequence
  Description of Artificial Sequence: Synthetic oligonucleotide
gguagcugggauccacucg

SEQ ID NO: 1203498 - RNA, 19 nt, Artificial Sequence
  Description of Artificial Sequence: Synthetic oligonucleotide
acacguccggcaccaggcc

SEQ ID NO: 1203499 - RNA, 19 nt, Artificial Sequence
  Description of Artificial Sequence: Synthetic oligonucleotide
gaaaguaagugcauggguu

SEQ ID NO: 1203500 - RNA, 19 nt, Artificial Sequence
  Description of Artificial Sequence: Synthetic oligonucleotide
cccuagacaggcuaguaag

SEQ ID NO: 1203501 - RNA, 19 nt, Artificial Sequence
  Description of Artificial Sequence: Synthetic oligonucleotide
acagucagucacaaaguca

SEQ ID NO: 1203502 - RNA, 19 nt, Artificial Sequence
  Description of Artificial Sequence: Synthetic oligonucleotide
ugguaccucuuggagguag

SEQ ID NO: 1203503 - RNA, 19 nt, Artificial Sequence
  Description of Artificial Sequence: Synthetic oligonucleotide
gauagaagucuaguugaaa

SEQ ID NO: 1203504 - RNA, 19 nt, Artificial Sequence
  Description of Artificial Sequence: Synthetic oligonucleotide
caacacacggcggucagac

SEQ ID NO: 1203505 - RNA, 19 nt, Artificial Sequence
  Description of Artificial Sequence: Synthetic oligonucleotide
ugucucggggaucacuuuu

SEQ ID NO: 1203506 - RNA, 19 nt, Artificial Sequence
  Description of Artificial Sequence: Synthetic oligonucleotide
aauaggcagucaccagcau

SEQ ID NO: 1203507 - RNA, 19 nt, Artificial Sequence
  Description of Artificial Sequence: Synthetic oligonucleotide
ggaucacuuuucuucgaag

SEQ ID NO: 1203508 - RNA, 19 nt, Artificial Sequence
  Description of Artificial Sequence: Synthetic oligonucleotide
aagucaacaugaagagaga

SEQ ID NO: 1203509 - RNA, 19 nt, Artificial Sequence
  Description of Artificial Sequence: Synthetic oligonucleotide
acaaagggugcuacagguc

SEQ ID NO: 1203510 - RNA, 19 nt, Artificial Sequence
  Description of Artificial Sequence: Synthetic oligonucleotide
guaagugcaggggcacucg

SEQ ID NO: 1203511 - RNA, 19 nt, Artificial Sequence
  Description of Artificial Sequence: Synthetic oligonucleotide
ugcggggacgcuccggaca

SEQ ID NO: 1203512 - RNA, 19 nt, Artificial Sequence
  Description of Artificial Sequence: Synthetic oligonucleotide
gaaaagcgaugaaggauuc

SEQ ID NO: 1203513 - RNA, 19 nt, Artificial Sequence
  Description of Artificial Sequence: Synthetic oligonucleotide
ucggcagggaagucaugcc

SEQ ID NO: 1203514 - RNA, 19 nt, Artificial Sequence
  Description of Artificial Sequence: Synthetic oligonucleotide
cugacggucauaauucucu

SEQ ID NO: 1203515 - RNA, 19 nt, Artificial Sequence
  Description of Artificial Sequence: Synthetic oligonucleotide
gagccagucugcugccagg

SEQ ID NO: 1203516 - RNA, 19 nt, Artificial Sequence
  Description of Artificial Sequence: Synthetic oligonucleotide
uccacgggauuuucuuggc

SEQ ID NO: 1203517 - RNA, 19 nt, Artificial Sequence
  Description of Artificial Sequence: Synthetic oligonucleotide
aauucgguacagggaagaa

SEQ ID NO: 1203518 - RNA, 19 nt, Artificial Sequence
  Description of Artificial Sequence: Synthetic oligonucleotide
acuguggaggcaaggccac

SEQ ID NO: 1203519 - RNA, 19 nt, Artificial Sequence
  Description of Artificial Sequence: Synthetic oligonucleotide
caaggggaaaggacuaaca

SEQ ID NO: 1203520 - RNA, 19 nt, Artificial Sequence
  Description of Artificial Sequence: Synthetic oligonucleotide
gagaguaagugagggagaa

SEQ ID NO: 1203521 - RNA, 19 nt, Artificial Sequence
  Description of Artificial Sequence: Synthetic oligonucleotide
ugacggucauaauucucuc

SEQ ID NO: 1203522 - RNA, 19 nt, Artificial Sequence
  Description of Artificial Sequence: Synthetic oligonucleotide
gcaccuuuccaguccaucc

SEQ ID NO: 1203523 - RNA, 19 nt, Artificial Sequence
  Description of Artificial Sequence: Synthetic oligonucleotide
ccacaaacguagaggauag

SEQ ID NO: 1203524 - RNA, 19 nt, Artificial Sequence
  Description of Artificial Sequence: Synthetic oligonucleotide
gacgcuccggacacguccg

SEQ ID NO: 1203525 - RNA, 19 nt, Artificial Sequence
  Description of Artificial Sequence: Synthetic oligonucleotide
gaggacuguggaggcaagg

SEQ ID NO: 1203526 - RNA, 19 nt, Artificial Sequence
  Description of Artificial Sequence: Synthetic oligonucleotide
agagcuugguuaagcaaca

SEQ ID NO: 1203527 - RNA, 19 nt, Artificial Sequence
  Description of Artificial Sequence: Synthetic oligonucleotide
cacaaagggugcuacaggu

SEQ ID NO: 1203528 - RNA, 19 nt, Artificial Sequence
  Description of Artificial Sequence: Synthetic oligonucleotide
caggccaacucaauaagua

SEQ ID NO: 1203529 - RNA, 19 nt, Artificial Sequence
  Description of Artificial Sequence: Synthetic oligonucleotide
ucuuacgacccagccaguc

SEQ ID NO: 1203530 - RNA, 19 nt, Artificial Sequence
  Description of Artificial Sequence: Synthetic oligonucleotide
gcacaaaguagucuugaga

SEQ ID NO: 1203531 - RNA, 19 nt, Artificial Sequence
  Description of Artificial Sequence: Synthetic oligonucleotide
ggcacucggaaccaguuga

SEQ ID NO: 1203532 - RNA, 19 nt, Artificial Sequence
  Description of Artificial Sequence: Synthetic oligonucleotide
ggugguaccucuuggaggu

SEQ ID NO: 1203533 - RNA, 19 nt, Artificial Sequence
  Description of Artificial Sequence: Synthetic oligonucleotide
uugagaaccccagccugcu

SEQ ID NO: 1203534 - RNA, 19 nt, Artificial Sequence
  Description of Artificial Sequence: Synthetic oligonucleotide
agccagucugcugccaggg

SEQ ID NO: 1203535 - RNA, 19 nt, Artificial Sequence
  Description of Artificial Sequence: Synthetic oligonucleotide
gacuaacacagucaacuuu

SEQ ID NO: 1203536 - RNA, 19 nt, Artificial Sequence
  Description of Artificial Sequence: Synthetic oligonucleotide
ggacgcuccggacacgucc

SEQ ID NO: 1203537 - RNA, 19 nt, Artificial Sequence
  Description of Artificial Sequence: Synthetic oligonucleotide
ucugaccaccgugaagagu

SEQ ID NO: 1203538 - RNA, 19 nt, Artificial Sequence
  Description of Artificial Sequence: Synthetic oligonucleotide
uagcaaucugacccuccaa

SEQ ID NO: 1203539 - RNA, 19 nt, Artificial Sequence
  Description of Artificial Sequence: Synthetic oligonucleotide
aagggugcuacagguccca

SEQ ID NO: 1203540 - RNA, 19 nt, Artificial Sequence
  Description of Artificial Sequence: Synthetic oligonucleotide
aacacacggcggucagaca

SEQ ID NO: 1203541 - RNA, 19 nt, Artificial Sequence
  Description of Artificial Sequence: Synthetic oligonucleotide
gagcaguagacagcccacc

SEQ ID NO: 1203542 - RNA, 19 nt, Artificial Sequence
  Description of Artificial Sequence: Synthetic oligonucleotide
ugggauccacucggcaggg

SEQ ID NO: 1203543 - RNA, 19 nt, Artificial Sequence
  Description of Artificial Sequence: Synthetic oligonucleotide
agagaguaagugagggaga

SEQ ID NO: 1203544 - RNA, 19 nt, Artificial Sequence
  Description of Artificial Sequence: Synthetic oligonucleotide
cacguccggcaccaggccg

SEQ ID NO: 1203545 - RNA, 19 nt, Artificial Sequence
  Description of Artificial Sequence: Synthetic oligonucleotide
auacagcaaggggaaagga

SEQ ID NO: 1203546 - RNA, 19 nt, Artificial Sequence
  Description of Artificial Sequence: Synthetic oligonucleotide
cugaaggaaggagggguug

SEQ ID NO: 1203547 - RNA, 19 nt, Artificial Sequence
  Description of Artificial Sequence: Synthetic oligonucleotide
acaggccaacucaauaagu

SEQ ID NO: 1203548 - RNA, 19 nt, Artificial Sequence
  Description of Artificial Sequence: Synthetic oligonucleotide
uucuucgaaggaagcucau

SEQ ID NO: 1203549 - RNA, 19 nt, Artificial Sequence
  Description of Artificial Sequence: Synthetic oligonucleotide
uuucgaucacugucaugua

SEQ ID NO: 1203550 - RNA, 19 nt, Artificial Sequence
  Description of Artificial Sequence: Synthetic oligonucleotide
caauucgguacagggaaga

SEQ ID NO: 1203551 - RNA, 19 nt, Artificial Sequence
  Description of Artificial Sequence: Synthetic oligonucleotide
aggagcccuagacaggcua

SEQ ID NO: 1203552 - RNA, 19 nt, Artificial Sequence
  Description of Artificial Sequence: Synthetic oligonucleotide
caguuucgaagggccaagg

SEQ ID NO: 1203553 - RNA, 19 nt, Artificial Sequence
  Description of Artificial Sequence: Synthetic oligonucleotide
gguugcugcaagcccuucc

SEQ ID NO: 1203554 - RNA, 19 nt, Artificial Sequence
  Description of Artificial Sequence: Synthetic oligonucleotide
cucuuggagguagcaauuc

SEQ ID NO: 1203555 - RNA, 19 nt, Artificial Sequence
  Description of Artificial Sequence: Synthetic oligonucleotide
gcacccgcaacucagcauc

SEQ ID NO: 1203556 - RNA, 19 nt, Artificial Sequence
  Description of Artificial Sequence: Synthetic oligonucleotide
ggacacguccggcaccagg

SEQ ID NO: 1203557 - RNA, 19 nt, Artificial Sequence
  Description of Artificial Sequence: Synthetic oligonucleotide
ggccaacucaauaaguaga

SEQ ID NO: 1203558 - RNA, 19 nt, Artificial Sequence
  Description of Artificial Sequence: Synthetic oligonucleotide
gcaaucugacccuccaaga

SEQ ID NO: 1203559 - RNA, 19 nt, Artificial Sequence
  Description of Artificial Sequence: Synthetic oligonucleotide
acggcagaacauauacuga

SEQ ID NO: 1203560 - RNA, 19 nt, Artificial Sequence
  Description of Artificial Sequence: Synthetic oligonucleotide
uaccucuuggagguagcaa

SEQ ID NO: 1203561 - RNA, 19 nt, Artificial Sequence
  Description of Artificial Sequence: Synthetic oligonucleotide
gaaggauuccacgggauuu

SEQ ID NO: 1203562 - RNA, 19 nt, Artificial Sequence
  Description of Artificial Sequence: Synthetic oligonucleotide
cugggaaaguagagcccac

SEQ ID NO: 1203563 - RNA, 19 nt, Artificial Sequence
  Description of Artificial Sequence: Synthetic oligonucleotide
ucaugccguuccacgugcu

SEQ ID NO: 1203564 - RNA, 19 nt, Artificial Sequence
  Description of Artificial Sequence: Synthetic oligonucleotide
uacgacccagccaguccac

SEQ ID NO: 1203565 - RNA, 19 nt, Artificial Sequence
  Description of Artificial Sequence: Synthetic oligonucleotide
cccaccaagugcucggccc

SEQ ID NO: 1203566 - RNA, 19 nt, Artificial Sequence
  Description of Artificial Sequence: Synthetic oligonucleotide
ggcagaacauauacugaac

SEQ ID NO: 1203567 - RNA, 19 nt, Artificial Sequence
  Description of Artificial Sequence: Synthetic oligonucleotide
gcugagaauaggagagcag

SEQ ID NO: 1203568 - RNA, 19 nt, Artificial Sequence
  Description of Artificial Sequence: Synthetic oligonucleotide
uucuuacgacccagccagu

SEQ ID NO: 1203569 - RNA, 19 nt, Artificial Sequence
  Description of Artificial Sequence: Synthetic oligonucleotide
ggauuuucuuggcccgggc

SEQ ID NO: 1203570 - RNA, 19 nt, Artificial Sequence
  Description of Artificial Sequence: Synthetic oligonucleotide
gaccaccgugaagaguccc

SEQ ID NO: 1203571 - RNA, 19 nt, Artificial Sequence
  Description of Artificial Sequence: Synthetic oligonucleotide
caugacggcagaacauaua

SEQ ID NO: 1203572 - RNA, 19 nt, Artificial Sequence
  Description of Artificial Sequence: Synthetic oligonucleotide
cacgcugacggucauaauu

SEQ ID NO: 1203573 - RNA, 19 nt, Artificial Sequence
  Description of Artificial Sequence: Synthetic oligonucleotide
gccacaaacguagaggaua

SEQ ID NO: 1203574 - RNA, 19 nt, Artificial Sequence
  Description of Artificial Sequence: Synthetic oligonucleotide
caugccguuccacgugcuc

SEQ ID NO: 1203575 - RNA, 19 nt, Artificial Sequence
  Description of Artificial Sequence: Synthetic oligonucleotide
aaggcagcgcaagccucca

SEQ ID NO: 1203576 - RNA, 19 nt, Artificial Sequence
  Description of Artificial Sequence: Synthetic oligonucleotide
guggguaagugagauucaa

SEQ ID NO: 1203577 - RNA, 19 nt, Artificial Sequence
  Description of Artificial Sequence: Synthetic oligonucleotide
cagcacaaaguagucuuga

SEQ ID NO: 1203578 - RNA, 19 nt, Artificial Sequence
  Description of Artificial Sequence: Synthetic oligonucleotide
cacaaacguagaggauagc

SEQ ID NO: 1203579 - RNA, 19 nt, Artificial Sequence
  Description of Artificial Sequence: Synthetic oligonucleotide
cuccggacacguccggcac

SEQ ID NO: 1203580 - RNA, 19 nt, Artificial Sequence
  Description of Artificial Sequence: Synthetic oligonucleotide
gcucauggauguaccaggc

SEQ ID NO: 1203581 - RNA, 19 nt, Artificial Sequence
  Description of Artificial Sequence: Synthetic oligonucleotide
gugguaaugcugauagagu

SEQ ID NO: 1203582 - RNA, 19 nt, Artificial Sequence
  Description of Artificial Sequence: Synthetic oligonucleotide
agugcucggcccaccagca

SEQ ID NO: 1203583 - RNA, 19 nt, Artificial Sequence
  Description of Artificial Sequence: Synthetic oligonucleotide
cagccccauccaacuagcc

SEQ ID NO: 1203584 - RNA, 19 nt, Artificial Sequence
  Description of Artificial Sequence: Synthetic oligonucleotide
aaggcacgcugacggucau

SEQ ID NO: 1203585 - RNA, 19 nt, Artificial Sequence
  Description of Artificial Sequence: Synthetic oligonucleotide
gggaucacuuuucuucgaa

SEQ ID NO: 1203586 - RNA, 19 nt, Artificial Sequence
  Description of Artificial Sequence: Synthetic oligonucleotide
ccagcacaagucuuggaga

SEQ ID NO: 1203587 - RNA, 19 nt, Artificial Sequence
  Description of Artificial Sequence: Synthetic oligonucleotide
accaccgugaagaguccca

SEQ ID NO: 1203588 - RNA, 19 nt, Artificial Sequence
  Description of Artificial Sequence: Synthetic oligonucleotide
ggagcccuagacaggcuag

SEQ ID NO: 1203589 - RNA, 19 nt, Artificial Sequence
  Description of Artificial Sequence: Synthetic oligonucleotide
caugucugaccaccgugaa

SEQ ID NO: 1203590 - RNA, 19 nt, Artificial Sequence
  Description of Artificial Sequence: Synthetic oligonucleotide
agcaaggggaaaggacuaa

SEQ ID NO: 1203591 - RNA, 19 nt, Artificial Sequence
  Description of Artificial Sequence: Synthetic oligonucleotide
ccguuccacgugcucaugg

SEQ ID NO: 1203592 - RNA, 19 nt, Artificial Sequence
  Description of Artificial Sequence: Synthetic oligonucleotide
gucucggggaucacuuuuc

SEQ ID NO: 1203593 - RNA, 19 nt, Artificial Sequence
  Description of Artificial Sequence: Synthetic oligonucleotide
gcaauucgguacagggaag

SEQ ID NO: 1203594 - RNA, 19 nt, Artificial Sequence
  Description of Artificial Sequence: Synthetic oligonucleotide
cagcaucaugucugaccac

SEQ ID NO: 1203595 - RNA, 19 nt, Artificial Sequence
  Description of Artificial Sequence: Synthetic oligonucleotide
cagcgcaagccuccagcac

SEQ ID NO: 1203596 - RNA, 19 nt, Artificial Sequence
  Description of Artificial Sequence: Synthetic oligonucleotide
gugcaggggcacucggaac

SEQ ID NO: 1203597 - RNA, 19 nt, Artificial Sequence
  Description of Artificial Sequence: Synthetic oligonucleotide
gcaaggggaaaggacuaac

SEQ ID NO: 1203598 - RNA, 19 nt, Artificial Sequence
  Description of Artificial Sequence: Synthetic oligonucleotide
gggcuuguaugaugcccag

SEQ ID NO: 1203599 - RNA, 19 nt, Artificial Sequence
  Description of Artificial Sequence: Synthetic oligonucleotide
gcugguagagaaagucaac

SEQ ID NO: 1203600 - RNA, 19 nt, Artificial Sequence
  Description of Artificial Sequence: Synthetic oligonucleotide
acgcuccggacacguccgg

SEQ ID NO: 1203601 - RNA, 19 nt, Artificial Sequence
  Description of Artificial Sequence: Synthetic oligonucleotide
ccaacuagccacagccuca

SEQ ID NO: 1203602 - RNA, 19 nt, Artificial Sequence
  Description of Artificial Sequence: Synthetic oligonucleotide
gaguccauuccaggcaccu

SEQ ID NO: 1203603 - RNA, 19 nt, Artificial Sequence
  Description of Artificial Sequence: Synthetic oligonucleotide
guaccaggccucaaaggcu

SEQ ID NO: 1203604 - RNA, 19 nt, Artificial Sequence
  Description of Artificial Sequence: Synthetic oligonucleotide
acucucaaacagggcuugu

SEQ ID NO: 1203605 - RNA, 19 nt, Artificial Sequence
  Description of Artificial Sequence: Synthetic oligonucleotide
ccauccaacuagccacagc

SEQ ID NO: 1203606 - RNA, 19 nt, Artificial Sequence
  Description of Artificial Sequence: Synthetic oligonucleotide
gcagcgcaagccuccagca

SEQ ID NO: 1203607 - RNA, 19 nt, Artificial Sequence
  Description of Artificial Sequence: Synthetic oligonucleotide
gcucuggcaaagguagcug

SEQ ID NO: 1203608 - RNA, 19 nt, Artificial Sequence
  Description of Artificial Sequence: Synthetic oligonucleotide
aggcagcgcaagccuccag

SEQ ID NO: 1203609 - RNA, 19 nt, Artificial Sequence
  Description of Artificial Sequence: Synthetic oligonucleotide
acccuccaagaagugguaa

SEQ ID NO: 1203610 - RNA, 19 nt, Artificial Sequence
  Description of Artificial Sequence: Synthetic oligonucleotide
gcugccccggucugcgggg

SEQ ID NO: 1203611 - RNA, 19 nt, Artificial Sequence
  Description of Artificial Sequence: Synthetic oligonucleotide
cguagaggauagcaaucug

SEQ ID NO: 1203612 - RNA, 19 nt, Artificial Sequence
  Description of Artificial Sequence: Synthetic oligonucleotide
gugagggcacccgcaacuc

SEQ ID NO: 1203613 - RNA, 19 nt, Artificial Sequence
  Description of Artificial Sequence: Synthetic oligonucleotide
ccaguuucgaagggccaag

SEQ ID NO: 1203614 - RNA, 19 nt, Artificial Sequence
  Description of Artificial Sequence: Synthetic oligonucleotide
cggucauaauucucucccc

SEQ ID NO: 1203615 - RNA, 19 nt, Artificial Sequence
  Description of Artificial Sequence: Synthetic oligonucleotide
guggaggcaaggccacaaa

SEQ ID NO: 1203616 - RNA, 19 nt, Artificial Sequence
  Description of Artificial Sequence: Synthetic oligonucleotide
cacucggaaccaguugaga

SEQ ID NO: 1203617 - RNA, 19 nt, Artificial Sequence
  Description of Artificial Sequence: Synthetic oligonucleotide
gugagauucaagaguccau

SEQ ID NO: 1203618 - RNA, 19 nt, Artificial Sequence
  Description of Artificial Sequence: Synthetic oligonucleotide
caucaugucugaccaccgu

SEQ ID NO: 1203619 - RNA, 19 nt, Artificial Sequence
  Description of Artificial Sequence: Synthetic oligonucleotide
ccccggacgaccugcugcc

SEQ ID NO: 1203620 - RNA, 19 nt, Artificial Sequence
  Description of Artificial Sequence: Synthetic oligonucleotide
gcuccggacacguccggca

SEQ ID NO: 1203621 - RNA, 19 nt, Artificial Sequence
  Description of Artificial Sequence: Synthetic oligonucleotide
ggggaucacuuuucuucga

SEQ ID NO: 1203622 - RNA, 19 nt, Artificial Sequence
  Description of Artificial Sequence: Synthetic oligonucleotide
ucgaagggccaaggccccu

SEQ ID NO: 1203623 - RNA, 19 nt, Artificial Sequence
  Description of Artificial Sequence: Synthetic oligonucleotide
ggcaccuuuccaguccauc

SEQ ID NO: 1203624 - RNA, 19 nt, Artificial Sequence
  Description of Artificial Sequence: Synthetic oligonucleotide
uccacucggcagggaaguc

SEQ ID NO: 1203625 - RNA, 19 nt, Artificial Sequence
  Description of Artificial Sequence: Synthetic oligonucleotide
agcccuagacaggcuagua

SEQ ID NO: 1203626 - RNA, 19 nt, Artificial Sequence
  Description of Artificial Sequence: Synthetic oligonucleotide
acgacccagccaguccaca

SEQ ID NO: 1203627 - RNA, 19 nt, Artificial Sequence
  Description of Artificial Sequence: Synthetic oligonucleotide
uggcaccuuuccaguccau

SEQ ID NO: 1203628 - RNA, 19 nt, Artificial Sequence
  Description of Artificial Sequence: Synthetic oligonucleotide
caccaggccgccgggccgc

SEQ ID NO: 1203629 - RNA, 19 nt, Artificial Sequence
  Description of Artificial Sequence: Synthetic oligonucleotide
ccgcaacucagcaucaugu

SEQ ID NO: 1203630 - RNA, 19 nt, Artificial Sequence
  Description of Artificial Sequence: Synthetic oligonucleotide
ccggacgaccugcugcccc

SEQ ID NO: 1203631 - RNA, 19 nt, Artificial Sequence
  Description of Artificial Sequence: Synthetic oligonucleotide
cacuggcaagaggggcugc

SEQ ID NO: 1203632 - RNA, 19 nt, Artificial Sequence
  Description of Artificial Sequence: Synthetic oligonucleotide
ccgugaagagucccaccac

SEQ ID NO: 1203633 - RNA, 19 nt, Artificial Sequence
  Description of Artificial Sequence: Synthetic oligonucleotide
cugcggggacgcuccggac

SEQ ID NO: 1203634 - RNA, 19 nt, Artificial Sequence
  Description of Artificial Sequence: Synthetic oligonucleotide
cggacgaccugcugccccg

SEQ ID NO: 1203635 - RNA, 19 nt, Artificial Sequence
  Description of Artificial Sequence: Synthetic oligonucleotide
caggggcacucggaaccag

SEQ ID NO: 1203636 - RNA, 19 nt, Artificial Sequence
  Description of Artificial Sequence: Synthetic oligonucleotide
gggugagggcacccgcaac

SEQ ID NO: 1203637 - RNA, 19 nt, Artificial Sequence
  Description of Artificial Sequence: Synthetic oligonucleotide
cggucugcggggacgcucc

SEQ ID NO: 1203638 - RNA, 19 nt, Artificial Sequence
  Description of Artificial Sequence: Synthetic oligonucleotide
gcagcaacacacggcgguc

SEQ ID NO: 1203639 - RNA, 19 nt, Artificial Sequence
  Description of Artificial Sequence: Synthetic oligonucleotide
gucauacagguggguaagu

SEQ ID NO: 1203640 - RNA, 19 nt, Artificial Sequence
  Description of Artificial Sequence: Synthetic oligonucleotide
gggcacccgcaacucagca

SEQ ID NO: 1203641 - RNA, 19 nt, Artificial Sequence
  Description of Artificial Sequence: Synthetic oligonucleotide
guggggccccauguggguc

SEQ ID NO: 1203642 - RNA, 19 nt, Artificial Sequence
  Description of Artificial Sequence: Synthetic oligonucleotide
ggccagcacaugguuccag

SEQ ID NO: 1203643 - RNA, 19 nt, Artificial Sequence
  Description of Artificial Sequence: Synthetic oligonucleotide
gagcccuagacaggcuagu

SEQ ID NO: 1203644 - RNA, 19 nt, Artificial Sequence
  Description of Artificial Sequence: Synthetic oligonucleotide
gccccauguggguccagca

SEQ ID NO: 1203645 - RNA, 19 nt, Artificial Sequence
  Description of Artificial Sequence: Synthetic oligonucleotide
ccaagugcucggcccacca

SEQ ID NO: 1203646 - RNA, 19 nt, Artificial Sequence
  Description of Artificial Sequence: Synthetic oligonucleotide
ggacgaccugcugccccgg

SEQ ID NO: 1203647 - RNA, 19 nt, Artificial Sequence
  Description of Artificial Sequence: Synthetic oligonucleotide
cauauuccuagugcccguu

SEQ ID NO: 1203648 - RNA, 19 nt, Artificial Sequence
  Description of Artificial Sequence: Synthetic oligonucleotide
cccauccaacuagccacag

SEQ ID NO: 1203649 - RNA, 19 nt, Artificial Sequence
  Description of Artificial Sequence: Synthetic oligonucleotide
cgggauuuucuuggcccgg

SEQ ID NO: 1203650 - RNA, 19 nt, Artificial Sequence
  Description of Artificial Sequence: Synthetic oligonucleotide
ggauuccacgggauuuucu

SEQ ID NO: 1203651 - RNA, 19 nt, Artificial Sequence
  Description of Artificial Sequence: Synthetic oligonucleotide
gccccggucugcggggacg

SEQ ID NO: 1203652 - RNA, 19 nt, Artificial Sequence
  Description of Artificial Sequence: Synthetic oligonucleotide
cucggggaucacuuuucuu

SEQ ID NO: 1203653 - RNA, 19 nt, Artificial Sequence
  Description of Artificial Sequence: Synthetic oligonucleotide
cuguggaggcaaggccaca

SEQ ID NO: 1203654 - RNA, 19 nt, Artificial Sequence
  Description of Artificial Sequence: Synthetic oligonucleotide
cucggcccaccagcagcac

SEQ ID NO: 1203655 - RNA, 19 nt, Artificial Sequence
  Description of Artificial Sequence: Synthetic oligonucleotide
gacgaccugcugccccggu

SEQ ID NO: 1203656 - RNA, 19 nt, Artificial Sequence
  Description of Artificial Sequence: Synthetic oligonucleotide
cccaguuucgaagggccaa

SEQ ID NO: 1203657 - RNA, 19 nt, Artificial Sequence
  Description of Artificial Sequence: Synthetic oligonucleotide
gggaaaggacuaacacagu

SEQ ID NO: 1203658 - RNA, 19 nt, Artificial Sequence
  Description of Artificial Sequence: Synthetic oligonucleotide
ccaugacggcagaacauau

SEQ ID NO: 1203659 - RNA, 19 nt, Artificial Sequence
  Description of Artificial Sequence: Synthetic oligonucleotide
gcgcaagccuccagcacaa

SEQ ID NO: 1203660 - RNA, 19 nt, Artificial Sequence
  Description of Artificial Sequence: Synthetic oligonucleotide
ccucuuggagguagcaauu

SEQ ID NO: 1203661 - RNA, 19 nt, Artificial Sequence
  Description of Artificial Sequence: Synthetic oligonucleotide
ccggacacguccggcacca

SEQ ID NO: 1203662 - RNA, 19 nt, Artificial Sequence
  Description of Artificial Sequence: Synthetic oligonucleotide
ggggacgcuccggacacgu

SEQ ID NO: 1203663 - RNA, 19 nt, Artificial Sequence
  Description of Artificial Sequence: Synthetic oligonucleotide
ggcucggcaucuugacaau

SEQ ID NO: 1203664 - RNA, 19 nt, Artificial Sequence
  Description of Artificial Sequence: Synthetic oligonucleotide
ccccggucugcggggacgc

SEQ ID NO: 1203665 - RNA, 19 nt, Artificial Sequence
  Description of Artificial Sequence: Synthetic oligonucleotide
ccggucugcggggacgcuc

SEQ ID NO: 1203666 - RNA, 19 nt, Artificial Sequence
  Description of Artificial Sequence: Synthetic oligonucleotide
gccagaaaguagacuugau

SEQ ID NO: 1203667 - RNA, 19 nt, Artificial Sequence
  Description of Artificial Sequence: Synthetic oligonucleotide
cuacaggucccagccccau

SEQ ID NO: 1203668 - RNA, 19 nt, Artificial Sequence
  Description of Artificial Sequence: Synthetic oligonucleotide
ggccacaaacguagaggau

SEQ ID NO: 1203669 - RNA, 19 nt, Artificial Sequence
  Description of Artificial Sequence: Synthetic oligonucleotide
cgcuccggacacguccggc

SEQ ID NO: 1203670 - RNA, 19 nt, Artificial Sequence
  Description of Artificial Sequence: Synthetic oligonucleotide
gggacgcuccggacacguc

SEQ ID NO: 1203671 - RNA, 19 nt, Artificial Sequence
  Description of Artificial Sequence: Synthetic oligonucleotide
cccggacgaccugcugccc

SEQ ID NO: 1203672 - RNA, 19 nt, Artificial Sequence
  Description of Artificial Sequence: Synthetic oligonucleotide
gcucggcaucuugacaauu

SEQ ID NO: 1203673 - RNA, 19 nt, Artificial Sequence
  Description of Artificial Sequence: Synthetic oligonucleotide
cggggacgcuccggacacg

SEQ ID NO: 1203674 - RNA, 19 nt, Artificial Sequence
  Description of Artificial Sequence: Synthetic oligonucleotide
ccacgugcucauggaugua

SEQ ID NO: 1203675 - RNA, 19 nt, Artificial Sequence
  Description of Artificial Sequence: Synthetic oligonucleotide
cggccagcacaugguucca

SEQ ID NO: 1203676 - RNA, 19 nt, Artificial Sequence
  Description of Artificial Sequence: Synthetic oligonucleotide
cccggucugcggggacgcu

SEQ ID NO: 1203677 - RNA, 19 nt, Artificial Sequence
  Description of Artificial Sequence: Synthetic oligonucleotide
aaauauuucuauuacagcc

SEQ ID NO: 1203678 - RNA, 19 nt, Artificial Sequence
  Description of Artificial Sequence: Synthetic oligonucleotide
uuaaauuuauuuaugagag

SEQ ID NO: 1203679 - RNA, 19 nt, Artificial Sequence
  Description of Artificial Sequence: Synthetic oligonucleotide
aacauguuccuauacagcc

SEQ ID NO: 1203680 - RNA, 19 nt, Artificial Sequence
  Description of Artificial Sequence: Synthetic oligonucleotide
auauaaacaaguuaggcuc

SEQ ID NO: 1203681 - RNA, 19 nt, Artificial Sequence
  Description of Artificial Sequence: Synthetic oligonucleotide
aauauaaacaaguuaggcu

SEQ ID NO: 1203682 - RNA, 19 nt, Artificial Sequence
  Description of Artificial Sequence: Synthetic oligonucleotide
cuauuugugaguuauaagc

SEQ ID NO: 1203683 - RNA, 19 nt, Artificial Sequence
  Description of Artificial Sequence: Synthetic oligonucleotide
aaagguguggucccgaagc

SEQ ID NO: 1203684 - RNA, 19 nt, Artificial Sequence
  Description of Artificial Sequence: Synthetic oligonucleotide
aauaucugccuucaccacc

SEQ ID NO: 1203685 - RNA, 19 nt, Artificial Sequence
  Description of Artificial Sequence: Synthetic oligonucleotide
uacaauaucaaauacucac

SEQ ID NO: 1203686 - RNA, 19 nt, Artificial Sequence
  Description of Artificial Sequence: Synthetic oligonucleotide
ugaguuauaagcuacaaua

SEQ ID NO: 1203687 - RNA, 19 nt, Artificial Sequence
  Description of Artificial Sequence: Synthetic oligonucleotide
uauuuauccaacaucuugc

SEQ ID NO: 1203688 - RNA, 19 nt, Artificial Sequence
  Description of Artificial Sequence: Synthetic oligonucleotide
ucauauaccaaaaggauuc

SEQ ID NO: 1203689 - RNA, 19 nt, Artificial Sequence
  Description of Artificial Sequence: Synthetic oligonucleotide
aaaggauucccugugcucc

SEQ ID NO: 1203690 - RNA, 19 nt, Artificial Sequence
  Description of Artificial Sequence: Synthetic oligonucleotide
aauacucacuauuugugag

SEQ ID NO: 1203691 - RNA, 19 nt, Artificial Sequence
  Description of Artificial Sequence: Synthetic oligonucleotide
uuaacaguucuugacaugg

SEQ ID NO: 1203692 - RNA, 19 nt, Artificial Sequence
  Description of Artificial Sequence: Synthetic oligonucleotide
uguaguuuacaauaucugc

SEQ ID NO: 1203693 - RNA, 19 nt, Artificial Sequence
  Description of Artificial Sequence: Synthetic oligonucleotide
auuuguaauaucauauacc

SEQ ID NO: 1203694 - RNA, 19 nt, Artificial Sequence
  Description of Artificial Sequence: Synthetic oligonucleotide
ucuaagccaaauaugauaa

SEQ ID NO: 1203695 - RNA, 19 nt, Artificial Sequence
  Description of Artificial Sequence: Synthetic oligonucleotide
aaggagaaguucucagucc

SEQ ID NO: 1203696 - RNA, 19 nt, Artificial Sequence
  Description of Artificial Sequence: Synthetic oligonucleotide
gaucgauccacaaugaucc

SEQ ID NO: 1203697 - RNA, 19 nt, Artificial Sequence
  Description of Artificial Sequence: Synthetic oligonucleotide
uguacuguuucccaaaagu

SEQ ID NO: 1203698 - RNA, 19 nt, Artificial Sequence
  Description of Artificial Sequence: Synthetic oligonucleotide
gaugaucaaagcuuggagc

SEQ ID NO: 1203699 - RNA, 19 nt, Artificial Sequence
  Description of Artificial Sequence: Synthetic oligonucleotide
ugauaaaauaugcaaugac

SEQ ID NO: 1203700 - RNA, 19 nt, Artificial Sequence
  Description of Artificial Sequence: Synthetic oligonucleotide
uauuugugaguuauaagcu

SEQ ID NO: 1203701 - RNA, 19 nt, Artificial Sequence
  Description of Artificial Sequence: Synthetic oligonucleotide
aaucguaagugcuuaucag

SEQ ID NO: 1203702 - RNA, 19 nt, Artificial Sequence
  Description of Artificial Sequence: Synthetic oligonucleotide
gaaguauacuuucacacac

SEQ ID NO: 1203703 - RNA, 19 nt, Artificial Sequence
  Description of Artificial Sequence: Synthetic oligonucleotide
acuauuaacacagugugug

SEQ ID NO: 1203704 - RNA, 19 nt, Artificial Sequence
  Description of Artificial Sequence: Synthetic oligonucleotide
auuugaagcacuuucaauu

SEQ ID NO: 1203705 - RNA, 19 nt, Artificial Sequence
  Description of Artificial Sequence: Synthetic oligonucleotide
aaauacucacuauuuguga

SEQ ID NO: 1203706 - RNA, 19 nt, Artificial Sequence
  Description of Artificial Sequence: Synthetic oligonucleotide
cacugauaaaacauguucc

SEQ ID NO: 1203707 - RNA, 19 nt, Artificial Sequence
  Description of Artificial Sequence: Synthetic oligonucleotide
uaucauauaccaaaaggau

SEQ ID NO: 1203708 - RNA, 19 nt, Artificial Sequence
  Description of Artificial Sequence: Synthetic oligonucleotide
aagucaauuuuauugccca

SEQ ID NO: 1203709 - RNA, 19 nt, Artificial Sequence
  Description of Artificial Sequence: Synthetic oligonucleotide
ugaaccauguaucaaaauu

SEQ ID NO: 1203710 - RNA, 19 nt, Artificial Sequence
  Description of Artificial Sequence: Synthetic oligonucleotide
aauaccaaucuucuaaauu

SEQ ID NO: 1203711 - RNA, 19 nt, Artificial Sequence
  Description of Artificial Sequence: Synthetic oligonucleotide
cugaaguauacuuucacac

SEQ ID NO: 1203712 - RNA, 19 nt, Artificial Sequence
  Description of Artificial Sequence: Synthetic oligonucleotide
uucauaaagccaucuaagc

SEQ ID NO: 1203713 - RNA, 19 nt, Artificial Sequence
  Description of Artificial Sequence: Synthetic oligonucleotide
ucaaguaacugguucacca

SEQ ID NO: 1203714 - RNA, 19 nt, Artificial Sequence
  Description of Artificial Sequence: Synthetic oligonucleotide
uuugugaguuauaagcuac

SEQ ID NO: 1203715 - RNA, 19 nt, Artificial Sequence
  Description of Artificial Sequence: Synthetic oligonucleotide
agauagaaaaugaugauca

SEQ ID NO: 1203716 - RNA, 19 nt, Artificial Sequence
  Description of Artificial Sequence: Synthetic oligonucleotide
uuucccaaaagucucuuga

SEQ ID NO: 1203717 - RNA, 19 nt, Artificial Sequence
  Description of Artificial Sequence: Synthetic oligonucleotide
uauaaacaaguuaggcucc

SEQ ID NO: 1203718 - RNA, 19 nt, Artificial Sequence
  Description of Artificial Sequence: Synthetic oligonucleotide
cugacuauagaaaugguca

SEQ ID NO: 1203719 - RNA, 19 nt, Artificial Sequence
  Description of Artificial Sequence: Synthetic oligonucleotide
uuguaguuuacaauaucug

SEQ ID NO: 1203720 - RNA, 19 nt, Artificial Sequence
  Description of Artificial Sequence: Synthetic oligonucleotide
aacugguucaccaucagug

SEQ ID NO: 1203721 - RNA, 19 nt, Artificial Sequence
  Description of Artificial Sequence: Synthetic oligonucleotide
ugcuuaucagguuuuacug

SEQ ID NO: 1203722 - RNA, 19 nt, Artificial Sequence
  Description of Artificial Sequence: Synthetic oligonucleotide
guauauuuuacucuuaaua

SEQ ID NO: 1203723 - RNA, 19 nt, Artificial Sequence
  Description of Artificial Sequence: Synthetic oligonucleotide
cauaaagccaucuaagcca

SEQ ID NO: 1203724 - RNA, 19 nt, Artificial Sequence
  Description of Artificial Sequence: Synthetic oligonucleotide
caaauacucacuauuugug

SEQ ID NO: 1203725 - RNA, 19 nt, Artificial Sequence
  Description of Artificial Sequence: Synthetic oligonucleotide
aacugaaccauguaucaaa

SEQ ID NO: 1203726 - RNA, 19 nt, Artificial Sequence
  Description of Artificial Sequence: Synthetic oligonucleotide
uuuguuuaauuugauuccc

SEQ ID NO: 1203727 - RNA, 19 nt, Artificial Sequence
  Description of Artificial Sequence: Synthetic oligonucleotide
gacgauuuucaguugccgg

SEQ ID NO: 1203728 - RNA, 19 nt, Artificial Sequence
  Description of Artificial Sequence: Synthetic oligonucleotide
uuuacucuuaauagccagc

SEQ ID NO: 1203729 - RNA, 19 nt, Artificial Sequence
  Description of Artificial Sequence: Synthetic oligonucleotide
cauguaucaaaauucauaa

SEQ ID NO: 1203730 - RNA, 19 nt, Artificial Sequence
  Description of Artificial Sequence: Synthetic oligonucleotide
acuuuguauauuuuacucu

SEQ ID NO: 1203731 - RNA, 19 nt, Artificial Sequence
  Description of Artificial Sequence: Synthetic oligonucleotide
uacuguucgcauaugcucc

SEQ ID NO: 1203732 - RNA, 19 nt, Artificial Sequence
  Description of Artificial Sequence: Synthetic oligonucleotide
ucugaaguauacuuucaca

SEQ ID NO: 1203733 - RNA, 19 nt, Artificial Sequence
  Description of Artificial Sequence: Synthetic oligonucleotide
ugugaggcaacuuaaggau

SEQ ID NO: 1203734 - RNA, 19 nt, Artificial Sequence
  Description of Artificial Sequence: Synthetic oligonucleotide
aaaauucauaaagccaucu

SEQ ID NO: 1203735 - RNA, 19 nt, Artificial Sequence
  Description of Artificial Sequence: Synthetic oligonucleotide
agaaucacucacuggccgc

SEQ ID NO: 1203736 - RNA, 19 nt, Artificial Sequence
  Description of Artificial Sequence: Synthetic oligonucleotide
uuccuauacagccugggac

SEQ ID NO: 1203737 - RNA, 19 nt, Artificial Sequence
  Description of Artificial Sequence: Synthetic oligonucleotide
uccuauacagccugggacc

SEQ ID NO: 1203738 - RNA, 19 nt, Artificial Sequence
  Description of Artificial Sequence: Synthetic oligonucleotide
ugaucgauccacaaugauc

SEQ ID NO: 1203739 - RNA, 19 nt, Artificial Sequence
  Description of Artificial Sequence: Synthetic oligonucleotide
acuauuugugaguuauaag

SEQ ID NO: 1203740 - RNA, 19 nt, Artificial Sequence
  Description of Artificial Sequence: Synthetic oligonucleotide
ucgcauaugcuccaaguca

SEQ ID NO: 1203741 - RNA, 19 nt, Artificial Sequence
  Description of Artificial Sequence: Synthetic oligonucleotide
cuugagcaaaacaugucgc

SEQ ID NO: 1203742 - RNA, 19 nt, Artificial Sequence
  Description of Artificial Sequence: Synthetic oligonucleotide
uuuacaauaucugccuuca

SEQ ID NO: 1203743 - RNA, 19 nt, Artificial Sequence
  Description of Artificial Sequence: Synthetic oligonucleotide
aacauucaaauuuccuggu

SEQ ID NO: 1203744 - RNA, 19 nt, Artificial Sequence
  Description of Artificial Sequence: Synthetic oligonucleotide
gugugaucgauccacaaug

SEQ ID NO: 1203745 - RNA, 19 nt, Artificial Sequence
  Description of Artificial Sequence: Synthetic oligonucleotide
uuuccuggcaaaaucguaa

SEQ ID NO: 1203746 - RNA, 19 nt, Artificial Sequence
  Description of Artificial Sequence: Synthetic oligonucleotide
ugaggcaacuuaaggauga

SEQ ID NO: 1203747 - RNA, 19 nt, Artificial Sequence
  Description of Artificial Sequence: Synthetic oligonucleotide
aaggaggucuucccggagg

SEQ ID NO: 1203748 - RNA, 19 nt, Artificial Sequence
  Description of Artificial Sequence: Synthetic oligonucleotide
aagucucuugagcaaaaca

SEQ ID NO: 1203749 - RNA, 19 nt, Artificial Sequence
  Description of Artificial Sequence: Synthetic oligonucleotide
aaagcuuugauaauuugua

SEQ ID NO: 1203750 - RNA, 19 nt, Artificial Sequence
  Description of Artificial Sequence: Synthetic oligonucleotide
auucauaaagccaucuaag

SEQ ID NO: 1203751 - RNA, 19 nt, Artificial Sequence
  Description of Artificial Sequence: Synthetic oligonucleotide
aggagauucauguggagga

SEQ ID NO: 1203752 - RNA, 19 nt, Artificial Sequence
  Description of Artificial Sequence: Synthetic oligonucleotide
ugagcugacuauagaaaug

SEQ ID NO: 1203753 - RNA, 19 nt, Artificial Sequence
  Description of Artificial Sequence: Synthetic oligonucleotide
cuuaauagccagcaaagga

SEQ ID NO: 1203754 - RNA, 19 nt, Artificial Sequence
  Description of Artificial Sequence: Synthetic oligonucleotide
uuacuguucgcauaugcuc

SEQ ID NO: 1203755 - RNA, 19 nt, Artificial Sequence
  Description of Artificial Sequence: Synthetic oligonucleotide
acaauauaaacaaguuagg

SEQ ID NO: 1203756 - RNA, 19 nt, Artificial Sequence
  Description of Artificial Sequence: Synthetic oligonucleotide
agcacgacgauuuucaguu

SEQ ID NO: 1203757 - RNA, 19 nt, Artificial Sequence
  Description of Artificial Sequence: Synthetic oligonucleotide
aaggauguaaagaagcaaa

SEQ ID NO: 1203758 - RNA, 19 nt, Artificial Sequence
  Description of Artificial Sequence: Synthetic oligonucleotide
uaaauuuauuuaugagaga

SEQ ID NO: 1203759 - RNA, 19 nt, Artificial Sequence
  Description of Artificial Sequence: Synthetic oligonucleotide
uaauuugauucccaggauu

SEQ ID NO: 1203760 - RNA, 19 nt, Artificial Sequence
  Description of Artificial Sequence: Synthetic oligonucleotide
ugugagcugacuauagaaa

SEQ ID NO: 1203761 - RNA, 19 nt, Artificial Sequence
  Description of Artificial Sequence: Synthetic oligonucleotide
aaauucauaaagccaucua

SEQ ID NO: 1203762 - RNA, 19 nt, Artificial Sequence
  Description of Artificial Sequence: Synthetic oligonucleotide
auaccaaaaggauucccug

SEQ ID NO: 1203763 - RNA, 19 nt, Artificial Sequence
  Description of Artificial Sequence: Synthetic oligonucleotide
gguacagugugaucgaucc

SEQ ID NO: 1203764 - RNA, 19 nt, Artificial Sequence
  Description of Artificial Sequence: Synthetic oligonucleotide
aaaagacucaaggauguaa

SEQ ID NO: 1203765 - RNA, 19 nt, Artificial Sequence
  Description of Artificial Sequence: Synthetic oligonucleotide
auauaccaaaaggauuccc

SEQ ID NO: 1203766 - RNA, 19 nt, Artificial Sequence
  Description of Artificial Sequence: Synthetic oligonucleotide
aacaaaguggcuacuaaaa

SEQ ID NO: 1203767 - RNA, 19 nt, Artificial Sequence
  Description of Artificial Sequence: Synthetic oligonucleotide
uggguuaacaguucuugac

SEQ ID NO: 1203768 - RNA, 19 nt, Artificial Sequence
  Description of Artificial Sequence: Synthetic oligonucleotide
agcuuugauaauuuguaau

SEQ ID NO: 1203769 - RNA, 19 nt, Artificial Sequence
  Description of Artificial Sequence: Synthetic oligonucleotide
caacuuaaggaugaaggag

SEQ ID NO: 1203770 - RNA, 19 nt, Artificial Sequence
  Description of Artificial Sequence: Synthetic oligonucleotide
uuacucuuaauagccagca

SEQ ID NO: 1203771 - RNA, 19 nt, Artificial Sequence
  Description of Artificial Sequence: Synthetic oligonucleotide
ugucugcccuccuauaucc

SEQ ID NO: 1203772 - RNA, 19 nt, Artificial Sequence
  Description of Artificial Sequence: Synthetic oligonucleotide
acauggaacuccguggugg

SEQ ID NO: 1203773 - RNA, 19 nt, Artificial Sequence
  Description of Artificial Sequence: Synthetic oligonucleotide
uacagugugaucgauccac

SEQ ID NO: 1203774 - RNA, 19 nt, Artificial Sequence
  Description of Artificial Sequence: Synthetic oligonucleotide
ucuucaccacagaauacca

SEQ ID NO: 1203775 - RNA, 19 nt, Artificial Sequence
  Description of Artificial Sequence: Synthetic oligonucleotide
uggcaaaaucguaagugcu

SEQ ID NO: 1203776 - RNA, 19 nt, Artificial Sequence
  Description of Artificial Sequence: Synthetic oligonucleotide
caguucuugacauggacuc

SEQ ID NO: 1203777 - RNA, 19 nt, Artificial Sequence
  Description of Artificial Sequence: Synthetic oligonucleotide
uugagcaaaacaugucgcu

SEQ ID NO: 1203778 - RNA, 19 nt, Artificial Sequence
  Description of Artificial Sequence: Synthetic oligonucleotide
aagcuuugauaauuuguaa

SEQ ID NO: 1203779 - RNA, 19 nt, Artificial Sequence
  Description of Artificial Sequence: Synthetic oligonucleotide
ugugaucgauccacaauga

SEQ ID NO: 1203780 - RNA, 19 nt, Artificial Sequence
  Description of Artificial Sequence: Synthetic oligonucleotide
agccaucuaagccaaauau

SEQ ID NO: 1203781 - RNA, 19 nt, Artificial Sequence
  Description of Artificial Sequence: Synthetic oligonucleotide
agaauaccaaucuucuaaa

SEQ ID NO: 1203782 - RNA, 19 nt, Artificial Sequence
  Description of Artificial Sequence: Synthetic oligonucleotide
acgauuuucaguugccggu

SEQ ID NO: 1203783 - RNA, 19 nt, Artificial Sequence
  Description of Artificial Sequence: Synthetic oligonucleotide
uuugauucccaggauuucu

SEQ ID NO: 1203784 - RNA, 19 nt, Artificial Sequence
  Description of Artificial Sequence: Synthetic oligonucleotide
agccgaauuccuuccaguc

SEQ ID NO: 1203785 - RNA, 19 nt, Artificial Sequence
  Description of Artificial Sequence: Synthetic oligonucleotide
cauguuccuauacagccug

SEQ ID NO: 1203786 - RNA, 19 nt, Artificial Sequence
  Description of Artificial Sequence: Synthetic oligonucleotide
ugaagucuguaggagauuc

SEQ ID NO: 1203787 - RNA, 19 nt, Artificial Sequence
  Description of Artificial Sequence: Synthetic oligonucleotide
aggagaaguucucagucca

SEQ ID NO: 1203788 - RNA, 19 nt, Artificial Sequence
  Description of Artificial Sequence: Synthetic oligonucleotide
uucgcauaugcuccaaguc

SEQ ID NO: 1203789 - RNA, 19 nt, Artificial Sequence
  Description of Artificial Sequence: Synthetic oligonucleotide
uggacucuccauuugaauu

SEQ ID NO: 1203790 - RNA, 19 nt, Artificial Sequence
  Description of Artificial Sequence: Synthetic oligonucleotide
aguuaggcuccuuuuaaaa

SEQ ID NO: 1203791 - RNA, 19 nt, Artificial Sequence
  Description of Artificial Sequence: Synthetic oligonucleotide
guuuacaauaucugccuuc

SEQ ID NO: 1203792 - RNA, 19 nt, Artificial Sequence
  Description of Artificial Sequence: Synthetic oligonucleotide
aaaccauuuuccuggcaaa

SEQ ID NO: 1203793 - RNA, 19 nt, Artificial Sequence
  Description of Artificial Sequence: Synthetic oligonucleotide
aaagcaaccaggggcugag

SEQ ID NO: 1203794 - RNA, 19 nt, Artificial Sequence
  Description of Artificial Sequence: Synthetic oligonucleotide
uguuccuauacagccuggg

SEQ ID NO: 1203795 - RNA, 19 nt, Artificial Sequence
  Description of Artificial Sequence: Synthetic oligonucleotide
auacucacuauuugugagu

SEQ ID NO: 1203796 - RNA, 19 nt, Artificial Sequence
  Description of Artificial Sequence: Synthetic oligonucleotide
cagauagaaaaugaugauc

SEQ ID NO: 1203797 - RNA, 19 nt, Artificial Sequence
  Description of Artificial Sequence: Synthetic oligonucleotide
uugccagaacuauuaacac

SEQ ID NO: 1203798 - RNA, 19 nt, Artificial Sequence
  Description of Artificial Sequence: Synthetic oligonucleotide
gaaacaaaguggcuacuaa

SEQ ID NO: 1203799 - RNA, 19 nt, Artificial Sequence
  Description of Artificial Sequence: Synthetic oligonucleotide
uugugaguuauaagcuaca

SEQ ID NO: 1203800 - RNA, 19 nt, Artificial Sequence
  Description of Artificial Sequence: Synthetic oligonucleotide
uaccaaaaggauucccugu

SEQ ID NO: 1203801 - RNA, 19 nt, Artificial Sequence
  Description of Artificial Sequence: Synthetic oligonucleotide
acaauaucaaauacucacu

SEQ ID NO: 1203802 - RNA, 19 nt, Artificial Sequence
  Description of Artificial Sequence: Synthetic oligonucleotide
aguaacauucaaauuuccu

SEQ ID NO: 1203803 - RNA, 19 nt, Artificial Sequence
  Description of Artificial Sequence: Synthetic oligonucleotide
gaauggacucuccauuuga

SEQ ID NO: 1203804 - RNA, 19 nt, Artificial Sequence
  Description of Artificial Sequence: Synthetic oligonucleotide
guggaggaucaacugaacc

SEQ ID NO: 1203805 - RNA, 19 nt, Artificial Sequence
  Description of Artificial Sequence: Synthetic oligonucleotide
cacgacgauuuucaguugc

SEQ ID NO: 1203806 - RNA, 19 nt, Artificial Sequence
  Description of Artificial Sequence: Synthetic oligonucleotide
agaauggacucuccauuug

SEQ ID NO: 1203807 - RNA, 19 nt, Artificial Sequence
  Description of Artificial Sequence: Synthetic oligonucleotide
guuaacaguucuugacaug

SEQ ID NO: 1203808 - RNA, 19 nt, Artificial Sequence
  Description of Artificial Sequence: Synthetic oligonucleotide
uguucgcauaugcuccaag

SEQ ID NO: 1203809 - RNA, 19 nt, Artificial Sequence
  Description of Artificial Sequence: Synthetic oligonucleotide
uggaguaggaggagagugu

SEQ ID NO: 1203810 - RNA, 19 nt, Artificial Sequence
  Description of Artificial Sequence: Synthetic oligonucleotide
ucaccacagaauaccaauc

SEQ ID NO: 1203811 - RNA, 19 nt, Artificial Sequence
  Description of Artificial Sequence: Synthetic oligonucleotide
agggagaaucacucacugg

SEQ ID NO: 1203812 - RNA, 19 nt, Artificial Sequence
  Description of Artificial Sequence: Synthetic oligonucleotide
aagccgaauuccuuccagu

SEQ ID NO: 1203813 - RNA, 19 nt, Artificial Sequence
  Description of Artificial Sequence: Synthetic oligonucleotide
caaucuucuaaauucucaa

SEQ ID NO: 1203814 - RNA, 19 nt, Artificial Sequence
  Description of Artificial Sequence: Synthetic oligonucleotide
aacuauuaacacagugugu

SEQ ID NO: 1203815 - RNA, 19 nt, Artificial Sequence
  Description of Artificial Sequence: Synthetic oligonucleotide
aacaugucgcuaaggaggu

SEQ ID NO: 1203816 - RNA, 19 nt, Artificial Sequence
  Description of Artificial Sequence: Synthetic oligonucleotide
uccgugguggguuaacagu

SEQ ID NO: 1203817 - RNA, 19 nt, Artificial Sequence
  Description of Artificial Sequence: Synthetic oligonucleotide
uguauuuauccaacaucuu

SEQ ID NO: 1203818 - RNA, 19 nt, Artificial Sequence
  Description of Artificial Sequence: Synthetic oligonucleotide
aagucuguaggagauucau

SEQ ID NO: 1203819 - RNA, 19 nt, Artificial Sequence
  Description of Artificial Sequence: Synthetic oligonucleotide
auccacaaugauccaagga

SEQ ID NO: 1203820 - RNA, 19 nt, Artificial Sequence
  Description of Artificial Sequence: Synthetic oligonucleotide
agugugaucgauccacaau

SEQ ID NO: 1203821 - RNA, 19 nt, Artificial Sequence
  Description of Artificial Sequence: Synthetic oligonucleotide
auugucugcccuccuauau

SEQ ID NO: 1203822 - RNA, 19 nt, Artificial Sequence
  Description of Artificial Sequence: Synthetic oligonucleotide
gaagcacucucaugaaguc

SEQ ID NO: 1203823 - RNA, 19 nt, Artificial Sequence
  Description of Artificial Sequence: Synthetic oligonucleotide
ucagguacagugugaucga

SEQ ID NO: 1203824 - RNA, 19 nt, Artificial Sequence
  Description of Artificial Sequence: Synthetic oligonucleotide
gaccaugauacaguaauaa

SEQ ID NO: 1203825 - RNA, 19 nt, Artificial Sequence
  Description of Artificial Sequence: Synthetic oligonucleotide
ccaucuaagccaaauauga

SEQ ID NO: 1203826 - RNA, 19 nt, Artificial Sequence
  Description of Artificial Sequence: Synthetic oligonucleotide
acaaguuaggcuccuuuua

SEQ ID NO: 1203827 - RNA, 19 nt, Artificial Sequence
  Description of Artificial Sequence: Synthetic oligonucleotide
ugugaguuauaagcuacaa

SEQ ID NO: 1203828 - RNA, 19 nt, Artificial Sequence
  Description of Artificial Sequence: Synthetic oligonucleotide
gcugaaacaaaguggcuac

SEQ ID NO: 1203829 - RNA, 19 nt, Artificial Sequence
  Description of Artificial Sequence: Synthetic oligonucleotide
cauauaccaaaaggauucc

SEQ ID NO: 1203830 - RNA, 19 nt, Artificial Sequence
  Description of Artificial Sequence: Synthetic oligonucleotide
aaguauacuuucacacaca

SEQ ID NO: 1203831 - RNA, 19 nt, Artificial Sequence
  Description of Artificial Sequence: Synthetic oligonucleotide
uaaggaggucuucccggag

SEQ ID NO: 1203832 - RNA, 19 nt, Artificial Sequence
  Description of Artificial Sequence: Synthetic oligonucleotide
aagcuacaauauaaacaag

SEQ ID NO: 1203833 - RNA, 19 nt, Artificial Sequence
  Description of Artificial Sequence: Synthetic oligonucleotide
auagaaauggucacugaua

SEQ ID NO: 1203834 - RNA, 19 nt, Artificial Sequence
  Description of Artificial Sequence: Synthetic oligonucleotide
acgacgauuuucaguugcc

SEQ ID NO: 1203835 - RNA, 19 nt, Artificial Sequence
  Description of Artificial Sequence: Synthetic oligonucleotide
uugucugcccuccuauauc

SEQ ID NO: 1203836 - RNA, 19 nt, Artificial Sequence
  Description of Artificial Sequence: Synthetic oligonucleotide
gaaucacucacuggccgcc

SEQ ID NO: 1203837 - RNA, 19 nt, Artificial Sequence
  Description of Artificial Sequence: Synthetic oligonucleotide
ugagcaaaacaugucgcua

SEQ ID NO: 1203838 - RNA, 19 nt, Artificial Sequence
  Description of Artificial Sequence: Synthetic oligonucleotide
auuuuacucuuaauagcca

SEQ ID NO: 1203839 - RNA, 19 nt, Artificial Sequence
  Description of Artificial Sequence: Synthetic oligonucleotide
aucugaacaucagguacag

SEQ ID NO: 1203840 - RNA, 19 nt, Artificial Sequence
  Description of Artificial Sequence: Synthetic oligonucleotide
caauaucugccuucaccac

SEQ ID NO: 1203841 - RNA, 19 nt, Artificial Sequence
  Description of Artificial Sequence: Synthetic oligonucleotide
auuuccugguaagguaauc

SEQ ID NO: 1203842 - RNA, 19 nt, Artificial Sequence
  Description of Artificial Sequence: Synthetic oligonucleotide
cagggagaaucacucacug

SEQ ID NO: 1203843 - RNA, 19 nt, Artificial Sequence
  Description of Artificial Sequence: Synthetic oligonucleotide
ugcccaccaaagcaaccag

SEQ ID NO: 1203844 - RNA, 19 nt, Artificial Sequence
  Description of Artificial Sequence: Synthetic oligonucleotide
gucgcuaaggaggucuucc

SEQ ID NO: 1203845 - RNA, 19 nt, Artificial Sequence
  Description of Artificial Sequence: Synthetic oligonucleotide
uagccagcaaaggaacacc

SEQ ID NO: 1203846 - RNA, 19 nt, Artificial Sequence
  Description of Artificial Sequence: Synthetic oligonucleotide
aguuuacaauaucugccuu

SEQ ID NO: 1203847 - RNA, 19 nt, Artificial Sequence
  Description of Artificial Sequence: Synthetic oligonucleotide
uccaauccuacagucugcu

SEQ ID NO: 1203848 - RNA, 19 nt, Artificial Sequence
  Description of Artificial Sequence: Synthetic oligonucleotide
gagucugacauggugucca

SEQ ID NO: 1203849 - RNA, 19 nt, Artificial Sequence
  Description of Artificial Sequence: Synthetic oligonucleotide
gguggguuaacaguucuug

SEQ ID NO: 1203850 - RNA, 19 nt, Artificial Sequence
  Description of Artificial Sequence: Synthetic oligonucleotide
ucgcuaaggaggucuuccc

SEQ ID NO: 1203851 - RNA, 19 nt, Artificial Sequence
  Description of Artificial Sequence: Synthetic oligonucleotide
uccugguaagguaauccuu

SEQ ID NO: 1203852 - RNA, 19 nt, Artificial Sequence
  Description of Artificial Sequence: Synthetic oligonucleotide
aaccauuuuccuggcaaaa

SEQ ID NO: 1203853 - RNA, 19 nt, Artificial Sequence
  Description of Artificial Sequence: Synthetic oligonucleotide
uuacaauaucugccuucac

SEQ ID NO: 1203854 - RNA, 19 nt, Artificial Sequence
  Description of Artificial Sequence: Synthetic oligonucleotide
ccucauuugaagcacuuuc

SEQ ID NO: 1203855 - RNA, 19 nt, Artificial Sequence
  Description of Artificial Sequence: Synthetic oligonucleotide
acauucaaauuuccuggua

SEQ ID NO: 1203856 - RNA, 19 nt, Artificial Sequence
  Description of Artificial Sequence: Synthetic oligonucleotide
ggguuaacaguucuugaca

SEQ ID NO: 1203857 - RNA, 19 nt, Artificial Sequence
  Description of Artificial Sequence: Synthetic oligonucleotide
cuauuacagccucauuuga

SEQ ID NO: 1203858 - RNA, 19 nt, Artificial Sequence
  Description of Artificial Sequence: Synthetic oligonucleotide
aggaucaacugaaccaugu

SEQ ID NO: 1203859 - RNA, 19 nt, Artificial Sequence
  Description of Artificial Sequence: Synthetic oligonucleotide
ccuggcaaaaucguaagug

SEQ ID NO: 1203860 - RNA, 19 nt, Artificial Sequence
  Description of Artificial Sequence: Synthetic oligonucleotide
auggacucuccauuugaau

SEQ ID NO: 1203861 - RNA, 19 nt, Artificial Sequence
  Description of Artificial Sequence: Synthetic oligonucleotide
cacuauuugugaguuauaa

SEQ ID NO: 1203862 - RNA, 19 nt, Artificial Sequence
  Description of Artificial Sequence: Synthetic oligonucleotide
guaagugcuuaucagguuu

SEQ ID NO: 1203863 - RNA, 19 nt, Artificial Sequence
  Description of Artificial Sequence: Synthetic oligonucleotide
ugugcuccauagauguauu

SEQ ID NO: 1203864 - RNA, 19 nt, Artificial Sequence
  Description of Artificial Sequence: Synthetic oligonucleotide
cucaaguaacugguucacc

SEQ ID NO: 1203865 - RNA, 19 nt, Artificial Sequence
  Description of Artificial Sequence: Synthetic oligonucleotide
cccaaaagucucuugagca

SEQ ID NO: 1203866 - RNA, 19 nt, Artificial Sequence
  Description of Artificial Sequence: Synthetic oligonucleotide
ggcaggacgagcaggaccc

SEQ ID NO: 1203867 - RNA, 19 nt, Artificial Sequence
  Description of Artificial Sequence: Synthetic oligonucleotide
guuccuauacagccuggga

SEQ ID NO: 1203868 - RNA, 19 nt, Artificial Sequence
  Description of Artificial Sequence: Synthetic oligonucleotide
gagauucauguggaggauc

SEQ ID NO: 1203869 - RNA, 19 nt, Artificial Sequence
  Description of Artificial Sequence: Synthetic oligonucleotide
aggauguaaagaagcaaaa

SEQ ID NO: 1203870 - RNA, 19 nt, Artificial Sequence
  Description of Artificial Sequence: Synthetic oligonucleotide
agguacagugugaucgauc

SEQ ID NO: 1203871 - RNA, 19 nt, Artificial Sequence
  Description of Artificial Sequence: Synthetic oligonucleotide
caacuuuguauauuuuacu

SEQ ID NO: 1203872 - RNA, 19 nt, Artificial Sequence
  Description of Artificial Sequence: Synthetic oligonucleotide
ucgauccacaaugauccaa

SEQ ID NO: 1203873 - RNA, 19 nt, Artificial Sequence
  Description of Artificial Sequence: Synthetic oligonucleotide
uaacacaguguguguucac

SEQ ID NO: 1203874 - RNA, 19 nt, Artificial Sequence
  Description of Artificial Sequence: Synthetic oligonucleotide
guggguuaacaguucuuga

SEQ ID NO: 1203875 - RNA, 19 nt, Artificial Sequence
  Description of Artificial Sequence: Synthetic oligonucleotide
caugaagucuguaggagau

SEQ ID NO: 1203876 - RNA, 19 nt, Artificial Sequence
  Description of Artificial Sequence: Synthetic oligonucleotide
ggaccaauccuggagaaga

SEQ ID NO: 1203877 - RNA, 19 nt, Artificial Sequence
  Description of Artificial Sequence: Synthetic oligonucleotide
ucacuauuugugaguuaua

SEQ ID NO: 1203878 - RNA, 19 nt, Artificial Sequence
  Description of Artificial Sequence: Synthetic oligonucleotide
ugccaugacucaucuggaa

SEQ ID NO: 1203879 - RNA, 19 nt, Artificial Sequence
  Description of Artificial Sequence: Synthetic oligonucleotide
gugaggcaacuuaaggaug

SEQ ID NO: 1203880 - RNA, 19 nt, Artificial Sequence
  Description of Artificial Sequence: Synthetic oligonucleotide
cuacugugaggcaacuuaa

SEQ ID NO: 1203881 - RNA, 19 nt, Artificial Sequence
  Description of Artificial Sequence: Synthetic oligonucleotide
gcugacuauagaaaugguc

SEQ ID NO: 1203882 - RNA, 19 nt, Artificial Sequence
  Description of Artificial Sequence: Synthetic oligonucleotide
agcaaccaggggcugaguu

SEQ ID NO: 1203883 - RNA, 19 nt, Artificial Sequence
  Description of Artificial Sequence: Synthetic oligonucleotide
gcuuggagcaucuucauau

SEQ ID NO: 1203884 - RNA, 19 nt, Artificial Sequence
  Description of Artificial Sequence: Synthetic oligonucleotide
uugccaccuauugucugcc

SEQ ID NO: 1203885 - RNA, 19 nt, Artificial Sequence
  Description of Artificial Sequence: Synthetic oligonucleotide
cuuucacacacaggaguuc

SEQ ID NO: 1203886 - RNA, 19 nt, Artificial Sequence
  Description of Artificial Sequence: Synthetic oligonucleotide
guaaagaagcaaaaugguu

SEQ ID NO: 1203887 - RNA, 19 nt, Artificial Sequence
  Description of Artificial Sequence: Synthetic oligonucleotide
guucgcauaugcuccaagu

SEQ ID NO: 1203888 - RNA, 19 nt, Artificial Sequence
  Description of Artificial Sequence: Synthetic oligonucleotide
caaggauguaaagaagcaa

SEQ ID NO: 1203889 - RNA, 19 nt, Artificial Sequence
  Description of Artificial Sequence: Synthetic oligonucleotide
uggucccgaagccgaauuc

SEQ ID NO: 1203890 - RNA, 19 nt, Artificial Sequence
  Description of Artificial Sequence: Synthetic oligonucleotide
uggaacuccgugguggguu

SEQ ID NO: 1203891 - RNA, 19 nt, Artificial Sequence
  Description of Artificial Sequence: Synthetic oligonucleotide
agagugugagcugacuaua

SEQ ID NO: 1203892 - RNA, 19 nt, Artificial Sequence
  Description of Artificial Sequence: Synthetic oligonucleotide
caccuauugucugcccucc

SEQ ID NO: 1203893 - RNA, 19 nt, Artificial Sequence
  Description of Artificial Sequence: Synthetic oligonucleotide
gguuuuacuguucgcauau

SEQ ID NO: 1203894 - RNA, 19 nt, Artificial Sequence
  Description of Artificial Sequence: Synthetic oligonucleotide
cuauuaacacagugugugu

SEQ ID NO: 1203895 - RNA, 19 nt, Artificial Sequence
  Description of Artificial Sequence: Synthetic oligonucleotide
ugguggguuaacaguucuu

SEQ ID NO: 1203896 - RNA, 19 nt, Artificial Sequence
  Description of Artificial Sequence: Synthetic oligonucleotide
cuucaccacagaauaccaa

SEQ ID NO: 1203897 - RNA, 19 nt, Artificial Sequence
  Description of Artificial Sequence: Synthetic oligonucleotide
gccaaauaugauaaaauau

SEQ ID NO: 1203898 - RNA, 19 nt, Artificial Sequence
  Description of Artificial Sequence: Synthetic oligonucleotide
cuaagccaaauaugauaaa

SEQ ID NO: 1203899 - RNA, 19 nt, Artificial Sequence
  Description of Artificial Sequence: Synthetic oligonucleotide
guuuuacuguucgcauaug

SEQ ID NO: 1203900 - RNA, 19 nt, Artificial Sequence
  Description of Artificial Sequence: Synthetic oligonucleotide
gugaguuauaagcuacaau

SEQ ID NO: 1203901 - RNA, 19 nt, Artificial Sequence
  Description of Artificial Sequence: Synthetic oligonucleotide
ggucccgaagccgaauucc

SEQ ID NO: 1203902 - RNA, 19 nt, Artificial Sequence
  Description of Artificial Sequence: Synthetic oligonucleotide
caccaucagugcucugaag

SEQ ID NO: 1203903 - RNA, 19 nt, Artificial Sequence
  Description of Artificial Sequence: Synthetic oligonucleotide
uaaagccaucuaagccaaa

SEQ ID NO: 1203904 - RNA, 19 nt, Artificial Sequence
  Description of Artificial Sequence: Synthetic oligonucleotide
agcuuggagcaucuucaua

SEQ ID NO: 1203905 - RNA, 19 nt, Artificial Sequence
  Description of Artificial Sequence: Synthetic oligonucleotide
cucaaagcuuugauaauuu

SEQ ID NO: 1203906 - RNA, 19 nt, Artificial Sequence
  Description of Artificial Sequence: Synthetic oligonucleotide
aguugccgguccuggcucu

SEQ ID NO: 1203907 - RNA, 19 nt, Artificial Sequence
  Description of Artificial Sequence: Synthetic oligonucleotide
cuucgcucacugucuucac

SEQ ID NO: 1203908 - RNA, 19 nt, Artificial Sequence
  Description of Artificial Sequence: Synthetic oligonucleotide
ggagagugugagcugacua

SEQ ID NO: 1203909 - RNA, 19 nt, Artificial Sequence
  Description of Artificial Sequence: Synthetic oligonucleotide
guggcuacuaaaaccauuu

SEQ ID NO: 1203910 - RNA, 19 nt, Artificial Sequence
  Description of Artificial Sequence: Synthetic oligonucleotide
ggagaagaauugccagaac

SEQ ID NO: 1203911 - RNA, 19 nt, Artificial Sequence
  Description of Artificial Sequence: Synthetic oligonucleotide
ucccgaagccgaauuccuu

SEQ ID NO: 1203912 - RNA, 19 nt, Artificial Sequence
  Description of Artificial Sequence: Synthetic oligonucleotide
ugccaccuauugucugccc

SEQ ID NO: 1203913 - RNA, 19 nt, Artificial Sequence
  Description of Artificial Sequence: Synthetic oligonucleotide
cugucuuggcugaaacaaa

SEQ ID NO: 1203914 - RNA, 19 nt, Artificial Sequence
  Description of Artificial Sequence: Synthetic oligonucleotide
ugcccuccuauaucccaaa

SEQ ID NO: 1203915 - RNA, 19 nt, Artificial Sequence
  Description of Artificial Sequence: Synthetic oligonucleotide
caucuaagccaaauaugau

SEQ ID NO: 1203916 - RNA, 19 nt, Artificial Sequence
  Description of Artificial Sequence: Synthetic oligonucleotide
guacagugugaucgaucca

SEQ ID NO: 1203917 - RNA, 19 nt, Artificial Sequence
  Description of Artificial Sequence: Synthetic oligonucleotide
aggagagugugagcugacu

SEQ ID NO: 1203918 - RNA, 19 nt, Artificial Sequence
  Description of Artificial Sequence: Synthetic oligonucleotide
cagagaauggacucuccau

SEQ ID NO: 1203919 - RNA, 19 nt, Artificial Sequence
  Description of Artificial Sequence: Synthetic oligonucleotide
accuauugucugcccuccu

SEQ ID NO: 1203920 - RNA, 19 nt, Artificial Sequence
  Description of Artificial Sequence: Synthetic oligonucleotide
gcaaaaucguaagugcuua

SEQ ID NO: 1203921 - RNA, 19 nt, Artificial Sequence
  Description of Artificial Sequence: Synthetic oligonucleotide
agcugacuauagaaauggu

SEQ ID NO: 1203922 - RNA, 19 nt, Artificial Sequence
  Description of Artificial Sequence: Synthetic oligonucleotide
ggucacugauaaaacaugu

SEQ ID NO: 1203923 - RNA, 19 nt, Artificial Sequence
  Description of Artificial Sequence: Synthetic oligonucleotide
cucuucgcucacugucuuc

SEQ ID NO: 1203924 - RNA, 19 nt, Artificial Sequence
  Description of Artificial Sequence: Synthetic oligonucleotide
ccuacagucugcuuguacu

SEQ ID NO: 1203925 - RNA, 19 nt, Artificial Sequence
  Description of Artificial Sequence: Synthetic oligonucleotide
augccaugacucaucugga

SEQ ID NO: 1203926 - RNA, 19 nt, Artificial Sequence
  Description of Artificial Sequence: Synthetic oligonucleotide
acaugucgcuaaggagguc

SEQ ID NO: 1203927 - RNA, 19 nt, Artificial Sequence
  Description of Artificial Sequence: Synthetic oligonucleotide
gcuacaauauaaacaaguu

SEQ ID NO: 1203928 - RNA, 19 nt, Artificial Sequence
  Description of Artificial Sequence: Synthetic oligonucleotide
cccggcgucuccucaaccc

SEQ ID NO: 1203929 - RNA, 19 nt, Artificial Sequence
  Description of Artificial Sequence: Synthetic oligonucleotide
cagguuuuacuguucgcau

SEQ ID NO: 1203930 - RNA, 19 nt, Artificial Sequence
  Description of Artificial Sequence: Synthetic oligonucleotide
ugucgcuaaggaggucuuc

SEQ ID NO: 1203931 - RNA, 19 nt, Artificial Sequence
  Description of Artificial Sequence: Synthetic oligonucleotide
caaagcaaccaggggcuga

SEQ ID NO: 1203932 - RNA, 19 nt, Artificial Sequence
  Description of Artificial Sequence: Synthetic oligonucleotide
gaccaauccuggagaagaa

SEQ ID NO: 1203933 - RNA, 19 nt, Artificial Sequence
  Description of Artificial Sequence: Synthetic oligonucleotide
aggaacccagggagaauca

SEQ ID NO: 1203934 - RNA, 19 nt, Artificial Sequence
  Description of Artificial Sequence: Synthetic oligonucleotide
ucccggaggugccgucccc

SEQ ID NO: 1203935 - RNA, 19 nt, Artificial Sequence
  Description of Artificial Sequence: Synthetic oligonucleotide
ggaggaucaacugaaccau

SEQ ID NO: 1203936 - RNA, 19 nt, Artificial Sequence
  Description of Artificial Sequence: Synthetic oligonucleotide
gugaucgauccacaaugau

SEQ ID NO: 1203937 - RNA, 19 nt, Artificial Sequence
  Description of Artificial Sequence: Synthetic oligonucleotide
ugcuacugugaggcaacuu

SEQ ID NO: 1203938 - RNA, 19 nt, Artificial Sequence
  Description of Artificial Sequence: Synthetic oligonucleotide
gggaccaauccuggagaag

SEQ ID NO: 1203939 - RNA, 19 nt, Artificial Sequence
  Description of Artificial Sequence: Synthetic oligonucleotide
cagcacgacgauuuucagu

SEQ ID NO: 1203940 - RNA, 19 nt, Artificial Sequence
  Description of Artificial Sequence: Synthetic oligonucleotide
ccuauaucccaaacuugaa

SEQ ID NO: 1203941 - RNA, 19 nt, Artificial Sequence
  Description of Artificial Sequence: Synthetic oligonucleotide
cgacgauuuucaguugccg

SEQ ID NO: 1203942 - RNA, 19 nt, Artificial Sequence
  Description of Artificial Sequence: Synthetic oligonucleotide
gaggcaacuuaaggaugaa

SEQ ID NO: 1203943 - RNA, 19 nt, Artificial Sequence
  Description of Artificial Sequence: Synthetic oligonucleotide
cgcauaugcuccaagucaa

SEQ ID NO: 1203944 - RNA, 19 nt, Artificial Sequence
  Description of Artificial Sequence: Synthetic oligonucleotide
gcacgacgauuuucaguug

SEQ ID NO: 1203945 - RNA, 19 nt, Artificial Sequence
  Description of Artificial Sequence: Synthetic oligonucleotide
ccaucagugcucugaagua

SEQ ID NO: 1203946 - RNA, 19 nt, Artificial Sequence
  Description of Artificial Sequence: Synthetic oligonucleotide
ggucuucccggaggugccg

SEQ ID NO: 1203947 - RNA, 19 nt, Artificial Sequence
  Description of Artificial Sequence: Synthetic oligonucleotide
ggcaaaaucguaagugcuu

SEQ ID NO: 1203948 - RNA, 19 nt, Artificial Sequence
  Description of Artificial Sequence: Synthetic oligonucleotide
cgucuccucaacccugaag

SEQ ID NO: 1203949 - RNA, 19 nt, Artificial Sequence
  Description of Artificial Sequence: Synthetic oligonucleotide
ggaacuccgugguggguua

SEQ ID NO: 1203950 - RNA, 19 nt, Artificial Sequence
  Description of Artificial Sequence: Synthetic oligonucleotide
cugaaacaaaguggcuacu

SEQ ID NO: 1203951 - RNA, 19 nt, Artificial Sequence
  Description of Artificial Sequence: Synthetic oligonucleotide
gcccuccuauaucccaaac

SEQ ID NO: 1203952 - RNA, 19 nt, Artificial Sequence
  Description of Artificial Sequence: Synthetic oligonucleotide
augucgcuaaggaggucuu

SEQ ID NO: 1203953 - RNA, 19 nt, Artificial Sequence
  Description of Artificial Sequence: Synthetic oligonucleotide
ccuauugucugcccuccua

SEQ ID NO: 1203954 - RNA, 19 nt, Artificial Sequence
  Description of Artificial Sequence: Synthetic oligonucleotide
cuauacagccugggaccaa

SEQ ID NO: 1203955 - RNA, 19 nt, Artificial Sequence
  Description of Artificial Sequence: Synthetic oligonucleotide
cacucucaugaagucugua

SEQ ID NO: 1203956 - RNA, 19 nt, Artificial Sequence
  Description of Artificial Sequence: Synthetic oligonucleotide
cccuccuauaucccaaacu

SEQ ID NO: 1203957 - RNA, 19 nt, Artificial Sequence
  Description of Artificial Sequence: Synthetic oligonucleotide
cagugcucugaaguauacu

SEQ ID NO: 1203958 - RNA, 19 nt, Artificial Sequence
  Description of Artificial Sequence: Synthetic oligonucleotide
cuguucgcauaugcuccaa

SEQ ID NO: 1203959 - RNA, 19 nt, Artificial Sequence
  Description of Artificial Sequence: Synthetic oligonucleotide
ggagauucauguggaggau

SEQ ID NO: 1203960 - RNA, 19 nt, Artificial Sequence
  Description of Artificial Sequence: Synthetic oligonucleotide
ccgugguggguuaacaguu

SEQ ID NO: 1203961 - RNA, 19 nt, Artificial Sequence
  Description of Artificial Sequence: Synthetic oligonucleotide
guguggucccgaagccgaa

SEQ ID NO: 1203962 - RNA, 19 nt, Artificial Sequence
  Description of Artificial Sequence: Synthetic oligonucleotide
gccccggcgucuccucaac

SEQ ID NO: 1203963 - RNA, 19 nt, Artificial Sequence
  Description of Artificial Sequence: Synthetic oligonucleotide
cugcuacugugaggcaacu

SEQ ID NO: 1203964 - RNA, 19 nt, Artificial Sequence
  Description of Artificial Sequence: Synthetic oligonucleotide
ccugugcuccauagaugua

SEQ ID NO: 1203965 - RNA, 19 nt, Artificial Sequence
  Description of Artificial Sequence: Synthetic oligonucleotide
cguaagugcuuaucagguu

SEQ ID NO: 1203966 - RNA, 19 nt, Artificial Sequence
  Description of Artificial Sequence: Synthetic oligonucleotide
gccucauuugaagcacuuu

SEQ ID NO: 1203967 - RNA, 19 nt, Artificial Sequence
  Description of Artificial Sequence: Synthetic oligonucleotide
gcgucuccucaacccugaa

SEQ ID NO: 1203968 - RNA, 19 nt, Artificial Sequence
  Description of Artificial Sequence: Synthetic oligonucleotide
ccaauccuacagucugcuu

SEQ ID NO: 1203969 - RNA, 19 nt, Artificial Sequence
  Description of Artificial Sequence: Synthetic oligonucleotide
ccgccccggcgucuccuca

SEQ ID NO: 1203970 - RNA, 19 nt, Artificial Sequence
  Description of Artificial Sequence: Synthetic oligonucleotide
cgccccggcgucuccucaa

SEQ ID NO: 1203971 - RNA, 19 nt, Artificial Sequence
  Description of Artificial Sequence: Synthetic oligonucleotide
aauucauccaugcagcugc

SEQ ID NO: 1203972 - RNA, 19 nt, Artificial Sequence
  Description of Artificial Sequence: Synthetic oligonucleotide
aguaugaucauguuguucc

SEQ ID NO: 1203973 - RNA, 19 nt, Artificial Sequence
  Description of Artificial Sequence: Synthetic oligonucleotide
aacuuuaaauggcuaaacc

SEQ ID NO: 1203974 - RNA, 19 nt, Artificial Sequence
  Description of Artificial Sequence: Synthetic oligonucleotide
aaauguauacguugaaccg

SEQ ID NO: 1203975 - RNA, 19 nt, Artificial Sequence
  Description of Artificial Sequence: Synthetic oligonucleotide
aagaguguauugcuggugc

SEQ ID NO: 1203976 - RNA, 19 nt, Artificial Sequence
  Description of Artificial Sequence: Synthetic oligonucleotide
aacauuaggccaauuaggc

SEQ ID NO: 1203977 - RNA, 19 nt, Artificial Sequence
  Description of Artificial Sequence: Synthetic oligonucleotide
auuucaaugucaaaagucc

SEQ ID NO: 1203978 - RNA, 19 nt, Artificial Sequence
  Description of Artificial Sequence: Synthetic oligonucleotide
uaguaauuauaguuuaugg

SEQ ID NO: 1203979 - RNA, 19 nt, Artificial Sequence
  Description of Artificial Sequence: Synthetic oligonucleotide
ugaacuaugcccaaauuca

SEQ ID NO: 1203980 - RNA, 19 nt, Artificial Sequence
  Description of Artificial Sequence: Synthetic oligonucleotide
caaauguauacguugaacc

SEQ ID NO: 1203981 - RNA, 19 nt, Artificial Sequence
  Description of Artificial Sequence: Synthetic oligonucleotide
aggccaauuaggcagagcc

SEQ ID NO: 1203982 - RNA, 19 nt, Artificial Sequence
  Description of Artificial Sequence: Synthetic oligonucleotide
aguacgguggcauuucucc

SEQ ID NO: 1203983 - RNA, 19 nt, Artificial Sequence
  Description of Artificial Sequence: Synthetic oligonucleotide
uuuuagaauuacauuuggg

SEQ ID NO: 1203984 - RNA, 19 nt, Artificial Sequence
  Description of Artificial Sequence: Synthetic oligonucleotide
auaguuuauggcccuaacc

SEQ ID NO: 1203985 - RNA, 19 nt, Artificial Sequence
  Description of Artificial Sequence: Synthetic oligonucleotide
aucacaagaaaccccagac

SEQ ID NO: 1203986 - RNA, 19 nt, Artificial Sequence
  Description of Artificial Sequence: Synthetic oligonucleotide
uaagauauuccccagguua

SEQ ID NO: 1203987 - RNA, 19 nt, Artificial Sequence
  Description of Artificial Sequence: Synthetic oligonucleotide
uuuaagauauuccccaggu

SEQ ID NO: 1203988 - RNA, 19 nt, Artificial Sequence
  Description of Artificial Sequence: Synthetic oligonucleotide
ucucaagcauucaagagug

SEQ ID NO: 1203989 - RNA, 19 nt, Artificial Sequence
  Description of Artificial Sequence: Synthetic oligonucleotide
ugagagagugaucauuagg

SEQ ID NO: 1203990 - RNA, 19 nt, Artificial Sequence
  Description of Artificial Sequence: Synthetic oligonucleotide
aauaacaguguaauaaaca

SEQ ID NO: 1203991 - RNA, 19 nt, Artificial Sequence
  Description of Artificial Sequence: Synthetic oligonucleotide
uaggaauuaauuccagugc

SEQ ID NO: 1203992 - RNA, 19 nt, Artificial Sequence
  Description of Artificial Sequence: Synthetic oligonucleotide
ucaaccaacugacuuaaug

SEQ ID NO: 1203993 - RNA, 19 nt, Artificial Sequence
  Description of Artificial Sequence: Synthetic oligonucleotide
uauacguugaaccgaggcc

SEQ ID NO: 1203994 - RNA, 19 nt, Artificial Sequence
  Description of Artificial Sequence: Synthetic oligonucleotide
aaugaauaguaguaauuau

SEQ ID NO: 1203995 - RNA, 19 nt, Artificial Sequence
  Description of Artificial Sequence: Synthetic oligonucleotide
  modified_base (16)..(16): a, c, u, g, unknown or other
aauaucugauggcuunccu

SEQ ID NO: 1203996 - RNA, 19 nt, Artificial Sequence
  Description of Artificial Sequence: Synthetic oligonucleotide
aauuauaguuuauggcccu

SEQ ID NO: 1203997 - RNA, 19 nt, Artificial Sequence
  Description of Artificial Sequence: Synthetic oligonucleotide
gacuuaaugagagggaugc

SEQ ID NO: 1203998 - RNA, 19 nt, Artificial Sequence
  Description of Artificial Sequence: Synthetic oligonucleotide
ucccgguaauaucugaugg

SEQ ID NO: 1203999 - RNA, 19 nt, Artificial Sequence
  Description of Artificial Sequence: Synthetic oligonucleotide
uggauuugcuuuaauugcc

SEQ ID NO: 1204000 - RNA, 19 nt, Artificial Sequence
  Description of Artificial Sequence: Synthetic oligonucleotide
ugaucauuaggaauuaauu

SEQ ID NO: 1204001 - RNA, 19 nt, Artificial Sequence
  Description of Artificial Sequence: Synthetic oligonucleotide
uccggcuucaguacggugg

SEQ ID NO: 1204002 - RNA, 19 nt, Artificial Sequence
  Description of Artificial Sequence: Synthetic oligonucleotide
ugaugaguagaauucccag

SEQ ID NO: 1204003 - RNA, 19 nt, Artificial Sequence
  Description of Artificial Sequence: Synthetic oligonucleotide
gaugaguagaauucccagc

SEQ ID NO: 1204004 - RNA, 19 nt, Artificial Sequence
  Description of Artificial Sequence: Synthetic oligonucleotide
aauuaccaugguaacuggc

SEQ ID NO: 1204005 - RNA, 19 nt, Artificial Sequence
  Description of Artificial Sequence: Synthetic oligonucleotide
aaccuuagcauugagggga

SEQ ID NO: 1204006 - RNA, 19 nt, Artificial Sequence
  Description of Artificial Sequence: Synthetic oligonucleotide
cauugaccaaucaaaacac

SEQ ID NO: 1204007 - RNA, 19 nt, Artificial Sequence
  Description of Artificial Sequence: Synthetic oligonucleotide
agagcaauuacccuccagu

SEQ ID NO: 1204008 - RNA, 19 nt, Artificial Sequence
  Description of Artificial Sequence: Synthetic oligonucleotide
augaucauguuguuccacg

SEQ ID NO: 1204009 - RNA, 19 nt, Artificial Sequence
  Description of Artificial Sequence: Synthetic oligonucleotide
aauguauacguugaaccga

SEQ ID NO: 1204010 - RNA, 19 nt, Artificial Sequence
  Description of Artificial Sequence: Synthetic oligonucleotide
cuaaccaacacgcugucug

SEQ ID NO: 1204011 - RNA, 19 nt, Artificial Sequence
  Description of Artificial Sequence: Synthetic oligonucleotide
uuaauugcuguccgguagc

SEQ ID NO: 1204012 - RNA, 19 nt, Artificial Sequence
  Description of Artificial Sequence: Synthetic oligonucleotide
uguacuugggauucagucu

SEQ ID NO: 1204013 - RNA, 19 nt, Artificial Sequence
  Description of Artificial Sequence: Synthetic oligonucleotide
ggaauaaagcuucagacuc

SEQ ID NO: 1204014 - RNA, 19 nt, Artificial Sequence
  Description of Artificial Sequence: Synthetic oligonucleotide
auaaagcacagccaaauua

SEQ ID NO: 1204015 - RNA, 19 nt, Artificial Sequence
  Description of Artificial Sequence: Synthetic oligonucleotide
uugcuugcaggaaggaagg

SEQ ID NO: 1204016 - RNA, 19 nt, Artificial Sequence
  Description of Artificial Sequence: Synthetic oligonucleotide
aggaguaugaucauguugu

SEQ ID NO: 1204017 - RNA, 19 nt, Artificial Sequence
  Description of Artificial Sequence: Synthetic oligonucleotide
uuuaauugccuugaggaau

SEQ ID NO: 1204018 - RNA, 19 nt, Artificial Sequence
  Description of Artificial Sequence: Synthetic oligonucleotide
ucaaugaauaguaguaauu

SEQ ID NO: 1204019 - RNA, 19 nt, Artificial Sequence
  Description of Artificial Sequence: Synthetic oligonucleotide
  modified_base (7)..(7): a, c, u, g, unknown or other
uggcuunccuguuugguug

SEQ ID NO: 1204020 - RNA, 19 nt, Artificial Sequence
  Description of Artificial Sequence: Synthetic oligonucleotide
uugaugaguagaauuccca

SEQ ID NO: 1204021 - RNA, 19 nt, Artificial Sequence
  Description of Artificial Sequence: Synthetic oligonucleotide
aaccguuucaggcuauucu

SEQ ID NO: 1204022 - RNA, 19 nt, Artificial Sequence
  Description of Artificial Sequence: Synthetic oligonucleotide
agggaugcagcccauugac

SEQ ID NO: 1204023 - RNA, 19 nt, Artificial Sequence
  Description of Artificial Sequence: Synthetic oligonucleotide
uuuauggcccuaaccaaca

SEQ ID NO: 1204024 - RNA, 19 nt, Artificial Sequence
  Description of Artificial Sequence: Synthetic oligonucleotide
agagcacagggcuuggaac

SEQ ID NO: 1204025 - RNA, 19 nt, Artificial Sequence
  Description of Artificial Sequence: Synthetic oligonucleotide
aauuaggcagagccaaagu

SEQ ID NO: 1204026 - RNA, 19 nt, Artificial Sequence
  Description of Artificial Sequence: Synthetic oligonucleotide
gagagagugaucauuagga

SEQ ID NO: 1204027 - RNA, 19 nt, Artificial Sequence
  Description of Artificial Sequence: Synthetic oligonucleotide
uuacauuuggguagucuga

SEQ ID NO: 1204028 - RNA, 19 nt, Artificial Sequence
  Description of Artificial Sequence: Synthetic oligonucleotide
auggcccuaaccaacacgc

SEQ ID NO: 1204029 - RNA, 19 nt, Artificial Sequence
  Description of Artificial Sequence: Synthetic oligonucleotide
ucagaucugcauacagccg

SEQ ID NO: 1204030 - RNA, 19 nt, Artificial Sequence
  Description of Artificial Sequence: Synthetic oligonucleotide
uucaaugaauaguaguaau

SEQ ID NO: 1204031 - RNA, 19 nt, Artificial Sequence
  Description of Artificial Sequence: Synthetic oligonucleotide
aauaaagcuucagacuccu

SEQ ID NO: 1204032 - RNA, 19 nt, Artificial Sequence
  Description of Artificial Sequence: Synthetic oligonucleotide
guacuugggauucagucug

SEQ ID NO: 1204033 - RNA, 19 nt, Artificial Sequence
  Description of Artificial Sequence: Synthetic oligonucleotide
guauacguugaaccgaggc

SEQ ID NO: 1204034 - RNA, 19 nt, Artificial Sequence
  Description of Artificial Sequence: Synthetic oligonucleotide
ugcuuagggcuccaaagcc

SEQ ID NO: 1204035 - RNA, 19 nt, Artificial Sequence
  Description of Artificial Sequence: Synthetic oligonucleotide
uucaaugcguccacguggc

SEQ ID NO: 1204036 - RNA, 19 nt, Artificial Sequence
  Description of Artificial Sequence: Synthetic oligonucleotide
uguccgguagcuuugcucu

SEQ ID NO: 1204037 - RNA, 19 nt, Artificial Sequence
  Description of Artificial Sequence: Synthetic oligonucleotide
ugucaaaaguccucucaag

SEQ ID NO: 1204038 - RNA, 19 nt, Artificial Sequence
  Description of Artificial Sequence: Synthetic oligonucleotide
gcgaugauaaagcacagcc

SEQ ID NO: 1204039 - RNA, 19 nt, Artificial Sequence
  Description of Artificial Sequence: Synthetic oligonucleotide
uauugcuggugcuauaauc

SEQ ID NO: 1204040 - RNA, 19 nt, Artificial Sequence
  Description of Artificial Sequence: Synthetic oligonucleotide
aguguuucuuggccgaguc

SEQ ID NO: 1204041 - RNA, 19 nt, Artificial Sequence
  Description of Artificial Sequence: Synthetic oligonucleotide
cuuuuaagauauuccccag

SEQ ID NO: 1204042 - RNA, 19 nt, Artificial Sequence
  Description of Artificial Sequence: Synthetic oligonucleotide
uccgccacuccccacuucg

SEQ ID NO: 1204043 - RNA, 19 nt, Artificial Sequence
  Description of Artificial Sequence: Synthetic oligonucleotide
aacuaugcccaaauucauc

SEQ ID NO: 1204044 - RNA, 19 nt, Artificial Sequence
  Description of Artificial Sequence: Synthetic oligonucleotide
cuaaacccaaauguauacg

SEQ ID NO: 1204045 - RNA, 19 nt, Artificial Sequence
  Description of Artificial Sequence: Synthetic oligonucleotide
gaaccgaggccucaugugc

SEQ ID NO: 1204046 - RNA, 19 nt, Artificial Sequence
  Description of Artificial Sequence: Synthetic oligonucleotide
uaguaguaauuauaguuua

SEQ ID NO: 1204047 - RNA, 19 nt, Artificial Sequence
  Description of Artificial Sequence: Synthetic oligonucleotide
uuacccuccagucaaccaa

SEQ ID NO: 1204048 - RNA, 19 nt, Artificial Sequence
  Description of Artificial Sequence: Synthetic oligonucleotide
ugaucauguuguuccacgc

SEQ ID NO: 1204049 - RNA, 19 nt, Artificial Sequence
  Description of Artificial Sequence: Synthetic oligonucleotide
aauuaccuguguuguccag

SEQ ID NO: 1204050 - RNA, 19 nt, Artificial Sequence
  Description of Artificial Sequence: Synthetic oligonucleotide
accguuucaggcuauucug

SEQ ID NO: 1204051 - RNA, 19 nt, Artificial Sequence
  Description of Artificial Sequence: Synthetic oligonucleotide
uauaguuuauggcccuaac

SEQ ID NO: 1204052 - RNA, 19 nt, Artificial Sequence
  Description of Artificial Sequence: Synthetic oligonucleotide
aaugcguccacguggcgau

SEQ ID NO: 1204053 - RNA, 19 nt, Artificial Sequence
  Description of Artificial Sequence: Synthetic oligonucleotide
agggcacuccgaaagagcc

SEQ ID NO: 1204054 - RNA, 19 nt, Artificial Sequence
  Description of Artificial Sequence: Synthetic oligonucleotide
ucucccgacugcuucagcc

SEQ ID NO: 1204055 - RNA, 19 nt, Artificial Sequence
  Description of Artificial Sequence: Synthetic oligonucleotide
uucuuagugugucugcuua

SEQ ID NO: 1204056 - RNA, 19 nt, Artificial Sequence
  Description of Artificial Sequence: Synthetic oligonucleotide
auacguugaaccgaggccu

SEQ ID NO: 1204057 - RNA, 19 nt, Artificial Sequence
  Description of Artificial Sequence: Synthetic oligonucleotide
uuccagcguacauaaagca

SEQ ID NO: 1204058 - RNA, 19 nt, Artificial Sequence
  Description of Artificial Sequence: Synthetic oligonucleotide
gcauugaggggacacaccg

SEQ ID NO: 1204059 - RNA, 19 nt, Artificial Sequence
  Description of Artificial Sequence: Synthetic oligonucleotide
cuucggaucacacaccuca

SEQ ID NO: 1204060 - RNA, 19 nt, Artificial Sequence
  Description of Artificial Sequence: Synthetic oligonucleotide
gaauuaauuccagugccuc

SEQ ID NO: 1204061 - RNA, 19 nt, Artificial Sequence
  Description of Artificial Sequence: Synthetic oligonucleotide
gaguagaauucccagcaca

SEQ ID NO: 1204062 - RNA, 19 nt, Artificial Sequence
  Description of Artificial Sequence: Synthetic oligonucleotide
gaauaaagcuucagacucc

SEQ ID NO: 1204063 - RNA, 19 nt, Artificial Sequence
  Description of Artificial Sequence: Synthetic oligonucleotide
agcaauuacccuccaguca

SEQ ID NO: 1204064 - RNA, 19 nt, Artificial Sequence
  Description of Artificial Sequence: Synthetic oligonucleotide
gaccacgaagcccacucgg

SEQ ID NO: 1204065 - RNA, 19 nt, Artificial Sequence
  Description of Artificial Sequence: Synthetic oligonucleotide
auuaccuguguuguccagg

SEQ ID NO: 1204066 - RNA, 19 nt, Artificial Sequence
  Description of Artificial Sequence: Synthetic oligonucleotide
uccgccugugcuuaauugc

SEQ ID NO: 1204067 - RNA, 19 nt, Artificial Sequence
  Description of Artificial Sequence: Synthetic oligonucleotide
acguuugccaaggagaaca

SEQ ID NO: 1204068 - RNA, 19 nt, Artificial Sequence
  Description of Artificial Sequence: Synthetic oligonucleotide
ucuuagugugucugcuuag

SEQ ID NO: 1204069 - RNA, 19 nt, Artificial Sequence
  Description of Artificial Sequence: Synthetic oligonucleotide
uuaccaugguaacuggcaa

SEQ ID NO: 1204070 - RNA, 19 nt, Artificial Sequence
  Description of Artificial Sequence: Synthetic oligonucleotide
agccaaauuaccaugguaa

SEQ ID NO: 1204071 - RNA, 19 nt, Artificial Sequence
  Description of Artificial Sequence: Synthetic oligonucleotide
agacuguaauucuccuugg

SEQ ID NO: 1204072 - RNA, 19 nt, Artificial Sequence
  Description of Artificial Sequence: Synthetic oligonucleotide
uugaaccgaggccucaugu

SEQ ID NO: 1204073 - RNA, 19 nt, Artificial Sequence
  Description of Artificial Sequence: Synthetic oligonucleotide
auuaccaugguaacuggca

SEQ ID NO: 1204074 - RNA, 19 nt, Artificial Sequence
  Description of Artificial Sequence: Synthetic oligonucleotide
uguauacguugaaccgagg

SEQ ID NO: 1204075 - RNA, 19 nt, Artificial Sequence
  Description of Artificial Sequence: Synthetic oligonucleotide
ugaaccgaggccucaugug

SEQ ID NO: 1204076 - RNA, 19 nt, Artificial Sequence
  Description of Artificial Sequence: Synthetic oligonucleotide
ugggcuaaauuaccugugu

SEQ ID NO: 1204077 - RNA, 19 nt, Artificial Sequence
  Description of Artificial Sequence: Synthetic oligonucleotide
uucccgguaauaucugaug

SEQ ID NO: 1204078 - RNA, 19 nt, Artificial Sequence
  Description of Artificial Sequence: Synthetic oligonucleotide
ugcugguggacccguaccc

SEQ ID NO: 1204079 - RNA, 19 nt, Artificial Sequence
  Description of Artificial Sequence: Synthetic oligonucleotide
acaccgacagggcacuccg

SEQ ID NO: 1204080 - RNA, 19 nt, Artificial Sequence
  Description of Artificial Sequence: Synthetic oligonucleotide
uuaauuccagugccucucu

SEQ ID NO: 1204081 - RNA, 19 nt, Artificial Sequence
  Description of Artificial Sequence: Synthetic oligonucleotide
uaaccaacacgcugucugc

SEQ ID NO: 1204082 - RNA, 19 nt, Artificial Sequence
  Description of Artificial Sequence: Synthetic oligonucleotide
uccagcguacauaaagcau

SEQ ID NO: 1204083 - RNA, 19 nt, Artificial Sequence
  Description of Artificial Sequence: Synthetic oligonucleotide
auauuccccagguuauuca

SEQ ID NO: 1204084 - RNA, 19 nt, Artificial Sequence
  Description of Artificial Sequence: Synthetic oligonucleotide
aagauauuccccagguuau

SEQ ID NO: 1204085 - RNA, 19 nt, Artificial Sequence
  Description of Artificial Sequence: Synthetic oligonucleotide
ugaguagaauucccagcac

SEQ ID NO: 1204086 - RNA, 19 nt, Artificial Sequence
  Description of Artificial Sequence: Synthetic oligonucleotide
cagcguacauaaagcaugc

SEQ ID NO: 1204087 - RNA, 19 nt, Artificial Sequence
  Description of Artificial Sequence: Synthetic oligonucleotide
augagagagugaucauuag

SEQ ID NO: 1204088 - RNA, 19 nt, Artificial Sequence
  Description of Artificial Sequence: Synthetic oligonucleotide
auguauacguugaaccgag

SEQ ID NO: 1204089 - RNA, 19 nt, Artificial Sequence
  Description of Artificial Sequence: Synthetic oligonucleotide
ucaagcauucaagagugua

SEQ ID NO: 1204090 - RNA, 19 nt, Artificial Sequence
  Description of Artificial Sequence: Synthetic oligonucleotide
cuuagcauugaggggacac

SEQ ID NO: 1204091 - RNA, 19 nt, Artificial Sequence
  Description of Artificial Sequence: Synthetic oligonucleotide
uuaagauauuccccagguu

SEQ ID NO: 1204092 - RNA, 19 nt, Artificial Sequence
  Description of Artificial Sequence: Synthetic oligonucleotide
agcacguuugccaaggaga

SEQ ID NO: 1204093 - RNA, 19 nt, Artificial Sequence
  Description of Artificial Sequence: Synthetic oligonucleotide
cagugaggggagaucagcc

SEQ ID NO: 1204094 - RNA, 19 nt, Artificial Sequence
  Description of Artificial Sequence: Synthetic oligonucleotide
ccauugaccaaucaaaaca

SEQ ID NO: 1204095 - RNA, 19 nt, Artificial Sequence
  Description of Artificial Sequence: Synthetic oligonucleotide
gcuaaacccaaauguauac

SEQ ID NO: 1204096 - RNA, 19 nt, Artificial Sequence
  Description of Artificial Sequence: Synthetic oligonucleotide
uucggaucacacaccucag

SEQ ID NO: 1204097 - RNA, 19 nt, Artificial Sequence
  Description of Artificial Sequence: Synthetic oligonucleotide
ucuucgcuccgccacuccc

SEQ ID NO: 1204098 - RNA, 19 nt, Artificial Sequence
  Description of Artificial Sequence: Synthetic oligonucleotide
ugugcuccggcuucaguac

SEQ ID NO: 1204099 - RNA, 19 nt, Artificial Sequence
  Description of Artificial Sequence: Synthetic oligonucleotide
ugcuccggcuucaguacgg

SEQ ID NO: 1204100 - RNA, 19 nt, Artificial Sequence
  Description of Artificial Sequence: Synthetic oligonucleotide
aacaugagagagugaucau

SEQ ID NO: 1204101 - RNA, 19 nt, Artificial Sequence
  Description of Artificial Sequence: Synthetic oligonucleotide
caugagagagugaucauua

SEQ ID NO: 1204102 - RNA, 19 nt, Artificial Sequence
  Description of Artificial Sequence: Synthetic oligonucleotide
agugaaccuuagcauugag

SEQ ID NO: 1204103 - RNA, 19 nt, Artificial Sequence
  Description of Artificial Sequence: Synthetic oligonucleotide
gcguacauaaagcaugcug

SEQ ID NO: 1204104 - RNA, 19 nt, Artificial Sequence
  Description of Artificial Sequence: Synthetic oligonucleotide
cagucuggguauuuccgcc

SEQ ID NO: 1204105 - RNA, 19 nt, Artificial Sequence
  Description of Artificial Sequence: Synthetic oligonucleotide
ccagcguacauaaagcaug

SEQ ID NO: 1204106 - RNA, 19 nt, Artificial Sequence
  Description of Artificial Sequence: Synthetic oligonucleotide
uuccacgccaggcugugcu

SEQ ID NO: 1204107 - RNA, 19 nt, Artificial Sequence
  Description of Artificial Sequence: Synthetic oligonucleotide
uauuccccagguuauucau

SEQ ID NO: 1204108 - RNA, 19 nt, Artificial Sequence
  Description of Artificial Sequence: Synthetic oligonucleotide
aaggagaacaugagagagu

SEQ ID NO: 1204109 - RNA, 19 nt, Artificial Sequence
  Description of Artificial Sequence: Synthetic oligonucleotide
agaucugcauacagccgcc

SEQ ID NO: 1204110 - RNA, 19 nt, Artificial Sequence
  Description of Artificial Sequence: Synthetic oligonucleotide
guccccagcgaugauaaag

SEQ ID NO: 1204111 - RNA, 19 nt, Artificial Sequence
  Description of Artificial Sequence: Synthetic oligonucleotide
uuccgccugugcuuaauug

SEQ ID NO: 1204112 - RNA, 19 nt, Artificial Sequence
  Description of Artificial Sequence: Synthetic oligonucleotide
cuuuaauugccuugaggaa

SEQ ID NO: 1204113 - RNA, 19 nt, Artificial Sequence
  Description of Artificial Sequence: Synthetic oligonucleotide
guaaaugcugguggacccg

SEQ ID NO: 1204114 - RNA, 19 nt, Artificial Sequence
  Description of Artificial Sequence: Synthetic oligonucleotide
acuccgaaagagccggucu

SEQ ID NO: 1204115 - RNA, 19 nt, Artificial Sequence
  Description of Artificial Sequence: Synthetic oligonucleotide
aguccucucaagcauucaa

SEQ ID NO: 1204116 - RNA, 19 nt, Artificial Sequence
  Description of Artificial Sequence: Synthetic oligonucleotide
cacguggcgauucagaucu

SEQ ID NO: 1204117 - RNA, 19 nt, Artificial Sequence
  Description of Artificial Sequence: Synthetic oligonucleotide
ucggaucacacaccucaga

SEQ ID NO: 1204118 - RNA, 19 nt, Artificial Sequence
  Description of Artificial Sequence: Synthetic oligonucleotide
agcauugaggggacacacc

SEQ ID NO: 1204119 - RNA, 19 nt, Artificial Sequence
  Description of Artificial Sequence: Synthetic oligonucleotide
acccguacccaugauuuuc

SEQ ID NO: 1204120 - RNA, 19 nt, Artificial Sequence
  Description of Artificial Sequence: Synthetic oligonucleotide
aaaaguccucucaagcauu

SEQ ID NO: 1204121 - RNA, 19 nt, Artificial Sequence
  Description of Artificial Sequence: Synthetic oligonucleotide
uagcauugaggggacacac

SEQ ID NO: 1204122 - RNA, 19 nt, Artificial Sequence
  Description of Artificial Sequence: Synthetic oligonucleotide
  modified_base (3)..(3): a, c, u, g, unknown or other
uunccuguuugguugccuu

SEQ ID NO: 1204123 - RNA, 19 nt, Artificial Sequence
  Description of Artificial Sequence: Synthetic oligonucleotide
  modified_base (2)..(2): a, c, u, g, unknown or other
unccuguuugguugccuug

SEQ ID NO: 1204124 - RNA, 19 nt, Artificial Sequence
  Description of Artificial Sequence: Synthetic oligonucleotide
cuuagggcuccaaagccga

SEQ ID NO: 1204125 - RNA, 19 nt, Artificial Sequence
  Description of Artificial Sequence: Synthetic oligonucleotide
uuauggcccuaaccaacac

SEQ ID NO: 1204126 - RNA, 19 nt, Artificial Sequence
  Description of Artificial Sequence: Synthetic oligonucleotide
uuggacagccaaugacagc

SEQ ID NO: 1204127 - RNA, 19 nt, Artificial Sequence
  Description of Artificial Sequence: Synthetic oligonucleotide
cucucaagcauucaagagu

SEQ ID NO: 1204128 - RNA, 19 nt, Artificial Sequence
  Description of Artificial Sequence: Synthetic oligonucleotide
gggcuuggaacauuaggcc

SEQ ID NO: 1204129 - RNA, 19 nt, Artificial Sequence
  Description of Artificial Sequence: Synthetic oligonucleotide
ucaaugcguccacguggcg

SEQ ID NO: 1204130 - RNA, 19 nt, Artificial Sequence
  Description of Artificial Sequence: Synthetic oligonucleotide
agaguguauugcuggugcu

SEQ ID NO: 1204131 - RNA, 19 nt, Artificial Sequence
  Description of Artificial Sequence: Synthetic oligonucleotide
gaguaugaucauguuguuc

SEQ ID NO: 1204132 - RNA, 19 nt, Artificial Sequence
  Description of Artificial Sequence: Synthetic oligonucleotide
gugcuuaauugcuguccgg

SEQ ID NO: 1204133 - RNA, 19 nt, Artificial Sequence
  Description of Artificial Sequence: Synthetic oligonucleotide
agcuucagacuccuuguau

SEQ ID NO: 1204134 - RNA, 19 nt, Artificial Sequence
  Description of Artificial Sequence: Synthetic oligonucleotide
cagggcacuccgaaagagc

SEQ ID NO: 1204135 - RNA, 19 nt, Artificial Sequence
  Description of Artificial Sequence: Synthetic oligonucleotide
ggaucacacaccucagagc

SEQ ID NO: 1204136 - RNA, 19 nt, Artificial Sequence
  Description of Artificial Sequence: Synthetic oligonucleotide
ccucgguaaaugcuggugg

SEQ ID NO: 1204137 - RNA, 19 nt, Artificial Sequence
  Description of Artificial Sequence: Synthetic oligonucleotide
ucccgacugcuucagccug

SEQ ID NO: 1204138 - RNA, 19 nt, Artificial Sequence
  Description of Artificial Sequence: Synthetic oligonucleotide
aguaguaauuauaguuuau

SEQ ID NO: 1204139 - RNA, 19 nt, Artificial Sequence
  Description of Artificial Sequence: Synthetic oligonucleotide
cagccugggcuaaauuacc

SEQ ID NO: 1204140 - RNA, 19 nt, Artificial Sequence
  Description of Artificial Sequence: Synthetic oligonucleotide
ugaggggagaucagccauc

SEQ ID NO: 1204141 - RNA, 19 nt, Artificial Sequence
  Description of Artificial Sequence: Synthetic oligonucleotide
agcccauugaccaaucaaa

SEQ ID NO: 1204142 - RNA, 19 nt, Artificial Sequence
  Description of Artificial Sequence: Synthetic oligonucleotide
  modified_base (8)..(8): a, c, u, g, unknown or other
auggcuunccuguuugguu

SEQ ID NO: 1204143 - RNA, 19 nt, Artificial Sequence
  Description of Artificial Sequence: Synthetic oligonucleotide
uagggcuccaaagccgaag

SEQ ID NO: 1204144 - RNA, 19 nt, Artificial Sequence
  Description of Artificial Sequence: Synthetic oligonucleotide
cuucgcuccgccacucccc

SEQ ID NO: 1204145 - RNA, 19 nt, Artificial Sequence
  Description of Artificial Sequence: Synthetic oligonucleotide
acagggcacuccgaaagag

SEQ ID NO: 1204146 - RNA, 19 nt, Artificial Sequence
  Description of Artificial Sequence: Synthetic oligonucleotide
accaacugacuuaaugaga

SEQ ID NO: 1204147 - RNA, 19 nt, Artificial Sequence
  Description of Artificial Sequence: Synthetic oligonucleotide
caugcguucaaugcgucca

SEQ ID NO: 1204148 - RNA, 19 nt, Artificial Sequence
  Description of Artificial Sequence: Synthetic oligonucleotide
gagggaugcagcccauuga

SEQ ID NO: 1204149 - RNA, 19 nt, Artificial Sequence
  Description of Artificial Sequence: Synthetic oligonucleotide
uaauuccagugccucucuc

SEQ ID NO: 1204150 - RNA, 19 nt, Artificial Sequence
  Description of Artificial Sequence: Synthetic oligonucleotide
ucaggcuauucugaacuau

SEQ ID NO: 1204151 - RNA, 19 nt, Artificial Sequence
  Description of Artificial Sequence: Synthetic oligonucleotide
caagaguguauugcuggug

SEQ ID NO: 1204152 - RNA, 19 nt, Artificial Sequence
  Description of Artificial Sequence: Synthetic oligonucleotide
uggcuguauuuggacagcc

SEQ ID NO: 1204153 - RNA, 19 nt, Artificial Sequence
  Description of Artificial Sequence: Synthetic oligonucleotide
aucugcauacagccgccca

SEQ ID NO: 1204154 - RNA, 19 nt, Artificial Sequence
  Description of Artificial Sequence: Synthetic oligonucleotide
uucaguacgguggcauuuc

SEQ ID NO: 1204155 - RNA, 19 nt, Artificial Sequence
  Description of Artificial Sequence: Synthetic oligonucleotide
auggcuaaacccaaaugua

SEQ ID NO: 1204156 - RNA, 19 nt, Artificial Sequence
  Description of Artificial Sequence: Synthetic oligonucleotide
acaccucagagcauugaug

SEQ ID NO: 1204157 - RNA, 19 nt, Artificial Sequence
  Description of Artificial Sequence: Synthetic oligonucleotide
cagcacguuugccaaggag

SEQ ID NO: 1204158 - RNA, 19 nt, Artificial Sequence
  Description of Artificial Sequence: Synthetic oligonucleotide
gcuuagggcuccaaagccg

SEQ ID NO: 1204159 - RNA, 19 nt, Artificial Sequence
  Description of Artificial Sequence: Synthetic oligonucleotide
gggaaucacaagaaacccc

SEQ ID NO: 1204160 - RNA, 19 nt, Artificial Sequence
  Description of Artificial Sequence: Synthetic oligonucleotide
uacuugggauucagucuga

SEQ ID NO: 1204161 - RNA, 19 nt, Artificial Sequence
  Description of Artificial Sequence: Synthetic oligonucleotide
uaauugcuguccgguagcu

SEQ ID NO: 1204162 - RNA, 19 nt, Artificial Sequence
  Description of Artificial Sequence: Synthetic oligonucleotide
gagucgagauguccccagc

SEQ ID NO: 1204163 - RNA, 19 nt, Artificial Sequence
  Description of Artificial Sequence: Synthetic oligonucleotide
auuaggccaauuaggcaga

SEQ ID NO: 1204164 - RNA, 19 nt, Artificial Sequence
  Description of Artificial Sequence: Synthetic oligonucleotide
cuugaggaauaaagcuuca

SEQ ID NO: 1204165 - RNA, 19 nt, Artificial Sequence
  Description of Artificial Sequence: Synthetic oligonucleotide
uggacccguacccaugauu

SEQ ID NO: 1204166 - RNA, 19 nt, Artificial Sequence
  Description of Artificial Sequence: Synthetic oligonucleotide
uucaggcuauucugaacua

SEQ ID NO: 1204167 - RNA, 19 nt, Artificial Sequence
  Description of Artificial Sequence: Synthetic oligonucleotide
ugguggacccguacccaug

SEQ ID NO: 1204168 - RNA, 19 nt, Artificial Sequence
  Description of Artificial Sequence: Synthetic oligonucleotide
uacguugaaccgaggccuc

SEQ ID NO: 1204169 - RNA, 19 nt, Artificial Sequence
  Description of Artificial Sequence: Synthetic oligonucleotide
cagcgaugauaaagcacag

SEQ ID NO: 1204170 - RNA, 19 nt, Artificial Sequence
  Description of Artificial Sequence: Synthetic oligonucleotide
guugaaccgaggccucaug

SEQ ID NO: 1204171 - RNA, 19 nt, Artificial Sequence
  Description of Artificial Sequence: Synthetic oligonucleotide
ggaaggaagggaaucacaa

SEQ ID NO: 1204172 - RNA, 19 nt, Artificial Sequence
  Description of Artificial Sequence: Synthetic oligonucleotide
agccggucuucgcuccgcc

SEQ ID NO: 1204173 - RNA, 19 nt, Artificial Sequence
  Description of Artificial Sequence: Synthetic oligonucleotide
gugcauuuguucuagcuuu

SEQ ID NO: 1204174 - RNA, 19 nt, Artificial Sequence
  Description of Artificial Sequence: Synthetic oligonucleotide
ggcccuaaccaacacgcug

SEQ ID NO: 1204175 - RNA, 19 nt, Artificial Sequence
  Description of Artificial Sequence: Synthetic oligonucleotide
acauuuggguagucugaaa

SEQ ID NO: 1204176 - RNA, 19 nt, Artificial Sequence
  Description of Artificial Sequence: Synthetic oligonucleotide
ggcauucaaugaauaguag

SEQ ID NO: 1204177 - RNA, 19 nt, Artificial Sequence
  Description of Artificial Sequence: Synthetic oligonucleotide
ugccaauguuguagugaac

SEQ ID NO: 1204178 - RNA, 19 nt, Artificial Sequence
  Description of Artificial Sequence: Synthetic oligonucleotide
accuuagcauugaggggac

SEQ ID NO: 1204179 - RNA, 19 nt, Artificial Sequence
  Description of Artificial Sequence: Synthetic oligonucleotide
uuuccgccugugcuuaauu

SEQ ID NO: 1204180 - RNA, 19 nt, Artificial Sequence
  Description of Artificial Sequence: Synthetic oligonucleotide
gugcuccggcuucaguacg

SEQ ID NO: 1204181 - RNA, 19 nt, Artificial Sequence
  Description of Artificial Sequence: Synthetic oligonucleotide
caauuacccuccagucaac

SEQ ID NO: 1204182 - RNA, 19 nt, Artificial Sequence
  Description of Artificial Sequence: Synthetic oligonucleotide
cagguuauucauggcauga

SEQ ID NO: 1204183 - RNA, 19 nt, Artificial Sequence
  Description of Artificial Sequence: Synthetic oligonucleotide
agagccggucuucgcuccg

SEQ ID NO: 1204184 - RNA, 19 nt, Artificial Sequence
  Description of Artificial Sequence: Synthetic oligonucleotide
gcuaaauuaccuguguugu

SEQ ID NO: 1204185 - RNA, 19 nt, Artificial Sequence
  Description of Artificial Sequence: Synthetic oligonucleotide
cucugcgaccacgaagccc

SEQ ID NO: 1204186 - RNA, 19 nt, Artificial Sequence
  Description of Artificial Sequence: Synthetic oligonucleotide
  modified_base (9)..(9): a, c, u, g, unknown or other
gauggcuunccuguuuggu

SEQ ID NO: 1204187 - RNA, 19 nt, Artificial Sequence
  Description of Artificial Sequence: Synthetic oligonucleotide
ugcugccucgaaccguuuc

SEQ ID NO: 1204188 - RNA, 19 nt, Artificial Sequence
  Description of Artificial Sequence: Synthetic oligonucleotide
caagcauucaagaguguau

SEQ ID NO: 1204189 - RNA, 19 nt, Artificial Sequence
  Description of Artificial Sequence: Synthetic oligonucleotide
uccccacuucggaucacac

SEQ ID NO: 1204190 - RNA, 19 nt, Artificial Sequence
  Description of Artificial Sequence: Synthetic oligonucleotide
auguuguagugaaccuuag

SEQ ID NO: 1204191 - RNA, 19 nt, Artificial Sequence
  Description of Artificial Sequence: Synthetic oligonucleotide
accaacacgcugucugcaa

SEQ ID NO: 1204192 - RNA, 19 nt, Artificial Sequence
  Description of Artificial Sequence: Synthetic oligonucleotide
gaucagccaucuuuucugu

SEQ ID NO: 1204193 - RNA, 19 nt, Artificial Sequence
  Description of Artificial Sequence: Synthetic oligonucleotide
gaucugcauacagccgccc

SEQ ID NO: 1204194 - RNA, 19 nt, Artificial Sequence
  Description of Artificial Sequence: Synthetic oligonucleotide
uccgaaagagccggucuuc

SEQ ID NO: 1204195 - RNA, 19 nt, Artificial Sequence
  Description of Artificial Sequence: Synthetic oligonucleotide
ggcgauucagaucugcaua

SEQ ID NO: 1204196 - RNA, 19 nt, Artificial Sequence
  Description of Artificial Sequence: Synthetic oligonucleotide
gugaucauuaggaauuaau

SEQ ID NO: 1204197 - RNA, 19 nt, Artificial Sequence
  Description of Artificial Sequence: Synthetic oligonucleotide
guacgguggcauuucucca

SEQ ID NO: 1204198 - RNA, 19 nt, Artificial Sequence
  Description of Artificial Sequence: Synthetic oligonucleotide
cauacagccgcccaagguu

SEQ ID NO: 1204199 - RNA, 19 nt, Artificial Sequence
  Description of Artificial Sequence: Synthetic oligonucleotide
gaaccguuucaggcuauuc

SEQ ID NO: 1204200 - RNA, 19 nt, Artificial Sequence
  Description of Artificial Sequence: Synthetic oligonucleotide
auuauaguuuauggcccua

SEQ ID NO: 1204201 - RNA, 19 nt, Artificial Sequence
  Description of Artificial Sequence: Synthetic oligonucleotide
ucauggcaugaauguacuu

SEQ ID NO: 1204202 - RNA, 19 nt, Artificial Sequence
  Description of Artificial Sequence: Synthetic oligonucleotide
cacacaccucagagcauug

SEQ ID NO: 1204203 - RNA, 19 nt, Artificial Sequence
  Description of Artificial Sequence: Synthetic oligonucleotide
cacaccgacagggcacucc

SEQ ID NO: 1204204 - RNA, 19 nt, Artificial Sequence
  Description of Artificial Sequence: Synthetic oligonucleotide
agugaucauuaggaauuaa

SEQ ID NO: 1204205 - RNA, 19 nt, Artificial Sequence
  Description of Artificial Sequence: Synthetic oligonucleotide
uuagggcuccaaagccgaa

SEQ ID NO: 1204206 - RNA, 19 nt, Artificial Sequence
  Description of Artificial Sequence: Synthetic oligonucleotide
cauugaggggacacaccga

SEQ ID NO: 1204207 - RNA, 19 nt, Artificial Sequence
  Description of Artificial Sequence: Synthetic oligonucleotide
caaggagaucucauagugu

SEQ ID NO: 1204208 - RNA, 19 nt, Artificial Sequence
  Description of Artificial Sequence: Synthetic oligonucleotide
  modified_base (6)..(6): a, c, u, g, unknown or other
ggcuunccuguuugguugc

SEQ ID NO: 1204209 - RNA, 19 nt, Artificial Sequence
  Description of Artificial Sequence: Synthetic oligonucleotide
aauugcuguccgguagcuu

SEQ ID NO: 1204210 - RNA, 19 nt, Artificial Sequence
  Description of Artificial Sequence: Synthetic oligonucleotide
caaugcguccacguggcga

SEQ ID NO: 1204211 - RNA, 19 nt, Artificial Sequence
  Description of Artificial Sequence: Synthetic oligonucleotide
acuucggaucacacaccuc

SEQ ID NO: 1204212 - RNA, 19 nt, Artificial Sequence
  Description of Artificial Sequence: Synthetic oligonucleotide
cccguacccaugauuuucc

SEQ ID NO: 1204213 - RNA, 19 nt, Artificial Sequence
  Description of Artificial Sequence: Synthetic oligonucleotide
gccaauuaggcagagccaa

SEQ ID NO: 1204214 - RNA, 19 nt, Artificial Sequence
  Description of Artificial Sequence: Synthetic oligonucleotide
gagaucucauaguguuucu

SEQ ID NO: 1204215 - RNA, 19 nt, Artificial Sequence
  Description of Artificial Sequence: Synthetic oligonucleotide
cacgccaggcugugcuccg

SEQ ID NO: 1204216 - RNA, 19 nt, Artificial Sequence
  Description of Artificial Sequence: Synthetic oligonucleotide
ccaccucgguaaaugcugg

SEQ ID NO: 1204217 - RNA, 19 nt, Artificial Sequence
  Description of Artificial Sequence: Synthetic oligonucleotide
agccgcccaagguuguagu

SEQ ID NO: 1204218 - RNA, 19 nt, Artificial Sequence
  Description of Artificial Sequence: Synthetic oligonucleotide
cugccucgaaccguuucag

SEQ ID NO: 1204219 - RNA, 19 nt, Artificial Sequence
  Description of Artificial Sequence: Synthetic oligonucleotide
cagcccauugaccaaucaa

SEQ ID NO: 1204220 - RNA, 19 nt, Artificial Sequence
  Description of Artificial Sequence: Synthetic oligonucleotide
agccugggcuaaauuaccu

SEQ ID NO: 1204221 - RNA, 19 nt, Artificial Sequence
  Description of Artificial Sequence: Synthetic oligonucleotide
cagccaaauuaccauggua

SEQ ID NO: 1204222 - RNA, 19 nt, Artificial Sequence
  Description of Artificial Sequence: Synthetic oligonucleotide
ugcuguccgguagcuuugc

SEQ ID NO: 1204223 - RNA, 19 nt, Artificial Sequence
  Description of Artificial Sequence: Synthetic oligonucleotide
gucugcuuagggcuccaaa

SEQ ID NO: 1204224 - RNA, 19 nt, Artificial Sequence
  Description of Artificial Sequence: Synthetic oligonucleotide
cucgaaccguuucaggcua

SEQ ID NO: 1204225 - RNA, 19 nt, Artificial Sequence
  Description of Artificial Sequence: Synthetic oligonucleotide
gcugccucgaaccguuuca

SEQ ID NO: 1204226 - RNA, 19 nt, Artificial Sequence
  Description of Artificial Sequence: Synthetic oligonucleotide
guauuuccgccugugcuua

SEQ ID NO: 1204227 - RNA, 19 nt, Artificial Sequence
  Description of Artificial Sequence: Synthetic oligonucleotide
ucgaaccguuucaggcuau

SEQ ID NO: 1204228 - RNA, 19 nt, Artificial Sequence
  Description of Artificial Sequence: Synthetic oligonucleotide
acacaccucagagcauuga

SEQ ID NO: 1204229 - RNA, 19 nt, Artificial Sequence
  Description of Artificial Sequence: Synthetic oligonucleotide
gggacacaccgacagggca

SEQ ID NO: 1204230 - RNA, 19 nt, Artificial Sequence
  Description of Artificial Sequence: Synthetic oligonucleotide
gguggacccguacccauga

SEQ ID NO: 1204231 - RNA, 19 nt, Artificial Sequence
  Description of Artificial Sequence: Synthetic oligonucleotide
cuucagacuccuuguauuu

SEQ ID NO: 1204232 - RNA, 19 nt, Artificial Sequence
  Description of Artificial Sequence: Synthetic oligonucleotide
cacuucggaucacacaccu

SEQ ID NO: 1204233 - RNA, 19 nt, Artificial Sequence
  Description of Artificial Sequence: Synthetic oligonucleotide
ggcuaaacccaaauguaua

SEQ ID NO: 1204234 - RNA, 19 nt, Artificial Sequence
  Description of Artificial Sequence: Synthetic oligonucleotide
gacugcuucccgguaauau

SEQ ID NO: 1204235 - RNA, 19 nt, Artificial Sequence
  Description of Artificial Sequence: Synthetic oligonucleotide
cuguauuuggacagccaau

SEQ ID NO: 1204236 - RNA, 19 nt, Artificial Sequence
  Description of Artificial Sequence: Synthetic oligonucleotide
ccaugcguucaaugcgucc

SEQ ID NO: 1204237 - RNA, 19 nt, Artificial Sequence
  Description of Artificial Sequence: Synthetic oligonucleotide
cuuggccgagucgagaugu

SEQ ID NO: 1204238 - RNA, 19 nt, Artificial Sequence
  Description of Artificial Sequence: Synthetic oligonucleotide
ugcguccacguggcgauuc

SEQ ID NO: 1204239 - RNA, 19 nt, Artificial Sequence
  Description of Artificial Sequence: Synthetic oligonucleotide
cguacccaugauuuuccag

SEQ ID NO: 1204240 - RNA, 19 nt, Artificial Sequence
  Description of Artificial Sequence: Synthetic oligonucleotide
agcguacauaaagcaugcu

SEQ ID NO: 1204241 - RNA, 19 nt, Artificial Sequence
  Description of Artificial Sequence: Synthetic oligonucleotide
ggaauuaauuccagugccu

SEQ ID NO: 1204242 - RNA, 19 nt, Artificial Sequence
  Description of Artificial Sequence: Synthetic oligonucleotide
cacguuugccaaggagaac

SEQ ID NO: 1204243 - RNA, 19 nt, Artificial Sequence
  Description of Artificial Sequence: Synthetic oligonucleotide
cacuccgaaagagccgguc

SEQ ID NO: 1204244 - RNA, 19 nt, Artificial Sequence
  Description of Artificial Sequence: Synthetic oligonucleotide
cuucccgguaauaucugau

SEQ ID NO: 1204245 - RNA, 19 nt, Artificial Sequence
  Description of Artificial Sequence: Synthetic oligonucleotide
guccgguagcuuugcucug

SEQ ID NO: 1204246 - RNA, 19 nt, Artificial Sequence
  Description of Artificial Sequence: Synthetic oligonucleotide
auuuccgccugugcuuaau

SEQ ID NO: 1204247 - RNA, 19 nt, Artificial Sequence
  Description of Artificial Sequence: Synthetic oligonucleotide
ccgaaagagccggucuucg

SEQ ID NO: 1204248 - RNA, 19 nt, Artificial Sequence
  Description of Artificial Sequence: Synthetic oligonucleotide
cgagauguccccagcgaug

SEQ ID NO: 1204249 - RNA, 19 nt, Artificial Sequence
  Description of Artificial Sequence: Synthetic oligonucleotide
gcugccacggggucgagcu

SEQ ID NO: 1204250 - RNA, 19 nt, Artificial Sequence
  Description of Artificial Sequence: Synthetic oligonucleotide
cagccgcccaagguuguag

SEQ ID NO: 1204251 - RNA, 19 nt, Artificial Sequence
  Description of Artificial Sequence: Synthetic oligonucleotide
gggcacuccgaaagagccg

SEQ ID NO: 1204252 - RNA, 19 nt, Artificial Sequence
  Description of Artificial Sequence: Synthetic oligonucleotide
gcuucccgguaauaucuga

SEQ ID NO: 1204253 - RNA, 19 nt, Artificial Sequence
  Description of Artificial Sequence: Synthetic oligonucleotide
ugcugccacggggucgagc

SEQ ID NO: 1204254 - RNA, 19 nt, Artificial Sequence
  Description of Artificial Sequence: Synthetic oligonucleotide
aaaugcugguggacccgua

SEQ ID NO: 1204255 - RNA, 19 nt, Artificial Sequence
  Description of Artificial Sequence: Synthetic oligonucleotide
acguugaaccgaggccuca

SEQ ID NO: 1204256 - RNA, 19 nt, Artificial Sequence
  Description of Artificial Sequence: Synthetic oligonucleotide
gagccggucuucgcuccgc

SEQ ID NO: 1204257 - RNA, 19 nt, Artificial Sequence
  Description of Artificial Sequence: Synthetic oligonucleotide
ccgcccaagguuguaguag

SEQ ID NO: 1204258 - RNA, 19 nt, Artificial Sequence
  Description of Artificial Sequence: Synthetic oligonucleotide
cgaaagagccggucuucgc

SEQ ID NO: 1204259 - RNA, 19 nt, Artificial Sequence
  Description of Artificial Sequence: Synthetic oligonucleotide
  modified_base (13)..(13): a, c, u, g, unknown or other
aucugauggcuunccuguu

SEQ ID NO: 1204260 - RNA, 19 nt, Artificial Sequence
  Description of Artificial Sequence: Synthetic oligonucleotide
cucccgacugcuucagccu

SEQ ID NO: 1204261 - RNA, 19 nt, Artificial Sequence
  Description of Artificial Sequence: Synthetic oligonucleotide
ggacccguacccaugauuu

SEQ ID NO: 1204262 - RNA, 19 nt, Artificial Sequence
  Description of Artificial Sequence: Synthetic oligonucleotide
  modified_base (5)..(5): a, c, u, g, unknown or other
gcuunccuguuugguugcc

SEQ ID NO: 1204263 - RNA, 19 nt, Artificial Sequence
  Description of Artificial Sequence: Synthetic oligonucleotide
ccaaauuaccaugguaacu

SEQ ID NO: 1204264 - RNA, 19 nt, Artificial Sequence
  Description of Artificial Sequence: Synthetic oligonucleotide
gcccuaaccaacacgcugu

SEQ ID NO: 1204265 - RNA, 19 nt, Artificial Sequence
  Description of Artificial Sequence: Synthetic oligonucleotide
gcucugcgaccacgaagcc

SEQ ID NO: 1204266 - RNA, 19 nt, Artificial Sequence
  Description of Artificial Sequence: Synthetic oligonucleotide
ccgguaauaucugauggcu

SEQ ID NO: 1204267 - RNA, 19 nt, Artificial Sequence
  Description of Artificial Sequence: Synthetic oligonucleotide
cuccgaaagagccggucuu

SEQ ID NO: 1204268 - RNA, 19 nt, Artificial Sequence
  Description of Artificial Sequence: Synthetic oligonucleotide
cccaaauguauacguugaa

SEQ ID NO: 1204269 - RNA, 19 nt, Artificial Sequence
  Description of Artificial Sequence: Synthetic oligonucleotide
gggcuaaauuaccuguguu

SEQ ID NO: 1204270 - RNA, 19 nt, Artificial Sequence
  Description of Artificial Sequence: Synthetic oligonucleotide
cugccacggggucgagcug

SEQ ID NO: 1204271 - RNA, 19 nt, Artificial Sequence
  Description of Artificial Sequence: Synthetic oligonucleotide
ccaauuaggcagagccaaa

SEQ ID NO: 1204272 - RNA, 19 nt, Artificial Sequence
  Description of Artificial Sequence: Synthetic oligonucleotide
gacccguacccaugauuuu

SEQ ID NO: 1204273 - RNA, 19 nt, Artificial Sequence
  Description of Artificial Sequence: Synthetic oligonucleotide
ccgacugcuucagccuggg

SEQ ID NO: 1204274 - RNA, 19 nt, Artificial Sequence
  Description of Artificial Sequence: Synthetic oligonucleotide
cugguggacccguacccau

SEQ ID NO: 1204275 - RNA, 19 nt, Artificial Sequence
  Description of Artificial Sequence: Synthetic oligonucleotide
gcagacuguaauucuccuu

SEQ ID NO: 1204276 - RNA, 19 nt, Artificial Sequence
  Description of Artificial Sequence: Synthetic oligonucleotide
ggcuuugcccagcacguuu

SEQ ID NO: 1204277 - RNA, 19 nt, Artificial Sequence
  Description of Artificial Sequence: Synthetic oligonucleotide
cgccugugcuuaauugcug

SEQ ID NO: 1204278 - RNA, 19 nt, Artificial Sequence
  Description of Artificial Sequence: Synthetic oligonucleotide
ccgccacuccccacuucgg

SEQ ID NO: 1204279 - RNA, 19 nt, Artificial Sequence
  Description of Artificial Sequence: Synthetic oligonucleotide
caccgacagggcacuccga

SEQ ID NO: 1204280 - RNA, 19 nt, Artificial Sequence
  Description of Artificial Sequence: Synthetic oligonucleotide
cuucagccugggcuaaauu

SEQ ID NO: 1204281 - RNA, 19 nt, Artificial Sequence
  Description of Artificial Sequence: Synthetic oligonucleotide
ggucuucgcuccgccacuc

SEQ ID NO: 1204282 - RNA, 19 nt, Artificial Sequence
  Description of Artificial Sequence: Synthetic oligonucleotide
ggucgagcugcaaggagau

SEQ ID NO: 1204283 - RNA, 19 nt, Artificial Sequence
  Description of Artificial Sequence: Synthetic oligonucleotide
acagccgcccaagguugua

SEQ ID NO: 1204284 - RNA, 19 nt, Artificial Sequence
  Description of Artificial Sequence: Synthetic oligonucleotide
caccucgguaaaugcuggu

SEQ ID NO: 1204285 - RNA, 19 nt, Artificial Sequence
  Description of Artificial Sequence: Synthetic oligonucleotide
ccgccugugcuuaauugcu

SEQ ID NO: 1204286 - RNA, 19 nt, Artificial Sequence
  Description of Artificial Sequence: Synthetic oligonucleotide
ccguacccaugauuuucca

SEQ ID NO: 1204287 - RNA, 19 nt, Artificial Sequence
  Description of Artificial Sequence: Synthetic oligonucleotide
gccgcccaagguuguagua

SEQ ID NO: 1204288 - RNA, 19 nt, Artificial Sequence
  Description of Artificial Sequence: Synthetic oligonucleotide
gccggucuucgcuccgcca

SEQ ID NO: 1204289 - RNA, 19 nt, Artificial Sequence
  Description of Artificial Sequence: Synthetic oligonucleotide
ccgacagggcacuccgaaa

SEQ ID NO: 1204290 - RNA, 19 nt, Artificial Sequence
  Description of Artificial Sequence: Synthetic oligonucleotide
cguccacguggcgauucag

SEQ ID NO: 1204291 - RNA, 19 nt, Artificial Sequence
  Description of Artificial Sequence: Synthetic oligonucleotide
guggacccguacccaugau

SEQ ID NO: 1204292 - RNA, 19 nt, Artificial Sequence
  Description of Artificial Sequence: Synthetic oligonucleotide
gucaaccaacugacuuaau

SEQ ID NO: 1204293 - RNA, 19 nt, Artificial Sequence
  Description of Artificial Sequence: Synthetic oligonucleotide
gcuguccgguagcuuugcu

SEQ ID NO: 1204294 - RNA, 19 nt, Artificial Sequence
  Description of Artificial Sequence: Synthetic oligonucleotide
augcguccacguggcgauu

SEQ ID NO: 1204295 - RNA, 19 nt, Artificial Sequence
  Description of Artificial Sequence: Synthetic oligonucleotide
ccuuagcauugaggggaca

SEQ ID NO: 1204296 - RNA, 19 nt, Artificial Sequence
  Description of Artificial Sequence: Synthetic oligonucleotide
ccuaaccaacacgcugucu

SEQ ID NO: 1204297 - RNA, 19 nt, Artificial Sequence
  Description of Artificial Sequence: Synthetic oligonucleotide
gcuccggcuucaguacggu

SEQ ID NO: 1204298 - RNA, 19 nt, Artificial Sequence
  Description of Artificial Sequence: Synthetic oligonucleotide
cguuugccaaggagaacau

SEQ ID NO: 1204299 - RNA, 19 nt, Artificial Sequence
  Description of Artificial Sequence: Synthetic oligonucleotide
gcacuccgaaagagccggu

SEQ ID NO: 1204300 - RNA, 19 nt, Artificial Sequence
  Description of Artificial Sequence: Synthetic oligonucleotide
cggucuucgcuccgccacu

SEQ ID NO: 1204301 - RNA, 19 nt, Artificial Sequence
  Description of Artificial Sequence: Synthetic oligonucleotide
cgaaccguuucaggcuauu

SEQ ID NO: 1204302 - RNA, 19 nt, Artificial Sequence
  Description of Artificial Sequence: Synthetic oligonucleotide
aguaagacaauucaauucc

SEQ ID NO: 1204303 - RNA, 19 nt, Artificial Sequence
  Description of Artificial Sequence: Synthetic oligonucleotide
acuaauguuaaccaugugg

SEQ ID NO: 1204304 - RNA, 19 nt, Artificial Sequence
  Description of Artificial Sequence: Synthetic oligonucleotide
aaagacucugcaaacaucc

SEQ ID NO: 1204305 - RNA, 19 nt, Artificial Sequence
  Description of Artificial Sequence: Synthetic oligonucleotide
uuugaaguggggcaaaggg

SEQ ID NO: 1204306 - RNA, 19 nt, Artificial Sequence
  Description of Artificial Sequence: Synthetic oligonucleotide
uuuuaguucaaguuccugg

SEQ ID NO: 1204307 - RNA, 19 nt, Artificial Sequence
  Description of Artificial Sequence: Synthetic oligonucleotide
uguugaagaauuaugugag

SEQ ID NO: 1204308 - RNA, 19 nt, Artificial Sequence
  Description of Artificial Sequence: Synthetic oligonucleotide
aagacaugggcuuugaaug

SEQ ID NO: 1204309 - RNA, 19 nt, Artificial Sequence
  Description of Artificial Sequence: Synthetic oligonucleotide
uguguauacacaaaccaag

SEQ ID NO: 1204310 - RNA, 19 nt, Artificial Sequence
  Description of Artificial Sequence: Synthetic oligonucleotide
agaaagacgauuucaaaag

SEQ ID NO: 1204311 - RNA, 19 nt, Artificial Sequence
  Description of Artificial Sequence: Synthetic oligonucleotide
agacugaaguaacagaggc

SEQ ID NO: 1204312 - RNA, 19 nt, Artificial Sequence
  Description of Artificial Sequence: Synthetic oligonucleotide
aagucacucaaucaugacg

SEQ ID NO: 1204313 - RNA, 19 nt, Artificial Sequence
  Description of Artificial Sequence: Synthetic oligonucleotide
ucuacaucagaauuaagca

SEQ ID NO: 1204314 - RNA, 19 nt, Artificial Sequence
  Description of Artificial Sequence: Synthetic oligonucleotide
agacaaauaauccucuuuc

SEQ ID NO: 1204315 - RNA, 19 nt, Artificial Sequence
  Description of Artificial Sequence: Synthetic oligonucleotide
uguucuuaauauauaaucu

SEQ ID NO: 1204316 - RNA, 19 nt, Artificial Sequence
  Description of Artificial Sequence: Synthetic oligonucleotide
ucaaacaauuagcauagag

SEQ ID NO: 1204317 - RNA, 19 nt, Artificial Sequence
  Description of Artificial Sequence: Synthetic oligonucleotide
aucagaauuaagcaaaaug

SEQ ID NO: 1204318 - RNA, 19 nt, Artificial Sequence
  Description of Artificial Sequence: Synthetic oligonucleotide
cuuaacuccuccuacaggc

SEQ ID NO: 1204319 - RNA, 19 nt, Artificial Sequence
  Description of Artificial Sequence: Synthetic oligonucleotide
aaauauuauuaaaggagac

SEQ ID NO: 1204320 - RNA, 19 nt, Artificial Sequence
  Description of Artificial Sequence: Synthetic oligonucleotide
aaaguguacguuccuugcc

SEQ ID NO: 1204321 - RNA, 19 nt, Artificial Sequence
  Description of Artificial Sequence: Synthetic oligonucleotide
aguucaaguuccuggaacc

SEQ ID NO: 1204322 - RNA, 19 nt, Artificial Sequence
  Description of Artificial Sequence: Synthetic oligonucleotide
aaaccaaggcuuuugaagu

SEQ ID NO: 1204323 - RNA, 19 nt, Artificial Sequence
  Description of Artificial Sequence: Synthetic oligonucleotide
uucuuaauauauaaucuac

SEQ ID NO: 1204324 - RNA, 19 nt, Artificial Sequence
  Description of Artificial Sequence: Synthetic oligonucleotide
uaaauguaaacaugcaugu

SEQ ID NO: 1204325 - RNA, 19 nt, Artificial Sequence
  Description of Artificial Sequence: Synthetic oligonucleotide
auaaauguaaacaugcaug

SEQ ID NO: 1204326 - RNA, 19 nt, Artificial Sequence
  Description of Artificial Sequence: Synthetic oligonucleotide
gagacaaggacucuaagac

SEQ ID NO: 1204327 - RNA, 19 nt, Artificial Sequence
  Description of Artificial Sequence: Synthetic oligonucleotide
uuucaaaggauugccaugg

SEQ ID NO: 1204328 - RNA, 19 nt, Artificial Sequence
  Description of Artificial Sequence: Synthetic oligonucleotide
uauaaauguaaacaugcau

SEQ ID NO: 1204329 - RNA, 19 nt, Artificial Sequence
  Description of Artificial Sequence: Synthetic oligonucleotide
agugagagcagguuaagag

SEQ ID NO: 1204330 - RNA, 19 nt, Artificial Sequence
  Description of Artificial Sequence: Synthetic oligonucleotide
auuagcauagagcaaauaa

SEQ ID NO: 1204331 - RNA, 19 nt, Artificial Sequence
  Description of Artificial Sequence: Synthetic oligonucleotide
cuuugaaugcccuagacca

SEQ ID NO: 1204332 - RNA, 19 nt, Artificial Sequence
  Description of Artificial Sequence: Synthetic oligonucleotide
uuaaaggagacaaggacuc

SEQ ID NO: 1204333 - RNA, 19 nt, Artificial Sequence
  Description of Artificial Sequence: Synthetic oligonucleotide
uuauuaaaggagacaagga

SEQ ID NO: 1204334 - RNA, 19 nt, Artificial Sequence
  Description of Artificial Sequence: Synthetic oligonucleotide
uguauacacaaaccaaggc

SEQ ID NO: 1204335 - RNA, 19 nt, Artificial Sequence
  Description of Artificial Sequence: Synthetic oligonucleotide
uauucaugagcugagagcu

SEQ ID NO: 1204336 - RNA, 19 nt, Artificial Sequence
  Description of Artificial Sequence: Synthetic oligonucleotide
uuagcauagagcaaauaaa

SEQ ID NO: 1204337 - RNA, 19 nt, Artificial Sequence
  Description of Artificial Sequence: Synthetic oligonucleotide
caaaccaaggcuuuugaag

SEQ ID NO: 1204338 - RNA, 19 nt, Artificial Sequence
  Description of Artificial Sequence: Synthetic oligonucleotide
aaggauaccccugagaagu

SEQ ID NO: 1204339 - RNA, 19 nt, Artificial Sequence
  Description of Artificial Sequence: Synthetic oligonucleotide
auuaugugagaaaaucacc

SEQ ID NO: 1204340 - RNA, 19 nt, Artificial Sequence
  Description of Artificial Sequence: Synthetic oligonucleotide
uauuauuaaaggagacaag

SEQ ID NO: 1204341 - RNA, 19 nt, Artificial Sequence
  Description of Artificial Sequence: Synthetic oligonucleotide
ucaacuuaccuaccaagcc

SEQ ID NO: 1204342 - RNA, 19 nt, Artificial Sequence
  Description of Artificial Sequence: Synthetic oligonucleotide
ucauuacuaauguuaacca

SEQ ID NO: 1204343 - RNA, 19 nt, Artificial Sequence
  Description of Artificial Sequence: Synthetic oligonucleotide
ucuaagacugaaguaacag

SEQ ID NO: 1204344 - RNA, 19 nt, Artificial Sequence
  Description of Artificial Sequence: Synthetic oligonucleotide
aaaauguggugcuggguag

SEQ ID NO: 1204345 - RNA, 19 nt, Artificial Sequence
  Description of Artificial Sequence: Synthetic oligonucleotide
ugugagaaaaucacccacc

SEQ ID NO: 1204346 - RNA, 19 nt, Artificial Sequence
  Description of Artificial Sequence: Synthetic oligonucleotide
gaaggcucaacuuaccuac

SEQ ID NO: 1204347 - RNA, 19 nt, Artificial Sequence
  Description of Artificial Sequence: Synthetic oligonucleotide
cuaauguuaaccaugugga

SEQ ID NO: 1204348 - RNA, 19 nt, Artificial Sequence
  Description of Artificial Sequence: Synthetic oligonucleotide
aauagauuaaccaguggca

SEQ ID NO: 1204349 - RNA, 19 nt, Artificial Sequence
  Description of Artificial Sequence: Synthetic oligonucleotide
aagguugaaagaaaugaag

SEQ ID NO: 1204350 - RNA, 19 nt, Artificial Sequence
  Description of Artificial Sequence: Synthetic oligonucleotide
uuacuaauguuaaccaugu

SEQ ID NO: 1204351 - RNA, 19 nt, Artificial Sequence
  Description of Artificial Sequence: Synthetic oligonucleotide
uguguauugcauuuucccc

SEQ ID NO: 1204352 - RNA, 19 nt, Artificial Sequence
  Description of Artificial Sequence: Synthetic oligonucleotide
uuuguaugcacaccagggc

SEQ ID NO: 1204353 - RNA, 19 nt, Artificial Sequence
  Description of Artificial Sequence: Synthetic oligonucleotide
gagucuuagaaaguguacg

SEQ ID NO: 1204354 - RNA, 19 nt, Artificial Sequence
  Description of Artificial Sequence: Synthetic oligonucleotide
uuaccuaccaagcccagug

SEQ ID NO: 1204355 - RNA, 19 nt, Artificial Sequence
  Description of Artificial Sequence: Synthetic oligonucleotide
uagcauagagcaaauaaaa

SEQ ID NO: 1204356 - RNA, 19 nt, Artificial Sequence
  Description of Artificial Sequence: Synthetic oligonucleotide
uuaaccaguggcauuauua

SEQ ID NO: 1204357 - RNA, 19 nt, Artificial Sequence
  Description of Artificial Sequence: Synthetic oligonucleotide
uuaaccauguggaaacaga

SEQ ID NO: 1204358 - RNA, 19 nt, Artificial Sequence
  Description of Artificial Sequence: Synthetic oligonucleotide
gucuacaucagaauuaagc

SEQ ID NO: 1204359 - RNA, 19 nt, Artificial Sequence
  Description of Artificial Sequence: Synthetic oligonucleotide
auuacuaauguuaaccaug

SEQ ID NO: 1204360 - RNA, 19 nt, Artificial Sequence
  Description of Artificial Sequence: Synthetic oligonucleotide
uugguuggcacaaggauac

SEQ ID NO: 1204361 - RNA, 19 nt, Artificial Sequence
  Description of Artificial Sequence: Synthetic oligonucleotide
uguaccagaaagacgauuu

SEQ ID NO: 1204362 - RNA, 19 nt, Artificial Sequence
  Description of Artificial Sequence: Synthetic oligonucleotide
cugucauuaccaaagacuc

SEQ ID NO: 1204363 - RNA, 19 nt, Artificial Sequence
  Description of Artificial Sequence: Synthetic oligonucleotide
acaaggauaccccugagaa

SEQ ID NO: 1204364 - RNA, 19 nt, Artificial Sequence
  Description of Artificial Sequence: Synthetic oligonucleotide
acuuccuauagaaacaguc

SEQ ID NO: 1204365 - RNA, 19 nt, Artificial Sequence
  Description of Artificial Sequence: Synthetic oligonucleotide
aggacucuaagacugaagu

SEQ ID NO: 1204366 - RNA, 19 nt, Artificial Sequence
  Description of Artificial Sequence: Synthetic oligonucleotide
aggccugagucuuagaaag

SEQ ID NO: 1204367 - RNA, 19 nt, Artificial Sequence
  Description of Artificial Sequence: Synthetic oligonucleotide
ucuagagagguuugaguag

SEQ ID NO: 1204368 - RNA, 19 nt, Artificial Sequence
  Description of Artificial Sequence: Synthetic oligonucleotide
agucaaacaauuagcauag

SEQ ID NO: 1204369 - RNA, 19 nt, Artificial Sequence
  Description of Artificial Sequence: Synthetic oligonucleotide
ucuaguuuauguguauugc

SEQ ID NO: 1204370 - RNA, 19 nt, Artificial Sequence
  Description of Artificial Sequence: Synthetic oligonucleotide
guuuguaugcacaccaggg

SEQ ID NO: 1204371 - RNA, 19 nt, Artificial Sequence
  Description of Artificial Sequence: Synthetic oligonucleotide
ugaaguaacagaggcaaca

SEQ ID NO: 1204372 - RNA, 19 nt, Artificial Sequence
  Description of Artificial Sequence: Synthetic oligonucleotide
aauagacaaauaauccucu

SEQ ID NO: 1204373 - RNA, 19 nt, Artificial Sequence
  Description of Artificial Sequence: Synthetic oligonucleotide
gaaaguguacguuccuugc

SEQ ID NO: 1204374 - RNA, 19 nt, Artificial Sequence
  Description of Artificial Sequence: Synthetic oligonucleotide
cucaacuuaccuaccaagc

SEQ ID NO: 1204375 - RNA, 19 nt, Artificial Sequence
  Description of Artificial Sequence: Synthetic oligonucleotide
auaucuaguucugugauga

SEQ ID NO: 1204376 - RNA, 19 nt, Artificial Sequence
  Description of Artificial Sequence: Synthetic oligonucleotide
agacucugcaaacaucccg

SEQ ID NO: 1204377 - RNA, 19 nt, Artificial Sequence
  Description of Artificial Sequence: Synthetic oligonucleotide
uccguuaguucuccuauag

SEQ ID NO: 1204378 - RNA, 19 nt, Artificial Sequence
  Description of Artificial Sequence: Synthetic oligonucleotide
aauaauccucuuucaaaau

SEQ ID NO: 1204379 - RNA, 19 nt, Artificial Sequence
  Description of Artificial Sequence: Synthetic oligonucleotide
uuaggcacaagauuuuaaa

SEQ ID NO: 1204380 - RNA, 19 nt, Artificial Sequence
  Description of Artificial Sequence: Synthetic oligonucleotide
gacaauucaagucacucaa

SEQ ID NO: 1204381 - RNA, 19 nt, Artificial Sequence
  Description of Artificial Sequence: Synthetic oligonucleotide
agaaaguguacguuccuug

SEQ ID NO: 1204382 - RNA, 19 nt, Artificial Sequence
  Description of Artificial Sequence: Synthetic oligonucleotide
aucaugacguucaucuucc

SEQ ID NO: 1204383 - RNA, 19 nt, Artificial Sequence
  Description of Artificial Sequence: Synthetic oligonucleotide
cugaguaucugcaugcuuc

SEQ ID NO: 1204384 - RNA, 19 nt, Artificial Sequence
  Description of Artificial Sequence: Synthetic oligonucleotide
aagagcaguaagacaauuc

SEQ ID NO: 1204385 - RNA, 19 nt, Artificial Sequence
  Description of Artificial Sequence: Synthetic oligonucleotide
uaguuuauguguauugcau

SEQ ID NO: 1204386 - RNA, 19 nt, Artificial Sequence
  Description of Artificial Sequence: Synthetic oligonucleotide
ugcauaucuaguucuguga

SEQ ID NO: 1204387 - RNA, 19 nt, Artificial Sequence
  Description of Artificial Sequence: Synthetic oligonucleotide
caacuuaccuaccaagccc

SEQ ID NO: 1204388 - RNA, 19 nt, Artificial Sequence
  Description of Artificial Sequence: Synthetic oligonucleotide
cuuacugugguagggaaag

SEQ ID NO: 1204389 - RNA, 19 nt, Artificial Sequence
  Description of Artificial Sequence: Synthetic oligonucleotide
ugaagaauuaugugagaaa

SEQ ID NO: 1204390 - RNA, 19 nt, Artificial Sequence
  Description of Artificial Sequence: Synthetic oligonucleotide
aaaucagguaggagaaagg

SEQ ID NO: 1204391 - RNA, 19 nt, Artificial Sequence
  Description of Artificial Sequence: Synthetic oligonucleotide
auuuccuagcacuugaguu

SEQ ID NO: 1204392 - RNA, 19 nt, Artificial Sequence
  Description of Artificial Sequence: Synthetic oligonucleotide
auugccauggcuucucugu

SEQ ID NO: 1204393 - RNA, 19 nt, Artificial Sequence
  Description of Artificial Sequence: Synthetic oligonucleotide
ggugcgacucucuagagag

SEQ ID NO: 1204394 - RNA, 19 nt, Artificial Sequence
  Description of Artificial Sequence: Synthetic oligonucleotide
agaacuaguuuucccaccu

SEQ ID NO: 1204395 - RNA, 19 nt, Artificial Sequence
  Description of Artificial Sequence: Synthetic oligonucleotide
acucugaaacaagagauug

SEQ ID NO: 1204396 - RNA, 19 nt, Artificial Sequence
  Description of Artificial Sequence: Synthetic oligonucleotide
ugagucuugcagcaugucu

SEQ ID NO: 1204397 - RNA, 19 nt, Artificial Sequence
  Description of Artificial Sequence: Synthetic oligonucleotide
aaagccuggugcuagucau

SEQ ID NO: 1204398 - RNA, 19 nt, Artificial Sequence
  Description of Artificial Sequence: Synthetic oligonucleotide
aagagauuguugaagaauu

SEQ ID NO: 1204399 - RNA, 19 nt, Artificial Sequence
  Description of Artificial Sequence: Synthetic oligonucleotide
uccuauagaaacagucacu

SEQ ID NO: 1204400 - RNA, 19 nt, Artificial Sequence
  Description of Artificial Sequence: Synthetic oligonucleotide
caaccagaaaucagguagg

SEQ ID NO: 1204401 - RNA, 19 nt, Artificial Sequence
  Description of Artificial Sequence: Synthetic oligonucleotide
agucacucaaucaugacgu

SEQ ID NO: 1204402 - RNA, 19 nt, Artificial Sequence
  Description of Artificial Sequence: Synthetic oligonucleotide
cuagagagguuugaguagg

SEQ ID NO: 1204403 - RNA, 19 nt, Artificial Sequence
  Description of Artificial Sequence: Synthetic oligonucleotide
gauggugcgacucucuaga

SEQ ID NO: 1204404 - RNA, 19 nt, Artificial Sequence
  Description of Artificial Sequence: Synthetic oligonucleotide
acguucaucuucccugagc

SEQ ID NO: 1204405 - RNA, 19 nt, Artificial Sequence
  Description of Artificial Sequence: Synthetic oligonucleotide
ucacuuaacugcaaaucau

SEQ ID NO: 1204406 - RNA, 19 nt, Artificial Sequence
  Description of Artificial Sequence: Synthetic oligonucleotide
uuugagguacucauaccaa

SEQ ID NO: 1204407 - RNA, 19 nt, Artificial Sequence
  Description of Artificial Sequence: Synthetic oligonucleotide
uauuacugcagcacaccac

SEQ ID NO: 1204408 - RNA, 19 nt, Artificial Sequence
  Description of Artificial Sequence: Synthetic oligonucleotide
aggcacaagauuuuaaaua

SEQ ID NO: 1204409 - RNA, 19 nt, Artificial Sequence
  Description of Artificial Sequence: Synthetic oligonucleotide
auaauccucuuucaaaaua

SEQ ID NO: 1204410 - RNA, 19 nt, Artificial Sequence
  Description of Artificial Sequence: Synthetic oligonucleotide
ugaguaucugcaugcuucc

SEQ ID NO: 1204411 - RNA, 19 nt, Artificial Sequence
  Description of Artificial Sequence: Synthetic oligonucleotide
gacaaauaauccucuuuca

SEQ ID NO: 1204412 - RNA, 19 nt, Artificial Sequence
  Description of Artificial Sequence: Synthetic oligonucleotide
gggaauugaagacaugggc

SEQ ID NO: 1204413 - RNA, 19 nt, Artificial Sequence
  Description of Artificial Sequence: Synthetic oligonucleotide
uggaaccugccccagugag

SEQ ID NO: 1204414 - RNA, 19 nt, Artificial Sequence
  Description of Artificial Sequence: Synthetic oligonucleotide
aaccaaggcuuuugaagug

SEQ ID NO: 1204415 - RNA, 19 nt, Artificial Sequence
  Description of Artificial Sequence: Synthetic oligonucleotide
agauuguugaagaauuaug

SEQ ID NO: 1204416 - RNA, 19 nt, Artificial Sequence
  Description of Artificial Sequence: Synthetic oligonucleotide
aauuccguuaguucuccua

SEQ ID NO: 1204417 - RNA, 19 nt, Artificial Sequence
  Description of Artificial Sequence: Synthetic oligonucleotide
guuaguucuccuauagagc

SEQ ID NO: 1204418 - RNA, 19 nt, Artificial Sequence
  Description of Artificial Sequence: Synthetic oligonucleotide
gaaccugccccagugagag

SEQ ID NO: 1204419 - RNA, 19 nt, Artificial Sequence
  Description of Artificial Sequence: Synthetic oligonucleotide
aaauguggugcuggguagg

SEQ ID NO: 1204420 - RNA, 19 nt, Artificial Sequence
  Description of Artificial Sequence: Synthetic oligonucleotide
ugcacaccagggcauaccc

SEQ ID NO: 1204421 - RNA, 19 nt, Artificial Sequence
  Description of Artificial Sequence: Synthetic oligonucleotide
cagucaaacaauuagcaua

SEQ ID NO: 1204422 - RNA, 19 nt, Artificial Sequence
  Description of Artificial Sequence: Synthetic oligonucleotide
cacaagauuuuaaauauua

SEQ ID NO: 1204423 - RNA, 19 nt, Artificial Sequence
  Description of Artificial Sequence: Synthetic oligonucleotide
ugaccggggagucuggggc

SEQ ID NO: 1204424 - RNA, 19 nt, Artificial Sequence
  Description of Artificial Sequence: Synthetic oligonucleotide
agguugaaagaaaugaaga

SEQ ID NO: 1204425 - RNA, 19 nt, Artificial Sequence
  Description of Artificial Sequence: Synthetic oligonucleotide
cucacuuaacugcaaauca

SEQ ID NO: 1204426 - RNA, 19 nt, Artificial Sequence
  Description of Artificial Sequence: Synthetic oligonucleotide
cuuacccaaacagucaaac

SEQ ID NO: 1204427 - RNA, 19 nt, Artificial Sequence
  Description of Artificial Sequence: Synthetic oligonucleotide
uuucauuacuaauguuaac

SEQ ID NO: 1204428 - RNA, 19 nt, Artificial Sequence
  Description of Artificial Sequence: Synthetic oligonucleotide
gaaacaagagauuguugaa

SEQ ID NO: 1204429 - RNA, 19 nt, Artificial Sequence
  Description of Artificial Sequence: Synthetic oligonucleotide
uuacccaaacagucaaaca

SEQ ID NO: 1204430 - RNA, 19 nt, Artificial Sequence
  Description of Artificial Sequence: Synthetic oligonucleotide
aagacucugcaaacauccc

SEQ ID NO: 1204431 - RNA, 19 nt, Artificial Sequence
  Description of Artificial Sequence: Synthetic oligonucleotide
acuaguuuucccaccuuac

SEQ ID NO: 1204432 - RNA, 19 nt, Artificial Sequence
  Description of Artificial Sequence: Synthetic oligonucleotide
uagaacuaguuuucccacc

SEQ ID NO: 1204433 - RNA, 19 nt, Artificial Sequence
  Description of Artificial Sequence: Synthetic oligonucleotide
cagaaagacgauuucaaaa

SEQ ID NO: 1204434 - RNA, 19 nt, Artificial Sequence
  Description of Artificial Sequence: Synthetic oligonucleotide
aacuuaccuaccaagccca

SEQ ID NO: 1204435 - RNA, 19 nt, Artificial Sequence
  Description of Artificial Sequence: Synthetic oligonucleotide
aggcaguuuguaugcacac

SEQ ID NO: 1204436 - RNA, 19 nt, Artificial Sequence
  Description of Artificial Sequence: Synthetic oligonucleotide
gucaucggaggcuacauuc

SEQ ID NO: 1204437 - RNA, 19 nt, Artificial Sequence
  Description of Artificial Sequence: Synthetic oligonucleotide
uacguuccuugccaaguag

SEQ ID NO: 1204438 - RNA, 19 nt, Artificial Sequence
  Description of Artificial Sequence: Synthetic oligonucleotide
acucuaagacugaaguaac

SEQ ID NO: 1204439 - RNA, 19 nt, Artificial Sequence
  Description of Artificial Sequence: Synthetic oligonucleotide
uccuauagagcuacuuaaa

SEQ ID NO: 1204440 - RNA, 19 nt, Artificial Sequence
  Description of Artificial Sequence: Synthetic oligonucleotide
aaggccugagucuuagaaa

SEQ ID NO: 1204441 - RNA, 19 nt, Artificial Sequence
  Description of Artificial Sequence: Synthetic oligonucleotide
ugggcuuugaaugcccuag

SEQ ID NO: 1204442 - RNA, 19 nt, Artificial Sequence
  Description of Artificial Sequence: Synthetic oligonucleotide
agaccaggugcauugguca

SEQ ID NO: 1204443 - RNA, 19 nt, Artificial Sequence
  Description of Artificial Sequence: Synthetic oligonucleotide
aguuuauguguauugcauu

SEQ ID NO: 1204444 - RNA, 19 nt, Artificial Sequence
  Description of Artificial Sequence: Synthetic oligonucleotide
aggccuuaacuccuccuac

SEQ ID NO: 1204445 - RNA, 19 nt, Artificial Sequence
  Description of Artificial Sequence: Synthetic oligonucleotide
cucuguagaacuaguuuuc

SEQ ID NO: 1204446 - RNA, 19 nt, Artificial Sequence
  Description of Artificial Sequence: Synthetic oligonucleotide
ugagaaaaucacccaccac

SEQ ID NO: 1204447 - RNA, 19 nt, Artificial Sequence
  Description of Artificial Sequence: Synthetic oligonucleotide
uaggcacaagauuuuaaau

SEQ ID NO: 1204448 - RNA, 19 nt, Artificial Sequence
  Description of Artificial Sequence: Synthetic oligonucleotide
cacucaaucaugacguuca

SEQ ID NO: 1204449 - RNA, 19 nt, Artificial Sequence
  Description of Artificial Sequence: Synthetic oligonucleotide
auuccguuaguucuccuau

SEQ ID NO: 1204450 - RNA, 19 nt, Artificial Sequence
  Description of Artificial Sequence: Synthetic oligonucleotide
uaccagaaagacgauuuca

SEQ ID NO: 1204451 - RNA, 19 nt, Artificial Sequence
  Description of Artificial Sequence: Synthetic oligonucleotide
agguacucauaccaaccag

SEQ ID NO: 1204452 - RNA, 19 nt, Artificial Sequence
  Description of Artificial Sequence: Synthetic oligonucleotide
uucgcaacauccuccugug

SEQ ID NO: 1204453 - RNA, 19 nt, Artificial Sequence
  Description of Artificial Sequence: Synthetic oligonucleotide
cguuaguucuccuauagag

SEQ ID NO: 1204454 - RNA, 19 nt, Artificial Sequence
  Description of Artificial Sequence: Synthetic oligonucleotide
cagguuaagagcaguaaga

SEQ ID NO: 1204455 - RNA, 19 nt, Artificial Sequence
  Description of Artificial Sequence: Synthetic oligonucleotide
uuucuuacugugguaggga

SEQ ID NO: 1204456 - RNA, 19 nt, Artificial Sequence
  Description of Artificial Sequence: Synthetic oligonucleotide
cugaaacaagagauuguug

SEQ ID NO: 1204457 - RNA, 19 nt, Artificial Sequence
  Description of Artificial Sequence: Synthetic oligonucleotide
ucaucggaggcuacauucu

SEQ ID NO: 1204458 - RNA, 19 nt, Artificial Sequence
  Description of Artificial Sequence: Synthetic oligonucleotide
uguacguuccuugccaagu

SEQ ID NO: 1204459 - RNA, 19 nt, Artificial Sequence
  Description of Artificial Sequence: Synthetic oligonucleotide
cuagugaguugucucaguc

SEQ ID NO: 1204460 - RNA, 19 nt, Artificial Sequence
  Description of Artificial Sequence: Synthetic oligonucleotide
gugcauaucuaguucugug

SEQ ID NO: 1204461 - RNA, 19 nt, Artificial Sequence
  Description of Artificial Sequence: Synthetic oligonucleotide
acaucccgggaauugaaga

SEQ ID NO: 1204462 - RNA, 19 nt, Artificial Sequence
  Description of Artificial Sequence: Synthetic oligonucleotide
auagauuaaccaguggcau

SEQ ID NO: 1204463 - RNA, 19 nt, Artificial Sequence
  Description of Artificial Sequence: Synthetic oligonucleotide
agaaaaucacccaccacca

SEQ ID NO: 1204464 - RNA, 19 nt, Artificial Sequence
  Description of Artificial Sequence: Synthetic oligonucleotide
cucuagagagguuugagua

SEQ ID NO: 1204465 - RNA, 19 nt, Artificial Sequence
  Description of Artificial Sequence: Synthetic oligonucleotide
aagaauuaugugagaaaau

SEQ ID NO: 1204466 - RNA, 19 nt, Artificial Sequence
  Description of Artificial Sequence: Synthetic oligonucleotide
uaucugcaugcuuccaggc

SEQ ID NO: 1204467 - RNA, 19 nt, Artificial Sequence
  Description of Artificial Sequence: Synthetic oligonucleotide
uagugaguugucucagucu

SEQ ID NO: 1204468 - RNA, 19 nt, Artificial Sequence
  Description of Artificial Sequence: Synthetic oligonucleotide
gagguacucauaccaacca

SEQ ID NO: 1204469 - RNA, 19 nt, Artificial Sequence
  Description of Artificial Sequence: Synthetic oligonucleotide
ucggaggcuacauucugga

SEQ ID NO: 1204470 - RNA, 19 nt, Artificial Sequence
  Description of Artificial Sequence: Synthetic oligonucleotide
guuaaccauguggaaacag

SEQ ID NO: 1204471 - RNA, 19 nt, Artificial Sequence
  Description of Artificial Sequence: Synthetic oligonucleotide
agauggugcgacucucuag

SEQ ID NO: 1204472 - RNA, 19 nt, Artificial Sequence
  Description of Artificial Sequence: Synthetic oligonucleotide
agagguuugaguaggugca

SEQ ID NO: 1204473 - RNA, 19 nt, Artificial Sequence
  Description of Artificial Sequence: Synthetic oligonucleotide
agcaugugcauaucuaguu

SEQ ID NO: 1204474 - RNA, 19 nt, Artificial Sequence
  Description of Artificial Sequence: Synthetic oligonucleotide
uagaccaggugcauugguc

SEQ ID NO: 1204475 - RNA, 19 nt, Artificial Sequence
  Description of Artificial Sequence: Synthetic oligonucleotide
agauuaaccaguggcauua

SEQ ID NO: 1204476 - RNA, 19 nt, Artificial Sequence
  Description of Artificial Sequence: Synthetic oligonucleotide
uaccccaagguugaaagaa

SEQ ID NO: 1204477 - RNA, 19 nt, Artificial Sequence
  Description of Artificial Sequence: Synthetic oligonucleotide
auaucacacacacacccua

SEQ ID NO: 1204478 - RNA, 19 nt, Artificial Sequence
  Description of Artificial Sequence: Synthetic oligonucleotide
aggagauaggaccacugaa

SEQ ID NO: 1204479 - RNA, 19 nt, Artificial Sequence
  Description of Artificial Sequence: Synthetic oligonucleotide
gauuugugcagagagcaaa

SEQ ID NO: 1204480 - RNA, 19 nt, Artificial Sequence
  Description of Artificial Sequence: Synthetic oligonucleotide
ggagauaggaccacugaag

SEQ ID NO: 1204481 - RNA, 19 nt, Artificial Sequence
  Description of Artificial Sequence: Synthetic oligonucleotide
ucuuacugugguagggaaa

SEQ ID NO: 1204482 - RNA, 19 nt, Artificial Sequence
  Description of Artificial Sequence: Synthetic oligonucleotide
ucccugagcugucauuacc

SEQ ID NO: 1204483 - RNA, 19 nt, Artificial Sequence
  Description of Artificial Sequence: Synthetic oligonucleotide
cuauagagcuacuuaaacu

SEQ ID NO: 1204484 - RNA, 19 nt, Artificial Sequence
  Description of Artificial Sequence: Synthetic oligonucleotide
gauaggaccacugaaggau

SEQ ID NO: 1204485 - RNA, 19 nt, Artificial Sequence
  Description of Artificial Sequence: Synthetic oligonucleotide
uucuuacugugguagggaa

SEQ ID NO: 1204486 - RNA, 19 nt, Artificial Sequence
  Description of Artificial Sequence: Synthetic oligonucleotide
agagaaaauuauucugcua

SEQ ID NO: 1204487 - RNA, 19 nt, Artificial Sequence
  Description of Artificial Sequence: Synthetic oligonucleotide
guagcugagucuugcagca

SEQ ID NO: 1204488 - RNA, 19 nt, Artificial Sequence
  Description of Artificial Sequence: Synthetic oligonucleotide
guuaaagacugaguaucug

SEQ ID NO: 1204489 - RNA, 19 nt, Artificial Sequence
  Description of Artificial Sequence: Synthetic oligonucleotide
caucccgggaauugaagac

SEQ ID NO: 1204490 - RNA, 19 nt, Artificial Sequence
  Description of Artificial Sequence: Synthetic oligonucleotide
aaggcucaacuuaccuacc

SEQ ID NO: 1204491 - RNA, 19 nt, Artificial Sequence
  Description of Artificial Sequence: Synthetic oligonucleotide
guaagacaauucaauuccc

SEQ ID NO: 1204492 - RNA, 19 nt, Artificial Sequence
  Description of Artificial Sequence: Synthetic oligonucleotide
caaggauaccccugagaag

SEQ ID NO: 1204493 - RNA, 19 nt, Artificial Sequence
  Description of Artificial Sequence: Synthetic oligonucleotide
uggguaggccaggugaccg

SEQ ID NO: 1204494 - RNA, 19 nt, Artificial Sequence
  Description of Artificial Sequence: Synthetic oligonucleotide
ugcaugucuacaucagaau

SEQ ID NO: 1204495 - RNA, 19 nt, Artificial Sequence
  Description of Artificial Sequence: Synthetic oligonucleotide
cuggugcuagucaucacug

SEQ ID NO: 1204496 - RNA, 19 nt, Artificial Sequence
  Description of Artificial Sequence: Synthetic oligonucleotide
gugagaaaaucacccacca

SEQ ID NO: 1204497 - RNA, 19 nt, Artificial Sequence
  Description of Artificial Sequence: Synthetic oligonucleotide
aguaggugcagaagagggg

SEQ ID NO: 1204498 - RNA, 19 nt, Artificial Sequence
  Description of Artificial Sequence: Synthetic oligonucleotide
cagaaaucagguaggagaa

SEQ ID NO: 1204499 - RNA, 19 nt, Artificial Sequence
  Description of Artificial Sequence: Synthetic oligonucleotide
uucaaaggauugccauggc

SEQ ID NO: 1204500 - RNA, 19 nt, Artificial Sequence
  Description of Artificial Sequence: Synthetic oligonucleotide
uacuaauguuaaccaugug

SEQ ID NO: 1204501 - RNA, 19 nt, Artificial Sequence
  Description of Artificial Sequence: Synthetic oligonucleotide
ugaguguauucaugagcug

SEQ ID NO: 1204502 - RNA, 19 nt, Artificial Sequence
  Description of Artificial Sequence: Synthetic oligonucleotide
ugcgacucucuagagaggu

SEQ ID NO: 1204503 - RNA, 19 nt, Artificial Sequence
  Description of Artificial Sequence: Synthetic oligonucleotide
agaaggcucaacuuaccua

SEQ ID NO: 1204504 - RNA, 19 nt, Artificial Sequence
  Description of Artificial Sequence: Synthetic oligonucleotide
aaucucuaguuuaugugua

SEQ ID NO: 1204505 - RNA, 19 nt, Artificial Sequence
  Description of Artificial Sequence: Synthetic oligonucleotide
cugcuucgcaacauccucc

SEQ ID NO: 1204506 - RNA, 19 nt, Artificial Sequence
  Description of Artificial Sequence: Synthetic oligonucleotide
gcucaacuuaccuaccaag

SEQ ID NO: 1204507 - RNA, 19 nt, Artificial Sequence
  Description of Artificial Sequence: Synthetic oligonucleotide
accuuacccaaacagucaa

SEQ ID NO: 1204508 - RNA, 19 nt, Artificial Sequence
  Description of Artificial Sequence: Synthetic oligonucleotide
ggagacaaggacucuaaga

SEQ ID NO: 1204509 - RNA, 19 nt, Artificial Sequence
  Description of Artificial Sequence: Synthetic oligonucleotide
cuccuauagagcuacuuaa

SEQ ID NO: 1204510 - RNA, 19 nt, Artificial Sequence
  Description of Artificial Sequence: Synthetic oligonucleotide
gaaaaucacccaccaccac

SEQ ID NO: 1204511 - RNA, 19 nt, Artificial Sequence
  Description of Artificial Sequence: Synthetic oligonucleotide
auguggaaacagaauuccg

SEQ ID NO: 1204512 - RNA, 19 nt, Artificial Sequence
  Description of Artificial Sequence: Synthetic oligonucleotide
caugcuuccaggccuuaac

SEQ ID NO: 1204513 - RNA, 19 nt, Artificial Sequence
  Description of Artificial Sequence: Synthetic oligonucleotide
ugugcauaucuaguucugu

SEQ ID NO: 1204514 - RNA, 19 nt, Artificial Sequence
  Description of Artificial Sequence: Synthetic oligonucleotide
auagacaaauaauccucuu

SEQ ID NO: 1204515 - RNA, 19 nt, Artificial Sequence
  Description of Artificial Sequence: Synthetic oligonucleotide
gacaugggcuuugaaugcc

SEQ ID NO: 1204516 - RNA, 19 nt, Artificial Sequence
  Description of Artificial Sequence: Synthetic oligonucleotide
uaccuaccaagcccagugc

SEQ ID NO: 1204517 - RNA, 19 nt, Artificial Sequence
  Description of Artificial Sequence: Synthetic oligonucleotide
uuuuaggcacaagauuuua

SEQ ID NO: 1204518 - RNA, 19 nt, Artificial Sequence
  Description of Artificial Sequence: Synthetic oligonucleotide
aaccagaaaucagguagga

SEQ ID NO: 1204519 - RNA, 19 nt, Artificial Sequence
  Description of Artificial Sequence: Synthetic oligonucleotide
uggugcgacucucuagaga

SEQ ID NO: 1204520 - RNA, 19 nt, Artificial Sequence
  Description of Artificial Sequence: Synthetic oligonucleotide
ugaguugucucagucucuc

SEQ ID NO: 1204521 - RNA, 19 nt, Artificial Sequence
  Description of Artificial Sequence: Synthetic oligonucleotide
ggcauuauuacaaaucucu

SEQ ID NO: 1204522 - RNA, 19 nt, Artificial Sequence
  Description of Artificial Sequence: Synthetic oligonucleotide
cagcacaccaccauagaga

SEQ ID NO: 1204523 - RNA, 19 nt, Artificial Sequence
  Description of Artificial Sequence: Synthetic oligonucleotide
uagauuaaccaguggcauu

SEQ ID NO: 1204524 - RNA, 19 nt, Artificial Sequence
  Description of Artificial Sequence: Synthetic oligonucleotide
aggagacaaggacucuaag

SEQ ID NO: 1204525 - RNA, 19 nt, Artificial Sequence
  Description of Artificial Sequence: Synthetic oligonucleotide
guaggugcagaagagggga

SEQ ID NO: 1204526 - RNA, 19 nt, Artificial Sequence
  Description of Artificial Sequence: Synthetic oligonucleotide
uggaaucccgacagaagua

SEQ ID NO: 1204527 - RNA, 19 nt, Artificial Sequence
  Description of Artificial Sequence: Synthetic oligonucleotide
agugccacaugcaaauacu

SEQ ID NO: 1204528 - RNA, 19 nt, Artificial Sequence
  Description of Artificial Sequence: Synthetic oligonucleotide
cuauuacugcagcacacca

SEQ ID NO: 1204529 - RNA, 19 nt, Artificial Sequence
  Description of Artificial Sequence: Synthetic oligonucleotide
auagagcuacuuaaacucu

SEQ ID NO: 1204530 - RNA, 19 nt, Artificial Sequence
  Description of Artificial Sequence: Synthetic oligonucleotide
ucacucaaucaugacguuc

SEQ ID NO: 1204531 - RNA, 19 nt, Artificial Sequence
  Description of Artificial Sequence: Synthetic oligonucleotide
uacuuccuauagaaacagu

SEQ ID NO: 1204532 - RNA, 19 nt, Artificial Sequence
  Description of Artificial Sequence: Synthetic oligonucleotide
caagucacucaaucaugac

SEQ ID NO: 1204533 - RNA, 19 nt, Artificial Sequence
  Description of Artificial Sequence: Synthetic oligonucleotide
aauuagcauagagcaaaua

SEQ ID NO: 1204534 - RNA, 19 nt, Artificial Sequence
  Description of Artificial Sequence: Synthetic oligonucleotide
aacucugaaacaagagauu

SEQ ID NO: 1204535 - RNA, 19 nt, Artificial Sequence
  Description of Artificial Sequence: Synthetic oligonucleotide
ccgggaauugaagacaugg

SEQ ID NO: 1204536 - RNA, 19 nt, Artificial Sequence
  Description of Artificial Sequence: Synthetic oligonucleotide
agacucacuuaacugcaaa

SEQ ID NO: 1204537 - RNA, 19 nt, Artificial Sequence
  Description of Artificial Sequence: Synthetic oligonucleotide
ggaaucccgacagaaguag

SEQ ID NO: 1204538 - RNA, 19 nt, Artificial Sequence
  Description of Artificial Sequence: Synthetic oligonucleotide
acuagugaguugucucagu

SEQ ID NO: 1204539 - RNA, 19 nt, Artificial Sequence
  Description of Artificial Sequence: Synthetic oligonucleotide
ccagugacaauucaaguca

SEQ ID NO: 1204540 - RNA, 19 nt, Artificial Sequence
  Description of Artificial Sequence: Synthetic oligonucleotide
ccaaguuaaagacugagua

SEQ ID NO: 1204541 - RNA, 19 nt, Artificial Sequence
  Description of Artificial Sequence: Synthetic oligonucleotide
ucccgggaauugaagacau

SEQ ID NO: 1204542 - RNA, 19 nt, Artificial Sequence
  Description of Artificial Sequence: Synthetic oligonucleotide
uacugcagcacaccaccau

SEQ ID NO: 1204543 - RNA, 19 nt, Artificial Sequence
  Description of Artificial Sequence: Synthetic oligonucleotide
uguuaaccauguggaaaca

SEQ ID NO: 1204544 - RNA, 19 nt, Artificial Sequence
  Description of Artificial Sequence: Synthetic oligonucleotide
accagaaagacgauuucaa

SEQ ID NO: 1204545 - RNA, 19 nt, Artificial Sequence
  Description of Artificial Sequence: Synthetic oligonucleotide
aaggagacaaggacucuaa

SEQ ID NO: 1204546 - RNA, 19 nt, Artificial Sequence
  Description of Artificial Sequence: Synthetic oligonucleotide
ggcuguucuuaauauauaa

SEQ ID NO: 1204547 - RNA, 19 nt, Artificial Sequence
  Description of Artificial Sequence: Synthetic oligonucleotide
acacccuauuacugcagca

SEQ ID NO: 1204548 - RNA, 19 nt, Artificial Sequence
  Description of Artificial Sequence: Synthetic oligonucleotide
gaggcuacauucuggauuu

SEQ ID NO: 1204549 - RNA, 19 nt, Artificial Sequence
  Description of Artificial Sequence: Synthetic oligonucleotide
ucgcaacauccuccugugg

SEQ ID NO: 1204550 - RNA, 19 nt, Artificial Sequence
  Description of Artificial Sequence: Synthetic oligonucleotide
cacccuauuacugcagcac

SEQ ID NO: 1204551 - RNA, 19 nt, Artificial Sequence
  Description of Artificial Sequence: Synthetic oligonucleotide
accagaaaucagguaggag

SEQ ID NO: 1204552 - RNA, 19 nt, Artificial Sequence
  Description of Artificial Sequence: Synthetic oligonucleotide
gcuuucuuacugugguagg

SEQ ID NO: 1204553 - RNA, 19 nt, Artificial Sequence
  Description of Artificial Sequence: Synthetic oligonucleotide
aggcucaacuuaccuacca

SEQ ID NO: 1204554 - RNA, 19 nt, Artificial Sequence
  Description of Artificial Sequence: Synthetic oligonucleotide
cauuaccaaagacucugca

SEQ ID NO: 1204555 - RNA, 19 nt, Artificial Sequence
  Description of Artificial Sequence: Synthetic oligonucleotide
auaccccaagguugaaaga

SEQ ID NO: 1204556 - RNA, 19 nt, Artificial Sequence
  Description of Artificial Sequence: Synthetic oligonucleotide
agucacugaccagcaugcc

SEQ ID NO: 1204557 - RNA, 19 nt, Artificial Sequence
  Description of Artificial Sequence: Synthetic oligonucleotide
ccaccuuacccaaacaguc

SEQ ID NO: 1204558 - RNA, 19 nt, Artificial Sequence
  Description of Artificial Sequence: Synthetic oligonucleotide
gaaugcccuagaccaggug

SEQ ID NO: 1204559 - RNA, 19 nt, Artificial Sequence
  Description of Artificial Sequence: Synthetic oligonucleotide
uggcuguucuuaauauaua

SEQ ID NO: 1204560 - RNA, 19 nt, Artificial Sequence
  Description of Artificial Sequence: Synthetic oligonucleotide
gagguuugaguaggugcag

SEQ ID NO: 1204561 - RNA, 19 nt, Artificial Sequence
  Description of Artificial Sequence: Synthetic oligonucleotide
guaccagaaagacgauuuc

SEQ ID NO: 1204562 - RNA, 19 nt, Artificial Sequence
  Description of Artificial Sequence: Synthetic oligonucleotide
ggugcuagucaucacuguc

SEQ ID NO: 1204563 - RNA, 19 nt, Artificial Sequence
  Description of Artificial Sequence: Synthetic oligonucleotide
aguguacguuccuugccaa

SEQ ID NO: 1204564 - RNA, 19 nt, Artificial Sequence
  Description of Artificial Sequence: Synthetic oligonucleotide
ugguuaaggccugagucuu

SEQ ID NO: 1204565 - RNA, 19 nt, Artificial Sequence
  Description of Artificial Sequence: Synthetic oligonucleotide
aaacaucccgggaauugaa

SEQ ID NO: 1204566 - RNA, 19 nt, Artificial Sequence
  Description of Artificial Sequence: Synthetic oligonucleotide
ggaauugaagacaugggcu

SEQ ID NO: 1204567 - RNA, 19 nt, Artificial Sequence
  Description of Artificial Sequence: Synthetic oligonucleotide
agagcaaaaccuggagcca

SEQ ID NO: 1204568 - RNA, 19 nt, Artificial Sequence
  Description of Artificial Sequence: Synthetic oligonucleotide
auggugcgacucucuagag

SEQ ID NO: 1204569 - RNA, 19 nt, Artificial Sequence
  Description of Artificial Sequence: Synthetic oligonucleotide
acaaaggaagucacuuggu

SEQ ID NO: 1204570 - RNA, 19 nt, Artificial Sequence
  Description of Artificial Sequence: Synthetic oligonucleotide
uguguaccagaaagacgau

SEQ ID NO: 1204571 - RNA, 19 nt, Artificial Sequence
  Description of Artificial Sequence: Synthetic oligonucleotide
gagauuguugaagaauuau

SEQ ID NO: 1204572 - RNA, 19 nt, Artificial Sequence
  Description of Artificial Sequence: Synthetic oligonucleotide
gauggugaagauggugcga

SEQ ID NO: 1204573 - RNA, 19 nt, Artificial Sequence
  Description of Artificial Sequence: Synthetic oligonucleotide
acauuuccuagcacuugag

SEQ ID NO: 1204574 - RNA, 19 nt, Artificial Sequence
  Description of Artificial Sequence: Synthetic oligonucleotide
uggugcuagucaucacugu

SEQ ID NO: 1204575 - RNA, 19 nt, Artificial Sequence
  Description of Artificial Sequence: Synthetic oligonucleotide
uucuccuauagagcuacuu

SEQ ID NO: 1204576 - RNA, 19 nt, Artificial Sequence
  Description of Artificial Sequence: Synthetic oligonucleotide
cauuacuaauguuaaccau

SEQ ID NO: 1204577 - RNA, 19 nt, Artificial Sequence
  Description of Artificial Sequence: Synthetic oligonucleotide
cuucgcaacauccuccugu

SEQ ID NO: 1204578 - RNA, 19 nt, Artificial Sequence
  Description of Artificial Sequence: Synthetic oligonucleotide
caccuuacccaaacaguca

SEQ ID NO: 1204579 - RNA, 19 nt, Artificial Sequence
  Description of Artificial Sequence: Synthetic oligonucleotide
accaaccagaaaucaggua

SEQ ID NO: 1204580 - RNA, 19 nt, Artificial Sequence
  Description of Artificial Sequence: Synthetic oligonucleotide
cugguuaaggccugagucu

SEQ ID NO: 1204581 - RNA, 19 nt, Artificial Sequence
  Description of Artificial Sequence: Synthetic oligonucleotide
uccugugguguggaauccc

SEQ ID NO: 1204582 - RNA, 19 nt, Artificial Sequence
  Description of Artificial Sequence: Synthetic oligonucleotide
augugcauaucuaguucug

SEQ ID NO: 1204583 - RNA, 19 nt, Artificial Sequence
  Description of Artificial Sequence: Synthetic oligonucleotide
agugacaauucaagucacu

SEQ ID NO: 1204584 - RNA, 19 nt, Artificial Sequence
  Description of Artificial Sequence: Synthetic oligonucleotide
cagcaugucuguguaccag

SEQ ID NO: 1204585 - RNA, 19 nt, Artificial Sequence
  Description of Artificial Sequence: Synthetic oligonucleotide
ggcacaaggauaccccuga

SEQ ID NO: 1204586 - RNA, 19 nt, Artificial Sequence
  Description of Artificial Sequence: Synthetic oligonucleotide
ccuauuacugcagcacacc

SEQ ID NO: 1204587 - RNA, 19 nt, Artificial Sequence
  Description of Artificial Sequence: Synthetic oligonucleotide
ccaggcuaggagcaugugc

SEQ ID NO: 1204588 - RNA, 19 nt, Artificial Sequence
  Description of Artificial Sequence: Synthetic oligonucleotide
cccuagaccaggugcauug

SEQ ID NO: 1204589 - RNA, 19 nt, Artificial Sequence
  Description of Artificial Sequence: Synthetic oligonucleotide
uuccguuaguucuccuaua

SEQ ID NO: 1204590 - RNA, 19 nt, Artificial Sequence
  Description of Artificial Sequence: Synthetic oligonucleotide
agagauuguugaagaauua

SEQ ID NO: 1204591 - RNA, 19 nt, Artificial Sequence
  Description of Artificial Sequence: Synthetic oligonucleotide
cuuuggcuguucuuaauau

SEQ ID NO: 1204592 - RNA, 19 nt, Artificial Sequence
  Description of Artificial Sequence: Synthetic oligonucleotide
gagacuugaauaggcauuu

SEQ ID NO: 1204593 - RNA, 19 nt, Artificial Sequence
  Description of Artificial Sequence: Synthetic oligonucleotide
uucccacauccagugacaa

SEQ ID NO: 1204594 - RNA, 19 nt, Artificial Sequence
  Description of Artificial Sequence: Synthetic oligonucleotide
aggaccacugaaggauuug

SEQ ID NO: 1204595 - RNA, 19 nt, Artificial Sequence
  Description of Artificial Sequence: Synthetic oligonucleotide
cgggaauugaagacauggg

SEQ ID NO: 1204596 - RNA, 19 nt, Artificial Sequence
  Description of Artificial Sequence: Synthetic oligonucleotide
cucugaaacaagagauugu

SEQ ID NO: 1204597 - RNA, 19 nt, Artificial Sequence
  Description of Artificial Sequence: Synthetic oligonucleotide
aggugcagaagaggggaca

SEQ ID NO: 1204598 - RNA, 19 nt, Artificial Sequence
  Description of Artificial Sequence: Synthetic oligonucleotide
agaaaucagguaggagaaa

SEQ ID NO: 1204599 - RNA, 19 nt, Artificial Sequence
  Description of Artificial Sequence: Synthetic oligonucleotide
cccuauuacugcagcacac

SEQ ID NO: 1204600 - RNA, 19 nt, Artificial Sequence
  Description of Artificial Sequence: Synthetic oligonucleotide
cacuuaacugcaaaucauu

SEQ ID NO: 1204601 - RNA, 19 nt, Artificial Sequence
  Description of Artificial Sequence: Synthetic oligonucleotide
aggauaccccugagaaguc

SEQ ID NO: 1204602 - RNA, 19 nt, Artificial Sequence
  Description of Artificial Sequence: Synthetic oligonucleotide
uggcuuucuuacuguggua

SEQ ID NO: 1204603 - RNA, 19 nt, Artificial Sequence
  Description of Artificial Sequence: Synthetic oligonucleotide
cacugccagacucacuuaa

SEQ ID NO: 1204604 - RNA, 19 nt, Artificial Sequence
  Description of Artificial Sequence: Synthetic oligonucleotide
ggaggcuacauucuggauu

SEQ ID NO: 1204605 - RNA, 19 nt, Artificial Sequence
  Description of Artificial Sequence: Synthetic oligonucleotide
cuggguaggccaggugacc

SEQ ID NO: 1204606 - RNA, 19 nt, Artificial Sequence
  Description of Artificial Sequence: Synthetic oligonucleotide
caccauagagaaaauuauu

SEQ ID NO: 1204607 - RNA, 19 nt, Artificial Sequence
  Description of Artificial Sequence: Synthetic oligonucleotide
acuuaccuaccaagcccag

SEQ ID NO: 1204608 - RNA, 19 nt, Artificial Sequence
  Description of Artificial Sequence: Synthetic oligonucleotide
caugacguucaucuucccu

SEQ ID NO: 1204609 - RNA, 19 nt, Artificial Sequence
  Description of Artificial Sequence: Synthetic oligonucleotide
ggaaaggagauaggaccac

SEQ ID NO: 1204610 - RNA, 19 nt, Artificial Sequence
  Description of Artificial Sequence: Synthetic oligonucleotide
guacguuccuugccaagua

SEQ ID NO: 1204611 - RNA, 19 nt, Artificial Sequence
  Description of Artificial Sequence: Synthetic oligonucleotide
cuuccaggccuuaacuccu

SEQ ID NO: 1204612 - RNA, 19 nt, Artificial Sequence
  Description of Artificial Sequence: Synthetic oligonucleotide
ggacucuaagacugaagua

SEQ ID NO: 1204613 - RNA, 19 nt, Artificial Sequence
  Description of Artificial Sequence: Synthetic oligonucleotide
auaggaccacugaaggauu

SEQ ID NO: 1204614 - RNA, 19 nt, Artificial Sequence
  Description of Artificial Sequence: Synthetic oligonucleotide
gcauaucuaguucugugau

SEQ ID NO: 1204615 - RNA, 19 nt, Artificial Sequence
  Description of Artificial Sequence: Synthetic oligonucleotide
cuaggagcaugugcauauc

SEQ ID NO: 1204616 - RNA, 19 nt, Artificial Sequence
  Description of Artificial Sequence: Synthetic oligonucleotide
gugcgacucucuagagagg

SEQ ID NO: 1204617 - RNA, 19 nt, Artificial Sequence
  Description of Artificial Sequence: Synthetic oligonucleotide
caggccuuaacuccuccua

SEQ ID NO: 1204618 - RNA, 19 nt, Artificial Sequence
  Description of Artificial Sequence: Synthetic oligonucleotide
guaggccaggugaccgggg

SEQ ID NO: 1204619 - RNA, 19 nt, Artificial Sequence
  Description of Artificial Sequence: Synthetic oligonucleotide
gcuaggagcaugugcauau

SEQ ID NO: 1204620 - RNA, 19 nt, Artificial Sequence
  Description of Artificial Sequence: Synthetic oligonucleotide
agcuacugguuaaggccug

SEQ ID NO: 1204621 - RNA, 19 nt, Artificial Sequence
  Description of Artificial Sequence: Synthetic oligonucleotide
cugugguguggaaucccga

SEQ ID NO: 1204622 - RNA, 19 nt, Artificial Sequence
  Description of Artificial Sequence: Synthetic oligonucleotide
caauucccacauccaguga

SEQ ID NO: 1204623 - RNA, 19 nt, Artificial Sequence
  Description of Artificial Sequence: Synthetic oligonucleotide
guucaaguuccuggaaccu

SEQ ID NO: 1204624 - RNA, 19 nt, Artificial Sequence
  Description of Artificial Sequence: Synthetic oligonucleotide
ggcucaacuuaccuaccaa

SEQ ID NO: 1204625 - RNA, 19 nt, Artificial Sequence
  Description of Artificial Sequence: Synthetic oligonucleotide
ccagaaagacgauuucaaa

SEQ ID NO: 1204626 - RNA, 19 nt, Artificial Sequence
  Description of Artificial Sequence: Synthetic oligonucleotide
cagugagagcagguuaaga

SEQ ID NO: 1204627 - RNA, 19 nt, Artificial Sequence
  Description of Artificial Sequence: Synthetic oligonucleotide
ccaaacagucaaacaauua

SEQ ID NO: 1204628 - RNA, 19 nt, Artificial Sequence
  Description of Artificial Sequence: Synthetic oligonucleotide
caaggacucuaagacugaa

SEQ ID NO: 1204629 - RNA, 19 nt, Artificial Sequence
  Description of Artificial Sequence: Synthetic oligonucleotide
gaauuccguuaguucuccu

SEQ ID NO: 1204630 - RNA, 19 nt, Artificial Sequence
  Description of Artificial Sequence: Synthetic oligonucleotide
ucccugcuuuugagguacu

SEQ ID NO: 1204631 - RNA, 19 nt, Artificial Sequence
  Description of Artificial Sequence: Synthetic oligonucleotide
cuggaaccugccccaguga

SEQ ID NO: 1204632 - RNA, 19 nt, Artificial Sequence
  Description of Artificial Sequence: Synthetic oligonucleotide
gcagcaugucuguguacca

SEQ ID NO: 1204633 - RNA, 19 nt, Artificial Sequence
  Description of Artificial Sequence: Synthetic oligonucleotide
cuagaccaggugcauuggu

SEQ ID NO: 1204634 - RNA, 19 nt, Artificial Sequence
  Description of Artificial Sequence: Synthetic oligonucleotide
ccuagaccaggugcauugg

SEQ ID NO: 1204635 - RNA, 19 nt, Artificial Sequence
  Description of Artificial Sequence: Synthetic oligonucleotide
gugcuggguaggccaggug

SEQ ID NO: 1204636 - RNA, 19 nt, Artificial Sequence
  Description of Artificial Sequence: Synthetic oligonucleotide
cccagugagagcagguuaa

SEQ ID NO: 1204637 - RNA, 19 nt, Artificial Sequence
  Description of Artificial Sequence: Synthetic oligonucleotide
gguguggaaucccgacaga

SEQ ID NO: 1204638 - RNA, 19 nt, Artificial Sequence
  Description of Artificial Sequence: Synthetic oligonucleotide
ugcccuagaccaggugcau

SEQ ID NO: 1204639 - RNA, 19 nt, Artificial Sequence
  Description of Artificial Sequence: Synthetic oligonucleotide
agacuugaauaggcauuuu

SEQ ID NO: 1204640 - RNA, 19 nt, Artificial Sequence
  Description of Artificial Sequence: Synthetic oligonucleotide
ggaagucacuugguuggca

SEQ ID NO: 1204641 - RNA, 19 nt, Artificial Sequence
  Description of Artificial Sequence: Synthetic oligonucleotide
gggcauaccccaagguuga

SEQ ID NO: 1204642 - RNA, 19 nt, Artificial Sequence
  Description of Artificial Sequence: Synthetic oligonucleotide
caguggcauuauuacaaau

SEQ ID NO: 1204643 - RNA, 19 nt, Artificial Sequence
  Description of Artificial Sequence: Synthetic oligonucleotide
gcuguucuuaauauauaau

SEQ ID NO: 1204644 - RNA, 19 nt, Artificial Sequence
  Description of Artificial Sequence: Synthetic oligonucleotide
ccuacaggcucugcuucgc

SEQ ID NO: 1204645 - RNA, 19 nt, Artificial Sequence
  Description of Artificial Sequence: Synthetic oligonucleotide
guaugcacaccagggcaua

SEQ ID NO: 1204646 - RNA, 19 nt, Artificial Sequence
  Description of Artificial Sequence: Synthetic oligonucleotide
gcaaaaccuggagccaaca

SEQ ID NO: 1204647 - RNA, 19 nt, Artificial Sequence
  Description of Artificial Sequence: Synthetic oligonucleotide
gaccggggagucuggggcu

SEQ ID NO: 1204648 - RNA, 19 nt, Artificial Sequence
  Description of Artificial Sequence: Synthetic oligonucleotide
ccagugagagcagguuaag

SEQ ID NO: 1204649 - RNA, 19 nt, Artificial Sequence
  Description of Artificial Sequence: Synthetic oligonucleotide
ggauuugugcagagagcaa

SEQ ID NO: 1204650 - RNA, 19 nt, Artificial Sequence
  Description of Artificial Sequence: Synthetic oligonucleotide
cuuaccuaccaagcccagu

SEQ ID NO: 1204651 - RNA, 19 nt, Artificial Sequence
  Description of Artificial Sequence: Synthetic oligonucleotide
cccaccuuacccaaacagu

SEQ ID NO: 1204652 - RNA, 19 nt, Artificial Sequence
  Description of Artificial Sequence: Synthetic oligonucleotide
guguaccagaaagacgauu

SEQ ID NO: 1204653 - RNA, 19 nt, Artificial Sequence
  Description of Artificial Sequence: Synthetic oligonucleotide
ccguuaguucuccuauaga

SEQ ID NO: 1204654 - RNA, 19 nt, Artificial Sequence
  Description of Artificial Sequence: Synthetic oligonucleotide
ccacuuuggcuguucuuaa

SEQ ID NO: 1204655 - RNA, 19 nt, Artificial Sequence
  Description of Artificial Sequence: Synthetic oligonucleotide
gucacucaaucaugacguu

SEQ ID NO: 1204656 - RNA, 19 nt, Artificial Sequence
  Description of Artificial Sequence: Synthetic oligonucleotide
acaccagggcauaccccaa

SEQ ID NO: 1204657 - RNA, 19 nt, Artificial Sequence
  Description of Artificial Sequence: Synthetic oligonucleotide
ccuuacccaaacagucaaa

SEQ ID NO: 1204658 - RNA, 19 nt, Artificial Sequence
  Description of Artificial Sequence: Synthetic oligonucleotide
gguaggagaaaggcaguuu

SEQ ID NO: 1204659 - RNA, 19 nt, Artificial Sequence
  Description of Artificial Sequence: Synthetic oligonucleotide
gcuacugguuaaggccuga

SEQ ID NO: 1204660 - RNA, 19 nt, Artificial Sequence
  Description of Artificial Sequence: Synthetic oligonucleotide
gcuagucaucacugucacu

SEQ ID NO: 1204661 - RNA, 19 nt, Artificial Sequence
  Description of Artificial Sequence: Synthetic oligonucleotide
gguuaaggccugagucuua

SEQ ID NO: 1204662 - RNA, 19 nt, Artificial Sequence
  Description of Artificial Sequence: Synthetic oligonucleotide
aggcuacauucuggauuuu

SEQ ID NO: 1204663 - RNA, 19 nt, Artificial Sequence
  Description of Artificial Sequence: Synthetic oligonucleotide
ccaggccuuaacuccuccu

SEQ ID NO: 1204664 - RNA, 19 nt, Artificial Sequence
  Description of Artificial Sequence: Synthetic oligonucleotide
cgacucucuagagagguuu

SEQ ID NO: 1204665 - RNA, 19 nt, Artificial Sequence
  Description of Artificial Sequence: Synthetic oligonucleotide
gcgacucucuagagagguu

SEQ ID NO: 1204666 - RNA, 19 nt, Artificial Sequence
  Description of Artificial Sequence: Synthetic oligonucleotide
gcccuagaccaggugcauu

SEQ ID NO: 1204667 - RNA, 19 nt, Artificial Sequence
  Description of Artificial Sequence: Synthetic oligonucleotide
cggaggcuacauucuggau

SEQ ID NO: 1204668 - RNA, 19 nt, Artificial Sequence
  Description of Artificial Sequence: Synthetic oligonucleotide
aauuugaagauguagagaa

SEQ ID NO: 1204669 - RNA, 19 nt, Artificial Sequence
  Description of Artificial Sequence: Synthetic oligonucleotide
auagagaauauuccggucc

SEQ ID NO: 1204670 - RNA, 19 nt, Artificial Sequence
  Description of Artificial Sequence: Synthetic oligonucleotide
agauguagagaauuggggc

SEQ ID NO: 1204671 - RNA, 19 nt, Artificial Sequence
  Description of Artificial Sequence: Synthetic oligonucleotide
gaagauucugcccaaaucc

SEQ ID NO: 1204672 - RNA, 19 nt, Artificial Sequence
  Description of Artificial Sequence: Synthetic oligonucleotide
uccucgaaagcuauaaugg

SEQ ID NO: 1204673 - RNA, 19 nt, Artificial Sequence
  Description of Artificial Sequence: Synthetic oligonucleotide
ugauccauaaccuugcccc

SEQ ID NO: 1204674 - RNA, 19 nt, Artificial Sequence
  Description of Artificial Sequence: Synthetic oligonucleotide
agcguaaucacaaaugucc

SEQ ID NO: 1204675 - RNA, 19 nt, Artificial Sequence
  Description of Artificial Sequence: Synthetic oligonucleotide
aacaaacaugcucacugcc

SEQ ID NO: 1204676 - RNA, 19 nt, Artificial Sequence
  Description of Artificial Sequence: Synthetic oligonucleotide
aaauaaagugucaucacuc

SEQ ID NO: 1204677 - RNA, 19 nt, Artificial Sequence
  Description of Artificial Sequence: Synthetic oligonucleotide
agcgcuauggcguuguucc

SEQ ID NO: 1204678 - RNA, 19 nt, Artificial Sequence
  Description of Artificial Sequence: Synthetic oligonucleotide
aaauacuacuugaaagucc

SEQ ID NO: 1204679 - RNA, 19 nt, Artificial Sequence
  Description of Artificial Sequence: Synthetic oligonucleotide
aaaauacuacuugaaaguc

SEQ ID NO: 1204680 - RNA, 19 nt, Artificial Sequence
  Description of Artificial Sequence: Synthetic oligonucleotide
uuguacaaccuccucaugg

SEQ ID NO: 1204681 - RNA, 19 nt, Artificial Sequence
  Description of Artificial Sequence: Synthetic oligonucleotide
uuagcaggacaauaggacg

SEQ ID NO: 1204682 - RNA, 19 nt, Artificial Sequence
  Description of Artificial Sequence: Synthetic oligonucleotide
aaacagucgccucacagag

SEQ ID NO: 1204683 - RNA, 19 nt, Artificial Sequence
  Description of Artificial Sequence: Synthetic oligonucleotide
gaauauuccggucccaggg

SEQ ID NO: 1204684 - RNA, 19 nt, Artificial Sequence
  Description of Artificial Sequence: Synthetic oligonucleotide
gaugccuugagccagagga

SEQ ID NO: 1204685 - RNA, 19 nt, Artificial Sequence
  Description of Artificial Sequence: Synthetic oligonucleotide
agugucaucacucaaacuu

SEQ ID NO: 1204686 - RNA, 19 nt, Artificial Sequence
  Description of Artificial Sequence: Synthetic oligonucleotide
aauaggacguaauuaccug

SEQ ID NO: 1204687 - RNA, 19 nt, Artificial Sequence
  Description of Artificial Sequence: Synthetic oligonucleotide
uaacgagagaaguuguugg

SEQ ID NO: 1204688 - RNA, 19 nt, Artificial Sequence
  Description of Artificial Sequence: Synthetic oligonucleotide
ugugacagcuauaguaacg

SEQ ID NO: 1204689 - RNA, 19 nt, Artificial Sequence
  Description of Artificial Sequence: Synthetic oligonucleotide
guuuccauuauacacgccc

SEQ ID NO: 1204690 - RNA, 19 nt, Artificial Sequence
  Description of Artificial Sequence: Synthetic oligonucleotide
uuugugacagcuauaguaa

SEQ ID NO: 1204691 - RNA, 19 nt, Artificial Sequence
  Description of Artificial Sequence: Synthetic oligonucleotide
aagauguagagaauugggg

SEQ ID NO: 1204692 - RNA, 19 nt, Artificial Sequence
  Description of Artificial Sequence: Synthetic oligonucleotide
aauacuacuugaaaguccu

SEQ ID NO: 1204693 - RNA, 19 nt, Artificial Sequence
  Description of Artificial Sequence: Synthetic oligonucleotide
aacgagagaaguuguuggg

SEQ ID NO: 1204694 - RNA, 19 nt, Artificial Sequence
  Description of Artificial Sequence: Synthetic oligonucleotide
uccacuaagaucuucccca

SEQ ID NO: 1204695 - RNA, 19 nt, Artificial Sequence
  Description of Artificial Sequence: Synthetic oligonucleotide
uuuccauuauacacgcccg

SEQ ID NO: 1204696 - RNA, 19 nt, Artificial Sequence
  Description of Artificial Sequence: Synthetic oligonucleotide
ucacaaauguccacgaacu

SEQ ID NO: 1204697 - RNA, 19 nt, Artificial Sequence
  Description of Artificial Sequence: Synthetic oligonucleotide
aauauuccggucccagggg

SEQ ID NO: 1204698 - RNA, 19 nt, Artificial Sequence
  Description of Artificial Sequence: Synthetic oligonucleotide
aaaacagucgccucacaga

SEQ ID NO: 1204699 - RNA, 19 nt, Artificial Sequence
  Description of Artificial Sequence: Synthetic oligonucleotide
uagucuuccauacuggccu

SEQ ID NO: 1204700 - RNA, 19 nt, Artificial Sequence
  Description of Artificial Sequence: Synthetic oligonucleotide
uuccauacuggccugucgg

SEQ ID NO: 1204701 - RNA, 19 nt, Artificial Sequence
  Description of Artificial Sequence: Synthetic oligonucleotide
uccucaugcacaaugggug

SEQ ID NO: 1204702 - RNA, 19 nt, Artificial Sequence
  Description of Artificial Sequence: Synthetic oligonucleotide
uuguuagcaggacaauagg

SEQ ID NO: 1204703 - RNA, 19 nt, Artificial Sequence
  Description of Artificial Sequence: Synthetic oligonucleotide
agagaauuggggcaaaagu

SEQ ID NO: 1204704 - RNA, 19 nt, Artificial Sequence
  Description of Artificial Sequence: Synthetic oligonucleotide
auaguaacgagagaaguug

SEQ ID NO: 1204705 - RNA, 19 nt, Artificial Sequence
  Description of Artificial Sequence: Synthetic oligonucleotide
uuucccaguacucggaucu

SEQ ID NO: 1204706 - RNA, 19 nt, Artificial Sequence
  Description of Artificial Sequence: Synthetic oligonucleotide
acagcuauaguaacgagag

SEQ ID NO: 1204707 - RNA, 19 nt, Artificial Sequence
  Description of Artificial Sequence: Synthetic oligonucleotide
cucauggauacuuucgugc

SEQ ID NO: 1204708 - RNA, 19 nt, Artificial Sequence
  Description of Artificial Sequence: Synthetic oligonucleotide
ucuuccacggcucuaacaa

SEQ ID NO: 1204709 - RNA, 19 nt, Artificial Sequence
  Description of Artificial Sequence: Synthetic oligonucleotide
uccucgacaagccagcagc

SEQ ID NO: 1204710 - RNA, 19 nt, Artificial Sequence
  Description of Artificial Sequence: Synthetic oligonucleotide
uguuagcaggacaauagga

SEQ ID NO: 1204711 - RNA, 19 nt, Artificial Sequence
  Description of Artificial Sequence: Synthetic oligonucleotide
ugaucuuugugacagcuau

SEQ ID NO: 1204712 - RNA, 19 nt, Artificial Sequence
  Description of Artificial Sequence: Synthetic oligonucleotide
uucuuacuauuucuccucg

SEQ ID NO: 1204713 - RNA, 19 nt, Artificial Sequence
  Description of Artificial Sequence: Synthetic oligonucleotide
ucuucauagucuuccauac

SEQ ID NO: 1204714 - RNA, 19 nt, Artificial Sequence
  Description of Artificial Sequence: Synthetic oligonucleotide
cuugaauuugaagauguag

SEQ ID NO: 1204715 - RNA, 19 nt, Artificial Sequence
  Description of Artificial Sequence: Synthetic oligonucleotide
agcauagucgggaugaugg

SEQ ID NO: 1204716 - RNA, 19 nt, Artificial Sequence
  Description of Artificial Sequence: Synthetic oligonucleotide
ucauggaacaaauggcacc

SEQ ID NO: 1204717 - RNA, 19 nt, Artificial Sequence
  Description of Artificial Sequence: Synthetic oligonucleotide
gauguagagaauuggggca

SEQ ID NO: 1204718 - RNA, 19 nt, Artificial Sequence
  Description of Artificial Sequence: Synthetic oligonucleotide
uccuauuccuuccacuaag

SEQ ID NO: 1204719 - RNA, 19 nt, Artificial Sequence
  Description of Artificial Sequence: Synthetic oligonucleotide
aaagcuauaauggcauugu

SEQ ID NO: 1204720 - RNA, 19 nt, Artificial Sequence
  Description of Artificial Sequence: Synthetic oligonucleotide
gacguaauuaccugucccc

SEQ ID NO: 1204721 - RNA, 19 nt, Artificial Sequence
  Description of Artificial Sequence: Synthetic oligonucleotide
ugaugguacauguggaucu

SEQ ID NO: 1204722 - RNA, 19 nt, Artificial Sequence
  Description of Artificial Sequence: Synthetic oligonucleotide
auacuggccugucggaucc

SEQ ID NO: 1204723 - RNA, 19 nt, Artificial Sequence
  Description of Artificial Sequence: Synthetic oligonucleotide
uucauuauuccaugcaaaa

SEQ ID NO: 1204724 - RNA, 19 nt, Artificial Sequence
  Description of Artificial Sequence: Synthetic oligonucleotide
aaaugcaccgccaaucuca

SEQ ID NO: 1204725 - RNA, 19 nt, Artificial Sequence
  Description of Artificial Sequence: Synthetic oligonucleotide
aggcagaucauuguccucc

SEQ ID NO: 1204726 - RNA, 19 nt, Artificial Sequence
  Description of Artificial Sequence: Synthetic oligonucleotide
uagagaauauuccgguccc

SEQ ID NO: 1204727 - RNA, 19 nt, Artificial Sequence
  Description of Artificial Sequence: Synthetic oligonucleotide
uauaguaacgagagaaguu

SEQ ID NO: 1204728 - RNA, 19 nt, Artificial Sequence
  Description of Artificial Sequence: Synthetic oligonucleotide
aucuuugugacagcuauag

SEQ ID NO: 1204729 - RNA, 19 nt, Artificial Sequence
  Description of Artificial Sequence: Synthetic oligonucleotide
cuugcagccaagcauaguc

SEQ ID NO: 1204730 - RNA, 19 nt, Artificial Sequence
  Description of Artificial Sequence: Synthetic oligonucleotide
uuguuccagccaaacacgg

SEQ ID NO: 1204731 - RNA, 19 nt, Artificial Sequence
  Description of Artificial Sequence: Synthetic oligonucleotide
acaauaggacguaauuacc

SEQ ID NO: 1204732 - RNA, 19 nt, Artificial Sequence
  Description of Artificial Sequence: Synthetic oligonucleotide
uaacggguuccacugcucg

SEQ ID NO: 1204733 - RNA, 19 nt, Artificial Sequence
  Description of Artificial Sequence: Synthetic oligonucleotide
uguacaaccuccucaugga

SEQ ID NO: 1204734 - RNA, 19 nt, Artificial Sequence
  Description of Artificial Sequence: Synthetic oligonucleotide
agcuauaguaacgagagaa

SEQ ID NO: 1204735 - RNA, 19 nt, Artificial Sequence
  Description of Artificial Sequence: Synthetic oligonucleotide
cuuugugacagcuauagua

SEQ ID NO: 1204736 - RNA, 19 nt, Artificial Sequence
  Description of Artificial Sequence: Synthetic oligonucleotide
uggaucuucgcauguacug

SEQ ID NO: 1204737 - RNA, 19 nt, Artificial Sequence
  Description of Artificial Sequence: Synthetic oligonucleotide
uauuggcucauuguuagca

SEQ ID NO: 1204738 - RNA, 19 nt, Artificial Sequence
  Description of Artificial Sequence: Synthetic oligonucleotide
uuccacugcucgaugagag

SEQ ID NO: 1204739 - RNA, 19 nt, Artificial Sequence
  Description of Artificial Sequence: Synthetic oligonucleotide
gaacgggaaugccugaugc

SEQ ID NO: 1204740 - RNA, 19 nt, Artificial Sequence
  Description of Artificial Sequence: Synthetic oligonucleotide
uugcagccaagcauagucg

SEQ ID NO: 1204741 - RNA, 19 nt, Artificial Sequence
  Description of Artificial Sequence: Synthetic oligonucleotide
cacacguguaucuuuggcc

SEQ ID NO: 1204742 - RNA, 19 nt, Artificial Sequence
  Description of Artificial Sequence: Synthetic oligonucleotide
aacuugaugccuugagcca

SEQ ID NO: 1204743 - RNA, 19 nt, Artificial Sequence
  Description of Artificial Sequence: Synthetic oligonucleotide
cauagucuuccauacuggc

SEQ ID NO: 1204744 - RNA, 19 nt, Artificial Sequence
  Description of Artificial Sequence: Synthetic oligonucleotide
acuaagaucuuccccauuu

SEQ ID NO: 1204745 - RNA, 19 nt, Artificial Sequence
  Description of Artificial Sequence: Synthetic oligonucleotide
ugggcgguaggccugcacg

SEQ ID NO: 1204746 - RNA, 19 nt, Artificial Sequence
  Description of Artificial Sequence: Synthetic oligonucleotide
acacguguaucuuuggcca

SEQ ID NO: 1204747 - RNA, 19 nt, Artificial Sequence
  Description of Artificial Sequence: Synthetic oligonucleotide
aggucugcauccucgaaag

SEQ ID NO: 1204748 - RNA, 19 nt, Artificial Sequence
  Description of Artificial Sequence: Synthetic oligonucleotide
guuagcaggacaauaggac

SEQ ID NO: 1204749 - RNA, 19 nt, Artificial Sequence
  Description of Artificial Sequence: Synthetic oligonucleotide
uccauuauacacgcccgcg

SEQ ID NO: 1204750 - RNA, 19 nt, Artificial Sequence
  Description of Artificial Sequence: Synthetic oligonucleotide
cuccucauggauacuuucg

SEQ ID NO: 1204751 - RNA, 19 nt, Artificial Sequence
  Description of Artificial Sequence: Synthetic oligonucleotide
ucacacguguaucuuuggc

SEQ ID NO: 1204752 - RNA, 19 nt, Artificial Sequence
  Description of Artificial Sequence: Synthetic oligonucleotide
caaaagucuccucaugcac

SEQ ID NO: 1204753 - RNA, 19 nt, Artificial Sequence
  Description of Artificial Sequence: Synthetic oligonucleotide
uacauguggaucuucgcau

SEQ ID NO: 1204754 - RNA, 19 nt, Artificial Sequence
  Description of Artificial Sequence: Synthetic oligonucleotide
uuuccaccaagcuccaaca

SEQ ID NO: 1204755 - RNA, 19 nt, Artificial Sequence
  Description of Artificial Sequence: Synthetic oligonucleotide
ugugccaauaucugcucca

SEQ ID NO: 1204756 - RNA, 19 nt, Artificial Sequence
  Description of Artificial Sequence: Synthetic oligonucleotide
uucccaccaggccuaacgg

SEQ ID NO: 1204757 - RNA, 19 nt, Artificial Sequence
  Description of Artificial Sequence: Synthetic oligonucleotide
auaggacguaauuaccugu

SEQ ID NO: 1204758 - RNA, 19 nt, Artificial Sequence
  Description of Artificial Sequence: Synthetic oligonucleotide
auuggcucauuguuagcag

SEQ ID NO: 1204759 - RNA, 19 nt, Artificial Sequence
  Description of Artificial Sequence: Synthetic oligonucleotide
gcuauuggcucauuguuag

SEQ ID NO: 1204760 - RNA, 19 nt, Artificial Sequence
  Description of Artificial Sequence: Synthetic oligonucleotide
ugagagcauggccaggucu

SEQ ID NO: 1204761 - RNA, 19 nt, Artificial Sequence
  Description of Artificial Sequence: Synthetic oligonucleotide
uuccacggcucuaacaaac

SEQ ID NO: 1204762 - RNA, 19 nt, Artificial Sequence
  Description of Artificial Sequence: Synthetic oligonucleotide
ucauccucgacaagccagc

SEQ ID NO: 1204763 - RNA, 19 nt, Artificial Sequence
  Description of Artificial Sequence: Synthetic oligonucleotide
uccucauggauacuuucgu

SEQ ID NO: 1204764 - RNA, 19 nt, Artificial Sequence
  Description of Artificial Sequence: Synthetic oligonucleotide
cucgaugagagcauggcca

SEQ ID NO: 1204765 - RNA, 19 nt, Artificial Sequence
  Description of Artificial Sequence: Synthetic oligonucleotide
gaauuugaagauguagaga

SEQ ID NO: 1204766 - RNA, 19 nt, Artificial Sequence
  Description of Artificial Sequence: Synthetic oligonucleotide
caguuuucccaguacucgg

SEQ ID NO: 1204767 - RNA, 19 nt, Artificial Sequence
  Description of Artificial Sequence: Synthetic oligonucleotide
uagagaauuggggcaaaag

SEQ ID NO: 1204768 - RNA, 19 nt, Artificial Sequence
  Description of Artificial Sequence: Synthetic oligonucleotide
uacuauuucuccucgcuuu

SEQ ID NO: 1204769 - RNA, 19 nt, Artificial Sequence
  Description of Artificial Sequence: Synthetic oligonucleotide
ucuccuauuccuuccacua

SEQ ID NO: 1204770 - RNA, 19 nt, Artificial Sequence
  Description of Artificial Sequence: Synthetic oligonucleotide
uuccauuauacacgcccgc

SEQ ID NO: 1204771 - RNA, 19 nt, Artificial Sequence
  Description of Artificial Sequence: Synthetic oligonucleotide
auagucgggaugauggauc

SEQ ID NO: 1204772 - RNA, 19 nt, Artificial Sequence
  Description of Artificial Sequence: Synthetic oligonucleotide
guaacgagagaaguuguug

SEQ ID NO: 1204773 - RNA, 19 nt, Artificial Sequence
  Description of Artificial Sequence: Synthetic oligonucleotide
aggcaucgcugccagauuc

SEQ ID NO: 1204774 - RNA, 19 nt, Artificial Sequence
  Description of Artificial Sequence: Synthetic oligonucleotide
auuauacacgcccgcguug

SEQ ID NO: 1204775 - RNA, 19 nt, Artificial Sequence
  Description of Artificial Sequence: Synthetic oligonucleotide
uugcuauuggcucauuguu

SEQ ID NO: 1204776 - RNA, 19 nt, Artificial Sequence
  Description of Artificial Sequence: Synthetic oligonucleotide
ucacuucauuauuccaugc

SEQ ID NO: 1204777 - RNA, 19 nt, Artificial Sequence
  Description of Artificial Sequence: Synthetic oligonucleotide
cucgaaagcuauaauggca

SEQ ID NO: 1204778 - RNA, 19 nt, Artificial Sequence
  Description of Artificial Sequence: Synthetic oligonucleotide
aggaugauccauaaccuug

SEQ ID NO: 1204779 - RNA, 19 nt, Artificial Sequence
  Description of Artificial Sequence: Synthetic oligonucleotide
acaauggugggcucuacau

SEQ ID NO: 1204780 - RNA, 19 nt, Artificial Sequence
  Description of Artificial Sequence: Synthetic oligonucleotide
uaggacguaauuaccuguc

SEQ ID NO: 1204781 - RNA, 19 nt, Artificial Sequence
  Description of Artificial Sequence: Synthetic oligonucleotide
ucuuacuauuucuccucgc

SEQ ID NO: 1204782 - RNA, 19 nt, Artificial Sequence
  Description of Artificial Sequence: Synthetic oligonucleotide
aacacggccacugggaaau

SEQ ID NO: 1204783 - RNA, 19 nt, Artificial Sequence
  Description of Artificial Sequence: Synthetic oligonucleotide
uauggcguuguuccagcca

SEQ ID NO: 1204784 - RNA, 19 nt, Artificial Sequence
  Description of Artificial Sequence: Synthetic oligonucleotide
ggcucuacauaauugccag

SEQ ID NO: 1204785 - RNA, 19 nt, Artificial Sequence
  Description of Artificial Sequence: Synthetic oligonucleotide
aauaucugcuccaccacaa

SEQ ID NO: 1204786 - RNA, 19 nt, Artificial Sequence
  Description of Artificial Sequence: Synthetic oligonucleotide
aagauucugcccaaauccu

SEQ ID NO: 1204787 - RNA, 19 nt, Artificial Sequence
  Description of Artificial Sequence: Synthetic oligonucleotide
gacagcuauaguaacgaga

SEQ ID NO: 1204788 - RNA, 19 nt, Artificial Sequence
  Description of Artificial Sequence: Synthetic oligonucleotide
uucacacguguaucuuugg

SEQ ID NO: 1204789 - RNA, 19 nt, Artificial Sequence
  Description of Artificial Sequence: Synthetic oligonucleotide
guacauguggaucuucgca

SEQ ID NO: 1204790 - RNA, 19 nt, Artificial Sequence
  Description of Artificial Sequence: Synthetic oligonucleotide
agguacaccuuuguccagc

SEQ ID NO: 1204791 - RNA, 19 nt, Artificial Sequence
  Description of Artificial Sequence: Synthetic oligonucleotide
uggcauuguuuccaccaag

SEQ ID NO: 1204792 - RNA, 19 nt, Artificial Sequence
  Description of Artificial Sequence: Synthetic oligonucleotide
ggcucuaacaaacaugcuc

SEQ ID NO: 1204793 - RNA, 19 nt, Artificial Sequence
  Description of Artificial Sequence: Synthetic oligonucleotide
acacggaucugcgaguagg

SEQ ID NO: 1204794 - RNA, 19 nt, Artificial Sequence
  Description of Artificial Sequence: Synthetic oligonucleotide
cauagagaauauuccgguc

SEQ ID NO: 1204795 - RNA, 19 nt, Artificial Sequence
  Description of Artificial Sequence: Synthetic oligonucleotide
ugcuauuggcucauuguua

SEQ ID NO: 1204796 - RNA, 19 nt, Artificial Sequence
  Description of Artificial Sequence: Synthetic oligonucleotide
aacgggaaugccugaugcu

SEQ ID NO: 1204797 - RNA, 19 nt, Artificial Sequence
  Description of Artificial Sequence: Synthetic oligonucleotide
uguuccagccaaacacggc

SEQ ID NO: 1204798 - RNA, 19 nt, Artificial Sequence
  Description of Artificial Sequence: Synthetic oligonucleotide
ugcacggagaacgggaaug

SEQ ID NO: 1204799 - RNA, 19 nt, Artificial Sequence
  Description of Artificial Sequence: Synthetic oligonucleotide
aggacaauaggacguaauu

SEQ ID NO: 1204800 - RNA, 19 nt, Artificial Sequence
  Description of Artificial Sequence: Synthetic oligonucleotide
gacguucacaaugccacag

SEQ ID NO: 1204801 - RNA, 19 nt, Artificial Sequence
  Description of Artificial Sequence: Synthetic oligonucleotide
gcauguacugcuuccaggc

SEQ ID NO: 1204802 - RNA, 19 nt, Artificial Sequence
  Description of Artificial Sequence: Synthetic oligonucleotide
uuacuauuucuccucgcuu

SEQ ID NO: 1204803 - RNA, 19 nt, Artificial Sequence
  Description of Artificial Sequence: Synthetic oligonucleotide
ugucggauccuugcuauug

SEQ ID NO: 1204804 - RNA, 19 nt, Artificial Sequence
  Description of Artificial Sequence: Synthetic oligonucleotide
ugacagcuauaguaacgag

SEQ ID NO: 1204805 - RNA, 19 nt, Artificial Sequence
  Description of Artificial Sequence: Synthetic oligonucleotide
acuugaugccuugagccag

SEQ ID NO: 1204806 - RNA, 19 nt, Artificial Sequence
  Description of Artificial Sequence: Synthetic oligonucleotide
uacaaccuccucauggaua

SEQ ID NO: 1204807 - RNA, 19 nt, Artificial Sequence
  Description of Artificial Sequence: Synthetic oligonucleotide
agcagcguaaucacaaaug

SEQ ID NO: 1204808 - RNA, 19 nt, Artificial Sequence
  Description of Artificial Sequence: Synthetic oligonucleotide
ucuaacaaacaugcucacu

SEQ ID NO: 1204809 - RNA, 19 nt, Artificial Sequence
  Description of Artificial Sequence: Synthetic oligonucleotide
ucucugcccacauuuucca

SEQ ID NO: 1204810 - RNA, 19 nt, Artificial Sequence
  Description of Artificial Sequence: Synthetic oligonucleotide
aaccucuuguucauucuug

SEQ ID NO: 1204811 - RNA, 19 nt, Artificial Sequence
  Description of Artificial Sequence: Synthetic oligonucleotide
aggccaaucuuucuuacua

SEQ ID NO: 1204812 - RNA, 19 nt, Artificial Sequence
  Description of Artificial Sequence: Synthetic oligonucleotide
gaauggcuaagagauguca

SEQ ID NO: 1204813 - RNA, 19 nt, Artificial Sequence
  Description of Artificial Sequence: Synthetic oligonucleotide
ucacagagguacaccuuug

SEQ ID NO: 1204814 - RNA, 19 nt, Artificial Sequence
  Description of Artificial Sequence: Synthetic oligonucleotide
ucacucaaacuugaugccu

SEQ ID NO: 1204815 - RNA, 19 nt, Artificial Sequence
  Description of Artificial Sequence: Synthetic oligonucleotide
gggaugauggaucagcaga

SEQ ID NO: 1204816 - RNA, 19 nt, Artificial Sequence
  Description of Artificial Sequence: Synthetic oligonucleotide
uuauacacgcccgcguugu

SEQ ID NO: 1204817 - RNA, 19 nt, Artificial Sequence
  Description of Artificial Sequence: Synthetic oligonucleotide
ugcgaguaggcaccuuuca

SEQ ID NO: 1204818 - RNA, 19 nt, Artificial Sequence
  Description of Artificial Sequence: Synthetic oligonucleotide
uggacaugugggcgguagg

SEQ ID NO: 1204819 - RNA, 19 nt, Artificial Sequence
  Description of Artificial Sequence: Synthetic oligonucleotide
auaucugcuccaccacaag

SEQ ID NO: 1204820 - RNA, 19 nt, Artificial Sequence
  Description of Artificial Sequence: Synthetic oligonucleotide
gucggauccuugcuauugg

SEQ ID NO: 1204821 - RNA, 19 nt, Artificial Sequence
  Description of Artificial Sequence: Synthetic oligonucleotide
auugacguucacaaugcca

SEQ ID NO: 1204822 - RNA, 19 nt, Artificial Sequence
  Description of Artificial Sequence: Synthetic oligonucleotide
cuguuuccccaccugagug

SEQ ID NO: 1204823 - RNA, 19 nt, Artificial Sequence
  Description of Artificial Sequence: Synthetic oligonucleotide
uuccagugaaggacagcag

SEQ ID NO: 1204824 - RNA, 19 nt, Artificial Sequence
  Description of Artificial Sequence: Synthetic oligonucleotide
aaugcaccgccaaucucag

SEQ ID NO: 1204825 - RNA, 19 nt, Artificial Sequence
  Description of Artificial Sequence: Synthetic oligonucleotide
uagucgggaugauggauca

SEQ ID NO: 1204826 - RNA, 19 nt, Artificial Sequence
  Description of Artificial Sequence: Synthetic oligonucleotide
aaguuguuggggcuccuuu

SEQ ID NO: 1204827 - RNA, 19 nt, Artificial Sequence
  Description of Artificial Sequence: Synthetic oligonucleotide
acaaauggcaccaggcaga

SEQ ID NO: 1204828 - RNA, 19 nt, Artificial Sequence
  Description of Artificial Sequence: Synthetic oligonucleotide
aacacggaucugcgaguag

SEQ ID NO: 1204829 - RNA, 19 nt, Artificial Sequence
  Description of Artificial Sequence: Synthetic oligonucleotide
ucgacaagccagcagcgua

SEQ ID NO: 1204830 - RNA, 19 nt, Artificial Sequence
  Description of Artificial Sequence: Synthetic oligonucleotide
agaacgggaaugccugaug

SEQ ID NO: 1204831 - RNA, 19 nt, Artificial Sequence
  Description of Artificial Sequence: Synthetic oligonucleotide
gccaacacggaucugcgag

SEQ ID NO: 1204832 - RNA, 19 nt, Artificial Sequence
  Description of Artificial Sequence: Synthetic oligonucleotide
cugguaggaauauugacgu

SEQ ID NO: 1204833 - RNA, 19 nt, Artificial Sequence
  Description of Artificial Sequence: Synthetic oligonucleotide
ucuuugugacagcuauagu

SEQ ID NO: 1204834 - RNA, 19 nt, Artificial Sequence
  Description of Artificial Sequence: Synthetic oligonucleotide
ccagggguugccaacacgg

SEQ ID NO: 1204835 - RNA, 19 nt, Artificial Sequence
  Description of Artificial Sequence: Synthetic oligonucleotide
auauuccggucccaggggu

SEQ ID NO: 1204836 - RNA, 19 nt, Artificial Sequence
  Description of Artificial Sequence: Synthetic oligonucleotide
cuuccauacuggccugucg

SEQ ID NO: 1204837 - RNA, 19 nt, Artificial Sequence
  Description of Artificial Sequence: Synthetic oligonucleotide
uaauggcauuguuuccacc

SEQ ID NO: 1204838 - RNA, 19 nt, Artificial Sequence
  Description of Artificial Sequence: Synthetic oligonucleotide
uccacggcucuaacaaaca

SEQ ID NO: 1204839 - RNA, 19 nt, Artificial Sequence
  Description of Artificial Sequence: Synthetic oligonucleotide
uucuccucgcuuuggggca

SEQ ID NO: 1204840 - RNA, 19 nt, Artificial Sequence
  Description of Artificial Sequence: Synthetic oligonucleotide
acucaaacuugaugccuug

SEQ ID NO: 1204841 - RNA, 19 nt, Artificial Sequence
  Description of Artificial Sequence: Synthetic oligonucleotide
uguuugguaugcagugguc

SEQ ID NO: 1204842 - RNA, 19 nt, Artificial Sequence
  Description of Artificial Sequence: Synthetic oligonucleotide
cugugaucagcgcuauggc

SEQ ID NO: 1204843 - RNA, 19 nt, Artificial Sequence
  Description of Artificial Sequence: Synthetic oligonucleotide
ggacguaauuaccuguccc

SEQ ID NO: 1204844 - RNA, 19 nt, Artificial Sequence
  Description of Artificial Sequence: Synthetic oligonucleotide
auggcguuguuccagccaa

SEQ ID NO: 1204845 - RNA, 19 nt, Artificial Sequence
  Description of Artificial Sequence: Synthetic oligonucleotide
caauaggacguaauuaccu

SEQ ID NO: 1204846 - RNA, 19 nt, Artificial Sequence
  Description of Artificial Sequence: Synthetic oligonucleotide
gugacagcuauaguaacga

SEQ ID NO: 1204847 - RNA, 19 nt, Artificial Sequence
  Description of Artificial Sequence: Synthetic oligonucleotide
cauugcugugccaauaucu

SEQ ID NO: 1204848 - RNA, 19 nt, Artificial Sequence
  Description of Artificial Sequence: Synthetic oligonucleotide
auguccacgaacuccugaa

SEQ ID NO: 1204849 - RNA, 19 nt, Artificial Sequence
  Description of Artificial Sequence: Synthetic oligonucleotide
gcucuaacaaacaugcuca

SEQ ID NO: 1204850 - RNA, 19 nt, Artificial Sequence
  Description of Artificial Sequence: Synthetic oligonucleotide
gucgggaugauggaucagc

SEQ ID NO: 1204851 - RNA, 19 nt, Artificial Sequence
  Description of Artificial Sequence: Synthetic oligonucleotide
aagcuauaauggcauuguu

SEQ ID NO: 1204852 - RNA, 19 nt, Artificial Sequence
  Description of Artificial Sequence: Synthetic oligonucleotide
uguccacgaacuccugaac

SEQ ID NO: 1204853 - RNA, 19 nt, Artificial Sequence
  Description of Artificial Sequence: Synthetic oligonucleotide
aaacacggccacugggaaa

SEQ ID NO: 1204854 - RNA, 19 nt, Artificial Sequence
  Description of Artificial Sequence: Synthetic oligonucleotide
aacggguuccacugcucga

SEQ ID NO: 1204855 - RNA, 19 nt, Artificial Sequence
  Description of Artificial Sequence: Synthetic oligonucleotide
ucgcuuuggggcaggaauc

SEQ ID NO: 1204856 - RNA, 19 nt, Artificial Sequence
  Description of Artificial Sequence: Synthetic oligonucleotide
uucccacggcagcaaacag

SEQ ID NO: 1204857 - RNA, 19 nt, Artificial Sequence
  Description of Artificial Sequence: Synthetic oligonucleotide
cagugugcuucucuccucc

SEQ ID NO: 1204858 - RNA, 19 nt, Artificial Sequence
  Description of Artificial Sequence: Synthetic oligonucleotide
cauacuggccugucggauc

SEQ ID NO: 1204859 - RNA, 19 nt, Artificial Sequence
  Description of Artificial Sequence: Synthetic oligonucleotide
uggccugucggauccuugc

SEQ ID NO: 1204860 - RNA, 19 nt, Artificial Sequence
  Description of Artificial Sequence: Synthetic oligonucleotide
cacggcagcaaacagagcu

SEQ ID NO: 1204861 - RNA, 19 nt, Artificial Sequence
  Description of Artificial Sequence: Synthetic oligonucleotide
cuauuggcucauuguuagc

SEQ ID NO: 1204862 - RNA, 19 nt, Artificial Sequence
  Description of Artificial Sequence: Synthetic oligonucleotide
gcuauaguaacgagagaag

SEQ ID NO: 1204863 - RNA, 19 nt, Artificial Sequence
  Description of Artificial Sequence: Synthetic oligonucleotide
auuggggcaaaagucuccu

SEQ ID NO: 1204864 - RNA, 19 nt, Artificial Sequence
  Description of Artificial Sequence: Synthetic oligonucleotide
uuuucccaguacucggauc

SEQ ID NO: 1204865 - RNA, 19 nt, Artificial Sequence
  Description of Artificial Sequence: Synthetic oligonucleotide
cacggaucugcgaguaggc

SEQ ID NO: 1204866 - RNA, 19 nt, Artificial Sequence
  Description of Artificial Sequence: Synthetic oligonucleotide
cagcguaaucacaaauguc

SEQ ID NO: 1204867 - RNA, 19 nt, Artificial Sequence
  Description of Artificial Sequence: Synthetic oligonucleotide
aggccuaacggguuccacu

SEQ ID NO: 1204868 - RNA, 19 nt, Artificial Sequence
  Description of Artificial Sequence: Synthetic oligonucleotide
cuaugaucuuugugacagc

SEQ ID NO: 1204869 - RNA, 19 nt, Artificial Sequence
  Description of Artificial Sequence: Synthetic oligonucleotide
guacucggaucuucucccg

SEQ ID NO: 1204870 - RNA, 19 nt, Artificial Sequence
  Description of Artificial Sequence: Synthetic oligonucleotide
agcuauaauggcauuguuu

SEQ ID NO: 1204871 - RNA, 19 nt, Artificial Sequence
  Description of Artificial Sequence: Synthetic oligonucleotide
cagauucccugccaccgcc

SEQ ID NO: 1204872 - RNA, 19 nt, Artificial Sequence
  Description of Artificial Sequence: Synthetic oligonucleotide
cuugcuauuggcucauugu

SEQ ID NO: 1204873 - RNA, 19 nt, Artificial Sequence
  Description of Artificial Sequence: Synthetic oligonucleotide
uccacugcucgaugagagc

SEQ ID NO: 1204874 - RNA, 19 nt, Artificial Sequence
  Description of Artificial Sequence: Synthetic oligonucleotide
aauugccaggaugauccau

SEQ ID NO: 1204875 - RNA, 19 nt, Artificial Sequence
  Description of Artificial Sequence: Synthetic oligonucleotide
uacacgcccgcguuguccu

SEQ ID NO: 1204876 - RNA, 19 nt, Artificial Sequence
  Description of Artificial Sequence: Synthetic oligonucleotide
ugacguucacaaugccaca

SEQ ID NO: 1204877 - RNA, 19 nt, Artificial Sequence
  Description of Artificial Sequence: Synthetic oligonucleotide
ccucgaaagcuauaauggc

SEQ ID NO: 1204878 - RNA, 19 nt, Artificial Sequence
  Description of Artificial Sequence: Synthetic oligonucleotide
cuuacuauuucuccucgcu

SEQ ID NO: 1204879 - RNA, 19 nt, Artificial Sequence
  Description of Artificial Sequence: Synthetic oligonucleotide
gaaggcaagacgggucccc

SEQ ID NO: 1204880 - RNA, 19 nt, Artificial Sequence
  Description of Artificial Sequence: Synthetic oligonucleotide
ggaugauccauaaccuugc

SEQ ID NO: 1204881 - RNA, 19 nt, Artificial Sequence
  Description of Artificial Sequence: Synthetic oligonucleotide
uaggaauauugacguucac

SEQ ID NO: 1204882 - RNA, 19 nt, Artificial Sequence
  Description of Artificial Sequence: Synthetic oligonucleotide
auggauacuuucgugcaaa

SEQ ID NO: 1204883 - RNA, 19 nt, Artificial Sequence
  Description of Artificial Sequence: Synthetic oligonucleotide
acguucacaaugccacagu

SEQ ID NO: 1204884 - RNA, 19 nt, Artificial Sequence
  Description of Artificial Sequence: Synthetic oligonucleotide
ggcauuguuuccaccaagc

SEQ ID NO: 1204885 - RNA, 19 nt, Artificial Sequence
  Description of Artificial Sequence: Synthetic oligonucleotide
ggaucugcgaguaggcacc

SEQ ID NO: 1204886 - RNA, 19 nt, Artificial Sequence
  Description of Artificial Sequence: Synthetic oligonucleotide
cucuugcagccaagcauag

SEQ ID NO: 1204887 - RNA, 19 nt, Artificial Sequence
  Description of Artificial Sequence: Synthetic oligonucleotide
cauagaccacugugccucc

SEQ ID NO: 1204888 - RNA, 19 nt, Artificial Sequence
  Description of Artificial Sequence: Synthetic oligonucleotide
uggauacuuucgugcaaaa

SEQ ID NO: 1204889 - RNA, 19 nt, Artificial Sequence
  Description of Artificial Sequence: Synthetic oligonucleotide
aagguccgugcuguaguug

SEQ ID NO: 1204890 - RNA, 19 nt, Artificial Sequence
  Description of Artificial Sequence: Synthetic oligonucleotide
ggccuaacggguuccacug

SEQ ID NO: 1204891 - RNA, 19 nt, Artificial Sequence
  Description of Artificial Sequence: Synthetic oligonucleotide
agggguugccaacacggau

SEQ ID NO: 1204892 - RNA, 19 nt, Artificial Sequence
  Description of Artificial Sequence: Synthetic oligonucleotide
aaccuuggcuaugaucuuu

SEQ ID NO: 1204893 - RNA, 19 nt, Artificial Sequence
  Description of Artificial Sequence: Synthetic oligonucleotide
agucuuuguacaaccuccu

SEQ ID NO: 1204894 - RNA, 19 nt, Artificial Sequence
  Description of Artificial Sequence: Synthetic oligonucleotide
cccgcugguaggaauauug

SEQ ID NO: 1204895 - RNA, 19 nt, Artificial Sequence
  Description of Artificial Sequence: Synthetic oligonucleotide
aacaugcucacugccuguu

SEQ ID NO: 1204896 - RNA, 19 nt, Artificial Sequence
  Description of Artificial Sequence: Synthetic oligonucleotide
agucacaauggugggcucu

SEQ ID NO: 1204897 - RNA, 19 nt, Artificial Sequence
  Description of Artificial Sequence: Synthetic oligonucleotide
cuaacggguuccacugcuc

SEQ ID NO: 1204898 - RNA, 19 nt, Artificial Sequence
  Description of Artificial Sequence: Synthetic oligonucleotide
acggagaacgggaaugccu

SEQ ID NO: 1204899 - RNA, 19 nt, Artificial Sequence
  Description of Artificial Sequence: Synthetic oligonucleotide
guggacaugugggcgguag

SEQ ID NO: 1204900 - RNA, 19 nt, Artificial Sequence
  Description of Artificial Sequence: Synthetic oligonucleotide
auugccaggaugauccaua

SEQ ID NO: 1204901 - RNA, 19 nt, Artificial Sequence
  Description of Artificial Sequence: Synthetic oligonucleotide
ggugggcucuacauaauug

SEQ ID NO: 1204902 - RNA, 19 nt, Artificial Sequence
  Description of Artificial Sequence: Synthetic oligonucleotide
ugaucagcgcuauggcguu

SEQ ID NO: 1204903 - RNA, 19 nt, Artificial Sequence
  Description of Artificial Sequence: Synthetic oligonucleotide
gugaucagcgcuauggcgu

SEQ ID NO: 1204904 - RNA, 19 nt, Artificial Sequence
  Description of Artificial Sequence: Synthetic oligonucleotide
gcgaguaggcaccuuucag

SEQ ID NO: 1204905 - RNA, 19 nt, Artificial Sequence
  Description of Artificial Sequence: Synthetic oligonucleotide
ccaauccaucugaagauuc

SEQ ID NO: 1204906 - RNA, 19 nt, Artificial Sequence
  Description of Artificial Sequence: Synthetic oligonucleotide
gucuuuguacaaccuccuc

SEQ ID NO: 1204907 - RNA, 19 nt, Artificial Sequence
  Description of Artificial Sequence: Synthetic oligonucleotide
guucccacggcagcaaaca

SEQ ID NO: 1204908 - RNA, 19 nt, Artificial Sequence
  Description of Artificial Sequence: Synthetic oligonucleotide
uuccccaccugagugcuuc

SEQ ID NO: 1204909 - RNA, 19 nt, Artificial Sequence
  Description of Artificial Sequence: Synthetic oligonucleotide
accacugugccuccuuguu

SEQ ID NO: 1204910 - RNA, 19 nt, Artificial Sequence
  Description of Artificial Sequence: Synthetic oligonucleotide
augcaccgccaaucucagc

SEQ ID NO: 1204911 - RNA, 19 nt, Artificial Sequence
  Description of Artificial Sequence: Synthetic oligonucleotide
aguaacgagagaaguuguu

SEQ ID NO: 1204912 - RNA, 19 nt, Artificial Sequence
  Description of Artificial Sequence: Synthetic oligonucleotide
gcuauggcguuguuccagc

SEQ ID NO: 1204913 - RNA, 19 nt, Artificial Sequence
  Description of Artificial Sequence: Synthetic oligonucleotide
gcagcguaaucacaaaugu

SEQ ID NO: 1204914 - RNA, 19 nt, Artificial Sequence
  Description of Artificial Sequence: Synthetic oligonucleotide
guaugcagugguccauaga

SEQ ID NO: 1204915 - RNA, 19 nt, Artificial Sequence
  Description of Artificial Sequence: Synthetic oligonucleotide
ucccgcaaggccaggccaa

SEQ ID NO: 1204916 - RNA, 19 nt, Artificial Sequence
  Description of Artificial Sequence: Synthetic oligonucleotide
ccugaacuucuccuauucc

SEQ ID NO: 1204917 - RNA, 19 nt, Artificial Sequence
  Description of Artificial Sequence: Synthetic oligonucleotide
guccacgaacuccugaacu

SEQ ID NO: 1204918 - RNA, 19 nt, Artificial Sequence
  Description of Artificial Sequence: Synthetic oligonucleotide
guaggcaccuuucagucuu

SEQ ID NO: 1204919 - RNA, 19 nt, Artificial Sequence
  Description of Artificial Sequence: Synthetic oligonucleotide
caccgccaaucucagcccc

SEQ ID NO: 1204920 - RNA, 19 nt, Artificial Sequence
  Description of Artificial Sequence: Synthetic oligonucleotide
ugcauccucgaaagcuaua

SEQ ID NO: 1204921 - RNA, 19 nt, Artificial Sequence
  Description of Artificial Sequence: Synthetic oligonucleotide
ggacaugugggcgguaggc

SEQ ID NO: 1204922 - RNA, 19 nt, Artificial Sequence
  Description of Artificial Sequence: Synthetic oligonucleotide
uugguaugcagugguccau

SEQ ID NO: 1204923 - RNA, 19 nt, Artificial Sequence
  Description of Artificial Sequence: Synthetic oligonucleotide
acggcagcaaacagagcug

SEQ ID NO: 1204924 - RNA, 19 nt, Artificial Sequence
  Description of Artificial Sequence: Synthetic oligonucleotide
auggaacaaauggcaccag

SEQ ID NO: 1204925 - RNA, 19 nt, Artificial Sequence
  Description of Artificial Sequence: Synthetic oligonucleotide
uauacacgcccgcguuguc

SEQ ID NO: 1204926 - RNA, 19 nt, Artificial Sequence
  Description of Artificial Sequence: Synthetic oligonucleotide
cacaauggugggcucuaca

SEQ ID NO: 1204927 - RNA, 19 nt, Artificial Sequence
  Description of Artificial Sequence: Synthetic oligonucleotide
agccaagcauagucgggau

SEQ ID NO: 1204928 - RNA, 19 nt, Artificial Sequence
  Description of Artificial Sequence: Synthetic oligonucleotide
aucagcgcuauggcguugu

SEQ ID NO: 1204929 - RNA, 19 nt, Artificial Sequence
  Description of Artificial Sequence: Synthetic oligonucleotide
cguaaucacaaauguccac

SEQ ID NO: 1204930 - RNA, 19 nt, Artificial Sequence
  Description of Artificial Sequence: Synthetic oligonucleotide
ugguaugcagugguccaua

SEQ ID NO: 1204931 - RNA, 19 nt, Artificial Sequence
  Description of Artificial Sequence: Synthetic oligonucleotide
cauggauacuuucgugcaa

SEQ ID NO: 1204932 - RNA, 19 nt, Artificial Sequence
  Description of Artificial Sequence: Synthetic oligonucleotide
cacggagaacgggaaugcc

SEQ ID NO: 1204933 - RNA, 19 nt, Artificial Sequence
  Description of Artificial Sequence: Synthetic oligonucleotide
ccuugcuauuggcucauug

SEQ ID NO: 1204934 - RNA, 19 nt, Artificial Sequence
  Description of Artificial Sequence: Synthetic oligonucleotide
caccuguuuccccaccuga

SEQ ID NO: 1204935 - RNA, 19 nt, Artificial Sequence
  Description of Artificial Sequence: Synthetic oligonucleotide
cacugccuguuugguaugc

SEQ ID NO: 1204936 - RNA, 19 nt, Artificial Sequence
  Description of Artificial Sequence: Synthetic oligonucleotide
cagguucacacguguaucu

SEQ ID NO: 1204937 - RNA, 19 nt, Artificial Sequence
  Description of Artificial Sequence: Synthetic oligonucleotide
uuggggcaaaagucuccuc

SEQ ID NO: 1204938 - RNA, 19 nt, Artificial Sequence
  Description of Artificial Sequence: Synthetic oligonucleotide
gggguugccaacacggauc

SEQ ID NO: 1204939 - RNA, 19 nt, Artificial Sequence
  Description of Artificial Sequence: Synthetic oligonucleotide
augauucccaccaggccua

SEQ ID NO: 1204940 - RNA, 19 nt, Artificial Sequence
  Description of Artificial Sequence: Synthetic oligonucleotide
acggguuccacugcucgau

SEQ ID NO: 1204941 - RNA, 19 nt, Artificial Sequence
  Description of Artificial Sequence: Synthetic oligonucleotide
acggaucugcgaguaggca

SEQ ID NO: 1204942 - RNA, 19 nt, Artificial Sequence
  Description of Artificial Sequence: Synthetic oligonucleotide
ugccuccuuguuucuuuau

SEQ ID NO: 1204943 - RNA, 19 nt, Artificial Sequence
  Description of Artificial Sequence: Synthetic oligonucleotide
caggcagaucauuguccuc

SEQ ID NO: 1204944 - RNA, 19 nt, Artificial Sequence
  Description of Artificial Sequence: Synthetic oligonucleotide
gcgccaguuuccauuauac

SEQ ID NO: 1204945 - RNA, 19 nt, Artificial Sequence
  Description of Artificial Sequence: Synthetic oligonucleotide
accgccaaucucagccccg

SEQ ID NO: 1204946 - RNA, 19 nt, Artificial Sequence
  Description of Artificial Sequence: Synthetic oligonucleotide
gggcucuacauaauugcca

SEQ ID NO: 1204947 - RNA, 19 nt, Artificial Sequence
  Description of Artificial Sequence: Synthetic oligonucleotide
cuccuauuccuuccacuaa

SEQ ID NO: 1204948 - RNA, 19 nt, Artificial Sequence
  Description of Artificial Sequence: Synthetic oligonucleotide
gcguaaucacaaaugucca

SEQ ID NO: 1204949 - RNA, 19 nt, Artificial Sequence
  Description of Artificial Sequence: Synthetic oligonucleotide
cauuauacacgcccgcguu

SEQ ID NO: 1204950 - RNA, 19 nt, Artificial Sequence
  Description of Artificial Sequence: Synthetic oligonucleotide
gcauccucgaaagcuauaa

SEQ ID NO: 1204951 - RNA, 19 nt, Artificial Sequence
  Description of Artificial Sequence: Synthetic oligonucleotide
ccaagcuccaacaagcuuu

SEQ ID NO: 1204952 - RNA, 19 nt, Artificial Sequence
  Description of Artificial Sequence: Synthetic oligonucleotide
augaucuuugugacagcua

SEQ ID NO: 1204953 - RNA, 19 nt, Artificial Sequence
  Description of Artificial Sequence: Synthetic oligonucleotide
aggccugcacggagaacgg

SEQ ID NO: 1204954 - RNA, 19 nt, Artificial Sequence
  Description of Artificial Sequence: Synthetic oligonucleotide
ggaagguccgugcuguagu

SEQ ID NO: 1204955 - RNA, 19 nt, Artificial Sequence
  Description of Artificial Sequence: Synthetic oligonucleotide
guagagaauuggggcaaaa

SEQ ID NO: 1204956 - RNA, 19 nt, Artificial Sequence
  Description of Artificial Sequence: Synthetic oligonucleotide
cacggccacugggaaauug

SEQ ID NO: 1204957 - RNA, 19 nt, Artificial Sequence
  Description of Artificial Sequence: Synthetic oligonucleotide
guuuucccaguacucggau

SEQ ID NO: 1204958 - RNA, 19 nt, Artificial Sequence
  Description of Artificial Sequence: Synthetic oligonucleotide
cgcugguaggaauauugac

SEQ ID NO: 1204959 - RNA, 19 nt, Artificial Sequence
  Description of Artificial Sequence: Synthetic oligonucleotide
gcacggagaacgggaaugc

SEQ ID NO: 1204960 - RNA, 19 nt, Artificial Sequence
  Description of Artificial Sequence: Synthetic oligonucleotide
uggcguuguuccagccaaa

SEQ ID NO: 1204961 - RNA, 19 nt, Artificial Sequence
  Description of Artificial Sequence: Synthetic oligonucleotide
uccccaccugagugcuucc

SEQ ID NO: 1204962 - RNA, 19 nt, Artificial Sequence
  Description of Artificial Sequence: Synthetic oligonucleotide
ccuccucauggauacuuuc

SEQ ID NO: 1204963 - RNA, 19 nt, Artificial Sequence
  Description of Artificial Sequence: Synthetic oligonucleotide
gaucagcgcuauggcguug

SEQ ID NO: 1204964 - RNA, 19 nt, Artificial Sequence
  Description of Artificial Sequence: Synthetic oligonucleotide
agguucacacguguaucuu

SEQ ID NO: 1204965 - RNA, 19 nt, Artificial Sequence
  Description of Artificial Sequence: Synthetic oligonucleotide
cacgaacuccugaacuucu

SEQ ID NO: 1204966 - RNA, 19 nt, Artificial Sequence
  Description of Artificial Sequence: Synthetic oligonucleotide
ggguuccacugcucgauga

SEQ ID NO: 1204967 - RNA, 19 nt, Artificial Sequence
  Description of Artificial Sequence: Synthetic oligonucleotide
gcccgcguuguccucgcgg

SEQ ID NO: 1204968 - RNA, 19 nt, Artificial Sequence
  Description of Artificial Sequence: Synthetic oligonucleotide
gcauagucgggaugaugga

SEQ ID NO: 1204969 - RNA, 19 nt, Artificial Sequence
  Description of Artificial Sequence: Synthetic oligonucleotide
cagcucuugcagccaagca

SEQ ID NO: 1204970 - RNA, 19 nt, Artificial Sequence
  Description of Artificial Sequence: Synthetic oligonucleotide
gaccacugugccuccuugu

SEQ ID NO: 1204971 - RNA, 19 nt, Artificial Sequence
  Description of Artificial Sequence: Synthetic oligonucleotide
cagucacaauggugggcuc

SEQ ID NO: 1204972 - RNA, 19 nt, Artificial Sequence
  Description of Artificial Sequence: Synthetic oligonucleotide
auagaccacugugccuccu

SEQ ID NO: 1204973 - RNA, 19 nt, Artificial Sequence
  Description of Artificial Sequence: Synthetic oligonucleotide
cagggguugccaacacgga

SEQ ID NO: 1204974 - RNA, 19 nt, Artificial Sequence
  Description of Artificial Sequence: Synthetic oligonucleotide
gaagguccgugcuguaguu

SEQ ID NO: 1204975 - RNA, 19 nt, Artificial Sequence
  Description of Artificial Sequence: Synthetic oligonucleotide
cagcuauaguaacgagaga

SEQ ID NO: 1204976 - RNA, 19 nt, Artificial Sequence
  Description of Artificial Sequence: Synthetic oligonucleotide
caggacaauaggacguaau

SEQ ID NO: 1204977 - RNA, 19 nt, Artificial Sequence
  Description of Artificial Sequence: Synthetic oligonucleotide
cacagagguacaccuuugu

SEQ ID NO: 1204978 - RNA, 19 nt, Artificial Sequence
  Description of Artificial Sequence: Synthetic oligonucleotide
guacaaccuccucauggau

SEQ ID NO: 1204979 - RNA, 19 nt, Artificial Sequence
  Description of Artificial Sequence: Synthetic oligonucleotide
ccagauucccugccaccgc

SEQ ID NO: 1204980 - RNA, 19 nt, Artificial Sequence
  Description of Artificial Sequence: Synthetic oligonucleotide
ccaggaugauccauaaccu

SEQ ID NO: 1204981 - RNA, 19 nt, Artificial Sequence
  Description of Artificial Sequence: Synthetic oligonucleotide
ggcagaucauuguccucca

SEQ ID NO: 1204982 - RNA, 19 nt, Artificial Sequence
  Description of Artificial Sequence: Synthetic oligonucleotide
cagcgcuauggcguuguuc

SEQ ID NO: 1204983 - RNA, 19 nt, Artificial Sequence
  Description of Artificial Sequence: Synthetic oligonucleotide
ggcucauuguuagcaggac

SEQ ID NO: 1204984 - RNA, 19 nt, Artificial Sequence
  Description of Artificial Sequence: Synthetic oligonucleotide
augccuugagccagaggaa

SEQ ID NO: 1204985 - RNA, 19 nt, Artificial Sequence
  Description of Artificial Sequence: Synthetic oligonucleotide
ccuuuauaguuucuucaua

SEQ ID NO: 1204986 - RNA, 19 nt, Artificial Sequence
  Description of Artificial Sequence: Synthetic oligonucleotide
gucccagggguugccaaca

SEQ ID NO: 1204987 - RNA, 19 nt, Artificial Sequence
  Description of Artificial Sequence: Synthetic oligonucleotide
uccggucccagggguugcc

SEQ ID NO: 1204988 - RNA, 19 nt, Artificial Sequence
  Description of Artificial Sequence: Synthetic oligonucleotide
caggaugauccauaaccuu

SEQ ID NO: 1204989 - RNA, 19 nt, Artificial Sequence
  Description of Artificial Sequence: Synthetic oligonucleotide
ggagaacgggaaugccuga

SEQ ID NO: 1204990 - RNA, 19 nt, Artificial Sequence
  Description of Artificial Sequence: Synthetic oligonucleotide
ccacugcucgaugagagca

SEQ ID NO: 1204991 - RNA, 19 nt, Artificial Sequence
  Description of Artificial Sequence: Synthetic oligonucleotide
gucacaauggugggcucua

SEQ ID NO: 1204992 - RNA, 19 nt, Artificial Sequence
  Description of Artificial Sequence: Synthetic oligonucleotide
cauagucgggaugauggau

SEQ ID NO: 1204993 - RNA, 19 nt, Artificial Sequence
  Description of Artificial Sequence: Synthetic oligonucleotide
ggguugccaacacggaucu

SEQ ID NO: 1204994 - RNA, 19 nt, Artificial Sequence
  Description of Artificial Sequence: Synthetic oligonucleotide
gagaacgggaaugccugau

SEQ ID NO: 1204995 - RNA, 19 nt, Artificial Sequence
  Description of Artificial Sequence: Synthetic oligonucleotide
gaugguacauguggaucuu

SEQ ID NO: 1204996 - RNA, 19 nt, Artificial Sequence
  Description of Artificial Sequence: Synthetic oligonucleotide
caacacggaucugcgagua

SEQ ID NO: 1204997 - RNA, 19 nt, Artificial Sequence
  Description of Artificial Sequence: Synthetic oligonucleotide
gccuaacggguuccacugc

SEQ ID NO: 1204998 - RNA, 19 nt, Artificial Sequence
  Description of Artificial Sequence: Synthetic oligonucleotide
ucagcgcuauggcguuguu

SEQ ID NO: 1204999 - RNA, 19 nt, Artificial Sequence
  Description of Artificial Sequence: Synthetic oligonucleotide
gguacaccuuuguccagcu

SEQ ID NO: 1205000 - RNA, 19 nt, Artificial Sequence
  Description of Artificial Sequence: Synthetic oligonucleotide
gguucacacguguaucuuu

SEQ ID NO: 1205001 - RNA, 19 nt, Artificial Sequence
  Description of Artificial Sequence: Synthetic oligonucleotide
gucgccucacagagguaca

SEQ ID NO: 1205002 - RNA, 19 nt, Artificial Sequence
  Description of Artificial Sequence: Synthetic oligonucleotide
cauccucgacaagccagca

SEQ ID NO: 1205003 - RNA, 19 nt, Artificial Sequence
  Description of Artificial Sequence: Synthetic oligonucleotide
ccaggcagaucauuguccu

SEQ ID NO: 1205004 - RNA, 19 nt, Artificial Sequence
  Description of Artificial Sequence: Synthetic oligonucleotide
uccucgcuuuggggcagga

SEQ ID NO: 1205005 - RNA, 19 nt, Artificial Sequence
  Description of Artificial Sequence: Synthetic oligonucleotide
cauccucgaaagcuauaau

SEQ ID NO: 1205006 - RNA, 19 nt, Artificial Sequence
  Description of Artificial Sequence: Synthetic oligonucleotide
ggccaaucuuucuuacuau

SEQ ID NO: 1205007 - RNA, 19 nt, Artificial Sequence
  Description of Artificial Sequence: Synthetic oligonucleotide
ccgcugguaggaauauuga

SEQ ID NO: 1205008 - RNA, 19 nt, Artificial Sequence
  Description of Artificial Sequence: Synthetic oligonucleotide
cgcuauggcguuguuccag

SEQ ID NO: 1205009 - RNA, 19 nt, Artificial Sequence
  Description of Artificial Sequence: Synthetic oligonucleotide
ccgccagugugcuucucuc

SEQ ID NO: 1205010 - RNA, 19 nt, Artificial Sequence
  Description of Artificial Sequence: Synthetic oligonucleotide
cgugcuguaguugauggua

SEQ ID NO: 1205011 - RNA, 19 nt, Artificial Sequence
  Description of Artificial Sequence: Synthetic oligonucleotide
gacaagccagcagcguaau

SEQ ID NO: 1205012 - RNA, 19 nt, Artificial Sequence
  Description of Artificial Sequence: Synthetic oligonucleotide
gccauugcugugccaauau

SEQ ID NO: 1205013 - RNA, 19 nt, Artificial Sequence
  Description of Artificial Sequence: Synthetic oligonucleotide
caaauggcaccaggcagau

SEQ ID NO: 1205014 - RNA, 19 nt, Artificial Sequence
  Description of Artificial Sequence: Synthetic oligonucleotide
gaucugcgaguaggcaccu

SEQ ID NO: 1205015 - RNA, 19 nt, Artificial Sequence
  Description of Artificial Sequence: Synthetic oligonucleotide
ccauuauacacgcccgcgu

SEQ ID NO: 1205016 - RNA, 19 nt, Artificial Sequence
  Description of Artificial Sequence: Synthetic oligonucleotide
uacuggccugucggauccu

SEQ ID NO: 1205017 - RNA, 19 nt, Artificial Sequence
  Description of Artificial Sequence: Synthetic oligonucleotide
ccccgaucauccucgacaa

SEQ ID NO: 1205018 - RNA, 19 nt, Artificial Sequence
  Description of Artificial Sequence: Synthetic oligonucleotide
ccuaacggguuccacugcu

SEQ ID NO: 1205019 - RNA, 19 nt, Artificial Sequence
  Description of Artificial Sequence: Synthetic oligonucleotide
cacguguaucuuuggccau

SEQ ID NO: 1205020 - RNA, 19 nt, Artificial Sequence
  Description of Artificial Sequence: Synthetic oligonucleotide
gccugucggauccuugcua

SEQ ID NO: 1205021 - RNA, 19 nt, Artificial Sequence
  Description of Artificial Sequence: Synthetic oligonucleotide
cacugcucgaugagagcau

SEQ ID NO: 1205022 - RNA, 19 nt, Artificial Sequence
  Description of Artificial Sequence: Synthetic oligonucleotide
cucgacaagccagcagcgu

SEQ ID NO: 1205023 - RNA, 19 nt, Artificial Sequence
  Description of Artificial Sequence: Synthetic oligonucleotide
cagugaaggacagcagguu

SEQ ID NO: 1205024 - RNA, 19 nt, Artificial Sequence
  Description of Artificial Sequence: Synthetic oligonucleotide
gccgcgccaguuuccauua

SEQ ID NO: 1205025 - RNA, 19 nt, Artificial Sequence
  Description of Artificial Sequence: Synthetic oligonucleotide
ccgccaaucucagccccgc

SEQ ID NO: 1205026 - RNA, 19 nt, Artificial Sequence
  Description of Artificial Sequence: Synthetic oligonucleotide
cgccaguuuccauuauaca

SEQ ID NO: 1205027 - RNA, 19 nt, Artificial Sequence
  Description of Artificial Sequence: Synthetic oligonucleotide
cccgaucauccucgacaag

SEQ ID NO: 1205028 - RNA, 19 nt, Artificial Sequence
  Description of Artificial Sequence: Synthetic oligonucleotide
gcaggacaauaggacguaa

SEQ ID NO: 1205029 - RNA, 19 nt, Artificial Sequence
  Description of Artificial Sequence: Synthetic oligonucleotide
aguggacaugugggcggua

SEQ ID NO: 1205030 - RNA, 19 nt, Artificial Sequence
  Description of Artificial Sequence: Synthetic oligonucleotide
gccuccuuguuucuuuauu

SEQ ID NO: 1205031 - RNA, 19 nt, Artificial Sequence
  Description of Artificial Sequence: Synthetic oligonucleotide
ccaacacggaucugcgagu

SEQ ID NO: 1205032 - RNA, 19 nt, Artificial Sequence
  Description of Artificial Sequence: Synthetic oligonucleotide
gguugccaacacggaucug

SEQ ID NO: 1205033 - RNA, 19 nt, Artificial Sequence
  Description of Artificial Sequence: Synthetic oligonucleotide
cacuaagaucuuccccauu

SEQ ID NO: 1205034 - RNA, 19 nt, Artificial Sequence
  Description of Artificial Sequence: Synthetic oligonucleotide
gcgcuauggcguuguucca

SEQ ID NO: 1205035 - RNA, 19 nt, Artificial Sequence
  Description of Artificial Sequence: Synthetic oligonucleotide
ggccugucggauccuugcu

SEQ ID NO: 1205036 - RNA, 19 nt, Artificial Sequence
  Description of Artificial Sequence: Synthetic oligonucleotide
cugcacggagaacgggaau

SEQ ID NO: 1205037 - RNA, 19 nt, Artificial Sequence
  Description of Artificial Sequence: Synthetic oligonucleotide
caagcauagucgggaugau

SEQ ID NO: 1205038 - RNA, 19 nt, Artificial Sequence
  Description of Artificial Sequence: Synthetic oligonucleotide
ccgcguuguccucgcggag

SEQ ID NO: 1205039 - RNA, 19 nt, Artificial Sequence
  Description of Artificial Sequence: Synthetic oligonucleotide
ccacuaagaucuuccccau

SEQ ID NO: 1205040 - RNA, 19 nt, Artificial Sequence
  Description of Artificial Sequence: Synthetic oligonucleotide
ccacggcucuaacaaacau

SEQ ID NO: 1205041 - RNA, 19 nt, Artificial Sequence
  Description of Artificial Sequence: Synthetic oligonucleotide
acacggccacugggaaauu

SEQ ID NO: 1205042 - RNA, 19 nt, Artificial Sequence
  Description of Artificial Sequence: Synthetic oligonucleotide
caggcaucgcugccagauu

SEQ ID NO: 1205043 - RNA, 19 nt, Artificial Sequence
  Description of Artificial Sequence: Synthetic oligonucleotide
ccccgccgcgccaguuucc

SEQ ID NO: 1205044 - RNA, 19 nt, Artificial Sequence
  Description of Artificial Sequence: Synthetic oligonucleotide
cagccccgcugguaggaau

SEQ ID NO: 1205045 - RNA, 19 nt, Artificial Sequence
  Description of Artificial Sequence: Synthetic oligonucleotide
caccgccagugugcuucuc

SEQ ID NO: 1205046 - RNA, 19 nt, Artificial Sequence
  Description of Artificial Sequence: Synthetic oligonucleotide
cgcgccaguuuccauuaua

SEQ ID NO: 1205047 - RNA, 19 nt, Artificial Sequence
  Description of Artificial Sequence: Synthetic oligonucleotide
ccauacuggccugucggau

SEQ ID NO: 1205048 - RNA, 19 nt, Artificial Sequence
  Description of Artificial Sequence: Synthetic oligonucleotide
ccgcaaggccaggccaauc

SEQ ID NO: 1205049 - RNA, 19 nt, Artificial Sequence
  Description of Artificial Sequence: Synthetic oligonucleotide
gguccgugcuguaguugau

SEQ ID NO: 1205050 - RNA, 19 nt, Artificial Sequence
  Description of Artificial Sequence: Synthetic oligonucleotide
cccgccgcgccaguuucca

SEQ ID NO: 1205051 - RNA, 19 nt, Artificial Sequence
  Description of Artificial Sequence: Synthetic oligonucleotide
cggcucuaacaaacaugcu

SEQ ID NO: 1205052 - RNA, 19 nt, Artificial Sequence
  Description of Artificial Sequence: Synthetic oligonucleotide
ccgcgccaguuuccauuau

SEQ ID NO: 1205053 - RNA, 19 nt, Artificial Sequence
  Description of Artificial Sequence: Synthetic oligonucleotide
aaaugaaugauauagaggc

SEQ ID NO: 1205054 - RNA, 19 nt, Artificial Sequence
  Description of Artificial Sequence: Synthetic oligonucleotide
gaaaaugaaugauauagag

SEQ ID NO: 1205055 - RNA, 19 nt, Artificial Sequence
  Description of Artificial Sequence: Synthetic oligonucleotide
ugauuugugagcacuaagg

SEQ ID NO: 1205056 - RNA, 19 nt, Artificial Sequence
  Description of Artificial Sequence: Synthetic oligonucleotide
aagcucagaaaccaagagc

SEQ ID NO: 1205057 - RNA, 19 nt, Artificial Sequence
  Description of Artificial Sequence: Synthetic oligonucleotide
ucaagaauugcauagcuga

SEQ ID NO: 1205058 - RNA, 19 nt, Artificial Sequence
  Description of Artificial Sequence: Synthetic oligonucleotide
gauauagaggcccuaaggc

SEQ ID NO: 1205059 - RNA, 19 nt, Artificial Sequence
  Description of Artificial Sequence: Synthetic oligonucleotide
ugauauagaggcccuaagg

SEQ ID NO: 1205060 - RNA, 19 nt, Artificial Sequence
  Description of Artificial Sequence: Synthetic oligonucleotide
augaaugauauagaggccc

SEQ ID NO: 1205061 - RNA, 19 nt, Artificial Sequence
  Description of Artificial Sequence: Synthetic oligonucleotide
uccuaguguauacugaggg

SEQ ID NO: 1205062 - RNA, 19 nt, Artificial Sequence
  Description of Artificial Sequence: Synthetic oligonucleotide
aaaacagagguuucgagaa

SEQ ID NO: 1205063 - RNA, 19 nt, Artificial Sequence
  Description of Artificial Sequence: Synthetic oligonucleotide
acaguucuuguguagaugg

SEQ ID NO: 1205064 - RNA, 19 nt, Artificial Sequence
  Description of Artificial Sequence: Synthetic oligonucleotide
aguuaagugguugugaagg

SEQ ID NO: 1205065 - RNA, 19 nt, Artificial Sequence
  Description of Artificial Sequence: Synthetic oligonucleotide
uucaagucggcuaaucccg

SEQ ID NO: 1205066 - RNA, 19 nt, Artificial Sequence
  Description of Artificial Sequence: Synthetic oligonucleotide
ucuauacagucauugacag

SEQ ID NO: 1205067 - RNA, 19 nt, Artificial Sequence
  Description of Artificial Sequence: Synthetic oligonucleotide
ugucuauggcuaaagaugc

SEQ ID NO: 1205068 - RNA, 19 nt, Artificial Sequence
  Description of Artificial Sequence: Synthetic oligonucleotide
uauagaggcccuaaggcag

SEQ ID NO: 1205069 - RNA, 19 nt, Artificial Sequence
  Description of Artificial Sequence: Synthetic oligonucleotide
auaagauccacgcccacac

SEQ ID NO: 1205070 - RNA, 19 nt, Artificial Sequence
  Description of Artificial Sequence: Synthetic oligonucleotide
agaauugcauagcugacuc

SEQ ID NO: 1205071 - RNA, 19 nt, Artificial Sequence
  Description of Artificial Sequence: Synthetic oligonucleotide
cuggagacaauucacagcc

SEQ ID NO: 1205072 - RNA, 19 nt, Artificial Sequence
  Description of Artificial Sequence: Synthetic oligonucleotide
agauggaccaagcagugac

SEQ ID NO: 1205073 - RNA, 19 nt, Artificial Sequence
  Description of Artificial Sequence: Synthetic oligonucleotide
agcugcuagauucugugcc

SEQ ID NO: 1205074 - RNA, 19 nt, Artificial Sequence
  Description of Artificial Sequence: Synthetic oligonucleotide
ucauacacgacucccagga

SEQ ID NO: 1205075 - RNA, 19 nt, Artificial Sequence
  Description of Artificial Sequence: Synthetic oligonucleotide
gauuugugagcacuaaggc

SEQ ID NO: 1205076 - RNA, 19 nt, Artificial Sequence
  Description of Artificial Sequence: Synthetic oligonucleotide
acuaagaucacugauuugu

SEQ ID NO: 1205077 - RNA, 19 nt, Artificial Sequence
  Description of Artificial Sequence: Synthetic oligonucleotide
ugugcagauaagauccacg

SEQ ID NO: 1205078 - RNA, 19 nt, Artificial Sequence
  Description of Artificial Sequence: Synthetic oligonucleotide
agcaacugcugccugacgc

SEQ ID NO: 1205079 - RNA, 19 nt, Artificial Sequence
  Description of Artificial Sequence: Synthetic oligonucleotide
ucuguaaccaguagccucc

SEQ ID NO: 1205080 - RNA, 19 nt, Artificial Sequence
  Description of Artificial Sequence: Synthetic oligonucleotide
gaaccagagaaaaugaaug

SEQ ID NO: 1205081 - RNA, 19 nt, Artificial Sequence
  Description of Artificial Sequence: Synthetic oligonucleotide
gauggguuugcucagcuug

SEQ ID NO: 1205082 - RNA, 19 nt, Artificial Sequence
  Description of Artificial Sequence: Synthetic oligonucleotide
cugucuauggcuaaagaug

SEQ ID NO: 1205083 - RNA, 19 nt, Artificial Sequence
  Description of Artificial Sequence: Synthetic oligonucleotide
uuuacuaguuaagugguug

SEQ ID NO: 1205084 - RNA, 19 nt, Artificial Sequence
  Description of Artificial Sequence: Synthetic oligonucleotide
aacucuuaaggucccugcg

SEQ ID NO: 1205085 - RNA, 19 nt, Artificial Sequence
  Description of Artificial Sequence: Synthetic oligonucleotide
uguuugaauagcucuggag

SEQ ID NO: 1205086 - RNA, 19 nt, Artificial Sequence
  Description of Artificial Sequence: Synthetic oligonucleotide
agagacaccuuccagcguc

SEQ ID NO: 1205087 - RNA, 19 nt, Artificial Sequence
  Description of Artificial Sequence: Synthetic oligonucleotide
aacuaaugaggaauccagc

SEQ ID NO: 1205088 - RNA, 19 nt, Artificial Sequence
  Description of Artificial Sequence: Synthetic oligonucleotide
uaaagaugccaccucaggu

SEQ ID NO: 1205089 - RNA, 19 nt, Artificial Sequence
  Description of Artificial Sequence: Synthetic oligonucleotide
gaacuaaugaggaauccag

SEQ ID NO: 1205090 - RNA, 19 nt, Artificial Sequence
  Description of Artificial Sequence: Synthetic oligonucleotide
agucccaguaauauggacc

SEQ ID NO: 1205091 - RNA, 19 nt, Artificial Sequence
  Description of Artificial Sequence: Synthetic oligonucleotide
aagucggcuaaucccgccc

SEQ ID NO: 1205092 - RNA, 19 nt, Artificial Sequence
  Description of Artificial Sequence: Synthetic oligonucleotide
uguccuaguguauacugag

SEQ ID NO: 1205093 - RNA, 19 nt, Artificial Sequence
  Description of Artificial Sequence: Synthetic oligonucleotide
gucccaguaauauggaccg

SEQ ID NO: 1205094 - RNA, 19 nt, Artificial Sequence
  Description of Artificial Sequence: Synthetic oligonucleotide
uacugagggauacaguucu

SEQ ID NO: 1205095 - RNA, 19 nt, Artificial Sequence
  Description of Artificial Sequence: Synthetic oligonucleotide
agcagucccaguaauaugg

SEQ ID NO: 1205096 - RNA, 19 nt, Artificial Sequence
  Description of Artificial Sequence: Synthetic oligonucleotide
ucuagcuucuguaaccagu

SEQ ID NO: 1205097 - RNA, 19 nt, Artificial Sequence
  Description of Artificial Sequence: Synthetic oligonucleotide
uuugaguggucaagaauug

SEQ ID NO: 1205098 - RNA, 19 nt, Artificial Sequence
  Description of Artificial Sequence: Synthetic oligonucleotide
auauagaggcccuaaggca

SEQ ID NO: 1205099 - RNA, 19 nt, Artificial Sequence
  Description of Artificial Sequence: Synthetic oligonucleotide
aguguguagcaacugcuuc

SEQ ID NO: 1205100 - RNA, 19 nt, Artificial Sequence
  Description of Artificial Sequence: Synthetic oligonucleotide
auuugugagcacuaaggca

SEQ ID NO: 1205101 - RNA, 19 nt, Artificial Sequence
  Description of Artificial Sequence: Synthetic oligonucleotide
ugaugaacuaaugaggaau

SEQ ID NO: 1205102 - RNA, 19 nt, Artificial Sequence
  Description of Artificial Sequence: Synthetic oligonucleotide
guucaagucggcuaauccc

SEQ ID NO: 1205103 - RNA, 19 nt, Artificial Sequence
  Description of Artificial Sequence: Synthetic oligonucleotide
guguagauggaccaagcag

SEQ ID NO: 1205104 - RNA, 19 nt, Artificial Sequence
  Description of Artificial Sequence: Synthetic oligonucleotide
agcucagaaaccaagagca

SEQ ID NO: 1205105 - RNA, 19 nt, Artificial Sequence
  Description of Artificial Sequence: Synthetic oligonucleotide
uacacgacucccaggacag

SEQ ID NO: 1205106 - RNA, 19 nt, Artificial Sequence
  Description of Artificial Sequence: Synthetic oligonucleotide
uuugccaguguccuagugu

SEQ ID NO: 1205107 - RNA, 19 nt, Artificial Sequence
  Description of Artificial Sequence: Synthetic oligonucleotide
cugauccucggacugagcg

SEQ ID NO: 1205108 - RNA, 19 nt, Artificial Sequence
  Description of Artificial Sequence: Synthetic oligonucleotide
acagcgaccccucauagga

SEQ ID NO: 1205109 - RNA, 19 nt, Artificial Sequence
  Description of Artificial Sequence: Synthetic oligonucleotide
guuaagugguugugaaggg

SEQ ID NO: 1205110 - RNA, 19 nt, Artificial Sequence
  Description of Artificial Sequence: Synthetic oligonucleotide
uguguagauggaccaagca

SEQ ID NO: 1205111 - RNA, 19 nt, Artificial Sequence
  Description of Artificial Sequence: Synthetic oligonucleotide
augaacuaaugaggaaucc

SEQ ID NO: 1205112 - RNA, 19 nt, Artificial Sequence
  Description of Artificial Sequence: Synthetic oligonucleotide
ucuauggcuaaagaugcca

SEQ ID NO: 1205113 - RNA, 19 nt, Artificial Sequence
  Description of Artificial Sequence: Synthetic oligonucleotide
ugaagggcggaguagcccc

SEQ ID NO: 1205114 - RNA, 19 nt, Artificial Sequence
  Description of Artificial Sequence: Synthetic oligonucleotide
aaacagagguuucgagaag

SEQ ID NO: 1205115 - RNA, 19 nt, Artificial Sequence
  Description of Artificial Sequence: Synthetic oligonucleotide
gugcagauaagauccacgc

SEQ ID NO: 1205116 - RNA, 19 nt, Artificial Sequence
  Description of Artificial Sequence: Synthetic oligonucleotide
cugggcgucaucaaauccc

SEQ ID NO: 1205117 - RNA, 19 nt, Artificial Sequence
  Description of Artificial Sequence: Synthetic oligonucleotide
ugaaugauauagaggcccu

SEQ ID NO: 1205118 - RNA, 19 nt, Artificial Sequence
  Description of Artificial Sequence: Synthetic oligonucleotide
aaaccaagagcaggguccg

SEQ ID NO: 1205119 - RNA, 19 nt, Artificial Sequence
  Description of Artificial Sequence: Synthetic oligonucleotide
aaggcaauugagucauaca

SEQ ID NO: 1205120 - RNA, 19 nt, Artificial Sequence
  Description of Artificial Sequence: Synthetic oligonucleotide
uuacuaguuaagugguugu

SEQ ID NO: 1205121 - RNA, 19 nt, Artificial Sequence
  Description of Artificial Sequence: Synthetic oligonucleotide
ugagucauacacgacuccc

SEQ ID NO: 1205122 - RNA, 19 nt, Artificial Sequence
  Description of Artificial Sequence: Synthetic oligonucleotide
agaucuuucagaggcgagg

SEQ ID NO: 1205123 - RNA, 19 nt, Artificial Sequence
  Description of Artificial Sequence: Synthetic oligonucleotide
ucaggggcaaccuuugagu

SEQ ID NO: 1205124 - RNA, 19 nt, Artificial Sequence
  Description of Artificial Sequence: Synthetic oligonucleotide
agucauacacgacucccag

SEQ ID NO: 1205125 - RNA, 19 nt, Artificial Sequence
  Description of Artificial Sequence: Synthetic oligonucleotide
uaacucuuaaggucccugc

SEQ ID NO: 1205126 - RNA, 19 nt, Artificial Sequence
  Description of Artificial Sequence: Synthetic oligonucleotide
aaugauauagaggcccuaa

SEQ ID NO: 1205127 - RNA, 19 nt, Artificial Sequence
  Description of Artificial Sequence: Synthetic oligonucleotide
ucuuucagaggcgaggacu

SEQ ID NO: 1205128 - RNA, 19 nt, Artificial Sequence
  Description of Artificial Sequence: Synthetic oligonucleotide
guuacucugaggccugggg

SEQ ID NO: 1205129 - RNA, 19 nt, Artificial Sequence
  Description of Artificial Sequence: Synthetic oligonucleotide
ugauccucggacugagcgg

SEQ ID NO: 1205130 - RNA, 19 nt, Artificial Sequence
  Description of Artificial Sequence: Synthetic oligonucleotide
aauauggaccgauggguuu

SEQ ID NO: 1205131 - RNA, 19 nt, Artificial Sequence
  Description of Artificial Sequence: Synthetic oligonucleotide
ggcuccaucgcucagcccg

SEQ ID NO: 1205132 - RNA, 19 nt, Artificial Sequence
  Description of Artificial Sequence: Synthetic oligonucleotide
caaaacagagguuucgaga

SEQ ID NO: 1205133 - RNA, 19 nt, Artificial Sequence
  Description of Artificial Sequence: Synthetic oligonucleotide
caucaaaucccucagccca

SEQ ID NO: 1205134 - RNA, 19 nt, Artificial Sequence
  Description of Artificial Sequence: Synthetic oligonucleotide
caagcucagaaaccaagag

SEQ ID NO: 1205135 - RNA, 19 nt, Artificial Sequence
  Description of Artificial Sequence: Synthetic oligonucleotide
uuaagugguugugaagggc

SEQ ID NO: 1205136 - RNA, 19 nt, Artificial Sequence
  Description of Artificial Sequence: Synthetic oligonucleotide
uaguuaagugguugugaag

SEQ ID NO: 1205137 - RNA, 19 nt, Artificial Sequence
  Description of Artificial Sequence: Synthetic oligonucleotide
ugcucagcuuggaagagac

SEQ ID NO: 1205138 - RNA, 19 nt, Artificial Sequence
  Description of Artificial Sequence: Synthetic oligonucleotide
ucggcaaagacugucuaug

SEQ ID NO: 1205139 - RNA, 19 nt, Artificial Sequence
  Description of Artificial Sequence: Synthetic oligonucleotide
augcgcuagaggugcagcc

SEQ ID NO: 1205140 - RNA, 19 nt, Artificial Sequence
  Description of Artificial Sequence: Synthetic oligonucleotide
uuguguagauggaccaagc

SEQ ID NO: 1205141 - RNA, 19 nt, Artificial Sequence
  Description of Artificial Sequence: Synthetic oligonucleotide
ggccugaugaacuaaugag

SEQ ID NO: 1205142 - RNA, 19 nt, Artificial Sequence
  Description of Artificial Sequence: Synthetic oligonucleotide
uccuaaguguguagcaacu

SEQ ID NO: 1205143 - RNA, 19 nt, Artificial Sequence
  Description of Artificial Sequence: Synthetic oligonucleotide
agucggcuaaucccgcccc

SEQ ID NO: 1205144 - RNA, 19 nt, Artificial Sequence
  Description of Artificial Sequence: Synthetic oligonucleotide
ucaguccuaaguguguagc

SEQ ID NO: 1205145 - RNA, 19 nt, Artificial Sequence
  Description of Artificial Sequence: Synthetic oligonucleotide
cuuagccacgagauagggg

SEQ ID NO: 1205146 - RNA, 19 nt, Artificial Sequence
  Description of Artificial Sequence: Synthetic oligonucleotide
gaagcuccagccaagguca

SEQ ID NO: 1205147 - RNA, 19 nt, Artificial Sequence
  Description of Artificial Sequence: Synthetic oligonucleotide
cagggcaccgcccacauac

SEQ ID NO: 1205148 - RNA, 19 nt, Artificial Sequence
  Description of Artificial Sequence: Synthetic oligonucleotide
caccucagguccaaggcgg

SEQ ID NO: 1205149 - RNA, 19 nt, Artificial Sequence
  Description of Artificial Sequence: Synthetic oligonucleotide
gauacaguucuuguguaga

SEQ ID NO: 1205150 - RNA, 19 nt, Artificial Sequence
  Description of Artificial Sequence: Synthetic oligonucleotide
gacagugacuccuuuacua

SEQ ID NO: 1205151 - RNA, 19 nt, Artificial Sequence
  Description of Artificial Sequence: Synthetic oligonucleotide
ggacuuagccacgagauag

SEQ ID NO: 1205152 - RNA, 19 nt, Artificial Sequence
  Description of Artificial Sequence: Synthetic oligonucleotide
ugaauagcucuggagacaa

SEQ ID NO: 1205153 - RNA, 19 nt, Artificial Sequence
  Description of Artificial Sequence: Synthetic oligonucleotide
acacuaucuccccagcuca

SEQ ID NO: 1205154 - RNA, 19 nt, Artificial Sequence
  Description of Artificial Sequence: Synthetic oligonucleotide
uugagucauacacgacucc

SEQ ID NO: 1205155 - RNA, 19 nt, Artificial Sequence
  Description of Artificial Sequence: Synthetic oligonucleotide
cuugguacugcagauugac

SEQ ID NO: 1205156 - RNA, 19 nt, Artificial Sequence
  Description of Artificial Sequence: Synthetic oligonucleotide
uguacgugcugguggaaga

SEQ ID NO: 1205157 - RNA, 19 nt, Artificial Sequence
  Description of Artificial Sequence: Synthetic oligonucleotide
cuauggcuaaagaugccac

SEQ ID NO: 1205158 - RNA, 19 nt, Artificial Sequence
  Description of Artificial Sequence: Synthetic oligonucleotide
ugacagcgaccccucauag

SEQ ID NO: 1205159 - RNA, 19 nt, Artificial Sequence
  Description of Artificial Sequence: Synthetic oligonucleotide
cugauuugugagcacuaag

SEQ ID NO: 1205160 - RNA, 19 nt, Artificial Sequence
  Description of Artificial Sequence: Synthetic oligonucleotide
agcacuaaggcagggcgcg

SEQ ID NO: 1205161 - RNA, 19 nt, Artificial Sequence
  Description of Artificial Sequence: Synthetic oligonucleotide
ggugagcagguucaagucg

SEQ ID NO: 1205162 - RNA, 19 nt, Artificial Sequence
  Description of Artificial Sequence: Synthetic oligonucleotide
acuaguuaagugguuguga

SEQ ID NO: 1205163 - RNA, 19 nt, Artificial Sequence
  Description of Artificial Sequence: Synthetic oligonucleotide
ccuagagacaccuuccagc

SEQ ID NO: 1205164 - RNA, 19 nt, Artificial Sequence
  Description of Artificial Sequence: Synthetic oligonucleotide
augauuccccgggacaggc

SEQ ID NO: 1205165 - RNA, 19 nt, Artificial Sequence
  Description of Artificial Sequence: Synthetic oligonucleotide
cucuuaaggucccugcgac

SEQ ID NO: 1205166 - RNA, 19 nt, Artificial Sequence
  Description of Artificial Sequence: Synthetic oligonucleotide
uccccuagagacaccuucc

SEQ ID NO: 1205167 - RNA, 19 nt, Artificial Sequence
  Description of Artificial Sequence: Synthetic oligonucleotide
gacuccuuuacuaguuaag

SEQ ID NO: 1205168 - RNA, 19 nt, Artificial Sequence
  Description of Artificial Sequence: Synthetic oligonucleotide
ggcacuaauaaugugguca

SEQ ID NO: 1205169 - RNA, 19 nt, Artificial Sequence
  Description of Artificial Sequence: Synthetic oligonucleotide
cuuaaggucccugcgacuc

SEQ ID NO: 1205170 - RNA, 19 nt, Artificial Sequence
  Description of Artificial Sequence: Synthetic oligonucleotide
acucuuaaggucccugcga

SEQ ID NO: 1205171 - RNA, 19 nt, Artificial Sequence
  Description of Artificial Sequence: Synthetic oligonucleotide
agauaagauccacgcccac

SEQ ID NO: 1205172 - RNA, 19 nt, Artificial Sequence
  Description of Artificial Sequence: Synthetic oligonucleotide
uuuugccaguguccuagug

SEQ ID NO: 1205173 - RNA, 19 nt, Artificial Sequence
  Description of Artificial Sequence: Synthetic oligonucleotide
ucacugauuugugagcacu

SEQ ID NO: 1205174 - RNA, 19 nt, Artificial Sequence
  Description of Artificial Sequence: Synthetic oligonucleotide
agcgaccccucauaggaag

SEQ ID NO: 1205175 - RNA, 19 nt, Artificial Sequence
  Description of Artificial Sequence: Synthetic oligonucleotide
uugcauagcugacucuagu

SEQ ID NO: 1205176 - RNA, 19 nt, Artificial Sequence
  Description of Artificial Sequence: Synthetic oligonucleotide
aggggcaaccuuugagugg

SEQ ID NO: 1205177 - RNA, 19 nt, Artificial Sequence
  Description of Artificial Sequence: Synthetic oligonucleotide
ggaccaagcagugacuugg

SEQ ID NO: 1205178 - RNA, 19 nt, Artificial Sequence
  Description of Artificial Sequence: Synthetic oligonucleotide
aaccuuugaguggucaaga

SEQ ID NO: 1205179 - RNA, 19 nt, Artificial Sequence
  Description of Artificial Sequence: Synthetic oligonucleotide
cugcagauugaccacagca

SEQ ID NO: 1205180 - RNA, 19 nt, Artificial Sequence
  Description of Artificial Sequence: Synthetic oligonucleotide
cuaguuaagugguugugaa

SEQ ID NO: 1205181 - RNA, 19 nt, Artificial Sequence
  Description of Artificial Sequence: Synthetic oligonucleotide
gacagcgaccccucauagg

SEQ ID NO: 1205182 - RNA, 19 nt, Artificial Sequence
  Description of Artificial Sequence: Synthetic oligonucleotide
uugaauagcucuggagaca

SEQ ID NO: 1205183 - RNA, 19 nt, Artificial Sequence
  Description of Artificial Sequence: Synthetic oligonucleotide
acuuagccacgagauaggg

SEQ ID NO: 1205184 - RNA, 19 nt, Artificial Sequence
  Description of Artificial Sequence: Synthetic oligonucleotide
uucagaggcgaggacuuag

SEQ ID NO: 1205185 - RNA, 19 nt, Artificial Sequence
  Description of Artificial Sequence: Synthetic oligonucleotide
uacuaguuaagugguugug

SEQ ID NO: 1205186 - RNA, 19 nt, Artificial Sequence
  Description of Artificial Sequence: Synthetic oligonucleotide
agacaauucacagccauua

SEQ ID NO: 1205187 - RNA, 19 nt, Artificial Sequence
  Description of Artificial Sequence: Synthetic oligonucleotide
gguucaagucggcuaaucc

SEQ ID NO: 1205188 - RNA, 19 nt, Artificial Sequence
  Description of Artificial Sequence: Synthetic oligonucleotide
uugccaguguccuagugua

SEQ ID NO: 1205189 - RNA, 19 nt, Artificial Sequence
  Description of Artificial Sequence: Synthetic oligonucleotide
ucaagucggcuaaucccgc

SEQ ID NO: 1205190 - RNA, 19 nt, Artificial Sequence
  Description of Artificial Sequence: Synthetic oligonucleotide
gacuuagccacgagauagg

SEQ ID NO: 1205191 - RNA, 19 nt, Artificial Sequence
  Description of Artificial Sequence: Synthetic oligonucleotide
cucccaaacgcuugcugcc

SEQ ID NO: 1205192 - RNA, 19 nt, Artificial Sequence
  Description of Artificial Sequence: Synthetic oligonucleotide
gucauacacgacucccagg

SEQ ID NO: 1205193 - RNA, 19 nt, Artificial Sequence
  Description of Artificial Sequence: Synthetic oligonucleotide
caggccaagcucagaaacc

SEQ ID NO: 1205194 - RNA, 19 nt, Artificial Sequence
  Description of Artificial Sequence: Synthetic oligonucleotide
cacacuaucuccccagcuc

SEQ ID NO: 1205195 - RNA, 19 nt, Artificial Sequence
  Description of Artificial Sequence: Synthetic oligonucleotide
uugaguggucaagaauugc

SEQ ID NO: 1205196 - RNA, 19 nt, Artificial Sequence
  Description of Artificial Sequence: Synthetic oligonucleotide
uucuagcuucuguaaccag

SEQ ID NO: 1205197 - RNA, 19 nt, Artificial Sequence
  Description of Artificial Sequence: Synthetic oligonucleotide
uaguguauacugagggaua

SEQ ID NO: 1205198 - RNA, 19 nt, Artificial Sequence
  Description of Artificial Sequence: Synthetic oligonucleotide
gauaagauccacgcccaca

SEQ ID NO: 1205199 - RNA, 19 nt, Artificial Sequence
  Description of Artificial Sequence: Synthetic oligonucleotide
gucaagaauugcauagcug

SEQ ID NO: 1205200 - RNA, 19 nt, Artificial Sequence
  Description of Artificial Sequence: Synthetic oligonucleotide
guccuaaguguguagcaac

SEQ ID NO: 1205201 - RNA, 19 nt, Artificial Sequence
  Description of Artificial Sequence: Synthetic oligonucleotide
uaggaagcuccagccaagg

SEQ ID NO: 1205202 - RNA, 19 nt, Artificial Sequence
  Description of Artificial Sequence: Synthetic oligonucleotide
uaaucccgccccuaacucu

SEQ ID NO: 1205203 - RNA, 19 nt, Artificial Sequence
  Description of Artificial Sequence: Synthetic oligonucleotide
auauggaccgauggguuug

SEQ ID NO: 1205204 - RNA, 19 nt, Artificial Sequence
  Description of Artificial Sequence: Synthetic oligonucleotide
aacaagcuccuugguacug

SEQ ID NO: 1205205 - RNA, 19 nt, Artificial Sequence
  Description of Artificial Sequence: Synthetic oligonucleotide
gaugauuccccgggacagg

SEQ ID NO: 1205206 - RNA, 19 nt, Artificial Sequence
  Description of Artificial Sequence: Synthetic oligonucleotide
ccaagcagugacuugguug

SEQ ID NO: 1205207 - RNA, 19 nt, Artificial Sequence
  Description of Artificial Sequence: Synthetic oligonucleotide
cuaucuccccagcucaaac

SEQ ID NO: 1205208 - RNA, 19 nt, Artificial Sequence
  Description of Artificial Sequence: Synthetic oligonucleotide
guaaccaguagccucccaa

SEQ ID NO: 1205209 - RNA, 19 nt, Artificial Sequence
  Description of Artificial Sequence: Synthetic oligonucleotide
cauaggaagcuccagccaa

SEQ ID NO: 1205210 - RNA, 19 nt, Artificial Sequence
  Description of Artificial Sequence: Synthetic oligonucleotide
uguugccugcaaacacucc

SEQ ID NO: 1205211 - RNA, 19 nt, Artificial Sequence
  Description of Artificial Sequence: Synthetic oligonucleotide
uagauucugugcccaggac

SEQ ID NO: 1205212 - RNA, 19 nt, Artificial Sequence
  Description of Artificial Sequence: Synthetic oligonucleotide
cuaaucccgccccuaacuc

SEQ ID NO: 1205213 - RNA, 19 nt, Artificial Sequence
  Description of Artificial Sequence: Synthetic oligonucleotide
ugagcucacggcuguugcc

SEQ ID NO: 1205214 - RNA, 19 nt, Artificial Sequence
  Description of Artificial Sequence: Synthetic oligonucleotide
ugcuggaauggcacuaaua

SEQ ID NO: 1205215 - RNA, 19 nt, Artificial Sequence
  Description of Artificial Sequence: Synthetic oligonucleotide
acgcccacacuaucucccc

SEQ ID NO: 1205216 - RNA, 19 nt, Artificial Sequence
  Description of Artificial Sequence: Synthetic oligonucleotide
caaccuuugaguggucaag

SEQ ID NO: 1205217 - RNA, 19 nt, Artificial Sequence
  Description of Artificial Sequence: Synthetic oligonucleotide
cuccagccggccuaauucc

SEQ ID NO: 1205218 - RNA, 19 nt, Artificial Sequence
  Description of Artificial Sequence: Synthetic oligonucleotide
caggggcaaccuuugagug

SEQ ID NO: 1205219 - RNA, 19 nt, Artificial Sequence
  Description of Artificial Sequence: Synthetic oligonucleotide
cugagcucacggcuguugc

SEQ ID NO: 1205220 - RNA, 19 nt, Artificial Sequence
  Description of Artificial Sequence: Synthetic oligonucleotide
ccugaugaacuaaugagga

SEQ ID NO: 1205221 - RNA, 19 nt, Artificial Sequence
  Description of Artificial Sequence: Synthetic oligonucleotide
aaacacuccucggcaaaga

SEQ ID NO: 1205222 - RNA, 19 nt, Artificial Sequence
  Description of Artificial Sequence: Synthetic oligonucleotide
cuagauucugugcccagga

SEQ ID NO: 1205223 - RNA, 19 nt, Artificial Sequence
  Description of Artificial Sequence: Synthetic oligonucleotide
cagagguuucgagaagggg

SEQ ID NO: 1205224 - RNA, 19 nt, Artificial Sequence
  Description of Artificial Sequence: Synthetic oligonucleotide
ccccuaacucuuaaggucc

SEQ ID NO: 1205225 - RNA, 19 nt, Artificial Sequence
  Description of Artificial Sequence: Synthetic oligonucleotide
gccuaauuccucgaggucc

SEQ ID NO: 1205226 - RNA, 19 nt, Artificial Sequence
  Description of Artificial Sequence: Synthetic oligonucleotide
cagcuuggaagagacuggg

SEQ ID NO: 1205227 - RNA, 19 nt, Artificial Sequence
  Description of Artificial Sequence: Synthetic oligonucleotide
accaagagcaggguccgag

SEQ ID NO: 1205228 - RNA, 19 nt, Artificial Sequence
  Description of Artificial Sequence: Synthetic oligonucleotide
ggcaaagacugucuauggc

SEQ ID NO: 1205229 - RNA, 19 nt, Artificial Sequence
  Description of Artificial Sequence: Synthetic oligonucleotide
aguucaaagauggcaccgu

SEQ ID NO: 1205230 - RNA, 19 nt, Artificial Sequence
  Description of Artificial Sequence: Synthetic oligonucleotide
gauccucggacugagcgga

SEQ ID NO: 1205231 - RNA, 19 nt, Artificial Sequence
  Description of Artificial Sequence: Synthetic oligonucleotide
uggaccaagcagugacuug

SEQ ID NO: 1205232 - RNA, 19 nt, Artificial Sequence
  Description of Artificial Sequence: Synthetic oligonucleotide
ggggccagaacccugcagc

SEQ ID NO: 1205233 - RNA, 19 nt, Artificial Sequence
  Description of Artificial Sequence: Synthetic oligonucleotide
caaagacugucuauggcua

SEQ ID NO: 1205234 - RNA, 19 nt, Artificial Sequence
  Description of Artificial Sequence: Synthetic oligonucleotide
agcccagcccaaaacagag

SEQ ID NO: 1205235 - RNA, 19 nt, Artificial Sequence
  Description of Artificial Sequence: Synthetic oligonucleotide
uaagauccacgcccacacu

SEQ ID NO: 1205236 - RNA, 19 nt, Artificial Sequence
  Description of Artificial Sequence: Synthetic oligonucleotide
auugcauagcugacucuag

SEQ ID NO: 1205237 - RNA, 19 nt, Artificial Sequence
  Description of Artificial Sequence: Synthetic oligonucleotide
caucuccagcccuccacgg

SEQ ID NO: 1205238 - RNA, 19 nt, Artificial Sequence
  Description of Artificial Sequence: Synthetic oligonucleotide
guugccugcaaacacuccu

SEQ ID NO: 1205239 - RNA, 19 nt, Artificial Sequence
  Description of Artificial Sequence: Synthetic oligonucleotide
uguggucagccuccagacu

SEQ ID NO: 1205240 - RNA, 19 nt, Artificial Sequence
  Description of Artificial Sequence: Synthetic oligonucleotide
gauuccccgggacaggcaa

SEQ ID NO: 1205241 - RNA, 19 nt, Artificial Sequence
  Description of Artificial Sequence: Synthetic oligonucleotide
guccuaguguauacugagg

SEQ ID NO: 1205242 - RNA, 19 nt, Artificial Sequence
  Description of Artificial Sequence: Synthetic oligonucleotide
aaacgcuugcugcccucca

SEQ ID NO: 1205243 - RNA, 19 nt, Artificial Sequence
  Description of Artificial Sequence: Synthetic oligonucleotide
cagccggccuaauuccucg

SEQ ID NO: 1205244 - RNA, 19 nt, Artificial Sequence
  Description of Artificial Sequence: Synthetic oligonucleotide
gugguugugaagggccugg

SEQ ID NO: 1205245 - RNA, 19 nt, Artificial Sequence
  Description of Artificial Sequence: Synthetic oligonucleotide
uggagacaauucacagcca

SEQ ID NO: 1205246 - RNA, 19 nt, Artificial Sequence
  Description of Artificial Sequence: Synthetic oligonucleotide
caaacacuccucggcaaag

SEQ ID NO: 1205247 - RNA, 19 nt, Artificial Sequence
  Description of Artificial Sequence: Synthetic oligonucleotide
agguucaagucggcuaauc

SEQ ID NO: 1205248 - RNA, 19 nt, Artificial Sequence
  Description of Artificial Sequence: Synthetic oligonucleotide
guccccuagagacaccuuc

SEQ ID NO: 1205249 - RNA, 19 nt, Artificial Sequence
  Description of Artificial Sequence: Synthetic oligonucleotide
gaccgauggguuugcucag

SEQ ID NO: 1205250 - RNA, 19 nt, Artificial Sequence
  Description of Artificial Sequence: Synthetic oligonucleotide
ggcgucaucaaaucccuca

SEQ ID NO: 1205251 - RNA, 19 nt, Artificial Sequence
  Description of Artificial Sequence: Synthetic oligonucleotide
caagucggcuaaucccgcc

SEQ ID NO: 1205252 - RNA, 19 nt, Artificial Sequence
  Description of Artificial Sequence: Synthetic oligonucleotide
aguccuaaguguguagcaa

SEQ ID NO: 1205253 - RNA, 19 nt, Artificial Sequence
  Description of Artificial Sequence: Synthetic oligonucleotide
caccgucugauccucggac

SEQ ID NO: 1205254 - RNA, 19 nt, Artificial Sequence
  Description of Artificial Sequence: Synthetic oligonucleotide
auaggaagcuccagccaag

SEQ ID NO: 1205255 - RNA, 19 nt, Artificial Sequence
  Description of Artificial Sequence: Synthetic oligonucleotide
uguaaccaguagccuccca

SEQ ID NO: 1205256 - RNA, 19 nt, Artificial Sequence
  Description of Artificial Sequence: Synthetic oligonucleotide
accgucugauccucggacu

SEQ ID NO: 1205257 - RNA, 19 nt, Artificial Sequence
  Description of Artificial Sequence: Synthetic oligonucleotide
ucggacugagcggauccag

SEQ ID NO: 1205258 - RNA, 19 nt, Artificial Sequence
  Description of Artificial Sequence: Synthetic oligonucleotide
gcugcuagauucugugccc

SEQ ID NO: 1205259 - RNA, 19 nt, Artificial Sequence
  Description of Artificial Sequence: Synthetic oligonucleotide
cagucccaguaauauggac

SEQ ID NO: 1205260 - RNA, 19 nt, Artificial Sequence
  Description of Artificial Sequence: Synthetic oligonucleotide
ccucccaaacgcuugcugc

SEQ ID NO: 1205261 - RNA, 19 nt, Artificial Sequence
  Description of Artificial Sequence: Synthetic oligonucleotide
ggacaugcgcuagaggugc

SEQ ID NO: 1205262 - RNA, 19 nt, Artificial Sequence
  Description of Artificial Sequence: Synthetic oligonucleotide
gagucauacacgacuccca

SEQ ID NO: 1205263 - RNA, 19 nt, Artificial Sequence
  Description of Artificial Sequence: Synthetic oligonucleotide
uggaccgauggguuugcuc

SEQ ID NO: 1205264 - RNA, 19 nt, Artificial Sequence
  Description of Artificial Sequence: Synthetic oligonucleotide
aaaucccuggacagguaaa

SEQ ID NO: 1205265 - RNA, 19 nt, Artificial Sequence
  Description of Artificial Sequence: Synthetic oligonucleotide
acugauuugugagcacuaa

SEQ ID NO: 1205266 - RNA, 19 nt, Artificial Sequence
  Description of Artificial Sequence: Synthetic oligonucleotide
cugccugacgcccacucuc

SEQ ID NO: 1205267 - RNA, 19 nt, Artificial Sequence
  Description of Artificial Sequence: Synthetic oligonucleotide
gagcacuaaggcagggcgc

SEQ ID NO: 1205268 - RNA, 19 nt, Artificial Sequence
  Description of Artificial Sequence: Synthetic oligonucleotide
caugcgcuagaggugcagc

SEQ ID NO: 1205269 - RNA, 19 nt, Artificial Sequence
  Description of Artificial Sequence: Synthetic oligonucleotide
ugccugacgcccacucucu

SEQ ID NO: 1205270 - RNA, 19 nt, Artificial Sequence
  Description of Artificial Sequence: Synthetic oligonucleotide
ugguugugaagggccuggg

SEQ ID NO: 1205271 - RNA, 19 nt, Artificial Sequence
  Description of Artificial Sequence: Synthetic oligonucleotide
uauggaccgauggguuugc

SEQ ID NO: 1205272 - RNA, 19 nt, Artificial Sequence
  Description of Artificial Sequence: Synthetic oligonucleotide
ucccaaacgcuugcugccc

SEQ ID NO: 1205273 - RNA, 19 nt, Artificial Sequence
  Description of Artificial Sequence: Synthetic oligonucleotide
ugcgcuagaggugcagccu

SEQ ID NO: 1205274 - RNA, 19 nt, Artificial Sequence
  Description of Artificial Sequence: Synthetic oligonucleotide
aggacaugcgcuagaggug

SEQ ID NO: 1205275 - RNA, 19 nt, Artificial Sequence
  Description of Artificial Sequence: Synthetic oligonucleotide
aaucccgccccuaacucuu

SEQ ID NO: 1205276 - RNA, 19 nt, Artificial Sequence
  Description of Artificial Sequence: Synthetic oligonucleotide
guacgugcugguggaagag

SEQ ID NO: 1205277 - RNA, 19 nt, Artificial Sequence
  Description of Artificial Sequence: Synthetic oligonucleotide
cugaugaacuaaugaggaa

SEQ ID NO: 1205278 - RNA, 19 nt, Artificial Sequence
  Description of Artificial Sequence: Synthetic oligonucleotide
cauacacgacucccaggac

SEQ ID NO: 1205279 - RNA, 19 nt, Artificial Sequence
  Description of Artificial Sequence: Synthetic oligonucleotide
acgugcugguggaagagug

SEQ ID NO: 1205280 - RNA, 19 nt, Artificial Sequence
  Description of Artificial Sequence: Synthetic oligonucleotide
gugaagggcggaguagccc

SEQ ID NO: 1205281 - RNA, 19 nt, Artificial Sequence
  Description of Artificial Sequence: Synthetic oligonucleotide
uugcucagcuuggaagaga

SEQ ID NO: 1205282 - RNA, 19 nt, Artificial Sequence
  Description of Artificial Sequence: Synthetic oligonucleotide
gccaagcucagaaaccaag

SEQ ID NO: 1205283 - RNA, 19 nt, Artificial Sequence
  Description of Artificial Sequence: Synthetic oligonucleotide
auuccucgagguccaaguu

SEQ ID NO: 1205284 - RNA, 19 nt, Artificial Sequence
  Description of Artificial Sequence: Synthetic oligonucleotide
auggcaccgucugauccuc

SEQ ID NO: 1205285 - RNA, 19 nt, Artificial Sequence
  Description of Artificial Sequence: Synthetic oligonucleotide
agacuggcugaccucugaa

SEQ ID NO: 1205286 - RNA, 19 nt, Artificial Sequence
  Description of Artificial Sequence: Synthetic oligonucleotide
ccgccccuaacucuuaagg

SEQ ID NO: 1205287 - RNA, 19 nt, Artificial Sequence
  Description of Artificial Sequence: Synthetic oligonucleotide
aggacuuagccacgagaua

SEQ ID NO: 1205288 - RNA, 19 nt, Artificial Sequence
  Description of Artificial Sequence: Synthetic oligonucleotide
acaguuacucugaggccug

SEQ ID NO: 1205289 - RNA, 19 nt, Artificial Sequence
  Description of Artificial Sequence: Synthetic oligonucleotide
gggccugaugaacuaauga

SEQ ID NO: 1205290 - RNA, 19 nt, Artificial Sequence
  Description of Artificial Sequence: Synthetic oligonucleotide
uggcacuaauaaugugguc

SEQ ID NO: 1205291 - RNA, 19 nt, Artificial Sequence
  Description of Artificial Sequence: Synthetic oligonucleotide
ggaccggacacugagcuca

SEQ ID NO: 1205292 - RNA, 19 nt, Artificial Sequence
  Description of Artificial Sequence: Synthetic oligonucleotide
cugugcccaggacagcaac

SEQ ID NO: 1205293 - RNA, 19 nt, Artificial Sequence
  Description of Artificial Sequence: Synthetic oligonucleotide
gucuauggcuaaagaugcc

SEQ ID NO: 1205294 - RNA, 19 nt, Artificial Sequence
  Description of Artificial Sequence: Synthetic oligonucleotide
gaauugcauagcugacucu

SEQ ID NO: 1205295 - RNA, 19 nt, Artificial Sequence
  Description of Artificial Sequence: Synthetic oligonucleotide
cuguuugaauagcucugga

SEQ ID NO: 1205296 - RNA, 19 nt, Artificial Sequence
  Description of Artificial Sequence: Synthetic oligonucleotide
gacgcccacucucuauaca

SEQ ID NO: 1205297 - RNA, 19 nt, Artificial Sequence
  Description of Artificial Sequence: Synthetic oligonucleotide
gagacaccuuccagcgucc

SEQ ID NO: 1205298 - RNA, 19 nt, Artificial Sequence
  Description of Artificial Sequence: Synthetic oligonucleotide
uacgugcugguggaagagu

SEQ ID NO: 1205299 - RNA, 19 nt, Artificial Sequence
  Description of Artificial Sequence: Synthetic oligonucleotide
auggaccaagcagugacuu

SEQ ID NO: 1205300 - RNA, 19 nt, Artificial Sequence
  Description of Artificial Sequence: Synthetic oligonucleotide
ugcugcccuccacuaagau

SEQ ID NO: 1205301 - RNA, 19 nt, Artificial Sequence
  Description of Artificial Sequence: Synthetic oligonucleotide
gcaccgcccacauacagga

SEQ ID NO: 1205302 - RNA, 19 nt, Artificial Sequence
  Description of Artificial Sequence: Synthetic oligonucleotide
uuccccgggacaggcaaga

SEQ ID NO: 1205303 - RNA, 19 nt, Artificial Sequence
  Description of Artificial Sequence: Synthetic oligonucleotide
acaugcgcuagaggugcag

SEQ ID NO: 1205304 - RNA, 19 nt, Artificial Sequence
  Description of Artificial Sequence: Synthetic oligonucleotide
cagugaugguacccaggac

SEQ ID NO: 1205305 - RNA, 19 nt, Artificial Sequence
  Description of Artificial Sequence: Synthetic oligonucleotide
uggguuugcucagcuugga

SEQ ID NO: 1205306 - RNA, 19 nt, Artificial Sequence
  Description of Artificial Sequence: Synthetic oligonucleotide
ggaaaggcaauugagucau

SEQ ID NO: 1205307 - RNA, 19 nt, Artificial Sequence
  Description of Artificial Sequence: Synthetic oligonucleotide
auagaggcccuaaggcagu

SEQ ID NO: 1205308 - RNA, 19 nt, Artificial Sequence
  Description of Artificial Sequence: Synthetic oligonucleotide
cagccggugagcagguuca

SEQ ID NO: 1205309 - RNA, 19 nt, Artificial Sequence
  Description of Artificial Sequence: Synthetic oligonucleotide
caagcuccuugguacugca

SEQ ID NO: 1205310 - RNA, 19 nt, Artificial Sequence
  Description of Artificial Sequence: Synthetic oligonucleotide
cacggagugaccacuggcu

SEQ ID NO: 1205311 - RNA, 19 nt, Artificial Sequence
  Description of Artificial Sequence: Synthetic oligonucleotide
ccaguguccuaguguauac

SEQ ID NO: 1205312 - RNA, 19 nt, Artificial Sequence
  Description of Artificial Sequence: Synthetic oligonucleotide
gaaugauauagaggcccua

SEQ ID NO: 1205313 - RNA, 19 nt, Artificial Sequence
  Description of Artificial Sequence: Synthetic oligonucleotide
cuccucggcaaagacuguc

SEQ ID NO: 1205314 - RNA, 19 nt, Artificial Sequence
  Description of Artificial Sequence: Synthetic oligonucleotide
ccugggcgucaucaaaucc

SEQ ID NO: 1205315 - RNA, 19 nt, Artificial Sequence
  Description of Artificial Sequence: Synthetic oligonucleotide
ggagacaauucacagccau

SEQ ID NO: 1205316 - RNA, 19 nt, Artificial Sequence
  Description of Artificial Sequence: Synthetic oligonucleotide
cuuucagaggcgaggacuu

SEQ ID NO: 1205317 - RNA, 19 nt, Artificial Sequence
  Description of Artificial Sequence: Synthetic oligonucleotide
ccucggacugagcggaucc

SEQ ID NO: 1205318 - RNA, 19 nt, Artificial Sequence
  Description of Artificial Sequence: Synthetic oligonucleotide
ccaagagcaggguccgagc

SEQ ID NO: 1205319 - RNA, 19 nt, Artificial Sequence
  Description of Artificial Sequence: Synthetic oligonucleotide
ugagcggauccagccuccc

SEQ ID NO: 1205320 - RNA, 19 nt, Artificial Sequence
  Description of Artificial Sequence: Synthetic oligonucleotide
agcagugacuugguuguuu

SEQ ID NO: 1205321 - RNA, 19 nt, Artificial Sequence
  Description of Artificial Sequence: Synthetic oligonucleotide
accaagcagugacuugguu

SEQ ID NO: 1205322 - RNA, 19 nt, Artificial Sequence
  Description of Artificial Sequence: Synthetic oligonucleotide
gacugagcggauccagccu

SEQ ID NO: 1205323 - RNA, 19 nt, Artificial Sequence
  Description of Artificial Sequence: Synthetic oligonucleotide
ccaucgcucagcccgggcc

SEQ ID NO: 1205324 - RNA, 19 nt, Artificial Sequence
  Description of Artificial Sequence: Synthetic oligonucleotide
ccuaguguauacugaggga

SEQ ID NO: 1205325 - RNA, 19 nt, Artificial Sequence
  Description of Artificial Sequence: Synthetic oligonucleotide
acuaucuccccagcucaaa

SEQ ID NO: 1205326 - RNA, 19 nt, Artificial Sequence
  Description of Artificial Sequence: Synthetic oligonucleotide
cacugauuugugagcacua

SEQ ID NO: 1205327 - RNA, 19 nt, Artificial Sequence
  Description of Artificial Sequence: Synthetic oligonucleotide
gcgcgcauguacgugcugg

SEQ ID NO: 1205328 - RNA, 19 nt, Artificial Sequence
  Description of Artificial Sequence: Synthetic oligonucleotide
ccuaauuccucgaggucca

SEQ ID NO: 1205329 - RNA, 19 nt, Artificial Sequence
  Description of Artificial Sequence: Synthetic oligonucleotide
ccggccuaauuccucgagg

SEQ ID NO: 1205330 - RNA, 19 nt, Artificial Sequence
  Description of Artificial Sequence: Synthetic oligonucleotide
auacagucauugacagcga

SEQ ID NO: 1205331 - RNA, 19 nt, Artificial Sequence
  Description of Artificial Sequence: Synthetic oligonucleotide
gcuaaucccgccccuaacu

SEQ ID NO: 1205332 - RNA, 19 nt, Artificial Sequence
  Description of Artificial Sequence: Synthetic oligonucleotide
gauggaccaagcagugacu

SEQ ID NO: 1205333 - RNA, 19 nt, Artificial Sequence
  Description of Artificial Sequence: Synthetic oligonucleotide
acgguuuccccaggcucag

SEQ ID NO: 1205334 - RNA, 19 nt, Artificial Sequence
  Description of Artificial Sequence: Synthetic oligonucleotide
cggcaaagacugucuaugg

SEQ ID NO: 1205335 - RNA, 19 nt, Artificial Sequence
  Description of Artificial Sequence: Synthetic oligonucleotide
ccuaaguguguagcaacug

SEQ ID NO: 1205336 - RNA, 19 nt, Artificial Sequence
  Description of Artificial Sequence: Synthetic oligonucleotide
ggaaucuguucugggcagc

SEQ ID NO: 1205337 - RNA, 19 nt, Artificial Sequence
  Description of Artificial Sequence: Synthetic oligonucleotide
caguuacucugaggccugg

SEQ ID NO: 1205338 - RNA, 19 nt, Artificial Sequence
  Description of Artificial Sequence: Synthetic oligonucleotide
ccacggagugaccacuggc

SEQ ID NO: 1205339 - RNA, 19 nt, Artificial Sequence
  Description of Artificial Sequence: Synthetic oligonucleotide
uccgagcucccagcacucc

SEQ ID NO: 1205340 - RNA, 19 nt, Artificial Sequence
  Description of Artificial Sequence: Synthetic oligonucleotide
cugacgcccacucucuaua

SEQ ID NO: 1205341 - RNA, 19 nt, Artificial Sequence
  Description of Artificial Sequence: Synthetic oligonucleotide
gagcucacggcuguugccu

SEQ ID NO: 1205342 - RNA, 19 nt, Artificial Sequence
  Description of Artificial Sequence: Synthetic oligonucleotide
gaccccucauaggaagcuc

SEQ ID NO: 1205343 - RNA, 19 nt, Artificial Sequence
  Description of Artificial Sequence: Synthetic oligonucleotide
cuucaguccuaagugugua

SEQ ID NO: 1205344 - RNA, 19 nt, Artificial Sequence
  Description of Artificial Sequence: Synthetic oligonucleotide
cccuagagacaccuuccag

SEQ ID NO: 1205345 - RNA, 19 nt, Artificial Sequence
  Description of Artificial Sequence: Synthetic oligonucleotide
cccuaacucuuaagguccc

SEQ ID NO: 1205346 - RNA, 19 nt, Artificial Sequence
  Description of Artificial Sequence: Synthetic oligonucleotide
ucccaguaauauggaccga

SEQ ID NO: 1205347 - RNA, 19 nt, Artificial Sequence
  Description of Artificial Sequence: Synthetic oligonucleotide
gguaaacaagcuccuuggu

SEQ ID NO: 1205348 - RNA, 19 nt, Artificial Sequence
  Description of Artificial Sequence: Synthetic oligonucleotide
gcaaccuuugaguggucaa

SEQ ID NO: 1205349 - RNA, 19 nt, Artificial Sequence
  Description of Artificial Sequence: Synthetic oligonucleotide
ggcgcugggcaaaacugug

SEQ ID NO: 1205350 - RNA, 19 nt, Artificial Sequence
  Description of Artificial Sequence: Synthetic oligonucleotide
ggagcagucccaguaauau

SEQ ID NO: 1205351 - RNA, 19 nt, Artificial Sequence
  Description of Artificial Sequence: Synthetic oligonucleotide
ucccgccccuaacucuuaa

SEQ ID NO: 1205352 - RNA, 19 nt, Artificial Sequence
  Description of Artificial Sequence: Synthetic oligonucleotide
gugaugguacccaggacau

SEQ ID NO: 1205353 - RNA, 19 nt, Artificial Sequence
  Description of Artificial Sequence: Synthetic oligonucleotide
gguccgagcucccagcacu

SEQ ID NO: 1205354 - RNA, 19 nt, Artificial Sequence
  Description of Artificial Sequence: Synthetic oligonucleotide
ggccuaauuccucgagguc

SEQ ID NO: 1205355 - RNA, 19 nt, Artificial Sequence
  Description of Artificial Sequence: Synthetic oligonucleotide
uccucggacugagcggauc

SEQ ID NO: 1205356 - RNA, 19 nt, Artificial Sequence
  Description of Artificial Sequence: Synthetic oligonucleotide
auuccccgggacaggcaag

SEQ ID NO: 1205357 - RNA, 19 nt, Artificial Sequence
  Description of Artificial Sequence: Synthetic oligonucleotide
ggcuaaucccgccccuaac

SEQ ID NO: 1205358 - RNA, 19 nt, Artificial Sequence
  Description of Artificial Sequence: Synthetic oligonucleotide
ccgucugauccucggacug

SEQ ID NO: 1205359 - RNA, 19 nt, Artificial Sequence
  Description of Artificial Sequence: Synthetic oligonucleotide
gcauagcugacucuaguuu

SEQ ID NO: 1205360 - RNA, 19 nt, Artificial Sequence
  Description of Artificial Sequence: Synthetic oligonucleotide
agccggccuaauuccucga

SEQ ID NO: 1205361 - RNA, 19 nt, Artificial Sequence
  Description of Artificial Sequence: Synthetic oligonucleotide
gcggcgcugggcaaaacug

SEQ ID NO: 1205362 - RNA, 19 nt, Artificial Sequence
  Description of Artificial Sequence: Synthetic oligonucleotide
gccggccuaauuccucgag

SEQ ID NO: 1205363 - RNA, 19 nt, Artificial Sequence
  Description of Artificial Sequence: Synthetic oligonucleotide
ucggcuaaucccgccccua

SEQ ID NO: 1205364 - RNA, 19 nt, Artificial Sequence
  Description of Artificial Sequence: Synthetic oligonucleotide
gcacacgguuuccccaggc

SEQ ID NO: 1205365 - RNA, 19 nt, Artificial Sequence
  Description of Artificial Sequence: Synthetic oligonucleotide
cauugacagcgaccccuca

SEQ ID NO: 1205366 - RNA, 19 nt, Artificial Sequence
  Description of Artificial Sequence: Synthetic oligonucleotide
cggacacugagcucacggc

SEQ ID NO: 1205367 - RNA, 19 nt, Artificial Sequence
  Description of Artificial Sequence: Synthetic oligonucleotide
ugccccugggcgucaucaa

SEQ ID NO: 1205368 - RNA, 19 nt, Artificial Sequence
  Description of Artificial Sequence: Synthetic oligonucleotide
ccucccaacaucacaguua

SEQ ID NO: 1205369 - RNA, 19 nt, Artificial Sequence
  Description of Artificial Sequence: Synthetic oligonucleotide
cacuaaggcagggcgcgca

SEQ ID NO: 1205370 - RNA, 19 nt, Artificial Sequence
  Description of Artificial Sequence: Synthetic oligonucleotide
gagacaauucacagccauu

SEQ ID NO: 1205371 - RNA, 19 nt, Artificial Sequence
  Description of Artificial Sequence: Synthetic oligonucleotide
cucgagguccaaguucaaa

SEQ ID NO: 1205372 - RNA, 19 nt, Artificial Sequence
  Description of Artificial Sequence: Synthetic oligonucleotide
gcuagaggugcagccucag

SEQ ID NO: 1205373 - RNA, 19 nt, Artificial Sequence
  Description of Artificial Sequence: Synthetic oligonucleotide
gcuggaugauuccccggga

SEQ ID NO: 1205374 - RNA, 19 nt, Artificial Sequence
  Description of Artificial Sequence: Synthetic oligonucleotide
ggggcaaccuuugaguggu

SEQ ID NO: 1205375 - RNA, 19 nt, Artificial Sequence
  Description of Artificial Sequence: Synthetic oligonucleotide
cccaggacaugcgcuagag

SEQ ID NO: 1205376 - RNA, 19 nt, Artificial Sequence
  Description of Artificial Sequence: Synthetic oligonucleotide
agacaccuuccagcguccu

SEQ ID NO: 1205377 - RNA, 19 nt, Artificial Sequence
  Description of Artificial Sequence: Synthetic oligonucleotide
aucgcucagcccgggccug

SEQ ID NO: 1205378 - RNA, 19 nt, Artificial Sequence
  Description of Artificial Sequence: Synthetic oligonucleotide
gcuccaucgcucagcccgg

SEQ ID NO: 1205379 - RNA, 19 nt, Artificial Sequence
  Description of Artificial Sequence: Synthetic oligonucleotide
cccagcccaaaacagaggu

SEQ ID NO: 1205380 - RNA, 19 nt, Artificial Sequence
  Description of Artificial Sequence: Synthetic oligonucleotide
cuccaucgcucagcccggg

SEQ ID NO: 1205381 - RNA, 19 nt, Artificial Sequence
  Description of Artificial Sequence: Synthetic oligonucleotide
gacaugcgcuagaggugca

SEQ ID NO: 1205382 - RNA, 19 nt, Artificial Sequence
  Description of Artificial Sequence: Synthetic oligonucleotide
ggugugcagauaagaucca

SEQ ID NO: 1205383 - RNA, 19 nt, Artificial Sequence
  Description of Artificial Sequence: Synthetic oligonucleotide
cggacugagcggauccagc

SEQ ID NO: 1205384 - RNA, 19 nt, Artificial Sequence
  Description of Artificial Sequence: Synthetic oligonucleotide
ccccagcucaaacccuccg

SEQ ID NO: 1205385 - RNA, 19 nt, Artificial Sequence
  Description of Artificial Sequence: Synthetic oligonucleotide
caucgcucagcccgggccu

SEQ ID NO: 1205386 - RNA, 19 nt, Artificial Sequence
  Description of Artificial Sequence: Synthetic oligonucleotide
gaccggacacugagcucac

SEQ ID NO: 1205387 - RNA, 19 nt, Artificial Sequence
  Description of Artificial Sequence: Synthetic oligonucleotide
cacacgguuuccccaggcu

SEQ ID NO: 1205388 - RNA, 19 nt, Artificial Sequence
  Description of Artificial Sequence: Synthetic oligonucleotide
gcgcugggcaaaacugugc

SEQ ID NO: 1205389 - RNA, 19 nt, Artificial Sequence
  Description of Artificial Sequence: Synthetic oligonucleotide
gaccaagcagugacuuggu

SEQ ID NO: 1205390 - RNA, 19 nt, Artificial Sequence
  Description of Artificial Sequence: Synthetic oligonucleotide
cagcuugcugagcacugcu

SEQ ID NO: 1205391 - RNA, 19 nt, Artificial Sequence
  Description of Artificial Sequence: Synthetic oligonucleotide
gccaguguccuaguguaua

SEQ ID NO: 1205392 - RNA, 19 nt, Artificial Sequence
  Description of Artificial Sequence: Synthetic oligonucleotide
gcagucccaguaauaugga

SEQ ID NO: 1205393 - RNA, 19 nt, Artificial Sequence
  Description of Artificial Sequence: Synthetic oligonucleotide
ggucaggggcaaccuuuga

SEQ ID NO: 1205394 - RNA, 19 nt, Artificial Sequence
  Description of Artificial Sequence: Synthetic oligonucleotide
gcgaccccucauaggaagc

SEQ ID NO: 1205395 - RNA, 19 nt, Artificial Sequence
  Description of Artificial Sequence: Synthetic oligonucleotide
ccaaacgcuugcugcccuc

SEQ ID NO: 1205396 - RNA, 19 nt, Artificial Sequence
  Description of Artificial Sequence: Synthetic oligonucleotide
cucggacugagcggaucca

SEQ ID NO: 1205397 - RNA, 19 nt, Artificial Sequence
  Description of Artificial Sequence: Synthetic oligonucleotide
auggaccgauggguuugcu

SEQ ID NO: 1205398 - RNA, 19 nt, Artificial Sequence
  Description of Artificial Sequence: Synthetic oligonucleotide
cccgccccuaacucuuaag

SEQ ID NO: 1205399 - RNA, 19 nt, Artificial Sequence
  Description of Artificial Sequence: Synthetic oligonucleotide
cagcgaccccucauaggaa

SEQ ID NO: 1205400 - RNA, 19 nt, Artificial Sequence
  Description of Artificial Sequence: Synthetic oligonucleotide
ccuuugaguggucaagaau

SEQ ID NO: 1205401 - RNA, 19 nt, Artificial Sequence
  Description of Artificial Sequence: Synthetic oligonucleotide
gccggugagcagguucaag

SEQ ID NO: 1205402 - RNA, 19 nt, Artificial Sequence
  Description of Artificial Sequence: Synthetic oligonucleotide
ccacucucuauacagucau

SEQ ID NO: 1205403 - RNA, 19 nt, Artificial Sequence
  Description of Artificial Sequence: Synthetic oligonucleotide
gcgcauguacgugcuggug

SEQ ID NO: 1205404 - RNA, 19 nt, Artificial Sequence
  Description of Artificial Sequence: Synthetic oligonucleotide
gcugcuggaauggcacuaa

SEQ ID NO: 1205405 - RNA, 19 nt, Artificial Sequence
  Description of Artificial Sequence: Synthetic oligonucleotide
agggcaccgcccacauaca

SEQ ID NO: 1205406 - RNA, 19 nt, Artificial Sequence
  Description of Artificial Sequence: Synthetic oligonucleotide
cgggccugaugaacuaaug

SEQ ID NO: 1205407 - RNA, 19 nt, Artificial Sequence
  Description of Artificial Sequence: Synthetic oligonucleotide
gucggcuaaucccgccccu

SEQ ID NO: 1205408 - RNA, 19 nt, Artificial Sequence
  Description of Artificial Sequence: Synthetic oligonucleotide
cuaauuccucgagguccaa

SEQ ID NO: 1205409 - RNA, 19 nt, Artificial Sequence
  Description of Artificial Sequence: Synthetic oligonucleotide
caaggucaggggcaaccuu

SEQ ID NO: 1205410 - RNA, 19 nt, Artificial Sequence
  Description of Artificial Sequence: Synthetic oligonucleotide
gcggauccagccucccaaa

SEQ ID NO: 1205411 - RNA, 19 nt, Artificial Sequence
  Description of Artificial Sequence: Synthetic oligonucleotide
cacucucuauacagucauu

SEQ ID NO: 1205412 - RNA, 19 nt, Artificial Sequence
  Description of Artificial Sequence: Synthetic oligonucleotide
ccgagcucccagcacucca

SEQ ID NO: 1205413 - RNA, 19 nt, Artificial Sequence
  Description of Artificial Sequence: Synthetic oligonucleotide
agccggugagcagguucaa

SEQ ID NO: 1205414 - RNA, 19 nt, Artificial Sequence
  Description of Artificial Sequence: Synthetic oligonucleotide
gccucccaacaucacaguu

SEQ ID NO: 1205415 - RNA, 19 nt, Artificial Sequence
  Description of Artificial Sequence: Synthetic oligonucleotide
cacuccagccggccuaauu

SEQ ID NO: 1205416 - RNA, 19 nt, Artificial Sequence
  Description of Artificial Sequence: Synthetic oligonucleotide
gcagggcgcgcauguacgu

SEQ ID NO: 1205417 - RNA, 19 nt, Artificial Sequence
  Description of Artificial Sequence: Synthetic oligonucleotide
auccucggacugagcggau

SEQ ID NO: 1205418 - RNA, 19 nt, Artificial Sequence
  Description of Artificial Sequence: Synthetic oligonucleotide
cgccccuaacucuuaaggu

SEQ ID NO: 1205419 - RNA, 19 nt, Artificial Sequence
  Description of Artificial Sequence: Synthetic oligonucleotide
cgcuagaggugcagccuca

SEQ ID NO: 1205420 - RNA, 19 nt, Artificial Sequence
  Description of Artificial Sequence: Synthetic oligonucleotide
gggcgucaucaaaucccuc

SEQ ID NO: 1205421 - RNA, 19 nt, Artificial Sequence
  Description of Artificial Sequence: Synthetic oligonucleotide
ccugacgcccacucucuau

SEQ ID NO: 1205422 - RNA, 19 nt, Artificial Sequence
  Description of Artificial Sequence: Synthetic oligonucleotide
aucccgccccuaacucuua

SEQ ID NO: 1205423 - RNA, 19 nt, Artificial Sequence
  Description of Artificial Sequence: Synthetic oligonucleotide
cgucugauccucggacuga

SEQ ID NO: 1205424 - RNA, 19 nt, Artificial Sequence
  Description of Artificial Sequence: Synthetic oligonucleotide
gccugacgcccacucucua

SEQ ID NO: 1205425 - RNA, 19 nt, Artificial Sequence
  Description of Artificial Sequence: Synthetic oligonucleotide
cccaaacgcuugcugcccu

SEQ ID NO: 1205426 - RNA, 19 nt, Artificial Sequence
  Description of Artificial Sequence: Synthetic oligonucleotide
ccgggccugaugaacuaau

SEQ ID NO: 1205427 - RNA, 19 nt, Artificial Sequence
  Description of Artificial Sequence: Synthetic oligonucleotide
ccuaacucuuaaggucccu

SEQ ID NO: 1205428 - RNA, 19 nt, Artificial Sequence
  Description of Artificial Sequence: Synthetic oligonucleotide
ccuccacggagugaccacu

SEQ ID NO: 1205429 - RNA, 19 nt, Artificial Sequence
  Description of Artificial Sequence: Synthetic oligonucleotide
ccucgagguccaaguucaa

SEQ ID NO: 1205430 - RNA, 19 nt, Artificial Sequence
  Description of Artificial Sequence: Synthetic oligonucleotide
cggcuaaucccgccccuaa

SEQ ID NO: 1205431 - RNA, 19 nt, Artificial Sequence
  Description of Artificial Sequence: Synthetic oligonucleotide
gggcaaccuuugagugguc

SEQ ID NO: 1205432 - RNA, 19 nt, Artificial Sequence
  Description of Artificial Sequence: Synthetic oligonucleotide
gcucagccggugagcaggu

SEQ ID NO: 1205433 - RNA, 19 nt, Artificial Sequence
  Description of Artificial Sequence: Synthetic oligonucleotide
cuuugccccugggcgucau

SEQ ID NO: 1205434 - RNA, 19 nt, Artificial Sequence
  Description of Artificial Sequence: Synthetic oligonucleotide
cgcgcauguacgugcuggu

SEQ ID NO: 1205435 - RNA, 19 nt, Artificial Sequence
  Description of Artificial Sequence: Synthetic oligonucleotide
cgguuuccccaggcucagc

SEQ ID NO: 1205436 - RNA, 19 nt, Artificial Sequence
  Description of Artificial Sequence: Synthetic oligonucleotide
cgaccccucauaggaagcu

SEQ ID NO: 1205437 - RNA, 19 nt, Artificial Sequence
  Description of Artificial Sequence: Synthetic oligonucleotide
aaugacacuuucuaguucc

SEQ ID NO: 1205438 - RNA, 19 nt, Artificial Sequence
  Description of Artificial Sequence: Synthetic oligonucleotide
uugaauaaaagucacauug

SEQ ID NO: 1205439 - RNA, 19 nt, Artificial Sequence
  Description of Artificial Sequence: Synthetic oligonucleotide
uagauuaacacauaaaaug

SEQ ID NO: 1205440 - RNA, 19 nt, Artificial Sequence
  Description of Artificial Sequence: Synthetic oligonucleotide
uuuagauuaacacauaaaa

SEQ ID NO: 1205441 - RNA, 19 nt, Artificial Sequence
  Description of Artificial Sequence: Synthetic oligonucleotide
aauaccucgaaguaacauc

SEQ ID NO: 1205442 - RNA, 19 nt, Artificial Sequence
  Description of Artificial Sequence: Synthetic oligonucleotide
uuuaucagggacaagguug

SEQ ID NO: 1205443 - RNA, 19 nt, Artificial Sequence
  Description of Artificial Sequence: Synthetic oligonucleotide
aagauguuaucccaccacc

SEQ ID NO: 1205444 - RNA, 19 nt, Artificial Sequence
  Description of Artificial Sequence: Synthetic oligonucleotide
ugaauuuuagauuaacaca

SEQ ID NO: 1205445 - RNA, 19 nt, Artificial Sequence
  Description of Artificial Sequence: Synthetic oligonucleotide
acaagcauuagucuggagg

SEQ ID NO: 1205446 - RNA, 19 nt, Artificial Sequence
  Description of Artificial Sequence: Synthetic oligonucleotide
gaaaauccugaccaaaacg

SEQ ID NO: 1205447 - RNA, 19 nt, Artificial Sequence
  Description of Artificial Sequence: Synthetic oligonucleotide
ugaaguauagcucuccgcc

SEQ ID NO: 1205448 - RNA, 19 nt, Artificial Sequence
  Description of Artificial Sequence: Synthetic oligonucleotide
uauaaauuuaguagggacu

SEQ ID NO: 1205449 - RNA, 19 nt, Artificial Sequence
  Description of Artificial Sequence: Synthetic oligonucleotide
gauacaacgauaucguagc

SEQ ID NO: 1205450 - RNA, 19 nt, Artificial Sequence
  Description of Artificial Sequence: Synthetic oligonucleotide
acaacccagauccaaaacc

SEQ ID NO: 1205451 - RNA, 19 nt, Artificial Sequence
  Description of Artificial Sequence: Synthetic oligonucleotide
aaaacuggugcuuugcugu

SEQ ID NO: 1205452 - RNA, 19 nt, Artificial Sequence
  Description of Artificial Sequence: Synthetic oligonucleotide
gugaauuuuagauuaacac

SEQ ID NO: 1205453 - RNA, 19 nt, Artificial Sequence
  Description of Artificial Sequence: Synthetic oligonucleotide
ugugauuccaccuuuguaa

SEQ ID NO: 1205454 - RNA, 19 nt, Artificial Sequence
  Description of Artificial Sequence: Synthetic oligonucleotide
uucuaauucagaacggccc

SEQ ID NO: 1205455 - RNA, 19 nt, Artificial Sequence
  Description of Artificial Sequence: Synthetic oligonucleotide
aacgauaucguagcucucc

SEQ ID NO: 1205456 - RNA, 19 nt, Artificial Sequence
  Description of Artificial Sequence: Synthetic oligonucleotide
uuugacauaguuaguauaa

SEQ ID NO: 1205457 - RNA, 19 nt, Artificial Sequence
  Description of Artificial Sequence: Synthetic oligonucleotide
uuagucaugucuauuccag

SEQ ID NO: 1205458 - RNA, 19 nt, Artificial Sequence
  Description of Artificial Sequence: Synthetic oligonucleotide
uucaaggcuagcauagacg

SEQ ID NO: 1205459 - RNA, 19 nt, Artificial Sequence
  Description of Artificial Sequence: Synthetic oligonucleotide
uuaaaagccuaugugagug

SEQ ID NO: 1205460 - RNA, 19 nt, Artificial Sequence
  Description of Artificial Sequence: Synthetic oligonucleotide
cauaauaccucgaaguaac

SEQ ID NO: 1205461 - RNA, 19 nt, Artificial Sequence
  Description of Artificial Sequence: Synthetic oligonucleotide
aaaagguuugaagacaggu

SEQ ID NO: 1205462 - RNA, 19 nt, Artificial Sequence
  Description of Artificial Sequence: Synthetic oligonucleotide
ucuaauucagaacggcccc

SEQ ID NO: 1205463 - RNA, 19 nt, Artificial Sequence
  Description of Artificial Sequence: Synthetic oligonucleotide
agaacggccccgcauagcc

SEQ ID NO: 1205464 - RNA, 19 nt, Artificial Sequence
  Description of Artificial Sequence: Synthetic oligonucleotide
aacgcgaguucuucaagac

SEQ ID NO: 1205465 - RNA, 19 nt, Artificial Sequence
  Description of Artificial Sequence: Synthetic oligonucleotide
aguacaaagcaccacccag

SEQ ID NO: 1205466 - RNA, 19 nt, Artificial Sequence
  Description of Artificial Sequence: Synthetic oligonucleotide
aacgacagucaccaaugac

SEQ ID NO: 1205467 - RNA, 19 nt, Artificial Sequence
  Description of Artificial Sequence: Synthetic oligonucleotide
aauuuaguagggacucugc

SEQ ID NO: 1205468 - RNA, 19 nt, Artificial Sequence
  Description of Artificial Sequence: Synthetic oligonucleotide
uuugagugaaccuucaguu

SEQ ID NO: 1205469 - RNA, 19 nt, Artificial Sequence
  Description of Artificial Sequence: Synthetic oligonucleotide
uuuuagauuaacacauaaa

SEQ ID NO: 1205470 - RNA, 19 nt, Artificial Sequence
  Description of Artificial Sequence: Synthetic oligonucleotide
caagauagguuuuagccac

SEQ ID NO: 1205471 - RNA, 19 nt, Artificial Sequence
  Description of Artificial Sequence: Synthetic oligonucleotide
agauccuuccaguacaaag

SEQ ID NO: 1205472 - RNA, 19 nt, Artificial Sequence
  Description of Artificial Sequence: Synthetic oligonucleotide
ucaaggcuagcauagacgu

SEQ ID NO: 1205473 - RNA, 19 nt, Artificial Sequence
  Description of Artificial Sequence: Synthetic oligonucleotide
ugauaacacaguuggauac

SEQ ID NO: 1205474 - RNA, 19 nt, Artificial Sequence
  Description of Artificial Sequence: Synthetic oligonucleotide
ugugagugguucuuuagcc

SEQ ID NO: 1205475 - RNA, 19 nt, Artificial Sequence
  Description of Artificial Sequence: Synthetic oligonucleotide
acuucagcgcgccauacac

SEQ ID NO: 1205476 - RNA, 19 nt, Artificial Sequence
  Description of Artificial Sequence: Synthetic oligonucleotide
agauuaacacauaaaaugu

SEQ ID NO: 1205477 - RNA, 19 nt, Artificial Sequence
  Description of Artificial Sequence: Synthetic oligonucleotide
agguuuaaaagccuaugug

SEQ ID NO: 1205478 - RNA, 19 nt, Artificial Sequence
  Description of Artificial Sequence: Synthetic oligonucleotide
guucugaacguccuugugg

SEQ ID NO: 1205479 - RNA, 19 nt, Artificial Sequence
  Description of Artificial Sequence: Synthetic oligonucleotide
aagccuaugugagugguuc

SEQ ID NO: 1205480 - RNA, 19 nt, Artificial Sequence
  Description of Artificial Sequence: Synthetic oligonucleotide
uuagucuggagguuugcag

SEQ ID NO: 1205481 - RNA, 19 nt, Artificial Sequence
  Description of Artificial Sequence: Synthetic oligonucleotide
ugcugugaauuuuagauua

SEQ ID NO: 1205482 - RNA, 19 nt, Artificial Sequence
  Description of Artificial Sequence: Synthetic oligonucleotide
ugauuauauccuuuguuuc

SEQ ID NO: 1205483 - RNA, 19 nt, Artificial Sequence
  Description of Artificial Sequence: Synthetic oligonucleotide
gauaucguagcucuccuuc

SEQ ID NO: 1205484 - RNA, 19 nt, Artificial Sequence
  Description of Artificial Sequence: Synthetic oligonucleotide
auaguaguucugaacgucc

SEQ ID NO: 1205485 - RNA, 19 nt, Artificial Sequence
  Description of Artificial Sequence: Synthetic oligonucleotide
uugaacugugaugauauug

SEQ ID NO: 1205486 - RNA, 19 nt, Artificial Sequence
  Description of Artificial Sequence: Synthetic oligonucleotide
uguuaucccaccaccuucc

SEQ ID NO: 1205487 - RNA, 19 nt, Artificial Sequence
  Description of Artificial Sequence: Synthetic oligonucleotide
augccuuugacccuuugag

SEQ ID NO: 1205488 - RNA, 19 nt, Artificial Sequence
  Description of Artificial Sequence: Synthetic oligonucleotide
ucugauuauauccuuuguu

SEQ ID NO: 1205489 - RNA, 19 nt, Artificial Sequence
  Description of Artificial Sequence: Synthetic oligonucleotide
gauuguggugccuuugccc

SEQ ID NO: 1205490 - RNA, 19 nt, Artificial Sequence
  Description of Artificial Sequence: Synthetic oligonucleotide
aaaacgcgaguucuucaag

SEQ ID NO: 1205491 - RNA, 19 nt, Artificial Sequence
  Description of Artificial Sequence: Synthetic oligonucleotide
uagcuggcuaagcauauag

SEQ ID NO: 1205492 - RNA, 19 nt, Artificial Sequence
  Description of Artificial Sequence: Synthetic oligonucleotide
agucaugucuauuccagug

SEQ ID NO: 1205493 - RNA, 19 nt, Artificial Sequence
  Description of Artificial Sequence: Synthetic oligonucleotide
uuuaaaagccuaugugagu

SEQ ID NO: 1205494 - RNA, 19 nt, Artificial Sequence
  Description of Artificial Sequence: Synthetic oligonucleotide
uuagggaguuugaagaguc

SEQ ID NO: 1205495 - RNA, 19 nt, Artificial Sequence
  Description of Artificial Sequence: Synthetic oligonucleotide
uccgccguacuucagcgcg

SEQ ID NO: 1205496 - RNA, 19 nt, Artificial Sequence
  Description of Artificial Sequence: Synthetic oligonucleotide
uucugaacguccuugugga

SEQ ID NO: 1205497 - RNA, 19 nt, Artificial Sequence
  Description of Artificial Sequence: Synthetic oligonucleotide
gguuuaaaagccuauguga

SEQ ID NO: 1205498 - RNA, 19 nt, Artificial Sequence
  Description of Artificial Sequence: Synthetic oligonucleotide
aaacgcgaguucuucaaga

SEQ ID NO: 1205499 - RNA, 19 nt, Artificial Sequence
  Description of Artificial Sequence: Synthetic oligonucleotide
agauuguggugccuuugcc

SEQ ID NO: 1205500 - RNA, 19 nt, Artificial Sequence
  Description of Artificial Sequence: Synthetic oligonucleotide
agaacgcugaaauagugaa

SEQ ID NO: 1205501 - RNA, 19 nt, Artificial Sequence
  Description of Artificial Sequence: Synthetic oligonucleotide
aaggaagauguuaucccac

SEQ ID NO: 1205502 - RNA, 19 nt, Artificial Sequence
  Description of Artificial Sequence: Synthetic oligonucleotide
ugguacucaagauagguuu

SEQ ID NO: 1205503 - RNA, 19 nt, Artificial Sequence
  Description of Artificial Sequence: Synthetic oligonucleotide
uguuuaucagggacaaggu

SEQ ID NO: 1205504 - RNA, 19 nt, Artificial Sequence
  Description of Artificial Sequence: Synthetic oligonucleotide
uaaaagccuaugugagugg

SEQ ID NO: 1205505 - RNA, 19 nt, Artificial Sequence
  Description of Artificial Sequence: Synthetic oligonucleotide
aaguauagcucuccgccgu

SEQ ID NO: 1205506 - RNA, 19 nt, Artificial Sequence
  Description of Artificial Sequence: Synthetic oligonucleotide
ucaugucuauuccagugac

SEQ ID NO: 1205507 - RNA, 19 nt, Artificial Sequence
  Description of Artificial Sequence: Synthetic oligonucleotide
uuagccacuuccaccuggg

SEQ ID NO: 1205508 - RNA, 19 nt, Artificial Sequence
  Description of Artificial Sequence: Synthetic oligonucleotide
cccauaguaguucugaacg

SEQ ID NO: 1205509 - RNA, 19 nt, Artificial Sequence
  Description of Artificial Sequence: Synthetic oligonucleotide
aacaacuuggcaucuuuua

SEQ ID NO: 1205510 - RNA, 19 nt, Artificial Sequence
  Description of Artificial Sequence: Synthetic oligonucleotide
agguuuuagccacuuccac

SEQ ID NO: 1205511 - RNA, 19 nt, Artificial Sequence
  Description of Artificial Sequence: Synthetic oligonucleotide
aaauuugauugacaaucuu

SEQ ID NO: 1205512 - RNA, 19 nt, Artificial Sequence
  Description of Artificial Sequence: Synthetic oligonucleotide
uggcuaagcauauagcaau

SEQ ID NO: 1205513 - RNA, 19 nt, Artificial Sequence
  Description of Artificial Sequence: Synthetic oligonucleotide
aacguggcagacacaaaac

SEQ ID NO: 1205514 - RNA, 19 nt, Artificial Sequence
  Description of Artificial Sequence: Synthetic oligonucleotide
acgucacugaaguauagcu

SEQ ID NO: 1205515 - RNA, 19 nt, Artificial Sequence
  Description of Artificial Sequence: Synthetic oligonucleotide
auuuaguagggacucugcu

SEQ ID NO: 1205516 - RNA, 19 nt, Artificial Sequence
  Description of Artificial Sequence: Synthetic oligonucleotide
ccaaauuugauugacaauc

SEQ ID NO: 1205517 - RNA, 19 nt, Artificial Sequence
  Description of Artificial Sequence: Synthetic oligonucleotide
accucgaaguaacaucuuc

SEQ ID NO: 1205518 - RNA, 19 nt, Artificial Sequence
  Description of Artificial Sequence: Synthetic oligonucleotide
uagauuguggugccuuugc

SEQ ID NO: 1205519 - RNA, 19 nt, Artificial Sequence
  Description of Artificial Sequence: Synthetic oligonucleotide
ucgaaguaacaucuucaug

SEQ ID NO: 1205520 - RNA, 19 nt, Artificial Sequence
  Description of Artificial Sequence: Synthetic oligonucleotide
agcacuugcuguuuaucag

SEQ ID NO: 1205521 - RNA, 19 nt, Artificial Sequence
  Description of Artificial Sequence: Synthetic oligonucleotide
aagagucggaacguggcag

SEQ ID NO: 1205522 - RNA, 19 nt, Artificial Sequence
  Description of Artificial Sequence: Synthetic oligonucleotide
uggcagugaccaaacgugg

SEQ ID NO: 1205523 - RNA, 19 nt, Artificial Sequence
  Description of Artificial Sequence: Synthetic oligonucleotide
uucagcgcgccauacaccu

SEQ ID NO: 1205524 - RNA, 19 nt, Artificial Sequence
  Description of Artificial Sequence: Synthetic oligonucleotide
gauuccaccuuuguaaaca

SEQ ID NO: 1205525 - RNA, 19 nt, Artificial Sequence
  Description of Artificial Sequence: Synthetic oligonucleotide
gugagugguucuuuagccg

SEQ ID NO: 1205526 - RNA, 19 nt, Artificial Sequence
  Description of Artificial Sequence: Synthetic oligonucleotide
uuuaguagggacucugcuu

SEQ ID NO: 1205527 - RNA, 19 nt, Artificial Sequence
  Description of Artificial Sequence: Synthetic oligonucleotide
uuagccgccugcucgaaca

SEQ ID NO: 1205528 - RNA, 19 nt, Artificial Sequence
  Description of Artificial Sequence: Synthetic oligonucleotide
cacaaaacgacagucacca

SEQ ID NO: 1205529 - RNA, 19 nt, Artificial Sequence
  Description of Artificial Sequence: Synthetic oligonucleotide
ggauacaacgauaucguag

SEQ ID NO: 1205530 - RNA, 19 nt, Artificial Sequence
  Description of Artificial Sequence: Synthetic oligonucleotide
cuaagcauauagcaaucuc

SEQ ID NO: 1205531 - RNA, 19 nt, Artificial Sequence
  Description of Artificial Sequence: Synthetic oligonucleotide
ucuccgccguacuucagcg

SEQ ID NO: 1205532 - RNA, 19 nt, Artificial Sequence
  Description of Artificial Sequence: Synthetic oligonucleotide
aagacuaccccuaccaaau

SEQ ID NO: 1205533 - RNA, 19 nt, Artificial Sequence
  Description of Artificial Sequence: Synthetic oligonucleotide
uagggaguuugaagagucg

SEQ ID NO: 1205534 - RNA, 19 nt, Artificial Sequence
  Description of Artificial Sequence: Synthetic oligonucleotide
cugaaguauagcucuccgc

SEQ ID NO: 1205535 - RNA, 19 nt, Artificial Sequence
  Description of Artificial Sequence: Synthetic oligonucleotide
aucguagcucuccuucugg

SEQ ID NO: 1205536 - RNA, 19 nt, Artificial Sequence
  Description of Artificial Sequence: Synthetic oligonucleotide
agggaguuugaagagucgg

SEQ ID NO: 1205537 - RNA, 19 nt, Artificial Sequence
  Description of Artificial Sequence: Synthetic oligonucleotide
ugaccaaaacgcgaguucu

SEQ ID NO: 1205538 - RNA, 19 nt, Artificial Sequence
  Description of Artificial Sequence: Synthetic oligonucleotide
aauccugaccaaaacgcga

SEQ ID NO: 1205539 - RNA, 19 nt, Artificial Sequence
  Description of Artificial Sequence: Synthetic oligonucleotide
cuggccgucgaucagcagc

SEQ ID NO: 1205540 - RNA, 19 nt, Artificial Sequence
  Description of Artificial Sequence: Synthetic oligonucleotide
uggcagacacaaaacgaca

SEQ ID NO: 1205541 - RNA, 19 nt, Artificial Sequence
  Description of Artificial Sequence: Synthetic oligonucleotide
gguuuuagccacuuccacc

SEQ ID NO: 1205542 - RNA, 19 nt, Artificial Sequence
  Description of Artificial Sequence: Synthetic oligonucleotide
uaucguagcucuccuucug

SEQ ID NO: 1205543 - RNA, 19 nt, Artificial Sequence
  Description of Artificial Sequence: Synthetic oligonucleotide
uuugaagagucggaacgug

SEQ ID NO: 1205544 - RNA, 19 nt, Artificial Sequence
  Description of Artificial Sequence: Synthetic oligonucleotide
gaagacuaccccuaccaaa

SEQ ID NO: 1205545 - RNA, 19 nt, Artificial Sequence
  Description of Artificial Sequence: Synthetic oligonucleotide
gaguuugaagagucggaac

SEQ ID NO: 1205546 - RNA, 19 nt, Artificial Sequence
  Description of Artificial Sequence: Synthetic oligonucleotide
aguucuacuucugaacacu

SEQ ID NO: 1205547 - RNA, 19 nt, Artificial Sequence
  Description of Artificial Sequence: Synthetic oligonucleotide
aaacgacagucaccaauga

SEQ ID NO: 1205548 - RNA, 19 nt, Artificial Sequence
  Description of Artificial Sequence: Synthetic oligonucleotide
agaugucuucagaacauuc

SEQ ID NO: 1205549 - RNA, 19 nt, Artificial Sequence
  Description of Artificial Sequence: Synthetic oligonucleotide
ucccauaguaguucugaac

SEQ ID NO: 1205550 - RNA, 19 nt, Artificial Sequence
  Description of Artificial Sequence: Synthetic oligonucleotide
uaguaguucugaacguccu

SEQ ID NO: 1205551 - RNA, 19 nt, Artificial Sequence
  Description of Artificial Sequence: Synthetic oligonucleotide
accacagccauaauaccuc

SEQ ID NO: 1205552 - RNA, 19 nt, Artificial Sequence
  Description of Artificial Sequence: Synthetic oligonucleotide
uucaagacagcugccgucu

SEQ ID NO: 1205553 - RNA, 19 nt, Artificial Sequence
  Description of Artificial Sequence: Synthetic oligonucleotide
aggcauucaccccauaaaa

SEQ ID NO: 1205554 - RNA, 19 nt, Artificial Sequence
  Description of Artificial Sequence: Synthetic oligonucleotide
aaagguuugaagacagguu

SEQ ID NO: 1205555 - RNA, 19 nt, Artificial Sequence
  Description of Artificial Sequence: Synthetic oligonucleotide
uucagaacggccccgcaua

SEQ ID NO: 1205556 - RNA, 19 nt, Artificial Sequence
  Description of Artificial Sequence: Synthetic oligonucleotide
ugacgugucccuucuugcc

SEQ ID NO: 1205557 - RNA, 19 nt, Artificial Sequence
  Description of Artificial Sequence: Synthetic oligonucleotide
guaguucugaacguccuug

SEQ ID NO: 1205558 - RNA, 19 nt, Artificial Sequence
  Description of Artificial Sequence: Synthetic oligonucleotide
cugaagacuaccccuacca

SEQ ID NO: 1205559 - RNA, 19 nt, Artificial Sequence
  Description of Artificial Sequence: Synthetic oligonucleotide
accccuaccaaauuugauu

SEQ ID NO: 1205560 - RNA, 19 nt, Artificial Sequence
  Description of Artificial Sequence: Synthetic oligonucleotide
ugggccuuagucaugucua

SEQ ID NO: 1205561 - RNA, 19 nt, Artificial Sequence
  Description of Artificial Sequence: Synthetic oligonucleotide
aguaaaguccagagguguc

SEQ ID NO: 1205562 - RNA, 19 nt, Artificial Sequence
  Description of Artificial Sequence: Synthetic oligonucleotide
ucagaacggccccgcauag

SEQ ID NO: 1205563 - RNA, 19 nt, Artificial Sequence
  Description of Artificial Sequence: Synthetic oligonucleotide
uugacccuuugagugaacc

SEQ ID NO: 1205564 - RNA, 19 nt, Artificial Sequence
  Description of Artificial Sequence: Synthetic oligonucleotide
ucuuuagccgccugcucga

SEQ ID NO: 1205565 - RNA, 19 nt, Artificial Sequence
  Description of Artificial Sequence: Synthetic oligonucleotide
uaauaccucgaaguaacau

SEQ ID NO: 1205566 - RNA, 19 nt, Artificial Sequence
  Description of Artificial Sequence: Synthetic oligonucleotide
ucuauuccagugacguguc

SEQ ID NO: 1205567 - RNA, 19 nt, Artificial Sequence
  Description of Artificial Sequence: Synthetic oligonucleotide
aauucagaacggccccgca

SEQ ID NO: 1205568 - RNA, 19 nt, Artificial Sequence
  Description of Artificial Sequence: Synthetic oligonucleotide
uagacgucacugaaguaua

SEQ ID NO: 1205569 - RNA, 19 nt, Artificial Sequence
  Description of Artificial Sequence: Synthetic oligonucleotide
uacaacgauaucguagcuc

SEQ ID NO: 1205570 - RNA, 19 nt, Artificial Sequence
  Description of Artificial Sequence: Synthetic oligonucleotide
gcuagcauagacgucacug

SEQ ID NO: 1205571 - RNA, 19 nt, Artificial Sequence
  Description of Artificial Sequence: Synthetic oligonucleotide
accaaauuugauugacaau

SEQ ID NO: 1205572 - RNA, 19 nt, Artificial Sequence
  Description of Artificial Sequence: Synthetic oligonucleotide
aguucugaacguccuugug

SEQ ID NO: 1205573 - RNA, 19 nt, Artificial Sequence
  Description of Artificial Sequence: Synthetic oligonucleotide
cuaauucagaacggccccg

SEQ ID NO: 1205574 - RNA, 19 nt, Artificial Sequence
  Description of Artificial Sequence: Synthetic oligonucleotide
ugugguaggccagaaggaa

SEQ ID NO: 1205575 - RNA, 19 nt, Artificial Sequence
  Description of Artificial Sequence: Synthetic oligonucleotide
agcuggcuaagcauauagc

SEQ ID NO: 1205576 - RNA, 19 nt, Artificial Sequence
  Description of Artificial Sequence: Synthetic oligonucleotide
gacauaguuaguauaaauu

SEQ ID NO: 1205577 - RNA, 19 nt, Artificial Sequence
  Description of Artificial Sequence: Synthetic oligonucleotide
agguuccugaagacuaccc

SEQ ID NO: 1205578 - RNA, 19 nt, Artificial Sequence
  Description of Artificial Sequence: Synthetic oligonucleotide
aucucagcgucucggggag

SEQ ID NO: 1205579 - RNA, 19 nt, Artificial Sequence
  Description of Artificial Sequence: Synthetic oligonucleotide
uaauucagaacggccccgc

SEQ ID NO: 1205580 - RNA, 19 nt, Artificial Sequence
  Description of Artificial Sequence: Synthetic oligonucleotide
uauagcucuccgccguacu

SEQ ID NO: 1205581 - RNA, 19 nt, Artificial Sequence
  Description of Artificial Sequence: Synthetic oligonucleotide
gugugaagagaaaauccug

SEQ ID NO: 1205582 - RNA, 19 nt, Artificial Sequence
  Description of Artificial Sequence: Synthetic oligonucleotide
uuccagacgcucagggaca

SEQ ID NO: 1205583 - RNA, 19 nt, Artificial Sequence
  Description of Artificial Sequence: Synthetic oligonucleotide
ugacccuuugagugaaccu

SEQ ID NO: 1205584 - RNA, 19 nt, Artificial Sequence
  Description of Artificial Sequence: Synthetic oligonucleotide
ugucuauuccagugacgug

SEQ ID NO: 1205585 - RNA, 19 nt, Artificial Sequence
  Description of Artificial Sequence: Synthetic oligonucleotide
aauuuagauuguggugccu

SEQ ID NO: 1205586 - RNA, 19 nt, Artificial Sequence
  Description of Artificial Sequence: Synthetic oligonucleotide
gugaccaaacguggaaggg

SEQ ID NO: 1205587 - RNA, 19 nt, Artificial Sequence
  Description of Artificial Sequence: Synthetic oligonucleotide
cagacgcucagggacaacc

SEQ ID NO: 1205588 - RNA, 19 nt, Artificial Sequence
  Description of Artificial Sequence: Synthetic oligonucleotide
cugaccaaaacgcgaguuc

SEQ ID NO: 1205589 - RNA, 19 nt, Artificial Sequence
  Description of Artificial Sequence: Synthetic oligonucleotide
gacgucacugaaguauagc

SEQ ID NO: 1205590 - RNA, 19 nt, Artificial Sequence
  Description of Artificial Sequence: Synthetic oligonucleotide
cagaguuucccggauguac

SEQ ID NO: 1205591 - RNA, 19 nt, Artificial Sequence
  Description of Artificial Sequence: Synthetic oligonucleotide
cucgaacaccaugagcucc

SEQ ID NO: 1205592 - RNA, 19 nt, Artificial Sequence
  Description of Artificial Sequence: Synthetic oligonucleotide
agacacaaaacgacaguca

SEQ ID NO: 1205593 - RNA, 19 nt, Artificial Sequence
  Description of Artificial Sequence: Synthetic oligonucleotide
auccugaccaaaacgcgag

SEQ ID NO: 1205594 - RNA, 19 nt, Artificial Sequence
  Description of Artificial Sequence: Synthetic oligonucleotide
cuaccaaauuugauugaca

SEQ ID NO: 1205595 - RNA, 19 nt, Artificial Sequence
  Description of Artificial Sequence: Synthetic oligonucleotide
uacuucagcgcgccauaca

SEQ ID NO: 1205596 - RNA, 19 nt, Artificial Sequence
  Description of Artificial Sequence: Synthetic oligonucleotide
cuucagcgcgccauacacc

SEQ ID NO: 1205597 - RNA, 19 nt, Artificial Sequence
  Description of Artificial Sequence: Synthetic oligonucleotide
cgcgaguucuucaagacag

SEQ ID NO: 1205598 - RNA, 19 nt, Artificial Sequence
  Description of Artificial Sequence: Synthetic oligonucleotide
auuagucuggagguuugca

SEQ ID NO: 1205599 - RNA, 19 nt, Artificial Sequence
  Description of Artificial Sequence: Synthetic oligonucleotide
acgauaucguagcucuccu

SEQ ID NO: 1205600 - RNA, 19 nt, Artificial Sequence
  Description of Artificial Sequence: Synthetic oligonucleotide
ccugaguaaacacagagua

SEQ ID NO: 1205601 - RNA, 19 nt, Artificial Sequence
  Description of Artificial Sequence: Synthetic oligonucleotide
cuuugagugaaccuucagu

SEQ ID NO: 1205602 - RNA, 19 nt, Artificial Sequence
  Description of Artificial Sequence: Synthetic oligonucleotide
cagcgcgccauacaccucc

SEQ ID NO: 1205603 - RNA, 19 nt, Artificial Sequence
  Description of Artificial Sequence: Synthetic oligonucleotide
ucguagcucuccuucugga

SEQ ID NO: 1205604 - RNA, 19 nt, Artificial Sequence
  Description of Artificial Sequence: Synthetic oligonucleotide
auacaacgauaucguagcu

SEQ ID NO: 1205605 - RNA, 19 nt, Artificial Sequence
  Description of Artificial Sequence: Synthetic oligonucleotide
ccccuaccaaauuugauug

SEQ ID NO: 1205606 - RNA, 19 nt, Artificial Sequence
  Description of Artificial Sequence: Synthetic oligonucleotide
gucuauuccagugacgugu

SEQ ID NO: 1205607 - RNA, 19 nt, Artificial Sequence
  Description of Artificial Sequence: Synthetic oligonucleotide
agaguuucccggauguacu

SEQ ID NO: 1205608 - RNA, 19 nt, Artificial Sequence
  Description of Artificial Sequence: Synthetic oligonucleotide
caaaacgcgaguucuucaa

SEQ ID NO: 1205609 - RNA, 19 nt, Artificial Sequence
  Description of Artificial Sequence: Synthetic oligonucleotide
gccuuagucaugucuauuc

SEQ ID NO: 1205610 - RNA, 19 nt, Artificial Sequence
  Description of Artificial Sequence: Synthetic oligonucleotide
ccuuagucaugucuauucc

SEQ ID NO: 1205611 - RNA, 19 nt, Artificial Sequence
  Description of Artificial Sequence: Synthetic oligonucleotide
ccaguacaaagcaccaccc

SEQ ID NO: 1205612 - RNA, 19 nt, Artificial Sequence
  Description of Artificial Sequence: Synthetic oligonucleotide
uuuagccgccugcucgaac

SEQ ID NO: 1205613 - RNA, 19 nt, Artificial Sequence
  Description of Artificial Sequence: Synthetic oligonucleotide
acgcgaguucuucaagaca

SEQ ID NO: 1205614 - RNA, 19 nt, Artificial Sequence
  Description of Artificial Sequence: Synthetic oligonucleotide
uccagugacgugucccuuc

SEQ ID NO: 1205615 - RNA, 19 nt, Artificial Sequence
  Description of Artificial Sequence: Synthetic oligonucleotide
gaguaaaguccagaggugu

SEQ ID NO: 1205616 - RNA, 19 nt, Artificial Sequence
  Description of Artificial Sequence: Synthetic oligonucleotide
uaccccuaccaaauuugau

SEQ ID NO: 1205617 - RNA, 19 nt, Artificial Sequence
  Description of Artificial Sequence: Synthetic oligonucleotide
caaaacgacagucaccaau

SEQ ID NO: 1205618 - RNA, 19 nt, Artificial Sequence
  Description of Artificial Sequence: Synthetic oligonucleotide
agcgucucggggagcagcc

SEQ ID NO: 1205619 - RNA, 19 nt, Artificial Sequence
  Description of Artificial Sequence: Synthetic oligonucleotide
ucaccccauaaaaccuugu

SEQ ID NO: 1205620 - RNA, 19 nt, Artificial Sequence
  Description of Artificial Sequence: Synthetic oligonucleotide
aacguccuuguggaucuca

SEQ ID NO: 1205621 - RNA, 19 nt, Artificial Sequence
  Description of Artificial Sequence: Synthetic oligonucleotide
agcauuagucuggagguuu

SEQ ID NO: 1205622 - RNA, 19 nt, Artificial Sequence
  Description of Artificial Sequence: Synthetic oligonucleotide
auagcaaucucugccgcuu

SEQ ID NO: 1205623 - RNA, 19 nt, Artificial Sequence
  Description of Artificial Sequence: Synthetic oligonucleotide
cauuagucuggagguuugc

SEQ ID NO: 1205624 - RNA, 19 nt, Artificial Sequence
  Description of Artificial Sequence: Synthetic oligonucleotide
ugcuggccgucgaucagca

SEQ ID NO: 1205625 - RNA, 19 nt, Artificial Sequence
  Description of Artificial Sequence: Synthetic oligonucleotide
gaccacagccauaauaccu

SEQ ID NO: 1205626 - RNA, 19 nt, Artificial Sequence
  Description of Artificial Sequence: Synthetic oligonucleotide
uccugaccaaaacgcgagu

SEQ ID NO: 1205627 - RNA, 19 nt, Artificial Sequence
  Description of Artificial Sequence: Synthetic oligonucleotide
gauguuaucccaccaccuu

SEQ ID NO: 1205628 - RNA, 19 nt, Artificial Sequence
  Description of Artificial Sequence: Synthetic oligonucleotide
agcucuccgccguacuuca

SEQ ID NO: 1205629 - RNA, 19 nt, Artificial Sequence
  Description of Artificial Sequence: Synthetic oligonucleotide
gcauagacgucacugaagu

SEQ ID NO: 1205630 - RNA, 19 nt, Artificial Sequence
  Description of Artificial Sequence: Synthetic oligonucleotide
cagguuuaaaagccuaugu

SEQ ID NO: 1205631 - RNA, 19 nt, Artificial Sequence
  Description of Artificial Sequence: Synthetic oligonucleotide
uuccaguacaaagcaccac

SEQ ID NO: 1205632 - RNA, 19 nt, Artificial Sequence
  Description of Artificial Sequence: Synthetic oligonucleotide
cuauuccagugacgugucc

SEQ ID NO: 1205633 - RNA, 19 nt, Artificial Sequence
  Description of Artificial Sequence: Synthetic oligonucleotide
gagguguccugugguaggc

SEQ ID NO: 1205634 - RNA, 19 nt, Artificial Sequence
  Description of Artificial Sequence: Synthetic oligonucleotide
cuaccccuaccaaauuuga

SEQ ID NO: 1205635 - RNA, 19 nt, Artificial Sequence
  Description of Artificial Sequence: Synthetic oligonucleotide
caaugcauccuugaauaaa

SEQ ID NO: 1205636 - RNA, 19 nt, Artificial Sequence
  Description of Artificial Sequence: Synthetic oligonucleotide
auaauaccucgaaguaaca

SEQ ID NO: 1205637 - RNA, 19 nt, Artificial Sequence
  Description of Artificial Sequence: Synthetic oligonucleotide
auagcucuccgccguacuu

SEQ ID NO: 1205638 - RNA, 19 nt, Artificial Sequence
  Description of Artificial Sequence: Synthetic oligonucleotide
gggacaagguugauaacac

SEQ ID NO: 1205639 - RNA, 19 nt, Artificial Sequence
  Description of Artificial Sequence: Synthetic oligonucleotide
ccagaacgcugaaauagug

SEQ ID NO: 1205640 - RNA, 19 nt, Artificial Sequence
  Description of Artificial Sequence: Synthetic oligonucleotide
uggcaguuuuccagacgcu

SEQ ID NO: 1205641 - RNA, 19 nt, Artificial Sequence
  Description of Artificial Sequence: Synthetic oligonucleotide
uuugacccuuugagugaac

SEQ ID NO: 1205642 - RNA, 19 nt, Artificial Sequence
  Description of Artificial Sequence: Synthetic oligonucleotide
gcagguuuaaaagccuaug

SEQ ID NO: 1205643 - RNA, 19 nt, Artificial Sequence
  Description of Artificial Sequence: Synthetic oligonucleotide
caggcauucaccccauaaa

SEQ ID NO: 1205644 - RNA, 19 nt, Artificial Sequence
  Description of Artificial Sequence: Synthetic oligonucleotide
agccuaugugagugguucu

SEQ ID NO: 1205645 - RNA, 19 nt, Artificial Sequence
  Description of Artificial Sequence: Synthetic oligonucleotide
cuugaauggaucucugauu

SEQ ID NO: 1205646 - RNA, 19 nt, Artificial Sequence
  Description of Artificial Sequence: Synthetic oligonucleotide
caaggcuagcauagacguc

SEQ ID NO: 1205647 - RNA, 19 nt, Artificial Sequence
  Description of Artificial Sequence: Synthetic oligonucleotide
caguuggauacaacgauau

SEQ ID NO: 1205648 - RNA, 19 nt, Artificial Sequence
  Description of Artificial Sequence: Synthetic oligonucleotide
agacgucacugaaguauag

SEQ ID NO: 1205649 - RNA, 19 nt, Artificial Sequence
  Description of Artificial Sequence: Synthetic oligonucleotide
ccaacuagcuggcuaagca

SEQ ID NO: 1205650 - RNA, 19 nt, Artificial Sequence
  Description of Artificial Sequence: Synthetic oligonucleotide
ccccgcauagccagcagcg

SEQ ID NO: 1205651 - RNA, 19 nt, Artificial Sequence
  Description of Artificial Sequence: Synthetic oligonucleotide
aagcauuagucuggagguu

SEQ ID NO: 1205652 - RNA, 19 nt, Artificial Sequence
  Description of Artificial Sequence: Synthetic oligonucleotide
cacaagcauuagucuggag

SEQ ID NO: 1205653 - RNA, 19 nt, Artificial Sequence
  Description of Artificial Sequence: Synthetic oligonucleotide
ugccaucaggcgcaugcuu

SEQ ID NO: 1205654 - RNA, 19 nt, Artificial Sequence
  Description of Artificial Sequence: Synthetic oligonucleotide
aaagccuaugugagugguu

SEQ ID NO: 1205655 - RNA, 19 nt, Artificial Sequence
  Description of Artificial Sequence: Synthetic oligonucleotide
ggaguuugaagagucggaa

SEQ ID NO: 1205656 - RNA, 19 nt, Artificial Sequence
  Description of Artificial Sequence: Synthetic oligonucleotide
cgcauagccagcagcgugg

SEQ ID NO: 1205657 - RNA, 19 nt, Artificial Sequence
  Description of Artificial Sequence: Synthetic oligonucleotide
ugccaacuagcuggcuaag

SEQ ID NO: 1205658 - RNA, 19 nt, Artificial Sequence
  Description of Artificial Sequence: Synthetic oligonucleotide
cugccgucucuucauccac

SEQ ID NO: 1205659 - RNA, 19 nt, Artificial Sequence
  Description of Artificial Sequence: Synthetic oligonucleotide
agauagguuuuagccacuu

SEQ ID NO: 1205660 - RNA, 19 nt, Artificial Sequence
  Description of Artificial Sequence: Synthetic oligonucleotide
uaccucgaaguaacaucuu

SEQ ID NO: 1205661 - RNA, 19 nt, Artificial Sequence
  Description of Artificial Sequence: Synthetic oligonucleotide
ccugaagacuaccccuacc

SEQ ID NO: 1205662 - RNA, 19 nt, Artificial Sequence
  Description of Artificial Sequence: Synthetic oligonucleotide
acgcugaaauagugaaaua

SEQ ID NO: 1205663 - RNA, 19 nt, Artificial Sequence
  Description of Artificial Sequence: Synthetic oligonucleotide
caacgauaucguagcucuc

SEQ ID NO: 1205664 - RNA, 19 nt, Artificial Sequence
  Description of Artificial Sequence: Synthetic oligonucleotide
cuuugacccuuugagugaa

SEQ ID NO: 1205665 - RNA, 19 nt, Artificial Sequence
  Description of Artificial Sequence: Synthetic oligonucleotide
cccauaaaaccuuguguga

SEQ ID NO: 1205666 - RNA, 19 nt, Artificial Sequence
  Description of Artificial Sequence: Synthetic oligonucleotide
ggcaguuuuccagacgcuc

SEQ ID NO: 1205667 - RNA, 19 nt, Artificial Sequence
  Description of Artificial Sequence: Synthetic oligonucleotide
agacuaccccuaccaaauu

SEQ ID NO: 1205668 - RNA, 19 nt, Artificial Sequence
  Description of Artificial Sequence: Synthetic oligonucleotide
acgcucagggacaaccaga

SEQ ID NO: 1205669 - RNA, 19 nt, Artificial Sequence
  Description of Artificial Sequence: Synthetic oligonucleotide
cuuagggaguuugaagagu

SEQ ID NO: 1205670 - RNA, 19 nt, Artificial Sequence
  Description of Artificial Sequence: Synthetic oligonucleotide
ucggaacguggcagacaca

SEQ ID NO: 1205671 - RNA, 19 nt, Artificial Sequence
  Description of Artificial Sequence: Synthetic oligonucleotide
cccggauguacuuggggac

SEQ ID NO: 1205672 - RNA, 19 nt, Artificial Sequence
  Description of Artificial Sequence: Synthetic oligonucleotide
cuccgccguacuucagcgc

SEQ ID NO: 1205673 - RNA, 19 nt, Artificial Sequence
  Description of Artificial Sequence: Synthetic oligonucleotide
ccuggcaguuuuccagacg

SEQ ID NO: 1205674 - RNA, 19 nt, Artificial Sequence
  Description of Artificial Sequence: Synthetic oligonucleotide
guacucaagauagguuuua

SEQ ID NO: 1205675 - RNA, 19 nt, Artificial Sequence
  Description of Artificial Sequence: Synthetic oligonucleotide
caacuagcuggcuaagcau

SEQ ID NO: 1205676 - RNA, 19 nt, Artificial Sequence
  Description of Artificial Sequence: Synthetic oligonucleotide
acucugcuuccugaguaaa

SEQ ID NO: 1205677 - RNA, 19 nt, Artificial Sequence
  Description of Artificial Sequence: Synthetic oligonucleotide
cacagccauaauaccucga

SEQ ID NO: 1205678 - RNA, 19 nt, Artificial Sequence
  Description of Artificial Sequence: Synthetic oligonucleotide
gcauuagucuggagguuug

SEQ ID NO: 1205679 - RNA, 19 nt, Artificial Sequence
  Description of Artificial Sequence: Synthetic oligonucleotide
uccagacgcucagggacaa

SEQ ID NO: 1205680 - RNA, 19 nt, Artificial Sequence
  Description of Artificial Sequence: Synthetic oligonucleotide
ggcuaagcauauagcaauc

SEQ ID NO: 1205681 - RNA, 19 nt, Artificial Sequence
  Description of Artificial Sequence: Synthetic oligonucleotide
cagaacggccccgcauagc

SEQ ID NO: 1205682 - RNA, 19 nt, Artificial Sequence
  Description of Artificial Sequence: Synthetic oligonucleotide
gagugaaccuucaguucua

SEQ ID NO: 1205683 - RNA, 19 nt, Artificial Sequence
  Description of Artificial Sequence: Synthetic oligonucleotide
gccugcucgaacaccauga

SEQ ID NO: 1205684 - RNA, 19 nt, Artificial Sequence
  Description of Artificial Sequence: Synthetic oligonucleotide
ccauaauaccucgaaguaa

SEQ ID NO: 1205685 - RNA, 19 nt, Artificial Sequence
  Description of Artificial Sequence: Synthetic oligonucleotide
cugugaugauauuggcagu

SEQ ID NO: 1205686 - RNA, 19 nt, Artificial Sequence
  Description of Artificial Sequence: Synthetic oligonucleotide
ccgcauagccagcagcgug

SEQ ID NO: 1205687 - RNA, 19 nt, Artificial Sequence
  Description of Artificial Sequence: Synthetic oligonucleotide
gccaacuagcuggcuaagc

SEQ ID NO: 1205688 - RNA, 19 nt, Artificial Sequence
  Description of Artificial Sequence: Synthetic oligonucleotide
gguucuuuagccgccugcu

SEQ ID NO: 1205689 - RNA, 19 nt, Artificial Sequence
  Description of Artificial Sequence: Synthetic oligonucleotide
caccuuccuugaaugugaa

SEQ ID NO: 1205690 - RNA, 19 nt, Artificial Sequence
  Description of Artificial Sequence: Synthetic oligonucleotide
ccuuguuuugaacugugau

SEQ ID NO: 1205691 - RNA, 19 nt, Artificial Sequence
  Description of Artificial Sequence: Synthetic oligonucleotide
gaacggccccgcauagcca

SEQ ID NO: 1205692 - RNA, 19 nt, Artificial Sequence
  Description of Artificial Sequence: Synthetic oligonucleotide
guuaucccaccaccuuccu

SEQ ID NO: 1205693 - RNA, 19 nt, Artificial Sequence
  Description of Artificial Sequence: Synthetic oligonucleotide
gcgccauacaccuccugaa

SEQ ID NO: 1205694 - RNA, 19 nt, Artificial Sequence
  Description of Artificial Sequence: Synthetic oligonucleotide
gcgaguucuucaagacagc

SEQ ID NO: 1205695 - RNA, 19 nt, Artificial Sequence
  Description of Artificial Sequence: Synthetic oligonucleotide
ccacaacccagauccaaaa

SEQ ID NO: 1205696 - RNA, 19 nt, Artificial Sequence
  Description of Artificial Sequence: Synthetic oligonucleotide
ccaaugacacuuucuaguu

SEQ ID NO: 1205697 - RNA, 19 nt, Artificial Sequence
  Description of Artificial Sequence: Synthetic oligonucleotide
gcggugacacaagcauuag

SEQ ID NO: 1205698 - RNA, 19 nt, Artificial Sequence
  Description of Artificial Sequence: Synthetic oligonucleotide
gcugugaauuuuagauuaa

SEQ ID NO: 1205699 - RNA, 19 nt, Artificial Sequence
  Description of Artificial Sequence: Synthetic oligonucleotide
ggcgcaugcuuggacuuca

SEQ ID NO: 1205700 - RNA, 19 nt, Artificial Sequence
  Description of Artificial Sequence: Synthetic oligonucleotide
ccagcagcguggcuccaac

SEQ ID NO: 1205701 - RNA, 19 nt, Artificial Sequence
  Description of Artificial Sequence: Synthetic oligonucleotide
cccuaccaaauuugauuga

SEQ ID NO: 1205702 - RNA, 19 nt, Artificial Sequence
  Description of Artificial Sequence: Synthetic oligonucleotide
gaccaaaacgcgaguucuu

SEQ ID NO: 1205703 - RNA, 19 nt, Artificial Sequence
  Description of Artificial Sequence: Synthetic oligonucleotide
gaacguccuuguggaucuc

SEQ ID NO: 1205704 - RNA, 19 nt, Artificial Sequence
  Description of Artificial Sequence: Synthetic oligonucleotide
cgcggugacacaagcauua

SEQ ID NO: 1205705 - RNA, 19 nt, Artificial Sequence
  Description of Artificial Sequence: Synthetic oligonucleotide
cggaacguggcagacacaa

SEQ ID NO: 1205706 - RNA, 19 nt, Artificial Sequence
  Description of Artificial Sequence: Synthetic oligonucleotide
ccgugcuggccgucgauca

SEQ ID NO: 1205707 - RNA, 19 nt, Artificial Sequence
  Description of Artificial Sequence: Synthetic oligonucleotide
cgcgccauacaccuccuga

SEQ ID NO: 1205708 - RNA, 19 nt, Artificial Sequence
  Description of Artificial Sequence: Synthetic oligonucleotide
cuuuagccgccugcucgaa

SEQ ID NO: 1205709 - RNA, 19 nt, Artificial Sequence
  Description of Artificial Sequence: Synthetic oligonucleotide
ccgccguacuucagcgcgc

SEQ ID NO: 1205710 - RNA, 19 nt, Artificial Sequence
  Description of Artificial Sequence: Synthetic oligonucleotide
cagucaccaaugacacuuu

SEQ ID NO: 1205711 - RNA, 19 nt, Artificial Sequence
  Description of Artificial Sequence: Synthetic oligonucleotide
guccugugguaggccagaa

SEQ ID NO: 1205712 - RNA, 19 nt, Artificial Sequence
  Description of Artificial Sequence: Synthetic oligonucleotide
gugccaucaggcgcaugcu

SEQ ID NO: 1205713 - RNA, 19 nt, Artificial Sequence
  Description of Artificial Sequence: Synthetic oligonucleotide
gggccuuagucaugucuau

SEQ ID NO: 1205714 - RNA, 19 nt, Artificial Sequence
  Description of Artificial Sequence: Synthetic oligonucleotide
caccaccuuccuccaauuu

SEQ ID NO: 1205715 - RNA, 19 nt, Artificial Sequence
  Description of Artificial Sequence: Synthetic oligonucleotide
ggcuagcauagacgucacu

SEQ ID NO: 1205716 - RNA, 19 nt, Artificial Sequence
  Description of Artificial Sequence: Synthetic oligonucleotide
cgccguacuucagcgcgcc

SEQ ID NO: 1205717 - RNA, 19 nt, Artificial Sequence
  Description of Artificial Sequence: Synthetic oligonucleotide
gcgcgccauacaccuccug

SEQ ID NO: 1205718 - RNA, 19 nt, Artificial Sequence
  Description of Artificial Sequence: Synthetic oligonucleotide
gcucuccgccguacuucag

SEQ ID NO: 1205719 - RNA, 19 nt, Artificial Sequence
  Description of Artificial Sequence: Synthetic oligonucleotide
gccuaugugagugguucuu

SEQ ID NO: 1205720 - RNA, 19 nt, Artificial Sequence
  Description of Artificial Sequence: Synthetic oligonucleotide
ccugaccaaaacgcgaguu

SEQ ID NO: 1205721 - RNA, 19 nt, Artificial Sequence
  Description of Artificial Sequence: Synthetic oligonucleotide
cggauguacuuggggacca

SEQ ID NO: 1205722 - RNA, 19 nt, Artificial Sequence
  Description of Artificial Sequence: Synthetic oligonucleotide
gcgcaugcuuggacuucac

SEQ ID NO: 1205723 - RNA, 19 nt, Artificial Sequence
  Description of Artificial Sequence: Synthetic oligonucleotide
ggccuuagucaugucuauu

SEQ ID NO: 1205724 - RNA, 19 nt, Artificial Sequence
  Description of Artificial Sequence: Synthetic oligonucleotide
ccuaugugagugguucuuu

SEQ ID NO: 1205725 - RNA, 19 nt, Artificial Sequence
  Description of Artificial Sequence: Synthetic oligonucleotide
ccagacgcucagggacaac

SEQ ID NO: 1205726 - RNA, 19 nt, Artificial Sequence
  Description of Artificial Sequence: Synthetic oligonucleotide
ccguacuucagcgcgccau

SEQ ID NO: 1205727 - RNA, 19 nt, Artificial Sequence
  Description of Artificial Sequence: Synthetic oligonucleotide
cguggccgcggugacacaa

SEQ ID NO: 1205728 - RNA, 19 nt, Artificial Sequence
  Description of Artificial Sequence: Synthetic oligonucleotide
gcguggccgcggugacaca

SEQ ID NO: 1205729 - RNA, 19 nt, Artificial Sequence
  Description of Artificial Sequence: Synthetic oligonucleotide
ccgcuuccacaacccagau

SEQ ID NO: 1205730 - RNA, 19 nt, Artificial Sequence
  Description of Artificial Sequence: Synthetic oligonucleotide
aauaggaugcugcagaugc

SEQ ID NO: 1205731 - RNA, 19 nt, Artificial Sequence
  Description of Artificial Sequence: Synthetic oligonucleotide
ucaauaauaacucacucgg

SEQ ID NO: 1205732 - RNA, 19 nt, Artificial Sequence
  Description of Artificial Sequence: Synthetic oligonucleotide
aauauuaauuuccgagagc

SEQ ID NO: 1205733 - RNA, 19 nt, Artificial Sequence
  Description of Artificial Sequence: Synthetic oligonucleotide
uacuaugaaacauaaacag

SEQ ID NO: 1205734 - RNA, 19 nt, Artificial Sequence
  Description of Artificial Sequence: Synthetic oligonucleotide
ucuuauguuacauacagga

SEQ ID NO: 1205735 - RNA, 19 nt, Artificial Sequence
  Description of Artificial Sequence: Synthetic oligonucleotide
uaagcauucgaacacagcc

SEQ ID NO: 1205736 - RNA, 19 nt, Artificial Sequence
  Description of Artificial Sequence: Synthetic oligonucleotide
uuuggaauugacuagcacc

SEQ ID NO: 1205737 - RNA, 19 nt, Artificial Sequence
  Description of Artificial Sequence: Synthetic oligonucleotide
aaaauauuaguugagcgug

SEQ ID NO: 1205738 - RNA, 19 nt, Artificial Sequence
  Description of Artificial Sequence: Synthetic oligonucleotide
uuauguuacauacaggagu

SEQ ID NO: 1205739 - RNA, 19 nt, Artificial Sequence
  Description of Artificial Sequence: Synthetic oligonucleotide
agcaauugaacuccaaggc

SEQ ID NO: 1205740 - RNA, 19 nt, Artificial Sequence
  Description of Artificial Sequence: Synthetic oligonucleotide
aaccuuagaagguauuucg

SEQ ID NO: 1205741 - RNA, 19 nt, Artificial Sequence
  Description of Artificial Sequence: Synthetic oligonucleotide
uucagaauccacauaacag

SEQ ID NO: 1205742 - RNA, 19 nt, Artificial Sequence
  Description of Artificial Sequence: Synthetic oligonucleotide
uacuaaauaacaaaguuuu

SEQ ID NO: 1205743 - RNA, 19 nt, Artificial Sequence
  Description of Artificial Sequence: Synthetic oligonucleotide
uugucuaaaauauuaguug

SEQ ID NO: 1205744 - RNA, 19 nt, Artificial Sequence
  Description of Artificial Sequence: Synthetic oligonucleotide
uguaagaggaagagggucg

SEQ ID NO: 1205745 - RNA, 19 nt, Artificial Sequence
  Description of Artificial Sequence: Synthetic oligonucleotide
guaguugugaaacaggacc

SEQ ID NO: 1205746 - RNA, 19 nt, Artificial Sequence
  Description of Artificial Sequence: Synthetic oligonucleotide
cauuagauuggcaaguucc

SEQ ID NO: 1205747 - RNA, 19 nt, Artificial Sequence
  Description of Artificial Sequence: Synthetic oligonucleotide
ucgaagucugacaauaagg

SEQ ID NO: 1205748 - RNA, 19 nt, Artificial Sequence
  Description of Artificial Sequence: Synthetic oligonucleotide
auuuccgagagcgagaagc

SEQ ID NO: 1205749 - RNA, 19 nt, Artificial Sequence
  Description of Artificial Sequence: Synthetic oligonucleotide
ucuaaaucgaaccaucccu

SEQ ID NO: 1205750 - RNA, 19 nt, Artificial Sequence
  Description of Artificial Sequence: Synthetic oligonucleotide
gucaauaauaacucacucg

SEQ ID NO: 1205751 - RNA, 19 nt, Artificial Sequence
  Description of Artificial Sequence: Synthetic oligonucleotide
ugucuaaaauauuaguuga

SEQ ID NO: 1205752 - RNA, 19 nt, Artificial Sequence
  Description of Artificial Sequence: Synthetic oligonucleotide
ugugaaacaggaccgaaug

SEQ ID NO: 1205753 - RNA, 19 nt, Artificial Sequence
  Description of Artificial Sequence: Synthetic oligonucleotide
ucuguuaagcauucgaaca

SEQ ID NO: 1205754 - RNA, 19 nt, Artificial Sequence
  Description of Artificial Sequence: Synthetic oligonucleotide
aaguagucaauaauaacuc

SEQ ID NO: 1205755 - RNA, 19 nt, Artificial Sequence
  Description of Artificial Sequence: Synthetic oligonucleotide
ucaucaaaaguucuugcug

SEQ ID NO: 1205756 - RNA, 19 nt, Artificial Sequence
  Description of Artificial Sequence: Synthetic oligonucleotide
uaguugugaaacaggaccg

SEQ ID NO: 1205757 - RNA, 19 nt, Artificial Sequence
  Description of Artificial Sequence: Synthetic oligonucleotide
gaauccacauaacagggag

SEQ ID NO: 1205758 - RNA, 19 nt, Artificial Sequence
  Description of Artificial Sequence: Synthetic oligonucleotide
accgagaaccuuuacaagg

SEQ ID NO: 1205759 - RNA, 19 nt, Artificial Sequence
  Description of Artificial Sequence: Synthetic oligonucleotide
uaauaacucacucgggaag

SEQ ID NO: 1205760 - RNA, 19 nt, Artificial Sequence
  Description of Artificial Sequence: Synthetic oligonucleotide
caaguugacaagaaaguag

SEQ ID NO: 1205761 - RNA, 19 nt, Artificial Sequence
  Description of Artificial Sequence: Synthetic oligonucleotide
aguaccuucagcagaaacc

SEQ ID NO: 1205762 - RNA, 19 nt, Artificial Sequence
  Description of Artificial Sequence: Synthetic oligonucleotide
ucuaaaauauuaguugagc

SEQ ID NO: 1205763 - RNA, 19 nt, Artificial Sequence
  Description of Artificial Sequence: Synthetic oligonucleotide
auuuaaaagacccggucug

SEQ ID NO: 1205764 - RNA, 19 nt, Artificial Sequence
  Description of Artificial Sequence: Synthetic oligonucleotide
gauaguauggccacggcag

SEQ ID NO: 1205765 - RNA, 19 nt, Artificial Sequence
  Description of Artificial Sequence: Synthetic oligonucleotide
uuacuaaauaacaaaguuu

SEQ ID NO: 1205766 - RNA, 19 nt, Artificial Sequence
  Description of Artificial Sequence: Synthetic oligonucleotide
agcgcaagcauuuucauca

SEQ ID NO: 1205767 - RNA, 19 nt, Artificial Sequence
  Description of Artificial Sequence: Synthetic oligonucleotide
uuauuuacacauuggugcc

SEQ ID NO: 1205768 - RNA, 19 nt, Artificial Sequence
  Description of Artificial Sequence: Synthetic oligonucleotide
aagccaacgaccauggcac

SEQ ID NO: 1205769 - RNA, 19 nt, Artificial Sequence
  Description of Artificial Sequence: Synthetic oligonucleotide
auuaauuuccgagagcgag

SEQ ID NO: 1205770 - RNA, 19 nt, Artificial Sequence
  Description of Artificial Sequence: Synthetic oligonucleotide
auaacaggaagccauagau

SEQ ID NO: 1205771 - RNA, 19 nt, Artificial Sequence
  Description of Artificial Sequence: Synthetic oligonucleotide
uuuauuuaaaagacccggu

SEQ ID NO: 1205772 - RNA, 19 nt, Artificial Sequence
  Description of Artificial Sequence: Synthetic oligonucleotide
agauuggcaaguuccacac

SEQ ID NO: 1205773 - RNA, 19 nt, Artificial Sequence
  Description of Artificial Sequence: Synthetic oligonucleotide
caauauuaauuuccgagag

SEQ ID NO: 1205774 - RNA, 19 nt, Artificial Sequence
  Description of Artificial Sequence: Synthetic oligonucleotide
uuuguauguucccagacau

SEQ ID NO: 1205775 - RNA, 19 nt, Artificial Sequence
  Description of Artificial Sequence: Synthetic oligonucleotide
uuauuuaaaagacccgguc

SEQ ID NO: 1205776 - RNA, 19 nt, Artificial Sequence
  Description of Artificial Sequence: Synthetic oligonucleotide
ugcacuuuggaauaaguuc

SEQ ID NO: 1205777 - RNA, 19 nt, Artificial Sequence
  Description of Artificial Sequence: Synthetic oligonucleotide
acagcgaaauucucgcucc

SEQ ID NO: 1205778 - RNA, 19 nt, Artificial Sequence
  Description of Artificial Sequence: Synthetic oligonucleotide
aagggaugcaccuuagcug

SEQ ID NO: 1205779 - RNA, 19 nt, Artificial Sequence
  Description of Artificial Sequence: Synthetic oligonucleotide
uacaaacauaacaggaagc

SEQ ID NO: 1205780 - RNA, 19 nt, Artificial Sequence
  Description of Artificial Sequence: Synthetic oligonucleotide
uagccaauauuaauuuccg

SEQ ID NO: 1205781 - RNA, 19 nt, Artificial Sequence
  Description of Artificial Sequence: Synthetic oligonucleotide
auaucaggggaauuugcac

SEQ ID NO: 1205782 - RNA, 19 nt, Artificial Sequence
  Description of Artificial Sequence: Synthetic oligonucleotide
cuuaaaggauaguauggcc

SEQ ID NO: 1205783 - RNA, 19 nt, Artificial Sequence
  Description of Artificial Sequence: Synthetic oligonucleotide
gauacagcugguucuuugg

SEQ ID NO: 1205784 - RNA, 19 nt, Artificial Sequence
  Description of Artificial Sequence: Synthetic oligonucleotide
gacaagaggcuuuaugacc

SEQ ID NO: 1205785 - RNA, 19 nt, Artificial Sequence
  Description of Artificial Sequence: Synthetic oligonucleotide
ucuucagcggacaauacuc

SEQ ID NO: 1205786 - RNA, 19 nt, Artificial Sequence
  Description of Artificial Sequence: Synthetic oligonucleotide
caauugaacuccaaggcac

SEQ ID NO: 1205787 - RNA, 19 nt, Artificial Sequence
  Description of Artificial Sequence: Synthetic oligonucleotide
agucuuaucagccugugaa

SEQ ID NO: 1205788 - RNA, 19 nt, Artificial Sequence
  Description of Artificial Sequence: Synthetic oligonucleotide
acgaccauggcacuucuac

SEQ ID NO: 1205789 - RNA, 19 nt, Artificial Sequence
  Description of Artificial Sequence: Synthetic oligonucleotide
augauuuguucauauuguc

SEQ ID NO: 1205790 - RNA, 19 nt, Artificial Sequence
  Description of Artificial Sequence: Synthetic oligonucleotide
uauuaguugagcgugugga

SEQ ID NO: 1205791 - RNA, 19 nt, Artificial Sequence
  Description of Artificial Sequence: Synthetic oligonucleotide
guucucuuauguuacauac

SEQ ID NO: 1205792 - RNA, 19 nt, Artificial Sequence
  Description of Artificial Sequence: Synthetic oligonucleotide
guagccaauauuaauuucc

SEQ ID NO: 1205793 - RNA, 19 nt, Artificial Sequence
  Description of Artificial Sequence: Synthetic oligonucleotide
aggauugucagacaaaaua

SEQ ID NO: 1205794 - RNA, 19 nt, Artificial Sequence
  Description of Artificial Sequence: Synthetic oligonucleotide
ucgaacacagccuucagaa

SEQ ID NO: 1205795 - RNA, 19 nt, Artificial Sequence
  Description of Artificial Sequence: Synthetic oligonucleotide
aaacauaacaggaagccau

SEQ ID NO: 1205796 - RNA, 19 nt, Artificial Sequence
  Description of Artificial Sequence: Synthetic oligonucleotide
acaccaaccacccaguagu

SEQ ID NO: 1205797 - RNA, 19 nt, Artificial Sequence
  Description of Artificial Sequence: Synthetic oligonucleotide
gccaauauuaauuuccgag

SEQ ID NO: 1205798 - RNA, 19 nt, Artificial Sequence
  Description of Artificial Sequence: Synthetic oligonucleotide
auggacaccaaccacccag

SEQ ID NO: 1205799 - RNA, 19 nt, Artificial Sequence
  Description of Artificial Sequence: Synthetic oligonucleotide
cuuagaucaaguugacaag

SEQ ID NO: 1205800 - RNA, 19 nt, Artificial Sequence
  Description of Artificial Sequence: Synthetic oligonucleotide
acaagaggcuuuaugaccg

SEQ ID NO: 1205801 - RNA, 19 nt, Artificial Sequence
  Description of Artificial Sequence: Synthetic oligonucleotide
uaaggaagcuuaaaggaua

SEQ ID NO: 1205802 - RNA, 19 nt, Artificial Sequence
  Description of Artificial Sequence: Synthetic oligonucleotide
cuuauguuacauacaggag

SEQ ID NO: 1205803 - RNA, 19 nt, Artificial Sequence
  Description of Artificial Sequence: Synthetic oligonucleotide
cuagcaauugaacuccaag

SEQ ID NO: 1205804 - RNA, 19 nt, Artificial Sequence
  Description of Artificial Sequence: Synthetic oligonucleotide
uguucauauugucuaaaau

SEQ ID NO: 1205805 - RNA, 19 nt, Artificial Sequence
  Description of Artificial Sequence: Synthetic oligonucleotide
cuacuaugaaacauaaaca

SEQ ID NO: 1205806 - RNA, 19 nt, Artificial Sequence
  Description of Artificial Sequence: Synthetic oligonucleotide
uaucaggggaauuugcacu

SEQ ID NO: 1205807 - RNA, 19 nt, Artificial Sequence
  Description of Artificial Sequence: Synthetic oligonucleotide
uuuuguagccaauauuaau

SEQ ID NO: 1205808 - RNA, 19 nt, Artificial Sequence
  Description of Artificial Sequence: Synthetic oligonucleotide
guaagguaggauuuccuug

SEQ ID NO: 1205809 - RNA, 19 nt, Artificial Sequence
  Description of Artificial Sequence: Synthetic oligonucleotide
aaaucgaaccaucccuucu

SEQ ID NO: 1205810 - RNA, 19 nt, Artificial Sequence
  Description of Artificial Sequence: Synthetic oligonucleotide
uuaauuuccgagagcgaga

SEQ ID NO: 1205811 - RNA, 19 nt, Artificial Sequence
  Description of Artificial Sequence: Synthetic oligonucleotide
gaaccgagaaccuuuacaa

SEQ ID NO: 1205812 - RNA, 19 nt, Artificial Sequence
  Description of Artificial Sequence: Synthetic oligonucleotide
uuaugucugcuucaucuga

SEQ ID NO: 1205813 - RNA, 19 nt, Artificial Sequence
  Description of Artificial Sequence: Synthetic oligonucleotide
uucagaguuuugaaggcac

SEQ ID NO: 1205814 - RNA, 19 nt, Artificial Sequence
  Description of Artificial Sequence: Synthetic oligonucleotide
uucccagacauacaaaaua

SEQ ID NO: 1205815 - RNA, 19 nt, Artificial Sequence
  Description of Artificial Sequence: Synthetic oligonucleotide
aagcgcaagcauuuucauc

SEQ ID NO: 1205816 - RNA, 19 nt, Artificial Sequence
  Description of Artificial Sequence: Synthetic oligonucleotide
ucaucgauacagcugguuc

SEQ ID NO: 1205817 - RNA, 19 nt, Artificial Sequence
  Description of Artificial Sequence: Synthetic oligonucleotide
agaaagcgcaagcauuuuc

SEQ ID NO: 1205818 - RNA, 19 nt, Artificial Sequence
  Description of Artificial Sequence: Synthetic oligonucleotide
auauuaguugagcgugugg

SEQ ID NO: 1205819 - RNA, 19 nt, Artificial Sequence
  Description of Artificial Sequence: Synthetic oligonucleotide
cacacagcgaaauucucgc

SEQ ID NO: 1205820 - RNA, 19 nt, Artificial Sequence
  Description of Artificial Sequence: Synthetic oligonucleotide
aauauuaguugagcgugug

SEQ ID NO: 1205821 - RNA, 19 nt, Artificial Sequence
  Description of Artificial Sequence: Synthetic oligonucleotide
agguguaucacuggcaauc

SEQ ID NO: 1205822 - RNA, 19 nt, Artificial Sequence
  Description of Artificial Sequence: Synthetic oligonucleotide
aguccuuagaucaaguuga

SEQ ID NO: 1205823 - RNA, 19 nt, Artificial Sequence
  Description of Artificial Sequence: Synthetic oligonucleotide
accuuuacaagggaugcac

SEQ ID NO: 1205824 - RNA, 19 nt, Artificial Sequence
  Description of Artificial Sequence: Synthetic oligonucleotide
auauugucuaaaauauuag

SEQ ID NO: 1205825 - RNA, 19 nt, Artificial Sequence
  Description of Artificial Sequence: Synthetic oligonucleotide
gauugucagacaaaauaug

SEQ ID NO: 1205826 - RNA, 19 nt, Artificial Sequence
  Description of Artificial Sequence: Synthetic oligonucleotide
ucauggacaccaaccaccc

SEQ ID NO: 1205827 - RNA, 19 nt, Artificial Sequence
  Description of Artificial Sequence: Synthetic oligonucleotide
aagguaguugugaaacagg

SEQ ID NO: 1205828 - RNA, 19 nt, Artificial Sequence
  Description of Artificial Sequence: Synthetic oligonucleotide
aguagucaauaauaacuca

SEQ ID NO: 1205829 - RNA, 19 nt, Artificial Sequence
  Description of Artificial Sequence: Synthetic oligonucleotide
uuaagcauucgaacacagc

SEQ ID NO: 1205830 - RNA, 19 nt, Artificial Sequence
  Description of Artificial Sequence: Synthetic oligonucleotide
auaauaacucacucgggaa

SEQ ID NO: 1205831 - RNA, 19 nt, Artificial Sequence
  Description of Artificial Sequence: Synthetic oligonucleotide
aaccgagaaccuuuacaag

SEQ ID NO: 1205832 - RNA, 19 nt, Artificial Sequence
  Description of Artificial Sequence: Synthetic oligonucleotide
cggacaauacucuaaaucg

SEQ ID NO: 1205833 - RNA, 19 nt, Artificial Sequence
  Description of Artificial Sequence: Synthetic oligonucleotide
agaagcauauuuaauggcu

SEQ ID NO: 1205834 - RNA, 19 nt, Artificial Sequence
  Description of Artificial Sequence: Synthetic oligonucleotide
acucuaaaucgaaccaucc

SEQ ID NO: 1205835 - RNA, 19 nt, Artificial Sequence
  Description of Artificial Sequence: Synthetic oligonucleotide
cucuguuaagcauucgaac

SEQ ID NO: 1205836 - RNA, 19 nt, Artificial Sequence
  Description of Artificial Sequence: Synthetic oligonucleotide
aagcauauuuaauggcuaa

SEQ ID NO: 1205837 - RNA, 19 nt, Artificial Sequence
  Description of Artificial Sequence: Synthetic oligonucleotide
cucuaaaucgaaccauccc

SEQ ID NO: 1205838 - RNA, 19 nt, Artificial Sequence
  Description of Artificial Sequence: Synthetic oligonucleotide
cugacaauaaggaagcuua

SEQ ID NO: 1205839 - RNA, 19 nt, Artificial Sequence
  Description of Artificial Sequence: Synthetic oligonucleotide
gaaccuuuacaagggaugc

SEQ ID NO: 1205840 - RNA, 19 nt, Artificial Sequence
  Description of Artificial Sequence: Synthetic oligonucleotide
uacacauuggugcccauau

SEQ ID NO: 1205841 - RNA, 19 nt, Artificial Sequence
  Description of Artificial Sequence: Synthetic oligonucleotide
uacucuaaaucgaaccauc

SEQ ID NO: 1205842 - RNA, 19 nt, Artificial Sequence
  Description of Artificial Sequence: Synthetic oligonucleotide
  modified_base (8)..(8): a, c, u, g, unknown or other
aaaccccngccauguaagg

SEQ ID NO: 1205843 - RNA, 19 nt, Artificial Sequence
  Description of Artificial Sequence: Synthetic oligonucleotide
uuccacacagcgaaauucu

SEQ ID NO: 1205844 - RNA, 19 nt, Artificial Sequence
  Description of Artificial Sequence: Synthetic oligonucleotide
cuguuaagcauucgaacac

SEQ ID NO: 1205845 - RNA, 19 nt, Artificial Sequence
  Description of Artificial Sequence: Synthetic oligonucleotide
acaagaaaguagucaauaa

SEQ ID NO: 1205846 - RNA, 19 nt, Artificial Sequence
  Description of Artificial Sequence: Synthetic oligonucleotide
aaggaagcuuaaaggauag

SEQ ID NO: 1205847 - RNA, 19 nt, Artificial Sequence
  Description of Artificial Sequence: Synthetic oligonucleotide
uuuaauggcuaaguucaca

SEQ ID NO: 1205848 - RNA, 19 nt, Artificial Sequence
  Description of Artificial Sequence: Synthetic oligonucleotide
caggaguccauguauuccc

SEQ ID NO: 1205849 - RNA, 19 nt, Artificial Sequence
  Description of Artificial Sequence: Synthetic oligonucleotide
gcgagaagcauauuuaaug

SEQ ID NO: 1205850 - RNA, 19 nt, Artificial Sequence
  Description of Artificial Sequence: Synthetic oligonucleotide
guugacaagaaaguaguca

SEQ ID NO: 1205851 - RNA, 19 nt, Artificial Sequence
  Description of Artificial Sequence: Synthetic oligonucleotide
ggcacuucuacuaugaaac

SEQ ID NO: 1205852 - RNA, 19 nt, Artificial Sequence
  Description of Artificial Sequence: Synthetic oligonucleotide
uauuaauuuccgagagcga

SEQ ID NO: 1205853 - RNA, 19 nt, Artificial Sequence
  Description of Artificial Sequence: Synthetic oligonucleotide
uuuauuaugucugcuucau

SEQ ID NO: 1205854 - RNA, 19 nt, Artificial Sequence
  Description of Artificial Sequence: Synthetic oligonucleotide
  modified_base (10)..(10): a, c, u, g, unknown or other
agaaaccccngccauguaa

SEQ ID NO: 1205855 - RNA, 19 nt, Artificial Sequence
  Description of Artificial Sequence: Synthetic oligonucleotide
acaauacucuaaaucgaac

SEQ ID NO: 1205856 - RNA, 19 nt, Artificial Sequence
  Description of Artificial Sequence: Synthetic oligonucleotide
  modified_base (9)..(9): a, c, u, g, unknown or other
gaaaccccngccauguaag

SEQ ID NO: 1205857 - RNA, 19 nt, Artificial Sequence
  Description of Artificial Sequence: Synthetic oligonucleotide
uaaaagacccggucuguac

SEQ ID NO: 1205858 - RNA, 19 nt, Artificial Sequence
  Description of Artificial Sequence: Synthetic oligonucleotide
uguaagguaggauuuccuu

SEQ ID NO: 1205859 - RNA, 19 nt, Artificial Sequence
  Description of Artificial Sequence: Synthetic oligonucleotide
auaguauggccacggcagg

SEQ ID NO: 1205860 - RNA, 19 nt, Artificial Sequence
  Description of Artificial Sequence: Synthetic oligonucleotide
acuucagguguaucacugg

SEQ ID NO: 1205861 - RNA, 19 nt, Artificial Sequence
  Description of Artificial Sequence: Synthetic oligonucleotide
uaaguucugcccgugguug

SEQ ID NO: 1205862 - RNA, 19 nt, Artificial Sequence
  Description of Artificial Sequence: Synthetic oligonucleotide
uuuacuuccucagucuuau

SEQ ID NO: 1205863 - RNA, 19 nt, Artificial Sequence
  Description of Artificial Sequence: Synthetic oligonucleotide
agagggucgccaugcaaac

SEQ ID NO: 1205864 - RNA, 19 nt, Artificial Sequence
  Description of Artificial Sequence: Synthetic oligonucleotide
gucgaagucugacaauaag

SEQ ID NO: 1205865 - RNA, 19 nt, Artificial Sequence
  Description of Artificial Sequence: Synthetic oligonucleotide
ugguucuuuggaauugacu

SEQ ID NO: 1205866 - RNA, 19 nt, Artificial Sequence
  Description of Artificial Sequence: Synthetic oligonucleotide
uuaagagggguggacuucc

SEQ ID NO: 1205867 - RNA, 19 nt, Artificial Sequence
  Description of Artificial Sequence: Synthetic oligonucleotide
gaaagcgcaagcauuuuca

SEQ ID NO: 1205868 - RNA, 19 nt, Artificial Sequence
  Description of Artificial Sequence: Synthetic oligonucleotide
ggaaauaggaugcugcaga

SEQ ID NO: 1205869 - RNA, 19 nt, Artificial Sequence
  Description of Artificial Sequence: Synthetic oligonucleotide
uuuccgagagcgagaagca

SEQ ID NO: 1205870 - RNA, 19 nt, Artificial Sequence
  Description of Artificial Sequence: Synthetic oligonucleotide
acuaugaaacauaaacaga

SEQ ID NO: 1205871 - RNA, 19 nt, Artificial Sequence
  Description of Artificial Sequence: Synthetic oligonucleotide
uggaacucaucgauacagc

SEQ ID NO: 1205872 - RNA, 19 nt, Artificial Sequence
  Description of Artificial Sequence: Synthetic oligonucleotide
uuauuugcugcucgauuaa

SEQ ID NO: 1205873 - RNA, 19 nt, Artificial Sequence
  Description of Artificial Sequence: Synthetic oligonucleotide
ugaucagauuuucccuugc

SEQ ID NO: 1205874 - RNA, 19 nt, Artificial Sequence
  Description of Artificial Sequence: Synthetic oligonucleotide
uugcaguguucucuuaugu

SEQ ID NO: 1205875 - RNA, 19 nt, Artificial Sequence
  Description of Artificial Sequence: Synthetic oligonucleotide
uguauucccaagcccucug

SEQ ID NO: 1205876 - RNA, 19 nt, Artificial Sequence
  Description of Artificial Sequence: Synthetic oligonucleotide
ucauuagauuggcaaguuc

SEQ ID NO: 1205877 - RNA, 19 nt, Artificial Sequence
  Description of Artificial Sequence: Synthetic oligonucleotide
ugcaccuuagcugcugggg

SEQ ID NO: 1205878 - RNA, 19 nt, Artificial Sequence
  Description of Artificial Sequence: Synthetic oligonucleotide
auaacucacucgggaagcc

SEQ ID NO: 1205879 - RNA, 19 nt, Artificial Sequence
  Description of Artificial Sequence: Synthetic oligonucleotide
acauacaaaauaucucauu

SEQ ID NO: 1205880 - RNA, 19 nt, Artificial Sequence
  Description of Artificial Sequence: Synthetic oligonucleotide
ucagcggacaauacucuaa

SEQ ID NO: 1205881 - RNA, 19 nt, Artificial Sequence
  Description of Artificial Sequence: Synthetic oligonucleotide
uggcugcuagagaagacug

SEQ ID NO: 1205882 - RNA, 19 nt, Artificial Sequence
  Description of Artificial Sequence: Synthetic oligonucleotide
uuguaagaggaagaggguc

SEQ ID NO: 1205883 - RNA, 19 nt, Artificial Sequence
  Description of Artificial Sequence: Synthetic oligonucleotide
aaagcgcaagcauuuucau

SEQ ID NO: 1205884 - RNA, 19 nt, Artificial Sequence
  Description of Artificial Sequence: Synthetic oligonucleotide
aggauaguauggccacggc

SEQ ID NO: 1205885 - RNA, 19 nt, Artificial Sequence
  Description of Artificial Sequence: Synthetic oligonucleotide
cuucacuucagguguauca

SEQ ID NO: 1205886 - RNA, 19 nt, Artificial Sequence
  Description of Artificial Sequence: Synthetic oligonucleotide
uggaaauaggaugcugcag

SEQ ID NO: 1205887 - RNA, 19 nt, Artificial Sequence
  Description of Artificial Sequence: Synthetic oligonucleotide
uaguugagcguguggaacu

SEQ ID NO: 1205888 - RNA, 19 nt, Artificial Sequence
  Description of Artificial Sequence: Synthetic oligonucleotide
cacuucagguguaucacug

SEQ ID NO: 1205889 - RNA, 19 nt, Artificial Sequence
  Description of Artificial Sequence: Synthetic oligonucleotide
agacccggucuguacaaac

SEQ ID NO: 1205890 - RNA, 19 nt, Artificial Sequence
  Description of Artificial Sequence: Synthetic oligonucleotide
agucauuagauuggcaagu

SEQ ID NO: 1205891 - RNA, 19 nt, Artificial Sequence
  Description of Artificial Sequence: Synthetic oligonucleotide
aaauauuaguugagcgugu

SEQ ID NO: 1205892 - RNA, 19 nt, Artificial Sequence
  Description of Artificial Sequence: Synthetic oligonucleotide
aagacugcaccugauuuaa

SEQ ID NO: 1205893 - RNA, 19 nt, Artificial Sequence
  Description of Artificial Sequence: Synthetic oligonucleotide
caguguucucuuauguuac

SEQ ID NO: 1205894 - RNA, 19 nt, Artificial Sequence
  Description of Artificial Sequence: Synthetic oligonucleotide
uucacuucagguguaucac

SEQ ID NO: 1205895 - RNA, 19 nt, Artificial Sequence
  Description of Artificial Sequence: Synthetic oligonucleotide
agugaucagauuuucccuu

SEQ ID NO: 1205896 - RNA, 19 nt, Artificial Sequence
  Description of Artificial Sequence: Synthetic oligonucleotide
cgagaagcauauuuaaugg

SEQ ID NO: 1205897 - RNA, 19 nt, Artificial Sequence
  Description of Artificial Sequence: Synthetic oligonucleotide
guaaucaagguaguuguga

SEQ ID NO: 1205898 - RNA, 19 nt, Artificial Sequence
  Description of Artificial Sequence: Synthetic oligonucleotide
cauaucaggggaauuugca

SEQ ID NO: 1205899 - RNA, 19 nt, Artificial Sequence
  Description of Artificial Sequence: Synthetic oligonucleotide
ugcccauauuaaaagccac

SEQ ID NO: 1205900 - RNA, 19 nt, Artificial Sequence
  Description of Artificial Sequence: Synthetic oligonucleotide
uuuaaaagacccggucugu

SEQ ID NO: 1205901 - RNA, 19 nt, Artificial Sequence
  Description of Artificial Sequence: Synthetic oligonucleotide
uauuuacacauuggugccc

SEQ ID NO: 1205902 - RNA, 19 nt, Artificial Sequence
  Description of Artificial Sequence: Synthetic oligonucleotide
uggaauaaguucugcccgu

SEQ ID NO: 1205903 - RNA, 19 nt, Artificial Sequence
  Description of Artificial Sequence: Synthetic oligonucleotide
aaagacccggucuguacaa

SEQ ID NO: 1205904 - RNA, 19 nt, Artificial Sequence
  Description of Artificial Sequence: Synthetic oligonucleotide
uaauuuccgagagcgagaa

SEQ ID NO: 1205905 - RNA, 19 nt, Artificial Sequence
  Description of Artificial Sequence: Synthetic oligonucleotide
guuaagcauucgaacacag

SEQ ID NO: 1205906 - RNA, 19 nt, Artificial Sequence
  Description of Artificial Sequence: Synthetic oligonucleotide
uacauacaggaguccaugu

SEQ ID NO: 1205907 - RNA, 19 nt, Artificial Sequence
  Description of Artificial Sequence: Synthetic oligonucleotide
uguucucuuauguuacaua

SEQ ID NO: 1205908 - RNA, 19 nt, Artificial Sequence
  Description of Artificial Sequence: Synthetic oligonucleotide
cuugcaguguucucuuaug

SEQ ID NO: 1205909 - RNA, 19 nt, Artificial Sequence
  Description of Artificial Sequence: Synthetic oligonucleotide
auaaggaagcuuaaaggau

SEQ ID NO: 1205910 - RNA, 19 nt, Artificial Sequence
  Description of Artificial Sequence: Synthetic oligonucleotide
aagaggcuuuaugaccggg

SEQ ID NO: 1205911 - RNA, 19 nt, Artificial Sequence
  Description of Artificial Sequence: Synthetic oligonucleotide
uaaaucgaaccaucccuuc

SEQ ID NO: 1205912 - RNA, 19 nt, Artificial Sequence
  Description of Artificial Sequence: Synthetic oligonucleotide
uggcacuucuacuaugaaa

SEQ ID NO: 1205913 - RNA, 19 nt, Artificial Sequence
  Description of Artificial Sequence: Synthetic oligonucleotide
guuuacccguccuuggcug

SEQ ID NO: 1205914 - RNA, 19 nt, Artificial Sequence
  Description of Artificial Sequence: Synthetic oligonucleotide
aguauggccacggcaggac

SEQ ID NO: 1205915 - RNA, 19 nt, Artificial Sequence
  Description of Artificial Sequence: Synthetic oligonucleotide
gugaaacaggaccgaaugc

SEQ ID NO: 1205916 - RNA, 19 nt, Artificial Sequence
  Description of Artificial Sequence: Synthetic oligonucleotide
gacaauacucuaaaucgaa

SEQ ID NO: 1205917 - RNA, 19 nt, Artificial Sequence
  Description of Artificial Sequence: Synthetic oligonucleotide
agggaguaccuucagcaga

SEQ ID NO: 1205918 - RNA, 19 nt, Artificial Sequence
  Description of Artificial Sequence: Synthetic oligonucleotide
ugacaauaaggaagcuuaa

SEQ ID NO: 1205919 - RNA, 19 nt, Artificial Sequence
  Description of Artificial Sequence: Synthetic oligonucleotide
auuaguugagcguguggaa

SEQ ID NO: 1205920 - RNA, 19 nt, Artificial Sequence
  Description of Artificial Sequence: Synthetic oligonucleotide
auguuacauacaggagucc

SEQ ID NO: 1205921 - RNA, 19 nt, Artificial Sequence
  Description of Artificial Sequence: Synthetic oligonucleotide
aagagggucgccaugcaaa

SEQ ID NO: 1205922 - RNA, 19 nt, Artificial Sequence
  Description of Artificial Sequence: Synthetic oligonucleotide
uuauuaugucugcuucauc

SEQ ID NO: 1205923 - RNA, 19 nt, Artificial Sequence
  Description of Artificial Sequence: Synthetic oligonucleotide
ggaauugacuagcaccuug

SEQ ID NO: 1205924 - RNA, 19 nt, Artificial Sequence
  Description of Artificial Sequence: Synthetic oligonucleotide
auuagauuggcaaguucca

SEQ ID NO: 1205925 - RNA, 19 nt, Artificial Sequence
  Description of Artificial Sequence: Synthetic oligonucleotide
uuggcaaguuccacacagc

SEQ ID NO: 1205926 - RNA, 19 nt, Artificial Sequence
  Description of Artificial Sequence: Synthetic oligonucleotide
aauuuccgagagcgagaag

SEQ ID NO: 1205927 - RNA, 19 nt, Artificial Sequence
  Description of Artificial Sequence: Synthetic oligonucleotide
ggaccgaaugccaaaauug

SEQ ID NO: 1205928 - RNA, 19 nt, Artificial Sequence
  Description of Artificial Sequence: Synthetic oligonucleotide
gaauugacuagcaccuuga

SEQ ID NO: 1205929 - RNA, 19 nt, Artificial Sequence
  Description of Artificial Sequence: Synthetic oligonucleotide
acuagcaccuugaaggggu

SEQ ID NO: 1205930 - RNA, 19 nt, Artificial Sequence
  Description of Artificial Sequence: Synthetic oligonucleotide
uccgagagcgagaagcaua

SEQ ID NO: 1205931 - RNA, 19 nt, Artificial Sequence
  Description of Artificial Sequence: Synthetic oligonucleotide
gcaaguuccacacagcgaa

SEQ ID NO: 1205932 - RNA, 19 nt, Artificial Sequence
  Description of Artificial Sequence: Synthetic oligonucleotide
  modified_base (7)..(7): a, c, u, g, unknown or other
aaccccngccauguaaggu

SEQ ID NO: 1205933 - RNA, 19 nt, Artificial Sequence
  Description of Artificial Sequence: Synthetic oligonucleotide
uaacagggaguaccuucag

SEQ ID NO: 1205934 - RNA, 19 nt, Artificial Sequence
  Description of Artificial Sequence: Synthetic oligonucleotide
cacagcgaaauucucgcuc

SEQ ID NO: 1205935 - RNA, 19 nt, Artificial Sequence
  Description of Artificial Sequence: Synthetic oligonucleotide
ggugcccauauuaaaagcc

SEQ ID NO: 1205936 - RNA, 19 nt, Artificial Sequence
  Description of Artificial Sequence: Synthetic oligonucleotide
auaacagggaguaccuuca

SEQ ID NO: 1205937 - RNA, 19 nt, Artificial Sequence
  Description of Artificial Sequence: Synthetic oligonucleotide
uauggccacggcaggacgu

SEQ ID NO: 1205938 - RNA, 19 nt, Artificial Sequence
  Description of Artificial Sequence: Synthetic oligonucleotide
cauggcacuucuacuauga

SEQ ID NO: 1205939 - RNA, 19 nt, Artificial Sequence
  Description of Artificial Sequence: Synthetic oligonucleotide
ugaagggguuuacccgucc

SEQ ID NO: 1205940 - RNA, 19 nt, Artificial Sequence
  Description of Artificial Sequence: Synthetic oligonucleotide
ucacuucagguguaucacu

SEQ ID NO: 1205941 - RNA, 19 nt, Artificial Sequence
  Description of Artificial Sequence: Synthetic oligonucleotide
auuugcacuuuggaauaag

SEQ ID NO: 1205942 - RNA, 19 nt, Artificial Sequence
  Description of Artificial Sequence: Synthetic oligonucleotide
gaagacugcaccugauuua

SEQ ID NO: 1205943 - RNA, 19 nt, Artificial Sequence
  Description of Artificial Sequence: Synthetic oligonucleotide
caauucagcugccuuucug

SEQ ID NO: 1205944 - RNA, 19 nt, Artificial Sequence
  Description of Artificial Sequence: Synthetic oligonucleotide
uuuacccguccuuggcugc

SEQ ID NO: 1205945 - RNA, 19 nt, Artificial Sequence
  Description of Artificial Sequence: Synthetic oligonucleotide
uauuucgcuucuucacuuc

SEQ ID NO: 1205946 - RNA, 19 nt, Artificial Sequence
  Description of Artificial Sequence: Synthetic oligonucleotide
acuucuacuaugaaacaua

SEQ ID NO: 1205947 - RNA, 19 nt, Artificial Sequence
  Description of Artificial Sequence: Synthetic oligonucleotide
aguugacaagaaaguaguc

SEQ ID NO: 1205948 - RNA, 19 nt, Artificial Sequence
  Description of Artificial Sequence: Synthetic oligonucleotide
ugucgaagucugacaauaa

SEQ ID NO: 1205949 - RNA, 19 nt, Artificial Sequence
  Description of Artificial Sequence: Synthetic oligonucleotide
agaggcuuuaugaccgggg

SEQ ID NO: 1205950 - RNA, 19 nt, Artificial Sequence
  Description of Artificial Sequence: Synthetic oligonucleotide
ccaauauuaauuuccgaga

SEQ ID NO: 1205951 - RNA, 19 nt, Artificial Sequence
  Description of Artificial Sequence: Synthetic oligonucleotide
ccgaaugccaaaauuguuc

SEQ ID NO: 1205952 - RNA, 19 nt, Artificial Sequence
  Description of Artificial Sequence: Synthetic oligonucleotide
gacuagcaccuugaagggg

SEQ ID NO: 1205953 - RNA, 19 nt, Artificial Sequence
  Description of Artificial Sequence: Synthetic oligonucleotide
auacucuaaaucgaaccau

SEQ ID NO: 1205954 - RNA, 19 nt, Artificial Sequence
  Description of Artificial Sequence: Synthetic oligonucleotide
ucgauuaagagggguggac

SEQ ID NO: 1205955 - RNA, 19 nt, Artificial Sequence
  Description of Artificial Sequence: Synthetic oligonucleotide
gagcgagaagcauauuuaa

SEQ ID NO: 1205956 - RNA, 19 nt, Artificial Sequence
  Description of Artificial Sequence: Synthetic oligonucleotide
aggaccgaaugccaaaauu

SEQ ID NO: 1205957 - RNA, 19 nt, Artificial Sequence
  Description of Artificial Sequence: Synthetic oligonucleotide
ccgagaaccuuuacaaggg

SEQ ID NO: 1205958 - RNA, 19 nt, Artificial Sequence
  Description of Artificial Sequence: Synthetic oligonucleotide
ugcaguguucucuuauguu

SEQ ID NO: 1205959 - RNA, 19 nt, Artificial Sequence
  Description of Artificial Sequence: Synthetic oligonucleotide
agccaauauuaauuuccga

SEQ ID NO: 1205960 - RNA, 19 nt, Artificial Sequence
  Description of Artificial Sequence: Synthetic oligonucleotide
auccacauaacagggagua

SEQ ID NO: 1205961 - RNA, 19 nt, Artificial Sequence
  Description of Artificial Sequence: Synthetic oligonucleotide
ggacaagaggcuuuaugac

SEQ ID NO: 1205962 - RNA, 19 nt, Artificial Sequence
  Description of Artificial Sequence: Synthetic oligonucleotide
acauacaggaguccaugua

SEQ ID NO: 1205963 - RNA, 19 nt, Artificial Sequence
  Description of Artificial Sequence: Synthetic oligonucleotide
cgaaugccaaaauuguucc

SEQ ID NO: 1205964 - RNA, 19 nt, Artificial Sequence
  Description of Artificial Sequence: Synthetic oligonucleotide
agggucgccaugcaaacuu

SEQ ID NO: 1205965 - RNA, 19 nt, Artificial Sequence
  Description of Artificial Sequence: Synthetic oligonucleotide
ccacacagcgaaauucucg

SEQ ID NO: 1205966 - RNA, 19 nt, Artificial Sequence
  Description of Artificial Sequence: Synthetic oligonucleotide
ucaaaaguucuugcugcuc

SEQ ID NO: 1205967 - RNA, 19 nt, Artificial Sequence
  Description of Artificial Sequence: Synthetic oligonucleotide
uuaaaagacccggucugua

SEQ ID NO: 1205968 - RNA, 19 nt, Artificial Sequence
  Description of Artificial Sequence: Synthetic oligonucleotide
cagggaguaccuucagcag

SEQ ID NO: 1205969 - RNA, 19 nt, Artificial Sequence
  Description of Artificial Sequence: Synthetic oligonucleotide
ucauuauuugcugcucgau

SEQ ID NO: 1205970 - RNA, 19 nt, Artificial Sequence
  Description of Artificial Sequence: Synthetic oligonucleotide
guaagaggaagagggucgc

SEQ ID NO: 1205971 - RNA, 19 nt, Artificial Sequence
  Description of Artificial Sequence: Synthetic oligonucleotide
gaacagucucuucucuguc

SEQ ID NO: 1205972 - RNA, 19 nt, Artificial Sequence
  Description of Artificial Sequence: Synthetic oligonucleotide
aaccuuuacaagggaugca

SEQ ID NO: 1205973 - RNA, 19 nt, Artificial Sequence
  Description of Artificial Sequence: Synthetic oligonucleotide
ugccaauucagcugccuuu

SEQ ID NO: 1205974 - RNA, 19 nt, Artificial Sequence
  Description of Artificial Sequence: Synthetic oligonucleotide
gagagcgagaagcauauuu

SEQ ID NO: 1205975 - RNA, 19 nt, Artificial Sequence
  Description of Artificial Sequence: Synthetic oligonucleotide
caagaggcuuuaugaccgg

SEQ ID NO: 1205976 - RNA, 19 nt, Artificial Sequence
  Description of Artificial Sequence: Synthetic oligonucleotide
ucagucuuaucagccugug

SEQ ID NO: 1205977 - RNA, 19 nt, Artificial Sequence
  Description of Artificial Sequence: Synthetic oligonucleotide
aaccaucccuucuuuuauu

SEQ ID NO: 1205978 - RNA, 19 nt, Artificial Sequence
  Description of Artificial Sequence: Synthetic oligonucleotide
aggggaauuugcacuuugg

SEQ ID NO: 1205979 - RNA, 19 nt, Artificial Sequence
  Description of Artificial Sequence: Synthetic oligonucleotide
gauuuaagagcuggcauau

SEQ ID NO: 1205980 - RNA, 19 nt, Artificial Sequence
  Description of Artificial Sequence: Synthetic oligonucleotide
cacucgggaagccaacgac

SEQ ID NO: 1205981 - RNA, 19 nt, Artificial Sequence
  Description of Artificial Sequence: Synthetic oligonucleotide
aacauaacaggaagccaua

SEQ ID NO: 1205982 - RNA, 19 nt, Artificial Sequence
  Description of Artificial Sequence: Synthetic oligonucleotide
ugcucuuuuacugccugau

SEQ ID NO: 1205983 - RNA, 19 nt, Artificial Sequence
  Description of Artificial Sequence: Synthetic oligonucleotide
aagggguuuacccguccuu

SEQ ID NO: 1205984 - RNA, 19 nt, Artificial Sequence
  Description of Artificial Sequence: Synthetic oligonucleotide
agagcgagaagcauauuua

SEQ ID NO: 1205985 - RNA, 19 nt, Artificial Sequence
  Description of Artificial Sequence: Synthetic oligonucleotide
uggaugauuuguucauauu

SEQ ID NO: 1205986 - RNA, 19 nt, Artificial Sequence
  Description of Artificial Sequence: Synthetic oligonucleotide
uuguauguucccagacaua

SEQ ID NO: 1205987 - RNA, 19 nt, Artificial Sequence
  Description of Artificial Sequence: Synthetic oligonucleotide
aagggugggagggaaccga

SEQ ID NO: 1205988 - RNA, 19 nt, Artificial Sequence
  Description of Artificial Sequence: Synthetic oligonucleotide
ucugucgaagucugacaau

SEQ ID NO: 1205989 - RNA, 19 nt, Artificial Sequence
  Description of Artificial Sequence: Synthetic oligonucleotide
gcucgauuaagaggggugg

SEQ ID NO: 1205990 - RNA, 19 nt, Artificial Sequence
  Description of Artificial Sequence: Synthetic oligonucleotide
accaucccuucuuuuauua

SEQ ID NO: 1205991 - RNA, 19 nt, Artificial Sequence
  Description of Artificial Sequence: Synthetic oligonucleotide
augcaccuuagcugcuggg

SEQ ID NO: 1205992 - RNA, 19 nt, Artificial Sequence
  Description of Artificial Sequence: Synthetic oligonucleotide
uucagcggacaauacucua

SEQ ID NO: 1205993 - RNA, 19 nt, Artificial Sequence
  Description of Artificial Sequence: Synthetic oligonucleotide
ggaagcuuaaaggauagua

SEQ ID NO: 1205994 - RNA, 19 nt, Artificial Sequence
  Description of Artificial Sequence: Synthetic oligonucleotide
cauucgaacacagccuuca

SEQ ID NO: 1205995 - RNA, 19 nt, Artificial Sequence
  Description of Artificial Sequence: Synthetic oligonucleotide
uccuuagaucaaguugaca

SEQ ID NO: 1205996 - RNA, 19 nt, Artificial Sequence
  Description of Artificial Sequence: Synthetic oligonucleotide
cucgggaagccaacgacca

SEQ ID NO: 1205997 - RNA, 19 nt, Artificial Sequence
  Description of Artificial Sequence: Synthetic oligonucleotide
gauuaagagggguggacuu

SEQ ID NO: 1205998 - RNA, 19 nt, Artificial Sequence
  Description of Artificial Sequence: Synthetic oligonucleotide
aguugugaaacaggaccga

SEQ ID NO: 1205999 - RNA, 19 nt, Artificial Sequence
  Description of Artificial Sequence: Synthetic oligonucleotide
cucacucgggaagccaacg

SEQ ID NO: 1206000 - RNA, 19 nt, Artificial Sequence
  Description of Artificial Sequence: Synthetic oligonucleotide
  modified_base (6)..(6): a, c, u, g, unknown or other
accccngccauguaaggua

SEQ ID NO: 1206001 - RNA, 19 nt, Artificial Sequence
  Description of Artificial Sequence: Synthetic oligonucleotide
uuguugguccaugccuucc

SEQ ID NO: 1206002 - RNA, 19 nt, Artificial Sequence
  Description of Artificial Sequence: Synthetic oligonucleotide
uggccuuguugguccaugc

SEQ ID NO: 1206003 - RNA, 19 nt, Artificial Sequence
  Description of Artificial Sequence: Synthetic oligonucleotide
ccagacauacaaaauaucu

SEQ ID NO: 1206004 - RNA, 19 nt, Artificial Sequence
  Description of Artificial Sequence: Synthetic oligonucleotide
accauggcacuucuacuau

SEQ ID NO: 1206005 - RNA, 19 nt, Artificial Sequence
  Description of Artificial Sequence: Synthetic oligonucleotide
agaauccacauaacaggga

SEQ ID NO: 1206006 - RNA, 19 nt, Artificial Sequence
  Description of Artificial Sequence: Synthetic oligonucleotide
cauacaggaguccauguau

SEQ ID NO: 1206007 - RNA, 19 nt, Artificial Sequence
  Description of Artificial Sequence: Synthetic oligonucleotide
gcaguguucucuuauguua

SEQ ID NO: 1206008 - RNA, 19 nt, Artificial Sequence
  Description of Artificial Sequence: Synthetic oligonucleotide
agcgaaauucucgcuccag

SEQ ID NO: 1206009 - RNA, 19 nt, Artificial Sequence
  Description of Artificial Sequence: Synthetic oligonucleotide
caggggaauuugcacuuug

SEQ ID NO: 1206010 - RNA, 19 nt, Artificial Sequence
  Description of Artificial Sequence: Synthetic oligonucleotide
uaguauggccacggcagga

SEQ ID NO: 1206011 - RNA, 19 nt, Artificial Sequence
  Description of Artificial Sequence: Synthetic oligonucleotide
gaagagggucgccaugcaa

SEQ ID NO: 1206012 - RNA, 19 nt, Artificial Sequence
  Description of Artificial Sequence: Synthetic oligonucleotide
gggguuuacccguccuugg

SEQ ID NO: 1206013 - RNA, 19 nt, Artificial Sequence
  Description of Artificial Sequence: Synthetic oligonucleotide
caucgauacagcugguucu

SEQ ID NO: 1206014 - RNA, 19 nt, Artificial Sequence
  Description of Artificial Sequence: Synthetic oligonucleotide
gaccgaaugccaaaauugu

SEQ ID NO: 1206015 - RNA, 19 nt, Artificial Sequence
  Description of Artificial Sequence: Synthetic oligonucleotide
ugccccaaucuagcaauug

SEQ ID NO: 1206016 - RNA, 19 nt, Artificial Sequence
  Description of Artificial Sequence: Synthetic oligonucleotide
gaaccaucccuucuuuuau

SEQ ID NO: 1206017 - RNA, 19 nt, Artificial Sequence
  Description of Artificial Sequence: Synthetic oligonucleotide
caagaaagcgcaagcauuu

SEQ ID NO: 1206018 - RNA, 19 nt, Artificial Sequence
  Description of Artificial Sequence: Synthetic oligonucleotide
aagaaagcgcaagcauuuu

SEQ ID NO: 1206019 - RNA, 19 nt, Artificial Sequence
  Description of Artificial Sequence: Synthetic oligonucleotide
gguauuucgcuucuucacu

SEQ ID NO: 1206020 - RNA, 19 nt, Artificial Sequence
  Description of Artificial Sequence: Synthetic oligonucleotide
ggacaauacucuaaaucga

SEQ ID NO: 1206021 - RNA, 19 nt, Artificial Sequence
  Description of Artificial Sequence: Synthetic oligonucleotide
ggcauaucaggggaauuug

SEQ ID NO: 1206022 - RNA, 19 nt, Artificial Sequence
  Description of Artificial Sequence: Synthetic oligonucleotide
cugauuuaagagcuggcau

SEQ ID NO: 1206023 - RNA, 19 nt, Artificial Sequence
  Description of Artificial Sequence: Synthetic oligonucleotide
cacauaacagggaguaccu

SEQ ID NO: 1206024 - RNA, 19 nt, Artificial Sequence
  Description of Artificial Sequence: Synthetic oligonucleotide
acucacucgggaagccaac

SEQ ID NO: 1206025 - RNA, 19 nt, Artificial Sequence
  Description of Artificial Sequence: Synthetic oligonucleotide
agcgagaagcauauuuaau

SEQ ID NO: 1206026 - RNA, 19 nt, Artificial Sequence
  Description of Artificial Sequence: Synthetic oligonucleotide
cuaaaucgaaccaucccuu

SEQ ID NO: 1206027 - RNA, 19 nt, Artificial Sequence
  Description of Artificial Sequence: Synthetic oligonucleotide
ccaaucuagcaauugaacu

SEQ ID NO: 1206028 - RNA, 19 nt, Artificial Sequence
  Description of Artificial Sequence: Synthetic oligonucleotide
cugucgaagucugacaaua

SEQ ID NO: 1206029 - RNA, 19 nt, Artificial Sequence
  Description of Artificial Sequence: Synthetic oligonucleotide
agcccucuguuaagcauuc

SEQ ID NO: 1206030 - RNA, 19 nt, Artificial Sequence
  Description of Artificial Sequence: Synthetic oligonucleotide
ucgaaccaucccuucuuuu

SEQ ID NO: 1206031 - RNA, 19 nt, Artificial Sequence
  Description of Artificial Sequence: Synthetic oligonucleotide
gcauaucaggggaauuugc

SEQ ID NO: 1206032 - RNA, 19 nt, Artificial Sequence
  Description of Artificial Sequence: Synthetic oligonucleotide
gcugcuagagaagacugca

SEQ ID NO: 1206033 - RNA, 19 nt, Artificial Sequence
  Description of Artificial Sequence: Synthetic oligonucleotide
acaggaccgaaugccaaaa

SEQ ID NO: 1206034 - RNA, 19 nt, Artificial Sequence
  Description of Artificial Sequence: Synthetic oligonucleotide
ucccuugcaguguucucuu

SEQ ID NO: 1206035 - RNA, 19 nt, Artificial Sequence
  Description of Artificial Sequence: Synthetic oligonucleotide
aucgauacagcugguucuu

SEQ ID NO: 1206036 - RNA, 19 nt, Artificial Sequence
  Description of Artificial Sequence: Synthetic oligonucleotide
guugugaaacaggaccgaa

SEQ ID NO: 1206037 - RNA, 19 nt, Artificial Sequence
  Description of Artificial Sequence: Synthetic oligonucleotide
auggcacuucuacuaugaa

SEQ ID NO: 1206038 - RNA, 19 nt, Artificial Sequence
  Description of Artificial Sequence: Synthetic oligonucleotide
gacccggucuguacaaaca

SEQ ID NO: 1206039 - RNA, 19 nt, Artificial Sequence
  Description of Artificial Sequence: Synthetic oligonucleotide
ggacguggaagggugggag

SEQ ID NO: 1206040 - RNA, 19 nt, Artificial Sequence
  Description of Artificial Sequence: Synthetic oligonucleotide
caccaaccacccaguagug

SEQ ID NO: 1206041 - RNA, 19 nt, Artificial Sequence
  Description of Artificial Sequence: Synthetic oligonucleotide
cugagucauuagauuggca

SEQ ID NO: 1206042 - RNA, 19 nt, Artificial Sequence
  Description of Artificial Sequence: Synthetic oligonucleotide
ggaauaaguucugcccgug

SEQ ID NO: 1206043 - RNA, 19 nt, Artificial Sequence
  Description of Artificial Sequence: Synthetic oligonucleotide
acggcaggacguggaaggg

SEQ ID NO: 1206044 - RNA, 19 nt, Artificial Sequence
  Description of Artificial Sequence: Synthetic oligonucleotide
guauuucgcuucuucacuu

SEQ ID NO: 1206045 - RNA, 19 nt, Artificial Sequence
  Description of Artificial Sequence: Synthetic oligonucleotide
gaagggguuuacccguccu

SEQ ID NO: 1206046 - RNA, 19 nt, Artificial Sequence
  Description of Artificial Sequence: Synthetic oligonucleotide
gcuagagaagacugcaccu

SEQ ID NO: 1206047 - RNA, 19 nt, Artificial Sequence
  Description of Artificial Sequence: Synthetic oligonucleotide
cauuauuugcugcucgauu

SEQ ID NO: 1206048 - RNA, 19 nt, Artificial Sequence
  Description of Artificial Sequence: Synthetic oligonucleotide
cagcggacaauacucuaaa

SEQ ID NO: 1206049 - RNA, 19 nt, Artificial Sequence
  Description of Artificial Sequence: Synthetic oligonucleotide
ccauguauucccaagcccu

SEQ ID NO: 1206050 - RNA, 19 nt, Artificial Sequence
  Description of Artificial Sequence: Synthetic oligonucleotide
accaaccacccaguaguga

SEQ ID NO: 1206051 - RNA, 19 nt, Artificial Sequence
  Description of Artificial Sequence: Synthetic oligonucleotide
cuucagcggacaauacucu

SEQ ID NO: 1206052 - RNA, 19 nt, Artificial Sequence
  Description of Artificial Sequence: Synthetic oligonucleotide
ggcacauagcuggaguuuc

SEQ ID NO: 1206053 - RNA, 19 nt, Artificial Sequence
  Description of Artificial Sequence: Synthetic oligonucleotide
acacauuggugcccauauu

SEQ ID NO: 1206054 - RNA, 19 nt, Artificial Sequence
  Description of Artificial Sequence: Synthetic oligonucleotide
ccugauuuaagagcuggca

SEQ ID NO: 1206055 - RNA, 19 nt, Artificial Sequence
  Description of Artificial Sequence: Synthetic oligonucleotide
guccuuagaucaaguugac

SEQ ID NO: 1206056 - RNA, 19 nt, Artificial Sequence
  Description of Artificial Sequence: Synthetic oligonucleotide
agagaagacugcaccugau

SEQ ID NO: 1206057 - RNA, 19 nt, Artificial Sequence
  Description of Artificial Sequence: Synthetic oligonucleotide
aagacccggucuguacaaa

SEQ ID NO: 1206058 - RNA, 19 nt, Artificial Sequence
  Description of Artificial Sequence: Synthetic oligonucleotide
ucgggaagccaacgaccau

SEQ ID NO: 1206059 - RNA, 19 nt, Artificial Sequence
  Description of Artificial Sequence: Synthetic oligonucleotide
gccccaaucuagcaauuga

SEQ ID NO: 1206060 - RNA, 19 nt, Artificial Sequence
  Description of Artificial Sequence: Synthetic oligonucleotide
ccucuguuaagcauucgaa

SEQ ID NO: 1206061 - RNA, 19 nt, Artificial Sequence
  Description of Artificial Sequence: Synthetic oligonucleotide
aggaagcuuaaaggauagu

SEQ ID NO: 1206062 - RNA, 19 nt, Artificial Sequence
  Description of Artificial Sequence: Synthetic oligonucleotide
aucuagcaauugaacucca

SEQ ID NO: 1206063 - RNA, 19 nt, Artificial Sequence
  Description of Artificial Sequence: Synthetic oligonucleotide
cucgauuaagaggggugga

SEQ ID NO: 1206064 - RNA, 19 nt, Artificial Sequence
  Description of Artificial Sequence: Synthetic oligonucleotide
uggaauugacuagcaccuu

SEQ ID NO: 1206065 - RNA, 19 nt, Artificial Sequence
  Description of Artificial Sequence: Synthetic oligonucleotide
guuacauacaggaguccau

SEQ ID NO: 1206066 - RNA, 19 nt, Artificial Sequence
  Description of Artificial Sequence: Synthetic oligonucleotide
gcaccuuagcugcugggga

SEQ ID NO: 1206067 - RNA, 19 nt, Artificial Sequence
  Description of Artificial Sequence: Synthetic oligonucleotide
  modified_base (5)..(5): a, c, u, g, unknown or other
ccccngccauguaagguag

SEQ ID NO: 1206068 - RNA, 19 nt, Artificial Sequence
  Description of Artificial Sequence: Synthetic oligonucleotide
acauaacagggaguaccuu

SEQ ID NO: 1206069 - RNA, 19 nt, Artificial Sequence
  Description of Artificial Sequence: Synthetic oligonucleotide
gagggaaccgagaaccuuu

SEQ ID NO: 1206070 - RNA, 19 nt, Artificial Sequence
  Description of Artificial Sequence: Synthetic oligonucleotide
cagucuuaucagccuguga

SEQ ID NO: 1206071 - RNA, 19 nt, Artificial Sequence
  Description of Artificial Sequence: Synthetic oligonucleotide
agccaacgaccauggcacu

SEQ ID NO: 1206072 - RNA, 19 nt, Artificial Sequence
  Description of Artificial Sequence: Synthetic oligonucleotide
guauucccaagcccucugu

SEQ ID NO: 1206073 - RNA, 19 nt, Artificial Sequence
  Description of Artificial Sequence: Synthetic oligonucleotide
agacugcaccugauuuaag

SEQ ID NO: 1206074 - RNA, 19 nt, Artificial Sequence
  Description of Artificial Sequence: Synthetic oligonucleotide
gguuuacccguccuuggcu

SEQ ID NO: 1206075 - RNA, 19 nt, Artificial Sequence
  Description of Artificial Sequence: Synthetic oligonucleotide
ggggauuuucauggacacc

SEQ ID NO: 1206076 - RNA, 19 nt, Artificial Sequence
  Description of Artificial Sequence: Synthetic oligonucleotide
gcccauauuaaaagccaca

SEQ ID NO: 1206077 - RNA, 19 nt, Artificial Sequence
  Description of Artificial Sequence: Synthetic oligonucleotide
cccucuguuaagcauucga

SEQ ID NO: 1206078 - RNA, 19 nt, Artificial Sequence
  Description of Artificial Sequence: Synthetic oligonucleotide
gccuuguugguccaugccu

SEQ ID NO: 1206079 - RNA, 19 nt, Artificial Sequence
  Description of Artificial Sequence: Synthetic oligonucleotide
caaguuccacacagcgaaa

SEQ ID NO: 1206080 - RNA, 19 nt, Artificial Sequence
  Description of Artificial Sequence: Synthetic oligonucleotide
cacaguccuuagaucaagu

SEQ ID NO: 1206081 - RNA, 19 nt, Artificial Sequence
  Description of Artificial Sequence: Synthetic oligonucleotide
ggaugcaccuuagcugcug

SEQ ID NO: 1206082 - RNA, 19 nt, Artificial Sequence
  Description of Artificial Sequence: Synthetic oligonucleotide
gugguuguguggcucuggu

SEQ ID NO: 1206083 - RNA, 19 nt, Artificial Sequence
  Description of Artificial Sequence: Synthetic oligonucleotide
ggcaaguuccacacagcga

SEQ ID NO: 1206084 - RNA, 19 nt, Artificial Sequence
  Description of Artificial Sequence: Synthetic oligonucleotide
  modified_base (12)..(12): a, c, u, g, unknown or other
gcagaaaccccngccaugu

SEQ ID NO: 1206085 - RNA, 19 nt, Artificial Sequence
  Description of Artificial Sequence: Synthetic oligonucleotide
ucgauacagcugguucuuu

SEQ ID NO: 1206086 - RNA, 19 nt, Artificial Sequence
  Description of Artificial Sequence: Synthetic oligonucleotide
ccaacgaccauggcacuuc

SEQ ID NO: 1206087 - RNA, 19 nt, Artificial Sequence
  Description of Artificial Sequence: Synthetic oligonucleotide
gcugcucgauuaagagggg

SEQ ID NO: 1206088 - RNA, 19 nt, Artificial Sequence
  Description of Artificial Sequence: Synthetic oligonucleotide
gcgaaauucucgcuccagu

SEQ ID NO: 1206089 - RNA, 19 nt, Artificial Sequence
  Description of Artificial Sequence: Synthetic oligonucleotide
cauggacaccaaccaccca

SEQ ID NO: 1206090 - RNA, 19 nt, Artificial Sequence
  Description of Artificial Sequence: Synthetic oligonucleotide
  modified_base (4)..(4): a, c, u, g, unknown or other
cccngccauguaagguagg

SEQ ID NO: 1206091 - RNA, 19 nt, Artificial Sequence
  Description of Artificial Sequence: Synthetic oligonucleotide
cagcgaaauucucgcucca

SEQ ID NO: 1206092 - RNA, 19 nt, Artificial Sequence
  Description of Artificial Sequence: Synthetic oligonucleotide
gggaaccgagaaccuuuac

SEQ ID NO: 1206093 - RNA, 19 nt, Artificial Sequence
  Description of Artificial Sequence: Synthetic oligonucleotide
gucauuagauuggcaaguu

SEQ ID NO: 1206094 - RNA, 19 nt, Artificial Sequence
  Description of Artificial Sequence: Synthetic oligonucleotide
aacgaccauggcacuucua

SEQ ID NO: 1206095 - RNA, 19 nt, Artificial Sequence
  Description of Artificial Sequence: Synthetic oligonucleotide
gguguaucacuggcaaucu

SEQ ID NO: 1206096 - RNA, 19 nt, Artificial Sequence
  Description of Artificial Sequence: Synthetic oligonucleotide
agggaaccgagaaccuuua

SEQ ID NO: 1206097 - RNA, 19 nt, Artificial Sequence
  Description of Artificial Sequence: Synthetic oligonucleotide
agcuggcauaucaggggaa

SEQ ID NO: 1206098 - RNA, 19 nt, Artificial Sequence
  Description of Artificial Sequence: Synthetic oligonucleotide
ccauauuaaaagccacagu

SEQ ID NO: 1206099 - RNA, 19 nt, Artificial Sequence
  Description of Artificial Sequence: Synthetic oligonucleotide
  modified_base (3)..(3): a, c, u, g, unknown or other
ccngccauguaagguagga

SEQ ID NO: 1206100 - RNA, 19 nt, Artificial Sequence
  Description of Artificial Sequence: Synthetic oligonucleotide
gggucgccaugcaaacuug

SEQ ID NO: 1206101 - RNA, 19 nt, Artificial Sequence
  Description of Artificial Sequence: Synthetic oligonucleotide
caccuuagcugcuggggau

SEQ ID NO: 1206102 - RNA, 19 nt, Artificial Sequence
  Description of Artificial Sequence: Synthetic oligonucleotide
ccucauaaucauaaccauu

SEQ ID NO: 1206103 - RNA, 19 nt, Artificial Sequence
  Description of Artificial Sequence: Synthetic oligonucleotide
gagggucgccaugcaaacu

SEQ ID NO: 1206104 - RNA, 19 nt, Artificial Sequence
  Description of Artificial Sequence: Synthetic oligonucleotide
gcauucgaacacagccuuc

SEQ ID NO: 1206105 - RNA, 19 nt, Artificial Sequence
  Description of Artificial Sequence: Synthetic oligonucleotide
caacgaccauggcacuucu

SEQ ID NO: 1206106 - RNA, 19 nt, Artificial Sequence
  Description of Artificial Sequence: Synthetic oligonucleotide
cagcgaggucacaaguuuu

SEQ ID NO: 1206107 - RNA, 19 nt, Artificial Sequence
  Description of Artificial Sequence: Synthetic oligonucleotide
cagguguaucacuggcaau

SEQ ID NO: 1206108 - RNA, 19 nt, Artificial Sequence
  Description of Artificial Sequence: Synthetic oligonucleotide
cucaucgauacagcugguu

SEQ ID NO: 1206109 - RNA, 19 nt, Artificial Sequence
  Description of Artificial Sequence: Synthetic oligonucleotide
ccgagagcgagaagcauau

SEQ ID NO: 1206110 - RNA, 19 nt, Artificial Sequence
  Description of Artificial Sequence: Synthetic oligonucleotide
gcgcaagcauuuucaucaa

SEQ ID NO: 1206111 - RNA, 19 nt, Artificial Sequence
  Description of Artificial Sequence: Synthetic oligonucleotide
ggaaaccuuagaagguauu

SEQ ID NO: 1206112 - RNA, 19 nt, Artificial Sequence
  Description of Artificial Sequence: Synthetic oligonucleotide
gccaaguaaucaagguagu

SEQ ID NO: 1206113 - RNA, 19 nt, Artificial Sequence
  Description of Artificial Sequence: Synthetic oligonucleotide
gucgccaugcaaacuuguu

SEQ ID NO: 1206114 - RNA, 19 nt, Artificial Sequence
  Description of Artificial Sequence: Synthetic oligonucleotide
  modified_base (11)..(11): a, c, u, g, unknown or other
cagaaaccccngccaugua

SEQ ID NO: 1206115 - RNA, 19 nt, Artificial Sequence
  Description of Artificial Sequence: Synthetic oligonucleotide
cuucggccuuugguuuuca

SEQ ID NO: 1206116 - RNA, 19 nt, Artificial Sequence
  Description of Artificial Sequence: Synthetic oligonucleotide
  modified_base (2)..(2): a, c, u, g, unknown or other
cngccauguaagguaggau

SEQ ID NO: 1206117 - RNA, 19 nt, Artificial Sequence
  Description of Artificial Sequence: Synthetic oligonucleotide
gcuggcauaucaggggaau

SEQ ID NO: 1206118 - RNA, 19 nt, Artificial Sequence
  Description of Artificial Sequence: Synthetic oligonucleotide
cuuuaugaccggggauuuu

SEQ ID NO: 1206119 - RNA, 19 nt, Artificial Sequence
  Description of Artificial Sequence: Synthetic oligonucleotide
gcuuuaugaccggggauuu

SEQ ID NO: 1206120 - RNA, 19 nt, Artificial Sequence
  Description of Artificial Sequence: Synthetic oligonucleotide
ggucgccaugcaaacuugu

SEQ ID NO: 1206121 - RNA, 19 nt, Artificial Sequence
  Description of Artificial Sequence: Synthetic oligonucleotide
ggagggaaccgagaaccuu

SEQ ID NO: 1206122 - RNA, 19 nt, Artificial Sequence
  Description of Artificial Sequence: Synthetic oligonucleotide
ccaaguaaucaagguaguu

SEQ ID NO: 1206123 - RNA, 19 nt, Artificial Sequence
  Description of Artificial Sequence: Synthetic oligonucleotide
ccgugguuguguggcucug

SEQ ID NO: 1206124 - RNA, 19 nt, Artificial Sequence
  Description of Artificial Sequence: Synthetic oligonucleotide
gccaacgaccauggcacuu

SEQ ID NO: 1206125 - RNA, 19 nt, Artificial Sequence
  Description of Artificial Sequence: Synthetic oligonucleotide
gggaugcaccuuagcugcu

SEQ ID NO: 1206126 - RNA, 19 nt, Artificial Sequence
  Description of Artificial Sequence: Synthetic oligonucleotide
ccuuagcugcuggggauuu

SEQ ID NO: 1206127 - RNA, 19 nt, Artificial Sequence
  Description of Artificial Sequence: Synthetic oligonucleotide
cgagagcgagaagcauauu

SEQ ID NO: 1206128 - RNA, 19 nt, Artificial Sequence
  Description of Artificial Sequence: Synthetic oligonucleotide
  modified_base (1)..(1): a, c, u, g, unknown or other
ngccauguaagguaggauu

SEQ ID NO: 1206129 - RNA, 19 nt, Artificial Sequence
  Description of Artificial Sequence: Synthetic oligonucleotide
aauuguuggaugcaaaucc

SEQ ID NO: 1206130 - RNA, 19 nt, Artificial Sequence
  Description of Artificial Sequence: Synthetic oligonucleotide
augauagugccguauaacc

SEQ ID NO: 1206131 - RNA, 19 nt, Artificial Sequence
  Description of Artificial Sequence: Synthetic oligonucleotide
ucgacuacaagucaccagg

SEQ ID NO: 1206132 - RNA, 19 nt, Artificial Sequence
  Description of Artificial Sequence: Synthetic oligonucleotide
gaggauaugaaucugcagc

SEQ ID NO: 1206133 - RNA, 19 nt, Artificial Sequence
  Description of Artificial Sequence: Synthetic oligonucleotide
uuuuccacuagccaagucc

SEQ ID NO: 1206134 - RNA, 19 nt, Artificial Sequence
  Description of Artificial Sequence: Synthetic oligonucleotide
aaugucguggauguaagac

SEQ ID NO: 1206135 - RNA, 19 nt, Artificial Sequence
  Description of Artificial Sequence: Synthetic oligonucleotide
acugaucgaaagcacaagc

SEQ ID NO: 1206136 - RNA, 19 nt, Artificial Sequence
  Description of Artificial Sequence: Synthetic oligonucleotide
aagucccaaaucuuaauag

SEQ ID NO: 1206137 - RNA, 19 nt, Artificial Sequence
  Description of Artificial Sequence: Synthetic oligonucleotide
cuuaguaucagcagucagg

SEQ ID NO: 1206138 - RNA, 19 nt, Artificial Sequence
  Description of Artificial Sequence: Synthetic oligonucleotide
aucuuaauaguucugucag

SEQ ID NO: 1206139 - RNA, 19 nt, Artificial Sequence
  Description of Artificial Sequence: Synthetic oligonucleotide
aguaucagcagucagggca

SEQ ID NO: 1206140 - RNA, 19 nt, Artificial Sequence
  Description of Artificial Sequence: Synthetic oligonucleotide
gauacaaguacuccgucag

SEQ ID NO: 1206141 - RNA, 19 nt, Artificial Sequence
  Description of Artificial Sequence: Synthetic oligonucleotide
uuaguaucagcagucaggg

SEQ ID NO: 1206142 - RNA, 19 nt, Artificial Sequence
  Description of Artificial Sequence: Synthetic oligonucleotide
gaauucuugguauugccag

SEQ ID NO: 1206143 - RNA, 19 nt, Artificial Sequence
  Description of Artificial Sequence: Synthetic oligonucleotide
aaagacacagcuaaggacu

SEQ ID NO: 1206144 - RNA, 19 nt, Artificial Sequence
  Description of Artificial Sequence: Synthetic oligonucleotide
uggauguaagaccacagcc

SEQ ID NO: 1206145 - RNA, 19 nt, Artificial Sequence
  Description of Artificial Sequence: Synthetic oligonucleotide
aaauguguaaugucgugga

SEQ ID NO: 1206146 - RNA, 19 nt, Artificial Sequence
  Description of Artificial Sequence: Synthetic oligonucleotide
uugaaucucgacuacaagu

SEQ ID NO: 1206147 - RNA, 19 nt, Artificial Sequence
  Description of Artificial Sequence: Synthetic oligonucleotide
aggauaugaaucugcagcg

SEQ ID NO: 1206148 - RNA, 19 nt, Artificial Sequence
  Description of Artificial Sequence: Synthetic oligonucleotide
acuccgucagcauugaccg

SEQ ID NO: 1206149 - RNA, 19 nt, Artificial Sequence
  Description of Artificial Sequence: Synthetic oligonucleotide
uaugauugguuaauguuac

SEQ ID NO: 1206150 - RNA, 19 nt, Artificial Sequence
  Description of Artificial Sequence: Synthetic oligonucleotide
auuacgaagcuugauugcc

SEQ ID NO: 1206151 - RNA, 19 nt, Artificial Sequence
  Description of Artificial Sequence: Synthetic oligonucleotide
ugcauuaugaccagagaga

SEQ ID NO: 1206152 - RNA, 19 nt, Artificial Sequence
  Description of Artificial Sequence: Synthetic oligonucleotide
caggauacuguuuaugagg

SEQ ID NO: 1206153 - RNA, 19 nt, Artificial Sequence
  Description of Artificial Sequence: Synthetic oligonucleotide
ugauucgcuauccaaagac

SEQ ID NO: 1206154 - RNA, 19 nt, Artificial Sequence
  Description of Artificial Sequence: Synthetic oligonucleotide
augucguggauguaagacc

SEQ ID NO: 1206155 - RNA, 19 nt, Artificial Sequence
  Description of Artificial Sequence: Synthetic oligonucleotide
ugaaucucgacuacaaguc

SEQ ID NO: 1206156 - RNA, 19 nt, Artificial Sequence
  Description of Artificial Sequence: Synthetic oligonucleotide
aacaaguaaggacuccuug

SEQ ID NO: 1206157 - RNA, 19 nt, Artificial Sequence
  Description of Artificial Sequence: Synthetic oligonucleotide
uggaugcaaauccagacca

SEQ ID NO: 1206158 - RNA, 19 nt, Artificial Sequence
  Description of Artificial Sequence: Synthetic oligonucleotide
agcaguacgauuugcauca

SEQ ID NO: 1206159 - RNA, 19 nt, Artificial Sequence
  Description of Artificial Sequence: Synthetic oligonucleotide
uguguaaugucguggaugu

SEQ ID NO: 1206160 - RNA, 19 nt, Artificial Sequence
  Description of Artificial Sequence: Synthetic oligonucleotide
uaacgaaccacugauuucc

SEQ ID NO: 1206161 - RNA, 19 nt, Artificial Sequence
  Description of Artificial Sequence: Synthetic oligonucleotide
agcacaagcaaauauuccu

SEQ ID NO: 1206162 - RNA, 19 nt, Artificial Sequence
  Description of Artificial Sequence: Synthetic oligonucleotide
uacgauuugcaucaacucu

SEQ ID NO: 1206163 - RNA, 19 nt, Artificial Sequence
  Description of Artificial Sequence: Synthetic oligonucleotide
uguuaauaauugcauuaug

SEQ ID NO: 1206164 - RNA, 19 nt, Artificial Sequence
  Description of Artificial Sequence: Synthetic oligonucleotide
augauggacgcagaaaucg

SEQ ID NO: 1206165 - RNA, 19 nt, Artificial Sequence
  Description of Artificial Sequence: Synthetic oligonucleotide
ugucguggauguaagacca

SEQ ID NO: 1206166 - RNA, 19 nt, Artificial Sequence
  Description of Artificial Sequence: Synthetic oligonucleotide
ugccguauaaccuuguuau

SEQ ID NO: 1206167 - RNA, 19 nt, Artificial Sequence
  Description of Artificial Sequence: Synthetic oligonucleotide
uacuccgucagcauugacc

SEQ ID NO: 1206168 - RNA, 19 nt, Artificial Sequence
  Description of Artificial Sequence: Synthetic oligonucleotide
acucgcugaaaguuguagc

SEQ ID NO: 1206169 - RNA, 19 nt, Artificial Sequence
  Description of Artificial Sequence: Synthetic oligonucleotide
acaaucguauuguuguguc

SEQ ID NO: 1206170 - RNA, 19 nt, Artificial Sequence
  Description of Artificial Sequence: Synthetic oligonucleotide
cuuucugacugaucgaaag

SEQ ID NO: 1206171 - RNA, 19 nt, Artificial Sequence
  Description of Artificial Sequence: Synthetic oligonucleotide
auucgcuauccaaagaccc

SEQ ID NO: 1206172 - RNA, 19 nt, Artificial Sequence
  Description of Artificial Sequence: Synthetic oligonucleotide
aaauauuccugauucgcua

SEQ ID NO: 1206173 - RNA, 19 nt, Artificial Sequence
  Description of Artificial Sequence: Synthetic oligonucleotide
aaucucgacuacaagucac

SEQ ID NO: 1206174 - RNA, 19 nt, Artificial Sequence
  Description of Artificial Sequence: Synthetic oligonucleotide
ucuuaugauugguuaaugu

SEQ ID NO: 1206175 - RNA, 19 nt, Artificial Sequence
  Description of Artificial Sequence: Synthetic oligonucleotide
guaaccgacuuucugacug

SEQ ID NO: 1206176 - RNA, 19 nt, Artificial Sequence
  Description of Artificial Sequence: Synthetic oligonucleotide
guuaauguuacucuugucu

SEQ ID NO: 1206177 - RNA, 19 nt, Artificial Sequence
  Description of Artificial Sequence: Synthetic oligonucleotide
ugaucgaaagcacaagcaa

SEQ ID NO: 1206178 - RNA, 19 nt, Artificial Sequence
  Description of Artificial Sequence: Synthetic oligonucleotide
ucuuaguaucagcagucag

SEQ ID NO: 1206179 - RNA, 19 nt, Artificial Sequence
  Description of Artificial Sequence: Synthetic oligonucleotide
cuugauugccauuuuccgc

SEQ ID NO: 1206180 - RNA, 19 nt, Artificial Sequence
  Description of Artificial Sequence: Synthetic oligonucleotide
aauauuccugauucgcuau

SEQ ID NO: 1206181 - RNA, 19 nt, Artificial Sequence
  Description of Artificial Sequence: Synthetic oligonucleotide
uguugugucgugacuuccg

SEQ ID NO: 1206182 - RNA, 19 nt, Artificial Sequence
  Description of Artificial Sequence: Synthetic oligonucleotide
aaguuguagccaguucucc

SEQ ID NO: 1206183 - RNA, 19 nt, Artificial Sequence
  Description of Artificial Sequence: Synthetic oligonucleotide
uuaauguuacucuugucuu

SEQ ID NO: 1206184 - RNA, 19 nt, Artificial Sequence
  Description of Artificial Sequence: Synthetic oligonucleotide
aguaacgaaccacugauuu

SEQ ID NO: 1206185 - RNA, 19 nt, Artificial Sequence
  Description of Artificial Sequence: Synthetic oligonucleotide
ugcguguacucgcugaaag

SEQ ID NO: 1206186 - RNA, 19 nt, Artificial Sequence
  Description of Artificial Sequence: Synthetic oligonucleotide
gauguggccagucaaugac

SEQ ID NO: 1206187 - RNA, 19 nt, Artificial Sequence
  Description of Artificial Sequence: Synthetic oligonucleotide
aaaguuguagccaguucuc

SEQ ID NO: 1206188 - RNA, 19 nt, Artificial Sequence
  Description of Artificial Sequence: Synthetic oligonucleotide
caaauguguaaugucgugg

SEQ ID NO: 1206189 - RNA, 19 nt, Artificial Sequence
  Description of Artificial Sequence: Synthetic oligonucleotide
uguaaugucguggauguaa

SEQ ID NO: 1206190 - RNA, 19 nt, Artificial Sequence
  Description of Artificial Sequence: Synthetic oligonucleotide
uguuuaugaggauaugaau

SEQ ID NO: 1206191 - RNA, 19 nt, Artificial Sequence
  Description of Artificial Sequence: Synthetic oligonucleotide
gagagauuuugaauaaagc

SEQ ID NO: 1206192 - RNA, 19 nt, Artificial Sequence
  Description of Artificial Sequence: Synthetic oligonucleotide
aauucaucgcugugggcug

SEQ ID NO: 1206193 - RNA, 19 nt, Artificial Sequence
  Description of Artificial Sequence: Synthetic oligonucleotide
auacucauuacgaagcuug

SEQ ID NO: 1206194 - RNA, 19 nt, Artificial Sequence
  Description of Artificial Sequence: Synthetic oligonucleotide
uuuggaucuuaguaucagc

SEQ ID NO: 1206195 - RNA, 19 nt, Artificial Sequence
  Description of Artificial Sequence: Synthetic oligonucleotide
uugauuggcaggauacugu

SEQ ID NO: 1206196 - RNA, 19 nt, Artificial Sequence
  Description of Artificial Sequence: Synthetic oligonucleotide
ugacuuccgguaauuaucu

SEQ ID NO: 1206197 - RNA, 19 nt, Artificial Sequence
  Description of Artificial Sequence: Synthetic oligonucleotide
ugauugguuaauguuacuc

SEQ ID NO: 1206198 - RNA, 19 nt, Artificial Sequence
  Description of Artificial Sequence: Synthetic oligonucleotide
ucaauuguuggaugcaaau

SEQ ID NO: 1206199 - RNA, 19 nt, Artificial Sequence
  Description of Artificial Sequence: Synthetic oligonucleotide
agauccaguaacgaaccac

SEQ ID NO: 1206200 - RNA, 19 nt, Artificial Sequence
  Description of Artificial Sequence: Synthetic oligonucleotide
cuuccgguaauuaucugug

SEQ ID NO: 1206201 - RNA, 19 nt, Artificial Sequence
  Description of Artificial Sequence: Synthetic oligonucleotide
ucucacaucccagauccgg

SEQ ID NO: 1206202 - RNA, 19 nt, Artificial Sequence
  Description of Artificial Sequence: Synthetic oligonucleotide
agauccgggcaguugaauc

SEQ ID NO: 1206203 - RNA, 19 nt, Artificial Sequence
  Description of Artificial Sequence: Synthetic oligonucleotide
caauacaggaccauacuca

SEQ ID NO: 1206204 - RNA, 19 nt, Artificial Sequence
  Description of Artificial Sequence: Synthetic oligonucleotide
ugauuuccggguuccacag

SEQ ID NO: 1206205 - RNA, 19 nt, Artificial Sequence
  Description of Artificial Sequence: Synthetic oligonucleotide
ugaggauaugaaucugcag

SEQ ID NO: 1206206 - RNA, 19 nt, Artificial Sequence
  Description of Artificial Sequence: Synthetic oligonucleotide
guguacagaauguuucugc

SEQ ID NO: 1206207 - RNA, 19 nt, Artificial Sequence
  Description of Artificial Sequence: Synthetic oligonucleotide
ugcaauacaggaccauacu

SEQ ID NO: 1206208 - RNA, 19 nt, Artificial Sequence
  Description of Artificial Sequence: Synthetic oligonucleotide
uguuauacucaagauccca

SEQ ID NO: 1206209 - RNA, 19 nt, Artificial Sequence
  Description of Artificial Sequence: Synthetic oligonucleotide
ucgguacucacuuccagca

SEQ ID NO: 1206210 - RNA, 19 nt, Artificial Sequence
  Description of Artificial Sequence: Synthetic oligonucleotide
ugucagcagauccaguaac

SEQ ID NO: 1206211 - RNA, 19 nt, Artificial Sequence
  Description of Artificial Sequence: Synthetic oligonucleotide
aguacgauuugcaucaacu

SEQ ID NO: 1206212 - RNA, 19 nt, Artificial Sequence
  Description of Artificial Sequence: Synthetic oligonucleotide
uccgguaauuaucuguggu

SEQ ID NO: 1206213 - RNA, 19 nt, Artificial Sequence
  Description of Artificial Sequence: Synthetic oligonucleotide
guagaguuuccaugguggg

SEQ ID NO: 1206214 - RNA, 19 nt, Artificial Sequence
  Description of Artificial Sequence: Synthetic oligonucleotide
acuguuuaugaggauauga

SEQ ID NO: 1206215 - RNA, 19 nt, Artificial Sequence
  Description of Artificial Sequence: Synthetic oligonucleotide
uucuccagucccaaaggug

SEQ ID NO: 1206216 - RNA, 19 nt, Artificial Sequence
  Description of Artificial Sequence: Synthetic oligonucleotide
agauacaaguacuccguca

SEQ ID NO: 1206217 - RNA, 19 nt, Artificial Sequence
  Description of Artificial Sequence: Synthetic oligonucleotide
ccgacuuucugacugaucg

SEQ ID NO: 1206218 - RNA, 19 nt, Artificial Sequence
  Description of Artificial Sequence: Synthetic oligonucleotide
ugauggacgcagaaaucgc

SEQ ID NO: 1206219 - RNA, 19 nt, Artificial Sequence
  Description of Artificial Sequence: Synthetic oligonucleotide
ugacugaucgaaagcacaa

SEQ ID NO: 1206220 - RNA, 19 nt, Artificial Sequence
  Description of Artificial Sequence: Synthetic oligonucleotide
aaaucucuuucucuugaua

SEQ ID NO: 1206221 - RNA, 19 nt, Artificial Sequence
  Description of Artificial Sequence: Synthetic oligonucleotide
uaguaaccgacuuucugac

SEQ ID NO: 1206222 - RNA, 19 nt, Artificial Sequence
  Description of Artificial Sequence: Synthetic oligonucleotide
uccugauucgcuauccaaa

SEQ ID NO: 1206223 - RNA, 19 nt, Artificial Sequence
  Description of Artificial Sequence: Synthetic oligonucleotide
cacagcaaugcaucggacc

SEQ ID NO: 1206224 - RNA, 19 nt, Artificial Sequence
  Description of Artificial Sequence: Synthetic oligonucleotide
caaguaaggacuccuugug

SEQ ID NO: 1206225 - RNA, 19 nt, Artificial Sequence
  Description of Artificial Sequence: Synthetic oligonucleotide
uuagcucacuccuccagca

SEQ ID NO: 1206226 - RNA, 19 nt, Artificial Sequence
  Description of Artificial Sequence: Synthetic oligonucleotide
uuacgaagcuugauugcca

SEQ ID NO: 1206227 - RNA, 19 nt, Artificial Sequence
  Description of Artificial Sequence: Synthetic oligonucleotide
auauuccugauucgcuauc

SEQ ID NO: 1206228 - RNA, 19 nt, Artificial Sequence
  Description of Artificial Sequence: Synthetic oligonucleotide
agaucccacaaucguauug

SEQ ID NO: 1206229 - RNA, 19 nt, Artificial Sequence
  Description of Artificial Sequence: Synthetic oligonucleotide
acuucuuaugauugguuaa

SEQ ID NO: 1206230 - RNA, 19 nt, Artificial Sequence
  Description of Artificial Sequence: Synthetic oligonucleotide
gauucgcuauccaaagacc

SEQ ID NO: 1206231 - RNA, 19 nt, Artificial Sequence
  Description of Artificial Sequence: Synthetic oligonucleotide
augcaauacaggaccauac

SEQ ID NO: 1206232 - RNA, 19 nt, Artificial Sequence
  Description of Artificial Sequence: Synthetic oligonucleotide
uaccagaucccacaaucgu

SEQ ID NO: 1206233 - RNA, 19 nt, Artificial Sequence
  Description of Artificial Sequence: Synthetic oligonucleotide
uucgcuauccaaagaccca

SEQ ID NO: 1206234 - RNA, 19 nt, Artificial Sequence
  Description of Artificial Sequence: Synthetic oligonucleotide
gaucuuaguaucagcaguc

SEQ ID NO: 1206235 - RNA, 19 nt, Artificial Sequence
  Description of Artificial Sequence: Synthetic oligonucleotide
auaugaaucugcagcguuc

SEQ ID NO: 1206236 - RNA, 19 nt, Artificial Sequence
  Description of Artificial Sequence: Synthetic oligonucleotide
caaucguauuguugugucg

SEQ ID NO: 1206237 - RNA, 19 nt, Artificial Sequence
  Description of Artificial Sequence: Synthetic oligonucleotide
auugcauuaugaccagaga

SEQ ID NO: 1206238 - RNA, 19 nt, Artificial Sequence
  Description of Artificial Sequence: Synthetic oligonucleotide
uauuccugauucgcuaucc

SEQ ID NO: 1206239 - RNA, 19 nt, Artificial Sequence
  Description of Artificial Sequence: Synthetic oligonucleotide
cuuacgaucacaccccgca

SEQ ID NO: 1206240 - RNA, 19 nt, Artificial Sequence
  Description of Artificial Sequence: Synthetic oligonucleotide
acgauuugcaucaacucug

SEQ ID NO: 1206241 - RNA, 19 nt, Artificial Sequence
  Description of Artificial Sequence: Synthetic oligonucleotide
gauguaagaccacagcccu

SEQ ID NO: 1206242 - RNA, 19 nt, Artificial Sequence
  Description of Artificial Sequence: Synthetic oligonucleotide
uccgucagcauugaccgcc

SEQ ID NO: 1206243 - RNA, 19 nt, Artificial Sequence
  Description of Artificial Sequence: Synthetic oligonucleotide
aauguguaaugucguggau

SEQ ID NO: 1206244 - RNA, 19 nt, Artificial Sequence
  Description of Artificial Sequence: Synthetic oligonucleotide
guugugucgugacuuccgg

SEQ ID NO: 1206245 - RNA, 19 nt, Artificial Sequence
  Description of Artificial Sequence: Synthetic oligonucleotide
auguguaaugucguggaug

SEQ ID NO: 1206246 - RNA, 19 nt, Artificial Sequence
  Description of Artificial Sequence: Synthetic oligonucleotide
cuguuaguaaccgacuuuc

SEQ ID NO: 1206247 - RNA, 19 nt, Artificial Sequence
  Description of Artificial Sequence: Synthetic oligonucleotide
uacgaucacaccccgcacu

SEQ ID NO: 1206248 - RNA, 19 nt, Artificial Sequence
  Description of Artificial Sequence: Synthetic oligonucleotide
ucauggaauucaucgcugu

SEQ ID NO: 1206249 - RNA, 19 nt, Artificial Sequence
  Description of Artificial Sequence: Synthetic oligonucleotide
gaucacaccccgcacugug

SEQ ID NO: 1206250 - RNA, 19 nt, Artificial Sequence
  Description of Artificial Sequence: Synthetic oligonucleotide
acugauuuccggguuccac

SEQ ID NO: 1206251 - RNA, 19 nt, Artificial Sequence
  Description of Artificial Sequence: Synthetic oligonucleotide
uuccgguaauuaucugugg

SEQ ID NO: 1206252 - RNA, 19 nt, Artificial Sequence
  Description of Artificial Sequence: Synthetic oligonucleotide
uuaugaggauaugaaucug

SEQ ID NO: 1206253 - RNA, 19 nt, Artificial Sequence
  Description of Artificial Sequence: Synthetic oligonucleotide
gauggacgcagaaaucgcc

SEQ ID NO: 1206254 - RNA, 19 nt, Artificial Sequence
  Description of Artificial Sequence: Synthetic oligonucleotide
gagcaguacgauuugcauc

SEQ ID NO: 1206255 - RNA, 19 nt, Artificial Sequence
  Description of Artificial Sequence: Synthetic oligonucleotide
guggauguaagaccacagc

SEQ ID NO: 1206256 - RNA, 19 nt, Artificial Sequence
  Description of Artificial Sequence: Synthetic oligonucleotide
uacucgcugaaaguuguag

SEQ ID NO: 1206257 - RNA, 19 nt, Artificial Sequence
  Description of Artificial Sequence: Synthetic oligonucleotide
uguuaguaaccgacuuucu

SEQ ID NO: 1206258 - RNA, 19 nt, Artificial Sequence
  Description of Artificial Sequence: Synthetic oligonucleotide
aaaucgccgccacuauucu

SEQ ID NO: 1206259 - RNA, 19 nt, Artificial Sequence
  Description of Artificial Sequence: Synthetic oligonucleotide
caugauagugccguauaac

SEQ ID NO: 1206260 - RNA, 19 nt, Artificial Sequence
  Description of Artificial Sequence: Synthetic oligonucleotide
guuagcucacuccuccagc

SEQ ID NO: 1206261 - RNA, 19 nt, Artificial Sequence
  Description of Artificial Sequence: Synthetic oligonucleotide
aggaccauacucauuacga

SEQ ID NO: 1206262 - RNA, 19 nt, Artificial Sequence
  Description of Artificial Sequence: Synthetic oligonucleotide
uccagacaaaguguggaca

SEQ ID NO: 1206263 - RNA, 19 nt, Artificial Sequence
  Description of Artificial Sequence: Synthetic oligonucleotide
uacucauuacgaagcuuga

SEQ ID NO: 1206264 - RNA, 19 nt, Artificial Sequence
  Description of Artificial Sequence: Synthetic oligonucleotide
uggauguguaccugucacc

SEQ ID NO: 1206265 - RNA, 19 nt, Artificial Sequence
  Description of Artificial Sequence: Synthetic oligonucleotide
ucgcuauccaaagacccag

SEQ ID NO: 1206266 - RNA, 19 nt, Artificial Sequence
  Description of Artificial Sequence: Synthetic oligonucleotide
acagaauguuucugcaccu

SEQ ID NO: 1206267 - RNA, 19 nt, Artificial Sequence
  Description of Artificial Sequence: Synthetic oligonucleotide
gcaaauccagaccauacac

SEQ ID NO: 1206268 - RNA, 19 nt, Artificial Sequence
  Description of Artificial Sequence: Synthetic oligonucleotide
gaaucucgacuacaaguca

SEQ ID NO: 1206269 - RNA, 19 nt, Artificial Sequence
  Description of Artificial Sequence: Synthetic oligonucleotide
auuuuccacuagccaaguc

SEQ ID NO: 1206270 - RNA, 19 nt, Artificial Sequence
  Description of Artificial Sequence: Synthetic oligonucleotide
guacgauuugcaucaacuc

SEQ ID NO: 1206271 - RNA, 19 nt, Artificial Sequence
  Description of Artificial Sequence: Synthetic oligonucleotide
agacaaaguguggacacug

SEQ ID NO: 1206272 - RNA, 19 nt, Artificial Sequence
  Description of Artificial Sequence: Synthetic oligonucleotide
cugaucgaaagcacaagca

SEQ ID NO: 1206273 - RNA, 19 nt, Artificial Sequence
  Description of Artificial Sequence: Synthetic oligonucleotide
guaaugucguggauguaag

SEQ ID NO: 1206274 - RNA, 19 nt, Artificial Sequence
  Description of Artificial Sequence: Synthetic oligonucleotide
aggauacuguuuaugagga

SEQ ID NO: 1206275 - RNA, 19 nt, Artificial Sequence
  Description of Artificial Sequence: Synthetic oligonucleotide
ucggacccagccgagaugc

SEQ ID NO: 1206276 - RNA, 19 nt, Artificial Sequence
  Description of Artificial Sequence: Synthetic oligonucleotide
cagcuaaggacugugcagc

SEQ ID NO: 1206277 - RNA, 19 nt, Artificial Sequence
  Description of Artificial Sequence: Synthetic oligonucleotide
ugauaauuucugguuucca

SEQ ID NO: 1206278 - RNA, 19 nt, Artificial Sequence
  Description of Artificial Sequence: Synthetic oligonucleotide
acaguggcgacugcauucg

SEQ ID NO: 1206279 - RNA, 19 nt, Artificial Sequence
  Description of Artificial Sequence: Synthetic oligonucleotide
uaugcaauacaggaccaua

SEQ ID NO: 1206280 - RNA, 19 nt, Artificial Sequence
  Description of Artificial Sequence: Synthetic oligonucleotide
cuagccaagucccaaaucu

SEQ ID NO: 1206281 - RNA, 19 nt, Artificial Sequence
  Description of Artificial Sequence: Synthetic oligonucleotide
gauauggauguguaccugu

SEQ ID NO: 1206282 - RNA, 19 nt, Artificial Sequence
  Description of Artificial Sequence: Synthetic oligonucleotide
gucgguacucacuuccagc

SEQ ID NO: 1206283 - RNA, 19 nt, Artificial Sequence
  Description of Artificial Sequence: Synthetic oligonucleotide
uagugccauugucagcucc

SEQ ID NO: 1206284 - RNA, 19 nt, Artificial Sequence
  Description of Artificial Sequence: Synthetic oligonucleotide
cuucagcuguuaguaaccg

SEQ ID NO: 1206285 - RNA, 19 nt, Artificial Sequence
  Description of Artificial Sequence: Synthetic oligonucleotide
uugaccgccagcguguuaa

SEQ ID NO: 1206286 - RNA, 19 nt, Artificial Sequence
  Description of Artificial Sequence: Synthetic oligonucleotide
cauucguguguccagacaa

SEQ ID NO: 1206287 - RNA, 19 nt, Artificial Sequence
  Description of Artificial Sequence: Synthetic oligonucleotide
guaacgaaccacugauuuc

SEQ ID NO: 1206288 - RNA, 19 nt, Artificial Sequence
  Description of Artificial Sequence: Synthetic oligonucleotide
ugauuggcaggauacuguu

SEQ ID NO: 1206289 - RNA, 19 nt, Artificial Sequence
  Description of Artificial Sequence: Synthetic oligonucleotide
caauuguuggaugcaaauc

SEQ ID NO: 1206290 - RNA, 19 nt, Artificial Sequence
  Description of Artificial Sequence: Synthetic oligonucleotide
aaucgccgccacuauucug

SEQ ID NO: 1206291 - RNA, 19 nt, Artificial Sequence
  Description of Artificial Sequence: Synthetic oligonucleotide
auauggauguguaccuguc

SEQ ID NO: 1206292 - RNA, 19 nt, Artificial Sequence
  Description of Artificial Sequence: Synthetic oligonucleotide
accgccagcguguuaauaa

SEQ ID NO: 1206293 - RNA, 19 nt, Artificial Sequence
  Description of Artificial Sequence: Synthetic oligonucleotide
auggacgcagaaaucgccg

SEQ ID NO: 1206294 - RNA, 19 nt, Artificial Sequence
  Description of Artificial Sequence: Synthetic oligonucleotide
agcguucugaggucccuuc

SEQ ID NO: 1206295 - RNA, 19 nt, Artificial Sequence
  Description of Artificial Sequence: Synthetic oligonucleotide
agguuguacagcugcgugu

SEQ ID NO: 1206296 - RNA, 19 nt, Artificial Sequence
  Description of Artificial Sequence: Synthetic oligonucleotide
acgaaccacugauuuccgg

SEQ ID NO: 1206297 - RNA, 19 nt, Artificial Sequence
  Description of Artificial Sequence: Synthetic oligonucleotide
gauuugcaucaacucuggc

SEQ ID NO: 1206298 - RNA, 19 nt, Artificial Sequence
  Description of Artificial Sequence: Synthetic oligonucleotide
gauagugccguauaaccuu

SEQ ID NO: 1206299 - RNA, 19 nt, Artificial Sequence
  Description of Artificial Sequence: Synthetic oligonucleotide
aacgaaccacugauuuccg

SEQ ID NO: 1206300 - RNA, 19 nt, Artificial Sequence
  Description of Artificial Sequence: Synthetic oligonucleotide
gacugaucgaaagcacaag

SEQ ID NO: 1206301 - RNA, 19 nt, Artificial Sequence
  Description of Artificial Sequence: Synthetic oligonucleotide
cugacugaucgaaagcaca

SEQ ID NO: 1206302 - RNA, 19 nt, Artificial Sequence
  Description of Artificial Sequence: Synthetic oligonucleotide
cauagugccauugucagcu

SEQ ID NO: 1206303 - RNA, 19 nt, Artificial Sequence
  Description of Artificial Sequence: Synthetic oligonucleotide
uacgaagcuugauugccau

SEQ ID NO: 1206304 - RNA, 19 nt, Artificial Sequence
  Description of Artificial Sequence: Synthetic oligonucleotide
agaugcccacugauaaccc

SEQ ID NO: 1206305 - RNA, 19 nt, Artificial Sequence
  Description of Artificial Sequence: Synthetic oligonucleotide
cauuuuccgcuugugacuc

SEQ ID NO: 1206306 - RNA, 19 nt, Artificial Sequence
  Description of Artificial Sequence: Synthetic oligonucleotide
uccgggcaguugaaucucg

SEQ ID NO: 1206307 - RNA, 19 nt, Artificial Sequence
  Description of Artificial Sequence: Synthetic oligonucleotide
uuacgaucacaccccgcac

SEQ ID NO: 1206308 - RNA, 19 nt, Artificial Sequence
  Description of Artificial Sequence: Synthetic oligonucleotide
aucguauuguugugucgug

SEQ ID NO: 1206309 - RNA, 19 nt, Artificial Sequence
  Description of Artificial Sequence: Synthetic oligonucleotide
gcaauacaggaccauacuc

SEQ ID NO: 1206310 - RNA, 19 nt, Artificial Sequence
  Description of Artificial Sequence: Synthetic oligonucleotide
cuacaagucaccaggacau

SEQ ID NO: 1206311 - RNA, 19 nt, Artificial Sequence
  Description of Artificial Sequence: Synthetic oligonucleotide
uaaccgacuuucugacuga

SEQ ID NO: 1206312 - RNA, 19 nt, Artificial Sequence
  Description of Artificial Sequence: Synthetic oligonucleotide
auuccugauucgcuaucca

SEQ ID NO: 1206313 - RNA, 19 nt, Artificial Sequence
  Description of Artificial Sequence: Synthetic oligonucleotide
augaggauaugaaucugca

SEQ ID NO: 1206314 - RNA, 19 nt, Artificial Sequence
  Description of Artificial Sequence: Synthetic oligonucleotide
agcuguuaguaaccgacuu

SEQ ID NO: 1206315 - RNA, 19 nt, Artificial Sequence
  Description of Artificial Sequence: Synthetic oligonucleotide
ucguauuguugugucguga

SEQ ID NO: 1206316 - RNA, 19 nt, Artificial Sequence
  Description of Artificial Sequence: Synthetic oligonucleotide
ucgcugaaaguuguagcca

SEQ ID NO: 1206317 - RNA, 19 nt, Artificial Sequence
  Description of Artificial Sequence: Synthetic oligonucleotide
ucgcugugggcugggagcg

SEQ ID NO: 1206318 - RNA, 19 nt, Artificial Sequence
  Description of Artificial Sequence: Synthetic oligonucleotide
gauaugaaucugcagcguu

SEQ ID NO: 1206319 - RNA, 19 nt, Artificial Sequence
  Description of Artificial Sequence: Synthetic oligonucleotide
acgcagaaaucgccgccac

SEQ ID NO: 1206320 - RNA, 19 nt, Artificial Sequence
  Description of Artificial Sequence: Synthetic oligonucleotide
ugcauucguguguccagac

SEQ ID NO: 1206321 - RNA, 19 nt, Artificial Sequence
  Description of Artificial Sequence: Synthetic oligonucleotide
gaucccacaaucguauugu

SEQ ID NO: 1206322 - RNA, 19 nt, Artificial Sequence
  Description of Artificial Sequence: Synthetic oligonucleotide
gccgccacuauucugcagc

SEQ ID NO: 1206323 - RNA, 19 nt, Artificial Sequence
  Description of Artificial Sequence: Synthetic oligonucleotide
cagucccaaaggugcauag

SEQ ID NO: 1206324 - RNA, 19 nt, Artificial Sequence
  Description of Artificial Sequence: Synthetic oligonucleotide
aaccacugauuuccggguu

SEQ ID NO: 1206325 - RNA, 19 nt, Artificial Sequence
  Description of Artificial Sequence: Synthetic oligonucleotide
gugcauagugccauuguca

SEQ ID NO: 1206326 - RNA, 19 nt, Artificial Sequence
  Description of Artificial Sequence: Synthetic oligonucleotide
uaguaucagcagucagggc

SEQ ID NO: 1206327 - RNA, 19 nt, Artificial Sequence
  Description of Artificial Sequence: Synthetic oligonucleotide
guccagacaaaguguggac

SEQ ID NO: 1206328 - RNA, 19 nt, Artificial Sequence
  Description of Artificial Sequence: Synthetic oligonucleotide
uaauugcauuaugaccaga

SEQ ID NO: 1206329 - RNA, 19 nt, Artificial Sequence
  Description of Artificial Sequence: Synthetic oligonucleotide
aucuuaguaucagcaguca

SEQ ID NO: 1206330 - RNA, 19 nt, Artificial Sequence
  Description of Artificial Sequence: Synthetic oligonucleotide
aggugcauagugccauugu

SEQ ID NO: 1206331 - RNA, 19 nt, Artificial Sequence
  Description of Artificial Sequence: Synthetic oligonucleotide
aucacaccccgcacugugc

SEQ ID NO: 1206332 - RNA, 19 nt, Artificial Sequence
  Description of Artificial Sequence: Synthetic oligonucleotide
ugucauggguccucuucaa

SEQ ID NO: 1206333 - RNA, 19 nt, Artificial Sequence
  Description of Artificial Sequence: Synthetic oligonucleotide
agcugcguguacucgcuga

SEQ ID NO: 1206334 - RNA, 19 nt, Artificial Sequence
  Description of Artificial Sequence: Synthetic oligonucleotide
guguacucgcugaaaguug

SEQ ID NO: 1206335 - RNA, 19 nt, Artificial Sequence
  Description of Artificial Sequence: Synthetic oligonucleotide
ugcaucggacccagccgag

SEQ ID NO: 1206336 - RNA, 19 nt, Artificial Sequence
  Description of Artificial Sequence: Synthetic oligonucleotide
ccguauaaccuuguuauac

SEQ ID NO: 1206337 - RNA, 19 nt, Artificial Sequence
  Description of Artificial Sequence: Synthetic oligonucleotide
auagugccguauaaccuug

SEQ ID NO: 1206338 - RNA, 19 nt, Artificial Sequence
  Description of Artificial Sequence: Synthetic oligonucleotide
ccuccaucagggaauuucc

SEQ ID NO: 1206339 - RNA, 19 nt, Artificial Sequence
  Description of Artificial Sequence: Synthetic oligonucleotide
ugucgugacuuccgguaau

SEQ ID NO: 1206340 - RNA, 19 nt, Artificial Sequence
  Description of Artificial Sequence: Synthetic oligonucleotide
caaaguguggacacuggcu

SEQ ID NO: 1206341 - RNA, 19 nt, Artificial Sequence
  Description of Artificial Sequence: Synthetic oligonucleotide
agcuaaggacugugcagcu

SEQ ID NO: 1206342 - RNA, 19 nt, Artificial Sequence
  Description of Artificial Sequence: Synthetic oligonucleotide
ggugcauagugccauuguc

SEQ ID NO: 1206343 - RNA, 19 nt, Artificial Sequence
  Description of Artificial Sequence: Synthetic oligonucleotide
ggaucuuaguaucagcagu

SEQ ID NO: 1206344 - RNA, 19 nt, Artificial Sequence
  Description of Artificial Sequence: Synthetic oligonucleotide
cagauacaaguacuccguc

SEQ ID NO: 1206345 - RNA, 19 nt, Artificial Sequence
  Description of Artificial Sequence: Synthetic oligonucleotide
caccuuacaguggcgacug

SEQ ID NO: 1206346 - RNA, 19 nt, Artificial Sequence
  Description of Artificial Sequence: Synthetic oligonucleotide
uugugucgugacuuccggu

SEQ ID NO: 1206347 - RNA, 19 nt, Artificial Sequence
  Description of Artificial Sequence: Synthetic oligonucleotide
gaaccacugauuuccgggu

SEQ ID NO: 1206348 - RNA, 19 nt, Artificial Sequence
  Description of Artificial Sequence: Synthetic oligonucleotide
gcacaagcaaauauuccug

SEQ ID NO: 1206349 - RNA, 19 nt, Artificial Sequence
  Description of Artificial Sequence: Synthetic oligonucleotide
ggcauaugcaauacaggac

SEQ ID NO: 1206350 - RNA, 19 nt, Artificial Sequence
  Description of Artificial Sequence: Synthetic oligonucleotide
caucgcugugggcugggag

SEQ ID NO: 1206351 - RNA, 19 nt, Artificial Sequence
  Description of Artificial Sequence: Synthetic oligonucleotide
aggcacagguuuuccauua

SEQ ID NO: 1206352 - RNA, 19 nt, Artificial Sequence
  Description of Artificial Sequence: Synthetic oligonucleotide
auucaucgcugugggcugg

SEQ ID NO: 1206353 - RNA, 19 nt, Artificial Sequence
  Description of Artificial Sequence: Synthetic oligonucleotide
augaaucugcagcguucug

SEQ ID NO: 1206354 - RNA, 19 nt, Artificial Sequence
  Description of Artificial Sequence: Synthetic oligonucleotide
gccagcguguuaauaauug

SEQ ID NO: 1206355 - RNA, 19 nt, Artificial Sequence
  Description of Artificial Sequence: Synthetic oligonucleotide
aucaauuguuggaugcaaa

SEQ ID NO: 1206356 - RNA, 19 nt, Artificial Sequence
  Description of Artificial Sequence: Synthetic oligonucleotide
gacgcagaaaucgccgcca

SEQ ID NO: 1206357 - RNA, 19 nt, Artificial Sequence
  Description of Artificial Sequence: Synthetic oligonucleotide
cucuugauaauuucugguu

SEQ ID NO: 1206358 - RNA, 19 nt, Artificial Sequence
  Description of Artificial Sequence: Synthetic oligonucleotide
auaugcaauacaggaccau

SEQ ID NO: 1206359 - RNA, 19 nt, Artificial Sequence
  Description of Artificial Sequence: Synthetic oligonucleotide
gucgccccggguuagcuca

SEQ ID NO: 1206360 - RNA, 19 nt, Artificial Sequence
  Description of Artificial Sequence: Synthetic oligonucleotide
caguacgauuugcaucaac

SEQ ID NO: 1206361 - RNA, 19 nt, Artificial Sequence
  Description of Artificial Sequence: Synthetic oligonucleotide
cacugcacuuagauggcca

SEQ ID NO: 1206362 - RNA, 19 nt, Artificial Sequence
  Description of Artificial Sequence: Synthetic oligonucleotide
uuggcaggauacuguuuau

SEQ ID NO: 1206363 - RNA, 19 nt, Artificial Sequence
  Description of Artificial Sequence: Synthetic oligonucleotide
uucaucgcugugggcuggg

SEQ ID NO: 1206364 - RNA, 19 nt, Artificial Sequence
  Description of Artificial Sequence: Synthetic oligonucleotide
agugccguauaaccuuguu

SEQ ID NO: 1206365 - RNA, 19 nt, Artificial Sequence
  Description of Artificial Sequence: Synthetic oligonucleotide
uggcgacugcauucgugug

SEQ ID NO: 1206366 - RNA, 19 nt, Artificial Sequence
  Description of Artificial Sequence: Synthetic oligonucleotide
uagugccguauaaccuugu

SEQ ID NO: 1206367 - RNA, 19 nt, Artificial Sequence
  Description of Artificial Sequence: Synthetic oligonucleotide
gguuaauguuacucuuguc

SEQ ID NO: 1206368 - RNA, 19 nt, Artificial Sequence
  Description of Artificial Sequence: Synthetic oligonucleotide
guggcgacugcauucgugu

SEQ ID NO: 1206369 - RNA, 19 nt, Artificial Sequence
  Description of Artificial Sequence: Synthetic oligonucleotide
agccgagaugcccacugau

SEQ ID NO: 1206370 - RNA, 19 nt, Artificial Sequence
  Description of Artificial Sequence: Synthetic oligonucleotide
cguguuaauaauugcauua

SEQ ID NO: 1206371 - RNA, 19 nt, Artificial Sequence
  Description of Artificial Sequence: Synthetic oligonucleotide
uccuugugcuuacgaucac

SEQ ID NO: 1206372 - RNA, 19 nt, Artificial Sequence
  Description of Artificial Sequence: Synthetic oligonucleotide
cguauuguugugucgugac

SEQ ID NO: 1206373 - RNA, 19 nt, Artificial Sequence
  Description of Artificial Sequence: Synthetic oligonucleotide
gaugcccacugauaacccu

SEQ ID NO: 1206374 - RNA, 19 nt, Artificial Sequence
  Description of Artificial Sequence: Synthetic oligonucleotide
gugccguauaaccuuguua

SEQ ID NO: 1206375 - RNA, 19 nt, Artificial Sequence
  Description of Artificial Sequence: Synthetic oligonucleotide
cgauuugcaucaacucugg

SEQ ID NO: 1206376 - RNA, 19 nt, Artificial Sequence
  Description of Artificial Sequence: Synthetic oligonucleotide
gacccagaugcaaaugugu

SEQ ID NO: 1206377 - RNA, 19 nt, Artificial Sequence
  Description of Artificial Sequence: Synthetic oligonucleotide
caggagcaguacgauuugc

SEQ ID NO: 1206378 - RNA, 19 nt, Artificial Sequence
  Description of Artificial Sequence: Synthetic oligonucleotide
guacucacuuccagcagga

SEQ ID NO: 1206379 - RNA, 19 nt, Artificial Sequence
  Description of Artificial Sequence: Synthetic oligonucleotide
ggauauggauguguaccug

SEQ ID NO: 1206380 - RNA, 19 nt, Artificial Sequence
  Description of Artificial Sequence: Synthetic oligonucleotide
ggugccacugggguuuggg

SEQ ID NO: 1206381 - RNA, 19 nt, Artificial Sequence
  Description of Artificial Sequence: Synthetic oligonucleotide
aguacuccgucagcauuga

SEQ ID NO: 1206382 - RNA, 19 nt, Artificial Sequence
  Description of Artificial Sequence: Synthetic oligonucleotide
cacuuagauggccaugaua

SEQ ID NO: 1206383 - RNA, 19 nt, Artificial Sequence
  Description of Artificial Sequence: Synthetic oligonucleotide
gcggucagaagccccuggg

SEQ ID NO: 1206384 - RNA, 19 nt, Artificial Sequence
  Description of Artificial Sequence: Synthetic oligonucleotide
auuuuccgcuugugacucu

SEQ ID NO: 1206385 - RNA, 19 nt, Artificial Sequence
  Description of Artificial Sequence: Synthetic oligonucleotide
cuccaucagggaauuucca

SEQ ID NO: 1206386 - RNA, 19 nt, Artificial Sequence
  Description of Artificial Sequence: Synthetic oligonucleotide
ugauugccauuuuccgcuu

SEQ ID NO: 1206387 - RNA, 19 nt, Artificial Sequence
  Description of Artificial Sequence: Synthetic oligonucleotide
accgacuuucugacugauc

SEQ ID NO: 1206388 - RNA, 19 nt, Artificial Sequence
  Description of Artificial Sequence: Synthetic oligonucleotide
agcccugacugacuucuua

SEQ ID NO: 1206389 - RNA, 19 nt, Artificial Sequence
  Description of Artificial Sequence: Synthetic oligonucleotide
cugcagcguucugaggucc

SEQ ID NO: 1206390 - RNA, 19 nt, Artificial Sequence
  Description of Artificial Sequence: Synthetic oligonucleotide
aggacuccuugugcuuacg

SEQ ID NO: 1206391 - RNA, 19 nt, Artificial Sequence
  Description of Artificial Sequence: Synthetic oligonucleotide
acuuucugacugaucgaaa

SEQ ID NO: 1206392 - RNA, 19 nt, Artificial Sequence
  Description of Artificial Sequence: Synthetic oligonucleotide
cuucuuaugauugguuaau

SEQ ID NO: 1206393 - RNA, 19 nt, Artificial Sequence
  Description of Artificial Sequence: Synthetic oligonucleotide
acagcugcguguacucgcu

SEQ ID NO: 1206394 - RNA, 19 nt, Artificial Sequence
  Description of Artificial Sequence: Synthetic oligonucleotide
gccauuaaugcagaauucu

SEQ ID NO: 1206395 - RNA, 19 nt, Artificial Sequence
  Description of Artificial Sequence: Synthetic oligonucleotide
guaagaccacagcccugac

SEQ ID NO: 1206396 - RNA, 19 nt, Artificial Sequence
  Description of Artificial Sequence: Synthetic oligonucleotide
ggcaccuuacaguggcgac

SEQ ID NO: 1206397 - RNA, 19 nt, Artificial Sequence
  Description of Artificial Sequence: Synthetic oligonucleotide
ucgugacuuccgguaauua

SEQ ID NO: 1206398 - RNA, 19 nt, Artificial Sequence
  Description of Artificial Sequence: Synthetic oligonucleotide
cugcacuuagauggccaug

SEQ ID NO: 1206399 - RNA, 19 nt, Artificial Sequence
  Description of Artificial Sequence: Synthetic oligonucleotide
gccuccauaaucauggaau

SEQ ID NO: 1206400 - RNA, 19 nt, Artificial Sequence
  Description of Artificial Sequence: Synthetic oligonucleotide
acgaagcuugauugccauu

SEQ ID NO: 1206401 - RNA, 19 nt, Artificial Sequence
  Description of Artificial Sequence: Synthetic oligonucleotide
cagaccauacacugcacuu

SEQ ID NO: 1206402 - RNA, 19 nt, Artificial Sequence
  Description of Artificial Sequence: Synthetic oligonucleotide
ccagccgagaugcccacug

SEQ ID NO: 1206403 - RNA, 19 nt, Artificial Sequence
  Description of Artificial Sequence: Synthetic oligonucleotide
ggagcaguacgauuugcau

SEQ ID NO: 1206404 - RNA, 19 nt, Artificial Sequence
  Description of Artificial Sequence: Synthetic oligonucleotide
acucaagaucccagcacuu

SEQ ID NO: 1206405 - RNA, 19 nt, Artificial Sequence
  Description of Artificial Sequence: Synthetic oligonucleotide
gcauucguguguccagaca

SEQ ID NO: 1206406 - RNA, 19 nt, Artificial Sequence
  Description of Artificial Sequence: Synthetic oligonucleotide
guaaggacuccuugugcuu

SEQ ID NO: 1206407 - RNA, 19 nt, Artificial Sequence
  Description of Artificial Sequence: Synthetic oligonucleotide
cacaccccgcacugugcug

SEQ ID NO: 1206408 - RNA, 19 nt, Artificial Sequence
  Description of Artificial Sequence: Synthetic oligonucleotide
guacuccgucagcauugac

SEQ ID NO: 1206409 - RNA, 19 nt, Artificial Sequence
  Description of Artificial Sequence: Synthetic oligonucleotide
caugucgccccggguuagc

SEQ ID NO: 1206410 - RNA, 19 nt, Artificial Sequence
  Description of Artificial Sequence: Synthetic oligonucleotide
accauacacugcacuuaga

SEQ ID NO: 1206411 - RNA, 19 nt, Artificial Sequence
  Description of Artificial Sequence: Synthetic oligonucleotide
gccaugauagugccguaua

SEQ ID NO: 1206412 - RNA, 19 nt, Artificial Sequence
  Description of Artificial Sequence: Synthetic oligonucleotide
ucaucgcugugggcuggga

SEQ ID NO: 1206413 - RNA, 19 nt, Artificial Sequence
  Description of Artificial Sequence: Synthetic oligonucleotide
gucguggauguaagaccac

SEQ ID NO: 1206414 - RNA, 19 nt, Artificial Sequence
  Description of Artificial Sequence: Synthetic oligonucleotide
augucgccccggguuagcu

SEQ ID NO: 1206415 - RNA, 19 nt, Artificial Sequence
  Description of Artificial Sequence: Synthetic oligonucleotide
ccccggguuagcucacucc

SEQ ID NO: 1206416 - RNA, 19 nt, Artificial Sequence
  Description of Artificial Sequence: Synthetic oligonucleotide
auugaccgccagcguguua

SEQ ID NO: 1206417 - RNA, 19 nt, Artificial Sequence
  Description of Artificial Sequence: Synthetic oligonucleotide
cgcuauccaaagacccagg

SEQ ID NO: 1206418 - RNA, 19 nt, Artificial Sequence
  Description of Artificial Sequence: Synthetic oligonucleotide
ccauuuuccgcuugugacu

SEQ ID NO: 1206419 - RNA, 19 nt, Artificial Sequence
  Description of Artificial Sequence: Synthetic oligonucleotide
cguauaaccuuguuauacu

SEQ ID NO: 1206420 - RNA, 19 nt, Artificial Sequence
  Description of Artificial Sequence: Synthetic oligonucleotide
cgagaugcccacugauaac

SEQ ID NO: 1206421 - RNA, 19 nt, Artificial Sequence
  Description of Artificial Sequence: Synthetic oligonucleotide
ugaccgccagcguguuaau

SEQ ID NO: 1206422 - RNA, 19 nt, Artificial Sequence
  Description of Artificial Sequence: Synthetic oligonucleotide
cagcugcguguacucgcug

SEQ ID NO: 1206423 - RNA, 19 nt, Artificial Sequence
  Description of Artificial Sequence: Synthetic oligonucleotide
ggcgacugcauucgugugu

SEQ ID NO: 1206424 - RNA, 19 nt, Artificial Sequence
  Description of Artificial Sequence: Synthetic oligonucleotide
gcuguuaguaaccgacuuu

SEQ ID NO: 1206425 - RNA, 19 nt, Artificial Sequence
  Description of Artificial Sequence: Synthetic oligonucleotide
ccaugauagugccguauaa

SEQ ID NO: 1206426 - RNA, 19 nt, Artificial Sequence
  Description of Artificial Sequence: Synthetic oligonucleotide
gggagcggucagaagcccc

SEQ ID NO: 1206427 - RNA, 19 nt, Artificial Sequence
  Description of Artificial Sequence: Synthetic oligonucleotide
gcuuacgaucacaccccgc

SEQ ID NO: 1206428 - RNA, 19 nt, Artificial Sequence
  Description of Artificial Sequence: Synthetic oligonucleotide
gauuggcaggauacuguuu

SEQ ID NO: 1206429 - RNA, 19 nt, Artificial Sequence
  Description of Artificial Sequence: Synthetic oligonucleotide
ggauaugaaucugcagcgu

SEQ ID NO: 1206430 - RNA, 19 nt, Artificial Sequence
  Description of Artificial Sequence: Synthetic oligonucleotide
cagggaauuuccacugcuu

SEQ ID NO: 1206431 - RNA, 19 nt, Artificial Sequence
  Description of Artificial Sequence: Synthetic oligonucleotide
gcugcguguacucgcugaa

SEQ ID NO: 1206432 - RNA, 19 nt, Artificial Sequence
  Description of Artificial Sequence: Synthetic oligonucleotide
cauacucauuacgaagcuu

SEQ ID NO: 1206433 - RNA, 19 nt, Artificial Sequence
  Description of Artificial Sequence: Synthetic oligonucleotide
caucggacccagccgagau

SEQ ID NO: 1206434 - RNA, 19 nt, Artificial Sequence
  Description of Artificial Sequence: Synthetic oligonucleotide
gccguauaaccuuguuaua

SEQ ID NO: 1206435 - RNA, 19 nt, Artificial Sequence
  Description of Artificial Sequence: Synthetic oligonucleotide
cagccgagaugcccacuga

SEQ ID NO: 1206436 - RNA, 19 nt, Artificial Sequence
  Description of Artificial Sequence: Synthetic oligonucleotide
gcguguacucgcugaaagu

SEQ ID NO: 1206437 - RNA, 19 nt, Artificial Sequence
  Description of Artificial Sequence: Synthetic oligonucleotide
cgggcaguugaaucucgac

SEQ ID NO: 1206438 - RNA, 19 nt, Artificial Sequence
  Description of Artificial Sequence: Synthetic oligonucleotide
gcauugaccgccagcgugu

SEQ ID NO: 1206439 - RNA, 19 nt, Artificial Sequence
  Description of Artificial Sequence: Synthetic oligonucleotide
gaccgccagcguguuaaua

SEQ ID NO: 1206440 - RNA, 19 nt, Artificial Sequence
  Description of Artificial Sequence: Synthetic oligonucleotide
ccggguuagcucacuccuc

SEQ ID NO: 1206441 - RNA, 19 nt, Artificial Sequence
  Description of Artificial Sequence: Synthetic oligonucleotide
guacucgcugaaaguugua

SEQ ID NO: 1206442 - RNA, 19 nt, Artificial Sequence
  Description of Artificial Sequence: Synthetic oligonucleotide
ccuccauaaucauggaauu

SEQ ID NO: 1206443 - RNA, 19 nt, Artificial Sequence
  Description of Artificial Sequence: Synthetic oligonucleotide
cgacuacaagucaccagga

SEQ ID NO: 1206444 - RNA, 19 nt, Artificial Sequence
  Description of Artificial Sequence: Synthetic oligonucleotide
cugcguguacucgcugaaa

SEQ ID NO: 1206445 - RNA, 19 nt, Artificial Sequence
  Description of Artificial Sequence: Synthetic oligonucleotide
ccgguaauuaucugugguu

SEQ ID NO: 1206446 - RNA, 19 nt, Artificial Sequence
  Description of Artificial Sequence: Synthetic oligonucleotide
gcaccuuacaguggcgacu

SEQ ID NO: 1206447 - RNA, 19 nt, Artificial Sequence
  Description of Artificial Sequence: Synthetic oligonucleotide
cccggguuagcucacuccu

SEQ ID NO: 1206448 - RNA, 19 nt, Artificial Sequence
  Description of Artificial Sequence: Synthetic oligonucleotide
gucgugacuuccgguaauu

SEQ ID NO: 1206449 - RNA, 19 nt, Artificial Sequence
  Description of Artificial Sequence: Synthetic oligonucleotide
accccgcacugugcugaug

SEQ ID NO: 1206450 - RNA, 19 nt, Artificial Sequence
  Description of Artificial Sequence: Synthetic oligonucleotide
ccaugucgccccggguuag

SEQ ID NO: 1206451 - RNA, 19 nt, Artificial Sequence
  Description of Artificial Sequence: Synthetic oligonucleotide
ggaugcaaauccagaccau

SEQ ID NO: 1206452 - RNA, 19 nt, Artificial Sequence
  Description of Artificial Sequence: Synthetic oligonucleotide
gcaucggacccagccgaga

SEQ ID NO: 1206453 - RNA, 19 nt, Artificial Sequence
  Description of Artificial Sequence: Synthetic oligonucleotide
ccgggcaguugaaucucga

SEQ ID NO: 1206454 - RNA, 19 nt, Artificial Sequence
  Description of Artificial Sequence: Synthetic oligonucleotide
ccagauccgggcaguugaa

SEQ ID NO: 1206455 - RNA, 19 nt, Artificial Sequence
  Description of Artificial Sequence: Synthetic oligonucleotide
cagauccgggcaguugaau

SEQ ID NO: 1206456 - RNA, 19 nt, Artificial Sequence
  Description of Artificial Sequence: Synthetic oligonucleotide
gcaguacgauuugcaucaa

SEQ ID NO: 1206457 - RNA, 19 nt, Artificial Sequence
  Description of Artificial Sequence: Synthetic oligonucleotide
caguggcgacugcauucgu

SEQ ID NO: 1206458 - RNA, 19 nt, Artificial Sequence
  Description of Artificial Sequence: Synthetic oligonucleotide
cggguuccacagcaaugca

SEQ ID NO: 1206459 - RNA, 19 nt, Artificial Sequence
  Description of Artificial Sequence: Synthetic oligonucleotide
cauugaccgccagcguguu

SEQ ID NO: 1206460 - RNA, 19 nt, Artificial Sequence
  Description of Artificial Sequence: Synthetic oligonucleotide
gcagcguucugaggucccu

SEQ ID NO: 1206461 - RNA, 19 nt, Artificial Sequence
  Description of Artificial Sequence: Synthetic oligonucleotide
ccgccagcguguuaauaau

SEQ ID NO: 1206462 - RNA, 19 nt, Artificial Sequence
  Description of Artificial Sequence: Synthetic oligonucleotide
ccgccacuauucugcagcu

SEQ ID NO: 1206463 - RNA, 19 nt, Artificial Sequence
  Description of Artificial Sequence: Synthetic oligonucleotide
ccccugggugucgguacuc

SEQ ID NO: 1206464 - RNA, 19 nt, Artificial Sequence
  Description of Artificial Sequence: Synthetic oligonucleotide
cagcguucugaggucccuu

SEQ ID NO: 1206465 - RNA, 19 nt, Artificial Sequence
  Description of Artificial Sequence: Synthetic oligonucleotide
cgcagaaaucgccgccacu

SEQ ID NO: 1206466 - RNA, 19 nt, Artificial Sequence
  Description of Artificial Sequence: Synthetic oligonucleotide
cgccagcguguuaauaauu

SEQ ID NO: 1206467 - RNA, 19 nt, Artificial Sequence
  Description of Artificial Sequence: Synthetic oligonucleotide
gggcaucguaggggcuuuu

SEQ ID NO: 1206468 - RNA, 19 nt, Artificial Sequence
  Description of Artificial Sequence: Synthetic oligonucleotide
aauaccaggaaucuguacu

SEQ ID NO: 1206469 - RNA, 19 nt, Artificial Sequence
  Description of Artificial Sequence: Synthetic oligonucleotide
ucuggauucacaaagacau

SEQ ID NO: 1206470 - RNA, 19 nt, Artificial Sequence
  Description of Artificial Sequence: Synthetic oligonucleotide
auugaaaaggcgcccaucc

SEQ ID NO: 1206471 - RNA, 19 nt, Artificial Sequence
  Description of Artificial Sequence: Synthetic oligonucleotide
uggguuaucauccagggcu

SEQ ID NO: 1206472 - RNA, 19 nt, Artificial Sequence
  Description of Artificial Sequence: Synthetic oligonucleotide
auucuuauguccuaaggag

SEQ ID NO: 1206473 - RNA, 19 nt, Artificial Sequence
  Description of Artificial Sequence: Synthetic oligonucleotide
aguugaaugauaccuggac

SEQ ID NO: 1206474 - RNA, 19 nt, Artificial Sequence
  Description of Artificial Sequence: Synthetic oligonucleotide
aguguaugaguucaaacag

SEQ ID NO: 1206475 - RNA, 19 nt, Artificial Sequence
  Description of Artificial Sequence: Synthetic oligonucleotide
acucaagguauuuucagac

SEQ ID NO: 1206476 - RNA, 19 nt, Artificial Sequence
  Description of Artificial Sequence: Synthetic oligonucleotide
gaaguugaaugauaccugg

SEQ ID NO: 1206477 - RNA, 19 nt, Artificial Sequence
  Description of Artificial Sequence: Synthetic oligonucleotide
uaauugagggccaucacca

SEQ ID NO: 1206478 - RNA, 19 nt, Artificial Sequence
  Description of Artificial Sequence: Synthetic oligonucleotide
ugauucuuauguccuaagg

SEQ ID NO: 1206479 - RNA, 19 nt, Artificial Sequence
  Description of Artificial Sequence: Synthetic oligonucleotide
auagagaaugccuugguca

SEQ ID NO: 1206480 - RNA, 19 nt, Artificial Sequence
  Description of Artificial Sequence: Synthetic oligonucleotide
uuuggguuaucauccaggg

SEQ ID NO: 1206481 - RNA, 19 nt, Artificial Sequence
  Description of Artificial Sequence: Synthetic oligonucleotide
aguucaaacagaaagccuc

SEQ ID NO: 1206482 - RNA, 19 nt, Artificial Sequence
  Description of Artificial Sequence: Synthetic oligonucleotide
aaggagaucaugcuuuaug

SEQ ID NO: 1206483 - RNA, 19 nt, Artificial Sequence
  Description of Artificial Sequence: Synthetic oligonucleotide
uugaaugauaccuggacac

SEQ ID NO: 1206484 - RNA, 19 nt, Artificial Sequence
  Description of Artificial Sequence: Synthetic oligonucleotide
ucuuauguccuaaggagca

SEQ ID NO: 1206485 - RNA, 19 nt, Artificial Sequence
  Description of Artificial Sequence: Synthetic oligonucleotide
uuugagugagaaucuaugc

SEQ ID NO: 1206486 - RNA, 19 nt, Artificial Sequence
  Description of Artificial Sequence: Synthetic oligonucleotide
uguaugaguucaaacagaa

SEQ ID NO: 1206487 - RNA, 19 nt, Artificial Sequence
  Description of Artificial Sequence: Synthetic oligonucleotide
gaguguaugaguucaaaca

SEQ ID NO: 1206488 - RNA, 19 nt, Artificial Sequence
  Description of Artificial Sequence: Synthetic oligonucleotide
gauucuuauguccuaagga

SEQ ID NO: 1206489 - RNA, 19 nt, Artificial Sequence
  Description of Artificial Sequence: Synthetic oligonucleotide
ucaugcuuuaugaacucag

SEQ ID NO: 1206490 - RNA, 19 nt, Artificial Sequence
  Description of Artificial Sequence: Synthetic oligonucleotide
ugaguuggaaacuccaucu

SEQ ID NO: 1206491 - RNA, 19 nt, Artificial Sequence
  Description of Artificial Sequence: Synthetic oligonucleotide
ugcguguccacacuaauga

SEQ ID NO: 1206492 - RNA, 19 nt, Artificial Sequence
  Description of Artificial Sequence: Synthetic oligonucleotide
uugagugagaaucuaugcu

SEQ ID NO: 1206493 - RNA, 19 nt, Artificial Sequence
  Description of Artificial Sequence: Synthetic oligonucleotide
aguagcggaaggugaagcc

SEQ ID NO: 1206494 - RNA, 19 nt, Artificial Sequence
  Description of Artificial Sequence: Synthetic oligonucleotide
augcuuuaugaacucaggg

SEQ ID NO: 1206495 - RNA, 19 nt, Artificial Sequence
  Description of Artificial Sequence: Synthetic oligonucleotide
ugugcuuuggguuaucauc

SEQ ID NO: 1206496 - RNA, 19 nt, Artificial Sequence
  Description of Artificial Sequence: Synthetic oligonucleotide
ugcuuuaugaacucagggu

SEQ ID NO: 1206497 - RNA, 19 nt, Artificial Sequence
  Description of Artificial Sequence: Synthetic oligonucleotide
ugggagagguuuuagaacu

SEQ ID NO: 1206498 - RNA, 19 nt, Artificial Sequence
  Description of Artificial Sequence: Synthetic oligonucleotide
agucagacguucuggauuc

SEQ ID NO: 1206499 - RNA, 19 nt, Artificial Sequence
  Description of Artificial Sequence: Synthetic oligonucleotide
agcgucugaggacuuagcc

SEQ ID NO: 1206500 - RNA, 19 nt, Artificial Sequence
  Description of Artificial Sequence: Synthetic oligonucleotide
uguccuaaggagcagugga

SEQ ID NO: 1206501 - RNA, 19 nt, Artificial Sequence
  Description of Artificial Sequence: Synthetic oligonucleotide
ugauacuaugugcuuuggg

SEQ ID NO: 1206502 - RNA, 19 nt, Artificial Sequence
  Description of Artificial Sequence: Synthetic oligonucleotide
guaauugagggccaucacc

SEQ ID NO: 1206503 - RNA, 19 nt, Artificial Sequence
  Description of Artificial Sequence: Synthetic oligonucleotide
acucaugggacucuuuuag

SEQ ID NO: 1206504 - RNA, 19 nt, Artificial Sequence
  Description of Artificial Sequence: Synthetic oligonucleotide
auaccuggacacuuuugcc

SEQ ID NO: 1206505 - RNA, 19 nt, Artificial Sequence
  Description of Artificial Sequence: Synthetic oligonucleotide
ucacauguuugccaccggg

SEQ ID NO: 1206506 - RNA, 19 nt, Artificial Sequence
  Description of Artificial Sequence: Synthetic oligonucleotide
acacaagagguguuuugcc

SEQ ID NO: 1206507 - RNA, 19 nt, Artificial Sequence
  Description of Artificial Sequence: Synthetic oligonucleotide
ucugauacuaugugcuuug

SEQ ID NO: 1206508 - RNA, 19 nt, Artificial Sequence
  Description of Artificial Sequence: Synthetic oligonucleotide
acauguuugccaccgggac

SEQ ID NO: 1206509 - RNA, 19 nt, Artificial Sequence
  Description of Artificial Sequence: Synthetic oligonucleotide
auacucauugucauggagg

SEQ ID NO: 1206510 - RNA, 19 nt, Artificial Sequence
  Description of Artificial Sequence: Synthetic oligonucleotide
ucaagcugcaagucagacg

SEQ ID NO: 1206511 - RNA, 19 nt, Artificial Sequence
  Description of Artificial Sequence: Synthetic oligonucleotide
cuggugaaugccaaagccg

SEQ ID NO: 1206512 - RNA, 19 nt, Artificial Sequence
  Description of Artificial Sequence: Synthetic oligonucleotide
agacguucuggauuccacc

SEQ ID NO: 1206513 - RNA, 19 nt, Artificial Sequence
  Description of Artificial Sequence: Synthetic oligonucleotide
uggugaaugccaaagccga

SEQ ID NO: 1206514 - RNA, 19 nt, Artificial Sequence
  Description of Artificial Sequence: Synthetic oligonucleotide
aaucuaugcuuccgaguuc

SEQ ID NO: 1206515 - RNA, 19 nt, Artificial Sequence
  Description of Artificial Sequence: Synthetic oligonucleotide
gauacuaugugcuuugggu

SEQ ID NO: 1206516 - RNA, 19 nt, Artificial Sequence
  Description of Artificial Sequence: Synthetic oligonucleotide
uugagcauacaguagccca

SEQ ID NO: 1206517 - RNA, 19 nt, Artificial Sequence
  Description of Artificial Sequence: Synthetic oligonucleotide
aauugagggccaucaccac

SEQ ID NO: 1206518 - RNA, 19 nt, Artificial Sequence
  Description of Artificial Sequence: Synthetic oligonucleotide
cacacuaaugaacuccagg

SEQ ID NO: 1206519 - RNA, 19 nt, Artificial Sequence
  Description of Artificial Sequence: Synthetic oligonucleotide
gguauuuucagacucagaa

SEQ ID NO: 1206520 - RNA, 19 nt, Artificial Sequence
  Description of Artificial Sequence: Synthetic oligonucleotide
gucacagucagagagggag

SEQ ID NO: 1206521 - RNA, 19 nt, Artificial Sequence
  Description of Artificial Sequence: Synthetic oligonucleotide
ugagaaucuaugcuuccga

SEQ ID NO: 1206522 - RNA, 19 nt, Artificial Sequence
  Description of Artificial Sequence: Synthetic oligonucleotide
ugagugagaaucuaugcuu

SEQ ID NO: 1206523 - RNA, 19 nt, Artificial Sequence
  Description of Artificial Sequence: Synthetic oligonucleotide
ugaaugccaaagccgacgc

SEQ ID NO: 1206524 - RNA, 19 nt, Artificial Sequence
  Description of Artificial Sequence: Synthetic oligonucleotide
uguucuauuucaagcugca

SEQ ID NO: 1206525 - RNA, 19 nt, Artificial Sequence
  Description of Artificial Sequence: Synthetic oligonucleotide
aagcacacacucaugggac

SEQ ID NO: 1206526 - RNA, 19 nt, Artificial Sequence
  Description of Artificial Sequence: Synthetic oligonucleotide
uuguaggucacauguuugc

SEQ ID NO: 1206527 - RNA, 19 nt, Artificial Sequence
  Description of Artificial Sequence: Synthetic oligonucleotide
aguuggaaacuccaucuug

SEQ ID NO: 1206528 - RNA, 19 nt, Artificial Sequence
  Description of Artificial Sequence: Synthetic oligonucleotide
gagguuuuagaacugaagu

SEQ ID NO: 1206529 - RNA, 19 nt, Artificial Sequence
  Description of Artificial Sequence: Synthetic oligonucleotide
uuugccaccgggacaguag

SEQ ID NO: 1206530 - RNA, 19 nt, Artificial Sequence
  Description of Artificial Sequence: Synthetic oligonucleotide
caugcuuuaugaacucagg

SEQ ID NO: 1206531 - RNA, 19 nt, Artificial Sequence
  Description of Artificial Sequence: Synthetic oligonucleotide
aagucagacguucuggauu

SEQ ID NO: 1206532 - RNA, 19 nt, Artificial Sequence
  Description of Artificial Sequence: Synthetic oligonucleotide
agggccuugccacaguacg

SEQ ID NO: 1206533 - RNA, 19 nt, Artificial Sequence
  Description of Artificial Sequence: Synthetic oligonucleotide
aguggaagcacacacucau

SEQ ID NO: 1206534 - RNA, 19 nt, Artificial Sequence
  Description of Artificial Sequence: Synthetic oligonucleotide
gaaggugaagccauauccc

SEQ ID NO: 1206535 - RNA, 19 nt, Artificial Sequence
  Description of Artificial Sequence: Synthetic oligonucleotide
uccaccuaaggcaccaucu

SEQ ID NO: 1206536 - RNA, 19 nt, Artificial Sequence
  Description of Artificial Sequence: Synthetic oligonucleotide
gacacaagagguguuuugc

SEQ ID NO: 1206537 - RNA, 19 nt, Artificial Sequence
  Description of Artificial Sequence: Synthetic oligonucleotide
gagaaugccuuggucaucc

SEQ ID NO: 1206538 - RNA, 19 nt, Artificial Sequence
  Description of Artificial Sequence: Synthetic oligonucleotide
uacgggcagaaguugaaug

SEQ ID NO: 1206539 - RNA, 19 nt, Artificial Sequence
  Description of Artificial Sequence: Synthetic oligonucleotide
aggucuggaggucacugcg

SEQ ID NO: 1206540 - RNA, 19 nt, Artificial Sequence
  Description of Artificial Sequence: Synthetic oligonucleotide
aucucucugauacuaugug

SEQ ID NO: 1206541 - RNA, 19 nt, Artificial Sequence
  Description of Artificial Sequence: Synthetic oligonucleotide
gaagugacagugugugacc

SEQ ID NO: 1206542 - RNA, 19 nt, Artificial Sequence
  Description of Artificial Sequence: Synthetic oligonucleotide
uugagccucgaaaggauga

SEQ ID NO: 1206543 - RNA, 19 nt, Artificial Sequence
  Description of Artificial Sequence: Synthetic oligonucleotide
aguguugcccuuucuuguc

SEQ ID NO: 1206544 - RNA, 19 nt, Artificial Sequence
  Description of Artificial Sequence: Synthetic oligonucleotide
guuugagugagaaucuaug

SEQ ID NO: 1206545 - RNA, 19 nt, Artificial Sequence
  Description of Artificial Sequence: Synthetic oligonucleotide
uugcugauucuuauguccu

SEQ ID NO: 1206546 - RNA, 19 nt, Artificial Sequence
  Description of Artificial Sequence: Synthetic oligonucleotide
cagcauggcauaaggaggc

SEQ ID NO: 1206547 - RNA, 19 nt, Artificial Sequence
  Description of Artificial Sequence: Synthetic oligonucleotide
cauagggugacacccgaag

SEQ ID NO: 1206548 - RNA, 19 nt, Artificial Sequence
  Description of Artificial Sequence: Synthetic oligonucleotide
cauguucuauuucaagcug

SEQ ID NO: 1206549 - RNA, 19 nt, Artificial Sequence
  Description of Artificial Sequence: Synthetic oligonucleotide
uugggagagguuuuagaac

SEQ ID NO: 1206550 - RNA, 19 nt, Artificial Sequence
  Description of Artificial Sequence: Synthetic oligonucleotide
agauuguuccucagcaugg

SEQ ID NO: 1206551 - RNA, 19 nt, Artificial Sequence
  Description of Artificial Sequence: Synthetic oligonucleotide
agcucuuuccuugagccuc

SEQ ID NO: 1206552 - RNA, 19 nt, Artificial Sequence
  Description of Artificial Sequence: Synthetic oligonucleotide
uaggucacauguuugccac

SEQ ID NO: 1206553 - RNA, 19 nt, Artificial Sequence
  Description of Artificial Sequence: Synthetic oligonucleotide
agaaucuaugcuuccgagu

SEQ ID NO: 1206554 - RNA, 19 nt, Artificial Sequence
  Description of Artificial Sequence: Synthetic oligonucleotide
aagacauucucagcuguca

SEQ ID NO: 1206555 - RNA, 19 nt, Artificial Sequence
  Description of Artificial Sequence: Synthetic oligonucleotide
ccuuggauuacugaguugg

SEQ ID NO: 1206556 - RNA, 19 nt, Artificial Sequence
  Description of Artificial Sequence: Synthetic oligonucleotide
agguuuuagaacugaaguu

SEQ ID NO: 1206557 - RNA, 19 nt, Artificial Sequence
  Description of Artificial Sequence: Synthetic oligonucleotide
gauucccaugaacauacuc

SEQ ID NO: 1206558 - RNA, 19 nt, Artificial Sequence
  Description of Artificial Sequence: Synthetic oligonucleotide
uccgcuucagcgucugagg

SEQ ID NO: 1206559 - RNA, 19 nt, Artificial Sequence
  Description of Artificial Sequence: Synthetic oligonucleotide
acuuuugccacagacugga

SEQ ID NO: 1206560 - RNA, 19 nt, Artificial Sequence
  Description of Artificial Sequence: Synthetic oligonucleotide
ugacacaagagguguuuug

SEQ ID NO: 1206561 - RNA, 19 nt, Artificial Sequence
  Description of Artificial Sequence: Synthetic oligonucleotide
ucguaauugagggccauca

SEQ ID NO: 1206562 - RNA, 19 nt, Artificial Sequence
  Description of Artificial Sequence: Synthetic oligonucleotide
agccuuuucaguugcccag

SEQ ID NO: 1206563 - RNA, 19 nt, Artificial Sequence
  Description of Artificial Sequence: Synthetic oligonucleotide
agagguuuuagaacugaag

SEQ ID NO: 1206564 - RNA, 19 nt, Artificial Sequence
  Description of Artificial Sequence: Synthetic oligonucleotide
cuggggaauaccaggaauc

SEQ ID NO: 1206565 - RNA, 19 nt, Artificial Sequence
  Description of Artificial Sequence: Synthetic oligonucleotide
gugaaugccaaagccgacg

SEQ ID NO: 1206566 - RNA, 19 nt, Artificial Sequence
  Description of Artificial Sequence: Synthetic oligonucleotide
agaaguugaaugauaccug

SEQ ID NO: 1206567 - RNA, 19 nt, Artificial Sequence
  Description of Artificial Sequence: Synthetic oligonucleotide
gugggcaaagccuggagug

SEQ ID NO: 1206568 - RNA, 19 nt, Artificial Sequence
  Description of Artificial Sequence: Synthetic oligonucleotide
uagggugacacccgaagau

SEQ ID NO: 1206569 - RNA, 19 nt, Artificial Sequence
  Description of Artificial Sequence: Synthetic oligonucleotide
uacuaugugcuuuggguua

SEQ ID NO: 1206570 - RNA, 19 nt, Artificial Sequence
  Description of Artificial Sequence: Synthetic oligonucleotide
ugcuccagcggcgacacag

SEQ ID NO: 1206571 - RNA, 19 nt, Artificial Sequence
  Description of Artificial Sequence: Synthetic oligonucleotide
aaaaggcgcccauccuuag

SEQ ID NO: 1206572 - RNA, 19 nt, Artificial Sequence
  Description of Artificial Sequence: Synthetic oligonucleotide
gaaucuaugcuuccgaguu

SEQ ID NO: 1206573 - RNA, 19 nt, Artificial Sequence
  Description of Artificial Sequence: Synthetic oligonucleotide
agccucgaaaggaugacac

SEQ ID NO: 1206574 - RNA, 19 nt, Artificial Sequence
  Description of Artificial Sequence: Synthetic oligonucleotide
uauugcugauucuuauguc

SEQ ID NO: 1206575 - RNA, 19 nt, Artificial Sequence
  Description of Artificial Sequence: Synthetic oligonucleotide
cauagagaaugccuugguc

SEQ ID NO: 1206576 - RNA, 19 nt, Artificial Sequence
  Description of Artificial Sequence: Synthetic oligonucleotide
acgggcagaaguugaauga

SEQ ID NO: 1206577 - RNA, 19 nt, Artificial Sequence
  Description of Artificial Sequence: Synthetic oligonucleotide
caccuaaggcaccaucugg

SEQ ID NO: 1206578 - RNA, 19 nt, Artificial Sequence
  Description of Artificial Sequence: Synthetic oligonucleotide
cugaguuggaaacuccauc

SEQ ID NO: 1206579 - RNA, 19 nt, Artificial Sequence
  Description of Artificial Sequence: Synthetic oligonucleotide
gaauaccaggaaucuguac

SEQ ID NO: 1206580 - RNA, 19 nt, Artificial Sequence
  Description of Artificial Sequence: Synthetic oligonucleotide
uuggguuaucauccagggc

SEQ ID NO: 1206581 - RNA, 19 nt, Artificial Sequence
  Description of Artificial Sequence: Synthetic oligonucleotide
guccacacuaaugaacucc

SEQ ID NO: 1206582 - RNA, 19 nt, Artificial Sequence
  Description of Artificial Sequence: Synthetic oligonucleotide
acuugcucacuugugcagg

SEQ ID NO: 1206583 - RNA, 19 nt, Artificial Sequence
  Description of Artificial Sequence: Synthetic oligonucleotide
guuuuagaacugaaguuca

SEQ ID NO: 1206584 - RNA, 19 nt, Artificial Sequence
  Description of Artificial Sequence: Synthetic oligonucleotide
aaagccgacgcaggcgggg

SEQ ID NO: 1206585 - RNA, 19 nt, Artificial Sequence
  Description of Artificial Sequence: Synthetic oligonucleotide
auagggugacacccgaaga

SEQ ID NO: 1206586 - RNA, 19 nt, Artificial Sequence
  Description of Artificial Sequence: Synthetic oligonucleotide
ggcauaaggaggcuucucc

SEQ ID NO: 1206587 - RNA, 19 nt, Artificial Sequence
  Description of Artificial Sequence: Synthetic oligonucleotide
uccuugagccucgaaagga

SEQ ID NO: 1206588 - RNA, 19 nt, Artificial Sequence
  Description of Artificial Sequence: Synthetic oligonucleotide
uccgaguucuugcuucaca

SEQ ID NO: 1206589 - RNA, 19 nt, Artificial Sequence
  Description of Artificial Sequence: Synthetic oligonucleotide
aagugacagugugugacca

SEQ ID NO: 1206590 - RNA, 19 nt, Artificial Sequence
  Description of Artificial Sequence: Synthetic oligonucleotide
aucuaugcuuccgaguucu

SEQ ID NO: 1206591 - RNA, 19 nt, Artificial Sequence
  Description of Artificial Sequence: Synthetic oligonucleotide
uuauguccuaaggagcagu

SEQ ID NO: 1206592 - RNA, 19 nt, Artificial Sequence
  Description of Artificial Sequence: Synthetic oligonucleotide
cacuaaugaacuccagguc

SEQ ID NO: 1206593 - RNA, 19 nt, Artificial Sequence
  Description of Artificial Sequence: Synthetic oligonucleotide
ugaaugauaccuggacacu

SEQ ID NO: 1206594 - RNA, 19 nt, Artificial Sequence
  Description of Artificial Sequence: Synthetic oligonucleotide
uaugaacucagggucuggu

SEQ ID NO: 1206595 - RNA, 19 nt, Artificial Sequence
  Description of Artificial Sequence: Synthetic oligonucleotide
uuaugaacucagggucugg

SEQ ID NO: 1206596 - RNA, 19 nt, Artificial Sequence
  Description of Artificial Sequence: Synthetic oligonucleotide
cagaaguugaaugauaccu

SEQ ID NO: 1206597 - RNA, 19 nt, Artificial Sequence
  Description of Artificial Sequence: Synthetic oligonucleotide
cuugcucacuugugcaggc

SEQ ID NO: 1206598 - RNA, 19 nt, Artificial Sequence
  Description of Artificial Sequence: Synthetic oligonucleotide
aucuguacuuguccuggug

SEQ ID NO: 1206599 - RNA, 19 nt, Artificial Sequence
  Description of Artificial Sequence: Synthetic oligonucleotide
gagugagaaucuaugcuuc

SEQ ID NO: 1206600 - RNA, 19 nt, Artificial Sequence
  Description of Artificial Sequence: Synthetic oligonucleotide
uugccaccgggacaguagc

SEQ ID NO: 1206601 - RNA, 19 nt, Artificial Sequence
  Description of Artificial Sequence: Synthetic oligonucleotide
aaaggcgcccauccuuaga

SEQ ID NO: 1206602 - RNA, 19 nt, Artificial Sequence
  Description of Artificial Sequence: Synthetic oligonucleotide
uggggaauaccaggaaucu

SEQ ID NO: 1206603 - RNA, 19 nt, Artificial Sequence
  Description of Artificial Sequence: Synthetic oligonucleotide
uccuuagaguccaguuuga

SEQ ID NO: 1206604 - RNA, 19 nt, Artificial Sequence
  Description of Artificial Sequence: Synthetic oligonucleotide
ucuuuguaggucacauguu

SEQ ID NO: 1206605 - RNA, 19 nt, Artificial Sequence
  Description of Artificial Sequence: Synthetic oligonucleotide
aaguugaaugauaccugga

SEQ ID NO: 1206606 - RNA, 19 nt, Artificial Sequence
  Description of Artificial Sequence: Synthetic oligonucleotide
uuggauuacugaguuggaa

SEQ ID NO: 1206607 - RNA, 19 nt, Artificial Sequence
  Description of Artificial Sequence: Synthetic oligonucleotide
agggugacacccgaagauc

SEQ ID NO: 1206608 - RNA, 19 nt, Artificial Sequence
  Description of Artificial Sequence: Synthetic oligonucleotide
cacuugcucacuugugcag

SEQ ID NO: 1206609 - RNA, 19 nt, Artificial Sequence
  Description of Artificial Sequence: Synthetic oligonucleotide
uaugugcuuuggguuauca

SEQ ID NO: 1206610 - RNA, 19 nt, Artificial Sequence
  Description of Artificial Sequence: Synthetic oligonucleotide
agccauaucccaccagggu

SEQ ID NO: 1206611 - RNA, 19 nt, Artificial Sequence
  Description of Artificial Sequence: Synthetic oligonucleotide
acacucaugggacucuuuu

SEQ ID NO: 1206612 - RNA, 19 nt, Artificial Sequence
  Description of Artificial Sequence: Synthetic oligonucleotide
aggacuuagccuggaggac

SEQ ID NO: 1206613 - RNA, 19 nt, Artificial Sequence
  Description of Artificial Sequence: Synthetic oligonucleotide
uagcggaaggugaagccau

SEQ ID NO: 1206614 - RNA, 19 nt, Artificial Sequence
  Description of Artificial Sequence: Synthetic oligonucleotide
cugcaugcuccucuacagg

SEQ ID NO: 1206615 - RNA, 19 nt, Artificial Sequence
  Description of Artificial Sequence: Synthetic oligonucleotide
cuauuucaagcugcaaguc

SEQ ID NO: 1206616 - RNA, 19 nt, Artificial Sequence
  Description of Artificial Sequence: Synthetic oligonucleotide
agaguccaguuugagugag

SEQ ID NO: 1206617 - RNA, 19 nt, Artificial Sequence
  Description of Artificial Sequence: Synthetic oligonucleotide
agagguguuuugccagucu

SEQ ID NO: 1206618 - RNA, 19 nt, Artificial Sequence
  Description of Artificial Sequence: Synthetic oligonucleotide
uuagaucuucuggauucac

SEQ ID NO: 1206619 - RNA, 19 nt, Artificial Sequence
  Description of Artificial Sequence: Synthetic oligonucleotide
gagcauacaguagcccaag

SEQ ID NO: 1206620 - RNA, 19 nt, Artificial Sequence
  Description of Artificial Sequence: Synthetic oligonucleotide
auacaucugcuucugccua

SEQ ID NO: 1206621 - RNA, 19 nt, Artificial Sequence
  Description of Artificial Sequence: Synthetic oligonucleotide
auguccuaaggagcagugg

SEQ ID NO: 1206622 - RNA, 19 nt, Artificial Sequence
  Description of Artificial Sequence: Synthetic oligonucleotide
cagacguucuggauuccac

SEQ ID NO: 1206623 - RNA, 19 nt, Artificial Sequence
  Description of Artificial Sequence: Synthetic oligonucleotide
ugccaccgggacaguagcg

SEQ ID NO: 1206624 - RNA, 19 nt, Artificial Sequence
  Description of Artificial Sequence: Synthetic oligonucleotide
gggucauagggugacaccc

SEQ ID NO: 1206625 - RNA, 19 nt, Artificial Sequence
  Description of Artificial Sequence: Synthetic oligonucleotide
ugacacccgaagauccuuc

SEQ ID NO: 1206626 - RNA, 19 nt, Artificial Sequence
  Description of Artificial Sequence: Synthetic oligonucleotide
agcggcgacacagucccac

SEQ ID NO: 1206627 - RNA, 19 nt, Artificial Sequence
  Description of Artificial Sequence: Synthetic oligonucleotide
uccuuggauuacugaguug

SEQ ID NO: 1206628 - RNA, 19 nt, Artificial Sequence
  Description of Artificial Sequence: Synthetic oligonucleotide
uccucguaauugagggcca

SEQ ID NO: 1206629 - RNA, 19 nt, Artificial Sequence
  Description of Artificial Sequence: Synthetic oligonucleotide
cuaugcuuccgaguucuug

SEQ ID NO: 1206630 - RNA, 19 nt, Artificial Sequence
  Description of Artificial Sequence: Synthetic oligonucleotide
ccaaagccgacgcaggcgg

SEQ ID NO: 1206631 - RNA, 19 nt, Artificial Sequence
  Description of Artificial Sequence: Synthetic oligonucleotide
uucugccuagugaucuccu

SEQ ID NO: 1206632 - RNA, 19 nt, Artificial Sequence
  Description of Artificial Sequence: Synthetic oligonucleotide
ucagacguucuggauucca

SEQ ID NO: 1206633 - RNA, 19 nt, Artificial Sequence
  Description of Artificial Sequence: Synthetic oligonucleotide
uggcuuagaucuucuggau

SEQ ID NO: 1206634 - RNA, 19 nt, Artificial Sequence
  Description of Artificial Sequence: Synthetic oligonucleotide
accuaaggcaccaucugga

SEQ ID NO: 1206635 - RNA, 19 nt, Artificial Sequence
  Description of Artificial Sequence: Synthetic oligonucleotide
acaguacgggcagaaguug

SEQ ID NO: 1206636 - RNA, 19 nt, Artificial Sequence
  Description of Artificial Sequence: Synthetic oligonucleotide
cucacuugugcaggcuugg

SEQ ID NO: 1206637 - RNA, 19 nt, Artificial Sequence
  Description of Artificial Sequence: Synthetic oligonucleotide
gcagaaguugaaugauacc

SEQ ID NO: 1206638 - RNA, 19 nt, Artificial Sequence
  Description of Artificial Sequence: Synthetic oligonucleotide
agccacaccacuucauguu

SEQ ID NO: 1206639 - RNA, 19 nt, Artificial Sequence
  Description of Artificial Sequence: Synthetic oligonucleotide
uugugcguguccacacuaa

SEQ ID NO: 1206640 - RNA, 19 nt, Artificial Sequence
  Description of Artificial Sequence: Synthetic oligonucleotide
aggucucccucgugugggc

SEQ ID NO: 1206641 - RNA, 19 nt, Artificial Sequence
  Description of Artificial Sequence: Synthetic oligonucleotide
ccuagugaucuccucagug

SEQ ID NO: 1206642 - RNA, 19 nt, Artificial Sequence
  Description of Artificial Sequence: Synthetic oligonucleotide
ugcucacuugugcaggcuu

SEQ ID NO: 1206643 - RNA, 19 nt, Artificial Sequence
  Description of Artificial Sequence: Synthetic oligonucleotide
guguaugaguucaaacaga

SEQ ID NO: 1206644 - RNA, 19 nt, Artificial Sequence
  Description of Artificial Sequence: Synthetic oligonucleotide
cugauacuaugugcuuugg

SEQ ID NO: 1206645 - RNA, 19 nt, Artificial Sequence
  Description of Artificial Sequence: Synthetic oligonucleotide
gcgacacagucccacaaag

SEQ ID NO: 1206646 - RNA, 19 nt, Artificial Sequence
  Description of Artificial Sequence: Synthetic oligonucleotide
aggguugugcugauacauc

SEQ ID NO: 1206647 - RNA, 19 nt, Artificial Sequence
  Description of Artificial Sequence: Synthetic oligonucleotide
ugagccucgaaaggaugac

SEQ ID NO: 1206648 - RNA, 19 nt, Artificial Sequence
  Description of Artificial Sequence: Synthetic oligonucleotide
uuuugccagucuggguucc

SEQ ID NO: 1206649 - RNA, 19 nt, Artificial Sequence
  Description of Artificial Sequence: Synthetic oligonucleotide
augauaccuggacacuuuu

SEQ ID NO: 1206650 - RNA, 19 nt, Artificial Sequence
  Description of Artificial Sequence: Synthetic oligonucleotide
gaaaaggcgcccauccuua

SEQ ID NO: 1206651 - RNA, 19 nt, Artificial Sequence
  Description of Artificial Sequence: Synthetic oligonucleotide
aggagcgggaccaugcacu

SEQ ID NO: 1206652 - RNA, 19 nt, Artificial Sequence
  Description of Artificial Sequence: Synthetic oligonucleotide
cauguuugccaccgggaca

SEQ ID NO: 1206653 - RNA, 19 nt, Artificial Sequence
  Description of Artificial Sequence: Synthetic oligonucleotide
guagcggaaggugaagcca

SEQ ID NO: 1206654 - RNA, 19 nt, Artificial Sequence
  Description of Artificial Sequence: Synthetic oligonucleotide
uccucaguguugggaaggc

SEQ ID NO: 1206655 - RNA, 19 nt, Artificial Sequence
  Description of Artificial Sequence: Synthetic oligonucleotide
uaggaguguaugaguucaa

SEQ ID NO: 1206656 - RNA, 19 nt, Artificial Sequence
  Description of Artificial Sequence: Synthetic oligonucleotide
cuuagccuggaggacugug

SEQ ID NO: 1206657 - RNA, 19 nt, Artificial Sequence
  Description of Artificial Sequence: Synthetic oligonucleotide
ugcugauucuuauguccua

SEQ ID NO: 1206658 - RNA, 19 nt, Artificial Sequence
  Description of Artificial Sequence: Synthetic oligonucleotide
gacgcaggcggggauggcc

SEQ ID NO: 1206659 - RNA, 19 nt, Artificial Sequence
  Description of Artificial Sequence: Synthetic oligonucleotide
cuuggauuacugaguugga

SEQ ID NO: 1206660 - RNA, 19 nt, Artificial Sequence
  Description of Artificial Sequence: Synthetic oligonucleotide
accgggacaguagcggaag

SEQ ID NO: 1206661 - RNA, 19 nt, Artificial Sequence
  Description of Artificial Sequence: Synthetic oligonucleotide
gcccuuucuugucuguuag

SEQ ID NO: 1206662 - RNA, 19 nt, Artificial Sequence
  Description of Artificial Sequence: Synthetic oligonucleotide
cucauugaaaaggcgccca

SEQ ID NO: 1206663 - RNA, 19 nt, Artificial Sequence
  Description of Artificial Sequence: Synthetic oligonucleotide
gugcguguccacacuaaug

SEQ ID NO: 1206664 - RNA, 19 nt, Artificial Sequence
  Description of Artificial Sequence: Synthetic oligonucleotide
cagcugucagauucccaug

SEQ ID NO: 1206665 - RNA, 19 nt, Artificial Sequence
  Description of Artificial Sequence: Synthetic oligonucleotide
acuaugugcuuuggguuau

SEQ ID NO: 1206666 - RNA, 19 nt, Artificial Sequence
  Description of Artificial Sequence: Synthetic oligonucleotide
ggagaucaugcuuuaugaa

SEQ ID NO: 1206667 - RNA, 19 nt, Artificial Sequence
  Description of Artificial Sequence: Synthetic oligonucleotide
ucacuugugcaggcuuggc

SEQ ID NO: 1206668 - RNA, 19 nt, Artificial Sequence
  Description of Artificial Sequence: Synthetic oligonucleotide
gggugacacccgaagaucc

SEQ ID NO: 1206669 - RNA, 19 nt, Artificial Sequence
  Description of Artificial Sequence: Synthetic oligonucleotide
caguacgggcagaaguuga

SEQ ID NO: 1206670 - RNA, 19 nt, Artificial Sequence
  Description of Artificial Sequence: Synthetic oligonucleotide
cucaagguauuuucagacu

SEQ ID NO: 1206671 - RNA, 19 nt, Artificial Sequence
  Description of Artificial Sequence: Synthetic oligonucleotide
aggaguguaugaguucaaa

SEQ ID NO: 1206672 - RNA, 19 nt, Artificial Sequence
  Description of Artificial Sequence: Synthetic oligonucleotide
uggacacuuuugccacaga

SEQ ID NO: 1206673 - RNA, 19 nt, Artificial Sequence
  Description of Artificial Sequence: Synthetic oligonucleotide
gaaugauaccuggacacuu

SEQ ID NO: 1206674 - RNA, 19 nt, Artificial Sequence
  Description of Artificial Sequence: Synthetic oligonucleotide
cauugucauggaggaacug

SEQ ID NO: 1206675 - RNA, 19 nt, Artificial Sequence
  Description of Artificial Sequence: Synthetic oligonucleotide
caggagcgggaccaugcac

SEQ ID NO: 1206676 - RNA, 19 nt, Artificial Sequence
  Description of Artificial Sequence: Synthetic oligonucleotide
guugggaaggcagcuuguc

SEQ ID NO: 1206677 - RNA, 19 nt, Artificial Sequence
  Description of Artificial Sequence: Synthetic oligonucleotide
ggggucauagggugacacc

SEQ ID NO: 1206678 - RNA, 19 nt, Artificial Sequence
  Description of Artificial Sequence: Synthetic oligonucleotide
ccuggagugagguggucac

SEQ ID NO: 1206679 - RNA, 19 nt, Artificial Sequence
  Description of Artificial Sequence: Synthetic oligonucleotide
auaucccaccagggucacc

SEQ ID NO: 1206680 - RNA, 19 nt, Artificial Sequence
  Description of Artificial Sequence: Synthetic oligonucleotide
acguucuggauuccaccua

SEQ ID NO: 1206681 - RNA, 19 nt, Artificial Sequence
  Description of Artificial Sequence: Synthetic oligonucleotide
gccaccgggacaguagcgg

SEQ ID NO: 1206682 - RNA, 19 nt, Artificial Sequence
  Description of Artificial Sequence: Synthetic oligonucleotide
caguggaagcacacacuca

SEQ ID NO: 1206683 - RNA, 19 nt, Artificial Sequence
  Description of Artificial Sequence: Synthetic oligonucleotide
cuugugcguguccacacua

SEQ ID NO: 1206684 - RNA, 19 nt, Artificial Sequence
  Description of Artificial Sequence: Synthetic oligonucleotide
cuuccacuugcucacuugu

SEQ ID NO: 1206685 - RNA, 19 nt, Artificial Sequence
  Description of Artificial Sequence: Synthetic oligonucleotide
caucccuugugcgugucca

SEQ ID NO: 1206686 - RNA, 19 nt, Artificial Sequence
  Description of Artificial Sequence: Synthetic oligonucleotide
gagccucgaaaggaugaca

SEQ ID NO: 1206687 - RNA, 19 nt, Artificial Sequence
  Description of Artificial Sequence: Synthetic oligonucleotide
gacucuuuuaggaguguau

SEQ ID NO: 1206688 - RNA, 19 nt, Artificial Sequence
  Description of Artificial Sequence: Synthetic oligonucleotide
agguauuuucagacucaga

SEQ ID NO: 1206689 - RNA, 19 nt, Artificial Sequence
  Description of Artificial Sequence: Synthetic oligonucleotide
ggagcgggaccaugcacug

SEQ ID NO: 1206690 - RNA, 19 nt, Artificial Sequence
  Description of Artificial Sequence: Synthetic oligonucleotide
guaugaguucaaacagaaa

SEQ ID NO: 1206691 - RNA, 19 nt, Artificial Sequence
  Description of Artificial Sequence: Synthetic oligonucleotide
aggccuugcuccagcggcg

SEQ ID NO: 1206692 - RNA, 19 nt, Artificial Sequence
  Description of Artificial Sequence: Synthetic oligonucleotide
cacaguacgggcagaaguu

SEQ ID NO: 1206693 - RNA, 19 nt, Artificial Sequence
  Description of Artificial Sequence: Synthetic oligonucleotide
cuuuucaguugcccagcaa

SEQ ID NO: 1206694 - RNA, 19 nt, Artificial Sequence
  Description of Artificial Sequence: Synthetic oligonucleotide
ggguuaucauccagggcug

SEQ ID NO: 1206695 - RNA, 19 nt, Artificial Sequence
  Description of Artificial Sequence: Synthetic oligonucleotide
guccuuggauuacugaguu

SEQ ID NO: 1206696 - RNA, 19 nt, Artificial Sequence
  Description of Artificial Sequence: Synthetic oligonucleotide
ggacaguagcggaagguga

SEQ ID NO: 1206697 - RNA, 19 nt, Artificial Sequence
  Description of Artificial Sequence: Synthetic oligonucleotide
aagccgacgcaggcgggga

SEQ ID NO: 1206698 - RNA, 19 nt, Artificial Sequence
  Description of Artificial Sequence: Synthetic oligonucleotide
gaguuggaaacuccaucuu

SEQ ID NO: 1206699 - RNA, 19 nt, Artificial Sequence
  Description of Artificial Sequence: Synthetic oligonucleotide
ggcaaagccuggagugagg

SEQ ID NO: 1206700 - RNA, 19 nt, Artificial Sequence
  Description of Artificial Sequence: Synthetic oligonucleotide
ccaccuaaggcaccaucug

SEQ ID NO: 1206701 - RNA, 19 nt, Artificial Sequence
  Description of Artificial Sequence: Synthetic oligonucleotide
cauaucccaccagggucac

SEQ ID NO: 1206702 - RNA, 19 nt, Artificial Sequence
  Description of Artificial Sequence: Synthetic oligonucleotide
ucucccucgugugggcuuc

SEQ ID NO: 1206703 - RNA, 19 nt, Artificial Sequence
  Description of Artificial Sequence: Synthetic oligonucleotide
uuccgaguucuugcuucac

SEQ ID NO: 1206704 - RNA, 19 nt, Artificial Sequence
  Description of Artificial Sequence: Synthetic oligonucleotide
aggcgcccauccuuagagu

SEQ ID NO: 1206705 - RNA, 19 nt, Artificial Sequence
  Description of Artificial Sequence: Synthetic oligonucleotide
ucacugcggcgggagggcc

SEQ ID NO: 1206706 - RNA, 19 nt, Artificial Sequence
  Description of Artificial Sequence: Synthetic oligonucleotide
uucagcgucugaggacuua

SEQ ID NO: 1206707 - RNA, 19 nt, Artificial Sequence
  Description of Artificial Sequence: Synthetic oligonucleotide
gacucagaacugucacagu

SEQ ID NO: 1206708 - RNA, 19 nt, Artificial Sequence
  Description of Artificial Sequence: Synthetic oligonucleotide
cccagacuggggaauacca

SEQ ID NO: 1206709 - RNA, 19 nt, Artificial Sequence
  Description of Artificial Sequence: Synthetic oligonucleotide
uugcuucacaggggaggac

SEQ ID NO: 1206710 - RNA, 19 nt, Artificial Sequence
  Description of Artificial Sequence: Synthetic oligonucleotide
cccaguguccaguguugcc

SEQ ID NO: 1206711 - RNA, 19 nt, Artificial Sequence
  Description of Artificial Sequence: Synthetic oligonucleotide
cacuugugcaggcuuggcu

SEQ ID NO: 1206712 - RNA, 19 nt, Artificial Sequence
  Description of Artificial Sequence: Synthetic oligonucleotide
ccacuugcucacuugugca

SEQ ID NO: 1206713 - RNA, 19 nt, Artificial Sequence
  Description of Artificial Sequence: Synthetic oligonucleotide
ggugaaugccaaagccgac

SEQ ID NO: 1206714 - RNA, 19 nt, Artificial Sequence
  Description of Artificial Sequence: Synthetic oligonucleotide
caagucagacguucuggau

SEQ ID NO: 1206715 - RNA, 19 nt, Artificial Sequence
  Description of Artificial Sequence: Synthetic oligonucleotide
cacaccacuucauguucua

SEQ ID NO: 1206716 - RNA, 19 nt, Artificial Sequence
  Description of Artificial Sequence: Synthetic oligonucleotide
cagccacaccacuucaugu

SEQ ID NO: 1206717 - RNA, 19 nt, Artificial Sequence
  Description of Artificial Sequence: Synthetic oligonucleotide
gcgucugaggacuuagccu

SEQ ID NO: 1206718 - RNA, 19 nt, Artificial Sequence
  Description of Artificial Sequence: Synthetic oligonucleotide
gcuucagcgucugaggacu

SEQ ID NO: 1206719 - RNA, 19 nt, Artificial Sequence
  Description of Artificial Sequence: Synthetic oligonucleotide
caggguugugcugauacau

SEQ ID NO: 1206720 - RNA, 19 nt, Artificial Sequence
  Description of Artificial Sequence: Synthetic oligonucleotide
guuccucagcauggcauaa

SEQ ID NO: 1206721 - RNA, 19 nt, Artificial Sequence
  Description of Artificial Sequence: Synthetic oligonucleotide
cccuugugcguguccacac

SEQ ID NO: 1206722 - RNA, 19 nt, Artificial Sequence
  Description of Artificial Sequence: Synthetic oligonucleotide
gucagacguucuggauucc

SEQ ID NO: 1206723 - RNA, 19 nt, Artificial Sequence
  Description of Artificial Sequence: Synthetic oligonucleotide
cuaugugcuuuggguuauc

SEQ ID NO: 1206724 - RNA, 19 nt, Artificial Sequence
  Description of Artificial Sequence: Synthetic oligonucleotide
ggaauaccaggaaucugua

SEQ ID NO: 1206725 - RNA, 19 nt, Artificial Sequence
  Description of Artificial Sequence: Synthetic oligonucleotide
gggaccaugcacugcuucu

SEQ ID NO: 1206726 - RNA, 19 nt, Artificial Sequence
  Description of Artificial Sequence: Synthetic oligonucleotide
ggcgacacagucccacaaa

SEQ ID NO: 1206727 - RNA, 19 nt, Artificial Sequence
  Description of Artificial Sequence: Synthetic oligonucleotide
gcaucccuugugcgugucc

SEQ ID NO: 1206728 - RNA, 19 nt, Artificial Sequence
  Description of Artificial Sequence: Synthetic oligonucleotide
cucugauacuaugugcuuu

SEQ ID NO: 1206729 - RNA, 19 nt, Artificial Sequence
  Description of Artificial Sequence: Synthetic oligonucleotide
gcgcccauccuuagagucc

SEQ ID NO: 1206730 - RNA, 19 nt, Artificial Sequence
  Description of Artificial Sequence: Synthetic oligonucleotide
acuuagccuggaggacugu

SEQ ID NO: 1206731 - RNA, 19 nt, Artificial Sequence
  Description of Artificial Sequence: Synthetic oligonucleotide
caccgggacaguagcggaa

SEQ ID NO: 1206732 - RNA, 19 nt, Artificial Sequence
  Description of Artificial Sequence: Synthetic oligonucleotide
guuugccaccgggacagua

SEQ ID NO: 1206733 - RNA, 19 nt, Artificial Sequence
  Description of Artificial Sequence: Synthetic oligonucleotide
caggagaacucaagguauu

SEQ ID NO: 1206734 - RNA, 19 nt, Artificial Sequence
  Description of Artificial Sequence: Synthetic oligonucleotide
cccgcaucccuugugcgug

SEQ ID NO: 1206735 - RNA, 19 nt, Artificial Sequence
  Description of Artificial Sequence: Synthetic oligonucleotide
ggcuuagaucuucuggauu

SEQ ID NO: 1206736 - RNA, 19 nt, Artificial Sequence
  Description of Artificial Sequence: Synthetic oligonucleotide
uguuugccaccgggacagu

SEQ ID NO: 1206737 - RNA, 19 nt, Artificial Sequence
  Description of Artificial Sequence: Synthetic oligonucleotide
ggacucuuuuaggagugua

SEQ ID NO: 1206738 - RNA, 19 nt, Artificial Sequence
  Description of Artificial Sequence: Synthetic oligonucleotide
cccucgugugggcuucugc

SEQ ID NO: 1206739 - RNA, 19 nt, Artificial Sequence
  Description of Artificial Sequence: Synthetic oligonucleotide
uugcuccagcggcgacaca

SEQ ID NO: 1206740 - RNA, 19 nt, Artificial Sequence
  Description of Artificial Sequence: Synthetic oligonucleotide
ccgggacaguagcggaagg

SEQ ID NO: 1206741 - RNA, 19 nt, Artificial Sequence
  Description of Artificial Sequence: Synthetic oligonucleotide
guccaguuugagugagaau

SEQ ID NO: 1206742 - RNA, 19 nt, Artificial Sequence
  Description of Artificial Sequence: Synthetic oligonucleotide
ccuuuucaguugcccagca

SEQ ID NO: 1206743 - RNA, 19 nt, Artificial Sequence
  Description of Artificial Sequence: Synthetic oligonucleotide
agccgacgcaggcggggau

SEQ ID NO: 1206744 - RNA, 19 nt, Artificial Sequence
  Description of Artificial Sequence: Synthetic oligonucleotide
cggaaggugaagccauauc

SEQ ID NO: 1206745 - RNA, 19 nt, Artificial Sequence
  Description of Artificial Sequence: Synthetic oligonucleotide
gucacccggcuccgcuuca

SEQ ID NO: 1206746 - RNA, 19 nt, Artificial Sequence
  Description of Artificial Sequence: Synthetic oligonucleotide
guacgggcagaaguugaau

SEQ ID NO: 1206747 - RNA, 19 nt, Artificial Sequence
  Description of Artificial Sequence: Synthetic oligonucleotide
ccgcuucagcgucugagga

SEQ ID NO: 1206748 - RNA, 19 nt, Artificial Sequence
  Description of Artificial Sequence: Synthetic oligonucleotide
cacacacucaugggacucu

SEQ ID NO: 1206749 - RNA, 19 nt, Artificial Sequence
  Description of Artificial Sequence: Synthetic oligonucleotide
agcggaaggugaagccaua

SEQ ID NO: 1206750 - RNA, 19 nt, Artificial Sequence
  Description of Artificial Sequence: Synthetic oligonucleotide
gccgacgcaggcggggaug

SEQ ID NO: 1206751 - RNA, 19 nt, Artificial Sequence
  Description of Artificial Sequence: Synthetic oligonucleotide
ggcuccgcuucagcgucug

SEQ ID NO: 1206752 - RNA, 19 nt, Artificial Sequence
  Description of Artificial Sequence: Synthetic oligonucleotide
gcggcgacacagucccaca

SEQ ID NO: 1206753 - RNA, 19 nt, Artificial Sequence
  Description of Artificial Sequence: Synthetic oligonucleotide
ccaggagcgggaccaugca

SEQ ID NO: 1206754 - RNA, 19 nt, Artificial Sequence
  Description of Artificial Sequence: Synthetic oligonucleotide
ggccuugcuccagcggcga

SEQ ID NO: 1206755 - RNA, 19 nt, Artificial Sequence
  Description of Artificial Sequence: Synthetic oligonucleotide
gcccgcaucccuugugcgu

SEQ ID NO: 1206756 - RNA, 19 nt, Artificial Sequence
  Description of Artificial Sequence: Synthetic oligonucleotide
cuucagcgucugaggacuu

SEQ ID NO: 1206757 - RNA, 19 nt, Artificial Sequence
  Description of Artificial Sequence: Synthetic oligonucleotide
gggacucuuuuaggagugu

SEQ ID NO: 1206758 - RNA, 19 nt, Artificial Sequence
  Description of Artificial Sequence: Synthetic oligonucleotide
ccuugugcguguccacacu

SEQ ID NO: 1206759 - RNA, 19 nt, Artificial Sequence
  Description of Artificial Sequence: Synthetic oligonucleotide
cacugucuugggagagguu

SEQ ID NO: 1206760 - RNA, 19 nt, Artificial Sequence
  Description of Artificial Sequence: Synthetic oligonucleotide
gcggaaggugaagccauau

SEQ ID NO: 1206761 - RNA, 19 nt, Artificial Sequence
  Description of Artificial Sequence: Synthetic oligonucleotide
ggucucccucgugugggcu

SEQ ID NO: 1206762 - RNA, 19 nt, Artificial Sequence
  Description of Artificial Sequence: Synthetic oligonucleotide
cagcggcgacacaguccca

SEQ ID NO: 1206763 - RNA, 19 nt, Artificial Sequence
  Description of Artificial Sequence: Synthetic oligonucleotide
ggucaggguugugcugaua

SEQ ID NO: 1206764 - RNA, 19 nt, Artificial Sequence
  Description of Artificial Sequence: Synthetic oligonucleotide
gcuccgcuucagcgucuga

SEQ ID NO: 1206765 - RNA, 19 nt, Artificial Sequence
  Description of Artificial Sequence: Synthetic oligonucleotide
cggcgacacagucccacaa

SEQ ID NO: 1206766 - RNA, 19 nt, Artificial Sequence
  Description of Artificial Sequence: Synthetic oligonucleotide
gcagggcuucuagauuguu

SEQ ID NO: 1206767 - RNA, 19 nt, Artificial Sequence
  Description of Artificial Sequence: Synthetic oligonucleotide
cgcaucccuugugcguguc

SEQ ID NO: 1206768 - RNA, 19 nt, Artificial Sequence
  Description of Artificial Sequence: Synthetic oligonucleotide
cucccucgugugggcuucu

SEQ ID NO: 1206769 - RNA, 19 nt, Artificial Sequence
  Description of Artificial Sequence: Synthetic oligonucleotide
ccgcaucccuugugcgugu

SEQ ID NO: 1206770 - RNA, 19 nt, Artificial Sequence
  Description of Artificial Sequence: Synthetic oligonucleotide
gcgggaccaugcacugcuu

SEQ ID NO: 1206771 - RNA, 19 nt, Artificial Sequence
  Description of Artificial Sequence: Synthetic oligonucleotide
uugaacauaaauuucuccc

SEQ ID NO: 1206772 - RNA, 19 nt, Artificial Sequence
  Description of Artificial Sequence: Synthetic oligonucleotide
aaaaucugcaaauguagcu

SEQ ID NO: 1206773 - RNA, 19 nt, Artificial Sequence
  Description of Artificial Sequence: Synthetic oligonucleotide
aaagauuuccaguuugcug

SEQ ID NO: 1206774 - RNA, 19 nt, Artificial Sequence
  Description of Artificial Sequence: Synthetic oligonucleotide
uuaagcgucauguucugcg

SEQ ID NO: 1206775 - RNA, 19 nt, Artificial Sequence
  Description of Artificial Sequence: Synthetic oligonucleotide
auuucagagucccugcugc

SEQ ID NO: 1206776 - RNA, 19 nt, Artificial Sequence
  Description of Artificial Sequence: Synthetic oligonucleotide
uuaaaugucuccuuuggac

SEQ ID NO: 1206777 - RNA, 19 nt, Artificial Sequence
  Description of Artificial Sequence: Synthetic oligonucleotide
auuucgaaggcugauuucc

SEQ ID NO: 1206778 - RNA, 19 nt, Artificial Sequence
  Description of Artificial Sequence: Synthetic oligonucleotide
agaguuaagcgucauguuc

SEQ ID NO: 1206779 - RNA, 19 nt, Artificial Sequence
  Description of Artificial Sequence: Synthetic oligonucleotide
uccagauuccauuucagag

SEQ ID NO: 1206780 - RNA, 19 nt, Artificial Sequence
  Description of Artificial Sequence: Synthetic oligonucleotide
auagguagaaguccgcugg

SEQ ID NO: 1206781 - RNA, 19 nt, Artificial Sequence
  Description of Artificial Sequence: Synthetic oligonucleotide
aagaacgucucucuuggag

SEQ ID NO: 1206782 - RNA, 19 nt, Artificial Sequence
  Description of Artificial Sequence: Synthetic oligonucleotide
uaaaugucuccuuuggacc

SEQ ID NO: 1206783 - RNA, 19 nt, Artificial Sequence
  Description of Artificial Sequence: Synthetic oligonucleotide
uccaccuuugaccugauga

SEQ ID NO: 1206784 - RNA, 19 nt, Artificial Sequence
  Description of Artificial Sequence: Synthetic oligonucleotide
agcucuugcuuccagauuc

SEQ ID NO: 1206785 - RNA, 19 nt, Artificial Sequence
  Description of Artificial Sequence: Synthetic oligonucleotide
cucauuguuaugauucugg

SEQ ID NO: 1206786 - RNA, 19 nt, Artificial Sequence
  Description of Artificial Sequence: Synthetic oligonucleotide
aagaugaagaccagaacuc

SEQ ID NO: 1206787 - RNA, 19 nt, Artificial Sequence
  Description of Artificial Sequence: Synthetic oligonucleotide
cuugccguguuauugaagc

SEQ ID NO: 1206788 - RNA, 19 nt, Artificial Sequence
  Description of Artificial Sequence: Synthetic oligonucleotide
uuugcugagcacuguagcg

SEQ ID NO: 1206789 - RNA, 19 nt, Artificial Sequence
  Description of Artificial Sequence: Synthetic oligonucleotide
guucacuccaaucacagug

SEQ ID NO: 1206790 - RNA, 19 nt, Artificial Sequence
  Description of Artificial Sequence: Synthetic oligonucleotide
ucugguccaucuuaggagg

SEQ ID NO: 1206791 - RNA, 19 nt, Artificial Sequence
  Description of Artificial Sequence: Synthetic oligonucleotide
gacggcacaguucagcugg

SEQ ID NO: 1206792 - RNA, 19 nt, Artificial Sequence
  Description of Artificial Sequence: Synthetic oligonucleotide
uuaucauagguagaagucc

SEQ ID NO: 1206793 - RNA, 19 nt, Artificial Sequence
  Description of Artificial Sequence: Synthetic oligonucleotide
agaaccucaagccucgguc

SEQ ID NO: 1206794 - RNA, 19 nt, Artificial Sequence
  Description of Artificial Sequence: Synthetic oligonucleotide
agcguuugaguccuuuucc

SEQ ID NO: 1206795 - RNA, 19 nt, Artificial Sequence
  Description of Artificial Sequence: Synthetic oligonucleotide
uuguugacggcacaguuca

SEQ ID NO: 1206796 - RNA, 19 nt, Artificial Sequence
  Description of Artificial Sequence: Synthetic oligonucleotide
caaagagucaaggucaucc

SEQ ID NO: 1206797 - RNA, 19 nt, Artificial Sequence
  Description of Artificial Sequence: Synthetic oligonucleotide
cuuuuguagaugcuggacc

SEQ ID NO: 1206798 - RNA, 19 nt, Artificial Sequence
  Description of Artificial Sequence: Synthetic oligonucleotide
ugagaguuaagcgucaugu

SEQ ID NO: 1206799 - RNA, 19 nt, Artificial Sequence
  Description of Artificial Sequence: Synthetic oligonucleotide
guugucacgaggaagaaug

SEQ ID NO: 1206800 - RNA, 19 nt, Artificial Sequence
  Description of Artificial Sequence: Synthetic oligonucleotide
aaaugucuccuuuggaccu

SEQ ID NO: 1206801 - RNA, 19 nt, Artificial Sequence
  Description of Artificial Sequence: Synthetic oligonucleotide
gacgucaggaaacacuucc

SEQ ID NO: 1206802 - RNA, 19 nt, Artificial Sequence
  Description of Artificial Sequence: Synthetic oligonucleotide
ugagaugccacacaccuua

SEQ ID NO: 1206803 - RNA, 19 nt, Artificial Sequence
  Description of Artificial Sequence: Synthetic oligonucleotide
uauugaagcugucuguccu

SEQ ID NO: 1206804 - RNA, 19 nt, Artificial Sequence
  Description of Artificial Sequence: Synthetic oligonucleotide
uccaguuugcugcuacugg

SEQ ID NO: 1206805 - RNA, 19 nt, Artificial Sequence
  Description of Artificial Sequence: Synthetic oligonucleotide
auugaguucguacuugaga

SEQ ID NO: 1206806 - RNA, 19 nt, Artificial Sequence
  Description of Artificial Sequence: Synthetic oligonucleotide
uaucugguccaucuuagga

SEQ ID NO: 1206807 - RNA, 19 nt, Artificial Sequence
  Description of Artificial Sequence: Synthetic oligonucleotide
agaguccucauugaguucg

SEQ ID NO: 1206808 - RNA, 19 nt, Artificial Sequence
  Description of Artificial Sequence: Synthetic oligonucleotide
auuuccaguuugcugcuac

SEQ ID NO: 1206809 - RNA, 19 nt, Artificial Sequence
  Description of Artificial Sequence: Synthetic oligonucleotide
gacuguaguugucacgagg

SEQ ID NO: 1206810 - RNA, 19 nt, Artificial Sequence
  Description of Artificial Sequence: Synthetic oligonucleotide
cuuagcccagacaucauag

SEQ ID NO: 1206811 - RNA, 19 nt, Artificial Sequence
  Description of Artificial Sequence: Synthetic oligonucleotide
ucguacuugagaguuaagc

SEQ ID NO: 1206812 - RNA, 19 nt, Artificial Sequence
  Description of Artificial Sequence: Synthetic oligonucleotide
ugcaaauguagcucaggag

SEQ ID NO: 1206813 - RNA, 19 nt, Artificial Sequence
  Description of Artificial Sequence: Synthetic oligonucleotide
uguaguugucacgaggaag

SEQ ID NO: 1206814 - RNA, 19 nt, Artificial Sequence
  Description of Artificial Sequence: Synthetic oligonucleotide
uguuauugaagcugucugu

SEQ ID NO: 1206815 - RNA, 19 nt, Artificial Sequence
  Description of Artificial Sequence: Synthetic oligonucleotide
uguuccucauacaugugcu

SEQ ID NO: 1206816 - RNA, 19 nt, Artificial Sequence
  Description of Artificial Sequence: Synthetic oligonucleotide
ucuugagacacaguucucc

SEQ ID NO: 1206817 - RNA, 19 nt, Artificial Sequence
  Description of Artificial Sequence: Synthetic oligonucleotide
gacuucuucuuccaauacc

SEQ ID NO: 1206818 - RNA, 19 nt, Artificial Sequence
  Description of Artificial Sequence: Synthetic oligonucleotide
uuuggaccuggucauacac

SEQ ID NO: 1206819 - RNA, 19 nt, Artificial Sequence
  Description of Artificial Sequence: Synthetic oligonucleotide
guguuauugaagcugucug

SEQ ID NO: 1206820 - RNA, 19 nt, Artificial Sequence
  Description of Artificial Sequence: Synthetic oligonucleotide
uuauugaagcugucugucc

SEQ ID NO: 1206821 - RNA, 19 nt, Artificial Sequence
  Description of Artificial Sequence: Synthetic oligonucleotide
aaacacuuccgguuaggga

SEQ ID NO: 1206822 - RNA, 19 nt, Artificial Sequence
  Description of Artificial Sequence: Synthetic oligonucleotide
cuuguuccuccucucaacg

SEQ ID NO: 1206823 - RNA, 19 nt, Artificial Sequence
  Description of Artificial Sequence: Synthetic oligonucleotide
uuagggagcguuugagucc

SEQ ID NO: 1206824 - RNA, 19 nt, Artificial Sequence
  Description of Artificial Sequence: Synthetic oligonucleotide
acacaguucuccugugccc

SEQ ID NO: 1206825 - RNA, 19 nt, Artificial Sequence
  Description of Artificial Sequence: Synthetic oligonucleotide
ugucucagagcuaaccagu

SEQ ID NO: 1206826 - RNA, 19 nt, Artificial Sequence
  Description of Artificial Sequence: Synthetic oligonucleotide
agcauggagaacugaaaug

SEQ ID NO: 1206827 - RNA, 19 nt, Artificial Sequence
  Description of Artificial Sequence: Synthetic oligonucleotide
cacucuuuggaucugagga

SEQ ID NO: 1206828 - RNA, 19 nt, Artificial Sequence
  Description of Artificial Sequence: Synthetic oligonucleotide
gggacguuaucauagguag

SEQ ID NO: 1206829 - RNA, 19 nt, Artificial Sequence
  Description of Artificial Sequence: Synthetic oligonucleotide
gcauggagaacugaaaugg

SEQ ID NO: 1206830 - RNA, 19 nt, Artificial Sequence
  Description of Artificial Sequence: Synthetic oligonucleotide
agaugaagaccagaacucg

SEQ ID NO: 1206831 - RNA, 19 nt, Artificial Sequence
  Description of Artificial Sequence: Synthetic oligonucleotide
gagcuaaccagucaucuga

SEQ ID NO: 1206832 - RNA, 19 nt, Artificial Sequence
  Description of Artificial Sequence: Synthetic oligonucleotide
gauugcaccuuccagucuc

SEQ ID NO: 1206833 - RNA, 19 nt, Artificial Sequence
  Description of Artificial Sequence: Synthetic oligonucleotide
gaccugaugagguucacuc

SEQ ID NO: 1206834 - RNA, 19 nt, Artificial Sequence
  Description of Artificial Sequence: Synthetic oligonucleotide
guuagggagcguuugaguc

SEQ ID NO: 1206835 - RNA, 19 nt, Artificial Sequence
  Description of Artificial Sequence: Synthetic oligonucleotide
gcaaauguagcucaggaga

SEQ ID NO: 1206836 - RNA, 19 nt, Artificial Sequence
  Description of Artificial Sequence: Synthetic oligonucleotide
agacacaguucuccugugc

SEQ ID NO: 1206837 - RNA, 19 nt, Artificial Sequence
  Description of Artificial Sequence: Synthetic oligonucleotide
agaauggaaaguugcuuca

SEQ ID NO: 1206838 - RNA, 19 nt, Artificial Sequence
  Description of Artificial Sequence: Synthetic oligonucleotide
accugaugagguucacucc

SEQ ID NO: 1206839 - RNA, 19 nt, Artificial Sequence
  Description of Artificial Sequence: Synthetic oligonucleotide
gaaacacuuccgguuaggg

SEQ ID NO: 1206840 - RNA, 19 nt, Artificial Sequence
  Description of Artificial Sequence: Synthetic oligonucleotide
gguccuguaggacuggugg

SEQ ID NO: 1206841 - RNA, 19 nt, Artificial Sequence
  Description of Artificial Sequence: Synthetic oligonucleotide
agguuguccacgcucaucu

SEQ ID NO: 1206842 - RNA, 19 nt, Artificial Sequence
  Description of Artificial Sequence: Synthetic oligonucleotide
cuguuccucauacaugugc

SEQ ID NO: 1206843 - RNA, 19 nt, Artificial Sequence
  Description of Artificial Sequence: Synthetic oligonucleotide
guuaucauagguagaaguc

SEQ ID NO: 1206844 - RNA, 19 nt, Artificial Sequence
  Description of Artificial Sequence: Synthetic oligonucleotide
cuagcucuggccugggucc

SEQ ID NO: 1206845 - RNA, 19 nt, Artificial Sequence
  Description of Artificial Sequence: Synthetic oligonucleotide
uccuacagagcuccggggc

SEQ ID NO: 1206846 - RNA, 19 nt, Artificial Sequence
  Description of Artificial Sequence: Synthetic oligonucleotide
ucauugaguucguacuuga

SEQ ID NO: 1206847 - RNA, 19 nt, Artificial Sequence
  Description of Artificial Sequence: Synthetic oligonucleotide
cuaaccagucaucugacca

SEQ ID NO: 1206848 - RNA, 19 nt, Artificial Sequence
  Description of Artificial Sequence: Synthetic oligonucleotide
uugucacgaggaagaaugg

SEQ ID NO: 1206849 - RNA, 19 nt, Artificial Sequence
  Description of Artificial Sequence: Synthetic oligonucleotide
agccucugaagaugaagac

SEQ ID NO: 1206850 - RNA, 19 nt, Artificial Sequence
  Description of Artificial Sequence: Synthetic oligonucleotide
cauccuacagagcuccggg

SEQ ID NO: 1206851 - RNA, 19 nt, Artificial Sequence
  Description of Artificial Sequence: Synthetic oligonucleotide
ucaacguccucccgggagc

SEQ ID NO: 1206852 - RNA, 19 nt, Artificial Sequence
  Description of Artificial Sequence: Synthetic oligonucleotide
uguuccuccucucaacguc

SEQ ID NO: 1206853 - RNA, 19 nt, Artificial Sequence
  Description of Artificial Sequence: Synthetic oligonucleotide
uggaaugcugacgucagga

SEQ ID NO: 1206854 - RNA, 19 nt, Artificial Sequence
  Description of Artificial Sequence: Synthetic oligonucleotide
gacaguggcgcauccuuag

SEQ ID NO: 1206855 - RNA, 19 nt, Artificial Sequence
  Description of Artificial Sequence: Synthetic oligonucleotide
ugaaauggaguugaccguc

SEQ ID NO: 1206856 - RNA, 19 nt, Artificial Sequence
  Description of Artificial Sequence: Synthetic oligonucleotide
aggagacuguaguugucac

SEQ ID NO: 1206857 - RNA, 19 nt, Artificial Sequence
  Description of Artificial Sequence: Synthetic oligonucleotide
gaugagguucacuccaauc

SEQ ID NO: 1206858 - RNA, 19 nt, Artificial Sequence
  Description of Artificial Sequence: Synthetic oligonucleotide
aguugaccgucccugccac

SEQ ID NO: 1206859 - RNA, 19 nt, Artificial Sequence
  Description of Artificial Sequence: Synthetic oligonucleotide
uuaaucuguuccucauaca

SEQ ID NO: 1206860 - RNA, 19 nt, Artificial Sequence
  Description of Artificial Sequence: Synthetic oligonucleotide
aucaggacuacuugccgug

SEQ ID NO: 1206861 - RNA, 19 nt, Artificial Sequence
  Description of Artificial Sequence: Synthetic oligonucleotide
cguacuugagaguuaagcg

SEQ ID NO: 1206862 - RNA, 19 nt, Artificial Sequence
  Description of Artificial Sequence: Synthetic oligonucleotide
uagcgcuccccucagauau

SEQ ID NO: 1206863 - RNA, 19 nt, Artificial Sequence
  Description of Artificial Sequence: Synthetic oligonucleotide
agucaucaggagcauggag

SEQ ID NO: 1206864 - RNA, 19 nt, Artificial Sequence
  Description of Artificial Sequence: Synthetic oligonucleotide
acauuucgaaggcugauuu

SEQ ID NO: 1206865 - RNA, 19 nt, Artificial Sequence
  Description of Artificial Sequence: Synthetic oligonucleotide
cuuguugacggcacaguuc

SEQ ID NO: 1206866 - RNA, 19 nt, Artificial Sequence
  Description of Artificial Sequence: Synthetic oligonucleotide
gacguuaucauagguagaa

SEQ ID NO: 1206867 - RNA, 19 nt, Artificial Sequence
  Description of Artificial Sequence: Synthetic oligonucleotide
ucuuaggaggugacucugc

SEQ ID NO: 1206868 - RNA, 19 nt, Artificial Sequence
  Description of Artificial Sequence: Synthetic oligonucleotide
uaagcgucauguucugcgc

SEQ ID NO: 1206869 - RNA, 19 nt, Artificial Sequence
  Description of Artificial Sequence: Synthetic oligonucleotide
cugucuuagccucugaaga

SEQ ID NO: 1206870 - RNA, 19 nt, Artificial Sequence
  Description of Artificial Sequence: Synthetic oligonucleotide
aaguccgcuggucauugga

SEQ ID NO: 1206871 - RNA, 19 nt, Artificial Sequence
  Description of Artificial Sequence: Synthetic oligonucleotide
uuucgaaggcugauuucca

SEQ ID NO: 1206872 - RNA, 19 nt, Artificial Sequence
  Description of Artificial Sequence: Synthetic oligonucleotide
uccgcuggucauuggaaag

SEQ ID NO: 1206873 - RNA, 19 nt, Artificial Sequence
  Description of Artificial Sequence: Synthetic oligonucleotide
ucccaguucgcucuuccca

SEQ ID NO: 1206874 - RNA, 19 nt, Artificial Sequence
  Description of Artificial Sequence: Synthetic oligonucleotide
cuacuggugccuuggaaug

SEQ ID NO: 1206875 - RNA, 19 nt, Artificial Sequence
  Description of Artificial Sequence: Synthetic oligonucleotide
ucauuggaaagguggcgca

SEQ ID NO: 1206876 - RNA, 19 nt, Artificial Sequence
  Description of Artificial Sequence: Synthetic oligonucleotide
uguagcgcuccccucagau

SEQ ID NO: 1206877 - RNA, 19 nt, Artificial Sequence
  Description of Artificial Sequence: Synthetic oligonucleotide
guuauugaagcugucuguc

SEQ ID NO: 1206878 - RNA, 19 nt, Artificial Sequence
  Description of Artificial Sequence: Synthetic oligonucleotide
gaguacaccugcuggacuc

SEQ ID NO: 1206879 - RNA, 19 nt, Artificial Sequence
  Description of Artificial Sequence: Synthetic oligonucleotide
acaucauaguucuccuucu

SEQ ID NO: 1206880 - RNA, 19 nt, Artificial Sequence
  Description of Artificial Sequence: Synthetic oligonucleotide
ugacuucuucuuccaauac

SEQ ID NO: 1206881 - RNA, 19 nt, Artificial Sequence
  Description of Artificial Sequence: Synthetic oligonucleotide
acuguaguugucacgagga

SEQ ID NO: 1206882 - RNA, 19 nt, Artificial Sequence
  Description of Artificial Sequence: Synthetic oligonucleotide
ucucagagcuaaccaguca

SEQ ID NO: 1206883 - RNA, 19 nt, Artificial Sequence
  Description of Artificial Sequence: Synthetic oligonucleotide
ugaccaggcagguuagcca

SEQ ID NO: 1206884 - RNA, 19 nt, Artificial Sequence
  Description of Artificial Sequence: Synthetic oligonucleotide
ugucuuagccucugaagau

SEQ ID NO: 1206885 - RNA, 19 nt, Artificial Sequence
  Description of Artificial Sequence: Synthetic oligonucleotide
ugccguguuauugaagcug

SEQ ID NO: 1206886 - RNA, 19 nt, Artificial Sequence
  Description of Artificial Sequence: Synthetic oligonucleotide
aguucuccugugcccuucc

SEQ ID NO: 1206887 - RNA, 19 nt, Artificial Sequence
  Description of Artificial Sequence: Synthetic oligonucleotide
cucucaacguccucccggg

SEQ ID NO: 1206888 - RNA, 19 nt, Artificial Sequence
  Description of Artificial Sequence: Synthetic oligonucleotide
uguucugcgcaugucucag

SEQ ID NO: 1206889 - RNA, 19 nt, Artificial Sequence
  Description of Artificial Sequence: Synthetic oligonucleotide
agagcuaaccagucaucug

SEQ ID NO: 1206890 - RNA, 19 nt, Artificial Sequence
  Description of Artificial Sequence: Synthetic oligonucleotide
uugcugagcacuguagcgc

SEQ ID NO: 1206891 - RNA, 19 nt, Artificial Sequence
  Description of Artificial Sequence: Synthetic oligonucleotide
ccuuaaaugucuccuuugg

SEQ ID NO: 1206892 - RNA, 19 nt, Artificial Sequence
  Description of Artificial Sequence: Synthetic oligonucleotide
uccgagauugcaccuucca

SEQ ID NO: 1206893 - RNA, 19 nt, Artificial Sequence
  Description of Artificial Sequence: Synthetic oligonucleotide
gaacgucucucuuggaguc

SEQ ID NO: 1206894 - RNA, 19 nt, Artificial Sequence
  Description of Artificial Sequence: Synthetic oligonucleotide
agucaucugaccaggcagg

SEQ ID NO: 1206895 - RNA, 19 nt, Artificial Sequence
  Description of Artificial Sequence: Synthetic oligonucleotide
guacuugagaguuaagcgu

SEQ ID NO: 1206896 - RNA, 19 nt, Artificial Sequence
  Description of Artificial Sequence: Synthetic oligonucleotide
uccucauacaugugcuucu

SEQ ID NO: 1206897 - RNA, 19 nt, Artificial Sequence
  Description of Artificial Sequence: Synthetic oligonucleotide
aguuaagcgucauguucug

SEQ ID NO: 1206898 - RNA, 19 nt, Artificial Sequence
  Description of Artificial Sequence: Synthetic oligonucleotide
ccaagaacgucucucuugg

SEQ ID NO: 1206899 - RNA, 19 nt, Artificial Sequence
  Description of Artificial Sequence: Synthetic oligonucleotide
aguggcgcauccuuagacu

SEQ ID NO: 1206900 - RNA, 19 nt, Artificial Sequence
  Description of Artificial Sequence: Synthetic oligonucleotide
cugucuguccuggagagug

SEQ ID NO: 1206901 - RNA, 19 nt, Artificial Sequence
  Description of Artificial Sequence: Synthetic oligonucleotide
aagcgucauguucugcgca

SEQ ID NO: 1206902 - RNA, 19 nt, Artificial Sequence
  Description of Artificial Sequence: Synthetic oligonucleotide
ucguggucucugaucauca

SEQ ID NO: 1206903 - RNA, 19 nt, Artificial Sequence
  Description of Artificial Sequence: Synthetic oligonucleotide
cuuggggaagaggacuucg

SEQ ID NO: 1206904 - RNA, 19 nt, Artificial Sequence
  Description of Artificial Sequence: Synthetic oligonucleotide
ucccauccuacagagcucc

SEQ ID NO: 1206905 - RNA, 19 nt, Artificial Sequence
  Description of Artificial Sequence: Synthetic oligonucleotide
gaucccaguucgcucuucc

SEQ ID NO: 1206906 - RNA, 19 nt, Artificial Sequence
  Description of Artificial Sequence: Synthetic oligonucleotide
cuggucauacacuggaaga

SEQ ID NO: 1206907 - RNA, 19 nt, Artificial Sequence
  Description of Artificial Sequence: Synthetic oligonucleotide
ugaguucguacuugagagu

SEQ ID NO: 1206908 - RNA, 19 nt, Artificial Sequence
  Description of Artificial Sequence: Synthetic oligonucleotide
caugucucagagcuaacca

SEQ ID NO: 1206909 - RNA, 19 nt, Artificial Sequence
  Description of Artificial Sequence: Synthetic oligonucleotide
auccuacagagcuccgggg

SEQ ID NO: 1206910 - RNA, 19 nt, Artificial Sequence
  Description of Artificial Sequence: Synthetic oligonucleotide
cucaacguccucccgggag

SEQ ID NO: 1206911 - RNA, 19 nt, Artificial Sequence
  Description of Artificial Sequence: Synthetic oligonucleotide
gagcguuugaguccuuuuc

SEQ ID NO: 1206912 - RNA, 19 nt, Artificial Sequence
  Description of Artificial Sequence: Synthetic oligonucleotide
cuuaaaugucuccuuugga

SEQ ID NO: 1206913 - RNA, 19 nt, Artificial Sequence
  Description of Artificial Sequence: Synthetic oligonucleotide
guggcaucaggacuacuug

SEQ ID NO: 1206914 - RNA, 19 nt, Artificial Sequence
  Description of Artificial Sequence: Synthetic oligonucleotide
uuagcccagacaucauagu

SEQ ID NO: 1206915 - RNA, 19 nt, Artificial Sequence
  Description of Artificial Sequence: Synthetic oligonucleotide
cauuucagagucccugcug

SEQ ID NO: 1206916 - RNA, 19 nt, Artificial Sequence
  Description of Artificial Sequence: Synthetic oligonucleotide
aguacaccugcuggacucc

SEQ ID NO: 1206917 - RNA, 19 nt, Artificial Sequence
  Description of Artificial Sequence: Synthetic oligonucleotide
gaaauggaguugaccgucc

SEQ ID NO: 1206918 - RNA, 19 nt, Artificial Sequence
  Description of Artificial Sequence: Synthetic oligonucleotide
guggcgcaagucuugagac

SEQ ID NO: 1206919 - RNA, 19 nt, Artificial Sequence
  Description of Artificial Sequence: Synthetic oligonucleotide
ucagagcuaaccagucauc

SEQ ID NO: 1206920 - RNA, 19 nt, Artificial Sequence
  Description of Artificial Sequence: Synthetic oligonucleotide
ccuuuuccgagauugcacc

SEQ ID NO: 1206921 - RNA, 19 nt, Artificial Sequence
  Description of Artificial Sequence: Synthetic oligonucleotide
ugcugagcacuguagcgcu

SEQ ID NO: 1206922 - RNA, 19 nt, Artificial Sequence
  Description of Artificial Sequence: Synthetic oligonucleotide
uggucauacacuggaagau

SEQ ID NO: 1206923 - RNA, 19 nt, Artificial Sequence
  Description of Artificial Sequence: Synthetic oligonucleotide
ucuuuggaucugaggaguc

SEQ ID NO: 1206924 - RNA, 19 nt, Artificial Sequence
  Description of Artificial Sequence: Synthetic oligonucleotide
ucuugcuuccagauuccau

SEQ ID NO: 1206925 - RNA, 19 nt, Artificial Sequence
  Description of Artificial Sequence: Synthetic oligonucleotide
ucugaggagucccucucau

SEQ ID NO: 1206926 - RNA, 19 nt, Artificial Sequence
  Description of Artificial Sequence: Synthetic oligonucleotide
ucuguggcaucccauccua

SEQ ID NO: 1206927 - RNA, 19 nt, Artificial Sequence
  Description of Artificial Sequence: Synthetic oligonucleotide
caucccauccuacagagcu

SEQ ID NO: 1206928 - RNA, 19 nt, Artificial Sequence
  Description of Artificial Sequence: Synthetic oligonucleotide
accucauuguuaugauucu

SEQ ID NO: 1206929 - RNA, 19 nt, Artificial Sequence
  Description of Artificial Sequence: Synthetic oligonucleotide
gaguuaagcgucauguucu

SEQ ID NO: 1206930 - RNA, 19 nt, Artificial Sequence
  Description of Artificial Sequence: Synthetic oligonucleotide
agucaagugcccugcugug

SEQ ID NO: 1206931 - RNA, 19 nt, Artificial Sequence
  Description of Artificial Sequence: Synthetic oligonucleotide
aguccuuuuccgagauugc

SEQ ID NO: 1206932 - RNA, 19 nt, Artificial Sequence
  Description of Artificial Sequence: Synthetic oligonucleotide
ggcagggacguuaucauag

SEQ ID NO: 1206933 - RNA, 19 nt, Artificial Sequence
  Description of Artificial Sequence: Synthetic oligonucleotide
gacuucguggucucugauc

SEQ ID NO: 1206934 - RNA, 19 nt, Artificial Sequence
  Description of Artificial Sequence: Synthetic oligonucleotide
cucauugaguucguacuug

SEQ ID NO: 1206935 - RNA, 19 nt, Artificial Sequence
  Description of Artificial Sequence: Synthetic oligonucleotide
cugcaaauguagcucagga

SEQ ID NO: 1206936 - RNA, 19 nt, Artificial Sequence
  Description of Artificial Sequence: Synthetic oligonucleotide
agauuuccaguuugcugcu

SEQ ID NO: 1206937 - RNA, 19 nt, Artificial Sequence
  Description of Artificial Sequence: Synthetic oligonucleotide
guucgcucuucccacaguc

SEQ ID NO: 1206938 - RNA, 19 nt, Artificial Sequence
  Description of Artificial Sequence: Synthetic oligonucleotide
cacuggaagaucccaguuc

SEQ ID NO: 1206939 - RNA, 19 nt, Artificial Sequence
  Description of Artificial Sequence: Synthetic oligonucleotide
agaguacaccugcuggacu

SEQ ID NO: 1206940 - RNA, 19 nt, Artificial Sequence
  Description of Artificial Sequence: Synthetic oligonucleotide
gucucugaucaucaugguc

SEQ ID NO: 1206941 - RNA, 19 nt, Artificial Sequence
  Description of Artificial Sequence: Synthetic oligonucleotide
cauuucgaaggcugauuuc

SEQ ID NO: 1206942 - RNA, 19 nt, Artificial Sequence
  Description of Artificial Sequence: Synthetic oligonucleotide
agcuaaccagucaucugac

SEQ ID NO: 1206943 - RNA, 19 nt, Artificial Sequence
  Description of Artificial Sequence: Synthetic oligonucleotide
uucguacuugagaguuaag

SEQ ID NO: 1206944 - RNA, 19 nt, Artificial Sequence
  Description of Artificial Sequence: Synthetic oligonucleotide
gcguuugaguccuuuuccg

SEQ ID NO: 1206945 - RNA, 19 nt, Artificial Sequence
  Description of Artificial Sequence: Synthetic oligonucleotide
uguuaugauucugguucca

SEQ ID NO: 1206946 - RNA, 19 nt, Artificial Sequence
  Description of Artificial Sequence: Synthetic oligonucleotide
caagucuugagacacaguu

SEQ ID NO: 1206947 - RNA, 19 nt, Artificial Sequence
  Description of Artificial Sequence: Synthetic oligonucleotide
uagguagaaguccgcuggu

SEQ ID NO: 1206948 - RNA, 19 nt, Artificial Sequence
  Description of Artificial Sequence: Synthetic oligonucleotide
uuguuccuccucucaacgu

SEQ ID NO: 1206949 - RNA, 19 nt, Artificial Sequence
  Description of Artificial Sequence: Synthetic oligonucleotide
guugugguccuguaggacu

SEQ ID NO: 1206950 - RNA, 19 nt, Artificial Sequence
  Description of Artificial Sequence: Synthetic oligonucleotide
auugcaccuuccagucucc

SEQ ID NO: 1206951 - RNA, 19 nt, Artificial Sequence
  Description of Artificial Sequence: Synthetic oligonucleotide
gugccuuggaaugcugacg

SEQ ID NO: 1206952 - RNA, 19 nt, Artificial Sequence
  Description of Artificial Sequence: Synthetic oligonucleotide
cuguuuguuugcugagcac

SEQ ID NO: 1206953 - RNA, 19 nt, Artificial Sequence
  Description of Artificial Sequence: Synthetic oligonucleotide
gagcauggagaacugaaau

SEQ ID NO: 1206954 - RNA, 19 nt, Artificial Sequence
  Description of Artificial Sequence: Synthetic oligonucleotide
uggcgcauccuuagacuug

SEQ ID NO: 1206955 - RNA, 19 nt, Artificial Sequence
  Description of Artificial Sequence: Synthetic oligonucleotide
ggagagaguacaccugcug

SEQ ID NO: 1206956 - RNA, 19 nt, Artificial Sequence
  Description of Artificial Sequence: Synthetic oligonucleotide
gcaucaggacuacuugccg

SEQ ID NO: 1206957 - RNA, 19 nt, Artificial Sequence
  Description of Artificial Sequence: Synthetic oligonucleotide
cauggagaacugaaaugga

SEQ ID NO: 1206958 - RNA, 19 nt, Artificial Sequence
  Description of Artificial Sequence: Synthetic oligonucleotide
agugcccugcugugcuccc

SEQ ID NO: 1206959 - RNA, 19 nt, Artificial Sequence
  Description of Artificial Sequence: Synthetic oligonucleotide
uccgguuagggagcguuug

SEQ ID NO: 1206960 - RNA, 19 nt, Artificial Sequence
  Description of Artificial Sequence: Synthetic oligonucleotide
caggaggagagaguacacc

SEQ ID NO: 1206961 - RNA, 19 nt, Artificial Sequence
  Description of Artificial Sequence: Synthetic oligonucleotide
cugagcacuguagcgcucc

SEQ ID NO: 1206962 - RNA, 19 nt, Artificial Sequence
  Description of Artificial Sequence: Synthetic oligonucleotide
ugacggcacaguucagcug

SEQ ID NO: 1206963 - RNA, 19 nt, Artificial Sequence
  Description of Artificial Sequence: Synthetic oligonucleotide
caguggcgcauccuuagac

SEQ ID NO: 1206964 - RNA, 19 nt, Artificial Sequence
  Description of Artificial Sequence: Synthetic oligonucleotide
gcgaacuucuucuucucug

SEQ ID NO: 1206965 - RNA, 19 nt, Artificial Sequence
  Description of Artificial Sequence: Synthetic oligonucleotide
ugcuuccagauuccauuuc

SEQ ID NO: 1206966 - RNA, 19 nt, Artificial Sequence
  Description of Artificial Sequence: Synthetic oligonucleotide
gagcgcuccacauuucgaa

SEQ ID NO: 1206967 - RNA, 19 nt, Artificial Sequence
  Description of Artificial Sequence: Synthetic oligonucleotide
acguuaucauagguagaag

SEQ ID NO: 1206968 - RNA, 19 nt, Artificial Sequence
  Description of Artificial Sequence: Synthetic oligonucleotide
auccuuagacuuggggaag

SEQ ID NO: 1206969 - RNA, 19 nt, Artificial Sequence
  Description of Artificial Sequence: Synthetic oligonucleotide
ccuggucauacacuggaag

SEQ ID NO: 1206970 - RNA, 19 nt, Artificial Sequence
  Description of Artificial Sequence: Synthetic oligonucleotide
aaccucaagccucggucuu

SEQ ID NO: 1206971 - RNA, 19 nt, Artificial Sequence
  Description of Artificial Sequence: Synthetic oligonucleotide
aggacuucguggucucuga

SEQ ID NO: 1206972 - RNA, 19 nt, Artificial Sequence
  Description of Artificial Sequence: Synthetic oligonucleotide
gaagaggacuucguggucu

SEQ ID NO: 1206973 - RNA, 19 nt, Artificial Sequence
  Description of Artificial Sequence: Synthetic oligonucleotide
uacuugccguguuauugaa

SEQ ID NO: 1206974 - RNA, 19 nt, Artificial Sequence
  Description of Artificial Sequence: Synthetic oligonucleotide
uguugacggcacaguucag

SEQ ID NO: 1206975 - RNA, 19 nt, Artificial Sequence
  Description of Artificial Sequence: Synthetic oligonucleotide
uugccguguuauugaagcu

SEQ ID NO: 1206976 - RNA, 19 nt, Artificial Sequence
  Description of Artificial Sequence: Synthetic oligonucleotide
caccuuagcccagacauca

SEQ ID NO: 1206977 - RNA, 19 nt, Artificial Sequence
  Description of Artificial Sequence: Synthetic oligonucleotide
cugcgcaugucucagagcu

SEQ ID NO: 1206978 - RNA, 19 nt, Artificial Sequence
  Description of Artificial Sequence: Synthetic oligonucleotide
gaaccucaagccucggucu

SEQ ID NO: 1206979 - RNA, 19 nt, Artificial Sequence
  Description of Artificial Sequence: Synthetic oligonucleotide
uacuggugccuuggaaugc

SEQ ID NO: 1206980 - RNA, 19 nt, Artificial Sequence
  Description of Artificial Sequence: Synthetic oligonucleotide
cagguuagccacauagaaa

SEQ ID NO: 1206981 - RNA, 19 nt, Artificial Sequence
  Description of Artificial Sequence: Synthetic oligonucleotide
uuaggaggugacucugcuu

SEQ ID NO: 1206982 - RNA, 19 nt, Artificial Sequence
  Description of Artificial Sequence: Synthetic oligonucleotide
uccuuagacuuggggaaga

SEQ ID NO: 1206983 - RNA, 19 nt, Artificial Sequence
  Description of Artificial Sequence: Synthetic oligonucleotide
ugacaguggcgcauccuua

SEQ ID NO: 1206984 - RNA, 19 nt, Artificial Sequence
  Description of Artificial Sequence: Synthetic oligonucleotide
gggagcgcuccacauuucg

SEQ ID NO: 1206985 - RNA, 19 nt, Artificial Sequence
  Description of Artificial Sequence: Synthetic oligonucleotide
caagccucggucuuugucu

SEQ ID NO: 1206986 - RNA, 19 nt, Artificial Sequence
  Description of Artificial Sequence: Synthetic oligonucleotide
uuccaauaccuuguuccuc

SEQ ID NO: 1206987 - RNA, 19 nt, Artificial Sequence
  Description of Artificial Sequence: Synthetic oligonucleotide
guucguacuugagaguuaa

SEQ ID NO: 1206988 - RNA, 19 nt, Artificial Sequence
  Description of Artificial Sequence: Synthetic oligonucleotide
aagguggcgcaagucuuga

SEQ ID NO: 1206989 - RNA, 19 nt, Artificial Sequence
  Description of Artificial Sequence: Synthetic oligonucleotide
uggcgcaagucuugagaca

SEQ ID NO: 1206990 - RNA, 19 nt, Artificial Sequence
  Description of Artificial Sequence: Synthetic oligonucleotide
uuuuccgagauugcaccuu

SEQ ID NO: 1206991 - RNA, 19 nt, Artificial Sequence
  Description of Artificial Sequence: Synthetic oligonucleotide
gagguucacuccaaucaca

SEQ ID NO: 1206992 - RNA, 19 nt, Artificial Sequence
  Description of Artificial Sequence: Synthetic oligonucleotide
agcgucauguucugcgcau

SEQ ID NO: 1206993 - RNA, 19 nt, Artificial Sequence
  Description of Artificial Sequence: Synthetic oligonucleotide
aggagcauggagaacugaa

SEQ ID NO: 1206994 - RNA, 19 nt, Artificial Sequence
  Description of Artificial Sequence: Synthetic oligonucleotide
ugacgucaggaaacacuuc

SEQ ID NO: 1206995 - RNA, 19 nt, Artificial Sequence
  Description of Artificial Sequence: Synthetic oligonucleotide
ggaaagguggcgcaagucu

SEQ ID NO: 1206996 - RNA, 19 nt, Artificial Sequence
  Description of Artificial Sequence: Synthetic oligonucleotide
gguggcgcaagucuugaga

SEQ ID NO: 1206997 - RNA, 19 nt, Artificial Sequence
  Description of Artificial Sequence: Synthetic oligonucleotide
accagucaucugaccaggc

SEQ ID NO: 1206998 - RNA, 19 nt, Artificial Sequence
  Description of Artificial Sequence: Synthetic oligonucleotide
gcagggacguuaucauagg

SEQ ID NO: 1206999 - RNA, 19 nt, Artificial Sequence
  Description of Artificial Sequence: Synthetic oligonucleotide
ugguuccaacagcccagcc

SEQ ID NO: 1207000 - RNA, 19 nt, Artificial Sequence
  Description of Artificial Sequence: Synthetic oligonucleotide
ggcgcaagucuugagacac

SEQ ID NO: 1207001 - RNA, 19 nt, Artificial Sequence
  Description of Artificial Sequence: Synthetic oligonucleotide
guuaagcgucauguucugc

SEQ ID NO: 1207002 - RNA, 19 nt, Artificial Sequence
  Description of Artificial Sequence: Synthetic oligonucleotide
aacgucucucuuggaguca

SEQ ID NO: 1207003 - RNA, 19 nt, Artificial Sequence
  Description of Artificial Sequence: Synthetic oligonucleotide
caccuuccagucuccuggg

SEQ ID NO: 1207004 - RNA, 19 nt, Artificial Sequence
  Description of Artificial Sequence: Synthetic oligonucleotide
gaugaagaccagaacucgu

SEQ ID NO: 1207005 - RNA, 19 nt, Artificial Sequence
  Description of Artificial Sequence: Synthetic oligonucleotide
aggacuacuugccguguua

SEQ ID NO: 1207006 - RNA, 19 nt, Artificial Sequence
  Description of Artificial Sequence: Synthetic oligonucleotide
ggaaacacuuccgguuagg

SEQ ID NO: 1207007 - RNA, 19 nt, Artificial Sequence
  Description of Artificial Sequence: Synthetic oligonucleotide
uggaaagguggcgcaaguc

SEQ ID NO: 1207008 - RNA, 19 nt, Artificial Sequence
  Description of Artificial Sequence: Synthetic oligonucleotide
ccucucaacguccucccgg

SEQ ID NO: 1207009 - RNA, 19 nt, Artificial Sequence
  Description of Artificial Sequence: Synthetic oligonucleotide
aacguccucccgggagcgc

SEQ ID NO: 1207010 - RNA, 19 nt, Artificial Sequence
  Description of Artificial Sequence: Synthetic oligonucleotide
auugagccucaccaccuua

SEQ ID NO: 1207011 - RNA, 19 nt, Artificial Sequence
  Description of Artificial Sequence: Synthetic oligonucleotide
agggacguuaucauaggua

SEQ ID NO: 1207012 - RNA, 19 nt, Artificial Sequence
  Description of Artificial Sequence: Synthetic oligonucleotide
ggugccuuggaaugcugac

SEQ ID NO: 1207013 - RNA, 19 nt, Artificial Sequence
  Description of Artificial Sequence: Synthetic oligonucleotide
gucaagugcccugcugugc

SEQ ID NO: 1207014 - RNA, 19 nt, Artificial Sequence
  Description of Artificial Sequence: Synthetic oligonucleotide
gaguucguacuugagaguu

SEQ ID NO: 1207015 - RNA, 19 nt, Artificial Sequence
  Description of Artificial Sequence: Synthetic oligonucleotide
gcaugucucagagcuaacc

SEQ ID NO: 1207016 - RNA, 19 nt, Artificial Sequence
  Description of Artificial Sequence: Synthetic oligonucleotide
cucagagcuaaccagucau

SEQ ID NO: 1207017 - RNA, 19 nt, Artificial Sequence
  Description of Artificial Sequence: Synthetic oligonucleotide
ccaucuuaggaggugacuc

SEQ ID NO: 1207018 - RNA, 19 nt, Artificial Sequence
  Description of Artificial Sequence: Synthetic oligonucleotide
ggagucacaggcaggagga

SEQ ID NO: 1207019 - RNA, 19 nt, Artificial Sequence
  Description of Artificial Sequence: Synthetic oligonucleotide
acaguggcgcauccuuaga

SEQ ID NO: 1207020 - RNA, 19 nt, Artificial Sequence
  Description of Artificial Sequence: Synthetic oligonucleotide
gaggugacucugcuuccca

SEQ ID NO: 1207021 - RNA, 19 nt, Artificial Sequence
  Description of Artificial Sequence: Synthetic oligonucleotide
acuugccguguuauugaag

SEQ ID NO: 1207022 - RNA, 19 nt, Artificial Sequence
  Description of Artificial Sequence: Synthetic oligonucleotide
cacuguagcgcuccccuca

SEQ ID NO: 1207023 - RNA, 19 nt, Artificial Sequence
  Description of Artificial Sequence: Synthetic oligonucleotide
uuggagucacaggcaggag

SEQ ID NO: 1207024 - RNA, 19 nt, Artificial Sequence
  Description of Artificial Sequence: Synthetic oligonucleotide
cuuuggaccuggucauaca

SEQ ID NO: 1207025 - RNA, 19 nt, Artificial Sequence
  Description of Artificial Sequence: Synthetic oligonucleotide
aguucgcucuucccacagu

SEQ ID NO: 1207026 - RNA, 19 nt, Artificial Sequence
  Description of Artificial Sequence: Synthetic oligonucleotide
gcuaaccagucaucugacc

SEQ ID NO: 1207027 - RNA, 19 nt, Artificial Sequence
  Description of Artificial Sequence: Synthetic oligonucleotide
ucccugccacacaucccag

SEQ ID NO: 1207028 - RNA, 19 nt, Artificial Sequence
  Description of Artificial Sequence: Synthetic oligonucleotide
ucucaacguccucccggga

SEQ ID NO: 1207029 - RNA, 19 nt, Artificial Sequence
  Description of Artificial Sequence: Synthetic oligonucleotide
cgucaggaaacacuuccgg

SEQ ID NO: 1207030 - RNA, 19 nt, Artificial Sequence
  Description of Artificial Sequence: Synthetic oligonucleotide
ccugaugagguucacucca

SEQ ID NO: 1207031 - RNA, 19 nt, Artificial Sequence
  Description of Artificial Sequence: Synthetic oligonucleotide
ucaggacuacuugccgugu

SEQ ID NO: 1207032 - RNA, 19 nt, Artificial Sequence
  Description of Artificial Sequence: Synthetic oligonucleotide
ccccucagauaucuggucc

SEQ ID NO: 1207033 - RNA, 19 nt, Artificial Sequence
  Description of Artificial Sequence: Synthetic oligonucleotide
uggaucugaggagucccuc

SEQ ID NO: 1207034 - RNA, 19 nt, Artificial Sequence
  Description of Artificial Sequence: Synthetic oligonucleotide
cacaucccagaaccucaag

SEQ ID NO: 1207035 - RNA, 19 nt, Artificial Sequence
  Description of Artificial Sequence: Synthetic oligonucleotide
aucccauccuacagagcuc

SEQ ID NO: 1207036 - RNA, 19 nt, Artificial Sequence
  Description of Artificial Sequence: Synthetic oligonucleotide
ugaccgucccugccacaca

SEQ ID NO: 1207037 - RNA, 19 nt, Artificial Sequence
  Description of Artificial Sequence: Synthetic oligonucleotide
cugccacacaucccagaac

SEQ ID NO: 1207038 - RNA, 19 nt, Artificial Sequence
  Description of Artificial Sequence: Synthetic oligonucleotide
gucucagagcuaaccaguc

SEQ ID NO: 1207039 - RNA, 19 nt, Artificial Sequence
  Description of Artificial Sequence: Synthetic oligonucleotide
ggacugguggcaucaggac

SEQ ID NO: 1207040 - RNA, 19 nt, Artificial Sequence
  Description of Artificial Sequence: Synthetic oligonucleotide
ccgagauugcaccuuccag

SEQ ID NO: 1207041 - RNA, 19 nt, Artificial Sequence
  Description of Artificial Sequence: Synthetic oligonucleotide
ccuuuuguagaugcuggac

SEQ ID NO: 1207042 - RNA, 19 nt, Artificial Sequence
  Description of Artificial Sequence: Synthetic oligonucleotide
caucaggacuacuugccgu

SEQ ID NO: 1207043 - RNA, 19 nt, Artificial Sequence
  Description of Artificial Sequence: Synthetic oligonucleotide
cuuaggaggugacucugcu

SEQ ID NO: 1207044 - RNA, 19 nt, Artificial Sequence
  Description of Artificial Sequence: Synthetic oligonucleotide
ggguuucuaucuccuuuug

SEQ ID NO: 1207045 - RNA, 19 nt, Artificial Sequence
  Description of Artificial Sequence: Synthetic oligonucleotide
ccuagcucuggccuggguc

SEQ ID NO: 1207046 - RNA, 19 nt, Artificial Sequence
  Description of Artificial Sequence: Synthetic oligonucleotide
augcugacgucaggaaaca

SEQ ID NO: 1207047 - RNA, 19 nt, Artificial Sequence
  Description of Artificial Sequence: Synthetic oligonucleotide
agguggcgcaagucuugag

SEQ ID NO: 1207048 - RNA, 19 nt, Artificial Sequence
  Description of Artificial Sequence: Synthetic oligonucleotide
cuguggcaucccauccuac

SEQ ID NO: 1207049 - RNA, 19 nt, Artificial Sequence
  Description of Artificial Sequence: Synthetic oligonucleotide
uagaaguccgcuggucauu

SEQ ID NO: 1207050 - RNA, 19 nt, Artificial Sequence
  Description of Artificial Sequence: Synthetic oligonucleotide
gagaguuaagcgucauguu

SEQ ID NO: 1207051 - RNA, 19 nt, Artificial Sequence
  Description of Artificial Sequence: Synthetic oligonucleotide
gcugcgaacuucuucuucu

SEQ ID NO: 1207052 - RNA, 19 nt, Artificial Sequence
  Description of Artificial Sequence: Synthetic oligonucleotide
uuccgguuagggagcguuu

SEQ ID NO: 1207053 - RNA, 19 nt, Artificial Sequence
  Description of Artificial Sequence: Synthetic oligonucleotide
cccaguucgcucuucccac

SEQ ID NO: 1207054 - RNA, 19 nt, Artificial Sequence
  Description of Artificial Sequence: Synthetic oligonucleotide
cuguaggacugguggcauc

SEQ ID NO: 1207055 - RNA, 19 nt, Artificial Sequence
  Description of Artificial Sequence: Synthetic oligonucleotide
ugcgcaugucucagagcua

SEQ ID NO: 1207056 - RNA, 19 nt, Artificial Sequence
  Description of Artificial Sequence: Synthetic oligonucleotide
ugaguccuuuuccgagauu

SEQ ID NO: 1207057 - RNA, 19 nt, Artificial Sequence
  Description of Artificial Sequence: Synthetic oligonucleotide
cucagauaucugguccauc

SEQ ID NO: 1207058 - RNA, 19 nt, Artificial Sequence
  Description of Artificial Sequence: Synthetic oligonucleotide
ccagauuccauuucagagu

SEQ ID NO: 1207059 - RNA, 19 nt, Artificial Sequence
  Description of Artificial Sequence: Synthetic oligonucleotide
cuuuuccgagauugcaccu

SEQ ID NO: 1207060 - RNA, 19 nt, Artificial Sequence
  Description of Artificial Sequence: Synthetic oligonucleotide
uggagaguggugggucuuc

SEQ ID NO: 1207061 - RNA, 19 nt, Artificial Sequence
  Description of Artificial Sequence: Synthetic oligonucleotide
aggagagaguacaccugcu

SEQ ID NO: 1207062 - RNA, 19 nt, Artificial Sequence
  Description of Artificial Sequence: Synthetic oligonucleotide
agccuccccagagaguccu

SEQ ID NO: 1207063 - RNA, 19 nt, Artificial Sequence
  Description of Artificial Sequence: Synthetic oligonucleotide
cagagcuccggggcacugg

SEQ ID NO: 1207064 - RNA, 19 nt, Artificial Sequence
  Description of Artificial Sequence: Synthetic oligonucleotide
cagagcuaaccagucaucu

SEQ ID NO: 1207065 - RNA, 19 nt, Artificial Sequence
  Description of Artificial Sequence: Synthetic oligonucleotide
guacaccugcuggacuccc

SEQ ID NO: 1207066 - RNA, 19 nt, Artificial Sequence
  Description of Artificial Sequence: Synthetic oligonucleotide
ggaccuggucauacacugg

SEQ ID NO: 1207067 - RNA, 19 nt, Artificial Sequence
  Description of Artificial Sequence: Synthetic oligonucleotide
cguuaucauagguagaagu

SEQ ID NO: 1207068 - RNA, 19 nt, Artificial Sequence
  Description of Artificial Sequence: Synthetic oligonucleotide
caucaggagcauggagaac

SEQ ID NO: 1207069 - RNA, 19 nt, Artificial Sequence
  Description of Artificial Sequence: Synthetic oligonucleotide
ggaggugacucugcuuccc

SEQ ID NO: 1207070 - RNA, 19 nt, Artificial Sequence
  Description of Artificial Sequence: Synthetic oligonucleotide
gucacuugguugugguccu

SEQ ID NO: 1207071 - RNA, 19 nt, Artificial Sequence
  Description of Artificial Sequence: Synthetic oligonucleotide
gguuagggagcguuugagu

SEQ ID NO: 1207072 - RNA, 19 nt, Artificial Sequence
  Description of Artificial Sequence: Synthetic oligonucleotide
cuuagccucugaagaugaa

SEQ ID NO: 1207073 - RNA, 19 nt, Artificial Sequence
  Description of Artificial Sequence: Synthetic oligonucleotide
caagugcccugcugugcuc

SEQ ID NO: 1207074 - RNA, 19 nt, Artificial Sequence
  Description of Artificial Sequence: Synthetic oligonucleotide
auguagcucaggagacugu

SEQ ID NO: 1207075 - RNA, 19 nt, Artificial Sequence
  Description of Artificial Sequence: Synthetic oligonucleotide
guucugcgcaugucucaga

SEQ ID NO: 1207076 - RNA, 19 nt, Artificial Sequence
  Description of Artificial Sequence: Synthetic oligonucleotide
ggcugcgaacuucuucuuc

SEQ ID NO: 1207077 - RNA, 19 nt, Artificial Sequence
  Description of Artificial Sequence: Synthetic oligonucleotide
aguucguacuugagaguua

SEQ ID NO: 1207078 - RNA, 19 nt, Artificial Sequence
  Description of Artificial Sequence: Synthetic oligonucleotide
gcugacgucaggaaacacu

SEQ ID NO: 1207079 - RNA, 19 nt, Artificial Sequence
  Description of Artificial Sequence: Synthetic oligonucleotide
ggcugauuuccagggcugc

SEQ ID NO: 1207080 - RNA, 19 nt, Artificial Sequence
  Description of Artificial Sequence: Synthetic oligonucleotide
guggcgcauccuuagacuu

SEQ ID NO: 1207081 - RNA, 19 nt, Artificial Sequence
  Description of Artificial Sequence: Synthetic oligonucleotide
ccacacaccuuaaaugucu

SEQ ID NO: 1207082 - RNA, 19 nt, Artificial Sequence
  Description of Artificial Sequence: Synthetic oligonucleotide
cgcaagucuugagacacag

SEQ ID NO: 1207083 - RNA, 19 nt, Artificial Sequence
  Description of Artificial Sequence: Synthetic oligonucleotide
guagcgcuccccucagaua

SEQ ID NO: 1207084 - RNA, 19 nt, Artificial Sequence
  Description of Artificial Sequence: Synthetic oligonucleotide
ggaucugaggagucccucu

SEQ ID NO: 1207085 - RNA, 19 nt, Artificial Sequence
  Description of Artificial Sequence: Synthetic oligonucleotide
cacaguucuccugugcccu

SEQ ID NO: 1207086 - RNA, 19 nt, Artificial Sequence
  Description of Artificial Sequence: Synthetic oligonucleotide
ggugacucugcuucccagu

SEQ ID NO: 1207087 - RNA, 19 nt, Artificial Sequence
  Description of Artificial Sequence: Synthetic oligonucleotide
agcgcuccccucagauauc

SEQ ID NO: 1207088 - RNA, 19 nt, Artificial Sequence
  Description of Artificial Sequence: Synthetic oligonucleotide
cgagauugcaccuuccagu

SEQ ID NO: 1207089 - RNA, 19 nt, Artificial Sequence
  Description of Artificial Sequence: Synthetic oligonucleotide
ccuuagacuuggggaagag

SEQ ID NO: 1207090 - RNA, 19 nt, Artificial Sequence
  Description of Artificial Sequence: Synthetic oligonucleotide
uccuuuggaccuggucaua

SEQ ID NO: 1207091 - RNA, 19 nt, Artificial Sequence
  Description of Artificial Sequence: Synthetic oligonucleotide
gacuuggggaagaggacuu

SEQ ID NO: 1207092 - RNA, 19 nt, Artificial Sequence
  Description of Artificial Sequence: Synthetic oligonucleotide
caguucuccugugcccuuc

SEQ ID NO: 1207093 - RNA, 19 nt, Artificial Sequence
  Description of Artificial Sequence: Synthetic oligonucleotide
ccagucaucugaccaggca

SEQ ID NO: 1207094 - RNA, 19 nt, Artificial Sequence
  Description of Artificial Sequence: Synthetic oligonucleotide
guugaccgucccugccaca

SEQ ID NO: 1207095 - RNA, 19 nt, Artificial Sequence
  Description of Artificial Sequence: Synthetic oligonucleotide
gacuacuugccguguuauu

SEQ ID NO: 1207096 - RNA, 19 nt, Artificial Sequence
  Description of Artificial Sequence: Synthetic oligonucleotide
ggacguuaucauagguaga

SEQ ID NO: 1207097 - RNA, 19 nt, Artificial Sequence
  Description of Artificial Sequence: Synthetic oligonucleotide
gcgcaugucucagagcuaa

SEQ ID NO: 1207098 - RNA, 19 nt, Artificial Sequence
  Description of Artificial Sequence: Synthetic oligonucleotide
gccacacaccuuaaauguc

SEQ ID NO: 1207099 - RNA, 19 nt, Artificial Sequence
  Description of Artificial Sequence: Synthetic oligonucleotide
cagggacguuaucauaggu

SEQ ID NO: 1207100 - RNA, 19 nt, Artificial Sequence
  Description of Artificial Sequence: Synthetic oligonucleotide
accuggucauacacuggaa

SEQ ID NO: 1207101 - RNA, 19 nt, Artificial Sequence
  Description of Artificial Sequence: Synthetic oligonucleotide
gguggcaucaggacuacuu

SEQ ID NO: 1207102 - RNA, 19 nt, Artificial Sequence
  Description of Artificial Sequence: Synthetic oligonucleotide
accgucccugccacacauc

SEQ ID NO: 1207103 - RNA, 19 nt, Artificial Sequence
  Description of Artificial Sequence: Synthetic oligonucleotide
cguuugaguccuuuuccga

SEQ ID NO: 1207104 - RNA, 19 nt, Artificial Sequence
  Description of Artificial Sequence: Synthetic oligonucleotide
uccucccgggagcgcucca

SEQ ID NO: 1207105 - RNA, 19 nt, Artificial Sequence
  Description of Artificial Sequence: Synthetic oligonucleotide
ggagcgcuccacauuucga

SEQ ID NO: 1207106 - RNA, 19 nt, Artificial Sequence
  Description of Artificial Sequence: Synthetic oligonucleotide
cccagagaguccucauuga

SEQ ID NO: 1207107 - RNA, 19 nt, Artificial Sequence
  Description of Artificial Sequence: Synthetic oligonucleotide
cagaaccucaagccucggu

SEQ ID NO: 1207108 - RNA, 19 nt, Artificial Sequence
  Description of Artificial Sequence: Synthetic oligonucleotide
gccguguuauugaagcugu

SEQ ID NO: 1207109 - RNA, 19 nt, Artificial Sequence
  Description of Artificial Sequence: Synthetic oligonucleotide
cacauuucgaaggcugauu

SEQ ID NO: 1207110 - RNA, 19 nt, Artificial Sequence
  Description of Artificial Sequence: Synthetic oligonucleotide
cgguuagggagcguuugag

SEQ ID NO: 1207111 - RNA, 19 nt, Artificial Sequence
  Description of Artificial Sequence: Synthetic oligonucleotide
cccauccuacagagcuccg

SEQ ID NO: 1207112 - RNA, 19 nt, Artificial Sequence
  Description of Artificial Sequence: Synthetic oligonucleotide
cucccgggagcgcuccaca

SEQ ID NO: 1207113 - RNA, 19 nt, Artificial Sequence
  Description of Artificial Sequence: Synthetic oligonucleotide
caguucagcuggauuucau

SEQ ID NO: 1207114 - RNA, 19 nt, Artificial Sequence
  Description of Artificial Sequence: Synthetic oligonucleotide
cuuccgguuagggagcguu

SEQ ID NO: 1207115 - RNA, 19 nt, Artificial Sequence
  Description of Artificial Sequence: Synthetic oligonucleotide
ccuuagcccagacaucaua

SEQ ID NO: 1207116 - RNA, 19 nt, Artificial Sequence
  Description of Artificial Sequence: Synthetic oligonucleotide
cuugagaguuaagcgucau

SEQ ID NO: 1207117 - RNA, 19 nt, Artificial Sequence
  Description of Artificial Sequence: Synthetic oligonucleotide
cugcuacuggugccuugga

SEQ ID NO: 1207118 - RNA, 19 nt, Artificial Sequence
  Description of Artificial Sequence: Synthetic oligonucleotide
accuuagcccagacaucau

SEQ ID NO: 1207119 - RNA, 19 nt, Artificial Sequence
  Description of Artificial Sequence: Synthetic oligonucleotide
acuuccgguuagggagcgu

SEQ ID NO: 1207120 - RNA, 19 nt, Artificial Sequence
  Description of Artificial Sequence: Synthetic oligonucleotide
gcgucauguucugcgcaug

SEQ ID NO: 1207121 - RNA, 19 nt, Artificial Sequence
  Description of Artificial Sequence: Synthetic oligonucleotide
ggggcagggacguuaucau

SEQ ID NO: 1207122 - RNA, 19 nt, Artificial Sequence
  Description of Artificial Sequence: Synthetic oligonucleotide
ccccaauuuuguuuucaua

SEQ ID NO: 1207123 - RNA, 19 nt, Artificial Sequence
  Description of Artificial Sequence: Synthetic oligonucleotide
ccguguuauugaagcuguc

SEQ ID NO: 1207124 - RNA, 19 nt, Artificial Sequence
  Description of Artificial Sequence: Synthetic oligonucleotide
ggagcguuugaguccuuuu

SEQ ID NO: 1207125 - RNA, 19 nt, Artificial Sequence
  Description of Artificial Sequence: Synthetic oligonucleotide
gggcagggacguuaucaua

SEQ ID NO: 1207126 - RNA, 19 nt, Artificial Sequence
  Description of Artificial Sequence: Synthetic oligonucleotide
cuguagcgcuccccucaga

SEQ ID NO: 1207127 - RNA, 19 nt, Artificial Sequence
  Description of Artificial Sequence: Synthetic oligonucleotide
cgucccugccacacauccc

SEQ ID NO: 1207128 - RNA, 19 nt, Artificial Sequence
  Description of Artificial Sequence: Synthetic oligonucleotide
gaguccucauugaguucgu

SEQ ID NO: 1207129 - RNA, 19 nt, Artificial Sequence
  Description of Artificial Sequence: Synthetic oligonucleotide
ggacuacuugccguguuau

SEQ ID NO: 1207130 - RNA, 19 nt, Artificial Sequence
  Description of Artificial Sequence: Synthetic oligonucleotide
cauugagccucaccaccuu

SEQ ID NO: 1207131 - RNA, 19 nt, Artificial Sequence
  Description of Artificial Sequence: Synthetic oligonucleotide
ccaguucgcucuucccaca

SEQ ID NO: 1207132 - RNA, 19 nt, Artificial Sequence
  Description of Artificial Sequence: Synthetic oligonucleotide
ccgguuagggagcguuuga

SEQ ID NO: 1207133 - RNA, 19 nt, Artificial Sequence
  Description of Artificial Sequence: Synthetic oligonucleotide
ccuaguggggcagggacgu

SEQ ID NO: 1207134 - RNA, 19 nt, Artificial Sequence
  Description of Artificial Sequence: Synthetic oligonucleotide
ggagaguggugggucuucu

SEQ ID NO: 1207135 - RNA, 19 nt, Artificial Sequence
  Description of Artificial Sequence: Synthetic oligonucleotide
cucaagccucggucuuugu

SEQ ID NO: 1207136 - RNA, 19 nt, Artificial Sequence
  Description of Artificial Sequence: Synthetic oligonucleotide
gugcucccacacaccaucu

SEQ ID NO: 1207137 - RNA, 19 nt, Artificial Sequence
  Description of Artificial Sequence: Synthetic oligonucleotide
ggccuagcucuggccuggg

SEQ ID NO: 1207138 - RNA, 19 nt, Artificial Sequence
  Description of Artificial Sequence: Synthetic oligonucleotide
caggacuacuugccguguu

SEQ ID NO: 1207139 - RNA, 19 nt, Artificial Sequence
  Description of Artificial Sequence: Synthetic oligonucleotide
cuccccagagaguccucau

SEQ ID NO: 1207140 - RNA, 19 nt, Artificial Sequence
  Description of Artificial Sequence: Synthetic oligonucleotide
ggacuucguggucucugau

SEQ ID NO: 1207141 - RNA, 19 nt, Artificial Sequence
  Description of Artificial Sequence: Synthetic oligonucleotide
gcgcauccuuagacuuggg

SEQ ID NO: 1207142 - RNA, 19 nt, Artificial Sequence
  Description of Artificial Sequence: Synthetic oligonucleotide
gcugagcacuguagcgcuc

SEQ ID NO: 1207143 - RNA, 19 nt, Artificial Sequence
  Description of Artificial Sequence: Synthetic oligonucleotide
cccugcugccaagaacguc

SEQ ID NO: 1207144 - RNA, 19 nt, Artificial Sequence
  Description of Artificial Sequence: Synthetic oligonucleotide
cgcaugucucagagcuaac

SEQ ID NO: 1207145 - RNA, 19 nt, Artificial Sequence
  Description of Artificial Sequence: Synthetic oligonucleotide
gcaagucuugagacacagu

SEQ ID NO: 1207146 - RNA, 19 nt, Artificial Sequence
  Description of Artificial Sequence: Synthetic oligonucleotide
caggcagguuagccacaua

SEQ ID NO: 1207147 - RNA, 19 nt, Artificial Sequence
  Description of Artificial Sequence: Synthetic oligonucleotide
gcgcaagucuugagacaca

SEQ ID NO: 1207148 - RNA, 19 nt, Artificial Sequence
  Description of Artificial Sequence: Synthetic oligonucleotide
ccgggagcgcuccacauuu

SEQ ID NO: 1207149 - RNA, 19 nt, Artificial Sequence
  Description of Artificial Sequence: Synthetic oligonucleotide
gcgcuccccucagauaucu

SEQ ID NO: 1207150 - RNA, 19 nt, Artificial Sequence
  Description of Artificial Sequence: Synthetic oligonucleotide
gggagcguuugaguccuuu

SEQ ID NO: 1207151 - RNA, 19 nt, Artificial Sequence
  Description of Artificial Sequence: Synthetic oligonucleotide
cgggagcgcuccacauuuc

SEQ ID NO: 1207152 - RNA, 19 nt, Artificial Sequence
  Description of Artificial Sequence: Synthetic oligonucleotide
cguccucccgggagcgcuc

SEQ ID NO: 1207153 - RNA, 19 nt, Artificial Sequence
  Description of Artificial Sequence: Synthetic oligonucleotide
cgucucucuuggagucaca

SEQ ID NO: 1207154 - RNA, 19 nt, Artificial Sequence
  Description of Artificial Sequence: Synthetic oligonucleotide
gccuagcucuggccugggu

SEQ ID NO: 1207155 - RNA, 19 nt, Artificial Sequence
  Description of Artificial Sequence: Synthetic oligonucleotide
agggagcguuugaguccuu

SEQ ID NO: 1207156 - RNA, 19 nt, Artificial Sequence
  Description of Artificial Sequence: Synthetic oligonucleotide
cguggucucugaucaucau

SEQ ID NO: 1207157 - RNA, 19 nt, Artificial Sequence
  Description of Artificial Sequence: Synthetic oligonucleotide
cccgggagcgcuccacauu

SEQ ID NO: 1207158 - RNA, 19 nt, Artificial Sequence
  Description of Artificial Sequence: Synthetic oligonucleotide
aauguaauugaguaacagg

SEQ ID NO: 1207159 - RNA, 19 nt, Artificial Sequence
  Description of Artificial Sequence: Synthetic oligonucleotide
gauguugccaaauaaacug

SEQ ID NO: 1207160 - RNA, 19 nt, Artificial Sequence
  Description of Artificial Sequence: Synthetic oligonucleotide
uauaauuauuccaagcaug

SEQ ID NO: 1207161 - RNA, 19 nt, Artificial Sequence
  Description of Artificial Sequence: Synthetic oligonucleotide
aaggaauuaagguaugcag

SEQ ID NO: 1207162 - RNA, 19 nt, Artificial Sequence
  Description of Artificial Sequence: Synthetic oligonucleotide
gaauuagguauauucauag

SEQ ID NO: 1207163 - RNA, 19 nt, Artificial Sequence
  Description of Artificial Sequence: Synthetic oligonucleotide
uaagauucaugacaggugc

SEQ ID NO: 1207164 - RNA, 19 nt, Artificial Sequence
  Description of Artificial Sequence: Synthetic oligonucleotide
auguaauugaguaacaggg

SEQ ID NO: 1207165 - RNA, 19 nt, Artificial Sequence
  Description of Artificial Sequence: Synthetic oligonucleotide
aauugaguaacaggggcgc

SEQ ID NO: 1207166 - RNA, 19 nt, Artificial Sequence
  Description of Artificial Sequence: Synthetic oligonucleotide
agcaguaugugauacagag

SEQ ID NO: 1207167 - RNA, 19 nt, Artificial Sequence
  Description of Artificial Sequence: Synthetic oligonucleotide
uucuaucaaauaacgauag

SEQ ID NO: 1207168 - RNA, 19 nt, Artificial Sequence
  Description of Artificial Sequence: Synthetic oligonucleotide
uguaauugaguaacagggg

SEQ ID NO: 1207169 - RNA, 19 nt, Artificial Sequence
  Description of Artificial Sequence: Synthetic oligonucleotide
aauuagguauauucauagg

SEQ ID NO: 1207170 - RNA, 19 nt, Artificial Sequence
  Description of Artificial Sequence: Synthetic oligonucleotide
uaauugaguaacaggggcg

SEQ ID NO: 1207171 - RNA, 19 nt, Artificial Sequence
  Description of Artificial Sequence: Synthetic oligonucleotide
aucggaaagcuucuggucc

SEQ ID NO: 1207172 - RNA, 19 nt, Artificial Sequence
  Description of Artificial Sequence: Synthetic oligonucleotide
aacgaaaacacacugcaau

SEQ ID NO: 1207173 - RNA, 19 nt, Artificial Sequence
  Description of Artificial Sequence: Synthetic oligonucleotide
aauuauuccaagcaugguu

SEQ ID NO: 1207174 - RNA, 19 nt, Artificial Sequence
  Description of Artificial Sequence: Synthetic oligonucleotide
uaucuaucaacaaaaguuc

SEQ ID NO: 1207175 - RNA, 19 nt, Artificial Sequence
  Description of Artificial Sequence: Synthetic oligonucleotide
uuagguauauucauaggcu

SEQ ID NO: 1207176 - RNA, 19 nt, Artificial Sequence
  Description of Artificial Sequence: Synthetic oligonucleotide
guaaacaucccguaggccc

SEQ ID NO: 1207177 - RNA, 19 nt, Artificial Sequence
  Description of Artificial Sequence: Synthetic oligonucleotide
aaagugcggaaacacgaac

SEQ ID NO: 1207178 - RNA, 19 nt, Artificial Sequence
  Description of Artificial Sequence: Synthetic oligonucleotide
aguuaugagaucuuucucu

SEQ ID NO: 1207179 - RNA, 19 nt, Artificial Sequence
  Description of Artificial Sequence: Synthetic oligonucleotide
agaaguagugaagaaauuc

SEQ ID NO: 1207180 - RNA, 19 nt, Artificial Sequence
  Description of Artificial Sequence: Synthetic oligonucleotide
auaauuauuccaagcaugg

SEQ ID NO: 1207181 - RNA, 19 nt, Artificial Sequence
  Description of Artificial Sequence: Synthetic oligonucleotide
ucaaauaacgauagaccug

SEQ ID NO: 1207182 - RNA, 19 nt, Artificial Sequence
  Description of Artificial Sequence: Synthetic oligonucleotide
aaucggaaagcuucugguc

SEQ ID NO: 1207183 - RNA, 19 nt, Artificial Sequence
  Description of Artificial Sequence: Synthetic oligonucleotide
uuauaauuauuccaagcau

SEQ ID NO: 1207184 - RNA, 19 nt, Artificial Sequence
  Description of Artificial Sequence: Synthetic oligonucleotide
cuugucacgcauauggucc

SEQ ID NO: 1207185 - RNA, 19 nt, Artificial Sequence
  Description of Artificial Sequence: Synthetic oligonucleotide
agucucgaugacuucaggc

SEQ ID NO: 1207186 - RNA, 19 nt, Artificial Sequence
  Description of Artificial Sequence: Synthetic oligonucleotide
aaaaguucaucaugugucu

SEQ ID NO: 1207187 - RNA, 19 nt, Artificial Sequence
  Description of Artificial Sequence: Synthetic oligonucleotide
guaauugaguaacaggggc

SEQ ID NO: 1207188 - RNA, 19 nt, Artificial Sequence
  Description of Artificial Sequence: Synthetic oligonucleotide
aaaucggaaagcuucuggu

SEQ ID NO: 1207189 - RNA, 19 nt, Artificial Sequence
  Description of Artificial Sequence: Synthetic oligonucleotide
uacauguaagucucgauga

SEQ ID NO: 1207190 - RNA, 19 nt, Artificial Sequence
  Description of Artificial Sequence: Synthetic oligonucleotide
auaacgauagaccugcuaa

SEQ ID NO: 1207191 - RNA, 19 nt, Artificial Sequence
  Description of Artificial Sequence: Synthetic oligonucleotide
aaguucaagguaguguugg

SEQ ID NO: 1207192 - RNA, 19 nt, Artificial Sequence
  Description of Artificial Sequence: Synthetic oligonucleotide
caucaaaucggaaagcuuc

SEQ ID NO: 1207193 - RNA, 19 nt, Artificial Sequence
  Description of Artificial Sequence: Synthetic oligonucleotide
aaauuaagcaguaugugau

SEQ ID NO: 1207194 - RNA, 19 nt, Artificial Sequence
  Description of Artificial Sequence: Synthetic oligonucleotide
uguaagauucaugacaggu

SEQ ID NO: 1207195 - RNA, 19 nt, Artificial Sequence
  Description of Artificial Sequence: Synthetic oligonucleotide
uaagcaguaugugauacag

SEQ ID NO: 1207196 - RNA, 19 nt, Artificial Sequence
  Description of Artificial Sequence: Synthetic oligonucleotide
aacuuugcuggacaucguc

SEQ ID NO: 1207197 - RNA, 19 nt, Artificial Sequence
  Description of Artificial Sequence: Synthetic oligonucleotide
acaguuaugagaucuuucu

SEQ ID NO: 1207198 - RNA, 19 nt, Artificial Sequence
  Description of Artificial Sequence: Synthetic oligonucleotide
ugcggaaacacgaacaauc

SEQ ID NO: 1207199 - RNA, 19 nt, Artificial Sequence
  Description of Artificial Sequence: Synthetic oligonucleotide
uaagccccaggcauuagcg

SEQ ID NO: 1207200 - RNA, 19 nt, Artificial Sequence
  Description of Artificial Sequence: Synthetic oligonucleotide
ugcgauuucagcuccaagu

SEQ ID NO: 1207201 - RNA, 19 nt, Artificial Sequence
  Description of Artificial Sequence: Synthetic oligonucleotide
ugagggacgaagcagagua

SEQ ID NO: 1207202 - RNA, 19 nt, Artificial Sequence
  Description of Artificial Sequence: Synthetic oligonucleotide
uuuugauguugccaaauaa

SEQ ID NO: 1207203 - RNA, 19 nt, Artificial Sequence
  Description of Artificial Sequence: Synthetic oligonucleotide
uugaauuagguauauucau

SEQ ID NO: 1207204 - RNA, 19 nt, Artificial Sequence
  Description of Artificial Sequence: Synthetic oligonucleotide
agacauucuaucaaauaac

SEQ ID NO: 1207205 - RNA, 19 nt, Artificial Sequence
  Description of Artificial Sequence: Synthetic oligonucleotide
gaguggaguacuuuagaag

SEQ ID NO: 1207206 - RNA, 19 nt, Artificial Sequence
  Description of Artificial Sequence: Synthetic oligonucleotide
ugaaugguccuucuuuuga

SEQ ID NO: 1207207 - RNA, 19 nt, Artificial Sequence
  Description of Artificial Sequence: Synthetic oligonucleotide
ucuacggcuucccaggccc

SEQ ID NO: 1207208 - RNA, 19 nt, Artificial Sequence
  Description of Artificial Sequence: Synthetic oligonucleotide
ucggcagugguuuucuagg

SEQ ID NO: 1207209 - RNA, 19 nt, Artificial Sequence
  Description of Artificial Sequence: Synthetic oligonucleotide
uacuuuucauuuugccucg

SEQ ID NO: 1207210 - RNA, 19 nt, Artificial Sequence
  Description of Artificial Sequence: Synthetic oligonucleotide
agucagucgccacauguac

SEQ ID NO: 1207211 - RNA, 19 nt, Artificial Sequence
  Description of Artificial Sequence: Synthetic oligonucleotide
ugaauuagguauauucaua

SEQ ID NO: 1207212 - RNA, 19 nt, Artificial Sequence
  Description of Artificial Sequence: Synthetic oligonucleotide
uaugcagugagggacgaag

SEQ ID NO: 1207213 - RNA, 19 nt, Artificial Sequence
  Description of Artificial Sequence: Synthetic oligonucleotide
cacaccgccaucaaaucgg

SEQ ID NO: 1207214 - RNA, 19 nt, Artificial Sequence
  Description of Artificial Sequence: Synthetic oligonucleotide
ucuaucaacaaaaguucau

SEQ ID NO: 1207215 - RNA, 19 nt, Artificial Sequence
  Description of Artificial Sequence: Synthetic oligonucleotide
augaaggugcgauuguaag

SEQ ID NO: 1207216 - RNA, 19 nt, Artificial Sequence
  Description of Artificial Sequence: Synthetic oligonucleotide
caaaucggaaagcuucugg

SEQ ID NO: 1207217 - RNA, 19 nt, Artificial Sequence
  Description of Artificial Sequence: Synthetic oligonucleotide
uucauuuugccucguggca

SEQ ID NO: 1207218 - RNA, 19 nt, Artificial Sequence
  Description of Artificial Sequence: Synthetic oligonucleotide
uguucuaguggaagaaggu

SEQ ID NO: 1207219 - RNA, 19 nt, Artificial Sequence
  Description of Artificial Sequence: Synthetic oligonucleotide
aacacacugcaaugaaaug

SEQ ID NO: 1207220 - RNA, 19 nt, Artificial Sequence
  Description of Artificial Sequence: Synthetic oligonucleotide
ugccaaauaaacugcuuga

SEQ ID NO: 1207221 - RNA, 19 nt, Artificial Sequence
  Description of Artificial Sequence: Synthetic oligonucleotide
gucucgaugacuucaggcc

SEQ ID NO: 1207222 - RNA, 19 nt, Artificial Sequence
  Description of Artificial Sequence: Synthetic oligonucleotide
ugauuauaggcuucaguuc

SEQ ID NO: 1207223 - RNA, 19 nt, Artificial Sequence
  Description of Artificial Sequence: Synthetic oligonucleotide
acaaaccagauuaacauga

SEQ ID NO: 1207224 - RNA, 19 nt, Artificial Sequence
  Description of Artificial Sequence: Synthetic oligonucleotide
uaacgauagaccugcuaag

SEQ ID NO: 1207225 - RNA, 19 nt, Artificial Sequence
  Description of Artificial Sequence: Synthetic oligonucleotide
agguuaaaaguuaacuauc

SEQ ID NO: 1207226 - RNA, 19 nt, Artificial Sequence
  Description of Artificial Sequence: Synthetic oligonucleotide
uggacaucgucauaacucu

SEQ ID NO: 1207227 - RNA, 19 nt, Artificial Sequence
  Description of Artificial Sequence: Synthetic oligonucleotide
uaagucucgaugacuucag

SEQ ID NO: 1207228 - RNA, 19 nt, Artificial Sequence
  Description of Artificial Sequence: Synthetic oligonucleotide
uccacuacagccccggggu

SEQ ID NO: 1207229 - RNA, 19 nt, Artificial Sequence
  Description of Artificial Sequence: Synthetic oligonucleotide
ucaguauugaagacccagu

SEQ ID NO: 1207230 - RNA, 19 nt, Artificial Sequence
  Description of Artificial Sequence: Synthetic oligonucleotide
aauuaagcaguaugugaua

SEQ ID NO: 1207231 - RNA, 19 nt, Artificial Sequence
  Description of Artificial Sequence: Synthetic oligonucleotide
aauaacgauagaccugcua

SEQ ID NO: 1207232 - RNA, 19 nt, Artificial Sequence
  Description of Artificial Sequence: Synthetic oligonucleotide
uucaugacaggugcgugcg

SEQ ID NO: 1207233 - RNA, 19 nt, Artificial Sequence
  Description of Artificial Sequence: Synthetic oligonucleotide
ugaaggugcgauuguaaga

SEQ ID NO: 1207234 - RNA, 19 nt, Artificial Sequence
  Description of Artificial Sequence: Synthetic oligonucleotide
caaaagugcggaaacacga

SEQ ID NO: 1207235 - RNA, 19 nt, Artificial Sequence
  Description of Artificial Sequence: Synthetic oligonucleotide
ucaagugcucaccuugcug

SEQ ID NO: 1207236 - RNA, 19 nt, Artificial Sequence
  Description of Artificial Sequence: Synthetic oligonucleotide
auguugccaaauaaacugc

SEQ ID NO: 1207237 - RNA, 19 nt, Artificial Sequence
  Description of Artificial Sequence: Synthetic oligonucleotide
uuaagccccaggcauuagc

SEQ ID NO: 1207238 - RNA, 19 nt, Artificial Sequence
  Description of Artificial Sequence: Synthetic oligonucleotide
aguaaacaucccguaggcc

SEQ ID NO: 1207239 - RNA, 19 nt, Artificial Sequence
  Description of Artificial Sequence: Synthetic oligonucleotide
acgauagaccugcuaagag

SEQ ID NO: 1207240 - RNA, 19 nt, Artificial Sequence
  Description of Artificial Sequence: Synthetic oligonucleotide
ucgugguuuucacggaucc

SEQ ID NO: 1207241 - RNA, 19 nt, Artificial Sequence
  Description of Artificial Sequence: Synthetic oligonucleotide
guguucuaguggaagaagg

SEQ ID NO: 1207242 - RNA, 19 nt, Artificial Sequence
  Description of Artificial Sequence: Synthetic oligonucleotide
cucaguauugaagacccag

SEQ ID NO: 1207243 - RNA, 19 nt, Artificial Sequence
  Description of Artificial Sequence: Synthetic oligonucleotide
ucugguggauagacaaacc

SEQ ID NO: 1207244 - RNA, 19 nt, Artificial Sequence
  Description of Artificial Sequence: Synthetic oligonucleotide
aacgauagaccugcuaaga

SEQ ID NO: 1207245 - RNA, 19 nt, Artificial Sequence
  Description of Artificial Sequence: Synthetic oligonucleotide
cacagggcauuuaaaguag

SEQ ID NO: 1207246 - RNA, 19 nt, Artificial Sequence
  Description of Artificial Sequence: Synthetic oligonucleotide
cucgucucggaguaugggg

SEQ ID NO: 1207247 - RNA, 19 nt, Artificial Sequence
  Description of Artificial Sequence: Synthetic oligonucleotide
guaagauucaugacaggug

SEQ ID NO: 1207248 - RNA, 19 nt, Artificial Sequence
  Description of Artificial Sequence: Synthetic oligonucleotide
gacguucucaucagaauug

SEQ ID NO: 1207249 - RNA, 19 nt, Artificial Sequence
  Description of Artificial Sequence: Synthetic oligonucleotide
aagucucgaugacuucagg

SEQ ID NO: 1207250 - RNA, 19 nt, Artificial Sequence
  Description of Artificial Sequence: Synthetic oligonucleotide
uauugaagacccaguguuc

SEQ ID NO: 1207251 - RNA, 19 nt, Artificial Sequence
  Description of Artificial Sequence: Synthetic oligonucleotide
gaaacacgaacaaucaaaa

SEQ ID NO: 1207252 - RNA, 19 nt, Artificial Sequence
  Description of Artificial Sequence: Synthetic oligonucleotide
aagacccaguguucuagug

SEQ ID NO: 1207253 - RNA, 19 nt, Artificial Sequence
  Description of Artificial Sequence: Synthetic oligonucleotide
caguauugaagacccagug

SEQ ID NO: 1207254 - RNA, 19 nt, Artificial Sequence
  Description of Artificial Sequence: Synthetic oligonucleotide
ucauaacucucacuagcaa

SEQ ID NO: 1207255 - RNA, 19 nt, Artificial Sequence
  Description of Artificial Sequence: Synthetic oligonucleotide
cuucaugaaggugcgauug

SEQ ID NO: 1207256 - RNA, 19 nt, Artificial Sequence
  Description of Artificial Sequence: Synthetic oligonucleotide
aguaaaguagaaagugucu

SEQ ID NO: 1207257 - RNA, 19 nt, Artificial Sequence
  Description of Artificial Sequence: Synthetic oligonucleotide
agggcauuuaaaguagaag

SEQ ID NO: 1207258 - RNA, 19 nt, Artificial Sequence
  Description of Artificial Sequence: Synthetic oligonucleotide
ucgucucggaguaugggga

SEQ ID NO: 1207259 - RNA, 19 nt, Artificial Sequence
  Description of Artificial Sequence: Synthetic oligonucleotide
aggaauuaagguaugcagu

SEQ ID NO: 1207260 - RNA, 19 nt, Artificial Sequence
  Description of Artificial Sequence: Synthetic oligonucleotide
uuugcucucuucucgcgga

SEQ ID NO: 1207261 - RNA, 19 nt, Artificial Sequence
  Description of Artificial Sequence: Synthetic oligonucleotide
auuaagguaugcagugagg

SEQ ID NO: 1207262 - RNA, 19 nt, Artificial Sequence
  Description of Artificial Sequence: Synthetic oligonucleotide
ucggaguauggggaaaggg

SEQ ID NO: 1207263 - RNA, 19 nt, Artificial Sequence
  Description of Artificial Sequence: Synthetic oligonucleotide
agucgccacauguacaugu

SEQ ID NO: 1207264 - RNA, 19 nt, Artificial Sequence
  Description of Artificial Sequence: Synthetic oligonucleotide
gacuucaggccguaagaug

SEQ ID NO: 1207265 - RNA, 19 nt, Artificial Sequence
  Description of Artificial Sequence: Synthetic oligonucleotide
accgccaucaaaucggaaa

SEQ ID NO: 1207266 - RNA, 19 nt, Artificial Sequence
  Description of Artificial Sequence: Synthetic oligonucleotide
aggugcgugcgauuucagc

SEQ ID NO: 1207267 - RNA, 19 nt, Artificial Sequence
  Description of Artificial Sequence: Synthetic oligonucleotide
acguucucaucagaauugc

SEQ ID NO: 1207268 - RNA, 19 nt, Artificial Sequence
  Description of Artificial Sequence: Synthetic oligonucleotide
aaguuguccuccacuacag

SEQ ID NO: 1207269 - RNA, 19 nt, Artificial Sequence
  Description of Artificial Sequence: Synthetic oligonucleotide
gacgaagcagaguaaagua

SEQ ID NO: 1207270 - RNA, 19 nt, Artificial Sequence
  Description of Artificial Sequence: Synthetic oligonucleotide
aagugcggaaacacgaaca

SEQ ID NO: 1207271 - RNA, 19 nt, Artificial Sequence
  Description of Artificial Sequence: Synthetic oligonucleotide
uggaguacuuuagaagaca

SEQ ID NO: 1207272 - RNA, 19 nt, Artificial Sequence
  Description of Artificial Sequence: Synthetic oligonucleotide
uucucgucucggaguaugg

SEQ ID NO: 1207273 - RNA, 19 nt, Artificial Sequence
  Description of Artificial Sequence: Synthetic oligonucleotide
agguaggaaguccaccuug

SEQ ID NO: 1207274 - RNA, 19 nt, Artificial Sequence
  Description of Artificial Sequence: Synthetic oligonucleotide
aggugcgauuguaagauuc

SEQ ID NO: 1207275 - RNA, 19 nt, Artificial Sequence
  Description of Artificial Sequence: Synthetic oligonucleotide
aagcaugguucaucaucuc

SEQ ID NO: 1207276 - RNA, 19 nt, Artificial Sequence
  Description of Artificial Sequence: Synthetic oligonucleotide
aguuaacuaucguuucccu

SEQ ID NO: 1207277 - RNA, 19 nt, Artificial Sequence
  Description of Artificial Sequence: Synthetic oligonucleotide
gacccaguguucuagugga

SEQ ID NO: 1207278 - RNA, 19 nt, Artificial Sequence
  Description of Artificial Sequence: Synthetic oligonucleotide
uguacauguaagucucgau

SEQ ID NO: 1207279 - RNA, 19 nt, Artificial Sequence
  Description of Artificial Sequence: Synthetic oligonucleotide
aguguucuaguggaagaag

SEQ ID NO: 1207280 - RNA, 19 nt, Artificial Sequence
  Description of Artificial Sequence: Synthetic oligonucleotide
uucaugaaggugcgauugu

SEQ ID NO: 1207281 - RNA, 19 nt, Artificial Sequence
  Description of Artificial Sequence: Synthetic oligonucleotide
caggcauuagcguuuauaa

SEQ ID NO: 1207282 - RNA, 19 nt, Artificial Sequence
  Description of Artificial Sequence: Synthetic oligonucleotide
gugguuuucacggauccug

SEQ ID NO: 1207283 - RNA, 19 nt, Artificial Sequence
  Description of Artificial Sequence: Synthetic oligonucleotide
agugcggaaacacgaacaa

SEQ ID NO: 1207284 - RNA, 19 nt, Artificial Sequence
  Description of Artificial Sequence: Synthetic oligonucleotide
cauguacauguaagucucg

SEQ ID NO: 1207285 - RNA, 19 nt, Artificial Sequence
  Description of Artificial Sequence: Synthetic oligonucleotide
gaaagggugugccucagua

SEQ ID NO: 1207286 - RNA, 19 nt, Artificial Sequence
  Description of Artificial Sequence: Synthetic oligonucleotide
guauugaagacccaguguu

SEQ ID NO: 1207287 - RNA, 19 nt, Artificial Sequence
  Description of Artificial Sequence: Synthetic oligonucleotide
cucggcagugguuuucuag

SEQ ID NO: 1207288 - RNA, 19 nt, Artificial Sequence
  Description of Artificial Sequence: Synthetic oligonucleotide
gaaauucaaaagugcggaa

SEQ ID NO: 1207289 - RNA, 19 nt, Artificial Sequence
  Description of Artificial Sequence: Synthetic oligonucleotide
aaaggcgggguuggagugg

SEQ ID NO: 1207290 - RNA, 19 nt, Artificial Sequence
  Description of Artificial Sequence: Synthetic oligonucleotide
ugcgugcgauuucagcucc

SEQ ID NO: 1207291 - RNA, 19 nt, Artificial Sequence
  Description of Artificial Sequence: Synthetic oligonucleotide
gacaucgucauaacucuca

SEQ ID NO: 1207292 - RNA, 19 nt, Artificial Sequence
  Description of Artificial Sequence: Synthetic oligonucleotide
acggauccuggcuaaguug

SEQ ID NO: 1207293 - RNA, 19 nt, Artificial Sequence
  Description of Artificial Sequence: Synthetic oligonucleotide
acuaucguuucccuuucaa

SEQ ID NO: 1207294 - RNA, 19 nt, Artificial Sequence
  Description of Artificial Sequence: Synthetic oligonucleotide
uauaggcuucaguucauuu

SEQ ID NO: 1207295 - RNA, 19 nt, Artificial Sequence
  Description of Artificial Sequence: Synthetic oligonucleotide
cugcaaugaaaugagguca

SEQ ID NO: 1207296 - RNA, 19 nt, Artificial Sequence
  Description of Artificial Sequence: Synthetic oligonucleotide
agauucaugacaggugcgu

SEQ ID NO: 1207297 - RNA, 19 nt, Artificial Sequence
  Description of Artificial Sequence: Synthetic oligonucleotide
uaauuauuccaagcauggu

SEQ ID NO: 1207298 - RNA, 19 nt, Artificial Sequence
  Description of Artificial Sequence: Synthetic oligonucleotide
gauucaugacaggugcgug

SEQ ID NO: 1207299 - RNA, 19 nt, Artificial Sequence
  Description of Artificial Sequence: Synthetic oligonucleotide
aaaagugcggaaacacgaa

SEQ ID NO: 1207300 - RNA, 19 nt, Artificial Sequence
  Description of Artificial Sequence: Synthetic oligonucleotide
cugguggauagacaaacca

SEQ ID NO: 1207301 - RNA, 19 nt, Artificial Sequence
  Description of Artificial Sequence: Synthetic oligonucleotide
cacucugcgacuccuuuug

SEQ ID NO: 1207302 - RNA, 19 nt, Artificial Sequence
  Description of Artificial Sequence: Synthetic oligonucleotide
auucaaaagugcggaaaca

SEQ ID NO: 1207303 - RNA, 19 nt, Artificial Sequence
  Description of Artificial Sequence: Synthetic oligonucleotide
aguggaacaggaccccgcu

SEQ ID NO: 1207304 - RNA, 19 nt, Artificial Sequence
  Description of Artificial Sequence: Synthetic oligonucleotide
ucucgucucggaguauggg

SEQ ID NO: 1207305 - RNA, 19 nt, Artificial Sequence
  Description of Artificial Sequence: Synthetic oligonucleotide
aggccguaagauguaguac

SEQ ID NO: 1207306 - RNA, 19 nt, Artificial Sequence
  Description of Artificial Sequence: Synthetic oligonucleotide
acucucacuagcaaaguaa

SEQ ID NO: 1207307 - RNA, 19 nt, Artificial Sequence
  Description of Artificial Sequence: Synthetic oligonucleotide
ggaaacacgaacaaucaaa

SEQ ID NO: 1207308 - RNA, 19 nt, Artificial Sequence
  Description of Artificial Sequence: Synthetic oligonucleotide
aaugugaguggaguacuuu

SEQ ID NO: 1207309 - RNA, 19 nt, Artificial Sequence
  Description of Artificial Sequence: Synthetic oligonucleotide
gaaggugcgauuguaagau

SEQ ID NO: 1207310 - RNA, 19 nt, Artificial Sequence
  Description of Artificial Sequence: Synthetic oligonucleotide
cuccacuacagccccgggg

SEQ ID NO: 1207311 - RNA, 19 nt, Artificial Sequence
  Description of Artificial Sequence: Synthetic oligonucleotide
guaagauguaguacuuuuc

SEQ ID NO: 1207312 - RNA, 19 nt, Artificial Sequence
  Description of Artificial Sequence: Synthetic oligonucleotide
caguuaugagaucuuucuc

SEQ ID NO: 1207313 - RNA, 19 nt, Artificial Sequence
  Description of Artificial Sequence: Synthetic oligonucleotide
guucuaguggaagaagguc

SEQ ID NO: 1207314 - RNA, 19 nt, Artificial Sequence
  Description of Artificial Sequence: Synthetic oligonucleotide
aacuaucguuucccuuuca

SEQ ID NO: 1207315 - RNA, 19 nt, Artificial Sequence
  Description of Artificial Sequence: Synthetic oligonucleotide
cgauagaccugcuaagagg

SEQ ID NO: 1207316 - RNA, 19 nt, Artificial Sequence
  Description of Artificial Sequence: Synthetic oligonucleotide
caagcaugguucaucaucu

SEQ ID NO: 1207317 - RNA, 19 nt, Artificial Sequence
  Description of Artificial Sequence: Synthetic oligonucleotide
uugucacgcauaugguccu

SEQ ID NO: 1207318 - RNA, 19 nt, Artificial Sequence
  Description of Artificial Sequence: Synthetic oligonucleotide
cucucacuagcaaaguaaa

SEQ ID NO: 1207319 - RNA, 19 nt, Artificial Sequence
  Description of Artificial Sequence: Synthetic oligonucleotide
cauaggcuuuuaucuauca

SEQ ID NO: 1207320 - RNA, 19 nt, Artificial Sequence
  Description of Artificial Sequence: Synthetic oligonucleotide
gaccuggcagguuaaaagu

SEQ ID NO: 1207321 - RNA, 19 nt, Artificial Sequence
  Description of Artificial Sequence: Synthetic oligonucleotide
uggcagguuaaaaguuaac

SEQ ID NO: 1207322 - RNA, 19 nt, Artificial Sequence
  Description of Artificial Sequence: Synthetic oligonucleotide
auguacauguaagucucga

SEQ ID NO: 1207323 - RNA, 19 nt, Artificial Sequence
  Description of Artificial Sequence: Synthetic oligonucleotide
ggcauuagcguuuauaauu

SEQ ID NO: 1207324 - RNA, 19 nt, Artificial Sequence
  Description of Artificial Sequence: Synthetic oligonucleotide
ucaucaugugucugaugau

SEQ ID NO: 1207325 - RNA, 19 nt, Artificial Sequence
  Description of Artificial Sequence: Synthetic oligonucleotide
aggcauuagcguuuauaau

SEQ ID NO: 1207326 - RNA, 19 nt, Artificial Sequence
  Description of Artificial Sequence: Synthetic oligonucleotide
guaacaggggcgcucugca

SEQ ID NO: 1207327 - RNA, 19 nt, Artificial Sequence
  Description of Artificial Sequence: Synthetic oligonucleotide
auuagcguuuauaauuauu

SEQ ID NO: 1207328 - RNA, 19 nt, Artificial Sequence
  Description of Artificial Sequence: Synthetic oligonucleotide
uugcaaugugaguggagua

SEQ ID NO: 1207329 - RNA, 19 nt, Artificial Sequence
  Description of Artificial Sequence: Synthetic oligonucleotide
cuaucguuucccuuucaaa

SEQ ID NO: 1207330 - RNA, 19 nt, Artificial Sequence
  Description of Artificial Sequence: Synthetic oligonucleotide
ucgguucucuaccccgaug

SEQ ID NO: 1207331 - RNA, 19 nt, Artificial Sequence
  Description of Artificial Sequence: Synthetic oligonucleotide
uaacaggggcgcucugcag

SEQ ID NO: 1207332 - RNA, 19 nt, Artificial Sequence
  Description of Artificial Sequence: Synthetic oligonucleotide
uugaguaacaggggcgcuc

SEQ ID NO: 1207333 - RNA, 19 nt, Artificial Sequence
  Description of Artificial Sequence: Synthetic oligonucleotide
ucaugaaggugcgauugua

SEQ ID NO: 1207334 - RNA, 19 nt, Artificial Sequence
  Description of Artificial Sequence: Synthetic oligonucleotide
uugccucguggcaauggcu

SEQ ID NO: 1207335 - RNA, 19 nt, Artificial Sequence
  Description of Artificial Sequence: Synthetic oligonucleotide
uaacucucacuagcaaagu

SEQ ID NO: 1207336 - RNA, 19 nt, Artificial Sequence
  Description of Artificial Sequence: Synthetic oligonucleotide
aguguugggccagggcuuc

SEQ ID NO: 1207337 - RNA, 19 nt, Artificial Sequence
  Description of Artificial Sequence: Synthetic oligonucleotide
acaggugcgugcgauuuca

SEQ ID NO: 1207338 - RNA, 19 nt, Artificial Sequence
  Description of Artificial Sequence: Synthetic oligonucleotide
ccgcucgugguuuucacgg

SEQ ID NO: 1207339 - RNA, 19 nt, Artificial Sequence
  Description of Artificial Sequence: Synthetic oligonucleotide
cucgugguuuucacggauc

SEQ ID NO: 1207340 - RNA, 19 nt, Artificial Sequence
  Description of Artificial Sequence: Synthetic oligonucleotide
uuuaagccccaggcauuag

SEQ ID NO: 1207341 - RNA, 19 nt, Artificial Sequence
  Description of Artificial Sequence: Synthetic oligonucleotide
auuuaagccccaggcauua

SEQ ID NO: 1207342 - RNA, 19 nt, Artificial Sequence
  Description of Artificial Sequence: Synthetic oligonucleotide
gaguggaacaggaccccgc

SEQ ID NO: 1207343 - RNA, 19 nt, Artificial Sequence
  Description of Artificial Sequence: Synthetic oligonucleotide
gggaugacguucucaucag

SEQ ID NO: 1207344 - RNA, 19 nt, Artificial Sequence
  Description of Artificial Sequence: Synthetic oligonucleotide
gugauacagagaugacaca

SEQ ID NO: 1207345 - RNA, 19 nt, Artificial Sequence
  Description of Artificial Sequence: Synthetic oligonucleotide
agauuaacaugaacuugaa

SEQ ID NO: 1207346 - RNA, 19 nt, Artificial Sequence
  Description of Artificial Sequence: Synthetic oligonucleotide
aaggugcgauuguaagauu

SEQ ID NO: 1207347 - RNA, 19 nt, Artificial Sequence
  Description of Artificial Sequence: Synthetic oligonucleotide
ugcuugaaugguccuucuu

SEQ ID NO: 1207348 - RNA, 19 nt, Artificial Sequence
  Description of Artificial Sequence: Synthetic oligonucleotide
ggugcgugcgauuucagcu

SEQ ID NO: 1207349 - RNA, 19 nt, Artificial Sequence
  Description of Artificial Sequence: Synthetic oligonucleotide
ucgggagcuccaucugccc

SEQ ID NO: 1207350 - RNA, 19 nt, Artificial Sequence
  Description of Artificial Sequence: Synthetic oligonucleotide
gguucucuaccccgauggg

SEQ ID NO: 1207351 - RNA, 19 nt, Artificial Sequence
  Description of Artificial Sequence: Synthetic oligonucleotide
aacuugaauuagguauauu

SEQ ID NO: 1207352 - RNA, 19 nt, Artificial Sequence
  Description of Artificial Sequence: Synthetic oligonucleotide
agggacgaagcagaguaaa

SEQ ID NO: 1207353 - RNA, 19 nt, Artificial Sequence
  Description of Artificial Sequence: Synthetic oligonucleotide
ugacaggugcgugcgauuu

SEQ ID NO: 1207354 - RNA, 19 nt, Artificial Sequence
  Description of Artificial Sequence: Synthetic oligonucleotide
cgguucucuaccccgaugg

SEQ ID NO: 1207355 - RNA, 19 nt, Artificial Sequence
  Description of Artificial Sequence: Synthetic oligonucleotide
aaauaacgauagaccugcu

SEQ ID NO: 1207356 - RNA, 19 nt, Artificial Sequence
  Description of Artificial Sequence: Synthetic oligonucleotide
uguguuccaggaggccucc

SEQ ID NO: 1207357 - RNA, 19 nt, Artificial Sequence
  Description of Artificial Sequence: Synthetic oligonucleotide
uauuccaagcaugguucau

SEQ ID NO: 1207358 - RNA, 19 nt, Artificial Sequence
  Description of Artificial Sequence: Synthetic oligonucleotide
agguauauucauaggcuuu

SEQ ID NO: 1207359 - RNA, 19 nt, Artificial Sequence
  Description of Artificial Sequence: Synthetic oligonucleotide
aaacuuugcuggacaucgu

SEQ ID NO: 1207360 - RNA, 19 nt, Artificial Sequence
  Description of Artificial Sequence: Synthetic oligonucleotide
cacuacagccccggggucc

SEQ ID NO: 1207361 - RNA, 19 nt, Artificial Sequence
  Description of Artificial Sequence: Synthetic oligonucleotide
ucacggauccuggcuaagu

SEQ ID NO: 1207362 - RNA, 19 nt, Artificial Sequence
  Description of Artificial Sequence: Synthetic oligonucleotide
gugcgugcgauuucagcuc

SEQ ID NO: 1207363 - RNA, 19 nt, Artificial Sequence
  Description of Artificial Sequence: Synthetic oligonucleotide
ucaugacaggugcgugcga

SEQ ID NO: 1207364 - RNA, 19 nt, Artificial Sequence
  Description of Artificial Sequence: Synthetic oligonucleotide
cucggaguauggggaaagg

SEQ ID NO: 1207365 - RNA, 19 nt, Artificial Sequence
  Description of Artificial Sequence: Synthetic oligonucleotide
gaguagccuccguucacuc

SEQ ID NO: 1207366 - RNA, 19 nt, Artificial Sequence
  Description of Artificial Sequence: Synthetic oligonucleotide
ggccguaagauguaguacu

SEQ ID NO: 1207367 - RNA, 19 nt, Artificial Sequence
  Description of Artificial Sequence: Synthetic oligonucleotide
ccuugucacgcauaugguc

SEQ ID NO: 1207368 - RNA, 19 nt, Artificial Sequence
  Description of Artificial Sequence: Synthetic oligonucleotide
gccccaagggcaaacauac

SEQ ID NO: 1207369 - RNA, 19 nt, Artificial Sequence
  Description of Artificial Sequence: Synthetic oligonucleotide
ggagguaggaaguccaccu

SEQ ID NO: 1207370 - RNA, 19 nt, Artificial Sequence
  Description of Artificial Sequence: Synthetic oligonucleotide
uuccucgcggugccggacu

SEQ ID NO: 1207371 - RNA, 19 nt, Artificial Sequence
  Description of Artificial Sequence: Synthetic oligonucleotide
ggcgaguggggaauggaag

SEQ ID NO: 1207372 - RNA, 19 nt, Artificial Sequence
  Description of Artificial Sequence: Synthetic oligonucleotide
guuaacuaucguuucccuu

SEQ ID NO: 1207373 - RNA, 19 nt, Artificial Sequence
  Description of Artificial Sequence: Synthetic oligonucleotide
guauggggaaagggugugc

SEQ ID NO: 1207374 - RNA, 19 nt, Artificial Sequence
  Description of Artificial Sequence: Synthetic oligonucleotide
acaggggcgcucugcagaa

SEQ ID NO: 1207375 - RNA, 19 nt, Artificial Sequence
  Description of Artificial Sequence: Synthetic oligonucleotide
aaacaucccguaggcccga

SEQ ID NO: 1207376 - RNA, 19 nt, Artificial Sequence
  Description of Artificial Sequence: Synthetic oligonucleotide
uagccuccguucacucggc

SEQ ID NO: 1207377 - RNA, 19 nt, Artificial Sequence
  Description of Artificial Sequence: Synthetic oligonucleotide
uggcccauuuuguguucca

SEQ ID NO: 1207378 - RNA, 19 nt, Artificial Sequence
  Description of Artificial Sequence: Synthetic oligonucleotide
gacaggugcgugcgauuuc

SEQ ID NO: 1207379 - RNA, 19 nt, Artificial Sequence
  Description of Artificial Sequence: Synthetic oligonucleotide
uccaagcaugguucaucau

SEQ ID NO: 1207380 - RNA, 19 nt, Artificial Sequence
  Description of Artificial Sequence: Synthetic oligonucleotide
caucccguaggcccgagua

SEQ ID NO: 1207381 - RNA, 19 nt, Artificial Sequence
  Description of Artificial Sequence: Synthetic oligonucleotide
gcauuagcguuuauaauua

SEQ ID NO: 1207382 - RNA, 19 nt, Artificial Sequence
  Description of Artificial Sequence: Synthetic oligonucleotide
gcgaguggggaauggaaga

SEQ ID NO: 1207383 - RNA, 19 nt, Artificial Sequence
  Description of Artificial Sequence: Synthetic oligonucleotide
gggacgaagcagaguaaag

SEQ ID NO: 1207384 - RNA, 19 nt, Artificial Sequence
  Description of Artificial Sequence: Synthetic oligonucleotide
ugggcgaguggggaaugga

SEQ ID NO: 1207385 - RNA, 19 nt, Artificial Sequence
  Description of Artificial Sequence: Synthetic oligonucleotide
ggugcgauuguaagauuca

SEQ ID NO: 1207386 - RNA, 19 nt, Artificial Sequence
  Description of Artificial Sequence: Synthetic oligonucleotide
cugcuaagaggcugucaca

SEQ ID NO: 1207387 - RNA, 19 nt, Artificial Sequence
  Description of Artificial Sequence: Synthetic oligonucleotide
ggggaauggaagaaauuaa

SEQ ID NO: 1207388 - RNA, 19 nt, Artificial Sequence
  Description of Artificial Sequence: Synthetic oligonucleotide
cuaguggaagaaggucauc

SEQ ID NO: 1207389 - RNA, 19 nt, Artificial Sequence
  Description of Artificial Sequence: Synthetic oligonucleotide
cucgcggugccggacucgc

SEQ ID NO: 1207390 - RNA, 19 nt, Artificial Sequence
  Description of Artificial Sequence: Synthetic oligonucleotide
ggacgaagcagaguaaagu

SEQ ID NO: 1207391 - RNA, 19 nt, Artificial Sequence
  Description of Artificial Sequence: Synthetic oligonucleotide
uucucgcggaugguggcau

SEQ ID NO: 1207392 - RNA, 19 nt, Artificial Sequence
  Description of Artificial Sequence: Synthetic oligonucleotide
ccaguguucuaguggaaga

SEQ ID NO: 1207393 - RNA, 19 nt, Artificial Sequence
  Description of Artificial Sequence: Synthetic oligonucleotide
ucgcggaugguggcaucag

SEQ ID NO: 1207394 - RNA, 19 nt, Artificial Sequence
  Description of Artificial Sequence: Synthetic oligonucleotide
caggugcgugcgauuucag

SEQ ID NO: 1207395 - RNA, 19 nt, Artificial Sequence
  Description of Artificial Sequence: Synthetic oligonucleotide
gccuccguucacucggcag

SEQ ID NO: 1207396 - RNA, 19 nt, Artificial Sequence
  Description of Artificial Sequence: Synthetic oligonucleotide
gccaaauaaacugcuugaa

SEQ ID NO: 1207397 - RNA, 19 nt, Artificial Sequence
  Description of Artificial Sequence: Synthetic oligonucleotide
cugggcgaguggggaaugg

SEQ ID NO: 1207398 - RNA, 19 nt, Artificial Sequence
  Description of Artificial Sequence: Synthetic oligonucleotide
cauuuaagccccaggcauu

SEQ ID NO: 1207399 - RNA, 19 nt, Artificial Sequence
  Description of Artificial Sequence: Synthetic oligonucleotide
gcaaaggcgggguuggagu

SEQ ID NO: 1207400 - RNA, 19 nt, Artificial Sequence
  Description of Artificial Sequence: Synthetic oligonucleotide
ucguggcaauggcuuccac

SEQ ID NO: 1207401 - RNA, 19 nt, Artificial Sequence
  Description of Artificial Sequence: Synthetic oligonucleotide
ccggacucgccccucggcg

SEQ ID NO: 1207402 - RNA, 19 nt, Artificial Sequence
  Description of Artificial Sequence: Synthetic oligonucleotide
guucacucggcagugguuu

SEQ ID NO: 1207403 - RNA, 19 nt, Artificial Sequence
  Description of Artificial Sequence: Synthetic oligonucleotide
acaucccguaggcccgagu

SEQ ID NO: 1207404 - RNA, 19 nt, Artificial Sequence
  Description of Artificial Sequence: Synthetic oligonucleotide
cucgaugacuucaggccgu

SEQ ID NO: 1207405 - RNA, 19 nt, Artificial Sequence
  Description of Artificial Sequence: Synthetic oligonucleotide
gguauauucauaggcuuuu

SEQ ID NO: 1207406 - RNA, 19 nt, Artificial Sequence
  Description of Artificial Sequence: Synthetic oligonucleotide
ucuaccccgaugggaggua

SEQ ID NO: 1207407 - RNA, 19 nt, Artificial Sequence
  Description of Artificial Sequence: Synthetic oligonucleotide
ggcggcaucuucggcacgc

SEQ ID NO: 1207408 - RNA, 19 nt, Artificial Sequence
  Description of Artificial Sequence: Synthetic oligonucleotide
cuucggcacgcgccccggg

SEQ ID NO: 1207409 - RNA, 19 nt, Artificial Sequence
  Description of Artificial Sequence: Synthetic oligonucleotide
caucuucggcacgcgcccc

SEQ ID NO: 1207410 - RNA, 19 nt, Artificial Sequence
  Description of Artificial Sequence: Synthetic oligonucleotide
caucgucauaacucucacu

SEQ ID NO: 1207411 - RNA, 19 nt, Artificial Sequence
  Description of Artificial Sequence: Synthetic oligonucleotide
acaccgccaucaaaucgga

SEQ ID NO: 1207412 - RNA, 19 nt, Artificial Sequence
  Description of Artificial Sequence: Synthetic oligonucleotide
agaggcugucacaguuaug

SEQ ID NO: 1207413 - RNA, 19 nt, Artificial Sequence
  Description of Artificial Sequence: Synthetic oligonucleotide
ucgaugacuucaggccgua

SEQ ID NO: 1207414 - RNA, 19 nt, Artificial Sequence
  Description of Artificial Sequence: Synthetic oligonucleotide
gagguaggaaguccaccuu

SEQ ID NO: 1207415 - RNA, 19 nt, Artificial Sequence
  Description of Artificial Sequence: Synthetic oligonucleotide
ccccucggcggcaucuucg

SEQ ID NO: 1207416 - RNA, 19 nt, Artificial Sequence
  Description of Artificial Sequence: Synthetic oligonucleotide
ucucgcggaugguggcauc

SEQ ID NO: 1207417 - RNA, 19 nt, Artificial Sequence
  Description of Artificial Sequence: Synthetic oligonucleotide
gagggacgaagcagaguaa

SEQ ID NO: 1207418 - RNA, 19 nt, Artificial Sequence
  Description of Artificial Sequence: Synthetic oligonucleotide
ggaguacuuuagaagacau

SEQ ID NO: 1207419 - RNA, 19 nt, Artificial Sequence
  Description of Artificial Sequence: Synthetic oligonucleotide
cucgcggaugguggcauca

SEQ ID NO: 1207420 - RNA, 19 nt, Artificial Sequence
  Description of Artificial Sequence: Synthetic oligonucleotide
agaugacacagggcauuua

SEQ ID NO: 1207421 - RNA, 19 nt, Artificial Sequence
  Description of Artificial Sequence: Synthetic oligonucleotide
cuuccucgcggugccggac

SEQ ID NO: 1207422 - RNA, 19 nt, Artificial Sequence
  Description of Artificial Sequence: Synthetic oligonucleotide
caugagucagucgccacau

SEQ ID NO: 1207423 - RNA, 19 nt, Artificial Sequence
  Description of Artificial Sequence: Synthetic oligonucleotide
cuagggccucuacggcuuc

SEQ ID NO: 1207424 - RNA, 19 nt, Artificial Sequence
  Description of Artificial Sequence: Synthetic oligonucleotide
ccucguggcaauggcuucc

SEQ ID NO: 1207425 - RNA, 19 nt, Artificial Sequence
  Description of Artificial Sequence: Synthetic oligonucleotide
cugagagcccgcucguggu

SEQ ID NO: 1207426 - RNA, 19 nt, Artificial Sequence
  Description of Artificial Sequence: Synthetic oligonucleotide
cccguaggcccgaguagcc

SEQ ID NO: 1207427 - RNA, 19 nt, Artificial Sequence
  Description of Artificial Sequence: Synthetic oligonucleotide
gcaaugugaguggaguacu

SEQ ID NO: 1207428 - RNA, 19 nt, Artificial Sequence
  Description of Artificial Sequence: Synthetic oligonucleotide
gguaugcagugagggacga

SEQ ID NO: 1207429 - RNA, 19 nt, Artificial Sequence
  Description of Artificial Sequence: Synthetic oligonucleotide
caugacaggugcgugcgau

SEQ ID NO: 1207430 - RNA, 19 nt, Artificial Sequence
  Description of Artificial Sequence: Synthetic oligonucleotide
ccucuacggcuucccaggc

SEQ ID NO: 1207431 - RNA, 19 nt, Artificial Sequence
  Description of Artificial Sequence: Synthetic oligonucleotide
caaugugaguggaguacuu

SEQ ID NO: 1207432 - RNA, 19 nt, Artificial Sequence
  Description of Artificial Sequence: Synthetic oligonucleotide
ggacaucgucauaacucuc

SEQ ID NO: 1207433 - RNA, 19 nt, Artificial Sequence
  Description of Artificial Sequence: Synthetic oligonucleotide
cguaggcccgaguagccuc

SEQ ID NO: 1207434 - RNA, 19 nt, Artificial Sequence
  Description of Artificial Sequence: Synthetic oligonucleotide
cucguggcaauggcuucca

SEQ ID NO: 1207435 - RNA, 19 nt, Artificial Sequence
  Description of Artificial Sequence: Synthetic oligonucleotide
gucgccacauguacaugua

SEQ ID NO: 1207436 - RNA, 19 nt, Artificial Sequence
  Description of Artificial Sequence: Synthetic oligonucleotide
gucucggaguauggggaaa

SEQ ID NO: 1207437 - RNA, 19 nt, Artificial Sequence
  Description of Artificial Sequence: Synthetic oligonucleotide
ccgggcacgccuuccucgc

SEQ ID NO: 1207438 - RNA, 19 nt, Artificial Sequence
  Description of Artificial Sequence: Synthetic oligonucleotide
cggaguauggggaaagggu

SEQ ID NO: 1207439 - RNA, 19 nt, Artificial Sequence
  Description of Artificial Sequence: Synthetic oligonucleotide
cacggauccuggcuaaguu

SEQ ID NO: 1207440 - RNA, 19 nt, Artificial Sequence
  Description of Artificial Sequence: Synthetic oligonucleotide
gugcgauuguaagauucau

SEQ ID NO: 1207441 - RNA, 19 nt, Artificial Sequence
  Description of Artificial Sequence: Synthetic oligonucleotide
gccggacucgccccucggc

SEQ ID NO: 1207442 - RNA, 19 nt, Artificial Sequence
  Description of Artificial Sequence: Synthetic oligonucleotide
cggacucgccccucggcgg

SEQ ID NO: 1207443 - RNA, 19 nt, Artificial Sequence
  Description of Artificial Sequence: Synthetic oligonucleotide
cgccaucaaaucggaaagc

SEQ ID NO: 1207444 - RNA, 19 nt, Artificial Sequence
  Description of Artificial Sequence: Synthetic oligonucleotide
guaugcagugagggacgaa

SEQ ID NO: 1207445 - RNA, 19 nt, Artificial Sequence
  Description of Artificial Sequence: Synthetic oligonucleotide
cucuaccccgaugggaggu

SEQ ID NO: 1207446 - RNA, 19 nt, Artificial Sequence
  Description of Artificial Sequence: Synthetic oligonucleotide
ggauccuggcuaaguuguc

SEQ ID NO: 1207447 - RNA, 19 nt, Artificial Sequence
  Description of Artificial Sequence: Synthetic oligonucleotide
guggggaauggaagaaauu

SEQ ID NO: 1207448 - RNA, 19 nt, Artificial Sequence
  Description of Artificial Sequence: Synthetic oligonucleotide
cggauccuggcuaaguugu

SEQ ID NO: 1207449 - RNA, 19 nt, Artificial Sequence
  Description of Artificial Sequence: Synthetic oligonucleotide
gcggcaucuucggcacgcg

SEQ ID NO: 1207450 - RNA, 19 nt, Artificial Sequence
  Description of Artificial Sequence: Synthetic oligonucleotide
gugcggaaacacgaacaau

SEQ ID NO: 1207451 - RNA, 19 nt, Artificial Sequence
  Description of Artificial Sequence: Synthetic oligonucleotide
gcucgugguuuucacggau

SEQ ID NO: 1207452 - RNA, 19 nt, Artificial Sequence
  Description of Artificial Sequence: Synthetic oligonucleotide
cacucggcagugguuuucu

SEQ ID NO: 1207453 - RNA, 19 nt, Artificial Sequence
  Description of Artificial Sequence: Synthetic oligonucleotide
caccgccaucaaaucggaa

SEQ ID NO: 1207454 - RNA, 19 nt, Artificial Sequence
  Description of Artificial Sequence: Synthetic oligonucleotide
gcccgcucgugguuuucac

SEQ ID NO: 1207455 - RNA, 19 nt, Artificial Sequence
  Description of Artificial Sequence: Synthetic oligonucleotide
cggaaacacgaacaaucaa

SEQ ID NO: 1207456 - RNA, 19 nt, Artificial Sequence
  Description of Artificial Sequence: Synthetic oligonucleotide
ccacuacagccccgggguc

SEQ ID NO: 1207457 - RNA, 19 nt, Artificial Sequence
  Description of Artificial Sequence: Synthetic oligonucleotide
ggggcgcucugcagaacuc

SEQ ID NO: 1207458 - RNA, 19 nt, Artificial Sequence
  Description of Artificial Sequence: Synthetic oligonucleotide
gccguaagauguaguacuu

SEQ ID NO: 1207459 - RNA, 19 nt, Artificial Sequence
  Description of Artificial Sequence: Synthetic oligonucleotide
cucgccccucggcggcauc

SEQ ID NO: 1207460 - RNA, 19 nt, Artificial Sequence
  Description of Artificial Sequence: Synthetic oligonucleotide
gguccccgggcacgccuuc

SEQ ID NO: 1207461 - RNA, 19 nt, Artificial Sequence
  Description of Artificial Sequence: Synthetic oligonucleotide
ggcacgccuuccucgcggu

SEQ ID NO: 1207462 - RNA, 19 nt, Artificial Sequence
  Description of Artificial Sequence: Synthetic oligonucleotide
ccuuccucgcggugccgga

SEQ ID NO: 1207463 - RNA, 19 nt, Artificial Sequence
  Description of Artificial Sequence: Synthetic oligonucleotide
cgggcacgccuuccucgcg

SEQ ID NO: 1207464 - RNA, 19 nt, Artificial Sequence
  Description of Artificial Sequence: Synthetic oligonucleotide
cgcucgugguuuucacgga

SEQ ID NO: 1207465 - RNA, 19 nt, Artificial Sequence
  Description of Artificial Sequence: Synthetic oligonucleotide
ccgggguccccgggcacgc

SEQ ID NO: 1207466 - RNA, 19 nt, Artificial Sequence
  Description of Artificial Sequence: Synthetic oligonucleotide
gcgugcgauuucagcucca

SEQ ID NO: 1207467 - RNA, 19 nt, Artificial Sequence
  Description of Artificial Sequence: Synthetic oligonucleotide
ccacucugcgacuccuuuu

SEQ ID NO: 1207468 - RNA, 19 nt, Artificial Sequence
  Description of Artificial Sequence: Synthetic oligonucleotide
ccguaagauguaguacuuu

SEQ ID NO: 1207469 - RNA, 19 nt, Artificial Sequence
  Description of Artificial Sequence: Synthetic oligonucleotide
ccccgaugggagguaggaa

SEQ ID NO: 1207470 - RNA, 19 nt, Artificial Sequence
  Description of Artificial Sequence: Synthetic oligonucleotide
cgugguuuucacggauccu

SEQ ID NO: 1207471 - RNA, 19 nt, Artificial Sequence
  Description of Artificial Sequence: Synthetic oligonucleotide
ccguaggcccgaguagccu

SEQ ID NO: 1207472 - RNA, 19 nt, Artificial Sequence
  Description of Artificial Sequence: Synthetic oligonucleotide
ggguccccgggcacgccuu

SEQ ID NO: 1207473 - RNA, 19 nt, Artificial Sequence
  Description of Artificial Sequence: Synthetic oligonucleotide
cgccccucggcggcaucuu

SEQ ID NO: 1207474 - RNA, 19 nt, Artificial Sequence
  Description of Artificial Sequence: Synthetic oligonucleotide
aaaguuucucucccgagcc

SEQ ID NO: 1207475 - RNA, 19 nt, Artificial Sequence
  Description of Artificial Sequence: Synthetic oligonucleotide
aaaaccgucaaaaugcugg

SEQ ID NO: 1207476 - RNA, 19 nt, Artificial Sequence
  Description of Artificial Sequence: Synthetic oligonucleotide
cacaaaaccgucaaaaugc

SEQ ID NO: 1207477 - RNA, 19 nt, Artificial Sequence
  Description of Artificial Sequence: Synthetic oligonucleotide
guagcuacgauguucaagg

SEQ ID NO: 1207478 - RNA, 19 nt, Artificial Sequence
  Description of Artificial Sequence: Synthetic oligonucleotide
ugacaauggagcauuaggg

SEQ ID NO: 1207479 - RNA, 19 nt, Artificial Sequence
  Description of Artificial Sequence: Synthetic oligonucleotide
acaauggagcauuagggcc

SEQ ID NO: 1207480 - RNA, 19 nt, Artificial Sequence
  Description of Artificial Sequence: Synthetic oligonucleotide
auagaaguaauccaggccu

SEQ ID NO: 1207481 - RNA, 19 nt, Artificial Sequence
  Description of Artificial Sequence: Synthetic oligonucleotide
ugugauuucgaacaucuca

SEQ ID NO: 1207482 - RNA, 19 nt, Artificial Sequence
  Description of Artificial Sequence: Synthetic oligonucleotide
ugcaucuuaauaaagcgug

SEQ ID NO: 1207483 - RNA, 19 nt, Artificial Sequence
  Description of Artificial Sequence: Synthetic oligonucleotide
ugaacaguagcuacgaugu

SEQ ID NO: 1207484 - RNA, 19 nt, Artificial Sequence
  Description of Artificial Sequence: Synthetic oligonucleotide
uccauauauaucuuccacg

SEQ ID NO: 1207485 - RNA, 19 nt, Artificial Sequence
  Description of Artificial Sequence: Synthetic oligonucleotide
cuuggcaacaucauagccg

SEQ ID NO: 1207486 - RNA, 19 nt, Artificial Sequence
  Description of Artificial Sequence: Synthetic oligonucleotide
auuucgaacaucucacgac

SEQ ID NO: 1207487 - RNA, 19 nt, Artificial Sequence
  Description of Artificial Sequence: Synthetic oligonucleotide
uguucaaacuccuugugug

SEQ ID NO: 1207488 - RNA, 19 nt, Artificial Sequence
  Description of Artificial Sequence: Synthetic oligonucleotide
auauauaucuuccacguau

SEQ ID NO: 1207489 - RNA, 19 nt, Artificial Sequence
  Description of Artificial Sequence: Synthetic oligonucleotide
ucuuaauaaagcgugugag

SEQ ID NO: 1207490 - RNA, 19 nt, Artificial Sequence
  Description of Artificial Sequence: Synthetic oligonucleotide
aguaauccaggccuuggcc

SEQ ID NO: 1207491 - RNA, 19 nt, Artificial Sequence
  Description of Artificial Sequence: Synthetic oligonucleotide
agaaaagaggccuauauuu

SEQ ID NO: 1207492 - RNA, 19 nt, Artificial Sequence
  Description of Artificial Sequence: Synthetic oligonucleotide
guagucauaugucaugagg

SEQ ID NO: 1207493 - RNA, 19 nt, Artificial Sequence
  Description of Artificial Sequence: Synthetic oligonucleotide
aaaagaggccuauauuuca

SEQ ID NO: 1207494 - RNA, 19 nt, Artificial Sequence
  Description of Artificial Sequence: Synthetic oligonucleotide
uuucgaacaucucacgacc

SEQ ID NO: 1207495 - RNA, 19 nt, Artificial Sequence
  Description of Artificial Sequence: Synthetic oligonucleotide
aaguccagucuucaaagag

SEQ ID NO: 1207496 - RNA, 19 nt, Artificial Sequence
  Description of Artificial Sequence: Synthetic oligonucleotide
aagaggccuauauuucacc

SEQ ID NO: 1207497 - RNA, 19 nt, Artificial Sequence
  Description of Artificial Sequence: Synthetic oligonucleotide
aagacaacaugccucccuc

SEQ ID NO: 1207498 - RNA, 19 nt, Artificial Sequence
  Description of Artificial Sequence: Synthetic oligonucleotide
cucuaauccaugacaaugg

SEQ ID NO: 1207499 - RNA, 19 nt, Artificial Sequence
  Description of Artificial Sequence: Synthetic oligonucleotide
ucuguauauaccugggccc

SEQ ID NO: 1207500 - RNA, 19 nt, Artificial Sequence
  Description of Artificial Sequence: Synthetic oligonucleotide
ugauucacauuccaugaug

SEQ ID NO: 1207501 - RNA, 19 nt, Artificial Sequence
  Description of Artificial Sequence: Synthetic oligonucleotide
aagccgaggcacuaugcgc

SEQ ID NO: 1207502 - RNA, 19 nt, Artificial Sequence
  Description of Artificial Sequence: Synthetic oligonucleotide
gacaauggagcauuagggc

SEQ ID NO: 1207503 - RNA, 19 nt, Artificial Sequence
  Description of Artificial Sequence: Synthetic oligonucleotide
ucauaugucaugaggcuga

SEQ ID NO: 1207504 - RNA, 19 nt, Artificial Sequence
  Description of Artificial Sequence: Synthetic oligonucleotide
accgucaaaaugcugguuc

SEQ ID NO: 1207505 - RNA, 19 nt, Artificial Sequence
  Description of Artificial Sequence: Synthetic oligonucleotide
agccaucuaguacaggggc

SEQ ID NO: 1207506 - RNA, 19 nt, Artificial Sequence
  Description of Artificial Sequence: Synthetic oligonucleotide
uagaaaaguccauagucac

SEQ ID NO: 1207507 - RNA, 19 nt, Artificial Sequence
  Description of Artificial Sequence: Synthetic oligonucleotide
uuugacguccgucaccacc

SEQ ID NO: 1207508 - RNA, 19 nt, Artificial Sequence
  Description of Artificial Sequence: Synthetic oligonucleotide
gaggccuacauguuucugg

SEQ ID NO: 1207509 - RNA, 19 nt, Artificial Sequence
  Description of Artificial Sequence: Synthetic oligonucleotide
agcgucuguauauaccugg

SEQ ID NO: 1207510 - RNA, 19 nt, Artificial Sequence
  Description of Artificial Sequence: Synthetic oligonucleotide
aaagaggccuauauuucac

SEQ ID NO: 1207511 - RNA, 19 nt, Artificial Sequence
  Description of Artificial Sequence: Synthetic oligonucleotide
aaguuucucucccgagccc

SEQ ID NO: 1207512 - RNA, 19 nt, Artificial Sequence
  Description of Artificial Sequence: Synthetic oligonucleotide
cugaacaguagcuacgaug

SEQ ID NO: 1207513 - RNA, 19 nt, Artificial Sequence
  Description of Artificial Sequence: Synthetic oligonucleotide
uuggcaacaucauagccgu

SEQ ID NO: 1207514 - RNA, 19 nt, Artificial Sequence
  Description of Artificial Sequence: Synthetic oligonucleotide
gaagccgaggcacuaugcg

SEQ ID NO: 1207515 - RNA, 19 nt, Artificial Sequence
  Description of Artificial Sequence: Synthetic oligonucleotide
auauaucuuccacguauuc

SEQ ID NO: 1207516 - RNA, 19 nt, Artificial Sequence
  Description of Artificial Sequence: Synthetic oligonucleotide
guaagcauguggaugaggc

SEQ ID NO: 1207517 - RNA, 19 nt, Artificial Sequence
  Description of Artificial Sequence: Synthetic oligonucleotide
acgaccacgucucuucagc

SEQ ID NO: 1207518 - RNA, 19 nt, Artificial Sequence
  Description of Artificial Sequence: Synthetic oligonucleotide
aguuguucaaacuccuugu

SEQ ID NO: 1207519 - RNA, 19 nt, Artificial Sequence
  Description of Artificial Sequence: Synthetic oligonucleotide
agcuacgauguucaaggac

SEQ ID NO: 1207520 - RNA, 19 nt, Artificial Sequence
  Description of Artificial Sequence: Synthetic oligonucleotide
aggaggaucuugcuucgcc

SEQ ID NO: 1207521 - RNA, 19 nt, Artificial Sequence
  Description of Artificial Sequence: Synthetic oligonucleotide
caauggcuuagaaaagucc

SEQ ID NO: 1207522 - RNA, 19 nt, Artificial Sequence
  Description of Artificial Sequence: Synthetic oligonucleotide
ugucccacaccacucgggg

SEQ ID NO: 1207523 - RNA, 19 nt, Artificial Sequence
  Description of Artificial Sequence: Synthetic oligonucleotide
aagugaguaagcaugugga

SEQ ID NO: 1207524 - RNA, 19 nt, Artificial Sequence
  Description of Artificial Sequence: Synthetic oligonucleotide
guccauagucacuugggcg

SEQ ID NO: 1207525 - RNA, 19 nt, Artificial Sequence
  Description of Artificial Sequence: Synthetic oligonucleotide
ucuaauccaugacaaugga

SEQ ID NO: 1207526 - RNA, 19 nt, Artificial Sequence
  Description of Artificial Sequence: Synthetic oligonucleotide
gaccagaauggcuagcagc

SEQ ID NO: 1207527 - RNA, 19 nt, Artificial Sequence
  Description of Artificial Sequence: Synthetic oligonucleotide
gaaaucaucguaaguccag

SEQ ID NO: 1207528 - RNA, 19 nt, Artificial Sequence
  Description of Artificial Sequence: Synthetic oligonucleotide
aggauaggguccccaaccc

SEQ ID NO: 1207529 - RNA, 19 nt, Artificial Sequence
  Description of Artificial Sequence: Synthetic oligonucleotide
uucagcgucuguauauacc

SEQ ID NO: 1207530 - RNA, 19 nt, Artificial Sequence
  Description of Artificial Sequence: Synthetic oligonucleotide
aucuuaauaaagcguguga

SEQ ID NO: 1207531 - RNA, 19 nt, Artificial Sequence
  Description of Artificial Sequence: Synthetic oligonucleotide
caaaguuucucucccgagc

SEQ ID NO: 1207532 - RNA, 19 nt, Artificial Sequence
  Description of Artificial Sequence: Synthetic oligonucleotide
ucuugcuucgccacuguga

SEQ ID NO: 1207533 - RNA, 19 nt, Artificial Sequence
  Description of Artificial Sequence: Synthetic oligonucleotide
ucagaguaggguagaagac

SEQ ID NO: 1207534 - RNA, 19 nt, Artificial Sequence
  Description of Artificial Sequence: Synthetic oligonucleotide
uauccauauauaucuucca

SEQ ID NO: 1207535 - RNA, 19 nt, Artificial Sequence
  Description of Artificial Sequence: Synthetic oligonucleotide
gauuucgaacaucucacga

SEQ ID NO: 1207536 - RNA, 19 nt, Artificial Sequence
  Description of Artificial Sequence: Synthetic oligonucleotide
aguaggguagaagacaaca

SEQ ID NO: 1207537 - RNA, 19 nt, Artificial Sequence
  Description of Artificial Sequence: Synthetic oligonucleotide
uauucacacaggauagggu

SEQ ID NO: 1207538 - RNA, 19 nt, Artificial Sequence
  Description of Artificial Sequence: Synthetic oligonucleotide
uuaacuagggguggagaag

SEQ ID NO: 1207539 - RNA, 19 nt, Artificial Sequence
  Description of Artificial Sequence: Synthetic oligonucleotide
uugacguccgucaccacca

SEQ ID NO: 1207540 - RNA, 19 nt, Artificial Sequence
  Description of Artificial Sequence: Synthetic oligonucleotide
aaaccgucaaaaugcuggu

SEQ ID NO: 1207541 - RNA, 19 nt, Artificial Sequence
  Description of Artificial Sequence: Synthetic oligonucleotide
cacugucuaagacauuccg

SEQ ID NO: 1207542 - RNA, 19 nt, Artificial Sequence
  Description of Artificial Sequence: Synthetic oligonucleotide
aacaucucacgaccacguc

SEQ ID NO: 1207543 - RNA, 19 nt, Artificial Sequence
  Description of Artificial Sequence: Synthetic oligonucleotide
ucaucguaaguccagucuu

SEQ ID NO: 1207544 - RNA, 19 nt, Artificial Sequence
  Description of Artificial Sequence: Synthetic oligonucleotide
acaggcucuaauccaugac

SEQ ID NO: 1207545 - RNA, 19 nt, Artificial Sequence
  Description of Artificial Sequence: Synthetic oligonucleotide
ggcaccaaccucuaggucc

SEQ ID NO: 1207546 - RNA, 19 nt, Artificial Sequence
  Description of Artificial Sequence: Synthetic oligonucleotide
agcuuugacguccgucacc

SEQ ID NO: 1207547 - RNA, 19 nt, Artificial Sequence
  Description of Artificial Sequence: Synthetic oligonucleotide
gaaaagaggccuauauuuc

SEQ ID NO: 1207548 - RNA, 19 nt, Artificial Sequence
  Description of Artificial Sequence: Synthetic oligonucleotide
cugucuaagacauuccgga

SEQ ID NO: 1207549 - RNA, 19 nt, Artificial Sequence
  Description of Artificial Sequence: Synthetic oligonucleotide
cuugugugugaacauuccc

SEQ ID NO: 1207550 - RNA, 19 nt, Artificial Sequence
  Description of Artificial Sequence: Synthetic oligonucleotide
uuggaaugaaggagugacc

SEQ ID NO: 1207551 - RNA, 19 nt, Artificial Sequence
  Description of Artificial Sequence: Synthetic oligonucleotide
guagaagacaacaugccuc

SEQ ID NO: 1207552 - RNA, 19 nt, Artificial Sequence
  Description of Artificial Sequence: Synthetic oligonucleotide
acuaugcgcaggcuuuugg

SEQ ID NO: 1207553 - RNA, 19 nt, Artificial Sequence
  Description of Artificial Sequence: Synthetic oligonucleotide
gaacauucccagcugguca

SEQ ID NO: 1207554 - RNA, 19 nt, Artificial Sequence
  Description of Artificial Sequence: Synthetic oligonucleotide
guuccauggagugacguag

SEQ ID NO: 1207555 - RNA, 19 nt, Artificial Sequence
  Description of Artificial Sequence: Synthetic oligonucleotide
uccgcgauucuucuuguac

SEQ ID NO: 1207556 - RNA, 19 nt, Artificial Sequence
  Description of Artificial Sequence: Synthetic oligonucleotide
caagaagugcuccgcagcc

SEQ ID NO: 1207557 - RNA, 19 nt, Artificial Sequence
  Description of Artificial Sequence: Synthetic oligonucleotide
caggauaggguccccaacc

SEQ ID NO: 1207558 - RNA, 19 nt, Artificial Sequence
  Description of Artificial Sequence: Synthetic oligonucleotide
gacuuccaccacaaaaccg

SEQ ID NO: 1207559 - RNA, 19 nt, Artificial Sequence
  Description of Artificial Sequence: Synthetic oligonucleotide
ucagccaagugaguaagca

SEQ ID NO: 1207560 - RNA, 19 nt, Artificial Sequence
  Description of Artificial Sequence: Synthetic oligonucleotide
acugucuaagacauuccgg

SEQ ID NO: 1207561 - RNA, 19 nt, Artificial Sequence
  Description of Artificial Sequence: Synthetic oligonucleotide
gcuacgauguucaaggacc

SEQ ID NO: 1207562 - RNA, 19 nt, Artificial Sequence
  Description of Artificial Sequence: Synthetic oligonucleotide
aaaucaucguaaguccagu

SEQ ID NO: 1207563 - RNA, 19 nt, Artificial Sequence
  Description of Artificial Sequence: Synthetic oligonucleotide
gaggccuauauuucaccag

SEQ ID NO: 1207564 - RNA, 19 nt, Artificial Sequence
  Description of Artificial Sequence: Synthetic oligonucleotide
gacccaucaagcacggccg

SEQ ID NO: 1207565 - RNA, 19 nt, Artificial Sequence
  Description of Artificial Sequence: Synthetic oligonucleotide
uggaguagucauaugucau

SEQ ID NO: 1207566 - RNA, 19 nt, Artificial Sequence
  Description of Artificial Sequence: Synthetic oligonucleotide
cuaugcgcaggcuuuuggc

SEQ ID NO: 1207567 - RNA, 19 nt, Artificial Sequence
  Description of Artificial Sequence: Synthetic oligonucleotide
agaggccuauauuucacca

SEQ ID NO: 1207568 - RNA, 19 nt, Artificial Sequence
  Description of Artificial Sequence: Synthetic oligonucleotide
uugacagcucgcauccacc

SEQ ID NO: 1207569 - RNA, 19 nt, Artificial Sequence
  Description of Artificial Sequence: Synthetic oligonucleotide
aggccuauauuucaccagu

SEQ ID NO: 1207570 - RNA, 19 nt, Artificial Sequence
  Description of Artificial Sequence: Synthetic oligonucleotide
ucucccgagcccuagcuga

SEQ ID NO: 1207571 - RNA, 19 nt, Artificial Sequence
  Description of Artificial Sequence: Synthetic oligonucleotide
ucaugucagaagaccggcc

SEQ ID NO: 1207572 - RNA, 19 nt, Artificial Sequence
  Description of Artificial Sequence: Synthetic oligonucleotide
auauaccugggcccaauga

SEQ ID NO: 1207573 - RNA, 19 nt, Artificial Sequence
  Description of Artificial Sequence: Synthetic oligonucleotide
ggcuuagaaaaguccauag

SEQ ID NO: 1207574 - RNA, 19 nt, Artificial Sequence
  Description of Artificial Sequence: Synthetic oligonucleotide
cacguauucacacaggaua

SEQ ID NO: 1207575 - RNA, 19 nt, Artificial Sequence
  Description of Artificial Sequence: Synthetic oligonucleotide
caaugacaauuucacgggc

SEQ ID NO: 1207576 - RNA, 19 nt, Artificial Sequence
  Description of Artificial Sequence: Synthetic oligonucleotide
accauagcagaugucucac

SEQ ID NO: 1207577 - RNA, 19 nt, Artificial Sequence
  Description of Artificial Sequence: Synthetic oligonucleotide
agcaaaguuucucucccga

SEQ ID NO: 1207578 - RNA, 19 nt, Artificial Sequence
  Description of Artificial Sequence: Synthetic oligonucleotide
uuccggaaaucaucguaag

SEQ ID NO: 1207579 - RNA, 19 nt, Artificial Sequence
  Description of Artificial Sequence: Synthetic oligonucleotide
ugacagcucgcauccaccc

SEQ ID NO: 1207580 - RNA, 19 nt, Artificial Sequence
  Description of Artificial Sequence: Synthetic oligonucleotide
cucgcauccacccuugguc

SEQ ID NO: 1207581 - RNA, 19 nt, Artificial Sequence
  Description of Artificial Sequence: Synthetic oligonucleotide
acguauucacacaggauag

SEQ ID NO: 1207582 - RNA, 19 nt, Artificial Sequence
  Description of Artificial Sequence: Synthetic oligonucleotide
uaauccaggccuuggccca

SEQ ID NO: 1207583 - RNA, 19 nt, Artificial Sequence
  Description of Artificial Sequence: Synthetic oligonucleotide
cauagcagaugucucacca

SEQ ID NO: 1207584 - RNA, 19 nt, Artificial Sequence
  Description of Artificial Sequence: Synthetic oligonucleotide
cugagucuuuuccagcagc

SEQ ID NO: 1207585 - RNA, 19 nt, Artificial Sequence
  Description of Artificial Sequence: Synthetic oligonucleotide
caucucacgaccacgucuc

SEQ ID NO: 1207586 - RNA, 19 nt, Artificial Sequence
  Description of Artificial Sequence: Synthetic oligonucleotide
acguccgucaccaccagac

SEQ ID NO: 1207587 - RNA, 19 nt, Artificial Sequence
  Description of Artificial Sequence: Synthetic oligonucleotide
uagggguggagaagagcgg

SEQ ID NO: 1207588 - RNA, 19 nt, Artificial Sequence
  Description of Artificial Sequence: Synthetic oligonucleotide
ggcaacaucauagccgugg

SEQ ID NO: 1207589 - RNA, 19 nt, Artificial Sequence
  Description of Artificial Sequence: Synthetic oligonucleotide
uccauggagugacguagcc

SEQ ID NO: 1207590 - RNA, 19 nt, Artificial Sequence
  Description of Artificial Sequence: Synthetic oligonucleotide
uggugggcgugucacagca

SEQ ID NO: 1207591 - RNA, 19 nt, Artificial Sequence
  Description of Artificial Sequence: Synthetic oligonucleotide
acuuugacaggguggugug

SEQ ID NO: 1207592 - RNA, 19 nt, Artificial Sequence
  Description of Artificial Sequence: Synthetic oligonucleotide
gaccauagcagaugucuca

SEQ ID NO: 1207593 - RNA, 19 nt, Artificial Sequence
  Description of Artificial Sequence: Synthetic oligonucleotide
agccagacuggugagaucu

SEQ ID NO: 1207594 - RNA, 19 nt, Artificial Sequence
  Description of Artificial Sequence: Synthetic oligonucleotide
ucgcauccacccuuggucc

SEQ ID NO: 1207595 - RNA, 19 nt, Artificial Sequence
  Description of Artificial Sequence: Synthetic oligonucleotide
aacuuggaaugaaggagug

SEQ ID NO: 1207596 - RNA, 19 nt, Artificial Sequence
  Description of Artificial Sequence: Synthetic oligonucleotide
ccaugauucacauuccaug

SEQ ID NO: 1207597 - RNA, 19 nt, Artificial Sequence
  Description of Artificial Sequence: Synthetic oligonucleotide
uccggaaaucaucguaagu

SEQ ID NO: 1207598 - RNA, 19 nt, Artificial Sequence
  Description of Artificial Sequence: Synthetic oligonucleotide
ucuuaacuagggguggaga

SEQ ID NO: 1207599 - RNA, 19 nt, Artificial Sequence
  Description of Artificial Sequence: Synthetic oligonucleotide
uccagccuacagcagguca

SEQ ID NO: 1207600 - RNA, 19 nt, Artificial Sequence
  Description of Artificial Sequence: Synthetic oligonucleotide
aagugcuccgcagccuggc

SEQ ID NO: 1207601 - RNA, 19 nt, Artificial Sequence
  Description of Artificial Sequence: Synthetic oligonucleotide
cuuaacuagggguggagaa

SEQ ID NO: 1207602 - RNA, 19 nt, Artificial Sequence
  Description of Artificial Sequence: Synthetic oligonucleotide
aucugacuuugacagggug

SEQ ID NO: 1207603 - RNA, 19 nt, Artificial Sequence
  Description of Artificial Sequence: Synthetic oligonucleotide
auaauccaugccauagaag

SEQ ID NO: 1207604 - RNA, 19 nt, Artificial Sequence
  Description of Artificial Sequence: Synthetic oligonucleotide
gaguagucauaugucauga

SEQ ID NO: 1207605 - RNA, 19 nt, Artificial Sequence
  Description of Artificial Sequence: Synthetic oligonucleotide
ccuauauuucaccagucac

SEQ ID NO: 1207606 - RNA, 19 nt, Artificial Sequence
  Description of Artificial Sequence: Synthetic oligonucleotide
ugaccauagcagaugucuc

SEQ ID NO: 1207607 - RNA, 19 nt, Artificial Sequence
  Description of Artificial Sequence: Synthetic oligonucleotide
agaagccgaggcacuaugc

SEQ ID NO: 1207608 - RNA, 19 nt, Artificial Sequence
  Description of Artificial Sequence: Synthetic oligonucleotide
agugaguaagcauguggau

SEQ ID NO: 1207609 - RNA, 19 nt, Artificial Sequence
  Description of Artificial Sequence: Synthetic oligonucleotide
caauggagcauuagggcca

SEQ ID NO: 1207610 - RNA, 19 nt, Artificial Sequence
  Description of Artificial Sequence: Synthetic oligonucleotide
cucacgaccacgucucuuc

SEQ ID NO: 1207611 - RNA, 19 nt, Artificial Sequence
  Description of Artificial Sequence: Synthetic oligonucleotide
uucuuaacuagggguggag

SEQ ID NO: 1207612 - RNA, 19 nt, Artificial Sequence
  Description of Artificial Sequence: Synthetic oligonucleotide
aagacauuccggaaaucau

SEQ ID NO: 1207613 - RNA, 19 nt, Artificial Sequence
  Description of Artificial Sequence: Synthetic oligonucleotide
ggaguagucauaugucaug

SEQ ID NO: 1207614 - RNA, 19 nt, Artificial Sequence
  Description of Artificial Sequence: Synthetic oligonucleotide
gaggccugugauuucgaac

SEQ ID NO: 1207615 - RNA, 19 nt, Artificial Sequence
  Description of Artificial Sequence: Synthetic oligonucleotide
ugcuucgccacugugacuu

SEQ ID NO: 1207616 - RNA, 19 nt, Artificial Sequence
  Description of Artificial Sequence: Synthetic oligonucleotide
gcucuaauccaugacaaug

SEQ ID NO: 1207617 - RNA, 19 nt, Artificial Sequence
  Description of Artificial Sequence: Synthetic oligonucleotide
agcgggaugaaggaacuug

SEQ ID NO: 1207618 - RNA, 19 nt, Artificial Sequence
  Description of Artificial Sequence: Synthetic oligonucleotide
gaaugaaggagugaccaua

SEQ ID NO: 1207619 - RNA, 19 nt, Artificial Sequence
  Description of Artificial Sequence: Synthetic oligonucleotide
uaccugggcccaaugacaa

SEQ ID NO: 1207620 - RNA, 19 nt, Artificial Sequence
  Description of Artificial Sequence: Synthetic oligonucleotide
agcgccucagccaagugag

SEQ ID NO: 1207621 - RNA, 19 nt, Artificial Sequence
  Description of Artificial Sequence: Synthetic oligonucleotide
cugcucaaggcccacgaug

SEQ ID NO: 1207622 - RNA, 19 nt, Artificial Sequence
  Description of Artificial Sequence: Synthetic oligonucleotide
aguggccacauggugggcg

SEQ ID NO: 1207623 - RNA, 19 nt, Artificial Sequence
  Description of Artificial Sequence: Synthetic oligonucleotide
caaaaccgucaaaaugcug

SEQ ID NO: 1207624 - RNA, 19 nt, Artificial Sequence
  Description of Artificial Sequence: Synthetic oligonucleotide
caccagaccccgaucuugg

SEQ ID NO: 1207625 - RNA, 19 nt, Artificial Sequence
  Description of Artificial Sequence: Synthetic oligonucleotide
uggagcauuagggccagga

SEQ ID NO: 1207626 - RNA, 19 nt, Artificial Sequence
  Description of Artificial Sequence: Synthetic oligonucleotide
gauguggaguagucauaug

SEQ ID NO: 1207627 - RNA, 19 nt, Artificial Sequence
  Description of Artificial Sequence: Synthetic oligonucleotide
ugaacauucccagcugguc

SEQ ID NO: 1207628 - RNA, 19 nt, Artificial Sequence
  Description of Artificial Sequence: Synthetic oligonucleotide
caggcucuaauccaugaca

SEQ ID NO: 1207629 - RNA, 19 nt, Artificial Sequence
  Description of Artificial Sequence: Synthetic oligonucleotide
augaccagaauggcuagca

SEQ ID NO: 1207630 - RNA, 19 nt, Artificial Sequence
  Description of Artificial Sequence: Synthetic oligonucleotide
auggugggcgugucacagc

SEQ ID NO: 1207631 - RNA, 19 nt, Artificial Sequence
  Description of Artificial Sequence: Synthetic oligonucleotide
agaagacaacaugccuccc

SEQ ID NO: 1207632 - RNA, 19 nt, Artificial Sequence
  Description of Artificial Sequence: Synthetic oligonucleotide
ucuaguacaggggccaguu

SEQ ID NO: 1207633 - RNA, 19 nt, Artificial Sequence
  Description of Artificial Sequence: Synthetic oligonucleotide
uagaaguaauccaggccuu

SEQ ID NO: 1207634 - RNA, 19 nt, Artificial Sequence
  Description of Artificial Sequence: Synthetic oligonucleotide
caucguaaguccagucuuc

SEQ ID NO: 1207635 - RNA, 19 nt, Artificial Sequence
  Description of Artificial Sequence: Synthetic oligonucleotide
guagccuaggaccucucca

SEQ ID NO: 1207636 - RNA, 19 nt, Artificial Sequence
  Description of Artificial Sequence: Synthetic oligonucleotide
cauggugggcgugucacag

SEQ ID NO: 1207637 - RNA, 19 nt, Artificial Sequence
  Description of Artificial Sequence: Synthetic oligonucleotide
acaaaaccgucaaaaugcu

SEQ ID NO: 1207638 - RNA, 19 nt, Artificial Sequence
  Description of Artificial Sequence: Synthetic oligonucleotide
ccggaaaucaucguaaguc

SEQ ID NO: 1207639 - RNA, 19 nt, Artificial Sequence
  Description of Artificial Sequence: Synthetic oligonucleotide
aagcgugugagcagagaca

SEQ ID NO: 1207640 - RNA, 19 nt, Artificial Sequence
  Description of Artificial Sequence: Synthetic oligonucleotide
agaaguaauccaggccuug

SEQ ID NO: 1207641 - RNA, 19 nt, Artificial Sequence
  Description of Artificial Sequence: Synthetic oligonucleotide
agcgugugagcagagacau

SEQ ID NO: 1207642 - RNA, 19 nt, Artificial Sequence
  Description of Artificial Sequence: Synthetic oligonucleotide
cagaccccgaucuuggaca

SEQ ID NO: 1207643 - RNA, 19 nt, Artificial Sequence
  Description of Artificial Sequence: Synthetic oligonucleotide
agaccccgaucuuggacag

SEQ ID NO: 1207644 - RNA, 19 nt, Artificial Sequence
  Description of Artificial Sequence: Synthetic oligonucleotide
gugaccauagcagaugucu

SEQ ID NO: 1207645 - RNA, 19 nt, Artificial Sequence
  Description of Artificial Sequence: Synthetic oligonucleotide
ucacgaccacgucucuuca

SEQ ID NO: 1207646 - RNA, 19 nt, Artificial Sequence
  Description of Artificial Sequence: Synthetic oligonucleotide
cggaaaucaucguaagucc

SEQ ID NO: 1207647 - RNA, 19 nt, Artificial Sequence
  Description of Artificial Sequence: Synthetic oligonucleotide
cucagccaagugaguaagc

SEQ ID NO: 1207648 - RNA, 19 nt, Artificial Sequence
  Description of Artificial Sequence: Synthetic oligonucleotide
cagaguaggguagaagaca

SEQ ID NO: 1207649 - RNA, 19 nt, Artificial Sequence
  Description of Artificial Sequence: Synthetic oligonucleotide
ggcuucaugucagaagacc

SEQ ID NO: 1207650 - RNA, 19 nt, Artificial Sequence
  Description of Artificial Sequence: Synthetic oligonucleotide
gacuuugacaggguggugu

SEQ ID NO: 1207651 - RNA, 19 nt, Artificial Sequence
  Description of Artificial Sequence: Synthetic oligonucleotide
gcaaaguuucucucccgag

SEQ ID NO: 1207652 - RNA, 19 nt, Artificial Sequence
  Description of Artificial Sequence: Synthetic oligonucleotide
cauuccggaaaucaucgua

SEQ ID NO: 1207653 - RNA, 19 nt, Artificial Sequence
  Description of Artificial Sequence: Synthetic oligonucleotide
auaccugggcccaaugaca

SEQ ID NO: 1207654 - RNA, 19 nt, Artificial Sequence
  Description of Artificial Sequence: Synthetic oligonucleotide
acagcucgcauccacccuu

SEQ ID NO: 1207655 - RNA, 19 nt, Artificial Sequence
  Description of Artificial Sequence: Synthetic oligonucleotide
cuacgauguucaaggacca

SEQ ID NO: 1207656 - RNA, 19 nt, Artificial Sequence
  Description of Artificial Sequence: Synthetic oligonucleotide
aggaucuugcuucgccacu

SEQ ID NO: 1207657 - RNA, 19 nt, Artificial Sequence
  Description of Artificial Sequence: Synthetic oligonucleotide
ggacagguuuaucugaaaa

SEQ ID NO: 1207658 - RNA, 19 nt, Artificial Sequence
  Description of Artificial Sequence: Synthetic oligonucleotide
ggugucguggucccgggug

SEQ ID NO: 1207659 - RNA, 19 nt, Artificial Sequence
  Description of Artificial Sequence: Synthetic oligonucleotide
gccuacauguuucuggcuc

SEQ ID NO: 1207660 - RNA, 19 nt, Artificial Sequence
  Description of Artificial Sequence: Synthetic oligonucleotide
augcgcaggcuuuuggcau

SEQ ID NO: 1207661 - RNA, 19 nt, Artificial Sequence
  Description of Artificial Sequence: Synthetic oligonucleotide
gauaggguccccaaccccu

SEQ ID NO: 1207662 - RNA, 19 nt, Artificial Sequence
  Description of Artificial Sequence: Synthetic oligonucleotide
uagcuacgauguucaagga

SEQ ID NO: 1207663 - RNA, 19 nt, Artificial Sequence
  Description of Artificial Sequence: Synthetic oligonucleotide
auggugucguggucccggg

SEQ ID NO: 1207664 - RNA, 19 nt, Artificial Sequence
  Description of Artificial Sequence: Synthetic oligonucleotide
auagccguggcuguuccau

SEQ ID NO: 1207665 - RNA, 19 nt, Artificial Sequence
  Description of Artificial Sequence: Synthetic oligonucleotide
gcccaaugacaauuucacg

SEQ ID NO: 1207666 - RNA, 19 nt, Artificial Sequence
  Description of Artificial Sequence: Synthetic oligonucleotide
ggaugaccagaauggcuag

SEQ ID NO: 1207667 - RNA, 19 nt, Artificial Sequence
  Description of Artificial Sequence: Synthetic oligonucleotide
cauggaugccagguuggag

SEQ ID NO: 1207668 - RNA, 19 nt, Artificial Sequence
  Description of Artificial Sequence: Synthetic oligonucleotide
ucguaaguccagucuucaa

SEQ ID NO: 1207669 - RNA, 19 nt, Artificial Sequence
  Description of Artificial Sequence: Synthetic oligonucleotide
aaguggccacauggugggc

SEQ ID NO: 1207670 - RNA, 19 nt, Artificial Sequence
  Description of Artificial Sequence: Synthetic oligonucleotide
ccuugugugugaacauucc

SEQ ID NO: 1207671 - RNA, 19 nt, Artificial Sequence
  Description of Artificial Sequence: Synthetic oligonucleotide
cuguauauaccugggccca

SEQ ID NO: 1207672 - RNA, 19 nt, Artificial Sequence
  Description of Artificial Sequence: Synthetic oligonucleotide
acuuggaaugaaggaguga

SEQ ID NO: 1207673 - RNA, 19 nt, Artificial Sequence
  Description of Artificial Sequence: Synthetic oligonucleotide
cuacauguuucuggcucag

SEQ ID NO: 1207674 - RNA, 19 nt, Artificial Sequence
  Description of Artificial Sequence: Synthetic oligonucleotide
aagagaagccgaggcacua

SEQ ID NO: 1207675 - RNA, 19 nt, Artificial Sequence
  Description of Artificial Sequence: Synthetic oligonucleotide
agccgaggcacuaugcgca

SEQ ID NO: 1207676 - RNA, 19 nt, Artificial Sequence
  Description of Artificial Sequence: Synthetic oligonucleotide
agugaccauagcagauguc

SEQ ID NO: 1207677 - RNA, 19 nt, Artificial Sequence
  Description of Artificial Sequence: Synthetic oligonucleotide
gaacaucucacgaccacgu

SEQ ID NO: 1207678 - RNA, 19 nt, Artificial Sequence
  Description of Artificial Sequence: Synthetic oligonucleotide
ggaaaucaucguaagucca

SEQ ID NO: 1207679 - RNA, 19 nt, Artificial Sequence
  Description of Artificial Sequence: Synthetic oligonucleotide
augccucccuccgcgauuc

SEQ ID NO: 1207680 - RNA, 19 nt, Artificial Sequence
  Description of Artificial Sequence: Synthetic oligonucleotide
gucucaccagaaaacagaa

SEQ ID NO: 1207681 - RNA, 19 nt, Artificial Sequence
  Description of Artificial Sequence: Synthetic oligonucleotide
ugacguccgucaccaccag

SEQ ID NO: 1207682 - RNA, 19 nt, Artificial Sequence
  Description of Artificial Sequence: Synthetic oligonucleotide
cucccagauggagaccccg

SEQ ID NO: 1207683 - RNA, 19 nt, Artificial Sequence
  Description of Artificial Sequence: Synthetic oligonucleotide
ccauauauaucuuccacgu

SEQ ID NO: 1207684 - RNA, 19 nt, Artificial Sequence
  Description of Artificial Sequence: Synthetic oligonucleotide
gcgggaugaaggaacuugg

SEQ ID NO: 1207685 - RNA, 19 nt, Artificial Sequence
  Description of Artificial Sequence: Synthetic oligonucleotide
cacgggcauccuuggaggc

SEQ ID NO: 1207686 - RNA, 19 nt, Artificial Sequence
  Description of Artificial Sequence: Synthetic oligonucleotide
cugugauuucgaacaucuc

SEQ ID NO: 1207687 - RNA, 19 nt, Artificial Sequence
  Description of Artificial Sequence: Synthetic oligonucleotide
gugucguggucccgggugc

SEQ ID NO: 1207688 - RNA, 19 nt, Artificial Sequence
  Description of Artificial Sequence: Synthetic oligonucleotide
ccagauggagaccccgacg

SEQ ID NO: 1207689 - RNA, 19 nt, Artificial Sequence
  Description of Artificial Sequence: Synthetic oligonucleotide
uguauauaccugggcccaa

SEQ ID NO: 1207690 - RNA, 19 nt, Artificial Sequence
  Description of Artificial Sequence: Synthetic oligonucleotide
accaaccucuagguccagg

SEQ ID NO: 1207691 - RNA, 19 nt, Artificial Sequence
  Description of Artificial Sequence: Synthetic oligonucleotide
auggcuuagaaaaguccau

SEQ ID NO: 1207692 - RNA, 19 nt, Artificial Sequence
  Description of Artificial Sequence: Synthetic oligonucleotide
cacgaccacgucucuucag

SEQ ID NO: 1207693 - RNA, 19 nt, Artificial Sequence
  Description of Artificial Sequence: Synthetic oligonucleotide
ccggccagacccaucaagc

SEQ ID NO: 1207694 - RNA, 19 nt, Artificial Sequence
  Description of Artificial Sequence: Synthetic oligonucleotide
ggaggaucuugcuucgcca

SEQ ID NO: 1207695 - RNA, 19 nt, Artificial Sequence
  Description of Artificial Sequence: Synthetic oligonucleotide
agcaggucauagaaguaau

SEQ ID NO: 1207696 - RNA, 19 nt, Artificial Sequence
  Description of Artificial Sequence: Synthetic oligonucleotide
agagcgggaugaaggaacu

SEQ ID NO: 1207697 - RNA, 19 nt, Artificial Sequence
  Description of Artificial Sequence: Synthetic oligonucleotide
uacgauguucaaggaccac

SEQ ID NO: 1207698 - RNA, 19 nt, Artificial Sequence
  Description of Artificial Sequence: Synthetic oligonucleotide
gucagaagaccggccagac

SEQ ID NO: 1207699 - RNA, 19 nt, Artificial Sequence
  Description of Artificial Sequence: Synthetic oligonucleotide
gcuuugacguccgucacca

SEQ ID NO: 1207700 - RNA, 19 nt, Artificial Sequence
  Description of Artificial Sequence: Synthetic oligonucleotide
ggaucuugcuucgccacug

SEQ ID NO: 1207701 - RNA, 19 nt, Artificial Sequence
  Description of Artificial Sequence: Synthetic oligonucleotide
gugcaucuuaauaaagcgu

SEQ ID NO: 1207702 - RNA, 19 nt, Artificial Sequence
  Description of Artificial Sequence: Synthetic oligonucleotide
gaguaggguagaagacaac

SEQ ID NO: 1207703 - RNA, 19 nt, Artificial Sequence
  Description of Artificial Sequence: Synthetic oligonucleotide
agcucgcauccacccuugg

SEQ ID NO: 1207704 - RNA, 19 nt, Artificial Sequence
  Description of Artificial Sequence: Synthetic oligonucleotide
aaccgucaaaaugcugguu

SEQ ID NO: 1207705 - RNA, 19 nt, Artificial Sequence
  Description of Artificial Sequence: Synthetic oligonucleotide
ggagugacguagccuagga

SEQ ID NO: 1207706 - RNA, 19 nt, Artificial Sequence
  Description of Artificial Sequence: Synthetic oligonucleotide
ccaggaggaucuugcuucg

SEQ ID NO: 1207707 - RNA, 19 nt, Artificial Sequence
  Description of Artificial Sequence: Synthetic oligonucleotide
gcuuagaaaaguccauagu

SEQ ID NO: 1207708 - RNA, 19 nt, Artificial Sequence
  Description of Artificial Sequence: Synthetic oligonucleotide
cauggaggccugugauuuc

SEQ ID NO: 1207709 - RNA, 19 nt, Artificial Sequence
  Description of Artificial Sequence: Synthetic oligonucleotide
gcgucuguauauaccuggg

SEQ ID NO: 1207710 - RNA, 19 nt, Artificial Sequence
  Description of Artificial Sequence: Synthetic oligonucleotide
caggcuuuuggcaugcuuu

SEQ ID NO: 1207711 - RNA, 19 nt, Artificial Sequence
  Description of Artificial Sequence: Synthetic oligonucleotide
ggcgugucacagcaggcac

SEQ ID NO: 1207712 - RNA, 19 nt, Artificial Sequence
  Description of Artificial Sequence: Synthetic oligonucleotide
acugugacuuggggucuag

SEQ ID NO: 1207713 - RNA, 19 nt, Artificial Sequence
  Description of Artificial Sequence: Synthetic oligonucleotide
cgugugagcagagacauca

SEQ ID NO: 1207714 - RNA, 19 nt, Artificial Sequence
  Description of Artificial Sequence: Synthetic oligonucleotide
uggcaacaucauagccgug

SEQ ID NO: 1207715 - RNA, 19 nt, Artificial Sequence
  Description of Artificial Sequence: Synthetic oligonucleotide
cugugauguggaguaguca

SEQ ID NO: 1207716 - RNA, 19 nt, Artificial Sequence
  Description of Artificial Sequence: Synthetic oligonucleotide
agagaagccgaggcacuau

SEQ ID NO: 1207717 - RNA, 19 nt, Artificial Sequence
  Description of Artificial Sequence: Synthetic oligonucleotide
cuaggaccucuccagcaaa

SEQ ID NO: 1207718 - RNA, 19 nt, Artificial Sequence
  Description of Artificial Sequence: Synthetic oligonucleotide
cacaggauaggguccccaa

SEQ ID NO: 1207719 - RNA, 19 nt, Artificial Sequence
  Description of Artificial Sequence: Synthetic oligonucleotide
cccuccgcgauucuucuug

SEQ ID NO: 1207720 - RNA, 19 nt, Artificial Sequence
  Description of Artificial Sequence: Synthetic oligonucleotide
ccagacccaucaagcacgg

SEQ ID NO: 1207721 - RNA, 19 nt, Artificial Sequence
  Description of Artificial Sequence: Synthetic oligonucleotide
ccauagcagaugucucacc

SEQ ID NO: 1207722 - RNA, 19 nt, Artificial Sequence
  Description of Artificial Sequence: Synthetic oligonucleotide
aucucacgaccacgucucu

SEQ ID NO: 1207723 - RNA, 19 nt, Artificial Sequence
  Description of Artificial Sequence: Synthetic oligonucleotide
uggugucguggucccgggu

SEQ ID NO: 1207724 - RNA, 19 nt, Artificial Sequence
  Description of Artificial Sequence: Synthetic oligonucleotide
guaggguagaagacaacau

SEQ ID NO: 1207725 - RNA, 19 nt, Artificial Sequence
  Description of Artificial Sequence: Synthetic oligonucleotide
gccaucuaguacaggggcc

SEQ ID NO: 1207726 - RNA, 19 nt, Artificial Sequence
  Description of Artificial Sequence: Synthetic oligonucleotide
cagcucgcauccacccuug

SEQ ID NO: 1207727 - RNA, 19 nt, Artificial Sequence
  Description of Artificial Sequence: Synthetic oligonucleotide
caaacuccuugugugugaa

SEQ ID NO: 1207728 - RNA, 19 nt, Artificial Sequence
  Description of Artificial Sequence: Synthetic oligonucleotide
accagaccccgaucuugga

SEQ ID NO: 1207729 - RNA, 19 nt, Artificial Sequence
  Description of Artificial Sequence: Synthetic oligonucleotide
ccuacauguuucuggcuca

SEQ ID NO: 1207730 - RNA, 19 nt, Artificial Sequence
  Description of Artificial Sequence: Synthetic oligonucleotide
ucucacgaccacgucucuu

SEQ ID NO: 1207731 - RNA, 19 nt, Artificial Sequence
  Description of Artificial Sequence: Synthetic oligonucleotide
ggccagaccaggucccaug

SEQ ID NO: 1207732 - RNA, 19 nt, Artificial Sequence
  Description of Artificial Sequence: Synthetic oligonucleotide
uggucccgggugcaucuua

SEQ ID NO: 1207733 - RNA, 19 nt, Artificial Sequence
  Description of Artificial Sequence: Synthetic oligonucleotide
agaagaccggccagaccca

SEQ ID NO: 1207734 - RNA, 19 nt, Artificial Sequence
  Description of Artificial Sequence: Synthetic oligonucleotide
cuuugacguccgucaccac

SEQ ID NO: 1207735 - RNA, 19 nt, Artificial Sequence
  Description of Artificial Sequence: Synthetic oligonucleotide
gucaccaccagaccccgau

SEQ ID NO: 1207736 - RNA, 19 nt, Artificial Sequence
  Description of Artificial Sequence: Synthetic oligonucleotide
cguauucacacaggauagg

SEQ ID NO: 1207737 - RNA, 19 nt, Artificial Sequence
  Description of Artificial Sequence: Synthetic oligonucleotide
gaucuugcuucgccacugu

SEQ ID NO: 1207738 - RNA, 19 nt, Artificial Sequence
  Description of Artificial Sequence: Synthetic oligonucleotide
gacguccgucaccaccaga

SEQ ID NO: 1207739 - RNA, 19 nt, Artificial Sequence
  Description of Artificial Sequence: Synthetic oligonucleotide
cacuaugcgcaggcuuuug

SEQ ID NO: 1207740 - RNA, 19 nt, Artificial Sequence
  Description of Artificial Sequence: Synthetic oligonucleotide
cgucuguauauaccugggc

SEQ ID NO: 1207741 - RNA, 19 nt, Artificial Sequence
  Description of Artificial Sequence: Synthetic oligonucleotide
ugacguagccuaggaccuc

SEQ ID NO: 1207742 - RNA, 19 nt, Artificial Sequence
  Description of Artificial Sequence: Synthetic oligonucleotide
ccagaccccgaucuuggac

SEQ ID NO: 1207743 - RNA, 19 nt, Artificial Sequence
  Description of Artificial Sequence: Synthetic oligonucleotide
cgaggcacuaugcgcaggc

SEQ ID NO: 1207744 - RNA, 19 nt, Artificial Sequence
  Description of Artificial Sequence: Synthetic oligonucleotide
gacguagccuaggaccucu

SEQ ID NO: 1207745 - RNA, 19 nt, Artificial Sequence
  Description of Artificial Sequence: Synthetic oligonucleotide
gcugugauguggaguaguc

SEQ ID NO: 1207746 - RNA, 19 nt, Artificial Sequence
  Description of Artificial Sequence: Synthetic oligonucleotide
gacagcucgcauccacccu

SEQ ID NO: 1207747 - RNA, 19 nt, Artificial Sequence
  Description of Artificial Sequence: Synthetic oligonucleotide
gccuaggaccucuccagca

SEQ ID NO: 1207748 - RNA, 19 nt, Artificial Sequence
  Description of Artificial Sequence: Synthetic oligonucleotide
agaccccgacgcccagcuc

SEQ ID NO: 1207749 - RNA, 19 nt, Artificial Sequence
  Description of Artificial Sequence: Synthetic oligonucleotide
gccuacagcaggucauaga

SEQ ID NO: 1207750 - RNA, 19 nt, Artificial Sequence
  Description of Artificial Sequence: Synthetic oligonucleotide
cuuugacagggugguguga

SEQ ID NO: 1207751 - RNA, 19 nt, Artificial Sequence
  Description of Artificial Sequence: Synthetic oligonucleotide
gugauguggaguagucaua

SEQ ID NO: 1207752 - RNA, 19 nt, Artificial Sequence
  Description of Artificial Sequence: Synthetic oligonucleotide
cgcgauucuucuuguacuc

SEQ ID NO: 1207753 - RNA, 19 nt, Artificial Sequence
  Description of Artificial Sequence: Synthetic oligonucleotide
ccucccuccgcgauucuuc

SEQ ID NO: 1207754 - RNA, 19 nt, Artificial Sequence
  Description of Artificial Sequence: Synthetic oligonucleotide
ccaucuaguacaggggcca

SEQ ID NO: 1207755 - RNA, 19 nt, Artificial Sequence
  Description of Artificial Sequence: Synthetic oligonucleotide
gugaacauucccagcuggu

SEQ ID NO: 1207756 - RNA, 19 nt, Artificial Sequence
  Description of Artificial Sequence: Synthetic oligonucleotide
gccagaccaggucccauga

SEQ ID NO: 1207757 - RNA, 19 nt, Artificial Sequence
  Description of Artificial Sequence: Synthetic oligonucleotide
ucguggucccgggugcauc

SEQ ID NO: 1207758 - RNA, 19 nt, Artificial Sequence
  Description of Artificial Sequence: Synthetic oligonucleotide
cagaccaggucccaugauu

SEQ ID NO: 1207759 - RNA, 19 nt, Artificial Sequence
  Description of Artificial Sequence: Synthetic oligonucleotide
ccgagcccuagcugaacag

SEQ ID NO: 1207760 - RNA, 19 nt, Artificial Sequence
  Description of Artificial Sequence: Synthetic oligonucleotide
cccagauggagaccccgac

SEQ ID NO: 1207761 - RNA, 19 nt, Artificial Sequence
  Description of Artificial Sequence: Synthetic oligonucleotide
cagccaagugaguaagcau

SEQ ID NO: 1207762 - RNA, 19 nt, Artificial Sequence
  Description of Artificial Sequence: Synthetic oligonucleotide
gcaccaaccucuaggucca

SEQ ID NO: 1207763 - RNA, 19 nt, Artificial Sequence
  Description of Artificial Sequence: Synthetic oligonucleotide
gcuguuccauggagugacg

SEQ ID NO: 1207764 - RNA, 19 nt, Artificial Sequence
  Description of Artificial Sequence: Synthetic oligonucleotide
acguagccuaggaccucuc

SEQ ID NO: 1207765 - RNA, 19 nt, Artificial Sequence
  Description of Artificial Sequence: Synthetic oligonucleotide
gccgaggcacuaugcgcag

SEQ ID NO: 1207766 - RNA, 19 nt, Artificial Sequence
  Description of Artificial Sequence: Synthetic oligonucleotide
cguagccuaggaccucucc

SEQ ID NO: 1207767 - RNA, 19 nt, Artificial Sequence
  Description of Artificial Sequence: Synthetic oligonucleotide
cacgaugguccuggugcuc

SEQ ID NO: 1207768 - RNA, 19 nt, Artificial Sequence
  Description of Artificial Sequence: Synthetic oligonucleotide
ggaugaggccuacauguuu

SEQ ID NO: 1207769 - RNA, 19 nt, Artificial Sequence
  Description of Artificial Sequence: Synthetic oligonucleotide
ccgaucuuggacagguuua

SEQ ID NO: 1207770 - RNA, 19 nt, Artificial Sequence
  Description of Artificial Sequence: Synthetic oligonucleotide
guauauaccugggcccaau

SEQ ID NO: 1207771 - RNA, 19 nt, Artificial Sequence
  Description of Artificial Sequence: Synthetic oligonucleotide
gcaucuuaauaaagcgugu

SEQ ID NO: 1207772 - RNA, 19 nt, Artificial Sequence
  Description of Artificial Sequence: Synthetic oligonucleotide
caauuucacgggcauccuu

SEQ ID NO: 1207773 - RNA, 19 nt, Artificial Sequence
  Description of Artificial Sequence: Synthetic oligonucleotide
ugacagcaggugggaugac

SEQ ID NO: 1207774 - RNA, 19 nt, Artificial Sequence
  Description of Artificial Sequence: Synthetic oligonucleotide
ccuaggaccucuccagcaa

SEQ ID NO: 1207775 - RNA, 19 nt, Artificial Sequence
  Description of Artificial Sequence: Synthetic oligonucleotide
ccuagcugaacaguagcua

SEQ ID NO: 1207776 - RNA, 19 nt, Artificial Sequence
  Description of Artificial Sequence: Synthetic oligonucleotide
gccaagugaguaagcaugu

SEQ ID NO: 1207777 - RNA, 19 nt, Artificial Sequence
  Description of Artificial Sequence: Synthetic oligonucleotide
ucccuccgcgauucuucuu

SEQ ID NO: 1207778 - RNA, 19 nt, Artificial Sequence
  Description of Artificial Sequence: Synthetic oligonucleotide
ggaccucuccagcaaaguu

SEQ ID NO: 1207779 - RNA, 19 nt, Artificial Sequence
  Description of Artificial Sequence: Synthetic oligonucleotide
gcauccacccuugguccac

SEQ ID NO: 1207780 - RNA, 19 nt, Artificial Sequence
  Description of Artificial Sequence: Synthetic oligonucleotide
cguccgucaccaccagacc

SEQ ID NO: 1207781 - RNA, 19 nt, Artificial Sequence
  Description of Artificial Sequence: Synthetic oligonucleotide
ggcacuaugcgcaggcuuu

SEQ ID NO: 1207782 - RNA, 19 nt, Artificial Sequence
  Description of Artificial Sequence: Synthetic oligonucleotide
ccgcgauucuucuuguacu

SEQ ID NO: 1207783 - RNA, 19 nt, Artificial Sequence
  Description of Artificial Sequence: Synthetic oligonucleotide
gaagaccggccagacccau

SEQ ID NO: 1207784 - RNA, 19 nt, Artificial Sequence
  Description of Artificial Sequence: Synthetic oligonucleotide
cccaugauucacauuccau

SEQ ID NO: 1207785 - RNA, 19 nt, Artificial Sequence
  Description of Artificial Sequence: Synthetic oligonucleotide
cuccgcgauucuucuugua

SEQ ID NO: 1207786 - RNA, 19 nt, Artificial Sequence
  Description of Artificial Sequence: Synthetic oligonucleotide
cagccuacagcaggucaua

SEQ ID NO: 1207787 - RNA, 19 nt, Artificial Sequence
  Description of Artificial Sequence: Synthetic oligonucleotide
gcucgcauccacccuuggu

SEQ ID NO: 1207788 - RNA, 19 nt, Artificial Sequence
  Description of Artificial Sequence: Synthetic oligonucleotide
caccaaccucuagguccag

SEQ ID NO: 1207789 - RNA, 19 nt, Artificial Sequence
  Description of Artificial Sequence: Synthetic oligonucleotide
ggucccgggugcaucuuaa

SEQ ID NO: 1207790 - RNA, 19 nt, Artificial Sequence
  Description of Artificial Sequence: Synthetic oligonucleotide
ccagccuacagcaggucau

SEQ ID NO: 1207791 - RNA, 19 nt, Artificial Sequence
  Description of Artificial Sequence: Synthetic oligonucleotide
ccgaggcacuaugcgcagg

SEQ ID NO: 1207792 - RNA, 19 nt, Artificial Sequence
  Description of Artificial Sequence: Synthetic oligonucleotide
ggccuacauguuucuggcu

SEQ ID NO: 1207793 - RNA, 19 nt, Artificial Sequence
  Description of Artificial Sequence: Synthetic oligonucleotide
caugccucccuccgcgauu

SEQ ID NO: 1207794 - RNA, 19 nt, Artificial Sequence
  Description of Artificial Sequence: Synthetic oligonucleotide
gcugaacaguagcuacgau

SEQ ID NO: 1207795 - RNA, 19 nt, Artificial Sequence
  Description of Artificial Sequence: Synthetic oligonucleotide
ccacguauucacacaggau

SEQ ID NO: 1207796 - RNA, 19 nt, Artificial Sequence
  Description of Artificial Sequence: Synthetic oligonucleotide
caucauagccguggcuguu

SEQ ID NO: 1207797 - RNA, 19 nt, Artificial Sequence
  Description of Artificial Sequence: Synthetic oligonucleotide
gcguugcuguccagccuac

SEQ ID NO: 1207798 - RNA, 19 nt, Artificial Sequence
  Description of Artificial Sequence: Synthetic oligonucleotide
gagcgggaugaaggaacuu

SEQ ID NO: 1207799 - RNA, 19 nt, Artificial Sequence
  Description of Artificial Sequence: Synthetic oligonucleotide
ccauggagugacguagccu

SEQ ID NO: 1207800 - RNA, 19 nt, Artificial Sequence
  Description of Artificial Sequence: Synthetic oligonucleotide
gcucaaggcccacgauggu

SEQ ID NO: 1207801 - RNA, 19 nt, Artificial Sequence
  Description of Artificial Sequence: Synthetic oligonucleotide
gccgcaccugcagagacuu

SEQ ID NO: 1207802 - RNA, 19 nt, Artificial Sequence
  Description of Artificial Sequence: Synthetic oligonucleotide
cgcauccacccuuggucca

SEQ ID NO: 1207803 - RNA, 19 nt, Artificial Sequence
  Description of Artificial Sequence: Synthetic oligonucleotide
gcgugugagcagagacauc

SEQ ID NO: 1207804 - RNA, 19 nt, Artificial Sequence
  Description of Artificial Sequence: Synthetic oligonucleotide
cgccucagccaagugagua

SEQ ID NO: 1207805 - RNA, 19 nt, Artificial Sequence
  Description of Artificial Sequence: Synthetic oligonucleotide
cgaccacgucucuucagcu

SEQ ID NO: 1207806 - RNA, 19 nt, Artificial Sequence
  Description of Artificial Sequence: Synthetic oligonucleotide
gucguggucccgggugcau

SEQ ID NO: 1207807 - RNA, 19 nt, Artificial Sequence
  Description of Artificial Sequence: Synthetic oligonucleotide
ccuccgcgauucuucuugu

SEQ ID NO: 1207808 - RNA, 19 nt, Artificial Sequence
  Description of Artificial Sequence: Synthetic oligonucleotide
gguuggaggcaggcccagu

SEQ ID NO: 1207809 - RNA, 19 nt, Artificial Sequence
  Description of Artificial Sequence: Synthetic oligonucleotide
ccgcaccugcagagacuuc

SEQ ID NO: 1207810 - RNA, 19 nt, Artificial Sequence
  Description of Artificial Sequence: Synthetic oligonucleotide
cgagcccuagcugaacagu

SEQ ID NO: 1207811 - RNA, 19 nt, Artificial Sequence
  Description of Artificial Sequence: Synthetic oligonucleotide
gcacuaugcgcaggcuuuu

SEQ ID NO: 1207812 - RNA, 19 nt, Artificial Sequence
  Description of Artificial Sequence: Synthetic oligonucleotide
ccacaccacucggggccug

SEQ ID NO: 1207813 - RNA, 19 nt, Artificial Sequence
  Description of Artificial Sequence: Synthetic oligonucleotide
ccagaccaggucccaugau

SEQ ID NO: 1207814 - RNA, 19 nt, Artificial Sequence
  Description of Artificial Sequence: Synthetic oligonucleotide
cguugcuguccagccuaca

SEQ ID NO: 1207815 - RNA, 19 nt, Artificial Sequence
  Description of Artificial Sequence: Synthetic oligonucleotide
guggucccgggugcaucuu

SEQ ID NO: 1207816 - RNA, 19 nt, Artificial Sequence
  Description of Artificial Sequence: Synthetic oligonucleotide
ccccaaccccugcauggau

SEQ ID NO: 1207817 - RNA, 19 nt, Artificial Sequence
  Description of Artificial Sequence: Synthetic oligonucleotide
cucggggccugugguccuu

SEQ ID NO: 1207818 - RNA, 19 nt, Artificial Sequence
  Description of Artificial Sequence: Synthetic oligonucleotide
gcgccucagccaagugagu

SEQ ID NO: 1207819 - RNA, 19 nt, Artificial Sequence
  Description of Artificial Sequence: Synthetic oligonucleotide
aaaauuggacucuccaccc

SEQ ID NO: 1207820 - RNA, 19 nt, Artificial Sequence
  Description of Artificial Sequence: Synthetic oligonucleotide
aacuucgaugucuagagag

SEQ ID NO: 1207821 - RNA, 19 nt, Artificial Sequence
  Description of Artificial Sequence: Synthetic oligonucleotide
uuaacuucgaugucuagag

SEQ ID NO: 1207822 - RNA, 19 nt, Artificial Sequence
  Description of Artificial Sequence: Synthetic oligonucleotide
ugaacucccgcuuagggcg

SEQ ID NO: 1207823 - RNA, 19 nt, Artificial Sequence
  Description of Artificial Sequence: Synthetic oligonucleotide
aaugugacugagcccaggc

SEQ ID NO: 1207824 - RNA, 19 nt, Artificial Sequence
  Description of Artificial Sequence: Synthetic oligonucleotide
ucaucaucuagcuuggucc

SEQ ID NO: 1207825 - RNA, 19 nt, Artificial Sequence
  Description of Artificial Sequence: Synthetic oligonucleotide
aacguuaguguuucuagag

SEQ ID NO: 1207826 - RNA, 19 nt, Artificial Sequence
  Description of Artificial Sequence: Synthetic oligonucleotide
aacaggugggagcugacac

SEQ ID NO: 1207827 - RNA, 19 nt, Artificial Sequence
  Description of Artificial Sequence: Synthetic oligonucleotide
ucauauagugccuugcagc

SEQ ID NO: 1207828 - RNA, 19 nt, Artificial Sequence
  Description of Artificial Sequence: Synthetic oligonucleotide
cagggcaucaccaaaauug

SEQ ID NO: 1207829 - RNA, 19 nt, Artificial Sequence
  Description of Artificial Sequence: Synthetic oligonucleotide
gaagaagcccgauuggccg

SEQ ID NO: 1207830 - RNA, 19 nt, Artificial Sequence
  Description of Artificial Sequence: Synthetic oligonucleotide
uucucaucgaucugguugg

SEQ ID NO: 1207831 - RNA, 19 nt, Artificial Sequence
  Description of Artificial Sequence: Synthetic oligonucleotide
uauagugccuugcagcuug

SEQ ID NO: 1207832 - RNA, 19 nt, Artificial Sequence
  Description of Artificial Sequence: Synthetic oligonucleotide
aggauucuucacuuggccc

SEQ ID NO: 1207833 - RNA, 19 nt, Artificial Sequence
  Description of Artificial Sequence: Synthetic oligonucleotide
uuuaacuucgaugucuaga

SEQ ID NO: 1207834 - RNA, 19 nt, Artificial Sequence
  Description of Artificial Sequence: Synthetic oligonucleotide
cauggacucaccugcaucc

SEQ ID NO: 1207835 - RNA, 19 nt, Artificial Sequence
  Description of Artificial Sequence: Synthetic oligonucleotide
ugggcaucuaccagggccg

SEQ ID NO: 1207836 - RNA, 19 nt, Artificial Sequence
  Description of Artificial Sequence: Synthetic oligonucleotide
uuaggauggaggacccagg

SEQ ID NO: 1207837 - RNA, 19 nt, Artificial Sequence
  Description of Artificial Sequence: Synthetic oligonucleotide
aagucuuaggauggaggac

SEQ ID NO: 1207838 - RNA, 19 nt, Artificial Sequence
  Description of Artificial Sequence: Synthetic oligonucleotide
uugaacucccgcuuagggc

SEQ ID NO: 1207839 - RNA, 19 nt, Artificial Sequence
  Description of Artificial Sequence: Synthetic oligonucleotide
gaaccgaccuccuuccucc

SEQ ID NO: 1207840 - RNA, 19 nt, Artificial Sequence
  Description of Artificial Sequence: Synthetic oligonucleotide
cuuggauacaguguucagc

SEQ ID NO: 1207841 - RNA, 19 nt, Artificial Sequence
  Description of Artificial Sequence: Synthetic oligonucleotide
agcuugguccccucggccc

SEQ ID NO: 1207842 - RNA, 19 nt, Artificial Sequence
  Description of Artificial Sequence: Synthetic oligonucleotide
ugggaagaagcccgauugg

SEQ ID NO: 1207843 - RNA, 19 nt, Artificial Sequence
  Description of Artificial Sequence: Synthetic oligonucleotide
gucauauagugccuugcag

SEQ ID NO: 1207844 - RNA, 19 nt, Artificial Sequence
  Description of Artificial Sequence: Synthetic oligonucleotide
cuuggcguuaggcugcugc

SEQ ID NO: 1207845 - RNA, 19 nt, Artificial Sequence
  Description of Artificial Sequence: Synthetic oligonucleotide
guuucuagagcaccuuggc

SEQ ID NO: 1207846 - RNA, 19 nt, Artificial Sequence
  Description of Artificial Sequence: Synthetic oligonucleotide
cuggcguagcuccucaucg

SEQ ID NO: 1207847 - RNA, 19 nt, Artificial Sequence
  Description of Artificial Sequence: Synthetic oligonucleotide
ggaacguuaguguuucuag

SEQ ID NO: 1207848 - RNA, 19 nt, Artificial Sequence
  Description of Artificial Sequence: Synthetic oligonucleotide
ugcaguggaucgaugaaau

SEQ ID NO: 1207849 - RNA, 19 nt, Artificial Sequence
  Description of Artificial Sequence: Synthetic oligonucleotide
aaauuggacucuccaccca

SEQ ID NO: 1207850 - RNA, 19 nt, Artificial Sequence
  Description of Artificial Sequence: Synthetic oligonucleotide
uccuggaggaacguuagug

SEQ ID NO: 1207851 - RNA, 19 nt, Artificial Sequence
  Description of Artificial Sequence: Synthetic oligonucleotide
caucaucuagcuugguccc

SEQ ID NO: 1207852 - RNA, 19 nt, Artificial Sequence
  Description of Artificial Sequence: Synthetic oligonucleotide
agucauauagugccuugca

SEQ ID NO: 1207853 - RNA, 19 nt, Artificial Sequence
  Description of Artificial Sequence: Synthetic oligonucleotide
caguggaucgaugaaauuc

SEQ ID NO: 1207854 - RNA, 19 nt, Artificial Sequence
  Description of Artificial Sequence: Synthetic oligonucleotide
cuuaggauggaggacccag

SEQ ID NO: 1207855 - RNA, 19 nt, Artificial Sequence
  Description of Artificial Sequence: Synthetic oligonucleotide
uguccccugaucugaauga

SEQ ID NO: 1207856 - RNA, 19 nt, Artificial Sequence
  Description of Artificial Sequence: Synthetic oligonucleotide
ugaggaagcugugaucuug

SEQ ID NO: 1207857 - RNA, 19 nt, Artificial Sequence
  Description of Artificial Sequence: Synthetic oligonucleotide
gaucugcacugcuugccgg

SEQ ID NO: 1207858 - RNA, 19 nt, Artificial Sequence
  Description of Artificial Sequence: Synthetic oligonucleotide
uccucaucggggaucuugc

SEQ ID NO: 1207859 - RNA, 19 nt, Artificial Sequence
  Description of Artificial Sequence: Synthetic oligonucleotide
aguggaucgaugaaauucu

SEQ ID NO: 1207860 - RNA, 19 nt, Artificial Sequence
  Description of Artificial Sequence: Synthetic oligonucleotide
aggaucugcacugcuugcc

SEQ ID NO: 1207861 - RNA, 19 nt, Artificial Sequence
  Description of Artificial Sequence: Synthetic oligonucleotide
gaacguuaguguuucuaga

SEQ ID NO: 1207862 - RNA, 19 nt, Artificial Sequence
  Description of Artificial Sequence: Synthetic oligonucleotide
guacucaaugguucugacc

SEQ ID NO: 1207863 - RNA, 19 nt, Artificial Sequence
  Description of Artificial Sequence: Synthetic oligonucleotide
caguuccuugccauggcgg

SEQ ID NO: 1207864 - RNA, 19 nt, Artificial Sequence
  Description of Artificial Sequence: Synthetic oligonucleotide
accugcuugcuuuugggga

SEQ ID NO: 1207865 - RNA, 19 nt, Artificial Sequence
  Description of Artificial Sequence: Synthetic oligonucleotide
guagaacugcuucuucagc

SEQ ID NO: 1207866 - RNA, 19 nt, Artificial Sequence
  Description of Artificial Sequence: Synthetic oligonucleotide
agggcaucaccaaaauugg

SEQ ID NO: 1207867 - RNA, 19 nt, Artificial Sequence
  Description of Artificial Sequence: Synthetic oligonucleotide
gaggaaugugacugagccc

SEQ ID NO: 1207868 - RNA, 19 nt, Artificial Sequence
  Description of Artificial Sequence: Synthetic oligonucleotide
acgagccauagguuguggg

SEQ ID NO: 1207869 - RNA, 19 nt, Artificial Sequence
  Description of Artificial Sequence: Synthetic oligonucleotide
uugugggacugcuguagag

SEQ ID NO: 1207870 - RNA, 19 nt, Artificial Sequence
  Description of Artificial Sequence: Synthetic oligonucleotide
uggcggaccaugcacucgc

SEQ ID NO: 1207871 - RNA, 19 nt, Artificial Sequence
  Description of Artificial Sequence: Synthetic oligonucleotide
uggcucgccuuguagaacu

SEQ ID NO: 1207872 - RNA, 19 nt, Artificial Sequence
  Description of Artificial Sequence: Synthetic oligonucleotide
uaacuucgaugucuagaga

SEQ ID NO: 1207873 - RNA, 19 nt, Artificial Sequence
  Description of Artificial Sequence: Synthetic oligonucleotide
uggcuuaccugcucaauau

SEQ ID NO: 1207874 - RNA, 19 nt, Artificial Sequence
  Description of Artificial Sequence: Synthetic oligonucleotide
gccaggauucuucacuugg

SEQ ID NO: 1207875 - RNA, 19 nt, Artificial Sequence
  Description of Artificial Sequence: Synthetic oligonucleotide
uagagaggaaugugacuga

SEQ ID NO: 1207876 - RNA, 19 nt, Artificial Sequence
  Description of Artificial Sequence: Synthetic oligonucleotide
aguuccuugccauggcgga

SEQ ID NO: 1207877 - RNA, 19 nt, Artificial Sequence
  Description of Artificial Sequence: Synthetic oligonucleotide
auaucagucuccagaaggu

SEQ ID NO: 1207878 - RNA, 19 nt, Artificial Sequence
  Description of Artificial Sequence: Synthetic oligonucleotide
aucaccaaaauuggacucu

SEQ ID NO: 1207879 - RNA, 19 nt, Artificial Sequence
  Description of Artificial Sequence: Synthetic oligonucleotide
uccuccgcgcgcuacucgg

SEQ ID NO: 1207880 - RNA, 19 nt, Artificial Sequence
  Description of Artificial Sequence: Synthetic oligonucleotide
ucgaugaaauucuguuuaa

SEQ ID NO: 1207881 - RNA, 19 nt, Artificial Sequence
  Description of Artificial Sequence: Synthetic oligonucleotide
uugugcaugcuggucuccg

SEQ ID NO: 1207882 - RNA, 19 nt, Artificial Sequence
  Description of Artificial Sequence: Synthetic oligonucleotide
cuugccauggcggaccaug

SEQ ID NO: 1207883 - RNA, 19 nt, Artificial Sequence
  Description of Artificial Sequence: Synthetic oligonucleotide
uucucgcugaccagcuggc

SEQ ID NO: 1207884 - RNA, 19 nt, Artificial Sequence
  Description of Artificial Sequence: Synthetic oligonucleotide
uggcguagcuccucaucgg

SEQ ID NO: 1207885 - RNA, 19 nt, Artificial Sequence
  Description of Artificial Sequence: Synthetic oligonucleotide
guuuaacuucgaugucuag

SEQ ID NO: 1207886 - RNA, 19 nt, Artificial Sequence
  Description of Artificial Sequence: Synthetic oligonucleotide
ucagguuuccgccggcguc

SEQ ID NO: 1207887 - RNA, 19 nt, Artificial Sequence
  Description of Artificial Sequence: Synthetic oligonucleotide
gagccauagguugugggac

SEQ ID NO: 1207888 - RNA, 19 nt, Artificial Sequence
  Description of Artificial Sequence: Synthetic oligonucleotide
aucuaccagggccgagagc

SEQ ID NO: 1207889 - RNA, 19 nt, Artificial Sequence
  Description of Artificial Sequence: Synthetic oligonucleotide
gcaacgugcaggcagccag

SEQ ID NO: 1207890 - RNA, 19 nt, Artificial Sequence
  Description of Artificial Sequence: Synthetic oligonucleotide
cauauagugccuugcagcu

SEQ ID NO: 1207891 - RNA, 19 nt, Artificial Sequence
  Description of Artificial Sequence: Synthetic oligonucleotide
gacaggaccucaggguggg

SEQ ID NO: 1207892 - RNA, 19 nt, Artificial Sequence
  Description of Artificial Sequence: Synthetic oligonucleotide
cugaaugaugaggaagcug

SEQ ID NO: 1207893 - RNA, 19 nt, Artificial Sequence
  Description of Artificial Sequence: Synthetic oligonucleotide
ggaucugcacugcuugccg

SEQ ID NO: 1207894 - RNA, 19 nt, Artificial Sequence
  Description of Artificial Sequence: Synthetic oligonucleotide
aaggucgaagggcucccgu

SEQ ID NO: 1207895 - RNA, 19 nt, Artificial Sequence
  Description of Artificial Sequence: Synthetic oligonucleotide
ugcacauagcugaguggga

SEQ ID NO: 1207896 - RNA, 19 nt, Artificial Sequence
  Description of Artificial Sequence: Synthetic oligonucleotide
guuaguguuucuagagcac

SEQ ID NO: 1207897 - RNA, 19 nt, Artificial Sequence
  Description of Artificial Sequence: Synthetic oligonucleotide
cacaugccagggacgagcc

SEQ ID NO: 1207898 - RNA, 19 nt, Artificial Sequence
  Description of Artificial Sequence: Synthetic oligonucleotide
aaacaggugggagcugaca

SEQ ID NO: 1207899 - RNA, 19 nt, Artificial Sequence
  Description of Artificial Sequence: Synthetic oligonucleotide
cacccgacgcuucagcuug

SEQ ID NO: 1207900 - RNA, 19 nt, Artificial Sequence
  Description of Artificial Sequence: Synthetic oligonucleotide
ggucgaagggcucccgugg

SEQ ID NO: 1207901 - RNA, 19 nt, Artificial Sequence
  Description of Artificial Sequence: Synthetic oligonucleotide
ggcauacuccugcugggcg

SEQ ID NO: 1207902 - RNA, 19 nt, Artificial Sequence
  Description of Artificial Sequence: Synthetic oligonucleotide
gugagagugaugaggucgc

SEQ ID NO: 1207903 - RNA, 19 nt, Artificial Sequence
  Description of Artificial Sequence: Synthetic oligonucleotide
ucaucuagcuugguccccu

SEQ ID NO: 1207904 - RNA, 19 nt, Artificial Sequence
  Description of Artificial Sequence: Synthetic oligonucleotide
agccccgcaaccgacaugu

SEQ ID NO: 1207905 - RNA, 19 nt, Artificial Sequence
  Description of Artificial Sequence: Synthetic oligonucleotide
guucugaccagcacuucug

SEQ ID NO: 1207906 - RNA, 19 nt, Artificial Sequence
  Description of Artificial Sequence: Synthetic oligonucleotide
aaccgaccuccuuccuccg

SEQ ID NO: 1207907 - RNA, 19 nt, Artificial Sequence
  Description of Artificial Sequence: Synthetic oligonucleotide
ggcgcggucacugaggcag

SEQ ID NO: 1207908 - RNA, 19 nt, Artificial Sequence
  Description of Artificial Sequence: Synthetic oligonucleotide
uucauggacucaccugcau

SEQ ID NO: 1207909 - RNA, 19 nt, Artificial Sequence
  Description of Artificial Sequence: Synthetic oligonucleotide
augcacucgcccagcagcc

SEQ ID NO: 1207910 - RNA, 19 nt, Artificial Sequence
  Description of Artificial Sequence: Synthetic oligonucleotide
uggcguuaggcugcugccg

SEQ ID NO: 1207911 - RNA, 19 nt, Artificial Sequence
  Description of Artificial Sequence: Synthetic oligonucleotide
cuagagaguccuucaccuc

SEQ ID NO: 1207912 - RNA, 19 nt, Artificial Sequence
  Description of Artificial Sequence: Synthetic oligonucleotide
uuccuccgcgcgcuacucg

SEQ ID NO: 1207913 - RNA, 19 nt, Artificial Sequence
  Description of Artificial Sequence: Synthetic oligonucleotide
cccgcaaccgacaugucgc

SEQ ID NO: 1207914 - RNA, 19 nt, Artificial Sequence
  Description of Artificial Sequence: Synthetic oligonucleotide
gaggccuccuccgugugcc

SEQ ID NO: 1207915 - RNA, 19 nt, Artificial Sequence
  Description of Artificial Sequence: Synthetic oligonucleotide
ucgaagggcucccguggcc

SEQ ID NO: 1207916 - RNA, 19 nt, Artificial Sequence
  Description of Artificial Sequence: Synthetic oligonucleotide
ucaccaaaauuggacucuc

SEQ ID NO: 1207917 - RNA, 19 nt, Artificial Sequence
  Description of Artificial Sequence: Synthetic oligonucleotide
ucccgcuuagggcgugagg

SEQ ID NO: 1207918 - RNA, 19 nt, Artificial Sequence
  Description of Artificial Sequence: Synthetic oligonucleotide
agccauagguugugggacu

SEQ ID NO: 1207919 - RNA, 19 nt, Artificial Sequence
  Description of Artificial Sequence: Synthetic oligonucleotide
ggcguagcuccucaucggg

SEQ ID NO: 1207920 - RNA, 19 nt, Artificial Sequence
  Description of Artificial Sequence: Synthetic oligonucleotide
gguugugggacugcuguag

SEQ ID NO: 1207921 - RNA, 19 nt, Artificial Sequence
  Description of Artificial Sequence: Synthetic oligonucleotide
aacgugcaggcagccagug

SEQ ID NO: 1207922 - RNA, 19 nt, Artificial Sequence
  Description of Artificial Sequence: Synthetic oligonucleotide
ggcgugaggaggcuucccg

SEQ ID NO: 1207923 - RNA, 19 nt, Artificial Sequence
  Description of Artificial Sequence: Synthetic oligonucleotide
caaccgacaugucgccucc

SEQ ID NO: 1207924 - RNA, 19 nt, Artificial Sequence
  Description of Artificial Sequence: Synthetic oligonucleotide
gauuggccgugcagcaucc

SEQ ID NO: 1207925 - RNA, 19 nt, Artificial Sequence
  Description of Artificial Sequence: Synthetic oligonucleotide
agcuugcaggcuggggacc

SEQ ID NO: 1207926 - RNA, 19 nt, Artificial Sequence
  Description of Artificial Sequence: Synthetic oligonucleotide
caacagggcaucaccaaaa

SEQ ID NO: 1207927 - RNA, 19 nt, Artificial Sequence
  Description of Artificial Sequence: Synthetic oligonucleotide
aggaccucagggugggccu

SEQ ID NO: 1207928 - RNA, 19 nt, Artificial Sequence
  Description of Artificial Sequence: Synthetic oligonucleotide
aaccgacaugucgccuccc

SEQ ID NO: 1207929 - RNA, 19 nt, Artificial Sequence
  Description of Artificial Sequence: Synthetic oligonucleotide
cucgcugaccagcuggcuc

SEQ ID NO: 1207930 - RNA, 19 nt, Artificial Sequence
  Description of Artificial Sequence: Synthetic oligonucleotide
cagcauugucagcuuggcc

SEQ ID NO: 1207931 - RNA, 19 nt, Artificial Sequence
  Description of Artificial Sequence: Synthetic oligonucleotide
aguguggggcggagggucc

SEQ ID NO: 1207932 - RNA, 19 nt, Artificial Sequence
  Description of Artificial Sequence: Synthetic oligonucleotide
gacgagccauagguugugg

SEQ ID NO: 1207933 - RNA, 19 nt, Artificial Sequence
  Description of Artificial Sequence: Synthetic oligonucleotide
aacgggcugggaggguuuc

SEQ ID NO: 1207934 - RNA, 19 nt, Artificial Sequence
  Description of Artificial Sequence: Synthetic oligonucleotide
caggaccucagggugggcc

SEQ ID NO: 1207935 - RNA, 19 nt, Artificial Sequence
  Description of Artificial Sequence: Synthetic oligonucleotide
caggcgcggucacugaggc

SEQ ID NO: 1207936 - RNA, 19 nt, Artificial Sequence
  Description of Artificial Sequence: Synthetic oligonucleotide
cagcucgccaucauucuca

SEQ ID NO: 1207937 - RNA, 19 nt, Artificial Sequence
  Description of Artificial Sequence: Synthetic oligonucleotide
ccggaucuuggauacagug

SEQ ID NO: 1207938 - RNA, 19 nt, Artificial Sequence
  Description of Artificial Sequence: Synthetic oligonucleotide
agcccgauuggccgugcag

SEQ ID NO: 1207939 - RNA, 19 nt, Artificial Sequence
  Description of Artificial Sequence: Synthetic oligonucleotide
aggaacguuaguguuucua

SEQ ID NO: 1207940 - RNA, 19 nt, Artificial Sequence
  Description of Artificial Sequence: Synthetic oligonucleotide
ugucgccucccgccgucgg

SEQ ID NO: 1207941 - RNA, 19 nt, Artificial Sequence
  Description of Artificial Sequence: Synthetic oligonucleotide
ucagccccgcaaccgacau

SEQ ID NO: 1207942 - RNA, 19 nt, Artificial Sequence
  Description of Artificial Sequence: Synthetic oligonucleotide
cuucagccccgcaaccgac

SEQ ID NO: 1207943 - RNA, 19 nt, Artificial Sequence
  Description of Artificial Sequence: Synthetic oligonucleotide
guugugggacugcuguaga

SEQ ID NO: 1207944 - RNA, 19 nt, Artificial Sequence
  Description of Artificial Sequence: Synthetic oligonucleotide
gagaguccuucaccucagc

SEQ ID NO: 1207945 - RNA, 19 nt, Artificial Sequence
  Description of Artificial Sequence: Synthetic oligonucleotide
ucgcccucgcggaagccca

SEQ ID NO: 1207946 - RNA, 19 nt, Artificial Sequence
  Description of Artificial Sequence: Synthetic oligonucleotide
gcuuaccugcucaauauca

SEQ ID NO: 1207947 - RNA, 19 nt, Artificial Sequence
  Description of Artificial Sequence: Synthetic oligonucleotide
cguuaguguuucuagagca

SEQ ID NO: 1207948 - RNA, 19 nt, Artificial Sequence
  Description of Artificial Sequence: Synthetic oligonucleotide
gggcccaucgccagcaacg

SEQ ID NO: 1207949 - RNA, 19 nt, Artificial Sequence
  Description of Artificial Sequence: Synthetic oligonucleotide
ggaggaacguuaguguuuc

SEQ ID NO: 1207950 - RNA, 19 nt, Artificial Sequence
  Description of Artificial Sequence: Synthetic oligonucleotide
gucacugaggcaggggcac

SEQ ID NO: 1207951 - RNA, 19 nt, Artificial Sequence
  Description of Artificial Sequence: Synthetic oligonucleotide
ugggcguccuggcaggcuu

SEQ ID NO: 1207952 - RNA, 19 nt, Artificial Sequence
  Description of Artificial Sequence: Synthetic oligonucleotide
gaagguugugcaugcuggu

SEQ ID NO: 1207953 - RNA, 19 nt, Artificial Sequence
  Description of Artificial Sequence: Synthetic oligonucleotide
ggcguuaggcugcugccgc

SEQ ID NO: 1207954 - RNA, 19 nt, Artificial Sequence
  Description of Artificial Sequence: Synthetic oligonucleotide
cuucauggacucaccugca

SEQ ID NO: 1207955 - RNA, 19 nt, Artificial Sequence
  Description of Artificial Sequence: Synthetic oligonucleotide
ucgccuuguagaacugcuu

SEQ ID NO: 1207956 - RNA, 19 nt, Artificial Sequence
  Description of Artificial Sequence: Synthetic oligonucleotide
ucuuaggauggaggaccca

SEQ ID NO: 1207957 - RNA, 19 nt, Artificial Sequence
  Description of Artificial Sequence: Synthetic oligonucleotide
ggcuugaacucccgcuuag

SEQ ID NO: 1207958 - RNA, 19 nt, Artificial Sequence
  Description of Artificial Sequence: Synthetic oligonucleotide
augguucugaccagcacuu

SEQ ID NO: 1207959 - RNA, 19 nt, Artificial Sequence
  Description of Artificial Sequence: Synthetic oligonucleotide
auuggccgugcagcauccc

SEQ ID NO: 1207960 - RNA, 19 nt, Artificial Sequence
  Description of Artificial Sequence: Synthetic oligonucleotide
cgacgcuucagcuugucug

SEQ ID NO: 1207961 - RNA, 19 nt, Artificial Sequence
  Description of Artificial Sequence: Synthetic oligonucleotide
auagguugugggacugcug

SEQ ID NO: 1207962 - RNA, 19 nt, Artificial Sequence
  Description of Artificial Sequence: Synthetic oligonucleotide
cuccgcgcgcuacucggcg

SEQ ID NO: 1207963 - RNA, 19 nt, Artificial Sequence
  Description of Artificial Sequence: Synthetic oligonucleotide
ccuccgccaaagcagcucg

SEQ ID NO: 1207964 - RNA, 19 nt, Artificial Sequence
  Description of Artificial Sequence: Synthetic oligonucleotide
uggccccggaucuuggaua

SEQ ID NO: 1207965 - RNA, 19 nt, Artificial Sequence
  Description of Artificial Sequence: Synthetic oligonucleotide
ccggacucagguuuccgcc

SEQ ID NO: 1207966 - RNA, 19 nt, Artificial Sequence
  Description of Artificial Sequence: Synthetic oligonucleotide
cuggcuuaccugcucaaua

SEQ ID NO: 1207967 - RNA, 19 nt, Artificial Sequence
  Description of Artificial Sequence: Synthetic oligonucleotide
gauucugcaguggaucgau

SEQ ID NO: 1207968 - RNA, 19 nt, Artificial Sequence
  Description of Artificial Sequence: Synthetic oligonucleotide
gcaaccgacaugucgccuc

SEQ ID NO: 1207969 - RNA, 19 nt, Artificial Sequence
  Description of Artificial Sequence: Synthetic oligonucleotide
caggugggagcugacacca

SEQ ID NO: 1207970 - RNA, 19 nt, Artificial Sequence
  Description of Artificial Sequence: Synthetic oligonucleotide
ucggggaucuugcccuguc

SEQ ID NO: 1207971 - RNA, 19 nt, Artificial Sequence
  Description of Artificial Sequence: Synthetic oligonucleotide
ucguaccaguucucaucga

SEQ ID NO: 1207972 - RNA, 19 nt, Artificial Sequence
  Description of Artificial Sequence: Synthetic oligonucleotide
aagcccgauuggccgugca

SEQ ID NO: 1207973 - RNA, 19 nt, Artificial Sequence
  Description of Artificial Sequence: Synthetic oligonucleotide
ugugccagacugggguacu

SEQ ID NO: 1207974 - RNA, 19 nt, Artificial Sequence
  Description of Artificial Sequence: Synthetic oligonucleotide
acggccuugcuggugacau

SEQ ID NO: 1207975 - RNA, 19 nt, Artificial Sequence
  Description of Artificial Sequence: Synthetic oligonucleotide
ugccagggacgagccauag

SEQ ID NO: 1207976 - RNA, 19 nt, Artificial Sequence
  Description of Artificial Sequence: Synthetic oligonucleotide
gccgaaccgaccuccuucc

SEQ ID NO: 1207977 - RNA, 19 nt, Artificial Sequence
  Description of Artificial Sequence: Synthetic oligonucleotide
ucuugggugcuggggcaca

SEQ ID NO: 1207978 - RNA, 19 nt, Artificial Sequence
  Description of Artificial Sequence: Synthetic oligonucleotide
auuggacucuccacccagu

SEQ ID NO: 1207979 - RNA, 19 nt, Artificial Sequence
  Description of Artificial Sequence: Synthetic oligonucleotide
uccgcgcgcuacucggcgc

SEQ ID NO: 1207980 - RNA, 19 nt, Artificial Sequence
  Description of Artificial Sequence: Synthetic oligonucleotide
agaagcccgauuggccgug

SEQ ID NO: 1207981 - RNA, 19 nt, Artificial Sequence
  Description of Artificial Sequence: Synthetic oligonucleotide
ccccgcaaccgacaugucg

SEQ ID NO: 1207982 - RNA, 19 nt, Artificial Sequence
  Description of Artificial Sequence: Synthetic oligonucleotide
auagugccuugcagcuugg

SEQ ID NO: 1207983 - RNA, 19 nt, Artificial Sequence
  Description of Artificial Sequence: Synthetic oligonucleotide
cuacucggcgccgccuccg

SEQ ID NO: 1207984 - RNA, 19 nt, Artificial Sequence
  Description of Artificial Sequence: Synthetic oligonucleotide
ccgaccuccuuccuccgcg

SEQ ID NO: 1207985 - RNA, 19 nt, Artificial Sequence
  Description of Artificial Sequence: Synthetic oligonucleotide
cucgccuuguagaacugcu

SEQ ID NO: 1207986 - RNA, 19 nt, Artificial Sequence
  Description of Artificial Sequence: Synthetic oligonucleotide
ggcuuaccugcucaauauc

SEQ ID NO: 1207987 - RNA, 19 nt, Artificial Sequence
  Description of Artificial Sequence: Synthetic oligonucleotide
gucgcccucgcggaagccc

SEQ ID NO: 1207988 - RNA, 19 nt, Artificial Sequence
  Description of Artificial Sequence: Synthetic oligonucleotide
auauagugccuugcagcuu

SEQ ID NO: 1207989 - RNA, 19 nt, Artificial Sequence
  Description of Artificial Sequence: Synthetic oligonucleotide
cuaccagggccgagagcug

SEQ ID NO: 1207990 - RNA, 19 nt, Artificial Sequence
  Description of Artificial Sequence: Synthetic oligonucleotide
ugcacucgcccagcagccc

SEQ ID NO: 1207991 - RNA, 19 nt, Artificial Sequence
  Description of Artificial Sequence: Synthetic oligonucleotide
caugucgccucccgccguc

SEQ ID NO: 1207992 - RNA, 19 nt, Artificial Sequence
  Description of Artificial Sequence: Synthetic oligonucleotide
cuccgccaaagcagcucgc

SEQ ID NO: 1207993 - RNA, 19 nt, Artificial Sequence
  Description of Artificial Sequence: Synthetic oligonucleotide
ggacucaccugcauccaac

SEQ ID NO: 1207994 - RNA, 19 nt, Artificial Sequence
  Description of Artificial Sequence: Synthetic oligonucleotide
agcugugaucuugggugcu

SEQ ID NO: 1207995 - RNA, 19 nt, Artificial Sequence
  Description of Artificial Sequence: Synthetic oligonucleotide
gcgugaggaggcuucccgc

SEQ ID NO: 1207996 - RNA, 19 nt, Artificial Sequence
  Description of Artificial Sequence: Synthetic oligonucleotide
cuggcucgccuuguagaac

SEQ ID NO: 1207997 - RNA, 19 nt, Artificial Sequence
  Description of Artificial Sequence: Synthetic oligonucleotide
cccggacucagguuuccgc

SEQ ID NO: 1207998 - RNA, 19 nt, Artificial Sequence
  Description of Artificial Sequence: Synthetic oligonucleotide
uuagggcgugaggaggcuu

SEQ ID NO: 1207999 - RNA, 19 nt, Artificial Sequence
  Description of Artificial Sequence: Synthetic oligonucleotide
ccgagagcuggcuuaccug

SEQ ID NO: 1208000 - RNA, 19 nt, Artificial Sequence
  Description of Artificial Sequence: Synthetic oligonucleotide
gcaggcgcggucacugagg

SEQ ID NO: 1208001 - RNA, 19 nt, Artificial Sequence
  Description of Artificial Sequence: Synthetic oligonucleotide
cauagguugugggacugcu

SEQ ID NO: 1208002 - RNA, 19 nt, Artificial Sequence
  Description of Artificial Sequence: Synthetic oligonucleotide
cgaugaaauucuguuuaac

SEQ ID NO: 1208003 - RNA, 19 nt, Artificial Sequence
  Description of Artificial Sequence: Synthetic oligonucleotide
cuuggccccggaucuugga

SEQ ID NO: 1208004 - RNA, 19 nt, Artificial Sequence
  Description of Artificial Sequence: Synthetic oligonucleotide
cggacucagguuuccgccg

SEQ ID NO: 1208005 - RNA, 19 nt, Artificial Sequence
  Description of Artificial Sequence: Synthetic oligonucleotide
cccgccaaccuucucgcug

SEQ ID NO: 1208006 - RNA, 19 nt, Artificial Sequence
  Description of Artificial Sequence: Synthetic oligonucleotide
caugccagggacgagccau

SEQ ID NO: 1208007 - RNA, 19 nt, Artificial Sequence
  Description of Artificial Sequence: Synthetic oligonucleotide
gcuggcucgccuuguagaa

SEQ ID NO: 1208008 - RNA, 19 nt, Artificial Sequence
  Description of Artificial Sequence: Synthetic oligonucleotide
augucgccucccgccgucg

SEQ ID NO: 1208009 - RNA, 19 nt, Artificial Sequence
  Description of Artificial Sequence: Synthetic oligonucleotide
gggaggguuucaaacaggu

SEQ ID NO: 1208010 - RNA, 19 nt, Artificial Sequence
  Description of Artificial Sequence: Synthetic oligonucleotide
cccgcuuagggcgugagga

SEQ ID NO: 1208011 - RNA, 19 nt, Artificial Sequence
  Description of Artificial Sequence: Synthetic oligonucleotide
ggacgagccauagguugug

SEQ ID NO: 1208012 - RNA, 19 nt, Artificial Sequence
  Description of Artificial Sequence: Synthetic oligonucleotide
gccauagguugugggacug

SEQ ID NO: 1208013 - RNA, 19 nt, Artificial Sequence
  Description of Artificial Sequence: Synthetic oligonucleotide
caucgccagcaacgggcug

SEQ ID NO: 1208014 - RNA, 19 nt, Artificial Sequence
  Description of Artificial Sequence: Synthetic oligonucleotide
ucgccgaaccgaccuccuu

SEQ ID NO: 1208015 - RNA, 19 nt, Artificial Sequence
  Description of Artificial Sequence: Synthetic oligonucleotide
gcggaccaugcacucgccc

SEQ ID NO: 1208016 - RNA, 19 nt, Artificial Sequence
  Description of Artificial Sequence: Synthetic oligonucleotide
ccgacaugucgccucccgc

SEQ ID NO: 1208017 - RNA, 19 nt, Artificial Sequence
  Description of Artificial Sequence: Synthetic oligonucleotide
cgauuggccgugcagcauc

SEQ ID NO: 1208018 - RNA, 19 nt, Artificial Sequence
  Description of Artificial Sequence: Synthetic oligonucleotide
uccgccggcgucgccgaac

SEQ ID NO: 1208019 - RNA, 19 nt, Artificial Sequence
  Description of Artificial Sequence: Synthetic oligonucleotide
uggucuccgccaccuccuu

SEQ ID NO: 1208020 - RNA, 19 nt, Artificial Sequence
  Description of Artificial Sequence: Synthetic oligonucleotide
ccgcuuagggcgugaggag

SEQ ID NO: 1208021 - RNA, 19 nt, Artificial Sequence
  Description of Artificial Sequence: Synthetic oligonucleotide
gcucgccuuguagaacugc

SEQ ID NO: 1208022 - RNA, 19 nt, Artificial Sequence
  Description of Artificial Sequence: Synthetic oligonucleotide
gcggcggcccuccagcuuc

SEQ ID NO: 1208023 - RNA, 19 nt, Artificial Sequence
  Description of Artificial Sequence: Synthetic oligonucleotide
gcuacucggcgccgccucc

SEQ ID NO: 1208024 - RNA, 19 nt, Artificial Sequence
  Description of Artificial Sequence: Synthetic oligonucleotide
aucggggaucuugcccugu

SEQ ID NO: 1208025 - RNA, 19 nt, Artificial Sequence
  Description of Artificial Sequence: Synthetic oligonucleotide
cucccgcuuagggcgugag

SEQ ID NO: 1208026 - RNA, 19 nt, Artificial Sequence
  Description of Artificial Sequence: Synthetic oligonucleotide
ggcgucgccgaaccgaccu

SEQ ID NO: 1208027 - RNA, 19 nt, Artificial Sequence
  Description of Artificial Sequence: Synthetic oligonucleotide
ccgcaaccgacaugucgcc

SEQ ID NO: 1208028 - RNA, 19 nt, Artificial Sequence
  Description of Artificial Sequence: Synthetic oligonucleotide
ccugcauccaacagggcau

SEQ ID NO: 1208029 - RNA, 19 nt, Artificial Sequence
  Description of Artificial Sequence: Synthetic oligonucleotide
gccccucugacugagggua

SEQ ID NO: 1208030 - RNA, 19 nt, Artificial Sequence
  Description of Artificial Sequence: Synthetic oligonucleotide
cgaaccgaccuccuuccuc

SEQ ID NO: 1208031 - RNA, 19 nt, Artificial Sequence
  Description of Artificial Sequence: Synthetic oligonucleotide
gggcaucaccaaaauugga

SEQ ID NO: 1208032 - RNA, 19 nt, Artificial Sequence
  Description of Artificial Sequence: Synthetic oligonucleotide
ccaaggaccugcuugcuuu

SEQ ID NO: 1208033 - RNA, 19 nt, Artificial Sequence
  Description of Artificial Sequence: Synthetic oligonucleotide
gaggaacguuaguguuucu

SEQ ID NO: 1208034 - RNA, 19 nt, Artificial Sequence
  Description of Artificial Sequence: Synthetic oligonucleotide
caacgugcaggcagccagu

SEQ ID NO: 1208035 - RNA, 19 nt, Artificial Sequence
  Description of Artificial Sequence: Synthetic oligonucleotide
gccgagagcuggcuuaccu

SEQ ID NO: 1208036 - RNA, 19 nt, Artificial Sequence
  Description of Artificial Sequence: Synthetic oligonucleotide
cagccccgcaaccgacaug

SEQ ID NO: 1208037 - RNA, 19 nt, Artificial Sequence
  Description of Artificial Sequence: Synthetic oligonucleotide
ccgccaaccuucucgcuga

SEQ ID NO: 1208038 - RNA, 19 nt, Artificial Sequence
  Description of Artificial Sequence: Synthetic oligonucleotide
cugcugccgcaacgugcag

SEQ ID NO: 1208039 - RNA, 19 nt, Artificial Sequence
  Description of Artificial Sequence: Synthetic oligonucleotide
gccccacaugccagggacg

SEQ ID NO: 1208040 - RNA, 19 nt, Artificial Sequence
  Description of Artificial Sequence: Synthetic oligonucleotide
cggaccaugcacucgccca

SEQ ID NO: 1208041 - RNA, 19 nt, Artificial Sequence
  Description of Artificial Sequence: Synthetic oligonucleotide
cggggaucuugcccugucg

SEQ ID NO: 1208042 - RNA, 19 nt, Artificial Sequence
  Description of Artificial Sequence: Synthetic oligonucleotide
ccggcgucgccgaaccgac

SEQ ID NO: 1208043 - RNA, 19 nt, Artificial Sequence
  Description of Artificial Sequence: Synthetic oligonucleotide
gugcaggcgcggucacuga

SEQ ID NO: 1208044 - RNA, 19 nt, Artificial Sequence
  Description of Artificial Sequence: Synthetic oligonucleotide
cgccgaaccgaccuccuuc

SEQ ID NO: 1208045 - RNA, 19 nt, Artificial Sequence
  Description of Artificial Sequence: Synthetic oligonucleotide
uggggaccccaaggaccug

SEQ ID NO: 1208046 - RNA, 19 nt, Artificial Sequence
  Description of Artificial Sequence: Synthetic oligonucleotide
uugguccccucggccccgc

SEQ ID NO: 1208047 - RNA, 19 nt, Artificial Sequence
  Description of Artificial Sequence: Synthetic oligonucleotide
ucccgcccggacucagguu

SEQ ID NO: 1208048 - RNA, 19 nt, Artificial Sequence
  Description of Artificial Sequence: Synthetic oligonucleotide
gacucuccacccaguuccu

SEQ ID NO: 1208049 - RNA, 19 nt, Artificial Sequence
  Description of Artificial Sequence: Synthetic oligonucleotide
acucccgcuuagggcguga

SEQ ID NO: 1208050 - RNA, 19 nt, Artificial Sequence
  Description of Artificial Sequence: Synthetic oligonucleotide
acgggcugggaggguuuca

SEQ ID NO: 1208051 - RNA, 19 nt, Artificial Sequence
  Description of Artificial Sequence: Synthetic oligonucleotide
gggacgagccauagguugu

SEQ ID NO: 1208052 - RNA, 19 nt, Artificial Sequence
  Description of Artificial Sequence: Synthetic oligonucleotide
gcccggacucagguuuccg

SEQ ID NO: 1208053 - RNA, 19 nt, Artificial Sequence
  Description of Artificial Sequence: Synthetic oligonucleotide
gccggcgucgccgaaccga

SEQ ID NO: 1208054 - RNA, 19 nt, Artificial Sequence
  Description of Artificial Sequence: Synthetic oligonucleotide
gugggguguggccccacau

SEQ ID NO: 1208055 - RNA, 19 nt, Artificial Sequence
  Description of Artificial Sequence: Synthetic oligonucleotide
ccgcacccgacgcuucagc

SEQ ID NO: 1208056 - RNA, 19 nt, Artificial Sequence
  Description of Artificial Sequence: Synthetic oligonucleotide
cgucgccgaaccgaccucc

SEQ ID NO: 1208057 - RNA, 19 nt, Artificial Sequence
  Description of Artificial Sequence: Synthetic oligonucleotide
gccgucgggccucccgccc

SEQ ID NO: 1208058 - RNA, 19 nt, Artificial Sequence
  Description of Artificial Sequence: Synthetic oligonucleotide
augccagggacgagccaua

SEQ ID NO: 1208059 - RNA, 19 nt, Artificial Sequence
  Description of Artificial Sequence: Synthetic oligonucleotide
ggcucgccuuguagaacug

SEQ ID NO: 1208060 - RNA, 19 nt, Artificial Sequence
  Description of Artificial Sequence: Synthetic oligonucleotide
cuagagcaccuuggcguua

SEQ ID NO: 1208061 - RNA, 19 nt, Artificial Sequence
  Description of Artificial Sequence: Synthetic oligonucleotide
ccgccgucgggccucccgc

SEQ ID NO: 1208062 - RNA, 19 nt, Artificial Sequence
  Description of Artificial Sequence: Synthetic oligonucleotide
gcguuaggcugcugccgca

SEQ ID NO: 1208063 - RNA, 19 nt, Artificial Sequence
  Description of Artificial Sequence: Synthetic oligonucleotide
gcgcuucauggacucaccu

SEQ ID NO: 1208064 - RNA, 19 nt, Artificial Sequence
  Description of Artificial Sequence: Synthetic oligonucleotide
gccuccgccaaagcagcuc

SEQ ID NO: 1208065 - RNA, 19 nt, Artificial Sequence
  Description of Artificial Sequence: Synthetic oligonucleotide
gcuggggcacaggggaauc

SEQ ID NO: 1208066 - RNA, 19 nt, Artificial Sequence
  Description of Artificial Sequence: Synthetic oligonucleotide
uuccgccggcgucgccgaa

SEQ ID NO: 1208067 - RNA, 19 nt, Artificial Sequence
  Description of Artificial Sequence: Synthetic oligonucleotide
gggguggcauacuccugcu

SEQ ID NO: 1208068 - RNA, 19 nt, Artificial Sequence
  Description of Artificial Sequence: Synthetic oligonucleotide
gcaguggaucgaugaaauu

SEQ ID NO: 1208069 - RNA, 19 nt, Artificial Sequence
  Description of Artificial Sequence: Synthetic oligonucleotide
gcgcggucacugaggcagg

SEQ ID NO: 1208070 - RNA, 19 nt, Artificial Sequence
  Description of Artificial Sequence: Synthetic oligonucleotide
acccgacgcuucagcuugu

SEQ ID NO: 1208071 - RNA, 19 nt, Artificial Sequence
  Description of Artificial Sequence: Synthetic oligonucleotide
ccaucgccagcaacgggcu

SEQ ID NO: 1208072 - RNA, 19 nt, Artificial Sequence
  Description of Artificial Sequence: Synthetic oligonucleotide
gcgucgccgaaccgaccuc

SEQ ID NO: 1208073 - RNA, 19 nt, Artificial Sequence
  Description of Artificial Sequence: Synthetic oligonucleotide
ggccgagagcuggcuuacc

SEQ ID NO: 1208074 - RNA, 19 nt, Artificial Sequence
  Description of Artificial Sequence: Synthetic oligonucleotide
gcacccgacgcuucagcuu

SEQ ID NO: 1208075 - RNA, 19 nt, Artificial Sequence
  Description of Artificial Sequence: Synthetic oligonucleotide
gucgccgaaccgaccuccu

SEQ ID NO: 1208076 - RNA, 19 nt, Artificial Sequence
  Description of Artificial Sequence: Synthetic oligonucleotide
ccgcccggacucagguuuc

SEQ ID NO: 1208077 - RNA, 19 nt, Artificial Sequence
  Description of Artificial Sequence: Synthetic oligonucleotide
gcccucgcggaagcccagc

SEQ ID NO: 1208078 - RNA, 19 nt, Artificial Sequence
  Description of Artificial Sequence: Synthetic oligonucleotide
cccgcacccgacgcuucag

SEQ ID NO: 1208079 - RNA, 19 nt, Artificial Sequence
  Description of Artificial Sequence: Synthetic oligonucleotide
gugugcaggcgcggucacu

SEQ ID NO: 1208080 - RNA, 19 nt, Artificial Sequence
  Description of Artificial Sequence: Synthetic oligonucleotide
gcaacgggcugggaggguu

SEQ ID NO: 1208081 - RNA, 19 nt, Artificial Sequence
  Description of Artificial Sequence: Synthetic oligonucleotide
cccgcccggacucagguuu

SEQ ID NO: 1208082 - RNA, 19 nt, Artificial Sequence
  Description of Artificial Sequence: Synthetic oligonucleotide
cgccgccuccgccaaagca

SEQ ID NO: 1208083 - RNA, 19 nt, Artificial Sequence
  Description of Artificial Sequence: Synthetic oligonucleotide
gcgcgcuacucggcgccgc

SEQ ID NO: 1208084 - RNA, 19 nt, Artificial Sequence
  Description of Artificial Sequence: Synthetic oligonucleotide
cccggaucuuggauacagu

SEQ ID NO: 1208085 - RNA, 19 nt, Artificial Sequence
  Description of Artificial Sequence: Synthetic oligonucleotide
cccgacgcuucagcuuguc

SEQ ID NO: 1208086 - RNA, 19 nt, Artificial Sequence
  Description of Artificial Sequence: Synthetic oligonucleotide
gggaccccaaggaccugcu

SEQ ID NO: 1208087 - RNA, 19 nt, Artificial Sequence
  Description of Artificial Sequence: Synthetic oligonucleotide
cgcacccgacgcuucagcu

SEQ ID NO: 1208088 - RNA, 19 nt, Artificial Sequence
  Description of Artificial Sequence: Synthetic oligonucleotide
cguuaggcugcugccgcaa

SEQ ID NO: 1208089 - RNA, 19 nt, Artificial Sequence
  Description of Artificial Sequence: Synthetic oligonucleotide
ccgacgcuucagcuugucu

SEQ ID NO: 1208090 - RNA, 19 nt, Artificial Sequence
  Description of Artificial Sequence: Synthetic oligonucleotide
gucgggccucccgcccgga

SEQ ID NO: 1208091 - RNA, 19 nt, Artificial Sequence
  Description of Artificial Sequence: Synthetic oligonucleotide
cgcccggacucagguuucc

SEQ ID NO: 1208092 - RNA, 19 nt, Artificial Sequence
  Description of Artificial Sequence: Synthetic oligonucleotide
cggcgucgccgaaccgacc

SEQ ID NO: 1208093 - RNA, 19 nt, Artificial Sequence
  Description of Artificial Sequence: Synthetic oligonucleotide
ggcucccguggccggggcu

SEQ ID NO: 1208094 - RNA, 19 nt, Artificial Sequence
  Description of Artificial Sequence: Synthetic oligonucleotide
cgcgcgcuacucggcgccg

SEQ ID NO: 1208095 - RNA, 19 nt, Artificial Sequence
  Description of Artificial Sequence: Synthetic oligonucleotide
ccuuggcguuaggcugcug

SEQ ID NO: 1208096 - RNA, 19 nt, Artificial Sequence
  Description of Artificial Sequence: Synthetic oligonucleotide
ggaccucagggugggccuu

SEQ ID NO: 1208097 - RNA, 19 nt, Artificial Sequence
  Description of Artificial Sequence: Synthetic oligonucleotide
ccgaaccgaccuccuuccu

SEQ ID NO: 1208098 - RNA, 19 nt, Artificial Sequence
  Description of Artificial Sequence: Synthetic oligonucleotide
cgaugucuagagaguccuu

SEQ ID NO: 1208099 - RNA, 19 nt, Artificial Sequence
  Description of Artificial Sequence: Synthetic oligonucleotide
gccccgcaaccgacauguc

SEQ ID NO: 1208100 - RNA, 19 nt, Artificial Sequence
  Description of Artificial Sequence: Synthetic oligonucleotide
cgcaaccgacaugucgccu

SEQ ID NO: 1208101 - RNA, 19 nt, Artificial Sequence
  Description of Artificial Sequence: Synthetic oligonucleotide
ccccgccaaccuucucgcu

SEQ ID NO: 1208102 - RNA, 19 nt, Artificial Sequence
  Description of Artificial Sequence: Synthetic oligonucleotide
aacauguguauccccaacc

SEQ ID NO: 1208103 - RNA, 19 nt, Artificial Sequence
  Description of Artificial Sequence: Synthetic oligonucleotide
ugaucacagacccauaggg

SEQ ID NO: 1208104 - RNA, 19 nt, Artificial Sequence
  Description of Artificial Sequence: Synthetic oligonucleotide
uguuuauuagacauuguug

SEQ ID NO: 1208105 - RNA, 19 nt, Artificial Sequence
  Description of Artificial Sequence: Synthetic oligonucleotide
ugaaacuuggcaucagugg

SEQ ID NO: 1208106 - RNA, 19 nt, Artificial Sequence
  Description of Artificial Sequence: Synthetic oligonucleotide
acagcauugagucauuguc

SEQ ID NO: 1208107 - RNA, 19 nt, Artificial Sequence
  Description of Artificial Sequence: Synthetic oligonucleotide
cuugauauugacuaugcuc

SEQ ID NO: 1208108 - RNA, 19 nt, Artificial Sequence
  Description of Artificial Sequence: Synthetic oligonucleotide
uccaguucguauuugaagc

SEQ ID NO: 1208109 - RNA, 19 nt, Artificial Sequence
  Description of Artificial Sequence: Synthetic oligonucleotide
uuugggaacauguguaucc

SEQ ID NO: 1208110 - RNA, 19 nt, Artificial Sequence
  Description of Artificial Sequence: Synthetic oligonucleotide
acuaugcucuugcugaagc

SEQ ID NO: 1208111 - RNA, 19 nt, Artificial Sequence
  Description of Artificial Sequence: Synthetic oligonucleotide
acauguguauccccaaccc

SEQ ID NO: 1208112 - RNA, 19 nt, Artificial Sequence
  Description of Artificial Sequence: Synthetic oligonucleotide
auaaccagguaguuggcgg

SEQ ID NO: 1208113 - RNA, 19 nt, Artificial Sequence
  Description of Artificial Sequence: Synthetic oligonucleotide
ucaggcuugauauugacua

SEQ ID NO: 1208114 - RNA, 19 nt, Artificial Sequence
  Description of Artificial Sequence: Synthetic oligonucleotide
aggucaaugcaccagauaa

SEQ ID NO: 1208115 - RNA, 19 nt, Artificial Sequence
  Description of Artificial Sequence: Synthetic oligonucleotide
uguauccccaacccagugg

SEQ ID NO: 1208116 - RNA, 19 nt, Artificial Sequence
  Description of Artificial Sequence: Synthetic oligonucleotide
ucgaugugaucccaaacgc

SEQ ID NO: 1208117 - RNA, 19 nt, Artificial Sequence
  Description of Artificial Sequence: Synthetic oligonucleotide
uucucuaugcgcagcuugg

SEQ ID NO: 1208118 - RNA, 19 nt, Artificial Sequence
  Description of Artificial Sequence: Synthetic oligonucleotide
cuuucgcuugcauucacgg

SEQ ID NO: 1208119 - RNA, 19 nt, Artificial Sequence
  Description of Artificial Sequence: Synthetic oligonucleotide
ucaaacagcauugagucau

SEQ ID NO: 1208120 - RNA, 19 nt, Artificial Sequence
  Description of Artificial Sequence: Synthetic oligonucleotide
aucccaaacgcuguagucc

SEQ ID NO: 1208121 - RNA, 19 nt, Artificial Sequence
  Description of Artificial Sequence: Synthetic oligonucleotide
auugacuaugcucuugcug

SEQ ID NO: 1208122 - RNA, 19 nt, Artificial Sequence
  Description of Artificial Sequence: Synthetic oligonucleotide
uucaacgaaggucuugugu

SEQ ID NO: 1208123 - RNA, 19 nt, Artificial Sequence
  Description of Artificial Sequence: Synthetic oligonucleotide
uaguccaccaucuucgccu

SEQ ID NO: 1208124 - RNA, 19 nt, Artificial Sequence
  Description of Artificial Sequence: Synthetic oligonucleotide
uuuucaacgaaggucuugu

SEQ ID NO: 1208125 - RNA, 19 nt, Artificial Sequence
  Description of Artificial Sequence: Synthetic oligonucleotide
guaguuggcggucuccucg

SEQ ID NO: 1208126 - RNA, 19 nt, Artificial Sequence
  Description of Artificial Sequence: Synthetic oligonucleotide
cuaccuuucgcuugcauuc

SEQ ID NO: 1208127 - RNA, 19 nt, Artificial Sequence
  Description of Artificial Sequence: Synthetic oligonucleotide
cucaacccgaagcagaaag

SEQ ID NO: 1208128 - RNA, 19 nt, Artificial Sequence
  Description of Artificial Sequence: Synthetic oligonucleotide
ugcaugugaaacuuggcau

SEQ ID NO: 1208129 - RNA, 19 nt, Artificial Sequence
  Description of Artificial Sequence: Synthetic oligonucleotide
aucgaugcaacgcugcaug

SEQ ID NO: 1208130 - RNA, 19 nt, Artificial Sequence
  Description of Artificial Sequence: Synthetic oligonucleotide
auuugcacguccuucacau

SEQ ID NO: 1208131 - RNA, 19 nt, Artificial Sequence
  Description of Artificial Sequence: Synthetic oligonucleotide
ugugccucagcucgcagcc

SEQ ID NO: 1208132 - RNA, 19 nt, Artificial Sequence
  Description of Artificial Sequence: Synthetic oligonucleotide
aagaacugccugaagcagg

SEQ ID NO: 1208133 - RNA, 19 nt, Artificial Sequence
  Description of Artificial Sequence: Synthetic oligonucleotide
acugacgucuuucucguug

SEQ ID NO: 1208134 - RNA, 19 nt, Artificial Sequence
  Description of Artificial Sequence: Synthetic oligonucleotide
guauuugaagcccuccaug

SEQ ID NO: 1208135 - RNA, 19 nt, Artificial Sequence
  Description of Artificial Sequence: Synthetic oligonucleotide
gucaaugcaccagauaacc

SEQ ID NO: 1208136 - RNA, 19 nt, Artificial Sequence
  Description of Artificial Sequence: Synthetic oligonucleotide
aguggaccaaccuggcaac

SEQ ID NO: 1208137 - RNA, 19 nt, Artificial Sequence
  Description of Artificial Sequence: Synthetic oligonucleotide
ugcccauuugggaacaugu

SEQ ID NO: 1208138 - RNA, 19 nt, Artificial Sequence
  Description of Artificial Sequence: Synthetic oligonucleotide
agaaucgaugcaacgcugc

SEQ ID NO: 1208139 - RNA, 19 nt, Artificial Sequence
  Description of Artificial Sequence: Synthetic oligonucleotide
gaugcaacgcugcauguga

SEQ ID NO: 1208140 - RNA, 19 nt, Artificial Sequence
  Description of Artificial Sequence: Synthetic oligonucleotide
ucuggcugucaucccagcg

SEQ ID NO: 1208141 - RNA, 19 nt, Artificial Sequence
  Description of Artificial Sequence: Synthetic oligonucleotide
uccauguacuguuggucgg

SEQ ID NO: 1208142 - RNA, 19 nt, Artificial Sequence
  Description of Artificial Sequence: Synthetic oligonucleotide
ucguauuugaagcccucca

SEQ ID NO: 1208143 - RNA, 19 nt, Artificial Sequence
  Description of Artificial Sequence: Synthetic oligonucleotide
ggagucaggagcuaggaac

SEQ ID NO: 1208144 - RNA, 19 nt, Artificial Sequence
  Description of Artificial Sequence: Synthetic oligonucleotide
uagacauuguugccaguug

SEQ ID NO: 1208145 - RNA, 19 nt, Artificial Sequence
  Description of Artificial Sequence: Synthetic oligonucleotide
uuuggggacggcuuccagc

SEQ ID NO: 1208146 - RNA, 19 nt, Artificial Sequence
  Description of Artificial Sequence: Synthetic oligonucleotide
uccaggucaaugcaccaga

SEQ ID NO: 1208147 - RNA, 19 nt, Artificial Sequence
  Description of Artificial Sequence: Synthetic oligonucleotide
uucucguacuuuucaacga

SEQ ID NO: 1208148 - RNA, 19 nt, Artificial Sequence
  Description of Artificial Sequence: Synthetic oligonucleotide
uuggggacggcuuccagca

SEQ ID NO: 1208149 - RNA, 19 nt, Artificial Sequence
  Description of Artificial Sequence: Synthetic oligonucleotide
ugcacauuucuccuccacu

SEQ ID NO: 1208150 - RNA, 19 nt, Artificial Sequence
  Description of Artificial Sequence: Synthetic oligonucleotide
gauauugacuaugcucuug

SEQ ID NO: 1208151 - RNA, 19 nt, Artificial Sequence
  Description of Artificial Sequence: Synthetic oligonucleotide
agaagugaaggagucagga

SEQ ID NO: 1208152 - RNA, 19 nt, Artificial Sequence
  Description of Artificial Sequence: Synthetic oligonucleotide
uuggcauucggcuaccuuu

SEQ ID NO: 1208153 - RNA, 19 nt, Artificial Sequence
  Description of Artificial Sequence: Synthetic oligonucleotide
cuaugcgcagcuuggcacg

SEQ ID NO: 1208154 - RNA, 19 nt, Artificial Sequence
  Description of Artificial Sequence: Synthetic oligonucleotide
gugcgucucguccucaucg

SEQ ID NO: 1208155 - RNA, 19 nt, Artificial Sequence
  Description of Artificial Sequence: Synthetic oligonucleotide
ccucaaacagcauugaguc

SEQ ID NO: 1208156 - RNA, 19 nt, Artificial Sequence
  Description of Artificial Sequence: Synthetic oligonucleotide
gacggcuuccagcaauggg

SEQ ID NO: 1208157 - RNA, 19 nt, Artificial Sequence
  Description of Artificial Sequence: Synthetic oligonucleotide
accuagguucacucucugc

SEQ ID NO: 1208158 - RNA, 19 nt, Artificial Sequence
  Description of Artificial Sequence: Synthetic oligonucleotide
auguguauccccaacccag

SEQ ID NO: 1208159 - RNA, 19 nt, Artificial Sequence
  Description of Artificial Sequence: Synthetic oligonucleotide
ucucguugcccgcuuuggg

SEQ ID NO: 1208160 - RNA, 19 nt, Artificial Sequence
  Description of Artificial Sequence: Synthetic oligonucleotide
cucguugcccgcuuugggg

SEQ ID NO: 1208161 - RNA, 19 nt, Artificial Sequence
  Description of Artificial Sequence: Synthetic oligonucleotide
uccuuaaaggccuccaguu

SEQ ID NO: 1208162 - RNA, 19 nt, Artificial Sequence
  Description of Artificial Sequence: Synthetic oligonucleotide
gcaccagauaaccagguag

SEQ ID NO: 1208163 - RNA, 19 nt, Artificial Sequence
  Description of Artificial Sequence: Synthetic oligonucleotide
ugaucccaaacgcuguagu

SEQ ID NO: 1208164 - RNA, 19 nt, Artificial Sequence
  Description of Artificial Sequence: Synthetic oligonucleotide
ugaaggagucaggagcuag

SEQ ID NO: 1208165 - RNA, 19 nt, Artificial Sequence
  Description of Artificial Sequence: Synthetic oligonucleotide
ugcguuggcauucggcuac

SEQ ID NO: 1208166 - RNA, 19 nt, Artificial Sequence
  Description of Artificial Sequence: Synthetic oligonucleotide
uggagaagggucacgcacu

SEQ ID NO: 1208167 - RNA, 19 nt, Artificial Sequence
  Description of Artificial Sequence: Synthetic oligonucleotide
ccuagguucacucucugcc

SEQ ID NO: 1208168 - RNA, 19 nt, Artificial Sequence
  Description of Artificial Sequence: Synthetic oligonucleotide
cuggugagcuaccugcucc

SEQ ID NO: 1208169 - RNA, 19 nt, Artificial Sequence
  Description of Artificial Sequence: Synthetic oligonucleotide
ugccucaaacagcauugag

SEQ ID NO: 1208170 - RNA, 19 nt, Artificial Sequence
  Description of Artificial Sequence: Synthetic oligonucleotide
cuaugcucuugcugaagcc

SEQ ID NO: 1208171 - RNA, 19 nt, Artificial Sequence
  Description of Artificial Sequence: Synthetic oligonucleotide
gagcaugccgaaaugcuug

SEQ ID NO: 1208172 - RNA, 19 nt, Artificial Sequence
  Description of Artificial Sequence: Synthetic oligonucleotide
aucuucgccuaggaggccc

SEQ ID NO: 1208173 - RNA, 19 nt, Artificial Sequence
  Description of Artificial Sequence: Synthetic oligonucleotide
gacaccucgaugugauccc

SEQ ID NO: 1208174 - RNA, 19 nt, Artificial Sequence
  Description of Artificial Sequence: Synthetic oligonucleotide
uuucgcuugcauucacggc

SEQ ID NO: 1208175 - RNA, 19 nt, Artificial Sequence
  Description of Artificial Sequence: Synthetic oligonucleotide
cucguacuccuucauggcc

SEQ ID NO: 1208176 - RNA, 19 nt, Artificial Sequence
  Description of Artificial Sequence: Synthetic oligonucleotide
cucguacuuuucaacgaag

SEQ ID NO: 1208177 - RNA, 19 nt, Artificial Sequence
  Description of Artificial Sequence: Synthetic oligonucleotide
cugaggguguccacguucc

SEQ ID NO: 1208178 - RNA, 19 nt, Artificial Sequence
  Description of Artificial Sequence: Synthetic oligonucleotide
ucggcuaccuuucgcuugc

SEQ ID NO: 1208179 - RNA, 19 nt, Artificial Sequence
  Description of Artificial Sequence: Synthetic oligonucleotide
auucacggcagccccgguc

SEQ ID NO: 1208180 - RNA, 19 nt, Artificial Sequence
  Description of Artificial Sequence: Synthetic oligonucleotide
uguguauccccaacccagu

SEQ ID NO: 1208181 - RNA, 19 nt, Artificial Sequence
  Description of Artificial Sequence: Synthetic oligonucleotide
uucggcuaccuuucgcuug

SEQ ID NO: 1208182 - RNA, 19 nt, Artificial Sequence
  Description of Artificial Sequence: Synthetic oligonucleotide
ucaccuagguucacucucu

SEQ ID NO: 1208183 - RNA, 19 nt, Artificial Sequence
  Description of Artificial Sequence: Synthetic oligonucleotide
uccucaucguccgacaccu

SEQ ID NO: 1208184 - RNA, 19 nt, Artificial Sequence
  Description of Artificial Sequence: Synthetic oligonucleotide
cugacgucuuucucguugc

SEQ ID NO: 1208185 - RNA, 19 nt, Artificial Sequence
  Description of Artificial Sequence: Synthetic oligonucleotide
aaacuuggcaucaguggga

SEQ ID NO: 1208186 - RNA, 19 nt, Artificial Sequence
  Description of Artificial Sequence: Synthetic oligonucleotide
aacgcugcaugugaaacuu

SEQ ID NO: 1208187 - RNA, 19 nt, Artificial Sequence
  Description of Artificial Sequence: Synthetic oligonucleotide
uucguauuugaagcccucc

SEQ ID NO: 1208188 - RNA, 19 nt, Artificial Sequence
  Description of Artificial Sequence: Synthetic oligonucleotide
aagcccuccauguacuguu

SEQ ID NO: 1208189 - RNA, 19 nt, Artificial Sequence
  Description of Artificial Sequence: Synthetic oligonucleotide
cagcggaagaggcuggccg

SEQ ID NO: 1208190 - RNA, 19 nt, Artificial Sequence
  Description of Artificial Sequence: Synthetic oligonucleotide
uguaguccaccaucuucgc

SEQ ID NO: 1208191 - RNA, 19 nt, Artificial Sequence
  Description of Artificial Sequence: Synthetic oligonucleotide
cacggggcaagccaugggc

SEQ ID NO: 1208192 - RNA, 19 nt, Artificial Sequence
  Description of Artificial Sequence: Synthetic oligonucleotide
uccgacaccucgaugugau

SEQ ID NO: 1208193 - RNA, 19 nt, Artificial Sequence
  Description of Artificial Sequence: Synthetic oligonucleotide
uauugacuaugcucuugcu

SEQ ID NO: 1208194 - RNA, 19 nt, Artificial Sequence
  Description of Artificial Sequence: Synthetic oligonucleotide
ucuucgccuaggaggcccg

SEQ ID NO: 1208195 - RNA, 19 nt, Artificial Sequence
  Description of Artificial Sequence: Synthetic oligonucleotide
ucguugcccgcuuugggga

SEQ ID NO: 1208196 - RNA, 19 nt, Artificial Sequence
  Description of Artificial Sequence: Synthetic oligonucleotide
cuaccugcuccaucagugc

SEQ ID NO: 1208197 - RNA, 19 nt, Artificial Sequence
  Description of Artificial Sequence: Synthetic oligonucleotide
gcuagggacaggcuggaag

SEQ ID NO: 1208198 - RNA, 19 nt, Artificial Sequence
  Description of Artificial Sequence: Synthetic oligonucleotide
ucucuugccuccucugagu

SEQ ID NO: 1208199 - RNA, 19 nt, Artificial Sequence
  Description of Artificial Sequence: Synthetic oligonucleotide
guguccacguuccagggca

SEQ ID NO: 1208200 - RNA, 19 nt, Artificial Sequence
  Description of Artificial Sequence: Synthetic oligonucleotide
agauaaccagguaguuggc

SEQ ID NO: 1208201 - RNA, 19 nt, Artificial Sequence
  Description of Artificial Sequence: Synthetic oligonucleotide
gaagggucacgcacugacg

SEQ ID NO: 1208202 - RNA, 19 nt, Artificial Sequence
  Description of Artificial Sequence: Synthetic oligonucleotide
uuucaacgaaggucuugug

SEQ ID NO: 1208203 - RNA, 19 nt, Artificial Sequence
  Description of Artificial Sequence: Synthetic oligonucleotide
caguucguauuugaagccc

SEQ ID NO: 1208204 - RNA, 19 nt, Artificial Sequence
  Description of Artificial Sequence: Synthetic oligonucleotide
acggggaucgaccuucaga

SEQ ID NO: 1208205 - RNA, 19 nt, Artificial Sequence
  Description of Artificial Sequence: Synthetic oligonucleotide
gaaucgaugcaacgcugca

SEQ ID NO: 1208206 - RNA, 19 nt, Artificial Sequence
  Description of Artificial Sequence: Synthetic oligonucleotide
cagaaucgaugcaacgcug

SEQ ID NO: 1208207 - RNA, 19 nt, Artificial Sequence
  Description of Artificial Sequence: Synthetic oligonucleotide
uaggaacauggugucuagg

SEQ ID NO: 1208208 - RNA, 19 nt, Artificial Sequence
  Description of Artificial Sequence: Synthetic oligonucleotide
uggcauucggcuaccuuuc

SEQ ID NO: 1208209 - RNA, 19 nt, Artificial Sequence
  Description of Artificial Sequence: Synthetic oligonucleotide
aaucgaugcaacgcugcau

SEQ ID NO: 1208210 - RNA, 19 nt, Artificial Sequence
  Description of Artificial Sequence: Synthetic oligonucleotide
ucgauguuggggugcgucu

SEQ ID NO: 1208211 - RNA, 19 nt, Artificial Sequence
  Description of Artificial Sequence: Synthetic oligonucleotide
cagggacucauagaccucc

SEQ ID NO: 1208212 - RNA, 19 nt, Artificial Sequence
  Description of Artificial Sequence: Synthetic oligonucleotide
aacuuggcaucagugggau

SEQ ID NO: 1208213 - RNA, 19 nt, Artificial Sequence
  Description of Artificial Sequence: Synthetic oligonucleotide
gagcuaggaacaugguguc

SEQ ID NO: 1208214 - RNA, 19 nt, Artificial Sequence
  Description of Artificial Sequence: Synthetic oligonucleotide
gggaucgaccuucagacuc

SEQ ID NO: 1208215 - RNA, 19 nt, Artificial Sequence
  Description of Artificial Sequence: Synthetic oligonucleotide
aaacgcuguaguccaccau

SEQ ID NO: 1208216 - RNA, 19 nt, Artificial Sequence
  Description of Artificial Sequence: Synthetic oligonucleotide
gacacggggcaagccaugg

SEQ ID NO: 1208217 - RNA, 19 nt, Artificial Sequence
  Description of Artificial Sequence: Synthetic oligonucleotide
aauggguccccggggcccg

SEQ ID NO: 1208218 - RNA, 19 nt, Artificial Sequence
  Description of Artificial Sequence: Synthetic oligonucleotide
agcaccuggaacuguuuau

SEQ ID NO: 1208219 - RNA, 19 nt, Artificial Sequence
  Description of Artificial Sequence: Synthetic oligonucleotide
ucuggugagcuaccugcuc

SEQ ID NO: 1208220 - RNA, 19 nt, Artificial Sequence
  Description of Artificial Sequence: Synthetic oligonucleotide
uggugagcuaccugcucca

SEQ ID NO: 1208221 - RNA, 19 nt, Artificial Sequence
  Description of Artificial Sequence: Synthetic oligonucleotide
guaguccaccaucuucgcc

SEQ ID NO: 1208222 - RNA, 19 nt, Artificial Sequence
  Description of Artificial Sequence: Synthetic oligonucleotide
uaguuggcggucuccucgc

SEQ ID NO: 1208223 - RNA, 19 nt, Artificial Sequence
  Description of Artificial Sequence: Synthetic oligonucleotide
auuugaagcccuccaugua

SEQ ID NO: 1208224 - RNA, 19 nt, Artificial Sequence
  Description of Artificial Sequence: Synthetic oligonucleotide
agggucacgcacugacguc

SEQ ID NO: 1208225 - RNA, 19 nt, Artificial Sequence
  Description of Artificial Sequence: Synthetic oligonucleotide
uguuggucggcggucuuga

SEQ ID NO: 1208226 - RNA, 19 nt, Artificial Sequence
  Description of Artificial Sequence: Synthetic oligonucleotide
ugauauugacuaugcucuu

SEQ ID NO: 1208227 - RNA, 19 nt, Artificial Sequence
  Description of Artificial Sequence: Synthetic oligonucleotide
ggagcuaggaacauggugu

SEQ ID NO: 1208228 - RNA, 19 nt, Artificial Sequence
  Description of Artificial Sequence: Synthetic oligonucleotide
caguggaccaaccuggcaa

SEQ ID NO: 1208229 - RNA, 19 nt, Artificial Sequence
  Description of Artificial Sequence: Synthetic oligonucleotide
gacuaugcucuugcugaag

SEQ ID NO: 1208230 - RNA, 19 nt, Artificial Sequence
  Description of Artificial Sequence: Synthetic oligonucleotide
cgcacugacgucuuucucg

SEQ ID NO: 1208231 - RNA, 19 nt, Artificial Sequence
  Description of Artificial Sequence: Synthetic oligonucleotide
uggugucuagguuuccuuu

SEQ ID NO: 1208232 - RNA, 19 nt, Artificial Sequence
  Description of Artificial Sequence: Synthetic oligonucleotide
uuggggugcgucucguccu

SEQ ID NO: 1208233 - RNA, 19 nt, Artificial Sequence
  Description of Artificial Sequence: Synthetic oligonucleotide
agguacuucuggcugucau

SEQ ID NO: 1208234 - RNA, 19 nt, Artificial Sequence
  Description of Artificial Sequence: Synthetic oligonucleotide
cauguguauccccaaccca

SEQ ID NO: 1208235 - RNA, 19 nt, Artificial Sequence
  Description of Artificial Sequence: Synthetic oligonucleotide
ugacuaugcucuugcugaa

SEQ ID NO: 1208236 - RNA, 19 nt, Artificial Sequence
  Description of Artificial Sequence: Synthetic oligonucleotide
agcuucgcuccuccuugcg

SEQ ID NO: 1208237 - RNA, 19 nt, Artificial Sequence
  Description of Artificial Sequence: Synthetic oligonucleotide
uggaccaaccuggcaacug

SEQ ID NO: 1208238 - RNA, 19 nt, Artificial Sequence
  Description of Artificial Sequence: Synthetic oligonucleotide
ccaguucguauuugaagcc

SEQ ID NO: 1208239 - RNA, 19 nt, Artificial Sequence
  Description of Artificial Sequence: Synthetic oligonucleotide
auuagacauuguugccagu

SEQ ID NO: 1208240 - RNA, 19 nt, Artificial Sequence
  Description of Artificial Sequence: Synthetic oligonucleotide
agaaagcuagacagaagaa

SEQ ID NO: 1208241 - RNA, 19 nt, Artificial Sequence
  Description of Artificial Sequence: Synthetic oligonucleotide
gcagccccgguccaguucg

SEQ ID NO: 1208242 - RNA, 19 nt, Artificial Sequence
  Description of Artificial Sequence: Synthetic oligonucleotide
ggaccaaccuggcaacugc

SEQ ID NO: 1208243 - RNA, 19 nt, Artificial Sequence
  Description of Artificial Sequence: Synthetic oligonucleotide
agcaugccgaaaugcuuga

SEQ ID NO: 1208244 - RNA, 19 nt, Artificial Sequence
  Description of Artificial Sequence: Synthetic oligonucleotide
acgcacugacgucuuucuc

SEQ ID NO: 1208245 - RNA, 19 nt, Artificial Sequence
  Description of Artificial Sequence: Synthetic oligonucleotide
aggcagggacucauagacc

SEQ ID NO: 1208246 - RNA, 19 nt, Artificial Sequence
  Description of Artificial Sequence: Synthetic oligonucleotide
caggcccugcccauuuggg

SEQ ID NO: 1208247 - RNA, 19 nt, Artificial Sequence
  Description of Artificial Sequence: Synthetic oligonucleotide
gugucuagguuuccuuuuc

SEQ ID NO: 1208248 - RNA, 19 nt, Artificial Sequence
  Description of Artificial Sequence: Synthetic oligonucleotide
guguauccccaacccagug

SEQ ID NO: 1208249 - RNA, 19 nt, Artificial Sequence
  Description of Artificial Sequence: Synthetic oligonucleotide
acacggggcaagccauggg

SEQ ID NO: 1208250 - RNA, 19 nt, Artificial Sequence
  Description of Artificial Sequence: Synthetic oligonucleotide
cccagaaucgaugcaacgc

SEQ ID NO: 1208251 - RNA, 19 nt, Artificial Sequence
  Description of Artificial Sequence: Synthetic oligonucleotide
uggcugucgggacucuggu

SEQ ID NO: 1208252 - RNA, 19 nt, Artificial Sequence
  Description of Artificial Sequence: Synthetic oligonucleotide
auggugucuagguuuccuu

SEQ ID NO: 1208253 - RNA, 19 nt, Artificial Sequence
  Description of Artificial Sequence: Synthetic oligonucleotide
cauucggcuaccuuucgcu

SEQ ID NO: 1208254 - RNA, 19 nt, Artificial Sequence
  Description of Artificial Sequence: Synthetic oligonucleotide
ccuggaacuguuuauuaga

SEQ ID NO: 1208255 - RNA, 19 nt, Artificial Sequence
  Description of Artificial Sequence: Synthetic oligonucleotide
ucacgcacugacgucuuuc

SEQ ID NO: 1208256 - RNA, 19 nt, Artificial Sequence
  Description of Artificial Sequence: Synthetic oligonucleotide
cggggaucgaccuucagac

SEQ ID NO: 1208257 - RNA, 19 nt, Artificial Sequence
  Description of Artificial Sequence: Synthetic oligonucleotide
ugcgucucguccucaucgu

SEQ ID NO: 1208258 - RNA, 19 nt, Artificial Sequence
  Description of Artificial Sequence: Synthetic oligonucleotide
uaccuuucgcuugcauuca

SEQ ID NO: 1208259 - RNA, 19 nt, Artificial Sequence
  Description of Artificial Sequence: Synthetic oligonucleotide
acuguuuauuagacauugu

SEQ ID NO: 1208260 - RNA, 19 nt, Artificial Sequence
  Description of Artificial Sequence: Synthetic oligonucleotide
ugcuccaucagugcacauu

SEQ ID NO: 1208261 - RNA, 19 nt, Artificial Sequence
  Description of Artificial Sequence: Synthetic oligonucleotide
gacagguacuucuggcugu

SEQ ID NO: 1208262 - RNA, 19 nt, Artificial Sequence
  Description of Artificial Sequence: Synthetic oligonucleotide
uugcguuggcauucggcua

SEQ ID NO: 1208263 - RNA, 19 nt, Artificial Sequence
  Description of Artificial Sequence: Synthetic oligonucleotide
cgcugcaugugaaacuugg

SEQ ID NO: 1208264 - RNA, 19 nt, Artificial Sequence
  Description of Artificial Sequence: Synthetic oligonucleotide
uuugcacguccuucacauc

SEQ ID NO: 1208265 - RNA, 19 nt, Artificial Sequence
  Description of Artificial Sequence: Synthetic oligonucleotide
cauuugcacguccuucaca

SEQ ID NO: 1208266 - RNA, 19 nt, Artificial Sequence
  Description of Artificial Sequence: Synthetic oligonucleotide
auucggcuaccuuucgcuu

SEQ ID NO: 1208267 - RNA, 19 nt, Artificial Sequence
  Description of Artificial Sequence: Synthetic oligonucleotide
ggccgugucgauguugggg

SEQ ID NO: 1208268 - RNA, 19 nt, Artificial Sequence
  Description of Artificial Sequence: Synthetic oligonucleotide
accucgaugugaucccaaa

SEQ ID NO: 1208269 - RNA, 19 nt, Artificial Sequence
  Description of Artificial Sequence: Synthetic oligonucleotide
caccagauaaccagguagu

SEQ ID NO: 1208270 - RNA, 19 nt, Artificial Sequence
  Description of Artificial Sequence: Synthetic oligonucleotide
gccuaggaggcccggauug

SEQ ID NO: 1208271 - RNA, 19 nt, Artificial Sequence
  Description of Artificial Sequence: Synthetic oligonucleotide
cuuuggggacggcuuccag

SEQ ID NO: 1208272 - RNA, 19 nt, Artificial Sequence
  Description of Artificial Sequence: Synthetic oligonucleotide
caauggguccccggggccc

SEQ ID NO: 1208273 - RNA, 19 nt, Artificial Sequence
  Description of Artificial Sequence: Synthetic oligonucleotide
ucgccuaggaggcccggau

SEQ ID NO: 1208274 - RNA, 19 nt, Artificial Sequence
  Description of Artificial Sequence: Synthetic oligonucleotide
ucuuucucguugcccgcuu

SEQ ID NO: 1208275 - RNA, 19 nt, Artificial Sequence
  Description of Artificial Sequence: Synthetic oligonucleotide
aggcccugcccauuuggga

SEQ ID NO: 1208276 - RNA, 19 nt, Artificial Sequence
  Description of Artificial Sequence: Synthetic oligonucleotide
gcccagaaucgaugcaacg

SEQ ID NO: 1208277 - RNA, 19 nt, Artificial Sequence
  Description of Artificial Sequence: Synthetic oligonucleotide
ggguguccacguuccaggg

SEQ ID NO: 1208278 - RNA, 19 nt, Artificial Sequence
  Description of Artificial Sequence: Synthetic oligonucleotide
gcaacgcugcaugugaaac

SEQ ID NO: 1208279 - RNA, 19 nt, Artificial Sequence
  Description of Artificial Sequence: Synthetic oligonucleotide
gucaucccagcgguggagc

SEQ ID NO: 1208280 - RNA, 19 nt, Artificial Sequence
  Description of Artificial Sequence: Synthetic oligonucleotide
guuggcggucuccucgcac

SEQ ID NO: 1208281 - RNA, 19 nt, Artificial Sequence
  Description of Artificial Sequence: Synthetic oligonucleotide
gucgauguuggggugcguc

SEQ ID NO: 1208282 - RNA, 19 nt, Artificial Sequence
  Description of Artificial Sequence: Synthetic oligonucleotide
agcuugcguuggcauucgg

SEQ ID NO: 1208283 - RNA, 19 nt, Artificial Sequence
  Description of Artificial Sequence: Synthetic oligonucleotide
cacguuccagggcaugcuc

SEQ ID NO: 1208284 - RNA, 19 nt, Artificial Sequence
  Description of Artificial Sequence: Synthetic oligonucleotide
ggucaaugcaccagauaac

SEQ ID NO: 1208285 - RNA, 19 nt, Artificial Sequence
  Description of Artificial Sequence: Synthetic oligonucleotide
ccauuugggaacaugugua

SEQ ID NO: 1208286 - RNA, 19 nt, Artificial Sequence
  Description of Artificial Sequence: Synthetic oligonucleotide
uuggcacggccccgcacac

SEQ ID NO: 1208287 - RNA, 19 nt, Artificial Sequence
  Description of Artificial Sequence: Synthetic oligonucleotide
gcugaggguguccacguuc

SEQ ID NO: 1208288 - RNA, 19 nt, Artificial Sequence
  Description of Artificial Sequence: Synthetic oligonucleotide
cuagguucacucucugccu

SEQ ID NO: 1208289 - RNA, 19 nt, Artificial Sequence
  Description of Artificial Sequence: Synthetic oligonucleotide
uugcccgcuuuggggacgg

SEQ ID NO: 1208290 - RNA, 19 nt, Artificial Sequence
  Description of Artificial Sequence: Synthetic oligonucleotide
ggcauucggcuaccuuucg

SEQ ID NO: 1208291 - RNA, 19 nt, Artificial Sequence
  Description of Artificial Sequence: Synthetic oligonucleotide
gcauucggcuaccuuucgc

SEQ ID NO: 1208292 - RNA, 19 nt, Artificial Sequence
  Description of Artificial Sequence: Synthetic oligonucleotide
uggccgugucgauguuggg

SEQ ID NO: 1208293 - RNA, 19 nt, Artificial Sequence
  Description of Artificial Sequence: Synthetic oligonucleotide
gguguccacguuccagggc

SEQ ID NO: 1208294 - RNA, 19 nt, Artificial Sequence
  Description of Artificial Sequence: Synthetic oligonucleotide
gcuugcauucacggcagcc

SEQ ID NO: 1208295 - RNA, 19 nt, Artificial Sequence
  Description of Artificial Sequence: Synthetic oligonucleotide
caccuagguucacucucug

SEQ ID NO: 1208296 - RNA, 19 nt, Artificial Sequence
  Description of Artificial Sequence: Synthetic oligonucleotide
uggggugcgucucguccuc

SEQ ID NO: 1208297 - RNA, 19 nt, Artificial Sequence
  Description of Artificial Sequence: Synthetic oligonucleotide
ggaacauguguauccccaa

SEQ ID NO: 1208298 - RNA, 19 nt, Artificial Sequence
  Description of Artificial Sequence: Synthetic oligonucleotide
gcuucgcuccuccuugcgc

SEQ ID NO: 1208299 - RNA, 19 nt, Artificial Sequence
  Description of Artificial Sequence: Synthetic oligonucleotide
uguccacguuccagggcau

SEQ ID NO: 1208300 - RNA, 19 nt, Artificial Sequence
  Description of Artificial Sequence: Synthetic oligonucleotide
agcgguggagcaugccgaa

SEQ ID NO: 1208301 - RNA, 19 nt, Artificial Sequence
  Description of Artificial Sequence: Synthetic oligonucleotide
gcauucacggcagccccgg

SEQ ID NO: 1208302 - RNA, 19 nt, Artificial Sequence
  Description of Artificial Sequence: Synthetic oligonucleotide
ggaggcccggauuggcucc

SEQ ID NO: 1208303 - RNA, 19 nt, Artificial Sequence
  Description of Artificial Sequence: Synthetic oligonucleotide
aggccuccaguucguauuu

SEQ ID NO: 1208304 - RNA, 19 nt, Artificial Sequence
  Description of Artificial Sequence: Synthetic oligonucleotide
ggggacacggggcaagcca

SEQ ID NO: 1208305 - RNA, 19 nt, Artificial Sequence
  Description of Artificial Sequence: Synthetic oligonucleotide
cugcccauuugggaacaug

SEQ ID NO: 1208306 - RNA, 19 nt, Artificial Sequence
  Description of Artificial Sequence: Synthetic oligonucleotide
ccauggucuggugagcuac

SEQ ID NO: 1208307 - RNA, 19 nt, Artificial Sequence
  Description of Artificial Sequence: Synthetic oligonucleotide
ccaggacuuuggcauaaug

SEQ ID NO: 1208308 - RNA, 19 nt, Artificial Sequence
  Description of Artificial Sequence: Synthetic oligonucleotide
uucgccuaggaggcccgga

SEQ ID NO: 1208309 - RNA, 19 nt, Artificial Sequence
  Description of Artificial Sequence: Synthetic oligonucleotide
gcaggcacggggaucgacc

SEQ ID NO: 1208310 - RNA, 19 nt, Artificial Sequence
  Description of Artificial Sequence: Synthetic oligonucleotide
guacuguuggucggcgguc

SEQ ID NO: 1208311 - RNA, 19 nt, Artificial Sequence
  Description of Artificial Sequence: Synthetic oligonucleotide
aguuggcggucuccucgca

SEQ ID NO: 1208312 - RNA, 19 nt, Artificial Sequence
  Description of Artificial Sequence: Synthetic oligonucleotide
gccucaaacagcauugagu

SEQ ID NO: 1208313 - RNA, 19 nt, Artificial Sequence
  Description of Artificial Sequence: Synthetic oligonucleotide
acggccccgcacacgcucc

SEQ ID NO: 1208314 - RNA, 19 nt, Artificial Sequence
  Description of Artificial Sequence: Synthetic oligonucleotide
acggggcaagccaugggcu

SEQ ID NO: 1208315 - RNA, 19 nt, Artificial Sequence
  Description of Artificial Sequence: Synthetic oligonucleotide
accauggucuggugagcua

SEQ ID NO: 1208316 - RNA, 19 nt, Artificial Sequence
  Description of Artificial Sequence: Synthetic oligonucleotide
cagcuugcguuggcauucg

SEQ ID NO: 1208317 - RNA, 19 nt, Artificial Sequence
  Description of Artificial Sequence: Synthetic oligonucleotide
acaccucgaugugauccca

SEQ ID NO: 1208318 - RNA, 19 nt, Artificial Sequence
  Description of Artificial Sequence: Synthetic oligonucleotide
gucggcggucuugaucuug

SEQ ID NO: 1208319 - RNA, 19 nt, Artificial Sequence
  Description of Artificial Sequence: Synthetic oligonucleotide
ggcacggggaucgaccuuc

SEQ ID NO: 1208320 - RNA, 19 nt, Artificial Sequence
  Description of Artificial Sequence: Synthetic oligonucleotide
ugcugaggguguccacguu

SEQ ID NO: 1208321 - RNA, 19 nt, Artificial Sequence
  Description of Artificial Sequence: Synthetic oligonucleotide
cacgcuccuuaaaggccuc

SEQ ID NO: 1208322 - RNA, 19 nt, Artificial Sequence
  Description of Artificial Sequence: Synthetic oligonucleotide
ccagaaucgaugcaacgcu

SEQ ID NO: 1208323 - RNA, 19 nt, Artificial Sequence
  Description of Artificial Sequence: Synthetic oligonucleotide
caggucaaugcaccagaua

SEQ ID NO: 1208324 - RNA, 19 nt, Artificial Sequence
  Description of Artificial Sequence: Synthetic oligonucleotide
gcccauuugggaacaugug

SEQ ID NO: 1208325 - RNA, 19 nt, Artificial Sequence
  Description of Artificial Sequence: Synthetic oligonucleotide
caucuucgccuaggaggcc

SEQ ID NO: 1208326 - RNA, 19 nt, Artificial Sequence
  Description of Artificial Sequence: Synthetic oligonucleotide
gcucuugcugaagccgucc

SEQ ID NO: 1208327 - RNA, 19 nt, Artificial Sequence
  Description of Artificial Sequence: Synthetic oligonucleotide
acuguuggucggcggucuu

SEQ ID NO: 1208328 - RNA, 19 nt, Artificial Sequence
  Description of Artificial Sequence: Synthetic oligonucleotide
cacgcacugacgucuuucu

SEQ ID NO: 1208329 - RNA, 19 nt, Artificial Sequence
  Description of Artificial Sequence: Synthetic oligonucleotide
gcuugauauugacuaugcu

SEQ ID NO: 1208330 - RNA, 19 nt, Artificial Sequence
  Description of Artificial Sequence: Synthetic oligonucleotide
ccaugcgcuccacucgggc

SEQ ID NO: 1208331 - RNA, 19 nt, Artificial Sequence
  Description of Artificial Sequence: Synthetic oligonucleotide
gcuaccuuucgcuugcauu

SEQ ID NO: 1208332 - RNA, 19 nt, Artificial Sequence
  Description of Artificial Sequence: Synthetic oligonucleotide
cacucgggccuggugccgc

SEQ ID NO: 1208333 - RNA, 19 nt, Artificial Sequence
  Description of Artificial Sequence: Synthetic oligonucleotide
cacggggaucgaccuucag

SEQ ID NO: 1208334 - RNA, 19 nt, Artificial Sequence
  Description of Artificial Sequence: Synthetic oligonucleotide
caacccaguggaccaaccu

SEQ ID NO: 1208335 - RNA, 19 nt, Artificial Sequence
  Description of Artificial Sequence: Synthetic oligonucleotide
cuucgccuaggaggcccgg

SEQ ID NO: 1208336 - RNA, 19 nt, Artificial Sequence
  Description of Artificial Sequence: Synthetic oligonucleotide
guccaccaucuucgccuag

SEQ ID NO: 1208337 - RNA, 19 nt, Artificial Sequence
  Description of Artificial Sequence: Synthetic oligonucleotide
gaccaaccuggcaacugcu

SEQ ID NO: 1208338 - RNA, 19 nt, Artificial Sequence
  Description of Artificial Sequence: Synthetic oligonucleotide
cagcucgcagccgcucaag

SEQ ID NO: 1208339 - RNA, 19 nt, Artificial Sequence
  Description of Artificial Sequence: Synthetic oligonucleotide
ugucgauguuggggugcgu

SEQ ID NO: 1208340 - RNA, 19 nt, Artificial Sequence
  Description of Artificial Sequence: Synthetic oligonucleotide
caggcacggggaucgaccu

SEQ ID NO: 1208341 - RNA, 19 nt, Artificial Sequence
  Description of Artificial Sequence: Synthetic oligonucleotide
caccucgaugugaucccaa

SEQ ID NO: 1208342 - RNA, 19 nt, Artificial Sequence
  Description of Artificial Sequence: Synthetic oligonucleotide
cucagcuugcguuggcauu

SEQ ID NO: 1208343 - RNA, 19 nt, Artificial Sequence
  Description of Artificial Sequence: Synthetic oligonucleotide
gcuggccgugucgauguug

SEQ ID NO: 1208344 - RNA, 19 nt, Artificial Sequence
  Description of Artificial Sequence: Synthetic oligonucleotide
gugcuagggacaggcugga

SEQ ID NO: 1208345 - RNA, 19 nt, Artificial Sequence
  Description of Artificial Sequence: Synthetic oligonucleotide
cccgaagcagaaagucuga

SEQ ID NO: 1208346 - RNA, 19 nt, Artificial Sequence
  Description of Artificial Sequence: Synthetic oligonucleotide
ccgccagcggaagaggcug

SEQ ID NO: 1208347 - RNA, 19 nt, Artificial Sequence
  Description of Artificial Sequence: Synthetic oligonucleotide
ccagguggacauugucuga

SEQ ID NO: 1208348 - RNA, 19 nt, Artificial Sequence
  Description of Artificial Sequence: Synthetic oligonucleotide
aggcacggggaucgaccuu

SEQ ID NO: 1208349 - RNA, 19 nt, Artificial Sequence
  Description of Artificial Sequence: Synthetic oligonucleotide
cgaugcaacgcugcaugug

SEQ ID NO: 1208350 - RNA, 19 nt, Artificial Sequence
  Description of Artificial Sequence: Synthetic oligonucleotide
ggaucgaccuucagacucu

SEQ ID NO: 1208351 - RNA, 19 nt, Artificial Sequence
  Description of Artificial Sequence: Synthetic oligonucleotide
ggacacggggcaagccaug

SEQ ID NO: 1208352 - RNA, 19 nt, Artificial Sequence
  Description of Artificial Sequence: Synthetic oligonucleotide
caggagcuaggaacauggu

SEQ ID NO: 1208353 - RNA, 19 nt, Artificial Sequence
  Description of Artificial Sequence: Synthetic oligonucleotide
ggcagccccgguccaguuc

SEQ ID NO: 1208354 - RNA, 19 nt, Artificial Sequence
  Description of Artificial Sequence: Synthetic oligonucleotide
caucguccgacaccucgau

SEQ ID NO: 1208355 - RNA, 19 nt, Artificial Sequence
  Description of Artificial Sequence: Synthetic oligonucleotide
ccgugucgauguuggggug

SEQ ID NO: 1208356 - RNA, 19 nt, Artificial Sequence
  Description of Artificial Sequence: Synthetic oligonucleotide
ggggacggcuuccagcaau

SEQ ID NO: 1208357 - RNA, 19 nt, Artificial Sequence
  Description of Artificial Sequence: Synthetic oligonucleotide
cucccucaccuagguucac

SEQ ID NO: 1208358 - RNA, 19 nt, Artificial Sequence
  Description of Artificial Sequence: Synthetic oligonucleotide
ccgccuucagccacuucca

SEQ ID NO: 1208359 - RNA, 19 nt, Artificial Sequence
  Description of Artificial Sequence: Synthetic oligonucleotide
cagagccccucaacccgaa

SEQ ID NO: 1208360 - RNA, 19 nt, Artificial Sequence
  Description of Artificial Sequence: Synthetic oligonucleotide
cguccgacaccucgaugug

SEQ ID NO: 1208361 - RNA, 19 nt, Artificial Sequence
  Description of Artificial Sequence: Synthetic oligonucleotide
ggggaucgaccuucagacu

SEQ ID NO: 1208362 - RNA, 19 nt, Artificial Sequence
  Description of Artificial Sequence: Synthetic oligonucleotide
guggaccaaccuggcaacu

SEQ ID NO: 1208363 - RNA, 19 nt, Artificial Sequence
  Description of Artificial Sequence: Synthetic oligonucleotide
guuggucggcggucuugau

SEQ ID NO: 1208364 - RNA, 19 nt, Artificial Sequence
  Description of Artificial Sequence: Synthetic oligonucleotide
caccgccuucagccacuuc

SEQ ID NO: 1208365 - RNA, 19 nt, Artificial Sequence
  Description of Artificial Sequence: Synthetic oligonucleotide
ccgacaccucgaugugauc

SEQ ID NO: 1208366 - RNA, 19 nt, Artificial Sequence
  Description of Artificial Sequence: Synthetic oligonucleotide
ccucaccuagguucacucu

SEQ ID NO: 1208367 - RNA, 19 nt, Artificial Sequence
  Description of Artificial Sequence: Synthetic oligonucleotide
ugcccgcuuuggggacggc

SEQ ID NO: 1208368 - RNA, 19 nt, Artificial Sequence
  Description of Artificial Sequence: Synthetic oligonucleotide
caucccagcgguggagcau

SEQ ID NO: 1208369 - RNA, 19 nt, Artificial Sequence
  Description of Artificial Sequence: Synthetic oligonucleotide
ccucagcuugcguuggcau

SEQ ID NO: 1208370 - RNA, 19 nt, Artificial Sequence
  Description of Artificial Sequence: Synthetic oligonucleotide
gucacgcacugacgucuuu

SEQ ID NO: 1208371 - RNA, 19 nt, Artificial Sequence
  Description of Artificial Sequence: Synthetic oligonucleotide
cauucacggcagccccggu

SEQ ID NO: 1208372 - RNA, 19 nt, Artificial Sequence
  Description of Artificial Sequence: Synthetic oligonucleotide
cgcuugcauucacggcagc

SEQ ID NO: 1208373 - RNA, 19 nt, Artificial Sequence
  Description of Artificial Sequence: Synthetic oligonucleotide
gccccgcacacgcuccuua

SEQ ID NO: 1208374 - RNA, 19 nt, Artificial Sequence
  Description of Artificial Sequence: Synthetic oligonucleotide
ggcugucgggacucugguu

SEQ ID NO: 1208375 - RNA, 19 nt, Artificial Sequence
  Description of Artificial Sequence: Synthetic oligonucleotide
gcacggggaucgaccuuca

SEQ ID NO: 1208376 - RNA, 19 nt, Artificial Sequence
  Description of Artificial Sequence: Synthetic oligonucleotide
ccccgcacacgcuccuuaa

SEQ ID NO: 1208377 - RNA, 19 nt, Artificial Sequence
  Description of Artificial Sequence: Synthetic oligonucleotide
ggggugcgucucguccuca

SEQ ID NO: 1208378 - RNA, 19 nt, Artificial Sequence
  Description of Artificial Sequence: Synthetic oligonucleotide
cacugacgucuuucucguu

SEQ ID NO: 1208379 - RNA, 19 nt, Artificial Sequence
  Description of Artificial Sequence: Synthetic oligonucleotide
ccucaacccgaagcagaaa

SEQ ID NO: 1208380 - RNA, 19 nt, Artificial Sequence
  Description of Artificial Sequence: Synthetic oligonucleotide
gcgguggagcaugccgaaa

SEQ ID NO: 1208381 - RNA, 19 nt, Artificial Sequence
  Description of Artificial Sequence: Synthetic oligonucleotide
ggcuggccgugucgauguu

SEQ ID NO: 1208382 - RNA, 19 nt, Artificial Sequence
  Description of Artificial Sequence: Synthetic oligonucleotide
cgcuguaguccaccaucuu

SEQ ID NO: 1208383 - RNA, 19 nt, Artificial Sequence
  Description of Artificial Sequence: Synthetic oligonucleotide
cccaggacuuuggcauaau

SEQ ID NO: 1208384 - RNA, 19 nt, Artificial Sequence
  Description of Artificial Sequence: Synthetic oligonucleotide
cgccuaggaggcccggauu

SEQ ID NO: 1208385 - RNA, 19 nt, Artificial Sequence
  Description of Artificial Sequence: Synthetic oligonucleotide
cguuggcauucggcuaccu

SEQ ID NO: 1208386 - RNA, 19 nt, Artificial Sequence
  Description of Artificial Sequence: Synthetic oligonucleotide
cggcuaccuuucgcuugca

SEQ ID NO: 1208387 - RNA, 19 nt, Artificial Sequence
  Description of Artificial Sequence: Synthetic oligonucleotide
cggcagccccgguccaguu

SEQ ID NO: 1208388 - RNA, 19 nt, Artificial Sequence
  Description of Artificial Sequence: Synthetic oligonucleotide
acaacuuuagcgcacaggc

SEQ ID NO: 1208389 - RNA, 19 nt, Artificial Sequence
  Description of Artificial Sequence: Synthetic oligonucleotide
uauaaaaccuuucuuuugg

SEQ ID NO: 1208390 - RNA, 19 nt, Artificial Sequence
  Description of Artificial Sequence: Synthetic oligonucleotide
ucucacauaacucuaaugc

SEQ ID NO: 1208391 - RNA, 19 nt, Artificial Sequence
  Description of Artificial Sequence: Synthetic oligonucleotide
aauagguuaggguaucugg

SEQ ID NO: 1208392 - RNA, 19 nt, Artificial Sequence
  Description of Artificial Sequence: Synthetic oligonucleotide
uuaaauguugguaagacua

SEQ ID NO: 1208393 - RNA, 19 nt, Artificial Sequence
  Description of Artificial Sequence: Synthetic oligonucleotide
auagauauccacaagaaag

SEQ ID NO: 1208394 - RNA, 19 nt, Artificial Sequence
  Description of Artificial Sequence: Synthetic oligonucleotide
ugcuuuauuaagaaugucc

SEQ ID NO: 1208395 - RNA, 19 nt, Artificial Sequence
  Description of Artificial Sequence: Synthetic oligonucleotide
aaacccgucguccauaggg

SEQ ID NO: 1208396 - RNA, 19 nt, Artificial Sequence
  Description of Artificial Sequence: Synthetic oligonucleotide
ucuaguuuuauacuccugc

SEQ ID NO: 1208397 - RNA, 19 nt, Artificial Sequence
  Description of Artificial Sequence: Synthetic oligonucleotide
uacuaauuugaucauuucc

SEQ ID NO: 1208398 - RNA, 19 nt, Artificial Sequence
  Description of Artificial Sequence: Synthetic oligonucleotide
aacucaauagcaucccggg

SEQ ID NO: 1208399 - RNA, 19 nt, Artificial Sequence
  Description of Artificial Sequence: Synthetic oligonucleotide
ugcaaaaucccuuucaagu

SEQ ID NO: 1208400 - RNA, 19 nt, Artificial Sequence
  Description of Artificial Sequence: Synthetic oligonucleotide
uuguaaaucgagcaguuga

SEQ ID NO: 1208401 - RNA, 19 nt, Artificial Sequence
  Description of Artificial Sequence: Synthetic oligonucleotide
aguuauuucucacauccuc

SEQ ID NO: 1208402 - RNA, 19 nt, Artificial Sequence
  Description of Artificial Sequence: Synthetic oligonucleotide
gauuuaauagguuagggua

SEQ ID NO: 1208403 - RNA, 19 nt, Artificial Sequence
  Description of Artificial Sequence: Synthetic oligonucleotide
aaugacccacugucgaugc

SEQ ID NO: 1208404 - RNA, 19 nt, Artificial Sequence
  Description of Artificial Sequence: Synthetic oligonucleotide
auacuccugcguuagaggc

SEQ ID NO: 1208405 - RNA, 19 nt, Artificial Sequence
  Description of Artificial Sequence: Synthetic oligonucleotide
agcucauuaucccauaguc

SEQ ID NO: 1208406 - RNA, 19 nt, Artificial Sequence
  Description of Artificial Sequence: Synthetic oligonucleotide
uugagagggaucuuuaagc

SEQ ID NO: 1208407 - RNA, 19 nt, Artificial Sequence
  Description of Artificial Sequence: Synthetic oligonucleotide
uaacucaauagcaucccgg

SEQ ID NO: 1208408 - RNA, 19 nt, Artificial Sequence
  Description of Artificial Sequence: Synthetic oligonucleotide
uugguaagacuacaaaagc

SEQ ID NO: 1208409 - RNA, 19 nt, Artificial Sequence
  Description of Artificial Sequence: Synthetic oligonucleotide
aacuuuagcgcacaggcaa

SEQ ID NO: 1208410 - RNA, 19 nt, Artificial Sequence
  Description of Artificial Sequence: Synthetic oligonucleotide
ugcguuuaacucaauagca

SEQ ID NO: 1208411 - RNA, 19 nt, Artificial Sequence
  Description of Artificial Sequence: Synthetic oligonucleotide
uccaauauaucuccaauau

SEQ ID NO: 1208412 - RNA, 19 nt, Artificial Sequence
  Description of Artificial Sequence: Synthetic oligonucleotide
guugguaagacuacaaaag

SEQ ID NO: 1208413 - RNA, 19 nt, Artificial Sequence
  Description of Artificial Sequence: Synthetic oligonucleotide
ugguaugucacuuucucug

SEQ ID NO: 1208414 - RNA, 19 nt, Artificial Sequence
  Description of Artificial Sequence: Synthetic oligonucleotide
ugauuuaauagguuagggu

SEQ ID NO: 1208415 - RNA, 19 nt, Artificial Sequence
  Description of Artificial Sequence: Synthetic oligonucleotide
cacaagaaaggcaauuagg

SEQ ID NO: 1208416 - RNA, 19 nt, Artificial Sequence
  Description of Artificial Sequence: Synthetic oligonucleotide
uaguugguuacagugauag

SEQ ID NO: 1208417 - RNA, 19 nt, Artificial Sequence
  Description of Artificial Sequence: Synthetic oligonucleotide
ugguaagacuacaaaagca

SEQ ID NO: 1208418 - RNA, 19 nt, Artificial Sequence
  Description of Artificial Sequence: Synthetic oligonucleotide
uauaucagcccauucugcc

SEQ ID NO: 1208419 - RNA, 19 nt, Artificial Sequence
  Description of Artificial Sequence: Synthetic oligonucleotide
agcagcaguuccuuuaugg

SEQ ID NO: 1208420 - RNA, 19 nt, Artificial Sequence
  Description of Artificial Sequence: Synthetic oligonucleotide
uguugguaagacuacaaaa

SEQ ID NO: 1208421 - RNA, 19 nt, Artificial Sequence
  Description of Artificial Sequence: Synthetic oligonucleotide
auuaugugguacuaauuug

SEQ ID NO: 1208422 - RNA, 19 nt, Artificial Sequence
  Description of Artificial Sequence: Synthetic oligonucleotide
uuuggcauuaguugguuac

SEQ ID NO: 1208423 - RNA, 19 nt, Artificial Sequence
  Description of Artificial Sequence: Synthetic oligonucleotide
gagcuuaaaggcucguucg

SEQ ID NO: 1208424 - RNA, 19 nt, Artificial Sequence
  Description of Artificial Sequence: Synthetic oligonucleotide
uccacuaauacucuccuau

SEQ ID NO: 1208425 - RNA, 19 nt, Artificial Sequence
  Description of Artificial Sequence: Synthetic oligonucleotide
ugagagggaucuuuaagcc

SEQ ID NO: 1208426 - RNA, 19 nt, Artificial Sequence
  Description of Artificial Sequence: Synthetic oligonucleotide
uuauagauacaugugauuu

SEQ ID NO: 1208427 - RNA, 19 nt, Artificial Sequence
  Description of Artificial Sequence: Synthetic oligonucleotide
uauacuccugcguuagagg

SEQ ID NO: 1208428 - RNA, 19 nt, Artificial Sequence
  Description of Artificial Sequence: Synthetic oligonucleotide
aagugaccuuaagagaacc

SEQ ID NO: 1208429 - RNA, 19 nt, Artificial Sequence
  Description of Artificial Sequence: Synthetic oligonucleotide
auaucagcccauucugccc

SEQ ID NO: 1208430 - RNA, 19 nt, Artificial Sequence
  Description of Artificial Sequence: Synthetic oligonucleotide
cuuagagcuagucugaaca

SEQ ID NO: 1208431 - RNA, 19 nt, Artificial Sequence
  Description of Artificial Sequence: Synthetic oligonucleotide
aggcaugauaauucuuugc

SEQ ID NO: 1208432 - RNA, 19 nt, Artificial Sequence
  Description of Artificial Sequence: Synthetic oligonucleotide
uuuuauacuccugcguuag

SEQ ID NO: 1208433 - RNA, 19 nt, Artificial Sequence
  Description of Artificial Sequence: Synthetic oligonucleotide
gguauuggaaaugacaaag

SEQ ID NO: 1208434 - RNA, 19 nt, Artificial Sequence
  Description of Artificial Sequence: Synthetic oligonucleotide
cauuccacuaauacucucc

SEQ ID NO: 1208435 - RNA, 19 nt, Artificial Sequence
  Description of Artificial Sequence: Synthetic oligonucleotide
cuaauacucuccuauggug

SEQ ID NO: 1208436 - RNA, 19 nt, Artificial Sequence
  Description of Artificial Sequence: Synthetic oligonucleotide
uucgcuucucucaucacgc

SEQ ID NO: 1208437 - RNA, 19 nt, Artificial Sequence
  Description of Artificial Sequence: Synthetic oligonucleotide
ugagcuuaaaggcucguuc

SEQ ID NO: 1208438 - RNA, 19 nt, Artificial Sequence
  Description of Artificial Sequence: Synthetic oligonucleotide
ucuaaacuuuucacuguag

SEQ ID NO: 1208439 - RNA, 19 nt, Artificial Sequence
  Description of Artificial Sequence: Synthetic oligonucleotide
cugcguuuaacucaauagc

SEQ ID NO: 1208440 - RNA, 19 nt, Artificial Sequence
  Description of Artificial Sequence: Synthetic oligonucleotide
cacuaauacucuccuaugg

SEQ ID NO: 1208441 - RNA, 19 nt, Artificial Sequence
  Description of Artificial Sequence: Synthetic oligonucleotide
auuaaauguugguaagacu

SEQ ID NO: 1208442 - RNA, 19 nt, Artificial Sequence
  Description of Artificial Sequence: Synthetic oligonucleotide
auucaacaguugcaguccc

SEQ ID NO: 1208443 - RNA, 19 nt, Artificial Sequence
  Description of Artificial Sequence: Synthetic oligonucleotide
aacaacuuuagcgcacagg

SEQ ID NO: 1208444 - RNA, 19 nt, Artificial Sequence
  Description of Artificial Sequence: Synthetic oligonucleotide
agcuuaaaggcucguucgc

SEQ ID NO: 1208445 - RNA, 19 nt, Artificial Sequence
  Description of Artificial Sequence: Synthetic oligonucleotide
acuaauacucuccuauggu

SEQ ID NO: 1208446 - RNA, 19 nt, Artificial Sequence
  Description of Artificial Sequence: Synthetic oligonucleotide
aggaguaucguacuuaguu

SEQ ID NO: 1208447 - RNA, 19 nt, Artificial Sequence
  Description of Artificial Sequence: Synthetic oligonucleotide
uuagagcuagucugaacag

SEQ ID NO: 1208448 - RNA, 19 nt, Artificial Sequence
  Description of Artificial Sequence: Synthetic oligonucleotide
uuaugggaaguccuucacc

SEQ ID NO: 1208449 - RNA, 19 nt, Artificial Sequence
  Description of Artificial Sequence: Synthetic oligonucleotide
uuugaagggaucuuccaau

SEQ ID NO: 1208450 - RNA, 19 nt, Artificial Sequence
  Description of Artificial Sequence: Synthetic oligonucleotide
uucauuaugugguacuaau

SEQ ID NO: 1208451 - RNA, 19 nt, Artificial Sequence
  Description of Artificial Sequence: Synthetic oligonucleotide
gugauagcaagauaccgug

SEQ ID NO: 1208452 - RNA, 19 nt, Artificial Sequence
  Description of Artificial Sequence: Synthetic oligonucleotide
gguaagacuacaaaagcag

SEQ ID NO: 1208453 - RNA, 19 nt, Artificial Sequence
  Description of Artificial Sequence: Synthetic oligonucleotide
ucuccuauggugccaaacu

SEQ ID NO: 1208454 - RNA, 19 nt, Artificial Sequence
  Description of Artificial Sequence: Synthetic oligonucleotide
auuaguugguuacagugau

SEQ ID NO: 1208455 - RNA, 19 nt, Artificial Sequence
  Description of Artificial Sequence: Synthetic oligonucleotide
acuacaaaagcagcaguuc

SEQ ID NO: 1208456 - RNA, 19 nt, Artificial Sequence
  Description of Artificial Sequence: Synthetic oligonucleotide
acaggaguaucguacuuag

SEQ ID NO: 1208457 - RNA, 19 nt, Artificial Sequence
  Description of Artificial Sequence: Synthetic oligonucleotide
agauuuaaguuacugcaaa

SEQ ID NO: 1208458 - RNA, 19 nt, Artificial Sequence
  Description of Artificial Sequence: Synthetic oligonucleotide
aacagcucggaaguaauca

SEQ ID NO: 1208459 - RNA, 19 nt, Artificial Sequence
  Description of Artificial Sequence: Synthetic oligonucleotide
uguaaaucgagcaguugau

SEQ ID NO: 1208460 - RNA, 19 nt, Artificial Sequence
  Description of Artificial Sequence: Synthetic oligonucleotide
ugugacuugguuguaaauc

SEQ ID NO: 1208461 - RNA, 19 nt, Artificial Sequence
  Description of Artificial Sequence: Synthetic oligonucleotide
cuugguuguaaaucgagca

SEQ ID NO: 1208462 - RNA, 19 nt, Artificial Sequence
  Description of Artificial Sequence: Synthetic oligonucleotide
cuugagagggaucuuuaag

SEQ ID NO: 1208463 - RNA, 19 nt, Artificial Sequence
  Description of Artificial Sequence: Synthetic oligonucleotide
ucaauagcaucccggguga

SEQ ID NO: 1208464 - RNA, 19 nt, Artificial Sequence
  Description of Artificial Sequence: Synthetic oligonucleotide
agcuagucugaacagcauc

SEQ ID NO: 1208465 - RNA, 19 nt, Artificial Sequence
  Description of Artificial Sequence: Synthetic oligonucleotide
aaaucgagcaguugauuua

SEQ ID NO: 1208466 - RNA, 19 nt, Artificial Sequence
  Description of Artificial Sequence: Synthetic oligonucleotide
aagaaagcggcauccacuu

SEQ ID NO: 1208467 - RNA, 19 nt, Artificial Sequence
  Description of Artificial Sequence: Synthetic oligonucleotide
gaggcccuuagaaagaaag

SEQ ID NO: 1208468 - RNA, 19 nt, Artificial Sequence
  Description of Artificial Sequence: Synthetic oligonucleotide
uacugcaaaucaaugucac

SEQ ID NO: 1208469 - RNA, 19 nt, Artificial Sequence
  Description of Artificial Sequence: Synthetic oligonucleotide
aagauaccgugaguguggc

SEQ ID NO: 1208470 - RNA, 19 nt, Artificial Sequence
  Description of Artificial Sequence: Synthetic oligonucleotide
ucacauugguuuucuagca

SEQ ID NO: 1208471 - RNA, 19 nt, Artificial Sequence
  Description of Artificial Sequence: Synthetic oligonucleotide
uuuaugggaaguccuucac

SEQ ID NO: 1208472 - RNA, 19 nt, Artificial Sequence
  Description of Artificial Sequence: Synthetic oligonucleotide
agacauaggugggagaguc

SEQ ID NO: 1208473 - RNA, 19 nt, Artificial Sequence
  Description of Artificial Sequence: Synthetic oligonucleotide
uaccgggucuauaucagcc

SEQ ID NO: 1208474 - RNA, 19 nt, Artificial Sequence
  Description of Artificial Sequence: Synthetic oligonucleotide
cucuauucaacaguugcag

SEQ ID NO: 1208475 - RNA, 19 nt, Artificial Sequence
  Description of Artificial Sequence: Synthetic oligonucleotide
gcauuaguugguuacagug

SEQ ID NO: 1208476 - RNA, 19 nt, Artificial Sequence
  Description of Artificial Sequence: Synthetic oligonucleotide
cuauaucagcccauucugc

SEQ ID NO: 1208477 - RNA, 19 nt, Artificial Sequence
  Description of Artificial Sequence: Synthetic oligonucleotide
ugcagauccuuuugaagug

SEQ ID NO: 1208478 - RNA, 19 nt, Artificial Sequence
  Description of Artificial Sequence: Synthetic oligonucleotide
aaugucacuaccagcacaa

SEQ ID NO: 1208479 - RNA, 19 nt, Artificial Sequence
  Description of Artificial Sequence: Synthetic oligonucleotide
uuagcuaggaucucacaua

SEQ ID NO: 1208480 - RNA, 19 nt, Artificial Sequence
  Description of Artificial Sequence: Synthetic oligonucleotide
agugguauuggaaaugaca

SEQ ID NO: 1208481 - RNA, 19 nt, Artificial Sequence
  Description of Artificial Sequence: Synthetic oligonucleotide
uaagaauaucagcaaugaa

SEQ ID NO: 1208482 - RNA, 19 nt, Artificial Sequence
  Description of Artificial Sequence: Synthetic oligonucleotide
gcugcguuuaacucaauag

SEQ ID NO: 1208483 - RNA, 19 nt, Artificial Sequence
  Description of Artificial Sequence: Synthetic oligonucleotide
ucguacuuaguucuuguua

SEQ ID NO: 1208484 - RNA, 19 nt, Artificial Sequence
  Description of Artificial Sequence: Synthetic oligonucleotide
ugugguaccgggucuauau

SEQ ID NO: 1208485 - RNA, 19 nt, Artificial Sequence
  Description of Artificial Sequence: Synthetic oligonucleotide
aacccuccgaaaaugccac

SEQ ID NO: 1208486 - RNA, 19 nt, Artificial Sequence
  Description of Artificial Sequence: Synthetic oligonucleotide
gucuacauacuguagcuca

SEQ ID NO: 1208487 - RNA, 19 nt, Artificial Sequence
  Description of Artificial Sequence: Synthetic oligonucleotide
ucuauucaacaguugcagu

SEQ ID NO: 1208488 - RNA, 19 nt, Artificial Sequence
  Description of Artificial Sequence: Synthetic oligonucleotide
accgggucuauaucagccc

SEQ ID NO: 1208489 - RNA, 19 nt, Artificial Sequence
  Description of Artificial Sequence: Synthetic oligonucleotide
gacagaguuauuucucaca

SEQ ID NO: 1208490 - RNA, 19 nt, Artificial Sequence
  Description of Artificial Sequence: Synthetic oligonucleotide
guugguaugucacuuucuc

SEQ ID NO: 1208491 - RNA, 19 nt, Artificial Sequence
  Description of Artificial Sequence: Synthetic oligonucleotide
caagggauggucacucuag

SEQ ID NO: 1208492 - RNA, 19 nt, Artificial Sequence
  Description of Artificial Sequence: Synthetic oligonucleotide
uccucaauuauugcaguga

SEQ ID NO: 1208493 - RNA, 19 nt, Artificial Sequence
  Description of Artificial Sequence: Synthetic oligonucleotide
ucguucgcuucucucauca

SEQ ID NO: 1208494 - RNA, 19 nt, Artificial Sequence
  Description of Artificial Sequence: Synthetic oligonucleotide
uauacacucguugguaugu

SEQ ID NO: 1208495 - RNA, 19 nt, Artificial Sequence
  Description of Artificial Sequence: Synthetic oligonucleotide
ugguaccgggucuauauca

SEQ ID NO: 1208496 - RNA, 19 nt, Artificial Sequence
  Description of Artificial Sequence: Synthetic oligonucleotide
auuccacuaauacucuccu

SEQ ID NO: 1208497 - RNA, 19 nt, Artificial Sequence
  Description of Artificial Sequence: Synthetic oligonucleotide
agcagcucuauucaacagu

SEQ ID NO: 1208498 - RNA, 19 nt, Artificial Sequence
  Description of Artificial Sequence: Synthetic oligonucleotide
uccgaaaaugccacacugu

SEQ ID NO: 1208499 - RNA, 19 nt, Artificial Sequence
  Description of Artificial Sequence: Synthetic oligonucleotide
cuuaagagaacccuccgaa

SEQ ID NO: 1208500 - RNA, 19 nt, Artificial Sequence
  Description of Artificial Sequence: Synthetic oligonucleotide
uuagcgcacaggcaaggga

SEQ ID NO: 1208501 - RNA, 19 nt, Artificial Sequence
  Description of Artificial Sequence: Synthetic oligonucleotide
cagugauagcaagauaccg

SEQ ID NO: 1208502 - RNA, 19 nt, Artificial Sequence
  Description of Artificial Sequence: Synthetic oligonucleotide
guaagacuacaaaagcagc

SEQ ID NO: 1208503 - RNA, 19 nt, Artificial Sequence
  Description of Artificial Sequence: Synthetic oligonucleotide
ugaccuuaagagaacccuc

SEQ ID NO: 1208504 - RNA, 19 nt, Artificial Sequence
  Description of Artificial Sequence: Synthetic oligonucleotide
agugaccuuaagagaaccc

SEQ ID NO: 1208505 - RNA, 19 nt, Artificial Sequence
  Description of Artificial Sequence: Synthetic oligonucleotide
agauacaugugauuuuauu

SEQ ID NO: 1208506 - RNA, 19 nt, Artificial Sequence
  Description of Artificial Sequence: Synthetic oligonucleotide
aagauuuaaguuacugcaa

SEQ ID NO: 1208507 - RNA, 19 nt, Artificial Sequence
  Description of Artificial Sequence: Synthetic oligonucleotide
agugauagcaagauaccgu

SEQ ID NO: 1208508 - RNA, 19 nt, Artificial Sequence
  Description of Artificial Sequence: Synthetic oligonucleotide
uuuaauagguuaggguauc

SEQ ID NO: 1208509 - RNA, 19 nt, Artificial Sequence
  Description of Artificial Sequence: Synthetic oligonucleotide
gaccuuaagagaacccucc

SEQ ID NO: 1208510 - RNA, 19 nt, Artificial Sequence
  Description of Artificial Sequence: Synthetic oligonucleotide
aauguugguaagacuacaa

SEQ ID NO: 1208511 - RNA, 19 nt, Artificial Sequence
  Description of Artificial Sequence: Synthetic oligonucleotide
ucguccauaggggacgccg

SEQ ID NO: 1208512 - RNA, 19 nt, Artificial Sequence
  Description of Artificial Sequence: Synthetic oligonucleotide
cauuaguugguuacaguga

SEQ ID NO: 1208513 - RNA, 19 nt, Artificial Sequence
  Description of Artificial Sequence: Synthetic oligonucleotide
acuguagccagugguauug

SEQ ID NO: 1208514 - RNA, 19 nt, Artificial Sequence
  Description of Artificial Sequence: Synthetic oligonucleotide
uaguuggcugcguuuaacu

SEQ ID NO: 1208515 - RNA, 19 nt, Artificial Sequence
  Description of Artificial Sequence: Synthetic oligonucleotide
cuccgaaaaugccacacug

SEQ ID NO: 1208516 - RNA, 19 nt, Artificial Sequence
  Description of Artificial Sequence: Synthetic oligonucleotide
agaguagauucuacgggac

SEQ ID NO: 1208517 - RNA, 19 nt, Artificial Sequence
  Description of Artificial Sequence: Synthetic oligonucleotide
aaucgagcaguugauuuaa

SEQ ID NO: 1208518 - RNA, 19 nt, Artificial Sequence
  Description of Artificial Sequence: Synthetic oligonucleotide
ugauagcaagauaccguga

SEQ ID NO: 1208519 - RNA, 19 nt, Artificial Sequence
  Description of Artificial Sequence: Synthetic oligonucleotide
ugacuugguuguaaaucga

SEQ ID NO: 1208520 - RNA, 19 nt, Artificial Sequence
  Description of Artificial Sequence: Synthetic oligonucleotide
gaguaucguacuuaguucu

SEQ ID NO: 1208521 - RNA, 19 nt, Artificial Sequence
  Description of Artificial Sequence: Synthetic oligonucleotide
ugacaaagugucuuugguu

SEQ ID NO: 1208522 - RNA, 19 nt, Artificial Sequence
  Description of Artificial Sequence: Synthetic oligonucleotide
uuuagcgcacaggcaaggg

SEQ ID NO: 1208523 - RNA, 19 nt, Artificial Sequence
  Description of Artificial Sequence: Synthetic oligonucleotide
auagucgaaauuccugaau

SEQ ID NO: 1208524 - RNA, 19 nt, Artificial Sequence
  Description of Artificial Sequence: Synthetic oligonucleotide
auagauacaugugauuuua

SEQ ID NO: 1208525 - RNA, 19 nt, Artificial Sequence
  Description of Artificial Sequence: Synthetic oligonucleotide
agaaacccgucguccauag

SEQ ID NO: 1208526 - RNA, 19 nt, Artificial Sequence
  Description of Artificial Sequence: Synthetic oligonucleotide
uuaaaggcucguucgcuuc

SEQ ID NO: 1208527 - RNA, 19 nt, Artificial Sequence
  Description of Artificial Sequence: Synthetic oligonucleotide
acuaccagcacaaagccuu

SEQ ID NO: 1208528 - RNA, 19 nt, Artificial Sequence
  Description of Artificial Sequence: Synthetic oligonucleotide
auaguuggcugcguuuaac

SEQ ID NO: 1208529 - RNA, 19 nt, Artificial Sequence
  Description of Artificial Sequence: Synthetic oligonucleotide
uuggcugcguuuaacucaa

SEQ ID NO: 1208530 - RNA, 19 nt, Artificial Sequence
  Description of Artificial Sequence: Synthetic oligonucleotide
ucugcccugucccuguaca

SEQ ID NO: 1208531 - RNA, 19 nt, Artificial Sequence
  Description of Artificial Sequence: Synthetic oligonucleotide
gauccuuuugaagugaccu

SEQ ID NO: 1208532 - RNA, 19 nt, Artificial Sequence
  Description of Artificial Sequence: Synthetic oligonucleotide
gugguauuggaaaugacaa

SEQ ID NO: 1208533 - RNA, 19 nt, Artificial Sequence
  Description of Artificial Sequence: Synthetic oligonucleotide
acuucguccagacgcucuc

SEQ ID NO: 1208534 - RNA, 19 nt, Artificial Sequence
  Description of Artificial Sequence: Synthetic oligonucleotide
cuauacacucguugguaug

SEQ ID NO: 1208535 - RNA, 19 nt, Artificial Sequence
  Description of Artificial Sequence: Synthetic oligonucleotide
cacugcuauacacucguug

SEQ ID NO: 1208536 - RNA, 19 nt, Artificial Sequence
  Description of Artificial Sequence: Synthetic oligonucleotide
cacgauccugcaaaauccc

SEQ ID NO: 1208537 - RNA, 19 nt, Artificial Sequence
  Description of Artificial Sequence: Synthetic oligonucleotide
ugauaauucuuugcauccu

SEQ ID NO: 1208538 - RNA, 19 nt, Artificial Sequence
  Description of Artificial Sequence: Synthetic oligonucleotide
cgagcaguugauuuaauag

SEQ ID NO: 1208539 - RNA, 19 nt, Artificial Sequence
  Description of Artificial Sequence: Synthetic oligonucleotide
acacucguugguaugucac

SEQ ID NO: 1208540 - RNA, 19 nt, Artificial Sequence
  Description of Artificial Sequence: Synthetic oligonucleotide
gauucuacgggacuggauu

SEQ ID NO: 1208541 - RNA, 19 nt, Artificial Sequence
  Description of Artificial Sequence: Synthetic oligonucleotide
uucuuauaguguccuuuuc

SEQ ID NO: 1208542 - RNA, 19 nt, Artificial Sequence
  Description of Artificial Sequence: Synthetic oligonucleotide
cugccaggcaugauaauuc

SEQ ID NO: 1208543 - RNA, 19 nt, Artificial Sequence
  Description of Artificial Sequence: Synthetic oligonucleotide
aacccgucguccauagggg

SEQ ID NO: 1208544 - RNA, 19 nt, Artificial Sequence
  Description of Artificial Sequence: Synthetic oligonucleotide
agagcuagucugaacagca

SEQ ID NO: 1208545 - RNA, 19 nt, Artificial Sequence
  Description of Artificial Sequence: Synthetic oligonucleotide
ugguauuggaaaugacaaa

SEQ ID NO: 1208546 - RNA, 19 nt, Artificial Sequence
  Description of Artificial Sequence: Synthetic oligonucleotide
ugcguuagaggcccuuaga

SEQ ID NO: 1208547 - RNA, 19 nt, Artificial Sequence
  Description of Artificial Sequence: Synthetic oligonucleotide
caugcacuuucauuaugug

SEQ ID NO: 1208548 - RNA, 19 nt, Artificial Sequence
  Description of Artificial Sequence: Synthetic oligonucleotide
auagguuaggguaucugga

SEQ ID NO: 1208549 - RNA, 19 nt, Artificial Sequence
  Description of Artificial Sequence: Synthetic oligonucleotide
ucauuaucccauagucgaa

SEQ ID NO: 1208550 - RNA, 19 nt, Artificial Sequence
  Description of Artificial Sequence: Synthetic oligonucleotide
aggcccuuagaaagaaagc

SEQ ID NO: 1208551 - RNA, 19 nt, Artificial Sequence
  Description of Artificial Sequence: Synthetic oligonucleotide
auuaucccauagucgaaau

SEQ ID NO: 1208552 - RNA, 19 nt, Artificial Sequence
  Description of Artificial Sequence: Synthetic oligonucleotide
aauuccugaaugacccacu

SEQ ID NO: 1208553 - RNA, 19 nt, Artificial Sequence
  Description of Artificial Sequence: Synthetic oligonucleotide
agagggaucuuuaagccau

SEQ ID NO: 1208554 - RNA, 19 nt, Artificial Sequence
  Description of Artificial Sequence: Synthetic oligonucleotide
uacacucguugguauguca

SEQ ID NO: 1208555 - RNA, 19 nt, Artificial Sequence
  Description of Artificial Sequence: Synthetic oligonucleotide
ucgagcaguugauuuaaua

SEQ ID NO: 1208556 - RNA, 19 nt, Artificial Sequence
  Description of Artificial Sequence: Synthetic oligonucleotide
gaguauacuggacuucucu

SEQ ID NO: 1208557 - RNA, 19 nt, Artificial Sequence
  Description of Artificial Sequence: Synthetic oligonucleotide
guacuaauuugaucauuuc

SEQ ID NO: 1208558 - RNA, 19 nt, Artificial Sequence
  Description of Artificial Sequence: Synthetic oligonucleotide
uuacagugauagcaagaua

SEQ ID NO: 1208559 - RNA, 19 nt, Artificial Sequence
  Description of Artificial Sequence: Synthetic oligonucleotide
cauuaugugguacuaauuu

SEQ ID NO: 1208560 - RNA, 19 nt, Artificial Sequence
  Description of Artificial Sequence: Synthetic oligonucleotide
ugaaugacccacugucgau

SEQ ID NO: 1208561 - RNA, 19 nt, Artificial Sequence
  Description of Artificial Sequence: Synthetic oligonucleotide
uccacuucguccagacgcu

SEQ ID NO: 1208562 - RNA, 19 nt, Artificial Sequence
  Description of Artificial Sequence: Synthetic oligonucleotide
augcuuuauuaagaauguc

SEQ ID NO: 1208563 - RNA, 19 nt, Artificial Sequence
  Description of Artificial Sequence: Synthetic oligonucleotide
uuaauagguuaggguaucu

SEQ ID NO: 1208564 - RNA, 19 nt, Artificial Sequence
  Description of Artificial Sequence: Synthetic oligonucleotide
cauagauauccacaagaaa

SEQ ID NO: 1208565 - RNA, 19 nt, Artificial Sequence
  Description of Artificial Sequence: Synthetic oligonucleotide
ggaguaucguacuuaguuc

SEQ ID NO: 1208566 - RNA, 19 nt, Artificial Sequence
  Description of Artificial Sequence: Synthetic oligonucleotide
cuuuagcgcacaggcaagg

SEQ ID NO: 1208567 - RNA, 19 nt, Artificial Sequence
  Description of Artificial Sequence: Synthetic oligonucleotide
cugaaugacccacugucga

SEQ ID NO: 1208568 - RNA, 19 nt, Artificial Sequence
  Description of Artificial Sequence: Synthetic oligonucleotide
uaucuggaaagaccacgau

SEQ ID NO: 1208569 - RNA, 19 nt, Artificial Sequence
  Description of Artificial Sequence: Synthetic oligonucleotide
uagauacaugugauuuuau

SEQ ID NO: 1208570 - RNA, 19 nt, Artificial Sequence
  Description of Artificial Sequence: Synthetic oligonucleotide
caucauucugugguaccgg

SEQ ID NO: 1208571 - RNA, 19 nt, Artificial Sequence
  Description of Artificial Sequence: Synthetic oligonucleotide
gcuaggaucucacauaacu

SEQ ID NO: 1208572 - RNA, 19 nt, Artificial Sequence
  Description of Artificial Sequence: Synthetic oligonucleotide
acucaauagcaucccgggu

SEQ ID NO: 1208573 - RNA, 19 nt, Artificial Sequence
  Description of Artificial Sequence: Synthetic oligonucleotide
cagcacggcacgaucacug

SEQ ID NO: 1208574 - RNA, 19 nt, Artificial Sequence
  Description of Artificial Sequence: Synthetic oligonucleotide
cuuugaagggaucuuccaa

SEQ ID NO: 1208575 - RNA, 19 nt, Artificial Sequence
  Description of Artificial Sequence: Synthetic oligonucleotide
ugcuauacacucguuggua

SEQ ID NO: 1208576 - RNA, 19 nt, Artificial Sequence
  Description of Artificial Sequence: Synthetic oligonucleotide
guaucguacuuaguucuug

SEQ ID NO: 1208577 - RNA, 19 nt, Artificial Sequence
  Description of Artificial Sequence: Synthetic oligonucleotide
guauacuggacuucucucu

SEQ ID NO: 1208578 - RNA, 19 nt, Artificial Sequence
  Description of Artificial Sequence: Synthetic oligonucleotide
uccauaggggacgccgccg

SEQ ID NO: 1208579 - RNA, 19 nt, Artificial Sequence
  Description of Artificial Sequence: Synthetic oligonucleotide
uuaguugguuacagugaua

SEQ ID NO: 1208580 - RNA, 19 nt, Artificial Sequence
  Description of Artificial Sequence: Synthetic oligonucleotide
guaucuggaaagaccacga

SEQ ID NO: 1208581 - RNA, 19 nt, Artificial Sequence
  Description of Artificial Sequence: Synthetic oligonucleotide
auucuacgggacuggauua

SEQ ID NO: 1208582 - RNA, 19 nt, Artificial Sequence
  Description of Artificial Sequence: Synthetic oligonucleotide
uucguccagacgcucucac

SEQ ID NO: 1208583 - RNA, 19 nt, Artificial Sequence
  Description of Artificial Sequence: Synthetic oligonucleotide
aucccgggugagcuuaaag

SEQ ID NO: 1208584 - RNA, 19 nt, Artificial Sequence
  Description of Artificial Sequence: Synthetic oligonucleotide
cucacauaacucuaaugcu

SEQ ID NO: 1208585 - RNA, 19 nt, Artificial Sequence
  Description of Artificial Sequence: Synthetic oligonucleotide
acgaucacuguagccagug

SEQ ID NO: 1208586 - RNA, 19 nt, Artificial Sequence
  Description of Artificial Sequence: Synthetic oligonucleotide
gaaacccgucguccauagg

SEQ ID NO: 1208587 - RNA, 19 nt, Artificial Sequence
  Description of Artificial Sequence: Synthetic oligonucleotide
cagaguuauuucucacauc

SEQ ID NO: 1208588 - RNA, 19 nt, Artificial Sequence
  Description of Artificial Sequence: Synthetic oligonucleotide
aaggcucguucgcuucucu

SEQ ID NO: 1208589 - RNA, 19 nt, Artificial Sequence
  Description of Artificial Sequence: Synthetic oligonucleotide
guaccgggucuauaucagc

SEQ ID NO: 1208590 - RNA, 19 nt, Artificial Sequence
  Description of Artificial Sequence: Synthetic oligonucleotide
ggacuggauuaaauguugg

SEQ ID NO: 1208591 - RNA, 19 nt, Artificial Sequence
  Description of Artificial Sequence: Synthetic oligonucleotide
uagauucuacgggacugga

SEQ ID NO: 1208592 - RNA, 19 nt, Artificial Sequence
  Description of Artificial Sequence: Synthetic oligonucleotide
acuuuagcgcacaggcaag

SEQ ID NO: 1208593 - RNA, 19 nt, Artificial Sequence
  Description of Artificial Sequence: Synthetic oligonucleotide
cuuauaguguccuuuucuu

SEQ ID NO: 1208594 - RNA, 19 nt, Artificial Sequence
  Description of Artificial Sequence: Synthetic oligonucleotide
agaguauacuggacuucuc

SEQ ID NO: 1208595 - RNA, 19 nt, Artificial Sequence
  Description of Artificial Sequence: Synthetic oligonucleotide
gcaccaagauuuaaguuac

SEQ ID NO: 1208596 - RNA, 19 nt, Artificial Sequence
  Description of Artificial Sequence: Synthetic oligonucleotide
gcuucucucaucacgcugc

SEQ ID NO: 1208597 - RNA, 19 nt, Artificial Sequence
  Description of Artificial Sequence: Synthetic oligonucleotide
agggaucuuccaauauauc

SEQ ID NO: 1208598 - RNA, 19 nt, Artificial Sequence
  Description of Artificial Sequence: Synthetic oligonucleotide
gacauaggugggagagucc

SEQ ID NO: 1208599 - RNA, 19 nt, Artificial Sequence
  Description of Artificial Sequence: Synthetic oligonucleotide
cugcguuagaggcccuuag

SEQ ID NO: 1208600 - RNA, 19 nt, Artificial Sequence
  Description of Artificial Sequence: Synthetic oligonucleotide
uucuuagagcuagucugaa

SEQ ID NO: 1208601 - RNA, 19 nt, Artificial Sequence
  Description of Artificial Sequence: Synthetic oligonucleotide
guccagacgcucucacugc

SEQ ID NO: 1208602 - RNA, 19 nt, Artificial Sequence
  Description of Artificial Sequence: Synthetic oligonucleotide
gcaaaaucccuuucaagua

SEQ ID NO: 1208603 - RNA, 19 nt, Artificial Sequence
  Description of Artificial Sequence: Synthetic oligonucleotide
auaccgugaguguggcaca

SEQ ID NO: 1208604 - RNA, 19 nt, Artificial Sequence
  Description of Artificial Sequence: Synthetic oligonucleotide
aaccuuucuuuuggcauua

SEQ ID NO: 1208605 - RNA, 19 nt, Artificial Sequence
  Description of Artificial Sequence: Synthetic oligonucleotide
ccuccuuguugucacauug

SEQ ID NO: 1208606 - RNA, 19 nt, Artificial Sequence
  Description of Artificial Sequence: Synthetic oligonucleotide
ggauuaaauguugguaaga

SEQ ID NO: 1208607 - RNA, 19 nt, Artificial Sequence
  Description of Artificial Sequence: Synthetic oligonucleotide
gcacgaucacuguagccag

SEQ ID NO: 1208608 - RNA, 19 nt, Artificial Sequence
  Description of Artificial Sequence: Synthetic oligonucleotide
cucacugcuauacacucgu

SEQ ID NO: 1208609 - RNA, 19 nt, Artificial Sequence
  Description of Artificial Sequence: Synthetic oligonucleotide
cuaccagcacaaagccuug

SEQ ID NO: 1208610 - RNA, 19 nt, Artificial Sequence
  Description of Artificial Sequence: Synthetic oligonucleotide
acauaacucuaaugcuuua

SEQ ID NO: 1208611 - RNA, 19 nt, Artificial Sequence
  Description of Artificial Sequence: Synthetic oligonucleotide
caacuuuagcgcacaggca

SEQ ID NO: 1208612 - RNA, 19 nt, Artificial Sequence
  Description of Artificial Sequence: Synthetic oligonucleotide
ugguacuaauuugaucauu

SEQ ID NO: 1208613 - RNA, 19 nt, Artificial Sequence
  Description of Artificial Sequence: Synthetic oligonucleotide
gauccugcaaaaucccuuu

SEQ ID NO: 1208614 - RNA, 19 nt, Artificial Sequence
  Description of Artificial Sequence: Synthetic oligonucleotide
aacucauuucuuagagcua

SEQ ID NO: 1208615 - RNA, 19 nt, Artificial Sequence
  Description of Artificial Sequence: Synthetic oligonucleotide
gguaccgggucuauaucag

SEQ ID NO: 1208616 - RNA, 19 nt, Artificial Sequence
  Description of Artificial Sequence: Synthetic oligonucleotide
gugaccuuaagagaacccu

SEQ ID NO: 1208617 - RNA, 19 nt, Artificial Sequence
  Description of Artificial Sequence: Synthetic oligonucleotide
guagccagugguauuggaa

SEQ ID NO: 1208618 - RNA, 19 nt, Artificial Sequence
  Description of Artificial Sequence: Synthetic oligonucleotide
uggcgcagauuccccgacc

SEQ ID NO: 1208619 - RNA, 19 nt, Artificial Sequence
  Description of Artificial Sequence: Synthetic oligonucleotide
ggcgcagauuccccgaccc

SEQ ID NO: 1208620 - RNA, 19 nt, Artificial Sequence
  Description of Artificial Sequence: Synthetic oligonucleotide
cucuccuauggugccaaac

SEQ ID NO: 1208621 - RNA, 19 nt, Artificial Sequence
  Description of Artificial Sequence: Synthetic oligonucleotide
ccuauggugccaaacuuga

SEQ ID NO: 1208622 - RNA, 19 nt, Artificial Sequence
  Description of Artificial Sequence: Synthetic oligonucleotide
ucguccagacgcucucacu

SEQ ID NO: 1208623 - RNA, 19 nt, Artificial Sequence
  Description of Artificial Sequence: Synthetic oligonucleotide
uuccacuaauacucuccua

SEQ ID NO: 1208624 - RNA, 19 nt, Artificial Sequence
  Description of Artificial Sequence: Synthetic oligonucleotide
agcacggcacgaucacugu

SEQ ID NO: 1208625 - RNA, 19 nt, Artificial Sequence
  Description of Artificial Sequence: Synthetic oligonucleotide
cguacuuaguucuuguuaa

SEQ ID NO: 1208626 - RNA, 19 nt, Artificial Sequence
  Description of Artificial Sequence: Synthetic oligonucleotide
ccacuaauacucuccuaug

SEQ ID NO: 1208627 - RNA, 19 nt, Artificial Sequence
  Description of Artificial Sequence: Synthetic oligonucleotide
cacuggauuagggccauca

SEQ ID NO: 1208628 - RNA, 19 nt, Artificial Sequence
  Description of Artificial Sequence: Synthetic oligonucleotide
ccuguuuaaugcaccaaga

SEQ ID NO: 1208629 - RNA, 19 nt, Artificial Sequence
  Description of Artificial Sequence: Synthetic oligonucleotide
ucgcuucucucaucacgcu

SEQ ID NO: 1208630 - RNA, 19 nt, Artificial Sequence
  Description of Artificial Sequence: Synthetic oligonucleotide
ggcucguucgcuucucuca

SEQ ID NO: 1208631 - RNA, 19 nt, Artificial Sequence
  Description of Artificial Sequence: Synthetic oligonucleotide
accgugaguguggcacagc

SEQ ID NO: 1208632 - RNA, 19 nt, Artificial Sequence
  Description of Artificial Sequence: Synthetic oligonucleotide
aggaucucacauaacucua

SEQ ID NO: 1208633 - RNA, 19 nt, Artificial Sequence
  Description of Artificial Sequence: Synthetic oligonucleotide
acccgucguccauagggga

SEQ ID NO: 1208634 - RNA, 19 nt, Artificial Sequence
  Description of Artificial Sequence: Synthetic oligonucleotide
gcguuagaggcccuuagaa

SEQ ID NO: 1208635 - RNA, 19 nt, Artificial Sequence
  Description of Artificial Sequence: Synthetic oligonucleotide
gguacuaauuugaucauuu

SEQ ID NO: 1208636 - RNA, 19 nt, Artificial Sequence
  Description of Artificial Sequence: Synthetic oligonucleotide
gugguaccgggucuauauc

SEQ ID NO: 1208637 - RNA, 19 nt, Artificial Sequence
  Description of Artificial Sequence: Synthetic oligonucleotide
ggucuauaucagcccauuc

SEQ ID NO: 1208638 - RNA, 19 nt, Artificial Sequence
  Description of Artificial Sequence: Synthetic oligonucleotide
augccacacuguauaguug

SEQ ID NO: 1208639 - RNA, 19 nt, Artificial Sequence
  Description of Artificial Sequence: Synthetic oligonucleotide
agauaccgugaguguggca

SEQ ID NO: 1208640 - RNA, 19 nt, Artificial Sequence
  Description of Artificial Sequence: Synthetic oligonucleotide
aguaucguacuuaguucuu

SEQ ID NO: 1208641 - RNA, 19 nt, Artificial Sequence
  Description of Artificial Sequence: Synthetic oligonucleotide
acgauccugcaaaaucccu

SEQ ID NO: 1208642 - RNA, 19 nt, Artificial Sequence
  Description of Artificial Sequence: Synthetic oligonucleotide
cuuaaaggcucguucgcuu

SEQ ID NO: 1208643 - RNA, 19 nt, Artificial Sequence
  Description of Artificial Sequence: Synthetic oligonucleotide
acgcucucacugcuauaca

SEQ ID NO: 1208644 - RNA, 19 nt, Artificial Sequence
  Description of Artificial Sequence: Synthetic oligonucleotide
uugucacauugguuuucua

SEQ ID NO: 1208645 - RNA, 19 nt, Artificial Sequence
  Description of Artificial Sequence: Synthetic oligonucleotide
ggcaacaacuuuagcgcac

SEQ ID NO: 1208646 - RNA, 19 nt, Artificial Sequence
  Description of Artificial Sequence: Synthetic oligonucleotide
gggcaacaacuuuagcgca

SEQ ID NO: 1208647 - RNA, 19 nt, Artificial Sequence
  Description of Artificial Sequence: Synthetic oligonucleotide
agauucuacgggacuggau

SEQ ID NO: 1208648 - RNA, 19 nt, Artificial Sequence
  Description of Artificial Sequence: Synthetic oligonucleotide
ucacugcuauacacucguu

SEQ ID NO: 1208649 - RNA, 19 nt, Artificial Sequence
  Description of Artificial Sequence: Synthetic oligonucleotide
augacccacugucgaugcu

SEQ ID NO: 1208650 - RNA, 19 nt, Artificial Sequence
  Description of Artificial Sequence: Synthetic oligonucleotide
cucguucgcuucucucauc

SEQ ID NO: 1208651 - RNA, 19 nt, Artificial Sequence
  Description of Artificial Sequence: Synthetic oligonucleotide
agcaucccgggugagcuua

SEQ ID NO: 1208652 - RNA, 19 nt, Artificial Sequence
  Description of Artificial Sequence: Synthetic oligonucleotide
cugccuguccggccucgcc

SEQ ID NO: 1208653 - RNA, 19 nt, Artificial Sequence
  Description of Artificial Sequence: Synthetic oligonucleotide
caauagcaucccgggugag

SEQ ID NO: 1208654 - RNA, 19 nt, Artificial Sequence
  Description of Artificial Sequence: Synthetic oligonucleotide
caaguaguuccaugcacuu

SEQ ID NO: 1208655 - RNA, 19 nt, Artificial Sequence
  Description of Artificial Sequence: Synthetic oligonucleotide
ccgaaaaugccacacugua

SEQ ID NO: 1208656 - RNA, 19 nt, Artificial Sequence
  Description of Artificial Sequence: Synthetic oligonucleotide
gcuauacacucguugguau

SEQ ID NO: 1208657 - RNA, 19 nt, Artificial Sequence
  Description of Artificial Sequence: Synthetic oligonucleotide
ccauuccacuaauacucuc

SEQ ID NO: 1208658 - RNA, 19 nt, Artificial Sequence
  Description of Artificial Sequence: Synthetic oligonucleotide
cugcuauacacucguuggu

SEQ ID NO: 1208659 - RNA, 19 nt, Artificial Sequence
  Description of Artificial Sequence: Synthetic oligonucleotide
ggaucucacauaacucuaa

SEQ ID NO: 1208660 - RNA, 19 nt, Artificial Sequence
  Description of Artificial Sequence: Synthetic oligonucleotide
guaaaucgagcaguugauu

SEQ ID NO: 1208661 - RNA, 19 nt, Artificial Sequence
  Description of Artificial Sequence: Synthetic oligonucleotide
ggcugcguuuaacucaaua

SEQ ID NO: 1208662 - RNA, 19 nt, Artificial Sequence
  Description of Artificial Sequence: Synthetic oligonucleotide
ucugccuguccggccucgc

SEQ ID NO: 1208663 - RNA, 19 nt, Artificial Sequence
  Description of Artificial Sequence: Synthetic oligonucleotide
cuccaaugaccuugcuuua

SEQ ID NO: 1208664 - RNA, 19 nt, Artificial Sequence
  Description of Artificial Sequence: Synthetic oligonucleotide
gcaagggauggucacucua

SEQ ID NO: 1208665 - RNA, 19 nt, Artificial Sequence
  Description of Artificial Sequence: Synthetic oligonucleotide
cuacgggacuggauuaaau

SEQ ID NO: 1208666 - RNA, 19 nt, Artificial Sequence
  Description of Artificial Sequence: Synthetic oligonucleotide
auaggggacgccgccgcuu

SEQ ID NO: 1208667 - RNA, 19 nt, Artificial Sequence
  Description of Artificial Sequence: Synthetic oligonucleotide
ggauuagggccaucauucu

SEQ ID NO: 1208668 - RNA, 19 nt, Artificial Sequence
  Description of Artificial Sequence: Synthetic oligonucleotide
cuccuauggugccaaacuu

SEQ ID NO: 1208669 - RNA, 19 nt, Artificial Sequence
  Description of Artificial Sequence: Synthetic oligonucleotide
ccuuuugaagugaccuuaa

SEQ ID NO: 1208670 - RNA, 19 nt, Artificial Sequence
  Description of Artificial Sequence: Synthetic oligonucleotide
ccugggcaacaacuuuagc

SEQ ID NO: 1208671 - RNA, 19 nt, Artificial Sequence
  Description of Artificial Sequence: Synthetic oligonucleotide
ccgugaguguggcacagca

SEQ ID NO: 1208672 - RNA, 19 nt, Artificial Sequence
  Description of Artificial Sequence: Synthetic oligonucleotide
agaggcccuuagaaagaaa

SEQ ID NO: 1208673 - RNA, 19 nt, Artificial Sequence
  Description of Artificial Sequence: Synthetic oligonucleotide
uagcaucccgggugagcuu

SEQ ID NO: 1208674 - RNA, 19 nt, Artificial Sequence
  Description of Artificial Sequence: Synthetic oligonucleotide
cagcccauucugcccuguc

SEQ ID NO: 1208675 - RNA, 19 nt, Artificial Sequence
  Description of Artificial Sequence: Synthetic oligonucleotide
cuucguccagacgcucuca

SEQ ID NO: 1208676 - RNA, 19 nt, Artificial Sequence
  Description of Artificial Sequence: Synthetic oligonucleotide
acucuccuauggugccaaa

SEQ ID NO: 1208677 - RNA, 19 nt, Artificial Sequence
  Description of Artificial Sequence: Synthetic oligonucleotide
augucacuaccagcacaaa

SEQ ID NO: 1208678 - RNA, 19 nt, Artificial Sequence
  Description of Artificial Sequence: Synthetic oligonucleotide
gcuuaaaggcucguucgcu

SEQ ID NO: 1208679 - RNA, 19 nt, Artificial Sequence
  Description of Artificial Sequence: Synthetic oligonucleotide
aucgagcaguugauuuaau

SEQ ID NO: 1208680 - RNA, 19 nt, Artificial Sequence
  Description of Artificial Sequence: Synthetic oligonucleotide
gcucggaaguaaucauaaa

SEQ ID NO: 1208681 - RNA, 19 nt, Artificial Sequence
  Description of Artificial Sequence: Synthetic oligonucleotide
ccgggucuauaucagccca

SEQ ID NO: 1208682 - RNA, 19 nt, Artificial Sequence
  Description of Artificial Sequence: Synthetic oligonucleotide
gcguuuaacucaauagcau

SEQ ID NO: 1208683 - RNA, 19 nt, Artificial Sequence
  Description of Artificial Sequence: Synthetic oligonucleotide
gguuguaaaucgagcaguu

SEQ ID NO: 1208684 - RNA, 19 nt, Artificial Sequence
  Description of Artificial Sequence: Synthetic oligonucleotide
gcgcagauuccccgacccc

SEQ ID NO: 1208685 - RNA, 19 nt, Artificial Sequence
  Description of Artificial Sequence: Synthetic oligonucleotide
cagaaacccgucguccaua

SEQ ID NO: 1208686 - RNA, 19 nt, Artificial Sequence
  Description of Artificial Sequence: Synthetic oligonucleotide
cuauggugccaaacuugau

SEQ ID NO: 1208687 - RNA, 19 nt, Artificial Sequence
  Description of Artificial Sequence: Synthetic oligonucleotide
caggaguaucguacuuagu

SEQ ID NO: 1208688 - RNA, 19 nt, Artificial Sequence
  Description of Artificial Sequence: Synthetic oligonucleotide
gagcuagucugaacagcau

SEQ ID NO: 1208689 - RNA, 19 nt, Artificial Sequence
  Description of Artificial Sequence: Synthetic oligonucleotide
gucguccauaggggacgcc

SEQ ID NO: 1208690 - RNA, 19 nt, Artificial Sequence
  Description of Artificial Sequence: Synthetic oligonucleotide
cggcacgaucacuguagcc

SEQ ID NO: 1208691 - RNA, 19 nt, Artificial Sequence
  Description of Artificial Sequence: Synthetic oligonucleotide
gaccacgauccugcaaaau

SEQ ID NO: 1208692 - RNA, 19 nt, Artificial Sequence
  Description of Artificial Sequence: Synthetic oligonucleotide
uggcugcguuuaacucaau

SEQ ID NO: 1208693 - RNA, 19 nt, Artificial Sequence
  Description of Artificial Sequence: Synthetic oligonucleotide
gugagcuuaaaggcucguu

SEQ ID NO: 1208694 - RNA, 19 nt, Artificial Sequence
  Description of Artificial Sequence: Synthetic oligonucleotide
ccgggugagcuuaaaggcu

SEQ ID NO: 1208695 - RNA, 19 nt, Artificial Sequence
  Description of Artificial Sequence: Synthetic oligonucleotide
cacgaucacuguagccagu

SEQ ID NO: 1208696 - RNA, 19 nt, Artificial Sequence
  Description of Artificial Sequence: Synthetic oligonucleotide
gcucguucgcuucucucau

SEQ ID NO: 1208697 - RNA, 19 nt, Artificial Sequence
  Description of Artificial Sequence: Synthetic oligonucleotide
guccggccucgccgccugg

SEQ ID NO: 1208698 - RNA, 19 nt, Artificial Sequence
  Description of Artificial Sequence: Synthetic oligonucleotide
gcacggcacgaucacugua

SEQ ID NO: 1208699 - RNA, 19 nt, Artificial Sequence
  Description of Artificial Sequence: Synthetic oligonucleotide
ccggccucgccgccuggcg

SEQ ID NO: 1208700 - RNA, 19 nt, Artificial Sequence
  Description of Artificial Sequence: Synthetic oligonucleotide
cucggccgccaucucuucu

SEQ ID NO: 1208701 - RNA, 19 nt, Artificial Sequence
  Description of Artificial Sequence: Synthetic oligonucleotide
ccuccgaaaaugccacacu

SEQ ID NO: 1208702 - RNA, 19 nt, Artificial Sequence
  Description of Artificial Sequence: Synthetic oligonucleotide
cugugguaccgggucuaua

SEQ ID NO: 1208703 - RNA, 19 nt, Artificial Sequence
  Description of Artificial Sequence: Synthetic oligonucleotide
ggugagcuuaaaggcucgu

SEQ ID NO: 1208704 - RNA, 19 nt, Artificial Sequence
  Description of Artificial Sequence: Synthetic oligonucleotide
caucccgggugagcuuaaa

SEQ ID NO: 1208705 - RNA, 19 nt, Artificial Sequence
  Description of Artificial Sequence: Synthetic oligonucleotide
cgucguccauaggggacgc

SEQ ID NO: 1208706 - RNA, 19 nt, Artificial Sequence
  Description of Artificial Sequence: Synthetic oligonucleotide
ccugcguuagaggcccuua

SEQ ID NO: 1208707 - RNA, 19 nt, Artificial Sequence
  Description of Artificial Sequence: Synthetic oligonucleotide
ucgccgccuggcgcagauu

SEQ ID NO: 1208708 - RNA, 19 nt, Artificial Sequence
  Description of Artificial Sequence: Synthetic oligonucleotide
cuguccggccucgccgccu

SEQ ID NO: 1208709 - RNA, 19 nt, Artificial Sequence
  Description of Artificial Sequence: Synthetic oligonucleotide
aaagagaagagcuugcguc

SEQ ID NO: 1208710 - RNA, 19 nt, Artificial Sequence
  Description of Artificial Sequence: Synthetic oligonucleotide
ucuaguauggcuuauucgg

SEQ ID NO: 1208711 - RNA, 19 nt, Artificial Sequence
  Description of Artificial Sequence: Synthetic oligonucleotide
ucuuaaauggaacacgggg

SEQ ID NO: 1208712 - RNA, 19 nt, Artificial Sequence
  Description of Artificial Sequence: Synthetic oligonucleotide
aguuaaguaaguaaaaggc

SEQ ID NO: 1208713 - RNA, 19 nt, Artificial Sequence
  Description of Artificial Sequence: Synthetic oligonucleotide
auaucuaagaauucccugc

SEQ ID NO: 1208714 - RNA, 19 nt, Artificial Sequence
  Description of Artificial Sequence: Synthetic oligonucleotide
uuaaccaugaagcuacugg

SEQ ID NO: 1208715 - RNA, 19 nt, Artificial Sequence
  Description of Artificial Sequence: Synthetic oligonucleotide
ucuacauugaauuuggcaa

SEQ ID NO: 1208716 - RNA, 19 nt, Artificial Sequence
  Description of Artificial Sequence: Synthetic oligonucleotide
gaugcguuaaccaugaagc

SEQ ID NO: 1208717 - RNA, 19 nt, Artificial Sequence
  Description of Artificial Sequence: Synthetic oligonucleotide
uaauauauaaacaguggcu

SEQ ID NO: 1208718 - RNA, 19 nt, Artificial Sequence
  Description of Artificial Sequence: Synthetic oligonucleotide
gauguauuggauucagugg

SEQ ID NO: 1208719 - RNA, 19 nt, Artificial Sequence
  Description of Artificial Sequence: Synthetic oligonucleotide
auugagauuauacuaaggu

SEQ ID NO: 1208720 - RNA, 19 nt, Artificial Sequence
  Description of Artificial Sequence: Synthetic oligonucleotide
ugauccguaagcacaaugg

SEQ ID NO: 1208721 - RNA, 19 nt, Artificial Sequence
  Description of Artificial Sequence: Synthetic oligonucleotide
aaucuaguauggcuuauuc

SEQ ID NO: 1208722 - RNA, 19 nt, Artificial Sequence
  Description of Artificial Sequence: Synthetic oligonucleotide
ucuauaucuaagaauuccc

SEQ ID NO: 1208723 - RNA, 19 nt, Artificial Sequence
  Description of Artificial Sequence: Synthetic oligonucleotide
auagagaucagacuccuag

SEQ ID NO: 1208724 - RNA, 19 nt, Artificial Sequence
  Description of Artificial Sequence: Synthetic oligonucleotide
ucuacaaauaucucuguug

SEQ ID NO: 1208725 - RNA, 19 nt, Artificial Sequence
  Description of Artificial Sequence: Synthetic oligonucleotide
aauaaugagcguugucagg

SEQ ID NO: 1208726 - RNA, 19 nt, Artificial Sequence
  Description of Artificial Sequence: Synthetic oligonucleotide
uuuuaguguacccagccug

SEQ ID NO: 1208727 - RNA, 19 nt, Artificial Sequence
  Description of Artificial Sequence: Synthetic oligonucleotide
uguaucagcguacaguuac

SEQ ID NO: 1208728 - RNA, 19 nt, Artificial Sequence
  Description of Artificial Sequence: Synthetic oligonucleotide
ucguuucuaauaaucaugc

SEQ ID NO: 1208729 - RNA, 19 nt, Artificial Sequence
  Description of Artificial Sequence: Synthetic oligonucleotide
uuaaauggaacacggggug

SEQ ID NO: 1208730 - RNA, 19 nt, Artificial Sequence
  Description of Artificial Sequence: Synthetic oligonucleotide
aaagugacgggacuauguc

SEQ ID NO: 1208731 - RNA, 19 nt, Artificial Sequence
  Description of Artificial Sequence: Synthetic oligonucleotide
uuucuaauaaucaugccuu

SEQ ID NO: 1208732 - RNA, 19 nt, Artificial Sequence
  Description of Artificial Sequence: Synthetic oligonucleotide
caggcagugaccuuuaagg

SEQ ID NO: 1208733 - RNA, 19 nt, Artificial Sequence
  Description of Artificial Sequence: Synthetic oligonucleotide
auggcaaaucgcuagacuc

SEQ ID NO: 1208734 - RNA, 19 nt, Artificial Sequence
  Description of Artificial Sequence: Synthetic oligonucleotide
accuuuaaggaagugaucg

SEQ ID NO: 1208735 - RNA, 19 nt, Artificial Sequence
  Description of Artificial Sequence: Synthetic oligonucleotide
uaauaaugagcguugucag

SEQ ID NO: 1208736 - RNA, 19 nt, Artificial Sequence
  Description of Artificial Sequence: Synthetic oligonucleotide
uacgucuuaaaguagaaau

SEQ ID NO: 1208737 - RNA, 19 nt, Artificial Sequence
  Description of Artificial Sequence: Synthetic oligonucleotide
aaacccuacggaaacaaac

SEQ ID NO: 1208738 - RNA, 19 nt, Artificial Sequence
  Description of Artificial Sequence: Synthetic oligonucleotide
uguccuuauuuaaugaaca

SEQ ID NO: 1208739 - RNA, 19 nt, Artificial Sequence
  Description of Artificial Sequence: Synthetic oligonucleotide
uauaucuaagaauucccug

SEQ ID NO: 1208740 - RNA, 19 nt, Artificial Sequence
  Description of Artificial Sequence: Synthetic oligonucleotide
uuauugagauuauacuaag

SEQ ID NO: 1208741 - RNA, 19 nt, Artificial Sequence
  Description of Artificial Sequence: Synthetic oligonucleotide
uuggcaacaguuuauauua

SEQ ID NO: 1208742 - RNA, 19 nt, Artificial Sequence
  Description of Artificial Sequence: Synthetic oligonucleotide
uaaagugaaaagcuguauc

SEQ ID NO: 1208743 - RNA, 19 nt, Artificial Sequence
  Description of Artificial Sequence: Synthetic oligonucleotide
uucuauaucuaagaauucc

SEQ ID NO: 1208744 - RNA, 19 nt, Artificial Sequence
  Description of Artificial Sequence: Synthetic oligonucleotide
ucgucgucgagcuuggugg

SEQ ID NO: 1208745 - RNA, 19 nt, Artificial Sequence
  Description of Artificial Sequence: Synthetic oligonucleotide
uucugaauugccuuacccc

SEQ ID NO: 1208746 - RNA, 19 nt, Artificial Sequence
  Description of Artificial Sequence: Synthetic oligonucleotide
auaaucaugccuuugcuuu

SEQ ID NO: 1208747 - RNA, 19 nt, Artificial Sequence
  Description of Artificial Sequence: Synthetic oligonucleotide
aacuaaaccacaggcagug

SEQ ID NO: 1208748 - RNA, 19 nt, Artificial Sequence
  Description of Artificial Sequence: Synthetic oligonucleotide
gaagugaucguuuucagcu

SEQ ID NO: 1208749 - RNA, 19 nt, Artificial Sequence
  Description of Artificial Sequence: Synthetic oligonucleotide
ucacguuucucuuugcggc

SEQ ID NO: 1208750 - RNA, 19 nt, Artificial Sequence
  Description of Artificial Sequence: Synthetic oligonucleotide
ucuaagaauucccugcuau

SEQ ID NO: 1208751 - RNA, 19 nt, Artificial Sequence
  Description of Artificial Sequence: Synthetic oligonucleotide
uuacccuugauaaaucuau

SEQ ID NO: 1208752 - RNA, 19 nt, Artificial Sequence
  Description of Artificial Sequence: Synthetic oligonucleotide
uuugcguauagucuguaaa

SEQ ID NO: 1208753 - RNA, 19 nt, Artificial Sequence
  Description of Artificial Sequence: Synthetic oligonucleotide
aguguacccagccugcugg

SEQ ID NO: 1208754 - RNA, 19 nt, Artificial Sequence
  Description of Artificial Sequence: Synthetic oligonucleotide
aucuaguauggcuuauucg

SEQ ID NO: 1208755 - RNA, 19 nt, Artificial Sequence
  Description of Artificial Sequence: Synthetic oligonucleotide
guaauaaugagcguuguca

SEQ ID NO: 1208756 - RNA, 19 nt, Artificial Sequence
  Description of Artificial Sequence: Synthetic oligonucleotide
aauaaucaugccuuugcuu

SEQ ID NO: 1208757 - RNA, 19 nt, Artificial Sequence
  Description of Artificial Sequence: Synthetic oligonucleotide
ucgcuagacuccaaguugg

SEQ ID NO: 1208758 - RNA, 19 nt, Artificial Sequence
  Description of Artificial Sequence: Synthetic oligonucleotide
gacuaugucuaccuguggc

SEQ ID NO: 1208759 - RNA, 19 nt, Artificial Sequence
  Description of Artificial Sequence: Synthetic oligonucleotide
cuuuggauguauuggauuc

SEQ ID NO: 1208760 - RNA, 19 nt, Artificial Sequence
  Description of Artificial Sequence: Synthetic oligonucleotide
gaugacgggaacaugccgg

SEQ ID NO: 1208761 - RNA, 19 nt, Artificial Sequence
  Description of Artificial Sequence: Synthetic oligonucleotide
uuuaguguacccagccugc

SEQ ID NO: 1208762 - RNA, 19 nt, Artificial Sequence
  Description of Artificial Sequence: Synthetic oligonucleotide
aaaagcuguaucagcguac

SEQ ID NO: 1208763 - RNA, 19 nt, Artificial Sequence
  Description of Artificial Sequence: Synthetic oligonucleotide
aauggcaaaucgcuagacu

SEQ ID NO: 1208764 - RNA, 19 nt, Artificial Sequence
  Description of Artificial Sequence: Synthetic oligonucleotide
uugauaaaucuauuugagu

SEQ ID NO: 1208765 - RNA, 19 nt, Artificial Sequence
  Description of Artificial Sequence: Synthetic oligonucleotide
uaagaauucccugcuauca

SEQ ID NO: 1208766 - RNA, 19 nt, Artificial Sequence
  Description of Artificial Sequence: Synthetic oligonucleotide
aaugagcguugucaggaag

SEQ ID NO: 1208767 - RNA, 19 nt, Artificial Sequence
  Description of Artificial Sequence: Synthetic oligonucleotide
ugcgguuacgucuuaaagu

SEQ ID NO: 1208768 - RNA, 19 nt, Artificial Sequence
  Description of Artificial Sequence: Synthetic oligonucleotide
cacaauggcaaaucgcuag

SEQ ID NO: 1208769 - RNA, 19 nt, Artificial Sequence
  Description of Artificial Sequence: Synthetic oligonucleotide
aaaucgcuagacuccaagu

SEQ ID NO: 1208770 - RNA, 19 nt, Artificial Sequence
  Description of Artificial Sequence: Synthetic oligonucleotide
ugacaguaaaucaauccuc

SEQ ID NO: 1208771 - RNA, 19 nt, Artificial Sequence
  Description of Artificial Sequence: Synthetic oligonucleotide
aaacaauugucugaauaga

SEQ ID NO: 1208772 - RNA, 19 nt, Artificial Sequence
  Description of Artificial Sequence: Synthetic oligonucleotide
uauucggaugcguuaacca

SEQ ID NO: 1208773 - RNA, 19 nt, Artificial Sequence
  Description of Artificial Sequence: Synthetic oligonucleotide
cuagcaacuaaaccacagg

SEQ ID NO: 1208774 - RNA, 19 nt, Artificial Sequence
  Description of Artificial Sequence: Synthetic oligonucleotide
gcaacuaaaccacaggcag

SEQ ID NO: 1208775 - RNA, 19 nt, Artificial Sequence
  Description of Artificial Sequence: Synthetic oligonucleotide
ugccuuaccccuuuggaug

SEQ ID NO: 1208776 - RNA, 19 nt, Artificial Sequence
  Description of Artificial Sequence: Synthetic oligonucleotide
ugcucucacguccaaugcg

SEQ ID NO: 1208777 - RNA, 19 nt, Artificial Sequence
  Description of Artificial Sequence: Synthetic oligonucleotide
gauccguaagcacaauggc

SEQ ID NO: 1208778 - RNA, 19 nt, Artificial Sequence
  Description of Artificial Sequence: Synthetic oligonucleotide
auaaugagcguugucagga

SEQ ID NO: 1208779 - RNA, 19 nt, Artificial Sequence
  Description of Artificial Sequence: Synthetic oligonucleotide
uuugagucgucgucgagcu

SEQ ID NO: 1208780 - RNA, 19 nt, Artificial Sequence
  Description of Artificial Sequence: Synthetic oligonucleotide
ucagcuaacuuugagucgu

SEQ ID NO: 1208781 - RNA, 19 nt, Artificial Sequence
  Description of Artificial Sequence: Synthetic oligonucleotide
uucggaugcguuaaccaug

SEQ ID NO: 1208782 - RNA, 19 nt, Artificial Sequence
  Description of Artificial Sequence: Synthetic oligonucleotide
cuuugagcaaucacagcag

SEQ ID NO: 1208783 - RNA, 19 nt, Artificial Sequence
  Description of Artificial Sequence: Synthetic oligonucleotide
cuacaaauaucucuguuga

SEQ ID NO: 1208784 - RNA, 19 nt, Artificial Sequence
  Description of Artificial Sequence: Synthetic oligonucleotide
ugagcaaucacagcagugu

SEQ ID NO: 1208785 - RNA, 19 nt, Artificial Sequence
  Description of Artificial Sequence: Synthetic oligonucleotide
ugggcauuguaacaaauuu

SEQ ID NO: 1208786 - RNA, 19 nt, Artificial Sequence
  Description of Artificial Sequence: Synthetic oligonucleotide
ugcguauagucuguaaaag

SEQ ID NO: 1208787 - RNA, 19 nt, Artificial Sequence
  Description of Artificial Sequence: Synthetic oligonucleotide
uccuagugacaguaaauca

SEQ ID NO: 1208788 - RNA, 19 nt, Artificial Sequence
  Description of Artificial Sequence: Synthetic oligonucleotide
aucagcuaacuuugagucg

SEQ ID NO: 1208789 - RNA, 19 nt, Artificial Sequence
  Description of Artificial Sequence: Synthetic oligonucleotide
uauuggauucaguggaagu

SEQ ID NO: 1208790 - RNA, 19 nt, Artificial Sequence
  Description of Artificial Sequence: Synthetic oligonucleotide
guugacauuagggaugggc

SEQ ID NO: 1208791 - RNA, 19 nt, Artificial Sequence
  Description of Artificial Sequence: Synthetic oligonucleotide
uggcaugggacucacuuga

SEQ ID NO: 1208792 - RNA, 19 nt, Artificial Sequence
  Description of Artificial Sequence: Synthetic oligonucleotide
ucuaauaaucaugccuuug

SEQ ID NO: 1208793 - RNA, 19 nt, Artificial Sequence
  Description of Artificial Sequence: Synthetic oligonucleotide
acccuacggaaacaaacac

SEQ ID NO: 1208794 - RNA, 19 nt, Artificial Sequence
  Description of Artificial Sequence: Synthetic oligonucleotide
ugcgucguuucuaauaauc

SEQ ID NO: 1208795 - RNA, 19 nt, Artificial Sequence
  Description of Artificial Sequence: Synthetic oligonucleotide
uggaaaagaaguccuuaaa

SEQ ID NO: 1208796 - RNA, 19 nt, Artificial Sequence
  Description of Artificial Sequence: Synthetic oligonucleotide
uaaaucaauccuccucgcu

SEQ ID NO: 1208797 - RNA, 19 nt, Artificial Sequence
  Description of Artificial Sequence: Synthetic oligonucleotide
cuguccuuauuuaaugaac

SEQ ID NO: 1208798 - RNA, 19 nt, Artificial Sequence
  Description of Artificial Sequence: Synthetic oligonucleotide
aagugacgggacuaugucu

SEQ ID NO: 1208799 - RNA, 19 nt, Artificial Sequence
  Description of Artificial Sequence: Synthetic oligonucleotide
acuaugucuaccuguggca

SEQ ID NO: 1208800 - RNA, 19 nt, Artificial Sequence
  Description of Artificial Sequence: Synthetic oligonucleotide
aagugaucguuuucagcug

SEQ ID NO: 1208801 - RNA, 19 nt, Artificial Sequence
  Description of Artificial Sequence: Synthetic oligonucleotide
ucggcuacuccucugcaug

SEQ ID NO: 1208802 - RNA, 19 nt, Artificial Sequence
  Description of Artificial Sequence: Synthetic oligonucleotide
guauggcuuauucggaugc

SEQ ID NO: 1208803 - RNA, 19 nt, Artificial Sequence
  Description of Artificial Sequence: Synthetic oligonucleotide
agcaguguuacacacuaau

SEQ ID NO: 1208804 - RNA, 19 nt, Artificial Sequence
  Description of Artificial Sequence: Synthetic oligonucleotide
uuucuauaucuaagaauuc

SEQ ID NO: 1208805 - RNA, 19 nt, Artificial Sequence
  Description of Artificial Sequence: Synthetic oligonucleotide
uugcguauagucuguaaaa

SEQ ID NO: 1208806 - RNA, 19 nt, Artificial Sequence
  Description of Artificial Sequence: Synthetic oligonucleotide
uguuacacacuaauauaua

SEQ ID NO: 1208807 - RNA, 19 nt, Artificial Sequence
  Description of Artificial Sequence: Synthetic oligonucleotide
uugguuacccuugauaaau

SEQ ID NO: 1208808 - RNA, 19 nt, Artificial Sequence
  Description of Artificial Sequence: Synthetic oligonucleotide
aauccaaccuacaaggcua

SEQ ID NO: 1208809 - RNA, 19 nt, Artificial Sequence
  Description of Artificial Sequence: Synthetic oligonucleotide
guccuuauuuaaugaacag

SEQ ID NO: 1208810 - RNA, 19 nt, Artificial Sequence
  Description of Artificial Sequence: Synthetic oligonucleotide
gaggguguucaccaguggc

SEQ ID NO: 1208811 - RNA, 19 nt, Artificial Sequence
  Description of Artificial Sequence: Synthetic oligonucleotide
caacuguccuuauuuaaug

SEQ ID NO: 1208812 - RNA, 19 nt, Artificial Sequence
  Description of Artificial Sequence: Synthetic oligonucleotide
agaugacgggaacaugccg

SEQ ID NO: 1208813 - RNA, 19 nt, Artificial Sequence
  Description of Artificial Sequence: Synthetic oligonucleotide
gucguuucuaauaaucaug

SEQ ID NO: 1208814 - RNA, 19 nt, Artificial Sequence
  Description of Artificial Sequence: Synthetic oligonucleotide
cucuuaaauggaacacggg

SEQ ID NO: 1208815 - RNA, 19 nt, Artificial Sequence
  Description of Artificial Sequence: Synthetic oligonucleotide
agcacaauggcaaaucgcu

SEQ ID NO: 1208816 - RNA, 19 nt, Artificial Sequence
  Description of Artificial Sequence: Synthetic oligonucleotide
aaagcuguaucagcguaca

SEQ ID NO: 1208817 - RNA, 19 nt, Artificial Sequence
  Description of Artificial Sequence: Synthetic oligonucleotide
acgucuuaaaguagaaauc

SEQ ID NO: 1208818 - RNA, 19 nt, Artificial Sequence
  Description of Artificial Sequence: Synthetic oligonucleotide
caaaucgcuagacuccaag

SEQ ID NO: 1208819 - RNA, 19 nt, Artificial Sequence
  Description of Artificial Sequence: Synthetic oligonucleotide
uuauucggaugcguuaacc

SEQ ID NO: 1208820 - RNA, 19 nt, Artificial Sequence
  Description of Artificial Sequence: Synthetic oligonucleotide
gguguuuagaagucaauca

SEQ ID NO: 1208821 - RNA, 19 nt, Artificial Sequence
  Description of Artificial Sequence: Synthetic oligonucleotide
gaacggugcucucacgucc

SEQ ID NO: 1208822 - RNA, 19 nt, Artificial Sequence
  Description of Artificial Sequence: Synthetic oligonucleotide
uuggauucaguggaaguga

SEQ ID NO: 1208823 - RNA, 19 nt, Artificial Sequence
  Description of Artificial Sequence: Synthetic oligonucleotide
ggaugcguuaaccaugaag

SEQ ID NO: 1208824 - RNA, 19 nt, Artificial Sequence
  Description of Artificial Sequence: Synthetic oligonucleotide
augcgguuacgucuuaaag

SEQ ID NO: 1208825 - RNA, 19 nt, Artificial Sequence
  Description of Artificial Sequence: Synthetic oligonucleotide
ucggaugcguuaaccauga

SEQ ID NO: 1208826 - RNA, 19 nt, Artificial Sequence
  Description of Artificial Sequence: Synthetic oligonucleotide
aacuuugagucgucgucga

SEQ ID NO: 1208827 - RNA, 19 nt, Artificial Sequence
  Description of Artificial Sequence: Synthetic oligonucleotide
cuuugagucgucgucgagc

SEQ ID NO: 1208828 - RNA, 19 nt, Artificial Sequence
  Description of Artificial Sequence: Synthetic oligonucleotide
aacccuacggaaacaaaca

SEQ ID NO: 1208829 - RNA, 19 nt, Artificial Sequence
  Description of Artificial Sequence: Synthetic oligonucleotide
aucagcguacaguuacauc

SEQ ID NO: 1208830 - RNA, 19 nt, Artificial Sequence
  Description of Artificial Sequence: Synthetic oligonucleotide
ugucugaauagagaucaga

SEQ ID NO: 1208831 - RNA, 19 nt, Artificial Sequence
  Description of Artificial Sequence: Synthetic oligonucleotide
auaaaucuauuugaguuuu

SEQ ID NO: 1208832 - RNA, 19 nt, Artificial Sequence
  Description of Artificial Sequence: Synthetic oligonucleotide
acuagcaacuaaaccacag

SEQ ID NO: 1208833 - RNA, 19 nt, Artificial Sequence
  Description of Artificial Sequence: Synthetic oligonucleotide
gaucguuuucagcugugac

SEQ ID NO: 1208834 - RNA, 19 nt, Artificial Sequence
  Description of Artificial Sequence: Synthetic oligonucleotide
gacgggaacaugccgggcc

SEQ ID NO: 1208835 - RNA, 19 nt, Artificial Sequence
  Description of Artificial Sequence: Synthetic oligonucleotide
gcguauagucuguaaaagg

SEQ ID NO: 1208836 - RNA, 19 nt, Artificial Sequence
  Description of Artificial Sequence: Synthetic oligonucleotide
gauaaaucuauuugaguuu

SEQ ID NO: 1208837 - RNA, 19 nt, Artificial Sequence
  Description of Artificial Sequence: Synthetic oligonucleotide
acaggcagugaccuuuaag

SEQ ID NO: 1208838 - RNA, 19 nt, Artificial Sequence
  Description of Artificial Sequence: Synthetic oligonucleotide
acacuaauauauaaacagu

SEQ ID NO: 1208839 - RNA, 19 nt, Artificial Sequence
  Description of Artificial Sequence: Synthetic oligonucleotide
augacgggaacaugccggg

SEQ ID NO: 1208840 - RNA, 19 nt, Artificial Sequence
  Description of Artificial Sequence: Synthetic oligonucleotide
cuaagaauucccugcuauc

SEQ ID NO: 1208841 - RNA, 19 nt, Artificial Sequence
  Description of Artificial Sequence: Synthetic oligonucleotide
acgggaacaugccgggccc

SEQ ID NO: 1208842 - RNA, 19 nt, Artificial Sequence
  Description of Artificial Sequence: Synthetic oligonucleotide
uggaggguguucaccagug

SEQ ID NO: 1208843 - RNA, 19 nt, Artificial Sequence
  Description of Artificial Sequence: Synthetic oligonucleotide
cuuaaauggaacacggggu

SEQ ID NO: 1208844 - RNA, 19 nt, Artificial Sequence
  Description of Artificial Sequence: Synthetic oligonucleotide
gaaauccaaccuacaaggc

SEQ ID NO: 1208845 - RNA, 19 nt, Artificial Sequence
  Description of Artificial Sequence: Synthetic oligonucleotide
acaauugucugaauagaga

SEQ ID NO: 1208846 - RNA, 19 nt, Artificial Sequence
  Description of Artificial Sequence: Synthetic oligonucleotide
gagaucagacuccuaguga

SEQ ID NO: 1208847 - RNA, 19 nt, Artificial Sequence
  Description of Artificial Sequence: Synthetic oligonucleotide
auagucuguaaaaggagcu

SEQ ID NO: 1208848 - RNA, 19 nt, Artificial Sequence
  Description of Artificial Sequence: Synthetic oligonucleotide
augagcguugucaggaagg

SEQ ID NO: 1208849 - RNA, 19 nt, Artificial Sequence
  Description of Artificial Sequence: Synthetic oligonucleotide
guaaaucaauccuccucgc

SEQ ID NO: 1208850 - RNA, 19 nt, Artificial Sequence
  Description of Artificial Sequence: Synthetic oligonucleotide
gugacaguaaaucaauccu

SEQ ID NO: 1208851 - RNA, 19 nt, Artificial Sequence
  Description of Artificial Sequence: Synthetic oligonucleotide
uuccuuuccaaggaaugca

SEQ ID NO: 1208852 - RNA, 19 nt, Artificial Sequence
  Description of Artificial Sequence: Synthetic oligonucleotide
uaugucuaccuguggcagc

SEQ ID NO: 1208853 - RNA, 19 nt, Artificial Sequence
  Description of Artificial Sequence: Synthetic oligonucleotide
auucggaugcguuaaccau

SEQ ID NO: 1208854 - RNA, 19 nt, Artificial Sequence
  Description of Artificial Sequence: Synthetic oligonucleotide
accaugaagcuacuggaaa

SEQ ID NO: 1208855 - RNA, 19 nt, Artificial Sequence
  Description of Artificial Sequence: Synthetic oligonucleotide
gaacaugccgggcccaaug

SEQ ID NO: 1208856 - RNA, 19 nt, Artificial Sequence
  Description of Artificial Sequence: Synthetic oligonucleotide
uucggcagcugcaggagga

SEQ ID NO: 1208857 - RNA, 19 nt, Artificial Sequence
  Description of Artificial Sequence: Synthetic oligonucleotide
acaaacagagcuacccaag

SEQ ID NO: 1208858 - RNA, 19 nt, Artificial Sequence
  Description of Artificial Sequence: Synthetic oligonucleotide
uacccaaggcguuugucac

SEQ ID NO: 1208859 - RNA, 19 nt, Artificial Sequence
  Description of Artificial Sequence: Synthetic oligonucleotide
gcuacucuuaaauggaaca

SEQ ID NO: 1208860 - RNA, 19 nt, Artificial Sequence
  Description of Artificial Sequence: Synthetic oligonucleotide
agcuagggaucugagauga

SEQ ID NO: 1208861 - RNA, 19 nt, Artificial Sequence
  Description of Artificial Sequence: Synthetic oligonucleotide
cuaugucuaccuguggcag

SEQ ID NO: 1208862 - RNA, 19 nt, Artificial Sequence
  Description of Artificial Sequence: Synthetic oligonucleotide
uccgguguuuagaagucaa

SEQ ID NO: 1208863 - RNA, 19 nt, Artificial Sequence
  Description of Artificial Sequence: Synthetic oligonucleotide
ugggacucacuugacagac

SEQ ID NO: 1208864 - RNA, 19 nt, Artificial Sequence
  Description of Artificial Sequence: Synthetic oligonucleotide
cacguuucucuuugcggcg

SEQ ID NO: 1208865 - RNA, 19 nt, Artificial Sequence
  Description of Artificial Sequence: Synthetic oligonucleotide
ugcaaucuaguauggcuua

SEQ ID NO: 1208866 - RNA, 19 nt, Artificial Sequence
  Description of Artificial Sequence: Synthetic oligonucleotide
ucuaccuguggcagcggca

SEQ ID NO: 1208867 - RNA, 19 nt, Artificial Sequence
  Description of Artificial Sequence: Synthetic oligonucleotide
auaccaucuuuaaaacaag

SEQ ID NO: 1208868 - RNA, 19 nt, Artificial Sequence
  Description of Artificial Sequence: Synthetic oligonucleotide
cuugcgucguuucuaauaa

SEQ ID NO: 1208869 - RNA, 19 nt, Artificial Sequence
  Description of Artificial Sequence: Synthetic oligonucleotide
ccuuugagcaaucacagca

SEQ ID NO: 1208870 - RNA, 19 nt, Artificial Sequence
  Description of Artificial Sequence: Synthetic oligonucleotide
uugccuuaccccuuuggau

SEQ ID NO: 1208871 - RNA, 19 nt, Artificial Sequence
  Description of Artificial Sequence: Synthetic oligonucleotide
guaagcacaauggcaaauc

SEQ ID NO: 1208872 - RNA, 19 nt, Artificial Sequence
  Description of Artificial Sequence: Synthetic oligonucleotide
agcaacuaaaccacaggca

SEQ ID NO: 1208873 - RNA, 19 nt, Artificial Sequence
  Description of Artificial Sequence: Synthetic oligonucleotide
cuacccaaggcguuuguca

SEQ ID NO: 1208874 - RNA, 19 nt, Artificial Sequence
  Description of Artificial Sequence: Synthetic oligonucleotide
gaagucaaucaacuguccu

SEQ ID NO: 1208875 - RNA, 19 nt, Artificial Sequence
  Description of Artificial Sequence: Synthetic oligonucleotide
ugcguuaaccaugaagcua

SEQ ID NO: 1208876 - RNA, 19 nt, Artificial Sequence
  Description of Artificial Sequence: Synthetic oligonucleotide
cugauccguaagcacaaug

SEQ ID NO: 1208877 - RNA, 19 nt, Artificial Sequence
  Description of Artificial Sequence: Synthetic oligonucleotide
ugagucucggcuacuccuc

SEQ ID NO: 1208878 - RNA, 19 nt, Artificial Sequence
  Description of Artificial Sequence: Synthetic oligonucleotide
cuauaucuaagaauucccu

SEQ ID NO: 1208879 - RNA, 19 nt, Artificial Sequence
  Description of Artificial Sequence: Synthetic oligonucleotide
uaguguacccagccugcug

SEQ ID NO: 1208880 - RNA, 19 nt, Artificial Sequence
  Description of Artificial Sequence: Synthetic oligonucleotide
cuaguauggcuuauucgga

SEQ ID NO: 1208881 - RNA, 19 nt, Artificial Sequence
  Description of Artificial Sequence: Synthetic oligonucleotide
uccagcuagggaucugaga

SEQ ID NO: 1208882 - RNA, 19 nt, Artificial Sequence
  Description of Artificial Sequence: Synthetic oligonucleotide
ggcacaguuaaguaaguaa

SEQ ID NO: 1208883 - RNA, 19 nt, Artificial Sequence
  Description of Artificial Sequence: Synthetic oligonucleotide
ugugagugcuguguggaaa

SEQ ID NO: 1208884 - RNA, 19 nt, Artificial Sequence
  Description of Artificial Sequence: Synthetic oligonucleotide
uuacgucuuaaaguagaaa

SEQ ID NO: 1208885 - RNA, 19 nt, Artificial Sequence
  Description of Artificial Sequence: Synthetic oligonucleotide
uucuaauaaucaugccuuu

SEQ ID NO: 1208886 - RNA, 19 nt, Artificial Sequence
  Description of Artificial Sequence: Synthetic oligonucleotide
acguuucucuuugcggcgc

SEQ ID NO: 1208887 - RNA, 19 nt, Artificial Sequence
  Description of Artificial Sequence: Synthetic oligonucleotide
aaccuacaaggcuacucuu

SEQ ID NO: 1208888 - RNA, 19 nt, Artificial Sequence
  Description of Artificial Sequence: Synthetic oligonucleotide
acauuagggaugggcauug

SEQ ID NO: 1208889 - RNA, 19 nt, Artificial Sequence
  Description of Artificial Sequence: Synthetic oligonucleotide
ugguuacccuugauaaauc

SEQ ID NO: 1208890 - RNA, 19 nt, Artificial Sequence
  Description of Artificial Sequence: Synthetic oligonucleotide
gacuccuagugacaguaaa

SEQ ID NO: 1208891 - RNA, 19 nt, Artificial Sequence
  Description of Artificial Sequence: Synthetic oligonucleotide
agcuaacuuugagucgucg

SEQ ID NO: 1208892 - RNA, 19 nt, Artificial Sequence
  Description of Artificial Sequence: Synthetic oligonucleotide
aaggcguuugucacauucu

SEQ ID NO: 1208893 - RNA, 19 nt, Artificial Sequence
  Description of Artificial Sequence: Synthetic oligonucleotide
caguguuacacacuaauau

SEQ ID NO: 1208894 - RNA, 19 nt, Artificial Sequence
  Description of Artificial Sequence: Synthetic oligonucleotide
aggaaugcaucagcuaacu

SEQ ID NO: 1208895 - RNA, 19 nt, Artificial Sequence
  Description of Artificial Sequence: Synthetic oligonucleotide
auccguaagcacaauggca

SEQ ID NO: 1208896 - RNA, 19 nt, Artificial Sequence
  Description of Artificial Sequence: Synthetic oligonucleotide
ugagcguugucaggaaggu

SEQ ID NO: 1208897 - RNA, 19 nt, Artificial Sequence
  Description of Artificial Sequence: Synthetic oligonucleotide
ugaucguuuucagcuguga

SEQ ID NO: 1208898 - RNA, 19 nt, Artificial Sequence
  Description of Artificial Sequence: Synthetic oligonucleotide
gcguuaaccaugaagcuac

SEQ ID NO: 1208899 - RNA, 19 nt, Artificial Sequence
  Description of Artificial Sequence: Synthetic oligonucleotide
agcgccaguuccucacagg

SEQ ID NO: 1208900 - RNA, 19 nt, Artificial Sequence
  Description of Artificial Sequence: Synthetic oligonucleotide
cuuauucggaugcguuaac

SEQ ID NO: 1208901 - RNA, 19 nt, Artificial Sequence
  Description of Artificial Sequence: Synthetic oligonucleotide
gucgucgucgagcuuggug

SEQ ID NO: 1208902 - RNA, 19 nt, Artificial Sequence
  Description of Artificial Sequence: Synthetic oligonucleotide
augggacucacuugacaga

SEQ ID NO: 1208903 - RNA, 19 nt, Artificial Sequence
  Description of Artificial Sequence: Synthetic oligonucleotide
gccgacauggucaugcucc

SEQ ID NO: 1208904 - RNA, 19 nt, Artificial Sequence
  Description of Artificial Sequence: Synthetic oligonucleotide
cacaaacagagcuacccaa

SEQ ID NO: 1208905 - RNA, 19 nt, Artificial Sequence
  Description of Artificial Sequence: Synthetic oligonucleotide
acuuugagucgucgucgag

SEQ ID NO: 1208906 - RNA, 19 nt, Artificial Sequence
  Description of Artificial Sequence: Synthetic oligonucleotide
aacacggggugguggucug

SEQ ID NO: 1208907 - RNA, 19 nt, Artificial Sequence
  Description of Artificial Sequence: Synthetic oligonucleotide
uaaugagcguugucaggaa

SEQ ID NO: 1208908 - RNA, 19 nt, Artificial Sequence
  Description of Artificial Sequence: Synthetic oligonucleotide
agugacgggacuaugucua

SEQ ID NO: 1208909 - RNA, 19 nt, Artificial Sequence
  Description of Artificial Sequence: Synthetic oligonucleotide
uggcuuauucggaugcguu

SEQ ID NO: 1208910 - RNA, 19 nt, Artificial Sequence
  Description of Artificial Sequence: Synthetic oligonucleotide
aaaacccuacggaaacaaa

SEQ ID NO: 1208911 - RNA, 19 nt, Artificial Sequence
  Description of Artificial Sequence: Synthetic oligonucleotide
gacuggaaagugacgggac

SEQ ID NO: 1208912 - RNA, 19 nt, Artificial Sequence
  Description of Artificial Sequence: Synthetic oligonucleotide
gguuacgucuuaaaguaga

SEQ ID NO: 1208913 - RNA, 19 nt, Artificial Sequence
  Description of Artificial Sequence: Synthetic oligonucleotide
agccgacauggucaugcuc

SEQ ID NO: 1208914 - RNA, 19 nt, Artificial Sequence
  Description of Artificial Sequence: Synthetic oligonucleotide
auccaaccuacaaggcuac

SEQ ID NO: 1208915 - RNA, 19 nt, Artificial Sequence
  Description of Artificial Sequence: Synthetic oligonucleotide
uaucagcguacaguuacau

SEQ ID NO: 1208916 - RNA, 19 nt, Artificial Sequence
  Description of Artificial Sequence: Synthetic oligonucleotide
uggcaacaguuuauauuaa

SEQ ID NO: 1208917 - RNA, 19 nt, Artificial Sequence
  Description of Artificial Sequence: Synthetic oligonucleotide
ucaauccuccucgcuccgg

SEQ ID NO: 1208918 - RNA, 19 nt, Artificial Sequence
  Description of Artificial Sequence: Synthetic oligonucleotide
uacccuugauaaaucuauu

SEQ ID NO: 1208919 - RNA, 19 nt, Artificial Sequence
  Description of Artificial Sequence: Synthetic oligonucleotide
guguuacacacuaauauau

SEQ ID NO: 1208920 - RNA, 19 nt, Artificial Sequence
  Description of Artificial Sequence: Synthetic oligonucleotide
uggaguccgccucacguuu

SEQ ID NO: 1208921 - RNA, 19 nt, Artificial Sequence
  Description of Artificial Sequence: Synthetic oligonucleotide
gcgguuacgucuuaaagua

SEQ ID NO: 1208922 - RNA, 19 nt, Artificial Sequence
  Description of Artificial Sequence: Synthetic oligonucleotide
gcucucacguccaaugcgg

SEQ ID NO: 1208923 - RNA, 19 nt, Artificial Sequence
  Description of Artificial Sequence: Synthetic oligonucleotide
guugguuacccuugauaaa

SEQ ID NO: 1208924 - RNA, 19 nt, Artificial Sequence
  Description of Artificial Sequence: Synthetic oligonucleotide
ucucggcuacuccucugca

SEQ ID NO: 1208925 - RNA, 19 nt, Artificial Sequence
  Description of Artificial Sequence: Synthetic oligonucleotide
gacgggacuaugucuaccu

SEQ ID NO: 1208926 - RNA, 19 nt, Artificial Sequence
  Description of Artificial Sequence: Synthetic oligonucleotide
guccaaugcgguuacgucu

SEQ ID NO: 1208927 - RNA, 19 nt, Artificial Sequence
  Description of Artificial Sequence: Synthetic oligonucleotide
uggaaagugacgggacuau

SEQ ID NO: 1208928 - RNA, 19 nt, Artificial Sequence
  Description of Artificial Sequence: Synthetic oligonucleotide
caguggaagugagugugag

SEQ ID NO: 1208929 - RNA, 19 nt, Artificial Sequence
  Description of Artificial Sequence: Synthetic oligonucleotide
ugacgggacuaugucuacc

SEQ ID NO: 1208930 - RNA, 19 nt, Artificial Sequence
  Description of Artificial Sequence: Synthetic oligonucleotide
uuaguguacccagccugcu

SEQ ID NO: 1208931 - RNA, 19 nt, Artificial Sequence
  Description of Artificial Sequence: Synthetic oligonucleotide
aggcguuugucacauucuu

SEQ ID NO: 1208932 - RNA, 19 nt, Artificial Sequence
  Description of Artificial Sequence: Synthetic oligonucleotide
aggguguucaccaguggcu

SEQ ID NO: 1208933 - RNA, 19 nt, Artificial Sequence
  Description of Artificial Sequence: Synthetic oligonucleotide
cauuggaguccgccucacg

SEQ ID NO: 1208934 - RNA, 19 nt, Artificial Sequence
  Description of Artificial Sequence: Synthetic oligonucleotide
cuggucguaggguccuggc

SEQ ID NO: 1208935 - RNA, 19 nt, Artificial Sequence
  Description of Artificial Sequence: Synthetic oligonucleotide
gggacuaugucuaccugug

SEQ ID NO: 1208936 - RNA, 19 nt, Artificial Sequence
  Description of Artificial Sequence: Synthetic oligonucleotide
caaccuacaaggcuacucu

SEQ ID NO: 1208937 - RNA, 19 nt, Artificial Sequence
  Description of Artificial Sequence: Synthetic oligonucleotide
acguccaaugcgguuacgu

SEQ ID NO: 1208938 - RNA, 19 nt, Artificial Sequence
  Description of Artificial Sequence: Synthetic oligonucleotide
cuacuggaaauccaaccua

SEQ ID NO: 1208939 - RNA, 19 nt, Artificial Sequence
  Description of Artificial Sequence: Synthetic oligonucleotide
gcagccgacauggucaugc

SEQ ID NO: 1208940 - RNA, 19 nt, Artificial Sequence
  Description of Artificial Sequence: Synthetic oligonucleotide
aggcacuacuguuugcgua

SEQ ID NO: 1208941 - RNA, 19 nt, Artificial Sequence
  Description of Artificial Sequence: Synthetic oligonucleotide
gacccgcgggagcaggcgg

SEQ ID NO: 1208942 - RNA, 19 nt, Artificial Sequence
  Description of Artificial Sequence: Synthetic oligonucleotide
ggacuaugucuaccugugg

SEQ ID NO: 1208943 - RNA, 19 nt, Artificial Sequence
  Description of Artificial Sequence: Synthetic oligonucleotide
agacuccaaguugguuacc

SEQ ID NO: 1208944 - RNA, 19 nt, Artificial Sequence
  Description of Artificial Sequence: Synthetic oligonucleotide
gcuacuccucugcaugucc

SEQ ID NO: 1208945 - RNA, 19 nt, Artificial Sequence
  Description of Artificial Sequence: Synthetic oligonucleotide
aacggugcucucacgucca

SEQ ID NO: 1208946 - RNA, 19 nt, Artificial Sequence
  Description of Artificial Sequence: Synthetic oligonucleotide
guuacgucuuaaaguagaa

SEQ ID NO: 1208947 - RNA, 19 nt, Artificial Sequence
  Description of Artificial Sequence: Synthetic oligonucleotide
guuugcguauagucuguaa

SEQ ID NO: 1208948 - RNA, 19 nt, Artificial Sequence
  Description of Artificial Sequence: Synthetic oligonucleotide
acgggacuaugucuaccug

SEQ ID NO: 1208949 - RNA, 19 nt, Artificial Sequence
  Description of Artificial Sequence: Synthetic oligonucleotide
gaccuuuaaggaagugauc

SEQ ID NO: 1208950 - RNA, 19 nt, Artificial Sequence
  Description of Artificial Sequence: Synthetic oligonucleotide
agauuauacuaagguuuaa

SEQ ID NO: 1208951 - RNA, 19 nt, Artificial Sequence
  Description of Artificial Sequence: Synthetic oligonucleotide
gcgccaguuccucacaggc

SEQ ID NO: 1208952 - RNA, 19 nt, Artificial Sequence
  Description of Artificial Sequence: Synthetic oligonucleotide
gagcuugcgucguuucuaa

SEQ ID NO: 1208953 - RNA, 19 nt, Artificial Sequence
  Description of Artificial Sequence: Synthetic oligonucleotide
ucgucgagcuuggugggcu

SEQ ID NO: 1208954 - RNA, 19 nt, Artificial Sequence
  Description of Artificial Sequence: Synthetic oligonucleotide
ugacccgcgggagcaggcg

SEQ ID NO: 1208955 - RNA, 19 nt, Artificial Sequence
  Description of Artificial Sequence: Synthetic oligonucleotide
ggacucacuugacagacua

SEQ ID NO: 1208956 - RNA, 19 nt, Artificial Sequence
  Description of Artificial Sequence: Synthetic oligonucleotide
agagcuugcgucguuucua

SEQ ID NO: 1208957 - RNA, 19 nt, Artificial Sequence
  Description of Artificial Sequence: Synthetic oligonucleotide
ucgcuccgguguuuagaag

SEQ ID NO: 1208958 - RNA, 19 nt, Artificial Sequence
  Description of Artificial Sequence: Synthetic oligonucleotide
ucucacguccaaugcgguu

SEQ ID NO: 1208959 - RNA, 19 nt, Artificial Sequence
  Description of Artificial Sequence: Synthetic oligonucleotide
gcugugacacugcuuuuac

SEQ ID NO: 1208960 - RNA, 19 nt, Artificial Sequence
  Description of Artificial Sequence: Synthetic oligonucleotide
ggaggguguucaccagugg

SEQ ID NO: 1208961 - RNA, 19 nt, Artificial Sequence
  Description of Artificial Sequence: Synthetic oligonucleotide
aauagagaucagacuccua

SEQ ID NO: 1208962 - RNA, 19 nt, Artificial Sequence
  Description of Artificial Sequence: Synthetic oligonucleotide
gacacugcuuuuacaauau

SEQ ID NO: 1208963 - RNA, 19 nt, Artificial Sequence
  Description of Artificial Sequence: Synthetic oligonucleotide
cucgcuccgguguuuagaa

SEQ ID NO: 1208964 - RNA, 19 nt, Artificial Sequence
  Description of Artificial Sequence: Synthetic oligonucleotide
uccgccucacguuucucuu

SEQ ID NO: 1208965 - RNA, 19 nt, Artificial Sequence
  Description of Artificial Sequence: Synthetic oligonucleotide
uuaccccuuuggauguauu

SEQ ID NO: 1208966 - RNA, 19 nt, Artificial Sequence
  Description of Artificial Sequence: Synthetic oligonucleotide
uggcuacaggaacggugcu

SEQ ID NO: 1208967 - RNA, 19 nt, Artificial Sequence
  Description of Artificial Sequence: Synthetic oligonucleotide
uguugacauuagggauggg

SEQ ID NO: 1208968 - RNA, 19 nt, Artificial Sequence
  Description of Artificial Sequence: Synthetic oligonucleotide
cucacguccaaugcgguua

SEQ ID NO: 1208969 - RNA, 19 nt, Artificial Sequence
  Description of Artificial Sequence: Synthetic oligonucleotide
uguuugcguauagucugua

SEQ ID NO: 1208970 - RNA, 19 nt, Artificial Sequence
  Description of Artificial Sequence: Synthetic oligonucleotide
ugucuaccuguggcagcgg

SEQ ID NO: 1208971 - RNA, 19 nt, Artificial Sequence
  Description of Artificial Sequence: Synthetic oligonucleotide
uugcgucguuucuaauaau

SEQ ID NO: 1208972 - RNA, 19 nt, Artificial Sequence
  Description of Artificial Sequence: Synthetic oligonucleotide
gugacgggacuaugucuac

SEQ ID NO: 1208973 - RNA, 19 nt, Artificial Sequence
  Description of Artificial Sequence: Synthetic oligonucleotide
gagcguugucaggaaggug

SEQ ID NO: 1208974 - RNA, 19 nt, Artificial Sequence
  Description of Artificial Sequence: Synthetic oligonucleotide
gugaucguuuucagcugug

SEQ ID NO: 1208975 - RNA, 19 nt, Artificial Sequence
  Description of Artificial Sequence: Synthetic oligonucleotide
accuacaaggcuacucuua

SEQ ID NO: 1208976 - RNA, 19 nt, Artificial Sequence
  Description of Artificial Sequence: Synthetic oligonucleotide
guaucagcguacaguuaca

SEQ ID NO: 1208977 - RNA, 19 nt, Artificial Sequence
  Description of Artificial Sequence: Synthetic oligonucleotide
caacuaaaccacaggcagu

SEQ ID NO: 1208978 - RNA, 19 nt, Artificial Sequence
  Description of Artificial Sequence: Synthetic oligonucleotide
cuuuaaggaagugaucguu

SEQ ID NO: 1208979 - RNA, 19 nt, Artificial Sequence
  Description of Artificial Sequence: Synthetic oligonucleotide
uccucgcuccgguguuuag

SEQ ID NO: 1208980 - RNA, 19 nt, Artificial Sequence
  Description of Artificial Sequence: Synthetic oligonucleotide
ggaacggugcucucacguc

SEQ ID NO: 1208981 - RNA, 19 nt, Artificial Sequence
  Description of Artificial Sequence: Synthetic oligonucleotide
uaccuguggcagcggcaug

SEQ ID NO: 1208982 - RNA, 19 nt, Artificial Sequence
  Description of Artificial Sequence: Synthetic oligonucleotide
ggaucugagaugacgggaa

SEQ ID NO: 1208983 - RNA, 19 nt, Artificial Sequence
  Description of Artificial Sequence: Synthetic oligonucleotide
ggaaagugacgggacuaug

SEQ ID NO: 1208984 - RNA, 19 nt, Artificial Sequence
  Description of Artificial Sequence: Synthetic oligonucleotide
ugacgggaacaugccgggc

SEQ ID NO: 1208985 - RNA, 19 nt, Artificial Sequence
  Description of Artificial Sequence: Synthetic oligonucleotide
gcuuauucggaugcguuaa

SEQ ID NO: 1208986 - RNA, 19 nt, Artificial Sequence
  Description of Artificial Sequence: Synthetic oligonucleotide
gcgucguuucuaauaauca

SEQ ID NO: 1208987 - RNA, 19 nt, Artificial Sequence
  Description of Artificial Sequence: Synthetic oligonucleotide
acgggcccuggcaugggac

SEQ ID NO: 1208988 - RNA, 19 nt, Artificial Sequence
  Description of Artificial Sequence: Synthetic oligonucleotide
cagaggugacccgcgggag

SEQ ID NO: 1208989 - RNA, 19 nt, Artificial Sequence
  Description of Artificial Sequence: Synthetic oligonucleotide
ggcaaaucgcuagacucca

SEQ ID NO: 1208990 - RNA, 19 nt, Artificial Sequence
  Description of Artificial Sequence: Synthetic oligonucleotide
agcuacccaaggcguuugu

SEQ ID NO: 1208991 - RNA, 19 nt, Artificial Sequence
  Description of Artificial Sequence: Synthetic oligonucleotide
gaugggcauuguaacaaau

SEQ ID NO: 1208992 - RNA, 19 nt, Artificial Sequence
  Description of Artificial Sequence: Synthetic oligonucleotide
ccagcuagggaucugagau

SEQ ID NO: 1208993 - RNA, 19 nt, Artificial Sequence
  Description of Artificial Sequence: Synthetic oligonucleotide
ucgagcuuggugggcucca

SEQ ID NO: 1208994 - RNA, 19 nt, Artificial Sequence
  Description of Artificial Sequence: Synthetic oligonucleotide
ccaaccuacaaggcuacuc

SEQ ID NO: 1208995 - RNA, 19 nt, Artificial Sequence
  Description of Artificial Sequence: Synthetic oligonucleotide
ggcuuauucggaugcguua

SEQ ID NO: 1208996 - RNA, 19 nt, Artificial Sequence
  Description of Artificial Sequence: Synthetic oligonucleotide
gucuguaaaaggagcuugu

SEQ ID NO: 1208997 - RNA, 19 nt, Artificial Sequence
  Description of Artificial Sequence: Synthetic oligonucleotide
gacauuagggaugggcauu

SEQ ID NO: 1208998 - RNA, 19 nt, Artificial Sequence
  Description of Artificial Sequence: Synthetic oligonucleotide
gaacacggggugguggucu

SEQ ID NO: 1208999 - RNA, 19 nt, Artificial Sequence
  Description of Artificial Sequence: Synthetic oligonucleotide
cagcuaacuuugagucguc

SEQ ID NO: 1209000 - RNA, 19 nt, Artificial Sequence
  Description of Artificial Sequence: Synthetic oligonucleotide
uggcuggucguaggguccu

SEQ ID NO: 1209001 - RNA, 19 nt, Artificial Sequence
  Description of Artificial Sequence: Synthetic oligonucleotide
ggcacuacuguuugcguau

SEQ ID NO: 1209002 - RNA, 19 nt, Artificial Sequence
  Description of Artificial Sequence: Synthetic oligonucleotide
gaagugagugugagagacu

SEQ ID NO: 1209003 - RNA, 19 nt, Artificial Sequence
  Description of Artificial Sequence: Synthetic oligonucleotide
aguccgccucacguuucuc

SEQ ID NO: 1209004 - RNA, 19 nt, Artificial Sequence
  Description of Artificial Sequence: Synthetic oligonucleotide
cuguuugcguauagucugu

SEQ ID NO: 1209005 - RNA, 19 nt, Artificial Sequence
  Description of Artificial Sequence: Synthetic oligonucleotide
gagucucggcuacuccucu

SEQ ID NO: 1209006 - RNA, 19 nt, Artificial Sequence
  Description of Artificial Sequence: Synthetic oligonucleotide
cuguaucagcguacaguua

SEQ ID NO: 1209007 - RNA, 19 nt, Artificial Sequence
  Description of Artificial Sequence: Synthetic oligonucleotide
gcgagcgccaguuccucac

SEQ ID NO: 1209008 - RNA, 19 nt, Artificial Sequence
  Description of Artificial Sequence: Synthetic oligonucleotide
ucguaggguccuggcuuug

SEQ ID NO: 1209009 - RNA, 19 nt, Artificial Sequence
  Description of Artificial Sequence: Synthetic oligonucleotide
gcuggucguaggguccugg

SEQ ID NO: 1209010 - RNA, 19 nt, Artificial Sequence
  Description of Artificial Sequence: Synthetic oligonucleotide
gucgucgagcuuggugggc

SEQ ID NO: 1209011 - RNA, 19 nt, Artificial Sequence
  Description of Artificial Sequence: Synthetic oligonucleotide
uugagucgucgucgagcuu

SEQ ID NO: 1209012 - RNA, 19 nt, Artificial Sequence
  Description of Artificial Sequence: Synthetic oligonucleotide
agggcgagcgccaguuccu

SEQ ID NO: 1209013 - RNA, 19 nt, Artificial Sequence
  Description of Artificial Sequence: Synthetic oligonucleotide
gcaguguuacacacuaaua

SEQ ID NO: 1209014 - RNA, 19 nt, Artificial Sequence
  Description of Artificial Sequence: Synthetic oligonucleotide
cguccaaugcgguuacguc

SEQ ID NO: 1209015 - RNA, 19 nt, Artificial Sequence
  Description of Artificial Sequence: Synthetic oligonucleotide
gaguccgccucacguuucu

SEQ ID NO: 1209016 - RNA, 19 nt, Artificial Sequence
  Description of Artificial Sequence: Synthetic oligonucleotide
cgguuacgucuuaaaguag

SEQ ID NO: 1209017 - RNA, 19 nt, Artificial Sequence
  Description of Artificial Sequence: Synthetic oligonucleotide
cuccgguguuuagaaguca

SEQ ID NO: 1209018 - RNA, 19 nt, Artificial Sequence
  Description of Artificial Sequence: Synthetic oligonucleotide
agacuccuagugacaguaa

SEQ ID NO: 1209019 - RNA, 19 nt, Artificial Sequence
  Description of Artificial Sequence: Synthetic oligonucleotide
cacguccaaugcgguuacg

SEQ ID NO: 1209020 - RNA, 19 nt, Artificial Sequence
  Description of Artificial Sequence: Synthetic oligonucleotide
gugacccgcgggagcaggc

SEQ ID NO: 1209021 - RNA, 19 nt, Artificial Sequence
  Description of Artificial Sequence: Synthetic oligonucleotide
ccaaguugguuacccuuga

SEQ ID NO: 1209022 - RNA, 19 nt, Artificial Sequence
  Description of Artificial Sequence: Synthetic oligonucleotide
gcuccgguguuuagaaguc

SEQ ID NO: 1209023 - RNA, 19 nt, Artificial Sequence
  Description of Artificial Sequence: Synthetic oligonucleotide
caaugcgguuacgucuuaa

SEQ ID NO: 1209024 - RNA, 19 nt, Artificial Sequence
  Description of Artificial Sequence: Synthetic oligonucleotide
cccuacggaaacaaacacu

SEQ ID NO: 1209025 - RNA, 19 nt, Artificial Sequence
  Description of Artificial Sequence: Synthetic oligonucleotide
cucucacguccaaugcggu

SEQ ID NO: 1209026 - RNA, 19 nt, Artificial Sequence
  Description of Artificial Sequence: Synthetic oligonucleotide
cuaccuguggcagcggcau

SEQ ID NO: 1209027 - RNA, 19 nt, Artificial Sequence
  Description of Artificial Sequence: Synthetic oligonucleotide
gcuacccaaggcguuuguc

SEQ ID NO: 1209028 - RNA, 19 nt, Artificial Sequence
  Description of Artificial Sequence: Synthetic oligonucleotide
acggugcucucacguccaa

SEQ ID NO: 1209029 - RNA, 19 nt, Artificial Sequence
  Description of Artificial Sequence: Synthetic oligonucleotide
gccuuaccccuuuggaugu

SEQ ID NO: 1209030 - RNA, 19 nt, Artificial Sequence
  Description of Artificial Sequence: Synthetic oligonucleotide
cccugauccguaagcacaa

SEQ ID NO: 1209031 - RNA, 19 nt, Artificial Sequence
  Description of Artificial Sequence: Synthetic oligonucleotide
ggucaugcuccugggucuc

SEQ ID NO: 1209032 - RNA, 19 nt, Artificial Sequence
  Description of Artificial Sequence: Synthetic oligonucleotide
caaucuaguauggcuuauu

SEQ ID NO: 1209033 - RNA, 19 nt, Artificial Sequence
  Description of Artificial Sequence: Synthetic oligonucleotide
ccuuuggauguauuggauu

SEQ ID NO: 1209034 - RNA, 19 nt, Artificial Sequence
  Description of Artificial Sequence: Synthetic oligonucleotide
ggcaugggacucacuugac

SEQ ID NO: 1209035 - RNA, 19 nt, Artificial Sequence
  Description of Artificial Sequence: Synthetic oligonucleotide
cucggcuacuccucugcau

SEQ ID NO: 1209036 - RNA, 19 nt, Artificial Sequence
  Description of Artificial Sequence: Synthetic oligonucleotide
ggcgggaugugagugcugu

SEQ ID NO: 1209037 - RNA, 19 nt, Artificial Sequence
  Description of Artificial Sequence: Synthetic oligonucleotide
gcacaauggcaaaucgcua

SEQ ID NO: 1209038 - RNA, 19 nt, Artificial Sequence
  Description of Artificial Sequence: Synthetic oligonucleotide
ccgcuggagcacugcagug

SEQ ID NO: 1209039 - RNA, 19 nt, Artificial Sequence
  Description of Artificial Sequence: Synthetic oligonucleotide
gcaugcgugggcgggaugu

SEQ ID NO: 1209040 - RNA, 19 nt, Artificial Sequence
  Description of Artificial Sequence: Synthetic oligonucleotide
cgcuccgguguuuagaagu

SEQ ID NO: 1209041 - RNA, 19 nt, Artificial Sequence
  Description of Artificial Sequence: Synthetic oligonucleotide
cuuaccccuuuggauguau

SEQ ID NO: 1209042 - RNA, 19 nt, Artificial Sequence
  Description of Artificial Sequence: Synthetic oligonucleotide
ggaacacgggguggugguc

SEQ ID NO: 1209043 - RNA, 19 nt, Artificial Sequence
  Description of Artificial Sequence: Synthetic oligonucleotide
cgucguuucuaauaaucau

SEQ ID NO: 1209044 - RNA, 19 nt, Artificial Sequence
  Description of Artificial Sequence: Synthetic oligonucleotide
ggcgagcgccaguuccuca

SEQ ID NO: 1209045 - RNA, 19 nt, Artificial Sequence
  Description of Artificial Sequence: Synthetic oligonucleotide
ggcaugcgugggcgggaug

SEQ ID NO: 1209046 - RNA, 19 nt, Artificial Sequence
  Description of Artificial Sequence: Synthetic oligonucleotide
ggaguccgccucacguuuc

SEQ ID NO: 1209047 - RNA, 19 nt, Artificial Sequence
  Description of Artificial Sequence: Synthetic oligonucleotide
ccguaagcacaauggcaaa

SEQ ID NO: 1209048 - RNA, 19 nt, Artificial Sequence
  Description of Artificial Sequence: Synthetic oligonucleotide
gcuagggaucugagaugac

SEQ ID NO: 1209049 - RNA, 19 nt, Artificial Sequence
  Description of Artificial Sequence: Synthetic oligonucleotide
cuuugcggcgcuggagggu

SEQ ID NO: 1209050 - RNA, 19 nt, Artificial Sequence
  Description of Artificial Sequence: Synthetic oligonucleotide
cgugacagggcgagcgcca

SEQ ID NO: 1209051 - RNA, 19 nt, Artificial Sequence
  Description of Artificial Sequence: Synthetic oligonucleotide
cagccgacauggucaugcu

SEQ ID NO: 1209052 - RNA, 19 nt, Artificial Sequence
  Description of Artificial Sequence: Synthetic oligonucleotide
cauuagggaugggcauugu

SEQ ID NO: 1209053 - RNA, 19 nt, Artificial Sequence
  Description of Artificial Sequence: Synthetic oligonucleotide
gcaaucuaguauggcuuau

SEQ ID NO: 1209054 - RNA, 19 nt, Artificial Sequence
  Description of Artificial Sequence: Synthetic oligonucleotide
ccucgcuccgguguuuaga

SEQ ID NO: 1209055 - RNA, 19 nt, Artificial Sequence
  Description of Artificial Sequence: Synthetic oligonucleotide
cacccacgggcccuggcau

SEQ ID NO: 1209056 - RNA, 19 nt, Artificial Sequence
  Description of Artificial Sequence: Synthetic oligonucleotide
gggaacaugccgggcccaa

SEQ ID NO: 1209057 - RNA, 19 nt, Artificial Sequence
  Description of Artificial Sequence: Synthetic oligonucleotide
gcaaaucgcuagacuccaa

SEQ ID NO: 1209058 - RNA, 19 nt, Artificial Sequence
  Description of Artificial Sequence: Synthetic oligonucleotide
ccucccgugguggcggguc

SEQ ID NO: 1209059 - RNA, 19 nt, Artificial Sequence
  Description of Artificial Sequence: Synthetic oligonucleotide
aggccccgugacagggcga

SEQ ID NO: 1209060 - RNA, 19 nt, Artificial Sequence
  Description of Artificial Sequence: Synthetic oligonucleotide
accucccgugguggcgggu

SEQ ID NO: 1209061 - RNA, 19 nt, Artificial Sequence
  Description of Artificial Sequence: Synthetic oligonucleotide
gggcgagcgccaguuccuc

SEQ ID NO: 1209062 - RNA, 19 nt, Artificial Sequence
  Description of Artificial Sequence: Synthetic oligonucleotide
ggcuggucguaggguccug

SEQ ID NO: 1209063 - RNA, 19 nt, Artificial Sequence
  Description of Artificial Sequence: Synthetic oligonucleotide
cgucgagcuuggugggcuc

SEQ ID NO: 1209064 - RNA, 19 nt, Artificial Sequence
  Description of Artificial Sequence: Synthetic oligonucleotide
gggacucacuugacagacu

SEQ ID NO: 1209065 - RNA, 19 nt, Artificial Sequence
  Description of Artificial Sequence: Synthetic oligonucleotide
ccgugguggcggguccucc

SEQ ID NO: 1209066 - RNA, 19 nt, Artificial Sequence
  Description of Artificial Sequence: Synthetic oligonucleotide
cccaaggcguuugucacau

SEQ ID NO: 1209067 - RNA, 19 nt, Artificial Sequence
  Description of Artificial Sequence: Synthetic oligonucleotide
ccgguguuuagaagucaau

SEQ ID NO: 1209068 - RNA, 19 nt, Artificial Sequence
  Description of Artificial Sequence: Synthetic oligonucleotide
ggcagccgacauggucaug

SEQ ID NO: 1209069 - RNA, 19 nt, Artificial Sequence
  Description of Artificial Sequence: Synthetic oligonucleotide
cgggaugugagugcugugu

SEQ ID NO: 1209070 - RNA, 19 nt, Artificial Sequence
  Description of Artificial Sequence: Synthetic oligonucleotide
cgacauggucaugcuccug

SEQ ID NO: 1209071 - RNA, 19 nt, Artificial Sequence
  Description of Artificial Sequence: Synthetic oligonucleotide
gccugguggcagccgacau

SEQ ID NO: 1209072 - RNA, 19 nt, Artificial Sequence
  Description of Artificial Sequence: Synthetic oligonucleotide
cguuaaccaugaagcuacu

SEQ ID NO: 1209073 - RNA, 19 nt, Artificial Sequence
  Description of Artificial Sequence: Synthetic oligonucleotide
ccaaugcgguuacgucuua

SEQ ID NO: 1209074 - RNA, 19 nt, Artificial Sequence
  Description of Artificial Sequence: Synthetic oligonucleotide
ccuuaccccuuuggaugua

SEQ ID NO: 1209075 - RNA, 19 nt, Artificial Sequence
  Description of Artificial Sequence: Synthetic oligonucleotide
ccugauccguaagcacaau

SEQ ID NO: 1209076 - RNA, 19 nt, Artificial Sequence
  Description of Artificial Sequence: Synthetic oligonucleotide
cggaugcguuaaccaugaa

SEQ ID NO: 1209077 - RNA, 19 nt, Artificial Sequence
  Description of Artificial Sequence: Synthetic oligonucleotide
cggugcucucacguccaau

SEQ ID NO: 1209078 - RNA, 19 nt, Artificial Sequence
  Description of Artificial Sequence: Synthetic oligonucleotide
aauauuucuaagcaaaagc

SEQ ID NO: 1209079 - RNA, 19 nt, Artificial Sequence
  Description of Artificial Sequence: Synthetic oligonucleotide
aauaauucagcuuggaccc

SEQ ID NO: 1209080 - RNA, 19 nt, Artificial Sequence
  Description of Artificial Sequence: Synthetic oligonucleotide
aaauacauccaauacauuc

SEQ ID NO: 1209081 - RNA, 19 nt, Artificial Sequence
  Description of Artificial Sequence: Synthetic oligonucleotide
uauauauaggacuauaggg

SEQ ID NO: 1209082 - RNA, 19 nt, Artificial Sequence
  Description of Artificial Sequence: Synthetic oligonucleotide
auagauuuaagauugacug

SEQ ID NO: 1209083 - RNA, 19 nt, Artificial Sequence
  Description of Artificial Sequence: Synthetic oligonucleotide
uuaccuaugaguaauauac

SEQ ID NO: 1209084 - RNA, 19 nt, Artificial Sequence
  Description of Artificial Sequence: Synthetic oligonucleotide
aauuuaaccauacacaaaa

SEQ ID NO: 1209085 - RNA, 19 nt, Artificial Sequence
  Description of Artificial Sequence: Synthetic oligonucleotide
uacauaaugaacuuuaaca

SEQ ID NO: 1209086 - RNA, 19 nt, Artificial Sequence
  Description of Artificial Sequence: Synthetic oligonucleotide
uaauaauucagcuuggacc

SEQ ID NO: 1209087 - RNA, 19 nt, Artificial Sequence
  Description of Artificial Sequence: Synthetic oligonucleotide
uggauaauaauucagcuug

SEQ ID NO: 1209088 - RNA, 19 nt, Artificial Sequence
  Description of Artificial Sequence: Synthetic oligonucleotide
aaauaaggauaauagaaca

SEQ ID NO: 1209089 - RNA, 19 nt, Artificial Sequence
  Description of Artificial Sequence: Synthetic oligonucleotide
ucaaaacuauguuacaugg

SEQ ID NO: 1209090 - RNA, 19 nt, Artificial Sequence
  Description of Artificial Sequence: Synthetic oligonucleotide
aaaacuauguuacaugggu

SEQ ID NO: 1209091 - RNA, 19 nt, Artificial Sequence
  Description of Artificial Sequence: Synthetic oligonucleotide
aaaggcuugauucccagac

SEQ ID NO: 1209092 - RNA, 19 nt, Artificial Sequence
  Description of Artificial Sequence: Synthetic oligonucleotide
ugaacuuuaacaaauuuaa

SEQ ID NO: 1209093 - RNA, 19 nt, Artificial Sequence
  Description of Artificial Sequence: Synthetic oligonucleotide
aaguaaaagauacaaguga

SEQ ID NO: 1209094 - RNA, 19 nt, Artificial Sequence
  Description of Artificial Sequence: Synthetic oligonucleotide
uuucucaucacaucggugg

SEQ ID NO: 1209095 - RNA, 19 nt, Artificial Sequence
  Description of Artificial Sequence: Synthetic oligonucleotide
uguauaguauauaauacac

SEQ ID NO: 1209096 - RNA, 19 nt, Artificial Sequence
  Description of Artificial Sequence: Synthetic oligonucleotide
aaauuaauaacccaaucuu

SEQ ID NO: 1209097 - RNA, 19 nt, Artificial Sequence
  Description of Artificial Sequence: Synthetic oligonucleotide
ugguagaccagucacauag

SEQ ID NO: 1209098 - RNA, 19 nt, Artificial Sequence
  Description of Artificial Sequence: Synthetic oligonucleotide
uuaaccauacacaaaauau

SEQ ID NO: 1209099 - RNA, 19 nt, Artificial Sequence
  Description of Artificial Sequence: Synthetic oligonucleotide
aacaucaguuauuuacacc

SEQ ID NO: 1209100 - RNA, 19 nt, Artificial Sequence
  Description of Artificial Sequence: Synthetic oligonucleotide
uauuagaauagauuuaccu

SEQ ID NO: 1209101 - RNA, 19 nt, Artificial Sequence
  Description of Artificial Sequence: Synthetic oligonucleotide
uauaauacacacaugguau

SEQ ID NO: 1209102 - RNA, 19 nt, Artificial Sequence
  Description of Artificial Sequence: Synthetic oligonucleotide
uuaucaaugaauuuuggau

SEQ ID NO: 1209103 - RNA, 19 nt, Artificial Sequence
  Description of Artificial Sequence: Synthetic oligonucleotide
aaacaucaguuauuuacac

SEQ ID NO: 1209104 - RNA, 19 nt, Artificial Sequence
  Description of Artificial Sequence: Synthetic oligonucleotide
uuuaagauugacuggauaa

SEQ ID NO: 1209105 - RNA, 19 nt, Artificial Sequence
  Description of Artificial Sequence: Synthetic oligonucleotide
aguuccaacauaaauauuc

SEQ ID NO: 1209106 - RNA, 19 nt, Artificial Sequence
  Description of Artificial Sequence: Synthetic oligonucleotide
guauauauaggacuauagg

SEQ ID NO: 1209107 - RNA, 19 nt, Artificial Sequence
  Description of Artificial Sequence: Synthetic oligonucleotide
aguaauauacuuuuaagua

SEQ ID NO: 1209108 - RNA, 19 nt, Artificial Sequence
  Description of Artificial Sequence: Synthetic oligonucleotide
uauuugacauuuaucauac

SEQ ID NO: 1209109 - RNA, 19 nt, Artificial Sequence
  Description of Artificial Sequence: Synthetic oligonucleotide
gaaaauaaggauaauagaa

SEQ ID NO: 1209110 - RNA, 19 nt, Artificial Sequence
  Description of Artificial Sequence: Synthetic oligonucleotide
aaauauauauuccucugaa

SEQ ID NO: 1209111 - RNA, 19 nt, Artificial Sequence
  Description of Artificial Sequence: Synthetic oligonucleotide
uuagaauagauuuaccuau

SEQ ID NO: 1209112 - RNA, 19 nt, Artificial Sequence
  Description of Artificial Sequence: Synthetic oligonucleotide
ugaguaauauacuuuuaag

SEQ ID NO: 1209113 - RNA, 19 nt, Artificial Sequence
  Description of Artificial Sequence: Synthetic oligonucleotide
acauuuguugacuauauga

SEQ ID NO: 1209114 - RNA, 19 nt, Artificial Sequence
  Description of Artificial Sequence: Synthetic oligonucleotide
uuauuccaaucuuuuaugg

SEQ ID NO: 1209115 - RNA, 19 nt, Artificial Sequence
  Description of Artificial Sequence: Synthetic oligonucleotide
uaaaugagugcuuacaaaa

SEQ ID NO: 1209116 - RNA, 19 nt, Artificial Sequence
  Description of Artificial Sequence: Synthetic oligonucleotide
acaaguuacuuuuagagaa

SEQ ID NO: 1209117 - RNA, 19 nt, Artificial Sequence
  Description of Artificial Sequence: Synthetic oligonucleotide
uaaccauacacaaaauaug

SEQ ID NO: 1209118 - RNA, 19 nt, Artificial Sequence
  Description of Artificial Sequence: Synthetic oligonucleotide
auacauaaugaacuuuaac

SEQ ID NO: 1209119 - RNA, 19 nt, Artificial Sequence
  Description of Artificial Sequence: Synthetic oligonucleotide
ucuaguaacuaucauuuaa

SEQ ID NO: 1209120 - RNA, 19 nt, Artificial Sequence
  Description of Artificial Sequence: Synthetic oligonucleotide
aguaauuauuguuuguaug

SEQ ID NO: 1209121 - RNA, 19 nt, Artificial Sequence
  Description of Artificial Sequence: Synthetic oligonucleotide
uguuacauggguauuuuac

SEQ ID NO: 1209122 - RNA, 19 nt, Artificial Sequence
  Description of Artificial Sequence: Synthetic oligonucleotide
uucuaaauauuucaacaac

SEQ ID NO: 1209123 - RNA, 19 nt, Artificial Sequence
  Description of Artificial Sequence: Synthetic oligonucleotide
gaugacaugacaggcaccg

SEQ ID NO: 1209124 - RNA, 19 nt, Artificial Sequence
  Description of Artificial Sequence: Synthetic oligonucleotide
uucuauacuauaauucacu

SEQ ID NO: 1209125 - RNA, 19 nt, Artificial Sequence
  Description of Artificial Sequence: Synthetic oligonucleotide
uuacuaauaauaaaacauu

SEQ ID NO: 1209126 - RNA, 19 nt, Artificial Sequence
  Description of Artificial Sequence: Synthetic oligonucleotide
uauauauuccucugaaacu

SEQ ID NO: 1209127 - RNA, 19 nt, Artificial Sequence
  Description of Artificial Sequence: Synthetic oligonucleotide
auauauucaaaacaaguua

SEQ ID NO: 1209128 - RNA, 19 nt, Artificial Sequence
  Description of Artificial Sequence: Synthetic oligonucleotide
agaccagucacauagauuu

SEQ ID NO: 1209129 - RNA, 19 nt, Artificial Sequence
  Description of Artificial Sequence: Synthetic oligonucleotide
aaaagauacaagugacucu

SEQ ID NO: 1209130 - RNA, 19 nt, Artificial Sequence
  Description of Artificial Sequence: Synthetic oligonucleotide
cugaaacuaauaaauuugc

SEQ ID NO: 1209131 - RNA, 19 nt, Artificial Sequence
  Description of Artificial Sequence: Synthetic oligonucleotide
cuaagcaaaagcuaugguc

SEQ ID NO: 1209132 - RNA, 19 nt, Artificial Sequence
  Description of Artificial Sequence: Synthetic oligonucleotide
uauauaggacuauagggac

SEQ ID NO: 1209133 - RNA, 19 nt, Artificial Sequence
  Description of Artificial Sequence: Synthetic oligonucleotide
uuuaugggagcaaauaaau

SEQ ID NO: 1209134 - RNA, 19 nt, Artificial Sequence
  Description of Artificial Sequence: Synthetic oligonucleotide
auugacuggauaauaauuc

SEQ ID NO: 1209135 - RNA, 19 nt, Artificial Sequence
  Description of Artificial Sequence: Synthetic oligonucleotide
acuauaauucacuuuauua

SEQ ID NO: 1209136 - RNA, 19 nt, Artificial Sequence
  Description of Artificial Sequence: Synthetic oligonucleotide
uucacuuuauuauuugaca

SEQ ID NO: 1209137 - RNA, 19 nt, Artificial Sequence
  Description of Artificial Sequence: Synthetic oligonucleotide
acuuacuaauaauaaaaca

SEQ ID NO: 1209138 - RNA, 19 nt, Artificial Sequence
  Description of Artificial Sequence: Synthetic oligonucleotide
uacuuacuaauaauaaaac

SEQ ID NO: 1209139 - RNA, 19 nt, Artificial Sequence
  Description of Artificial Sequence: Synthetic oligonucleotide
acuguauaguauauaauac

SEQ ID NO: 1209140 - RNA, 19 nt, Artificial Sequence
  Description of Artificial Sequence: Synthetic oligonucleotide
auuauuccaaucuuuuaug

SEQ ID NO: 1209141 - RNA, 19 nt, Artificial Sequence
  Description of Artificial Sequence: Synthetic oligonucleotide
auaauagaacauuuagaug

SEQ ID NO: 1209142 - RNA, 19 nt, Artificial Sequence
  Description of Artificial Sequence: Synthetic oligonucleotide
uaaaagauacaagugacuc

SEQ ID NO: 1209143 - RNA, 19 nt, Artificial Sequence
  Description of Artificial Sequence: Synthetic oligonucleotide
guggaaaaccuucaggagg

SEQ ID NO: 1209144 - RNA, 19 nt, Artificial Sequence
  Description of Artificial Sequence: Synthetic oligonucleotide
uuuuggauguuacauaaua

SEQ ID NO: 1209145 - RNA, 19 nt, Artificial Sequence
  Description of Artificial Sequence: Synthetic oligonucleotide
aacucugauugguacuuac

SEQ ID NO: 1209146 - RNA, 19 nt, Artificial Sequence
  Description of Artificial Sequence: Synthetic oligonucleotide
uuuaaccauacacaaaaua

SEQ ID NO: 1209147 - RNA, 19 nt, Artificial Sequence
  Description of Artificial Sequence: Synthetic oligonucleotide
aauuauuguuuguauguaa

SEQ ID NO: 1209148 - RNA, 19 nt, Artificial Sequence
  Description of Artificial Sequence: Synthetic oligonucleotide
ugagcuauuucucaauggu

SEQ ID NO: 1209149 - RNA, 19 nt, Artificial Sequence
  Description of Artificial Sequence: Synthetic oligonucleotide
gaauagauuuaccuaugag

SEQ ID NO: 1209150 - RNA, 19 nt, Artificial Sequence
  Description of Artificial Sequence: Synthetic oligonucleotide
uugacuguauaguauauaa

SEQ ID NO: 1209151 - RNA, 19 nt, Artificial Sequence
  Description of Artificial Sequence: Synthetic oligonucleotide
auauaauacacacauggua

SEQ ID NO: 1209152 - RNA, 19 nt, Artificial Sequence
  Description of Artificial Sequence: Synthetic oligonucleotide
gacucuuguauauauagga

SEQ ID NO: 1209153 - RNA, 19 nt, Artificial Sequence
  Description of Artificial Sequence: Synthetic oligonucleotide
agucacauagauuuaagau

SEQ ID NO: 1209154 - RNA, 19 nt, Artificial Sequence
  Description of Artificial Sequence: Synthetic oligonucleotide
uguaaaugagugcuuacaa

SEQ ID NO: 1209155 - RNA, 19 nt, Artificial Sequence
  Description of Artificial Sequence: Synthetic oligonucleotide
uucuaagcaaaagcuaugg

SEQ ID NO: 1209156 - RNA, 19 nt, Artificial Sequence
  Description of Artificial Sequence: Synthetic oligonucleotide
cuauaugaguggauaauag

SEQ ID NO: 1209157 - RNA, 19 nt, Artificial Sequence
  Description of Artificial Sequence: Synthetic oligonucleotide
auacauuauuauuccaauc

SEQ ID NO: 1209158 - RNA, 19 nt, Artificial Sequence
  Description of Artificial Sequence: Synthetic oligonucleotide
auuagaauagauuuaccua

SEQ ID NO: 1209159 - RNA, 19 nt, Artificial Sequence
  Description of Artificial Sequence: Synthetic oligonucleotide
aucaaaacuauguuacaug

SEQ ID NO: 1209160 - RNA, 19 nt, Artificial Sequence
  Description of Artificial Sequence: Synthetic oligonucleotide
ucuuguauauauaggacua

SEQ ID NO: 1209161 - RNA, 19 nt, Artificial Sequence
  Description of Artificial Sequence: Synthetic oligonucleotide
aaggguuuacaucuuaaau

SEQ ID NO: 1209162 - RNA, 19 nt, Artificial Sequence
  Description of Artificial Sequence: Synthetic oligonucleotide
cuaauaaauuugcuugagg

SEQ ID NO: 1209163 - RNA, 19 nt, Artificial Sequence
  Description of Artificial Sequence: Synthetic oligonucleotide
uguucugaacucuugcacc

SEQ ID NO: 1209164 - RNA, 19 nt, Artificial Sequence
  Description of Artificial Sequence: Synthetic oligonucleotide
guuacuuuuagagaaccag

SEQ ID NO: 1209165 - RNA, 19 nt, Artificial Sequence
  Description of Artificial Sequence: Synthetic oligonucleotide
gaagcuucugccuggcugg

SEQ ID NO: 1209166 - RNA, 19 nt, Artificial Sequence
  Description of Artificial Sequence: Synthetic oligonucleotide
ugacuggauaauaauucag

SEQ ID NO: 1209167 - RNA, 19 nt, Artificial Sequence
  Description of Artificial Sequence: Synthetic oligonucleotide
accaguuugauauuuuacu

SEQ ID NO: 1209168 - RNA, 19 nt, Artificial Sequence
  Description of Artificial Sequence: Synthetic oligonucleotide
uauaggacuauagggaccc

SEQ ID NO: 1209169 - RNA, 19 nt, Artificial Sequence
  Description of Artificial Sequence: Synthetic oligonucleotide
auauauaggacuauaggga

SEQ ID NO: 1209170 - RNA, 19 nt, Artificial Sequence
  Description of Artificial Sequence: Synthetic oligonucleotide
uauaugaguggauaauagu

SEQ ID NO: 1209171 - RNA, 19 nt, Artificial Sequence
  Description of Artificial Sequence: Synthetic oligonucleotide
uuaauggaaacaacuugac

SEQ ID NO: 1209172 - RNA, 19 nt, Artificial Sequence
  Description of Artificial Sequence: Synthetic oligonucleotide
aauguauguuuucuaaaua

SEQ ID NO: 1209173 - RNA, 19 nt, Artificial Sequence
  Description of Artificial Sequence: Synthetic oligonucleotide
ugucauuucugguauuacc

SEQ ID NO: 1209174 - RNA, 19 nt, Artificial Sequence
  Description of Artificial Sequence: Synthetic oligonucleotide
auggguauuuuacaaagga

SEQ ID NO: 1209175 - RNA, 19 nt, Artificial Sequence
  Description of Artificial Sequence: Synthetic oligonucleotide
aucuuaaauaugcaucucu

SEQ ID NO: 1209176 - RNA, 19 nt, Artificial Sequence
  Description of Artificial Sequence: Synthetic oligonucleotide
ugauugaggaguccggucu

SEQ ID NO: 1209177 - RNA, 19 nt, Artificial Sequence
  Description of Artificial Sequence: Synthetic oligonucleotide
agauuuaagauugacugga

SEQ ID NO: 1209178 - RNA, 19 nt, Artificial Sequence
  Description of Artificial Sequence: Synthetic oligonucleotide
aaagcuauggucugcucau

SEQ ID NO: 1209179 - RNA, 19 nt, Artificial Sequence
  Description of Artificial Sequence: Synthetic oligonucleotide
agaugaaacuuaucaauga

SEQ ID NO: 1209180 - RNA, 19 nt, Artificial Sequence
  Description of Artificial Sequence: Synthetic oligonucleotide
uuuggauguuacauaauau

SEQ ID NO: 1209181 - RNA, 19 nt, Artificial Sequence
  Description of Artificial Sequence: Synthetic oligonucleotide
gaguaauauacuuuuaagu

SEQ ID NO: 1209182 - RNA, 19 nt, Artificial Sequence
  Description of Artificial Sequence: Synthetic oligonucleotide
uuucuaagcaaaagcuaug

SEQ ID NO: 1209183 - RNA, 19 nt, Artificial Sequence
  Description of Artificial Sequence: Synthetic oligonucleotide
aacauuuguugacuauaug

SEQ ID NO: 1209184 - RNA, 19 nt, Artificial Sequence
  Description of Artificial Sequence: Synthetic oligonucleotide
ugguacuuacuaauaauaa

SEQ ID NO: 1209185 - RNA, 19 nt, Artificial Sequence
  Description of Artificial Sequence: Synthetic oligonucleotide
aguguucuugacuguauag

SEQ ID NO: 1209186 - RNA, 19 nt, Artificial Sequence
  Description of Artificial Sequence: Synthetic oligonucleotide
aggcauuagacauuuaaau

SEQ ID NO: 1209187 - RNA, 19 nt, Artificial Sequence
  Description of Artificial Sequence: Synthetic oligonucleotide
auagauuuaccuaugagua

SEQ ID NO: 1209188 - RNA, 19 nt, Artificial Sequence
  Description of Artificial Sequence: Synthetic oligonucleotide
guaauuauuguuuguaugu

SEQ ID NO: 1209189 - RNA, 19 nt, Artificial Sequence
  Description of Artificial Sequence: Synthetic oligonucleotide
ucuuaaauaugcaucucuu

SEQ ID NO: 1209190 - RNA, 19 nt, Artificial Sequence
  Description of Artificial Sequence: Synthetic oligonucleotide
aaaccuucaggaggaaagg

SEQ ID NO: 1209191 - RNA, 19 nt, Artificial Sequence
  Description of Artificial Sequence: Synthetic oligonucleotide
aauaaggauaauagaacau

SEQ ID NO: 1209192 - RNA, 19 nt, Artificial Sequence
  Description of Artificial Sequence: Synthetic oligonucleotide
gacuggauaauaauucagc

SEQ ID NO: 1209193 - RNA, 19 nt, Artificial Sequence
  Description of Artificial Sequence: Synthetic oligonucleotide
ucauauauuugcaguuaca

SEQ ID NO: 1209194 - RNA, 19 nt, Artificial Sequence
  Description of Artificial Sequence: Synthetic oligonucleotide
uuggauguuacauaauauu

SEQ ID NO: 1209195 - RNA, 19 nt, Artificial Sequence
  Description of Artificial Sequence: Synthetic oligonucleotide
acauagauuuaagauugac

SEQ ID NO: 1209196 - RNA, 19 nt, Artificial Sequence
  Description of Artificial Sequence: Synthetic oligonucleotide
uguguuguguguguggcag

SEQ ID NO: 1209197 - RNA, 19 nt, Artificial Sequence
  Description of Artificial Sequence: Synthetic oligonucleotide
uuacauggguauuuuacaa

SEQ ID NO: 1209198 - RNA, 19 nt, Artificial Sequence
  Description of Artificial Sequence: Synthetic oligonucleotide
uauuucucaaugguagacc

SEQ ID NO: 1209199 - RNA, 19 nt, Artificial Sequence
  Description of Artificial Sequence: Synthetic oligonucleotide
auuugcuugaggcauuaga

SEQ ID NO: 1209200 - RNA, 19 nt, Artificial Sequence
  Description of Artificial Sequence: Synthetic oligonucleotide
agaacuguuugaaugaacu

SEQ ID NO: 1209201 - RNA, 19 nt, Artificial Sequence
  Description of Artificial Sequence: Synthetic oligonucleotide
aggaguccggucucuaacc

SEQ ID NO: 1209202 - RNA, 19 nt, Artificial Sequence
  Description of Artificial Sequence: Synthetic oligonucleotide
ugcuaguuccaacauaaau

SEQ ID NO: 1209203 - RNA, 19 nt, Artificial Sequence
  Description of Artificial Sequence: Synthetic oligonucleotide
acagccucggagcugauug

SEQ ID NO: 1209204 - RNA, 19 nt, Artificial Sequence
  Description of Artificial Sequence: Synthetic oligonucleotide
uguccacugagcuauuucu

SEQ ID NO: 1209205 - RNA, 19 nt, Artificial Sequence
  Description of Artificial Sequence: Synthetic oligonucleotide
uccgaggaaacugacagca

SEQ ID NO: 1209206 - RNA, 19 nt, Artificial Sequence
  Description of Artificial Sequence: Synthetic oligonucleotide
ucuauacuauaauucacuu

SEQ ID NO: 1209207 - RNA, 19 nt, Artificial Sequence
  Description of Artificial Sequence: Synthetic oligonucleotide
cuguauaguauauaauaca

SEQ ID NO: 1209208 - RNA, 19 nt, Artificial Sequence
  Description of Artificial Sequence: Synthetic oligonucleotide
uuuugugugugugugugug

SEQ ID NO: 1209209 - RNA, 19 nt, Artificial Sequence
  Description of Artificial Sequence: Synthetic oligonucleotide
ucugauugguacuuacuaa

SEQ ID NO: 1209210 - RNA, 19 nt, Artificial Sequence
  Description of Artificial Sequence: Synthetic oligonucleotide
aagaacuguuugaaugaac

SEQ ID NO: 1209211 - RNA, 19 nt, Artificial Sequence
  Description of Artificial Sequence: Synthetic oligonucleotide
aaugguagaccagucacau

SEQ ID NO: 1209212 - RNA, 19 nt, Artificial Sequence
  Description of Artificial Sequence: Synthetic oligonucleotide
acucuuguauauauaggac

SEQ ID NO: 1209213 - RNA, 19 nt, Artificial Sequence
  Description of Artificial Sequence: Synthetic oligonucleotide
cauggguauuuuacaaagg

SEQ ID NO: 1209214 - RNA, 19 nt, Artificial Sequence
  Description of Artificial Sequence: Synthetic oligonucleotide
agaauagauuuaccuauga

SEQ ID NO: 1209215 - RNA, 19 nt, Artificial Sequence
  Description of Artificial Sequence: Synthetic oligonucleotide
acuaauaaauuugcuugag

SEQ ID NO: 1209216 - RNA, 19 nt, Artificial Sequence
  Description of Artificial Sequence: Synthetic oligonucleotide
cauccaauacauucaacuc

SEQ ID NO: 1209217 - RNA, 19 nt, Artificial Sequence
  Description of Artificial Sequence: Synthetic oligonucleotide
agcuuguacagccucggag

SEQ ID NO: 1209218 - RNA, 19 nt, Artificial Sequence
  Description of Artificial Sequence: Synthetic oligonucleotide
gguauuagaauagauuuac

SEQ ID NO: 1209219 - RNA, 19 nt, Artificial Sequence
  Description of Artificial Sequence: Synthetic oligonucleotide
cugagcuauuucucaaugg

SEQ ID NO: 1209220 - RNA, 19 nt, Artificial Sequence
  Description of Artificial Sequence: Synthetic oligonucleotide
ugguauuaccaguauuucu

SEQ ID NO: 1209221 - RNA, 19 nt, Artificial Sequence
  Description of Artificial Sequence: Synthetic oligonucleotide
aauggcaacuuggucagca

SEQ ID NO: 1209222 - RNA, 19 nt, Artificial Sequence
  Description of Artificial Sequence: Synthetic oligonucleotide
uuuaccuaugaguaauaua

SEQ ID NO: 1209223 - RNA, 19 nt, Artificial Sequence
  Description of Artificial Sequence: Synthetic oligonucleotide
guuacauggguauuuuaca

SEQ ID NO: 1209224 - RNA, 19 nt, Artificial Sequence
  Description of Artificial Sequence: Synthetic oligonucleotide
ggagcaaauaaauagauau

SEQ ID NO: 1209225 - RNA, 19 nt, Artificial Sequence
  Description of Artificial Sequence: Synthetic oligonucleotide
gauugguacuuacuaauaa

SEQ ID NO: 1209226 - RNA, 19 nt, Artificial Sequence
  Description of Artificial Sequence: Synthetic oligonucleotide
ucuaagcaaaagcuauggu

SEQ ID NO: 1209227 - RNA, 19 nt, Artificial Sequence
  Description of Artificial Sequence: Synthetic oligonucleotide
gaggucccuguauuaaagg

SEQ ID NO: 1209228 - RNA, 19 nt, Artificial Sequence
  Description of Artificial Sequence: Synthetic oligonucleotide
ugggagcaaauaaauagau

SEQ ID NO: 1209229 - RNA, 19 nt, Artificial Sequence
  Description of Artificial Sequence: Synthetic oligonucleotide
uuugaaugaacugcuaguu

SEQ ID NO: 1209230 - RNA, 19 nt, Artificial Sequence
  Description of Artificial Sequence: Synthetic oligonucleotide
gagaauguuuuguggaaca

SEQ ID NO: 1209231 - RNA, 19 nt, Artificial Sequence
  Description of Artificial Sequence: Synthetic oligonucleotide
cucauauauuugcaguuac

SEQ ID NO: 1209232 - RNA, 19 nt, Artificial Sequence
  Description of Artificial Sequence: Synthetic oligonucleotide
uuuggggagguggaaaacc

SEQ ID NO: 1209233 - RNA, 19 nt, Artificial Sequence
  Description of Artificial Sequence: Synthetic oligonucleotide
auauauuccucugaaacua

SEQ ID NO: 1209234 - RNA, 19 nt, Artificial Sequence
  Description of Artificial Sequence: Synthetic oligonucleotide
auaaggauaauagaacauu

SEQ ID NO: 1209235 - RNA, 19 nt, Artificial Sequence
  Description of Artificial Sequence: Synthetic oligonucleotide
uuauuauuccaaucuuuua

SEQ ID NO: 1209236 - RNA, 19 nt, Artificial Sequence
  Description of Artificial Sequence: Synthetic oligonucleotide
uggccugcauaauguaucg

SEQ ID NO: 1209237 - RNA, 19 nt, Artificial Sequence
  Description of Artificial Sequence: Synthetic oligonucleotide
cauaaugaacuuuaacaaa

SEQ ID NO: 1209238 - RNA, 19 nt, Artificial Sequence
  Description of Artificial Sequence: Synthetic oligonucleotide
uucucaaugguagaccagu

SEQ ID NO: 1209239 - RNA, 19 nt, Artificial Sequence
  Description of Artificial Sequence: Synthetic oligonucleotide
acacacaugguauuagaau

SEQ ID NO: 1209240 - RNA, 19 nt, Artificial Sequence
  Description of Artificial Sequence: Synthetic oligonucleotide
auaugaguggauaauagua

SEQ ID NO: 1209241 - RNA, 19 nt, Artificial Sequence
  Description of Artificial Sequence: Synthetic oligonucleotide
uugacuauaugaguggaua

SEQ ID NO: 1209242 - RNA, 19 nt, Artificial Sequence
  Description of Artificial Sequence: Synthetic oligonucleotide
uguguguuguguguguggc

SEQ ID NO: 1209243 - RNA, 19 nt, Artificial Sequence
  Description of Artificial Sequence: Synthetic oligonucleotide
uguguguguguguugugug

SEQ ID NO: 1209244 - RNA, 19 nt, Artificial Sequence
  Description of Artificial Sequence: Synthetic oligonucleotide
aagauugacuggauaauaa

SEQ ID NO: 1209245 - RNA, 19 nt, Artificial Sequence
  Description of Artificial Sequence: Synthetic oligonucleotide
aacuuggucagcauuugga

SEQ ID NO: 1209246 - RNA, 19 nt, Artificial Sequence
  Description of Artificial Sequence: Synthetic oligonucleotide
ugacuauaugaguggauaa

SEQ ID NO: 1209247 - RNA, 19 nt, Artificial Sequence
  Description of Artificial Sequence: Synthetic oligonucleotide
uuagagaaccaguuugaua

SEQ ID NO: 1209248 - RNA, 19 nt, Artificial Sequence
  Description of Artificial Sequence: Synthetic oligonucleotide
accuaugaguaauauacuu

SEQ ID NO: 1209249 - RNA, 19 nt, Artificial Sequence
  Description of Artificial Sequence: Synthetic oligonucleotide
uuaagauugacuggauaau

SEQ ID NO: 1209250 - RNA, 19 nt, Artificial Sequence
  Description of Artificial Sequence: Synthetic oligonucleotide
uguguaaaugagugcuuac

SEQ ID NO: 1209251 - RNA, 19 nt, Artificial Sequence
  Description of Artificial Sequence: Synthetic oligonucleotide
uacuauaauucacuuuauu

SEQ ID NO: 1209252 - RNA, 19 nt, Artificial Sequence
  Description of Artificial Sequence: Synthetic oligonucleotide
aguggauaauaguaauuau

SEQ ID NO: 1209253 - RNA, 19 nt, Artificial Sequence
  Description of Artificial Sequence: Synthetic oligonucleotide
ugacuguauaguauauaau

SEQ ID NO: 1209254 - RNA, 19 nt, Artificial Sequence
  Description of Artificial Sequence: Synthetic oligonucleotide
uacauggguauuuuacaaa

SEQ ID NO: 1209255 - RNA, 19 nt, Artificial Sequence
  Description of Artificial Sequence: Synthetic oligonucleotide
acucagggugcaccggugc

SEQ ID NO: 1209256 - RNA, 19 nt, Artificial Sequence
  Description of Artificial Sequence: Synthetic oligonucleotide
ugauugguacuuacuaaua

SEQ ID NO: 1209257 - RNA, 19 nt, Artificial Sequence
  Description of Artificial Sequence: Synthetic oligonucleotide
uaugaguaauauacuuuua

SEQ ID NO: 1209258 - RNA, 19 nt, Artificial Sequence
  Description of Artificial Sequence: Synthetic oligonucleotide
uaccaguauuucuaguaac

SEQ ID NO: 1209259 - RNA, 19 nt, Artificial Sequence
  Description of Artificial Sequence: Synthetic oligonucleotide
caaguuacuuuuagagaac

SEQ ID NO: 1209260 - RNA, 19 nt, Artificial Sequence
  Description of Artificial Sequence: Synthetic oligonucleotide
augaguggauaauaguaau

SEQ ID NO: 1209261 - RNA, 19 nt, Artificial Sequence
  Description of Artificial Sequence: Synthetic oligonucleotide
uguacagccucggagcuga

SEQ ID NO: 1209262 - RNA, 19 nt, Artificial Sequence
  Description of Artificial Sequence: Synthetic oligonucleotide
gcuccgaggaaacugacag

SEQ ID NO: 1209263 - RNA, 19 nt, Artificial Sequence
  Description of Artificial Sequence: Synthetic oligonucleotide
ugaguggauaauaguaauu

SEQ ID NO: 1209264 - RNA, 19 nt, Artificial Sequence
  Description of Artificial Sequence: Synthetic oligonucleotide
auuuaagauugacuggaua

SEQ ID NO: 1209265 - RNA, 19 nt, Artificial Sequence
  Description of Artificial Sequence: Synthetic oligonucleotide
uaccuaugaguaauauacu

SEQ ID NO: 1209266 - RNA, 19 nt, Artificial Sequence
  Description of Artificial Sequence: Synthetic oligonucleotide
agcaguccgacuccagagg

SEQ ID NO: 1209267 - RNA, 19 nt, Artificial Sequence
  Description of Artificial Sequence: Synthetic oligonucleotide
gagcugauugaggaguccg

SEQ ID NO: 1209268 - RNA, 19 nt, Artificial Sequence
  Description of Artificial Sequence: Synthetic oligonucleotide
ugggaaugcuuauucuucu

SEQ ID NO: 1209269 - RNA, 19 nt, Artificial Sequence
  Description of Artificial Sequence: Synthetic oligonucleotide
uguugacuauaugagugga

SEQ ID NO: 1209270 - RNA, 19 nt, Artificial Sequence
  Description of Artificial Sequence: Synthetic oligonucleotide
acuuaucaaugaauuuugg

SEQ ID NO: 1209271 - RNA, 19 nt, Artificial Sequence
  Description of Artificial Sequence: Synthetic oligonucleotide
ugcucauauauuugcaguu

SEQ ID NO: 1209272 - RNA, 19 nt, Artificial Sequence
  Description of Artificial Sequence: Synthetic oligonucleotide
ggaaugcuuauucuucucc

SEQ ID NO: 1209273 - RNA, 19 nt, Artificial Sequence
  Description of Artificial Sequence: Synthetic oligonucleotide
uaagauugacuggauaaua

SEQ ID NO: 1209274 - RNA, 19 nt, Artificial Sequence
  Description of Artificial Sequence: Synthetic oligonucleotide
aaggcuugauucccagacu

SEQ ID NO: 1209275 - RNA, 19 nt, Artificial Sequence
  Description of Artificial Sequence: Synthetic oligonucleotide
guaaaugagugcuuacaaa

SEQ ID NO: 1209276 - RNA, 19 nt, Artificial Sequence
  Description of Artificial Sequence: Synthetic oligonucleotide
auaacccaaucuuugucau

SEQ ID NO: 1209277 - RNA, 19 nt, Artificial Sequence
  Description of Artificial Sequence: Synthetic oligonucleotide
ucuugacuguauaguauau

SEQ ID NO: 1209278 - RNA, 19 nt, Artificial Sequence
  Description of Artificial Sequence: Synthetic oligonucleotide
uuaguguucuugacuguau

SEQ ID NO: 1209279 - RNA, 19 nt, Artificial Sequence
  Description of Artificial Sequence: Synthetic oligonucleotide
uguguguguguugugugug

SEQ ID NO: 1209280 - RNA, 19 nt, Artificial Sequence
  Description of Artificial Sequence: Synthetic oligonucleotide
caucaguuauuuacaccag

SEQ ID NO: 1209281 - RNA, 19 nt, Artificial Sequence
  Description of Artificial Sequence: Synthetic oligonucleotide
aaggauaauagaacauuua

SEQ ID NO: 1209282 - RNA, 19 nt, Artificial Sequence
  Description of Artificial Sequence: Synthetic oligonucleotide
cucuugggaaugcuuauuc

SEQ ID NO: 1209283 - RNA, 19 nt, Artificial Sequence
  Description of Artificial Sequence: Synthetic oligonucleotide
uugugugugugugugugug

SEQ ID NO: 1209284 - RNA, 19 nt, Artificial Sequence
  Description of Artificial Sequence: Synthetic oligonucleotide
cuugauucccagacuggug

SEQ ID NO: 1209285 - RNA, 19 nt, Artificial Sequence
  Description of Artificial Sequence: Synthetic oligonucleotide
acuauaugaguggauaaua

SEQ ID NO: 1209286 - RNA, 19 nt, Artificial Sequence
  Description of Artificial Sequence: Synthetic oligonucleotide
acaucgguggccugcauaa

SEQ ID NO: 1209287 - RNA, 19 nt, Artificial Sequence
  Description of Artificial Sequence: Synthetic oligonucleotide
gguacuuacuaauaauaaa

SEQ ID NO: 1209288 - RNA, 19 nt, Artificial Sequence
  Description of Artificial Sequence: Synthetic oligonucleotide
acauucaacucugauuggu

SEQ ID NO: 1209289 - RNA, 19 nt, Artificial Sequence
  Description of Artificial Sequence: Synthetic oligonucleotide
aauucagcuuggacccugg

SEQ ID NO: 1209290 - RNA, 19 nt, Artificial Sequence
  Description of Artificial Sequence: Synthetic oligonucleotide
ugaugacaugacaggcacc

SEQ ID NO: 1209291 - RNA, 19 nt, Artificial Sequence
  Description of Artificial Sequence: Synthetic oligonucleotide
aacugcuaguuccaacaua

SEQ ID NO: 1209292 - RNA, 19 nt, Artificial Sequence
  Description of Artificial Sequence: Synthetic oligonucleotide
cucuuguauauauaggacu

SEQ ID NO: 1209293 - RNA, 19 nt, Artificial Sequence
  Description of Artificial Sequence: Synthetic oligonucleotide
guguguguugugugugugg

SEQ ID NO: 1209294 - RNA, 19 nt, Artificial Sequence
  Description of Artificial Sequence: Synthetic oligonucleotide
ggggugguggcucacacag

SEQ ID NO: 1209295 - RNA, 19 nt, Artificial Sequence
  Description of Artificial Sequence: Synthetic oligonucleotide
uuuagagaaccaguuugau

SEQ ID NO: 1209296 - RNA, 19 nt, Artificial Sequence
  Description of Artificial Sequence: Synthetic oligonucleotide
gcacaugaugacaugacag

SEQ ID NO: 1209297 - RNA, 19 nt, Artificial Sequence
  Description of Artificial Sequence: Synthetic oligonucleotide
augggagcaaauaaauaga

SEQ ID NO: 1209298 - RNA, 19 nt, Artificial Sequence
  Description of Artificial Sequence: Synthetic oligonucleotide
ggaagcuucugccuggcug

SEQ ID NO: 1209299 - RNA, 19 nt, Artificial Sequence
  Description of Artificial Sequence: Synthetic oligonucleotide
guuauguccacugagcuau

SEQ ID NO: 1209300 - RNA, 19 nt, Artificial Sequence
  Description of Artificial Sequence: Synthetic oligonucleotide
acauuuagaugaaacuuau

SEQ ID NO: 1209301 - RNA, 19 nt, Artificial Sequence
  Description of Artificial Sequence: Synthetic oligonucleotide
uucugguauuaccaguauu

SEQ ID NO: 1209302 - RNA, 19 nt, Artificial Sequence
  Description of Artificial Sequence: Synthetic oligonucleotide
cuaugaguaauauacuuuu

SEQ ID NO: 1209303 - RNA, 19 nt, Artificial Sequence
  Description of Artificial Sequence: Synthetic oligonucleotide
agaggucccuguauuaaag

SEQ ID NO: 1209304 - RNA, 19 nt, Artificial Sequence
  Description of Artificial Sequence: Synthetic oligonucleotide
aguuauguccacugagcua

SEQ ID NO: 1209305 - RNA, 19 nt, Artificial Sequence
  Description of Artificial Sequence: Synthetic oligonucleotide
ggaaugaucaaaacuaugu

SEQ ID NO: 1209306 - RNA, 19 nt, Artificial Sequence
  Description of Artificial Sequence: Synthetic oligonucleotide
aaccuucaggaggaaagga

SEQ ID NO: 1209307 - RNA, 19 nt, Artificial Sequence
  Description of Artificial Sequence: Synthetic oligonucleotide
uuugugugugugugugugu

SEQ ID NO: 1209308 - RNA, 19 nt, Artificial Sequence
  Description of Artificial Sequence: Synthetic oligonucleotide
uaguguucuugacuguaua

SEQ ID NO: 1209309 - RNA, 19 nt, Artificial Sequence
  Description of Artificial Sequence: Synthetic oligonucleotide
gaggaaacugacagcaguc

SEQ ID NO: 1209310 - RNA, 19 nt, Artificial Sequence
  Description of Artificial Sequence: Synthetic oligonucleotide
uauggucugcucauauauu

SEQ ID NO: 1209311 - RNA, 19 nt, Artificial Sequence
  Description of Artificial Sequence: Synthetic oligonucleotide
uguguguguguguguguug

SEQ ID NO: 1209312 - RNA, 19 nt, Artificial Sequence
  Description of Artificial Sequence: Synthetic oligonucleotide
uucuuagcuguguucugaa

SEQ ID NO: 1209313 - RNA, 19 nt, Artificial Sequence
  Description of Artificial Sequence: Synthetic oligonucleotide
uguguguguugugugugug

SEQ ID NO: 1209314 - RNA, 19 nt, Artificial Sequence
  Description of Artificial Sequence: Synthetic oligonucleotide
uauguuacauggguauuuu

SEQ ID NO: 1209315 - RNA, 19 nt, Artificial Sequence
  Description of Artificial Sequence: Synthetic oligonucleotide
ugcaccggugcacaccacu

SEQ ID NO: 1209316 - RNA, 19 nt, Artificial Sequence
  Description of Artificial Sequence: Synthetic oligonucleotide
ucuuagcuguguucugaac

SEQ ID NO: 1209317 - RNA, 19 nt, Artificial Sequence
  Description of Artificial Sequence: Synthetic oligonucleotide
auuuaccuaugaguaauau

SEQ ID NO: 1209318 - RNA, 19 nt, Artificial Sequence
  Description of Artificial Sequence: Synthetic oligonucleotide
cagucacauagauuuaaga

SEQ ID NO: 1209319 - RNA, 19 nt, Artificial Sequence
  Description of Artificial Sequence: Synthetic oligonucleotide
ucuugcacccugcuuucuc

SEQ ID NO: 1209320 - RNA, 19 nt, Artificial Sequence
  Description of Artificial Sequence: Synthetic oligonucleotide
aaugaacugcuaguuccaa

SEQ ID NO: 1209321 - RNA, 19 nt, Artificial Sequence
  Description of Artificial Sequence: Synthetic oligonucleotide
caugguauuagaauagauu

SEQ ID NO: 1209322 - RNA, 19 nt, Artificial Sequence
  Description of Artificial Sequence: Synthetic oligonucleotide
gaggcauuagacauuuaaa

SEQ ID NO: 1209323 - RNA, 19 nt, Artificial Sequence
  Description of Artificial Sequence: Synthetic oligonucleotide
guguaaaugagugcuuaca

SEQ ID NO: 1209324 - RNA, 19 nt, Artificial Sequence
  Description of Artificial Sequence: Synthetic oligonucleotide
gaaugaacugcuaguucca

SEQ ID NO: 1209325 - RNA, 19 nt, Artificial Sequence
  Description of Artificial Sequence: Synthetic oligonucleotide
gcuaguuccaacauaaaua

SEQ ID NO: 1209326 - RNA, 19 nt, Artificial Sequence
  Description of Artificial Sequence: Synthetic oligonucleotide
gauugaggaguccggucuc

SEQ ID NO: 1209327 - RNA, 19 nt, Artificial Sequence
  Description of Artificial Sequence: Synthetic oligonucleotide
ccauacacaaaauauggaa

SEQ ID NO: 1209328 - RNA, 19 nt, Artificial Sequence
  Description of Artificial Sequence: Synthetic oligonucleotide
ucucaucacaucgguggcc

SEQ ID NO: 1209329 - RNA, 19 nt, Artificial Sequence
  Description of Artificial Sequence: Synthetic oligonucleotide
caacaacuuaguguucuug

SEQ ID NO: 1209330 - RNA, 19 nt, Artificial Sequence
  Description of Artificial Sequence: Synthetic oligonucleotide
uucuaguaacuaucauuua

SEQ ID NO: 1209331 - RNA, 19 nt, Artificial Sequence
  Description of Artificial Sequence: Synthetic oligonucleotide
cucaaugguagaccaguca

SEQ ID NO: 1209332 - RNA, 19 nt, Artificial Sequence
  Description of Artificial Sequence: Synthetic oligonucleotide
ugugugugugugugugugu

SEQ ID NO: 1209333 - RNA, 19 nt, Artificial Sequence
  Description of Artificial Sequence: Synthetic oligonucleotide
caucacaucgguggccugc

SEQ ID NO: 1209334 - RNA, 19 nt, Artificial Sequence
  Description of Artificial Sequence: Synthetic oligonucleotide
cugguauuaccaguauuuc

SEQ ID NO: 1209335 - RNA, 19 nt, Artificial Sequence
  Description of Artificial Sequence: Synthetic oligonucleotide
uguguguguguguguugug

SEQ ID NO: 1209336 - RNA, 19 nt, Artificial Sequence
  Description of Artificial Sequence: Synthetic oligonucleotide
caaugguagaccagucaca

SEQ ID NO: 1209337 - RNA, 19 nt, Artificial Sequence
  Description of Artificial Sequence: Synthetic oligonucleotide
auuugacauuuaucauaca

SEQ ID NO: 1209338 - RNA, 19 nt, Artificial Sequence
  Description of Artificial Sequence: Synthetic oligonucleotide
uucuggcuagaaugauggc

SEQ ID NO: 1209339 - RNA, 19 nt, Artificial Sequence
  Description of Artificial Sequence: Synthetic oligonucleotide
cuauggucugcucauauau

SEQ ID NO: 1209340 - RNA, 19 nt, Artificial Sequence
  Description of Artificial Sequence: Synthetic oligonucleotide
accggugcacaccacugcu

SEQ ID NO: 1209341 - RNA, 19 nt, Artificial Sequence
  Description of Artificial Sequence: Synthetic oligonucleotide
gugugugugugugugugug

SEQ ID NO: 1209342 - RNA, 19 nt, Artificial Sequence
  Description of Artificial Sequence: Synthetic oligonucleotide
gcaguuauguccacugagc

SEQ ID NO: 1209343 - RNA, 19 nt, Artificial Sequence
  Description of Artificial Sequence: Synthetic oligonucleotide
gaaugauggccugcuccag

SEQ ID NO: 1209344 - RNA, 19 nt, Artificial Sequence
  Description of Artificial Sequence: Synthetic oligonucleotide
cugauugguacuuacuaau

SEQ ID NO: 1209345 - RNA, 19 nt, Artificial Sequence
  Description of Artificial Sequence: Synthetic oligonucleotide
agcugauugaggaguccgg

SEQ ID NO: 1209346 - RNA, 19 nt, Artificial Sequence
  Description of Artificial Sequence: Synthetic oligonucleotide
aggacuauagggacccugu

SEQ ID NO: 1209347 - RNA, 19 nt, Artificial Sequence
  Description of Artificial Sequence: Synthetic oligonucleotide
caucuuaaauaugcaucuc

SEQ ID NO: 1209348 - RNA, 19 nt, Artificial Sequence
  Description of Artificial Sequence: Synthetic oligonucleotide
cuugcacccugcuuucuca

SEQ ID NO: 1209349 - RNA, 19 nt, Artificial Sequence
  Description of Artificial Sequence: Synthetic oligonucleotide
uguuguguguguggcaguu

SEQ ID NO: 1209350 - RNA, 19 nt, Artificial Sequence
  Description of Artificial Sequence: Synthetic oligonucleotide
cauucaacucugauuggua

SEQ ID NO: 1209351 - RNA, 19 nt, Artificial Sequence
  Description of Artificial Sequence: Synthetic oligonucleotide
auucccagacuggugcucu

SEQ ID NO: 1209352 - RNA, 19 nt, Artificial Sequence
  Description of Artificial Sequence: Synthetic oligonucleotide
gacuauaugaguggauaau

SEQ ID NO: 1209353 - RNA, 19 nt, Artificial Sequence
  Description of Artificial Sequence: Synthetic oligonucleotide
acucugauugguacuuacu

SEQ ID NO: 1209354 - RNA, 19 nt, Artificial Sequence
  Description of Artificial Sequence: Synthetic oligonucleotide
cuagaaugauggccugcuc

SEQ ID NO: 1209355 - RNA, 19 nt, Artificial Sequence
  Description of Artificial Sequence: Synthetic oligonucleotide
gcuauuucucaaugguaga

SEQ ID NO: 1209356 - RNA, 19 nt, Artificial Sequence
  Description of Artificial Sequence: Synthetic oligonucleotide
acuauguuacauggguauu

SEQ ID NO: 1209357 - RNA, 19 nt, Artificial Sequence
  Description of Artificial Sequence: Synthetic oligonucleotide
cuggauaauaauucagcuu

SEQ ID NO: 1209358 - RNA, 19 nt, Artificial Sequence
  Description of Artificial Sequence: Synthetic oligonucleotide
cuauacuauaauucacuuu

SEQ ID NO: 1209359 - RNA, 19 nt, Artificial Sequence
  Description of Artificial Sequence: Synthetic oligonucleotide
uaacccaaucuuugucauu

SEQ ID NO: 1209360 - RNA, 19 nt, Artificial Sequence
  Description of Artificial Sequence: Synthetic oligonucleotide
cacauagauuuaagauuga

SEQ ID NO: 1209361 - RNA, 19 nt, Artificial Sequence
  Description of Artificial Sequence: Synthetic oligonucleotide
uuguacagccucggagcug

SEQ ID NO: 1209362 - RNA, 19 nt, Artificial Sequence
  Description of Artificial Sequence: Synthetic oligonucleotide
caguuauguccacugagcu

SEQ ID NO: 1209363 - RNA, 19 nt, Artificial Sequence
  Description of Artificial Sequence: Synthetic oligonucleotide
auauuccucugaaacuaau

SEQ ID NO: 1209364 - RNA, 19 nt, Artificial Sequence
  Description of Artificial Sequence: Synthetic oligonucleotide
caccggugcacaccacugc

SEQ ID NO: 1209365 - RNA, 19 nt, Artificial Sequence
  Description of Artificial Sequence: Synthetic oligonucleotide
acccuggcaugucucccag

SEQ ID NO: 1209366 - RNA, 19 nt, Artificial Sequence
  Description of Artificial Sequence: Synthetic oligonucleotide
guguucuugacuguauagu

SEQ ID NO: 1209367 - RNA, 19 nt, Artificial Sequence
  Description of Artificial Sequence: Synthetic oligonucleotide
cuauagggacccugugaga

SEQ ID NO: 1209368 - RNA, 19 nt, Artificial Sequence
  Description of Artificial Sequence: Synthetic oligonucleotide
auggcaacuuggucagcau

SEQ ID NO: 1209369 - RNA, 19 nt, Artificial Sequence
  Description of Artificial Sequence: Synthetic oligonucleotide
ggaaaggagaauguuuugu

SEQ ID NO: 1209370 - RNA, 19 nt, Artificial Sequence
  Description of Artificial Sequence: Synthetic oligonucleotide
ggugcaccggugcacacca

SEQ ID NO: 1209371 - RNA, 19 nt, Artificial Sequence
  Description of Artificial Sequence: Synthetic oligonucleotide
ggcuugauucccagacugg

SEQ ID NO: 1209372 - RNA, 19 nt, Artificial Sequence
  Description of Artificial Sequence: Synthetic oligonucleotide
agugacucuuguauauaua

SEQ ID NO: 1209373 - RNA, 19 nt, Artificial Sequence
  Description of Artificial Sequence: Synthetic oligonucleotide
cuugacuguauaguauaua

SEQ ID NO: 1209374 - RNA, 19 nt, Artificial Sequence
  Description of Artificial Sequence: Synthetic oligonucleotide
ggacuauagggacccugug

SEQ ID NO: 1209375 - RNA, 19 nt, Artificial Sequence
  Description of Artificial Sequence: Synthetic oligonucleotide
cuguguaaaugagugcuua

SEQ ID NO: 1209376 - RNA, 19 nt, Artificial Sequence
  Description of Artificial Sequence: Synthetic oligonucleotide
aucacaucgguggccugca

SEQ ID NO: 1209377 - RNA, 19 nt, Artificial Sequence
  Description of Artificial Sequence: Synthetic oligonucleotide
caaucuuuuaugggagcaa

SEQ ID NO: 1209378 - RNA, 19 nt, Artificial Sequence
  Description of Artificial Sequence: Synthetic oligonucleotide
cagcuuggacccuggcaug

SEQ ID NO: 1209379 - RNA, 19 nt, Artificial Sequence
  Description of Artificial Sequence: Synthetic oligonucleotide
gaacugcuaguuccaacau

SEQ ID NO: 1209380 - RNA, 19 nt, Artificial Sequence
  Description of Artificial Sequence: Synthetic oligonucleotide
agcuuggacccuggcaugu

SEQ ID NO: 1209381 - RNA, 19 nt, Artificial Sequence
  Description of Artificial Sequence: Synthetic oligonucleotide
gggaaugcuuauucuucuc

SEQ ID NO: 1209382 - RNA, 19 nt, Artificial Sequence
  Description of Artificial Sequence: Synthetic oligonucleotide
cagaggucccuguauuaaa

SEQ ID NO: 1209383 - RNA, 19 nt, Artificial Sequence
  Description of Artificial Sequence: Synthetic oligonucleotide
cuuguacagccucggagcu

SEQ ID NO: 1209384 - RNA, 19 nt, Artificial Sequence
  Description of Artificial Sequence: Synthetic oligonucleotide
guguguuguguguguggca

SEQ ID NO: 1209385 - RNA, 19 nt, Artificial Sequence
  Description of Artificial Sequence: Synthetic oligonucleotide
cagcuccgaggaaacugac

SEQ ID NO: 1209386 - RNA, 19 nt, Artificial Sequence
  Description of Artificial Sequence: Synthetic oligonucleotide
guguguguguguugugugu

SEQ ID NO: 1209387 - RNA, 19 nt, Artificial Sequence
  Description of Artificial Sequence: Synthetic oligonucleotide
cuugaggcauuagacauuu

SEQ ID NO: 1209388 - RNA, 19 nt, Artificial Sequence
  Description of Artificial Sequence: Synthetic oligonucleotide
augguagaccagucacaua

SEQ ID NO: 1209389 - RNA, 19 nt, Artificial Sequence
  Description of Artificial Sequence: Synthetic oligonucleotide
guguguguguguguguugu

SEQ ID NO: 1209390 - RNA, 19 nt, Artificial Sequence
  Description of Artificial Sequence: Synthetic oligonucleotide
cuguuugaaugaacugcua

SEQ ID NO: 1209391 - RNA, 19 nt, Artificial Sequence
  Description of Artificial Sequence: Synthetic oligonucleotide
agcuccgaggaaacugaca

SEQ ID NO: 1209392 - RNA, 19 nt, Artificial Sequence
  Description of Artificial Sequence: Synthetic oligonucleotide
cuauguuacauggguauuu

SEQ ID NO: 1209393 - RNA, 19 nt, Artificial Sequence
  Description of Artificial Sequence: Synthetic oligonucleotide
ggaaggguuuacaucuuaa

SEQ ID NO: 1209394 - RNA, 19 nt, Artificial Sequence
  Description of Artificial Sequence: Synthetic oligonucleotide
aagcuauggucugcucaua

SEQ ID NO: 1209395 - RNA, 19 nt, Artificial Sequence
  Description of Artificial Sequence: Synthetic oligonucleotide
guguguguguguguugugu

SEQ ID NO: 1209396 - RNA, 19 nt, Artificial Sequence
  Description of Artificial Sequence: Synthetic oligonucleotide
ccuaugaguaauauacuuu

SEQ ID NO: 1209397 - RNA, 19 nt, Artificial Sequence
  Description of Artificial Sequence: Synthetic oligonucleotide
gcucauauauuugcaguua

SEQ ID NO: 1209398 - RNA, 19 nt, Artificial Sequence
  Description of Artificial Sequence: Synthetic oligonucleotide
gucccuguauuaaaggcuu

SEQ ID NO: 1209399 - RNA, 19 nt, Artificial Sequence
  Description of Artificial Sequence: Synthetic oligonucleotide
guguguguguugugugugu

SEQ ID NO: 1209400 - RNA, 19 nt, Artificial Sequence
  Description of Artificial Sequence: Synthetic oligonucleotide
guugacuauaugaguggau

SEQ ID NO: 1209401 - RNA, 19 nt, Artificial Sequence
  Description of Artificial Sequence: Synthetic oligonucleotide
cacaucgguggccugcaua

SEQ ID NO: 1209402 - RNA, 19 nt, Artificial Sequence
  Description of Artificial Sequence: Synthetic oligonucleotide
ggaggaaaggagaauguuu

SEQ ID NO: 1209403 - RNA, 19 nt, Artificial Sequence
  Description of Artificial Sequence: Synthetic oligonucleotide
gaacucuugcacccugcuu

SEQ ID NO: 1209404 - RNA, 19 nt, Artificial Sequence
  Description of Artificial Sequence: Synthetic oligonucleotide
ucacaucgguggccugcau

SEQ ID NO: 1209405 - RNA, 19 nt, Artificial Sequence
  Description of Artificial Sequence: Synthetic oligonucleotide
gcuagaaugauggccugcu

SEQ ID NO: 1209406 - RNA, 19 nt, Artificial Sequence
  Description of Artificial Sequence: Synthetic oligonucleotide
ccgaggaaacugacagcag

SEQ ID NO: 1209407 - RNA, 19 nt, Artificial Sequence
  Description of Artificial Sequence: Synthetic oligonucleotide
gcuauggucugcucauaua

SEQ ID NO: 1209408 - RNA, 19 nt, Artificial Sequence
  Description of Artificial Sequence: Synthetic oligonucleotide
ccagaggcgcugcauggug

SEQ ID NO: 1209409 - RNA, 19 nt, Artificial Sequence
  Description of Artificial Sequence: Synthetic oligonucleotide
auaggacuauagggacccu

SEQ ID NO: 1209410 - RNA, 19 nt, Artificial Sequence
  Description of Artificial Sequence: Synthetic oligonucleotide
gggaaggguuuacaucuua

SEQ ID NO: 1209411 - RNA, 19 nt, Artificial Sequence
  Description of Artificial Sequence: Synthetic oligonucleotide
gcuugauucccagacuggu

SEQ ID NO: 1209412 - RNA, 19 nt, Artificial Sequence
  Description of Artificial Sequence: Synthetic oligonucleotide
gcaccggugcacaccacug

SEQ ID NO: 1209413 - RNA, 19 nt, Artificial Sequence
  Description of Artificial Sequence: Synthetic oligonucleotide
ggcaccgagccugucgcac

SEQ ID NO: 1209414 - RNA, 19 nt, Artificial Sequence
  Description of Artificial Sequence: Synthetic oligonucleotide
cagggugcaccggugcaca

SEQ ID NO: 1209415 - RNA, 19 nt, Artificial Sequence
  Description of Artificial Sequence: Synthetic oligonucleotide
ccaauacauucaacucuga

SEQ ID NO: 1209416 - RNA, 19 nt, Artificial Sequence
  Description of Artificial Sequence: Synthetic oligonucleotide
guguguguguguguguguu

SEQ ID NO: 1209417 - RNA, 19 nt, Artificial Sequence
  Description of Artificial Sequence: Synthetic oligonucleotide
cagaggcgcugcauggugu

SEQ ID NO: 1209418 - RNA, 19 nt, Artificial Sequence
  Description of Artificial Sequence: Synthetic oligonucleotide
gcugauugaggaguccggu

SEQ ID NO: 1209419 - RNA, 19 nt, Artificial Sequence
  Description of Artificial Sequence: Synthetic oligonucleotide
gcaccgagccugucgcaca

SEQ ID NO: 1209420 - RNA, 19 nt, Artificial Sequence
  Description of Artificial Sequence: Synthetic oligonucleotide
caacucugauugguacuua

SEQ ID NO: 1209421 - RNA, 19 nt, Artificial Sequence
  Description of Artificial Sequence: Synthetic oligonucleotide
gguggccugcauaauguau

SEQ ID NO: 1209422 - RNA, 19 nt, Artificial Sequence
  Description of Artificial Sequence: Synthetic oligonucleotide
ccgacuccagaggcgcugc

SEQ ID NO: 1209423 - RNA, 19 nt, Artificial Sequence
  Description of Artificial Sequence: Synthetic oligonucleotide
gcgcugcaugguguguuca

SEQ ID NO: 1209424 - RNA, 19 nt, Artificial Sequence
  Description of Artificial Sequence: Synthetic oligonucleotide
gugcaccggugcacaccac

SEQ ID NO: 1209425 - RNA, 19 nt, Artificial Sequence
  Description of Artificial Sequence: Synthetic oligonucleotide
cucuugcacccugcuuucu

SEQ ID NO: 1209426 - RNA, 19 nt, Artificial Sequence
  Description of Artificial Sequence: Synthetic oligonucleotide
gccugucgcacagcuccga

SEQ ID NO: 1209427 - RNA, 19 nt, Artificial Sequence
  Description of Artificial Sequence: Synthetic oligonucleotide
guccgacuccagaggcgcu

SEQ ID NO: 1209428 - RNA, 19 nt, Artificial Sequence
  Description of Artificial Sequence: Synthetic oligonucleotide
caucgguggccugcauaau

SEQ ID NO: 1209429 - RNA, 19 nt, Artificial Sequence
  Description of Artificial Sequence: Synthetic oligonucleotide
guacagccucggagcugau

SEQ ID NO: 1209430 - RNA, 19 nt, Artificial Sequence
  Description of Artificial Sequence: Synthetic oligonucleotide
aggaaaaucacaccgaccc

SEQ ID NO: 1209431 - RNA, 19 nt, Artificial Sequence
  Description of Artificial Sequence: Synthetic oligonucleotide
acuuaauucagauauaaug

SEQ ID NO: 1209432 - RNA, 19 nt, Artificial Sequence
  Description of Artificial Sequence: Synthetic oligonucleotide
uugauuuuaguuuuggaag

SEQ ID NO: 1209433 - RNA, 19 nt, Artificial Sequence
  Description of Artificial Sequence: Synthetic oligonucleotide
ugaagaaguauccaaauga

SEQ ID NO: 1209434 - RNA, 19 nt, Artificial Sequence
  Description of Artificial Sequence: Synthetic oligonucleotide
aauagcauagcggagcagc

SEQ ID NO: 1209435 - RNA, 19 nt, Artificial Sequence
  Description of Artificial Sequence: Synthetic oligonucleotide
ucagauauaauguuugucu

SEQ ID NO: 1209436 - RNA, 19 nt, Artificial Sequence
  Description of Artificial Sequence: Synthetic oligonucleotide
auuagugaagucuaucccg

SEQ ID NO: 1209437 - RNA, 19 nt, Artificial Sequence
  Description of Artificial Sequence: Synthetic oligonucleotide
cuaaguaugaacaugguca

SEQ ID NO: 1209438 - RNA, 19 nt, Artificial Sequence
  Description of Artificial Sequence: Synthetic oligonucleotide
uuuaccuucauagacaucu

SEQ ID NO: 1209439 - RNA, 19 nt, Artificial Sequence
  Description of Artificial Sequence: Synthetic oligonucleotide
ugauuuuaguuuuggaagg

SEQ ID NO: 1209440 - RNA, 19 nt, Artificial Sequence
  Description of Artificial Sequence: Synthetic oligonucleotide
uaauguuugucuuaagacc

SEQ ID NO: 1209441 - RNA, 19 nt, Artificial Sequence
  Description of Artificial Sequence: Synthetic oligonucleotide
agucaauaaaauuaagucu

SEQ ID NO: 1209442 - RNA, 19 nt, Artificial Sequence
  Description of Artificial Sequence: Synthetic oligonucleotide
augaagugagaauuugucc

SEQ ID NO: 1209443 - RNA, 19 nt, Artificial Sequence
  Description of Artificial Sequence: Synthetic oligonucleotide
gaaagcuugagagagacug

SEQ ID NO: 1209444 - RNA, 19 nt, Artificial Sequence
  Description of Artificial Sequence: Synthetic oligonucleotide
uuagugaagucuaucccgg

SEQ ID NO: 1209445 - RNA, 19 nt, Artificial Sequence
  Description of Artificial Sequence: Synthetic oligonucleotide
aagucagcgaucugguucg

SEQ ID NO: 1209446 - RNA, 19 nt, Artificial Sequence
  Description of Artificial Sequence: Synthetic oligonucleotide
ugccaguuuaccuucauag

SEQ ID NO: 1209447 - RNA, 19 nt, Artificial Sequence
  Description of Artificial Sequence: Synthetic oligonucleotide
cuccgagagaucuagaagg

SEQ ID NO: 1209448 - RNA, 19 nt, Artificial Sequence
  Description of Artificial Sequence: Synthetic oligonucleotide
uauuagugaagucuauccc

SEQ ID NO: 1209449 - RNA, 19 nt, Artificial Sequence
  Description of Artificial Sequence: Synthetic oligonucleotide
ucuccuucggaugagacgg

SEQ ID NO: 1209450 - RNA, 19 nt, Artificial Sequence
  Description of Artificial Sequence: Synthetic oligonucleotide
aauguuugucuuaagaccu

SEQ ID NO: 1209451 - RNA, 19 nt, Artificial Sequence
  Description of Artificial Sequence: Synthetic oligonucleotide
aucaccucauccuuucucc

SEQ ID NO: 1209452 - RNA, 19 nt, Artificial Sequence
  Description of Artificial Sequence: Synthetic oligonucleotide
uguacgaguagaagcagag

SEQ ID NO: 1209453 - RNA, 19 nt, Artificial Sequence
  Description of Artificial Sequence: Synthetic oligonucleotide
ucaacauuuggauucacaa

SEQ ID NO: 1209454 - RNA, 19 nt, Artificial Sequence
  Description of Artificial Sequence: Synthetic oligonucleotide
aaauccaugacugggugag

SEQ ID NO: 1209455 - RNA, 19 nt, Artificial Sequence
  Description of Artificial Sequence: Synthetic oligonucleotide
gauucacaauagcauagcg

SEQ ID NO: 1209456 - RNA, 19 nt, Artificial Sequence
  Description of Artificial Sequence: Synthetic oligonucleotide
agaaguauccaaaugagca

SEQ ID NO: 1209457 - RNA, 19 nt, Artificial Sequence
  Description of Artificial Sequence: Synthetic oligonucleotide
ucaauaaaauuaagucucc

SEQ ID NO: 1209458 - RNA, 19 nt, Artificial Sequence
  Description of Artificial Sequence: Synthetic oligonucleotide
gucaauaaaauuaagucuc

SEQ ID NO: 1209459 - RNA, 19 nt, Artificial Sequence
  Description of Artificial Sequence: Synthetic oligonucleotide
uggauucacaauagcauag

SEQ ID NO: 1209460 - RNA, 19 nt, Artificial Sequence
  Description of Artificial Sequence: Synthetic oligonucleotide
aaguacacucuccaccuuc

SEQ ID NO: 1209461 - RNA, 19 nt, Artificial Sequence
  Description of Artificial Sequence: Synthetic oligonucleotide
gaccuaaguaugaacaugg

SEQ ID NO: 1209462 - RNA, 19 nt, Artificial Sequence
  Description of Artificial Sequence: Synthetic oligonucleotide
ucaaccacuuuuauggacu

SEQ ID NO: 1209463 - RNA, 19 nt, Artificial Sequence
  Description of Artificial Sequence: Synthetic oligonucleotide
aacgccagcccuuccagac

SEQ ID NO: 1209464 - RNA, 19 nt, Artificial Sequence
  Description of Artificial Sequence: Synthetic oligonucleotide
auuaacucuauccuuuccu

SEQ ID NO: 1209465 - RNA, 19 nt, Artificial Sequence
  Description of Artificial Sequence: Synthetic oligonucleotide
gaagaaguauccaaaugag

SEQ ID NO: 1209466 - RNA, 19 nt, Artificial Sequence
  Description of Artificial Sequence: Synthetic oligonucleotide
ugaucaccaaccaauauuu

SEQ ID NO: 1209467 - RNA, 19 nt, Artificial Sequence
  Description of Artificial Sequence: Synthetic oligonucleotide
aagaugaucaccaaccaau

SEQ ID NO: 1209468 - RNA, 19 nt, Artificial Sequence
  Description of Artificial Sequence: Synthetic oligonucleotide
accaaccaauauuucaugg

SEQ ID NO: 1209469 - RNA, 19 nt, Artificial Sequence
  Description of Artificial Sequence: Synthetic oligonucleotide
aaugguuugcacugugacu

SEQ ID NO: 1209470 - RNA, 19 nt, Artificial Sequence
  Description of Artificial Sequence: Synthetic oligonucleotide
ucaaguacacucuccaccu

SEQ ID NO: 1209471 - RNA, 19 nt, Artificial Sequence
  Description of Artificial Sequence: Synthetic oligonucleotide
uuaauucagauauaauguu

SEQ ID NO: 1209472 - RNA, 19 nt, Artificial Sequence
  Description of Artificial Sequence: Synthetic oligonucleotide
acgaccaccgagcucaugg

SEQ ID NO: 1209473 - RNA, 19 nt, Artificial Sequence
  Description of Artificial Sequence: Synthetic oligonucleotide
gaagaccuaaguaugaaca

SEQ ID NO: 1209474 - RNA, 19 nt, Artificial Sequence
  Description of Artificial Sequence: Synthetic oligonucleotide
aagaccugaacuccagaug

SEQ ID NO: 1209475 - RNA, 19 nt, Artificial Sequence
  Description of Artificial Sequence: Synthetic oligonucleotide
uucauagacaucuugucuu

SEQ ID NO: 1209476 - RNA, 19 nt, Artificial Sequence
  Description of Artificial Sequence: Synthetic oligonucleotide
uaaguaugaacauggucac

SEQ ID NO: 1209477 - RNA, 19 nt, Artificial Sequence
  Description of Artificial Sequence: Synthetic oligonucleotide
uuacuuaauucagauauaa

SEQ ID NO: 1209478 - RNA, 19 nt, Artificial Sequence
  Description of Artificial Sequence: Synthetic oligonucleotide
aagcucucgucccagacca

SEQ ID NO: 1209479 - RNA, 19 nt, Artificial Sequence
  Description of Artificial Sequence: Synthetic oligonucleotide
gucaaguacacucuccacc

SEQ ID NO: 1209480 - RNA, 19 nt, Artificial Sequence
  Description of Artificial Sequence: Synthetic oligonucleotide
caaccaauauuucauggac

SEQ ID NO: 1209481 - RNA, 19 nt, Artificial Sequence
  Description of Artificial Sequence: Synthetic oligonucleotide
uguugcauucuuugaaucu

SEQ ID NO: 1209482 - RNA, 19 nt, Artificial Sequence
  Description of Artificial Sequence: Synthetic oligonucleotide
uccaaaugagcagaaagcu

SEQ ID NO: 1209483 - RNA, 19 nt, Artificial Sequence
  Description of Artificial Sequence: Synthetic oligonucleotide
accaauauuucauggacau

SEQ ID NO: 1209484 - RNA, 19 nt, Artificial Sequence
  Description of Artificial Sequence: Synthetic oligonucleotide
aaauauggucauggcuucc

SEQ ID NO: 1209485 - RNA, 19 nt, Artificial Sequence
  Description of Artificial Sequence: Synthetic oligonucleotide
uccacgaccaccgagcuca

SEQ ID NO: 1209486 - RNA, 19 nt, Artificial Sequence
  Description of Artificial Sequence: Synthetic oligonucleotide
ugagaagaccuaaguauga

SEQ ID NO: 1209487 - RNA, 19 nt, Artificial Sequence
  Description of Artificial Sequence: Synthetic oligonucleotide
agaucuagaaggugggaug

SEQ ID NO: 1209488 - RNA, 19 nt, Artificial Sequence
  Description of Artificial Sequence: Synthetic oligonucleotide
ucuaccacuucuuuccacu

SEQ ID NO: 1209489 - RNA, 19 nt, Artificial Sequence
  Description of Artificial Sequence: Synthetic oligonucleotide
agcgauauauccugcacca

SEQ ID NO: 1209490 - RNA, 19 nt, Artificial Sequence
  Description of Artificial Sequence: Synthetic oligonucleotide
aacgcuuucuucauggagu

SEQ ID NO: 1209491 - RNA, 19 nt, Artificial Sequence
  Description of Artificial Sequence: Synthetic oligonucleotide
uccacuuacuuaauucaga

SEQ ID NO: 1209492 - RNA, 19 nt, Artificial Sequence
  Description of Artificial Sequence: Synthetic oligonucleotide
gcuguaaucgucuucccgg

SEQ ID NO: 1209493 - RNA, 19 nt, Artificial Sequence
  Description of Artificial Sequence: Synthetic oligonucleotide
aagaccuaaguaugaacau

SEQ ID NO: 1209494 - RNA, 19 nt, Artificial Sequence
  Description of Artificial Sequence: Synthetic oligonucleotide
aagaggcggauguggcucc

SEQ ID NO: 1209495 - RNA, 19 nt, Artificial Sequence
  Description of Artificial Sequence: Synthetic oligonucleotide
ucuuaagaccugaacucca

SEQ ID NO: 1209496 - RNA, 19 nt, Artificial Sequence
  Description of Artificial Sequence: Synthetic oligonucleotide
augaugcuucuccacgacc

SEQ ID NO: 1209497 - RNA, 19 nt, Artificial Sequence
  Description of Artificial Sequence: Synthetic oligonucleotide
uugacauggccaauucgcc

SEQ ID NO: 1209498 - RNA, 19 nt, Artificial Sequence
  Description of Artificial Sequence: Synthetic oligonucleotide
uuuccacugccucuguacc

SEQ ID NO: 1209499 - RNA, 19 nt, Artificial Sequence
  Description of Artificial Sequence: Synthetic oligonucleotide
ugauuuacaagugccacau

SEQ ID NO: 1209500 - RNA, 19 nt, Artificial Sequence
  Description of Artificial Sequence: Synthetic oligonucleotide
guacauuucuucuggagca

SEQ ID NO: 1209501 - RNA, 19 nt, Artificial Sequence
  Description of Artificial Sequence: Synthetic oligonucleotide
uugguauguacauuucuuc

SEQ ID NO: 1209502 - RNA, 19 nt, Artificial Sequence
  Description of Artificial Sequence: Synthetic oligonucleotide
uucggugccagucaauaaa

SEQ ID NO: 1209503 - RNA, 19 nt, Artificial Sequence
  Description of Artificial Sequence: Synthetic oligonucleotide
uguugauuuuaguuuugga

SEQ ID NO: 1209504 - RNA, 19 nt, Artificial Sequence
  Description of Artificial Sequence: Synthetic oligonucleotide
augaucaccaaccaauauu

SEQ ID NO: 1209505 - RNA, 19 nt, Artificial Sequence
  Description of Artificial Sequence: Synthetic oligonucleotide
uuggauucacaauagcaua

SEQ ID NO: 1209506 - RNA, 19 nt, Artificial Sequence
  Description of Artificial Sequence: Synthetic oligonucleotide
aaucacaccgacccgugau

SEQ ID NO: 1209507 - RNA, 19 nt, Artificial Sequence
  Description of Artificial Sequence: Synthetic oligonucleotide
cagcugauuuacaagugcc

SEQ ID NO: 1209508 - RNA, 19 nt, Artificial Sequence
  Description of Artificial Sequence: Synthetic oligonucleotide
gaaauauggucauggcuuc

SEQ ID NO: 1209509 - RNA, 19 nt, Artificial Sequence
  Description of Artificial Sequence: Synthetic oligonucleotide
agcaaaguucucuggaagu

SEQ ID NO: 1209510 - RNA, 19 nt, Artificial Sequence
  Description of Artificial Sequence: Synthetic oligonucleotide
aauuaagucuccacuuacu

SEQ ID NO: 1209511 - RNA, 19 nt, Artificial Sequence
  Description of Artificial Sequence: Synthetic oligonucleotide
auuaagucuccacuuacuu

SEQ ID NO: 1209512 - RNA, 19 nt, Artificial Sequence
  Description of Artificial Sequence: Synthetic oligonucleotide
cugccuucgggauggaugg

SEQ ID NO: 1209513 - RNA, 19 nt, Artificial Sequence
  Description of Artificial Sequence: Synthetic oligonucleotide
uucgacagcugauuuacaa

SEQ ID NO: 1209514 - RNA, 19 nt, Artificial Sequence
  Description of Artificial Sequence: Synthetic oligonucleotide
aaagcuugagagagacugg

SEQ ID NO: 1209515 - RNA, 19 nt, Artificial Sequence
  Description of Artificial Sequence: Synthetic oligonucleotide
augauggccaaacuacugu

SEQ ID NO: 1209516 - RNA, 19 nt, Artificial Sequence
  Description of Artificial Sequence: Synthetic oligonucleotide
gagggaauggcaguggcgc

SEQ ID NO: 1209517 - RNA, 19 nt, Artificial Sequence
  Description of Artificial Sequence: Synthetic oligonucleotide
gucuugauuugacauggcc

SEQ ID NO: 1209518 - RNA, 19 nt, Artificial Sequence
  Description of Artificial Sequence: Synthetic oligonucleotide
gagagaucuagaagguggg

SEQ ID NO: 1209519 - RNA, 19 nt, Artificial Sequence
  Description of Artificial Sequence: Synthetic oligonucleotide
uguaccacggaacgccagc

SEQ ID NO: 1209520 - RNA, 19 nt, Artificial Sequence
  Description of Artificial Sequence: Synthetic oligonucleotide
uacuguugauuuuaguuuu

SEQ ID NO: 1209521 - RNA, 19 nt, Artificial Sequence
  Description of Artificial Sequence: Synthetic oligonucleotide
agacaagcuggaaaucacc

SEQ ID NO: 1209522 - RNA, 19 nt, Artificial Sequence
  Description of Artificial Sequence: Synthetic oligonucleotide
uggacaucuguacgaguag

SEQ ID NO: 1209523 - RNA, 19 nt, Artificial Sequence
  Description of Artificial Sequence: Synthetic oligonucleotide
uucauaaucauuggagaua

SEQ ID NO: 1209524 - RNA, 19 nt, Artificial Sequence
  Description of Artificial Sequence: Synthetic oligonucleotide
uucgccagugcaagaaagc

SEQ ID NO: 1209525 - RNA, 19 nt, Artificial Sequence
  Description of Artificial Sequence: Synthetic oligonucleotide
uuaagucuccacuuacuua

SEQ ID NO: 1209526 - RNA, 19 nt, Artificial Sequence
  Description of Artificial Sequence: Synthetic oligonucleotide
uggccaauucgccagugca

SEQ ID NO: 1209527 - RNA, 19 nt, Artificial Sequence
  Description of Artificial Sequence: Synthetic oligonucleotide
agugcaagaaagcuuucau

SEQ ID NO: 1209528 - RNA, 19 nt, Artificial Sequence
  Description of Artificial Sequence: Synthetic oligonucleotide
cuccacuuacuuaauucag

SEQ ID NO: 1209529 - RNA, 19 nt, Artificial Sequence
  Description of Artificial Sequence: Synthetic oligonucleotide
uuaagaccugaacuccaga

SEQ ID NO: 1209530 - RNA, 19 nt, Artificial Sequence
  Description of Artificial Sequence: Synthetic oligonucleotide
ggacucaacauuuggauuc

SEQ ID NO: 1209531 - RNA, 19 nt, Artificial Sequence
  Description of Artificial Sequence: Synthetic oligonucleotide
agauauaauguuugucuua

SEQ ID NO: 1209532 - RNA, 19 nt, Artificial Sequence
  Description of Artificial Sequence: Synthetic oligonucleotide
uccagauaacacagcaagu

SEQ ID NO: 1209533 - RNA, 19 nt, Artificial Sequence
  Description of Artificial Sequence: Synthetic oligonucleotide
gugacgcuaguguaggaag

SEQ ID NO: 1209534 - RNA, 19 nt, Artificial Sequence
  Description of Artificial Sequence: Synthetic oligonucleotide
ucuauucggugccagucaa

SEQ ID NO: 1209535 - RNA, 19 nt, Artificial Sequence
  Description of Artificial Sequence: Synthetic oligonucleotide
ucuauccuuuccuuuugcu

SEQ ID NO: 1209536 - RNA, 19 nt, Artificial Sequence
  Description of Artificial Sequence: Synthetic oligonucleotide
caugauggccaaacuacug

SEQ ID NO: 1209537 - RNA, 19 nt, Artificial Sequence
  Description of Artificial Sequence: Synthetic oligonucleotide
uggcuauuccuguugcuug

SEQ ID NO: 1209538 - RNA, 19 nt, Artificial Sequence
  Description of Artificial Sequence: Synthetic oligonucleotide
cucuguaccacggaacgcc

SEQ ID NO: 1209539 - RNA, 19 nt, Artificial Sequence
  Description of Artificial Sequence: Synthetic oligonucleotide
auggccaaacuacuguuga

SEQ ID NO: 1209540 - RNA, 19 nt, Artificial Sequence
  Description of Artificial Sequence: Synthetic oligonucleotide
auauaauguuugucuuaag

SEQ ID NO: 1209541 - RNA, 19 nt, Artificial Sequence
  Description of Artificial Sequence: Synthetic oligonucleotide
uuggagauaugcacacaga

SEQ ID NO: 1209542 - RNA, 19 nt, Artificial Sequence
  Description of Artificial Sequence: Synthetic oligonucleotide
agucauugugagcaacaug

SEQ ID NO: 1209543 - RNA, 19 nt, Artificial Sequence
  Description of Artificial Sequence: Synthetic oligonucleotide
cagcgauauauccugcacc

SEQ ID NO: 1209544 - RNA, 19 nt, Artificial Sequence
  Description of Artificial Sequence: Synthetic oligonucleotide
agcaacaugaagugagaau

SEQ ID NO: 1209545 - RNA, 19 nt, Artificial Sequence
  Description of Artificial Sequence: Synthetic oligonucleotide
uguugcuugcugauggcau

SEQ ID NO: 1209546 - RNA, 19 nt, Artificial Sequence
  Description of Artificial Sequence: Synthetic oligonucleotide
agcgaucugguucgacagc

SEQ ID NO: 1209547 - RNA, 19 nt, Artificial Sequence
  Description of Artificial Sequence: Synthetic oligonucleotide
aucuguacgaguagaagca

SEQ ID NO: 1209548 - RNA, 19 nt, Artificial Sequence
  Description of Artificial Sequence: Synthetic oligonucleotide
uuucucccgagggagaucu

SEQ ID NO: 1209549 - RNA, 19 nt, Artificial Sequence
  Description of Artificial Sequence: Synthetic oligonucleotide
uccgagagaucuagaaggu

SEQ ID NO: 1209550 - RNA, 19 nt, Artificial Sequence
  Description of Artificial Sequence: Synthetic oligonucleotide
aauucgccagugcaagaaa

SEQ ID NO: 1209551 - RNA, 19 nt, Artificial Sequence
  Description of Artificial Sequence: Synthetic oligonucleotide
ucuagaaggugggaugcug

SEQ ID NO: 1209552 - RNA, 19 nt, Artificial Sequence
  Description of Artificial Sequence: Synthetic oligonucleotide
ggcauuguagaugaagaag

SEQ ID NO: 1209553 - RNA, 19 nt, Artificial Sequence
  Description of Artificial Sequence: Synthetic oligonucleotide
ucccaugauggccaaacua

SEQ ID NO: 1209554 - RNA, 19 nt, Artificial Sequence
  Description of Artificial Sequence: Synthetic oligonucleotide
acggcugugaagcacugga

SEQ ID NO: 1209555 - RNA, 19 nt, Artificial Sequence
  Description of Artificial Sequence: Synthetic oligonucleotide
aucacaccgacccgugauc

SEQ ID NO: 1209556 - RNA, 19 nt, Artificial Sequence
  Description of Artificial Sequence: Synthetic oligonucleotide
gucuuaagaccugaacucc

SEQ ID NO: 1209557 - RNA, 19 nt, Artificial Sequence
  Description of Artificial Sequence: Synthetic oligonucleotide
agaacugagaagaccuaag

SEQ ID NO: 1209558 - RNA, 19 nt, Artificial Sequence
  Description of Artificial Sequence: Synthetic oligonucleotide
acaucuguacgaguagaag

SEQ ID NO: 1209559 - RNA, 19 nt, Artificial Sequence
  Description of Artificial Sequence: Synthetic oligonucleotide
aaaaucacaccgacccgug

SEQ ID NO: 1209560 - RNA, 19 nt, Artificial Sequence
  Description of Artificial Sequence: Synthetic oligonucleotide
gugauccgagcuguaaucg

SEQ ID NO: 1209561 - RNA, 19 nt, Artificial Sequence
  Description of Artificial Sequence: Synthetic oligonucleotide
cuucccggcuuucugcugg

SEQ ID NO: 1209562 - RNA, 19 nt, Artificial Sequence
  Description of Artificial Sequence: Synthetic oligonucleotide
ucuguacgaguagaagcag

SEQ ID NO: 1209563 - RNA, 19 nt, Artificial Sequence
  Description of Artificial Sequence: Synthetic oligonucleotide
cguucuaccacuucuuucc

SEQ ID NO: 1209564 - RNA, 19 nt, Artificial Sequence
  Description of Artificial Sequence: Synthetic oligonucleotide
auggaugguccguggguac

SEQ ID NO: 1209565 - RNA, 19 nt, Artificial Sequence
  Description of Artificial Sequence: Synthetic oligonucleotide
ugacgcuaguguaggaagu

SEQ ID NO: 1209566 - RNA, 19 nt, Artificial Sequence
  Description of Artificial Sequence: Synthetic oligonucleotide
aaaucacaccgacccguga

SEQ ID NO: 1209567 - RNA, 19 nt, Artificial Sequence
  Description of Artificial Sequence: Synthetic oligonucleotide
ucggugccagucaauaaaa

SEQ ID NO: 1209568 - RNA, 19 nt, Artificial Sequence
  Description of Artificial Sequence: Synthetic oligonucleotide
ugucaaguacacucuccac

SEQ ID NO: 1209569 - RNA, 19 nt, Artificial Sequence
  Description of Artificial Sequence: Synthetic oligonucleotide
gaacauggucacucuaguc

SEQ ID NO: 1209570 - RNA, 19 nt, Artificial Sequence
  Description of Artificial Sequence: Synthetic oligonucleotide
auauggucauggcuuccag

SEQ ID NO: 1209571 - RNA, 19 nt, Artificial Sequence
  Description of Artificial Sequence: Synthetic oligonucleotide
gauggccaaacuacuguug

SEQ ID NO: 1209572 - RNA, 19 nt, Artificial Sequence
  Description of Artificial Sequence: Synthetic oligonucleotide
cugggugacgcuaguguag

SEQ ID NO: 1209573 - RNA, 19 nt, Artificial Sequence
  Description of Artificial Sequence: Synthetic oligonucleotide
ggugagagggcuuccuggg

SEQ ID NO: 1209574 - RNA, 19 nt, Artificial Sequence
  Description of Artificial Sequence: Synthetic oligonucleotide
ucuguaccacggaacgcca

SEQ ID NO: 1209575 - RNA, 19 nt, Artificial Sequence
  Description of Artificial Sequence: Synthetic oligonucleotide
cagcgaucugguucgacag

SEQ ID NO: 1209576 - RNA, 19 nt, Artificial Sequence
  Description of Artificial Sequence: Synthetic oligonucleotide
uauucggugccagucaaua

SEQ ID NO: 1209577 - RNA, 19 nt, Artificial Sequence
  Description of Artificial Sequence: Synthetic oligonucleotide
cccaugauggccaaacuac

SEQ ID NO: 1209578 - RNA, 19 nt, Artificial Sequence
  Description of Artificial Sequence: Synthetic oligonucleotide
ugaagucuaucccggcauc

SEQ ID NO: 1209579 - RNA, 19 nt, Artificial Sequence
  Description of Artificial Sequence: Synthetic oligonucleotide
ucaugaacgcuuucuucau

SEQ ID NO: 1209580 - RNA, 19 nt, Artificial Sequence
  Description of Artificial Sequence: Synthetic oligonucleotide
aguggcgcuggcuauuccu

SEQ ID NO: 1209581 - RNA, 19 nt, Artificial Sequence
  Description of Artificial Sequence: Synthetic oligonucleotide
ugauccgagcuguaaucgu

SEQ ID NO: 1209582 - RNA, 19 nt, Artificial Sequence
  Description of Artificial Sequence: Synthetic oligonucleotide
gaagaggcggauguggcuc

SEQ ID NO: 1209583 - RNA, 19 nt, Artificial Sequence
  Description of Artificial Sequence: Synthetic oligonucleotide
aagcuccagauaacacagc

SEQ ID NO: 1209584 - RNA, 19 nt, Artificial Sequence
  Description of Artificial Sequence: Synthetic oligonucleotide
uguaaucgucuucccggcu

SEQ ID NO: 1209585 - RNA, 19 nt, Artificial Sequence
  Description of Artificial Sequence: Synthetic oligonucleotide
uggcuugagacaagcugga

SEQ ID NO: 1209586 - RNA, 19 nt, Artificial Sequence
  Description of Artificial Sequence: Synthetic oligonucleotide
auucgccagugcaagaaag

SEQ ID NO: 1209587 - RNA, 19 nt, Artificial Sequence
  Description of Artificial Sequence: Synthetic oligonucleotide
cugauuuacaagugccaca

SEQ ID NO: 1209588 - RNA, 19 nt, Artificial Sequence
  Description of Artificial Sequence: Synthetic oligonucleotide
gaacugagaagaccuaagu

SEQ ID NO: 1209589 - RNA, 19 nt, Artificial Sequence
  Description of Artificial Sequence: Synthetic oligonucleotide
guagaugaagaaguaucca

SEQ ID NO: 1209590 - RNA, 19 nt, Artificial Sequence
  Description of Artificial Sequence: Synthetic oligonucleotide
ugccucuguaccacggaac

SEQ ID NO: 1209591 - RNA, 19 nt, Artificial Sequence
  Description of Artificial Sequence: Synthetic oligonucleotide
ugguccguggguacuuggc

SEQ ID NO: 1209592 - RNA, 19 nt, Artificial Sequence
  Description of Artificial Sequence: Synthetic oligonucleotide
caccuaaaauauagugaac

SEQ ID NO: 1209593 - RNA, 19 nt, Artificial Sequence
  Description of Artificial Sequence: Synthetic oligonucleotide
caccaaccaauauuucaug

SEQ ID NO: 1209594 - RNA, 19 nt, Artificial Sequence
  Description of Artificial Sequence: Synthetic oligonucleotide
aggcggauguggcuccagc

SEQ ID NO: 1209595 - RNA, 19 nt, Artificial Sequence
  Description of Artificial Sequence: Synthetic oligonucleotide
guauggguuggccuggcuc

SEQ ID NO: 1209596 - RNA, 19 nt, Artificial Sequence
  Description of Artificial Sequence: Synthetic oligonucleotide
guccguggguacuuggcag

SEQ ID NO: 1209597 - RNA, 19 nt, Artificial Sequence
  Description of Artificial Sequence: Synthetic oligonucleotide
caugacugggugagagggc

SEQ ID NO: 1209598 - RNA, 19 nt, Artificial Sequence
  Description of Artificial Sequence: Synthetic oligonucleotide
agcagcgauauauccugca

SEQ ID NO: 1209599 - RNA, 19 nt, Artificial Sequence
  Description of Artificial Sequence: Synthetic oligonucleotide
uagugaagucuaucccggc

SEQ ID NO: 1209600 - RNA, 19 nt, Artificial Sequence
  Description of Artificial Sequence: Synthetic oligonucleotide
ucgccagugcaagaaagcu

SEQ ID NO: 1209601 - RNA, 19 nt, Artificial Sequence
  Description of Artificial Sequence: Synthetic oligonucleotide
guacgaguagaagcagagg

SEQ ID NO: 1209602 - RNA, 19 nt, Artificial Sequence
  Description of Artificial Sequence: Synthetic oligonucleotide
cuucgggauggaugguccg

SEQ ID NO: 1209603 - RNA, 19 nt, Artificial Sequence
  Description of Artificial Sequence: Synthetic oligonucleotide
accacggaacgccagcccu

SEQ ID NO: 1209604 - RNA, 19 nt, Artificial Sequence
  Description of Artificial Sequence: Synthetic oligonucleotide
aaguaugaacauggucacu

SEQ ID NO: 1209605 - RNA, 19 nt, Artificial Sequence
  Description of Artificial Sequence: Synthetic oligonucleotide
ucacucuagucaaccacuu

SEQ ID NO: 1209606 - RNA, 19 nt, Artificial Sequence
  Description of Artificial Sequence: Synthetic oligonucleotide
ggucacucuagucaaccac

SEQ ID NO: 1209607 - RNA, 19 nt, Artificial Sequence
  Description of Artificial Sequence: Synthetic oligonucleotide
ccuaaguaugaacaugguc

SEQ ID NO: 1209608 - RNA, 19 nt, Artificial Sequence
  Description of Artificial Sequence: Synthetic oligonucleotide
augguccguggguacuugg

SEQ ID NO: 1209609 - RNA, 19 nt, Artificial Sequence
  Description of Artificial Sequence: Synthetic oligonucleotide
uaccacggaacgccagccc

SEQ ID NO: 1209610 - RNA, 19 nt, Artificial Sequence
  Description of Artificial Sequence: Synthetic oligonucleotide
caugaacugaagaggcgga

SEQ ID NO: 1209611 - RNA, 19 nt, Artificial Sequence
  Description of Artificial Sequence: Synthetic oligonucleotide
uggguauggguuggccugg

SEQ ID NO: 1209612 - RNA, 19 nt, Artificial Sequence
  Description of Artificial Sequence: Synthetic oligonucleotide
guaggaagucugucuggug

SEQ ID NO: 1209613 - RNA, 19 nt, Artificial Sequence
  Description of Artificial Sequence: Synthetic oligonucleotide
uagcagcgauauauccugc

SEQ ID NO: 1209614 - RNA, 19 nt, Artificial Sequence
  Description of Artificial Sequence: Synthetic oligonucleotide
gcuccgagagaucuagaag

SEQ ID NO: 1209615 - RNA, 19 nt, Artificial Sequence
  Description of Artificial Sequence: Synthetic oligonucleotide
cucuugguauguacauuuc

SEQ ID NO: 1209616 - RNA, 19 nt, Artificial Sequence
  Description of Artificial Sequence: Synthetic oligonucleotide
cucauccuuucucccgagg

SEQ ID NO: 1209617 - RNA, 19 nt, Artificial Sequence
  Description of Artificial Sequence: Synthetic oligonucleotide
acgaguagaagcagaggcu

SEQ ID NO: 1209618 - RNA, 19 nt, Artificial Sequence
  Description of Artificial Sequence: Synthetic oligonucleotide
agcugauuuacaagugcca

SEQ ID NO: 1209619 - RNA, 19 nt, Artificial Sequence
  Description of Artificial Sequence: Synthetic oligonucleotide
gcugauuuacaagugccac

SEQ ID NO: 1209620 - RNA, 19 nt, Artificial Sequence
  Description of Artificial Sequence: Synthetic oligonucleotide
cuuccagguuuaaugcgca

SEQ ID NO: 1209621 - RNA, 19 nt, Artificial Sequence
  Description of Artificial Sequence: Synthetic oligonucleotide
gguuuaaugcgcacacccc

SEQ ID NO: 1209622 - RNA, 19 nt, Artificial Sequence
  Description of Artificial Sequence: Synthetic oligonucleotide
guacuggucugccaguuua

SEQ ID NO: 1209623 - RNA, 19 nt, Artificial Sequence
  Description of Artificial Sequence: Synthetic oligonucleotide
caagaugaucaccaaccaa

SEQ ID NO: 1209624 - RNA, 19 nt, Artificial Sequence
  Description of Artificial Sequence: Synthetic oligonucleotide
gacgcuaguguaggaaguc

SEQ ID NO: 1209625 - RNA, 19 nt, Artificial Sequence
  Description of Artificial Sequence: Synthetic oligonucleotide
cugaggaaugguuugcacu

SEQ ID NO: 1209626 - RNA, 19 nt, Artificial Sequence
  Description of Artificial Sequence: Synthetic oligonucleotide
cuguacgaguagaagcaga

SEQ ID NO: 1209627 - RNA, 19 nt, Artificial Sequence
  Description of Artificial Sequence: Synthetic oligonucleotide
ucuaucccggcaucauuuu

SEQ ID NO: 1209628 - RNA, 19 nt, Artificial Sequence
  Description of Artificial Sequence: Synthetic oligonucleotide
cuugguauguacauuucuu

SEQ ID NO: 1209629 - RNA, 19 nt, Artificial Sequence
  Description of Artificial Sequence: Synthetic oligonucleotide
uuaccuucauagacaucuu

SEQ ID NO: 1209630 - RNA, 19 nt, Artificial Sequence
  Description of Artificial Sequence: Synthetic oligonucleotide
gagcuguaaucgucuuccc

SEQ ID NO: 1209631 - RNA, 19 nt, Artificial Sequence
  Description of Artificial Sequence: Synthetic oligonucleotide
aguacacucuccaccuucu

SEQ ID NO: 1209632 - RNA, 19 nt, Artificial Sequence
  Description of Artificial Sequence: Synthetic oligonucleotide
auucggugccagucaauaa

SEQ ID NO: 1209633 - RNA, 19 nt, Artificial Sequence
  Description of Artificial Sequence: Synthetic oligonucleotide
cucuagucaaccacuuuua

SEQ ID NO: 1209634 - RNA, 19 nt, Artificial Sequence
  Description of Artificial Sequence: Synthetic oligonucleotide
gauggaugguccgugggua

SEQ ID NO: 1209635 - RNA, 19 nt, Artificial Sequence
  Description of Artificial Sequence: Synthetic oligonucleotide
aaguacuggucugccaguu

SEQ ID NO: 1209636 - RNA, 19 nt, Artificial Sequence
  Description of Artificial Sequence: Synthetic oligonucleotide
ucgggauggaugguccgug

SEQ ID NO: 1209637 - RNA, 19 nt, Artificial Sequence
  Description of Artificial Sequence: Synthetic oligonucleotide
auagcauagcggagcagcu

SEQ ID NO: 1209638 - RNA, 19 nt, Artificial Sequence
  Description of Artificial Sequence: Synthetic oligonucleotide
aaccacuuuuauggacuga

SEQ ID NO: 1209639 - RNA, 19 nt, Artificial Sequence
  Description of Artificial Sequence: Synthetic oligonucleotide
aagcuuucauuaacucuau

SEQ ID NO: 1209640 - RNA, 19 nt, Artificial Sequence
  Description of Artificial Sequence: Synthetic oligonucleotide
aguauccaaaugagcagaa

SEQ ID NO: 1209641 - RNA, 19 nt, Artificial Sequence
  Description of Artificial Sequence: Synthetic oligonucleotide
gaacuccagaugucaagua

SEQ ID NO: 1209642 - RNA, 19 nt, Artificial Sequence
  Description of Artificial Sequence: Synthetic oligonucleotide
gccaauucgccagugcaag

SEQ ID NO: 1209643 - RNA, 19 nt, Artificial Sequence
  Description of Artificial Sequence: Synthetic oligonucleotide
agagaucuagaagguggga

SEQ ID NO: 1209644 - RNA, 19 nt, Artificial Sequence
  Description of Artificial Sequence: Synthetic oligonucleotide
uucccggcuuucugcuggg

SEQ ID NO: 1209645 - RNA, 19 nt, Artificial Sequence
  Description of Artificial Sequence: Synthetic oligonucleotide
gagaucuagaaggugggau

SEQ ID NO: 1209646 - RNA, 19 nt, Artificial Sequence
  Description of Artificial Sequence: Synthetic oligonucleotide
ucgcuuggcaugcccguuc

SEQ ID NO: 1209647 - RNA, 19 nt, Artificial Sequence
  Description of Artificial Sequence: Synthetic oligonucleotide
ggaacgccagcccuuccag

SEQ ID NO: 1209648 - RNA, 19 nt, Artificial Sequence
  Description of Artificial Sequence: Synthetic oligonucleotide
auguuugucuuaagaccug

SEQ ID NO: 1209649 - RNA, 19 nt, Artificial Sequence
  Description of Artificial Sequence: Synthetic oligonucleotide
caucucuauucggugccag

SEQ ID NO: 1209650 - RNA, 19 nt, Artificial Sequence
  Description of Artificial Sequence: Synthetic oligonucleotide
ccaaccaauauuucaugga

SEQ ID NO: 1209651 - RNA, 19 nt, Artificial Sequence
  Description of Artificial Sequence: Synthetic oligonucleotide
uucgggauggaugguccgu

SEQ ID NO: 1209652 - RNA, 19 nt, Artificial Sequence
  Description of Artificial Sequence: Synthetic oligonucleotide
guaccacggaacgccagcc

SEQ ID NO: 1209653 - RNA, 19 nt, Artificial Sequence
  Description of Artificial Sequence: Synthetic oligonucleotide
acggaacgccagcccuucc

SEQ ID NO: 1209654 - RNA, 19 nt, Artificial Sequence
  Description of Artificial Sequence: Synthetic oligonucleotide
agaugaucaccaaccaaua

SEQ ID NO: 1209655 - RNA, 19 nt, Artificial Sequence
  Description of Artificial Sequence: Synthetic oligonucleotide
uucagcccucgcuuggcau

SEQ ID NO: 1209656 - RNA, 19 nt, Artificial Sequence
  Description of Artificial Sequence: Synthetic oligonucleotide
gcugccuucgggauggaug

SEQ ID NO: 1209657 - RNA, 19 nt, Artificial Sequence
  Description of Artificial Sequence: Synthetic oligonucleotide
agacuggguauggguuggc

SEQ ID NO: 1209658 - RNA, 19 nt, Artificial Sequence
  Description of Artificial Sequence: Synthetic oligonucleotide
caauucgccagugcaagaa

SEQ ID NO: 1209659 - RNA, 19 nt, Artificial Sequence
  Description of Artificial Sequence: Synthetic oligonucleotide
uucggaugagacggcugug

SEQ ID NO: 1209660 - RNA, 19 nt, Artificial Sequence
  Description of Artificial Sequence: Synthetic oligonucleotide
cagauauaauguuugucuu

SEQ ID NO: 1209661 - RNA, 19 nt, Artificial Sequence
  Description of Artificial Sequence: Synthetic oligonucleotide
aguacuggucugccaguuu

SEQ ID NO: 1209662 - RNA, 19 nt, Artificial Sequence
  Description of Artificial Sequence: Synthetic oligonucleotide
gcuggugaggaagagucac

SEQ ID NO: 1209663 - RNA, 19 nt, Artificial Sequence
  Description of Artificial Sequence: Synthetic oligonucleotide
guacacucuccaccuucug

SEQ ID NO: 1209664 - RNA, 19 nt, Artificial Sequence
  Description of Artificial Sequence: Synthetic oligonucleotide
caacauuuggauucacaau

SEQ ID NO: 1209665 - RNA, 19 nt, Artificial Sequence
  Description of Artificial Sequence: Synthetic oligonucleotide
uccuucggaugagacggcu

SEQ ID NO: 1209666 - RNA, 19 nt, Artificial Sequence
  Description of Artificial Sequence: Synthetic oligonucleotide
cccgagggagaucucaaag

SEQ ID NO: 1209667 - RNA, 19 nt, Artificial Sequence
  Description of Artificial Sequence: Synthetic oligonucleotide
acgcuaguguaggaagucu

SEQ ID NO: 1209668 - RNA, 19 nt, Artificial Sequence
  Description of Artificial Sequence: Synthetic oligonucleotide
gucacucuagucaaccacu

SEQ ID NO: 1209669 - RNA, 19 nt, Artificial Sequence
  Description of Artificial Sequence: Synthetic oligonucleotide
cuucggaugagacggcugu

SEQ ID NO: 1209670 - RNA, 19 nt, Artificial Sequence
  Description of Artificial Sequence: Synthetic oligonucleotide
caauagcauagcggagcag

SEQ ID NO: 1209671 - RNA, 19 nt, Artificial Sequence
  Description of Artificial Sequence: Synthetic oligonucleotide
gugaagucuaucccggcau

SEQ ID NO: 1209672 - RNA, 19 nt, Artificial Sequence
  Description of Artificial Sequence: Synthetic oligonucleotide
uggcgcuggcuauuccugu

SEQ ID NO: 1209673 - RNA, 19 nt, Artificial Sequence
  Description of Artificial Sequence: Synthetic oligonucleotide
accuaaguaugaacauggu

SEQ ID NO: 1209674 - RNA, 19 nt, Artificial Sequence
  Description of Artificial Sequence: Synthetic oligonucleotide
acaccgacccgugauccga

SEQ ID NO: 1209675 - RNA, 19 nt, Artificial Sequence
  Description of Artificial Sequence: Synthetic oligonucleotide
ucccgagggagaucucaaa

SEQ ID NO: 1209676 - RNA, 19 nt, Artificial Sequence
  Description of Artificial Sequence: Synthetic oligonucleotide
auggguuggccuggcuccg

SEQ ID NO: 1209677 - RNA, 19 nt, Artificial Sequence
  Description of Artificial Sequence: Synthetic oligonucleotide
ggucauggaagcgguggag

SEQ ID NO: 1209678 - RNA, 19 nt, Artificial Sequence
  Description of Artificial Sequence: Synthetic oligonucleotide
cuccuucggaugagacggc

SEQ ID NO: 1209679 - RNA, 19 nt, Artificial Sequence
  Description of Artificial Sequence: Synthetic oligonucleotide
ggcuccgagagaucuagaa

SEQ ID NO: 1209680 - RNA, 19 nt, Artificial Sequence
  Description of Artificial Sequence: Synthetic oligonucleotide
caacucuugguauguacau

SEQ ID NO: 1209681 - RNA, 19 nt, Artificial Sequence
  Description of Artificial Sequence: Synthetic oligonucleotide
guaaucgucuucccggcuu

SEQ ID NO: 1209682 - RNA, 19 nt, Artificial Sequence
  Description of Artificial Sequence: Synthetic oligonucleotide
gagacggcugugaagcacu

SEQ ID NO: 1209683 - RNA, 19 nt, Artificial Sequence
  Description of Artificial Sequence: Synthetic oligonucleotide
gucacaacucuugguaugu

SEQ ID NO: 1209684 - RNA, 19 nt, Artificial Sequence
  Description of Artificial Sequence: Synthetic oligonucleotide
gugcaagaaagcuuucauu

SEQ ID NO: 1209685 - RNA, 19 nt, Artificial Sequence
  Description of Artificial Sequence: Synthetic oligonucleotide
ggagucuucgaagugcucu

SEQ ID NO: 1209686 - RNA, 19 nt, Artificial Sequence
  Description of Artificial Sequence: Synthetic oligonucleotide
gaccugaacuccagauguc

SEQ ID NO: 1209687 - RNA, 19 nt, Artificial Sequence
  Description of Artificial Sequence: Synthetic oligonucleotide
uccgagcuguaaucgucuu

SEQ ID NO: 1209688 - RNA, 19 nt, Artificial Sequence
  Description of Artificial Sequence: Synthetic oligonucleotide
gguccguggguacuuggca

SEQ ID NO: 1209689 - RNA, 19 nt, Artificial Sequence
  Description of Artificial Sequence: Synthetic oligonucleotide
ggacaucuguacgaguaga

SEQ ID NO: 1209690 - RNA, 19 nt, Artificial Sequence
  Description of Artificial Sequence: Synthetic oligonucleotide
cauggccaauucgccagug

SEQ ID NO: 1209691 - RNA, 19 nt, Artificial Sequence
  Description of Artificial Sequence: Synthetic oligonucleotide
cauggaagcgguggaggga

SEQ ID NO: 1209692 - RNA, 19 nt, Artificial Sequence
  Description of Artificial Sequence: Synthetic oligonucleotide
cuuuugcuugcugauggcu

SEQ ID NO: 1209693 - RNA, 19 nt, Artificial Sequence
  Description of Artificial Sequence: Synthetic oligonucleotide
caccgacccgugauccgag

SEQ ID NO: 1209694 - RNA, 19 nt, Artificial Sequence
  Description of Artificial Sequence: Synthetic oligonucleotide
ucacaacucuugguaugua

SEQ ID NO: 1209695 - RNA, 19 nt, Artificial Sequence
  Description of Artificial Sequence: Synthetic oligonucleotide
caacaugaagugagaauuu

SEQ ID NO: 1209696 - RNA, 19 nt, Artificial Sequence
  Description of Artificial Sequence: Synthetic oligonucleotide
gggaauggcaguggcgcug

SEQ ID NO: 1209697 - RNA, 19 nt, Artificial Sequence
  Description of Artificial Sequence: Synthetic oligonucleotide
ggugacgcuaguguaggaa

SEQ ID NO: 1209698 - RNA, 19 nt, Artificial Sequence
  Description of Artificial Sequence: Synthetic oligonucleotide
ggaagcgguggagggaaug

SEQ ID NO: 1209699 - RNA, 19 nt, Artificial Sequence
  Description of Artificial Sequence: Synthetic oligonucleotide
ggcggauguggcuccagca

SEQ ID NO: 1209700 - RNA, 19 nt, Artificial Sequence
  Description of Artificial Sequence: Synthetic oligonucleotide
cgcuaguguaggaagucug

SEQ ID NO: 1209701 - RNA, 19 nt, Artificial Sequence
  Description of Artificial Sequence: Synthetic oligonucleotide
ggcaugcccguucuaccac

SEQ ID NO: 1209702 - RNA, 19 nt, Artificial Sequence
  Description of Artificial Sequence: Synthetic oligonucleotide
gucuaucccggcaucauuu

SEQ ID NO: 1209703 - RNA, 19 nt, Artificial Sequence
  Description of Artificial Sequence: Synthetic oligonucleotide
gccaaacuacuguugauuu

SEQ ID NO: 1209704 - RNA, 19 nt, Artificial Sequence
  Description of Artificial Sequence: Synthetic oligonucleotide
ccuucggaugagacggcug

SEQ ID NO: 1209705 - RNA, 19 nt, Artificial Sequence
  Description of Artificial Sequence: Synthetic oligonucleotide
cuuucucccgagggagauc

SEQ ID NO: 1209706 - RNA, 19 nt, Artificial Sequence
  Description of Artificial Sequence: Synthetic oligonucleotide
cgauauauccugcaccaaa

SEQ ID NO: 1209707 - RNA, 19 nt, Artificial Sequence
  Description of Artificial Sequence: Synthetic oligonucleotide
caguggcgcuggcuauucc

SEQ ID NO: 1209708 - RNA, 19 nt, Artificial Sequence
  Description of Artificial Sequence: Synthetic oligonucleotide
cacggaacgccagcccuuc

SEQ ID NO: 1209709 - RNA, 19 nt, Artificial Sequence
  Description of Artificial Sequence: Synthetic oligonucleotide
gacccgugauccgagcugu

SEQ ID NO: 1209710 - RNA, 19 nt, Artificial Sequence
  Description of Artificial Sequence: Synthetic oligonucleotide
cucccgagggagaucucaa

SEQ ID NO: 1209711 - RNA, 19 nt, Artificial Sequence
  Description of Artificial Sequence: Synthetic oligonucleotide
gcgcuggcuauuccuguug

SEQ ID NO: 1209712 - RNA, 19 nt, Artificial Sequence
  Description of Artificial Sequence: Synthetic oligonucleotide
agacggcugugaagcacug

SEQ ID NO: 1209713 - RNA, 19 nt, Artificial Sequence
  Description of Artificial Sequence: Synthetic oligonucleotide
cuccacgaccaccgagcuc

SEQ ID NO: 1209714 - RNA, 19 nt, Artificial Sequence
  Description of Artificial Sequence: Synthetic oligonucleotide
agcccucgcuuggcaugcc

SEQ ID NO: 1209715 - RNA, 19 nt, Artificial Sequence
  Description of Artificial Sequence: Synthetic oligonucleotide
gguuugcacugugacugga

SEQ ID NO: 1209716 - RNA, 19 nt, Artificial Sequence
  Description of Artificial Sequence: Synthetic oligonucleotide
ccgagagaucuagaaggug

SEQ ID NO: 1209717 - RNA, 19 nt, Artificial Sequence
  Description of Artificial Sequence: Synthetic oligonucleotide
cuggcuauuccuguugcuu

SEQ ID NO: 1209718 - RNA, 19 nt, Artificial Sequence
  Description of Artificial Sequence: Synthetic oligonucleotide
ccucuguaccacggaacgc

SEQ ID NO: 1209719 - RNA, 19 nt, Artificial Sequence
  Description of Artificial Sequence: Synthetic oligonucleotide
cgcuggcuauuccuguugc

SEQ ID NO: 1209720 - RNA, 19 nt, Artificial Sequence
  Description of Artificial Sequence: Synthetic oligonucleotide
gcuccagauaacacagcaa

SEQ ID NO: 1209721 - RNA, 19 nt, Artificial Sequence
  Description of Artificial Sequence: Synthetic oligonucleotide
ccgagcuguaaucgucuuc

SEQ ID NO: 1209722 - RNA, 19 nt, Artificial Sequence
  Description of Artificial Sequence: Synthetic oligonucleotide
ugccuucgggauggauggu

SEQ ID NO: 1209723 - RNA, 19 nt, Artificial Sequence
  Description of Artificial Sequence: Synthetic oligonucleotide
agaggcggauguggcucca

SEQ ID NO: 1209724 - RNA, 19 nt, Artificial Sequence
  Description of Artificial Sequence: Synthetic oligonucleotide
cgggauggaugguccgugg

SEQ ID NO: 1209725 - RNA, 19 nt, Artificial Sequence
  Description of Artificial Sequence: Synthetic oligonucleotide
ugcugccuucgggauggau

SEQ ID NO: 1209726 - RNA, 19 nt, Artificial Sequence
  Description of Artificial Sequence: Synthetic oligonucleotide
ccaugauggccaaacuacu

SEQ ID NO: 1209727 - RNA, 19 nt, Artificial Sequence
  Description of Artificial Sequence: Synthetic oligonucleotide
cuauucggugccagucaau

SEQ ID NO: 1209728 - RNA, 19 nt, Artificial Sequence
  Description of Artificial Sequence: Synthetic oligonucleotide
gccuucgggauggaugguc

SEQ ID NO: 1209729 - RNA, 19 nt, Artificial Sequence
  Description of Artificial Sequence: Synthetic oligonucleotide
ccaauucgccagugcaaga

SEQ ID NO: 1209730 - RNA, 19 nt, Artificial Sequence
  Description of Artificial Sequence: Synthetic oligonucleotide
gcccucgcuuggcaugccc

SEQ ID NO: 1209731 - RNA, 19 nt, Artificial Sequence
  Description of Artificial Sequence: Synthetic oligonucleotide
cgacccgugauccgagcug

SEQ ID NO: 1209732 - RNA, 19 nt, Artificial Sequence
  Description of Artificial Sequence: Synthetic oligonucleotide
gggugacgcuaguguagga

SEQ ID NO: 1209733 - RNA, 19 nt, Artificial Sequence
  Description of Artificial Sequence: Synthetic oligonucleotide
cacucuagucaaccacuuu

SEQ ID NO: 1209734 - RNA, 19 nt, Artificial Sequence
  Description of Artificial Sequence: Synthetic oligonucleotide
gcaguggcgcuggcuauuc

SEQ ID NO: 1209735 - RNA, 19 nt, Artificial Sequence
  Description of Artificial Sequence: Synthetic oligonucleotide
cacgaccaccgagcucaug

SEQ ID NO: 1209736 - RNA, 19 nt, Artificial Sequence
  Description of Artificial Sequence: Synthetic oligonucleotide
ggggagaaacucccaugau

SEQ ID NO: 1209737 - RNA, 19 nt, Artificial Sequence
  Description of Artificial Sequence: Synthetic oligonucleotide
ccaaacuacuguugauuuu

SEQ ID NO: 1209738 - RNA, 19 nt, Artificial Sequence
  Description of Artificial Sequence: Synthetic oligonucleotide
gcgauauauccugcaccaa

SEQ ID NO: 1209739 - RNA, 19 nt, Artificial Sequence
  Description of Artificial Sequence: Synthetic oligonucleotide
cggaugagacggcugugaa

SEQ ID NO: 1209740 - RNA, 19 nt, Artificial Sequence
  Description of Artificial Sequence: Synthetic oligonucleotide
ggcgcuggcuauuccuguu

SEQ ID NO: 1209741 - RNA, 19 nt, Artificial Sequence
  Description of Artificial Sequence: Synthetic oligonucleotide
ccccucaugaacgcuuucu

SEQ ID NO: 1209742 - RNA, 19 nt, Artificial Sequence
  Description of Artificial Sequence: Synthetic oligonucleotide
ccgugauccgagcuguaau

SEQ ID NO: 1209743 - RNA, 19 nt, Artificial Sequence
  Description of Artificial Sequence: Synthetic oligonucleotide
ccguggguacuuggcagca

SEQ ID NO: 1209744 - RNA, 19 nt, Artificial Sequence
  Description of Artificial Sequence: Synthetic oligonucleotide
ggaugguccguggguacuu

SEQ ID NO: 1209745 - RNA, 19 nt, Artificial Sequence
  Description of Artificial Sequence: Synthetic oligonucleotide
acccgugauccgagcugua

SEQ ID NO: 1209746 - RNA, 19 nt, Artificial Sequence
  Description of Artificial Sequence: Synthetic oligonucleotide
cucgcuuggcaugcccguu

SEQ ID NO: 1209747 - RNA, 19 nt, Artificial Sequence
  Description of Artificial Sequence: Synthetic oligonucleotide
cggugccagucaauaaaau

SEQ ID NO: 1209748 - RNA, 19 nt, Artificial Sequence
  Description of Artificial Sequence: Synthetic oligonucleotide
cgccagcccuuccagacuu

SEQ ID NO: 1209749 - RNA, 19 nt, Artificial Sequence
  Description of Artificial Sequence: Synthetic oligonucleotide
ccacgaccaccgagcucau

SEQ ID NO: 1209750 - RNA, 19 nt, Artificial Sequence
  Description of Artificial Sequence: Synthetic oligonucleotide
aagaauacauccuucauca

SEQ ID NO: 1209751 - RNA, 19 nt, Artificial Sequence
  Description of Artificial Sequence: Synthetic oligonucleotide
uaagccacaagccauacgc

SEQ ID NO: 1209752 - RNA, 19 nt, Artificial Sequence
  Description of Artificial Sequence: Synthetic oligonucleotide
aauaccuagaaauccacca

SEQ ID NO: 1209753 - RNA, 19 nt, Artificial Sequence
  Description of Artificial Sequence: Synthetic oligonucleotide
aaauccaccaggaacauuc

SEQ ID NO: 1209754 - RNA, 19 nt, Artificial Sequence
  Description of Artificial Sequence: Synthetic oligonucleotide
augucuacuauccaugucg

SEQ ID NO: 1209755 - RNA, 19 nt, Artificial Sequence
  Description of Artificial Sequence: Synthetic oligonucleotide
aagaauagcagguaacuga

SEQ ID NO: 1209756 - RNA, 19 nt, Artificial Sequence
  Description of Artificial Sequence: Synthetic oligonucleotide
agaugauaaaguaaggggc

SEQ ID NO: 1209757 - RNA, 19 nt, Artificial Sequence
  Description of Artificial Sequence: Synthetic oligonucleotide
agaaugaacgagcaucagc

SEQ ID NO: 1209758 - RNA, 19 nt, Artificial Sequence
  Description of Artificial Sequence: Synthetic oligonucleotide
aagaaguucucuuugugca

SEQ ID NO: 1209759 - RNA, 19 nt, Artificial Sequence
  Description of Artificial Sequence: Synthetic oligonucleotide
auacucucuaaucuguccc

SEQ ID NO: 1209760 - RNA, 19 nt, Artificial Sequence
  Description of Artificial Sequence: Synthetic oligonucleotide
aauaggaccugcuccauug

SEQ ID NO: 1209761 - RNA, 19 nt, Artificial Sequence
  Description of Artificial Sequence: Synthetic oligonucleotide
gaaugaacgagcaucagcc

SEQ ID NO: 1209762 - RNA, 19 nt, Artificial Sequence
  Description of Artificial Sequence: Synthetic oligonucleotide
cuugucacgagcuugugcc

SEQ ID NO: 1209763 - RNA, 19 nt, Artificial Sequence
  Description of Artificial Sequence: Synthetic oligonucleotide
cuuagagagauagacacgg

SEQ ID NO: 1209764 - RNA, 19 nt, Artificial Sequence
  Description of Artificial Sequence: Synthetic oligonucleotide
uccuuagagagauagacac

SEQ ID NO: 1209765 - RNA, 19 nt, Artificial Sequence
  Description of Artificial Sequence: Synthetic oligonucleotide
gaugcaaauaccuagaaau

SEQ ID NO: 1209766 - RNA, 19 nt, Artificial Sequence
  Description of Artificial Sequence: Synthetic oligonucleotide
ugugccaauaagaaguucu

SEQ ID NO: 1209767 - RNA, 19 nt, Artificial Sequence
  Description of Artificial Sequence: Synthetic oligonucleotide
aagaagaauacauccuuca

SEQ ID NO: 1209768 - RNA, 19 nt, Artificial Sequence
  Description of Artificial Sequence: Synthetic oligonucleotide
agagaugauaaaguaaggg

SEQ ID NO: 1209769 - RNA, 19 nt, Artificial Sequence
  Description of Artificial Sequence: Synthetic oligonucleotide
ucgucgaagaagcaggcgg

SEQ ID NO: 1209770 - RNA, 19 nt, Artificial Sequence
  Description of Artificial Sequence: Synthetic oligonucleotide
agcgugaagacccagaagu

SEQ ID NO: 1209771 - RNA, 19 nt, Artificial Sequence
  Description of Artificial Sequence: Synthetic oligonucleotide
ucuaaucugucccaacugc

SEQ ID NO: 1209772 - RNA, 19 nt, Artificial Sequence
  Description of Artificial Sequence: Synthetic oligonucleotide
ucuacuauccaugucgaag

SEQ ID NO: 1209773 - RNA, 19 nt, Artificial Sequence
  Description of Artificial Sequence: Synthetic oligonucleotide
uaacugaucacguugccca

SEQ ID NO: 1209774 - RNA, 19 nt, Artificial Sequence
  Description of Artificial Sequence: Synthetic oligonucleotide
aaauaccuagaaauccacc

SEQ ID NO: 1209775 - RNA, 19 nt, Artificial Sequence
  Description of Artificial Sequence: Synthetic oligonucleotide
cauggaugcaaauaccuag

SEQ ID NO: 1209776 - RNA, 19 nt, Artificial Sequence
  Description of Artificial Sequence: Synthetic oligonucleotide
ucagacgucgcucauacuc

SEQ ID NO: 1209777 - RNA, 19 nt, Artificial Sequence
  Description of Artificial Sequence: Synthetic oligonucleotide
ugcaaauaccuagaaaucc

SEQ ID NO: 1209778 - RNA, 19 nt, Artificial Sequence
  Description of Artificial Sequence: Synthetic oligonucleotide
uugaugucuacuauccaug

SEQ ID NO: 1209779 - RNA, 19 nt, Artificial Sequence
  Description of Artificial Sequence: Synthetic oligonucleotide
aaagacaccggguguuccg

SEQ ID NO: 1209780 - RNA, 19 nt, Artificial Sequence
  Description of Artificial Sequence: Synthetic oligonucleotide
uaaaguaaggggcggggcc

SEQ ID NO: 1209781 - RNA, 19 nt, Artificial Sequence
  Description of Artificial Sequence: Synthetic oligonucleotide
auagacacggaagugcucg

SEQ ID NO: 1209782 - RNA, 19 nt, Artificial Sequence
  Description of Artificial Sequence: Synthetic oligonucleotide
agauugaguacucgguagg

SEQ ID NO: 1209783 - RNA, 19 nt, Artificial Sequence
  Description of Artificial Sequence: Synthetic oligonucleotide
agcccuacgacaccugugc

SEQ ID NO: 1209784 - RNA, 19 nt, Artificial Sequence
  Description of Artificial Sequence: Synthetic oligonucleotide
cagcuuuggacccaggugg

SEQ ID NO: 1209785 - RNA, 19 nt, Artificial Sequence
  Description of Artificial Sequence: Synthetic oligonucleotide
caccccauaagccacaagc

SEQ ID NO: 1209786 - RNA, 19 nt, Artificial Sequence
  Description of Artificial Sequence: Synthetic oligonucleotide
auugaugucuacuauccau

SEQ ID NO: 1209787 - RNA, 19 nt, Artificial Sequence
  Description of Artificial Sequence: Synthetic oligonucleotide
gauaaaguaaggggcgggg

SEQ ID NO: 1209788 - RNA, 19 nt, Artificial Sequence
  Description of Artificial Sequence: Synthetic oligonucleotide
cuuccuuagagagauagac

SEQ ID NO: 1209789 - RNA, 19 nt, Artificial Sequence
  Description of Artificial Sequence: Synthetic oligonucleotide
acgagcaucagccugcaug

SEQ ID NO: 1209790 - RNA, 19 nt, Artificial Sequence
  Description of Artificial Sequence: Synthetic oligonucleotide
aaaguguagcugaacagug

SEQ ID NO: 1209791 - RNA, 19 nt, Artificial Sequence
  Description of Artificial Sequence: Synthetic oligonucleotide
ugcacagacucccaaguga

SEQ ID NO: 1209792 - RNA, 19 nt, Artificial Sequence
  Description of Artificial Sequence: Synthetic oligonucleotide
gagcagauugaguacucgg

SEQ ID NO: 1209793 - RNA, 19 nt, Artificial Sequence
  Description of Artificial Sequence: Synthetic oligonucleotide
gagauagacacggaagugc

SEQ ID NO: 1209794 - RNA, 19 nt, Artificial Sequence
  Description of Artificial Sequence: Synthetic oligonucleotide
uagguuucgguucccgggg

SEQ ID NO: 1209795 - RNA, 19 nt, Artificial Sequence
  Description of Artificial Sequence: Synthetic oligonucleotide
guaacacucuccaaagagg

SEQ ID NO: 1209796 - RNA, 19 nt, Artificial Sequence
  Description of Artificial Sequence: Synthetic oligonucleotide
agaggaacuuugccgggcc

SEQ ID NO: 1209797 - RNA, 19 nt, Artificial Sequence
  Description of Artificial Sequence: Synthetic oligonucleotide
cacaugagagaugauaaag

SEQ ID NO: 1209798 - RNA, 19 nt, Artificial Sequence
  Description of Artificial Sequence: Synthetic oligonucleotide
auagcagguaacugaucac

SEQ ID NO: 1209799 - RNA, 19 nt, Artificial Sequence
  Description of Artificial Sequence: Synthetic oligonucleotide
auaaaguaaggggcggggc

SEQ ID NO: 1209800 - RNA, 19 nt, Artificial Sequence
  Description of Artificial Sequence: Synthetic oligonucleotide
cauacucucuaaucugucc

SEQ ID NO: 1209801 - RNA, 19 nt, Artificial Sequence
  Description of Artificial Sequence: Synthetic oligonucleotide
uagagagauagacacggaa

SEQ ID NO: 1209802 - RNA, 19 nt, Artificial Sequence
  Description of Artificial Sequence: Synthetic oligonucleotide
uguagcugaacaguggcga

SEQ ID NO: 1209803 - RNA, 19 nt, Artificial Sequence
  Description of Artificial Sequence: Synthetic oligonucleotide
aagugagcagcuugcgcuc

SEQ ID NO: 1209804 - RNA, 19 nt, Artificial Sequence
  Description of Artificial Sequence: Synthetic oligonucleotide
uguaugucccaagucauac

SEQ ID NO: 1209805 - RNA, 19 nt, Artificial Sequence
  Description of Artificial Sequence: Synthetic oligonucleotide
uuccuuagagagauagaca

SEQ ID NO: 1209806 - RNA, 19 nt, Artificial Sequence
  Description of Artificial Sequence: Synthetic oligonucleotide
ugauaaaguaaggggcggg

SEQ ID NO: 1209807 - RNA, 19 nt, Artificial Sequence
  Description of Artificial Sequence: Synthetic oligonucleotide
agagagauagacacggaag

SEQ ID NO: 1209808 - RNA, 19 nt, Artificial Sequence
  Description of Artificial Sequence: Synthetic oligonucleotide
ucggccacccaacugagga

SEQ ID NO: 1209809 - RNA, 19 nt, Artificial Sequence
  Description of Artificial Sequence: Synthetic oligonucleotide
cagauugaguacucgguag

SEQ ID NO: 1209810 - RNA, 19 nt, Artificial Sequence
  Description of Artificial Sequence: Synthetic oligonucleotide
ugaggaggcgcacaugaga

SEQ ID NO: 1209811 - RNA, 19 nt, Artificial Sequence
  Description of Artificial Sequence: Synthetic oligonucleotide
ugaagaucaugaagucgag

SEQ ID NO: 1209812 - RNA, 19 nt, Artificial Sequence
  Description of Artificial Sequence: Synthetic oligonucleotide
gacuguaccccauccuggg

SEQ ID NO: 1209813 - RNA, 19 nt, Artificial Sequence
  Description of Artificial Sequence: Synthetic oligonucleotide
augaacgagcaucagccug

SEQ ID NO: 1209814 - RNA, 19 nt, Artificial Sequence
  Description of Artificial Sequence: Synthetic oligonucleotide
cagguaacugaucacguug

SEQ ID NO: 1209815 - RNA, 19 nt, Artificial Sequence
  Description of Artificial Sequence: Synthetic oligonucleotide
gugaagaucaugaagucga

SEQ ID NO: 1209816 - RNA, 19 nt, Artificial Sequence
  Description of Artificial Sequence: Synthetic oligonucleotide
aagugagcccuacgacacc

SEQ ID NO: 1209817 - RNA, 19 nt, Artificial Sequence
  Description of Artificial Sequence: Synthetic oligonucleotide
agguaacugaucacguugc

SEQ ID NO: 1209818 - RNA, 19 nt, Artificial Sequence
  Description of Artificial Sequence: Synthetic oligonucleotide
caagugagcccuacgacac

SEQ ID NO: 1209819 - RNA, 19 nt, Artificial Sequence
  Description of Artificial Sequence: Synthetic oligonucleotide
ugucuacuauccaugucga

SEQ ID NO: 1209820 - RNA, 19 nt, Artificial Sequence
  Description of Artificial Sequence: Synthetic oligonucleotide
aacacacgcgcaaacagca

SEQ ID NO: 1209821 - RNA, 19 nt, Artificial Sequence
  Description of Artificial Sequence: Synthetic oligonucleotide
gaagaucaugaagucgagg

SEQ ID NO: 1209822 - RNA, 19 nt, Artificial Sequence
  Description of Artificial Sequence: Synthetic oligonucleotide
aaguguagcugaacagugg

SEQ ID NO: 1209823 - RNA, 19 nt, Artificial Sequence
  Description of Artificial Sequence: Synthetic oligonucleotide
cuucagacgucgcucauac

SEQ ID NO: 1209824 - RNA, 19 nt, Artificial Sequence
  Description of Artificial Sequence: Synthetic oligonucleotide
guuucagacgcucggaguc

SEQ ID NO: 1209825 - RNA, 19 nt, Artificial Sequence
  Description of Artificial Sequence: Synthetic oligonucleotide
aucacguugcccaggaagg

SEQ ID NO: 1209826 - RNA, 19 nt, Artificial Sequence
  Description of Artificial Sequence: Synthetic oligonucleotide
acaagccauacgcagagaa

SEQ ID NO: 1209827 - RNA, 19 nt, Artificial Sequence
  Description of Artificial Sequence: Synthetic oligonucleotide
aacuuugccgggcccaggu

SEQ ID NO: 1209828 - RNA, 19 nt, Artificial Sequence
  Description of Artificial Sequence: Synthetic oligonucleotide
ccauugaugucuacuaucc

SEQ ID NO: 1209829 - RNA, 19 nt, Artificial Sequence
  Description of Artificial Sequence: Synthetic oligonucleotide
caacacacgcgcaaacagc

SEQ ID NO: 1209830 - RNA, 19 nt, Artificial Sequence
  Description of Artificial Sequence: Synthetic oligonucleotide
auaagccacaagccauacg

SEQ ID NO: 1209831 - RNA, 19 nt, Artificial Sequence
  Description of Artificial Sequence: Synthetic oligonucleotide
gacacggaagugcucgaag

SEQ ID NO: 1209832 - RNA, 19 nt, Artificial Sequence
  Description of Artificial Sequence: Synthetic oligonucleotide
gaagaagaauacauccuuc

SEQ ID NO: 1209833 - RNA, 19 nt, Artificial Sequence
  Description of Artificial Sequence: Synthetic oligonucleotide
ucgcacagcagcgugaaga

SEQ ID NO: 1209834 - RNA, 19 nt, Artificial Sequence
  Description of Artificial Sequence: Synthetic oligonucleotide
aggacuguaugucccaagu

SEQ ID NO: 1209835 - RNA, 19 nt, Artificial Sequence
  Description of Artificial Sequence: Synthetic oligonucleotide
aaaguaaggggcggggcca

SEQ ID NO: 1209836 - RNA, 19 nt, Artificial Sequence
  Description of Artificial Sequence: Synthetic oligonucleotide
guggccucuccccacaggg

SEQ ID NO: 1209837 - RNA, 19 nt, Artificial Sequence
  Description of Artificial Sequence: Synthetic oligonucleotide
caaagcagcgggcacguac

SEQ ID NO: 1209838 - RNA, 19 nt, Artificial Sequence
  Description of Artificial Sequence: Synthetic oligonucleotide
uacucucuaaucuguccca

SEQ ID NO: 1209839 - RNA, 19 nt, Artificial Sequence
  Description of Artificial Sequence: Synthetic oligonucleotide
guagcguugugccuuccag

SEQ ID NO: 1209840 - RNA, 19 nt, Artificial Sequence
  Description of Artificial Sequence: Synthetic oligonucleotide
ucauacucucuaaucuguc

SEQ ID NO: 1209841 - RNA, 19 nt, Artificial Sequence
  Description of Artificial Sequence: Synthetic oligonucleotide
ucacgaugacaaucuuggg

SEQ ID NO: 1209842 - RNA, 19 nt, Artificial Sequence
  Description of Artificial Sequence: Synthetic oligonucleotide
cucuaaucugucccaacug

SEQ ID NO: 1209843 - RNA, 19 nt, Artificial Sequence
  Description of Artificial Sequence: Synthetic oligonucleotide
aagaaugaacgagcaucag

SEQ ID NO: 1209844 - RNA, 19 nt, Artificial Sequence
  Description of Artificial Sequence: Synthetic oligonucleotide
aagacaccggguguuccgg

SEQ ID NO: 1209845 - RNA, 19 nt, Artificial Sequence
  Description of Artificial Sequence: Synthetic oligonucleotide
uaaucugucccaacugcuu

SEQ ID NO: 1209846 - RNA, 19 nt, Artificial Sequence
  Description of Artificial Sequence: Synthetic oligonucleotide
uguuccgggcuggaaaucc

SEQ ID NO: 1209847 - RNA, 19 nt, Artificial Sequence
  Description of Artificial Sequence: Synthetic oligonucleotide
ugcucgaaggcuggggagg

SEQ ID NO: 1209848 - RNA, 19 nt, Artificial Sequence
  Description of Artificial Sequence: Synthetic oligonucleotide
gaaaguguagcugaacagu

SEQ ID NO: 1209849 - RNA, 19 nt, Artificial Sequence
  Description of Artificial Sequence: Synthetic oligonucleotide
caagaauagcagguaacug

SEQ ID NO: 1209850 - RNA, 19 nt, Artificial Sequence
  Description of Artificial Sequence: Synthetic oligonucleotide
guaacugaucacguugccc

SEQ ID NO: 1209851 - RNA, 19 nt, Artificial Sequence
  Description of Artificial Sequence: Synthetic oligonucleotide
uccaugucgaagucagggu

SEQ ID NO: 1209852 - RNA, 19 nt, Artificial Sequence
  Description of Artificial Sequence: Synthetic oligonucleotide
ugguaacacucuccaaaga

SEQ ID NO: 1209853 - RNA, 19 nt, Artificial Sequence
  Description of Artificial Sequence: Synthetic oligonucleotide
acgacaccugugcagccac

SEQ ID NO: 1209854 - RNA, 19 nt, Artificial Sequence
  Description of Artificial Sequence: Synthetic oligonucleotide
aaagcagcgggcacguacu

SEQ ID NO: 1209855 - RNA, 19 nt, Artificial Sequence
  Description of Artificial Sequence: Synthetic oligonucleotide
agaauagcagguaacugau

SEQ ID NO: 1209856 - RNA, 19 nt, Artificial Sequence
  Description of Artificial Sequence: Synthetic oligonucleotide
aggaacauucagcuuugga

SEQ ID NO: 1209857 - RNA, 19 nt, Artificial Sequence
  Description of Artificial Sequence: Synthetic oligonucleotide
gucccaacugcuucagugc

SEQ ID NO: 1209858 - RNA, 19 nt, Artificial Sequence
  Description of Artificial Sequence: Synthetic oligonucleotide
gcugcuaagggccucggcc

SEQ ID NO: 1209859 - RNA, 19 nt, Artificial Sequence
  Description of Artificial Sequence: Synthetic oligonucleotide
ucuucgcacagcagcguga

SEQ ID NO: 1209860 - RNA, 19 nt, Artificial Sequence
  Description of Artificial Sequence: Synthetic oligonucleotide
uguagcguugugccuucca

SEQ ID NO: 1209861 - RNA, 19 nt, Artificial Sequence
  Description of Artificial Sequence: Synthetic oligonucleotide
agauagacacggaagugcu

SEQ ID NO: 1209862 - RNA, 19 nt, Artificial Sequence
  Description of Artificial Sequence: Synthetic oligonucleotide
caucgucgaagaagcaggc

SEQ ID NO: 1209863 - RNA, 19 nt, Artificial Sequence
  Description of Artificial Sequence: Synthetic oligonucleotide
gcaucgucgaagaagcagg

SEQ ID NO: 1209864 - RNA, 19 nt, Artificial Sequence
  Description of Artificial Sequence: Synthetic oligonucleotide
ucgcucauacucucuaauc

SEQ ID NO: 1209865 - RNA, 19 nt, Artificial Sequence
  Description of Artificial Sequence: Synthetic oligonucleotide
uacucgguagguuucgguu

SEQ ID NO: 1209866 - RNA, 19 nt, Artificial Sequence
  Description of Artificial Sequence: Synthetic oligonucleotide
agacgucgcucauacucuc

SEQ ID NO: 1209867 - RNA, 19 nt, Artificial Sequence
  Description of Artificial Sequence: Synthetic oligonucleotide
gaggacuguaugucccaag

SEQ ID NO: 1209868 - RNA, 19 nt, Artificial Sequence
  Description of Artificial Sequence: Synthetic oligonucleotide
augagagaugauaaaguaa

SEQ ID NO: 1209869 - RNA, 19 nt, Artificial Sequence
  Description of Artificial Sequence: Synthetic oligonucleotide
uuugccgggcccagguccc

SEQ ID NO: 1209870 - RNA, 19 nt, Artificial Sequence
  Description of Artificial Sequence: Synthetic oligonucleotide
uguucacugugaagauaug

SEQ ID NO: 1209871 - RNA, 19 nt, Artificial Sequence
  Description of Artificial Sequence: Synthetic oligonucleotide
ugagcccuacgacaccugu

SEQ ID NO: 1209872 - RNA, 19 nt, Artificial Sequence
  Description of Artificial Sequence: Synthetic oligonucleotide
gcgcagaggaacuuugccg

SEQ ID NO: 1209873 - RNA, 19 nt, Artificial Sequence
  Description of Artificial Sequence: Synthetic oligonucleotide
ucgcuugucacgagcuugu

SEQ ID NO: 1209874 - RNA, 19 nt, Artificial Sequence
  Description of Artificial Sequence: Synthetic oligonucleotide
ugcagcggacgccuagcag

SEQ ID NO: 1209875 - RNA, 19 nt, Artificial Sequence
  Description of Artificial Sequence: Synthetic oligonucleotide
gaguacucgguagguuucg

SEQ ID NO: 1209876 - RNA, 19 nt, Artificial Sequence
  Description of Artificial Sequence: Synthetic oligonucleotide
agcaaggcagagcugcuaa

SEQ ID NO: 1209877 - RNA, 19 nt, Artificial Sequence
  Description of Artificial Sequence: Synthetic oligonucleotide
gguguagaugagaggaggg

SEQ ID NO: 1209878 - RNA, 19 nt, Artificial Sequence
  Description of Artificial Sequence: Synthetic oligonucleotide
cuacuauccaugucgaagu

SEQ ID NO: 1209879 - RNA, 19 nt, Artificial Sequence
  Description of Artificial Sequence: Synthetic oligonucleotide
uacuauccaugucgaaguc

SEQ ID NO: 1209880 - RNA, 19 nt, Artificial Sequence
  Description of Artificial Sequence: Synthetic oligonucleotide
gaaugaacucuccauggau

SEQ ID NO: 1209881 - RNA, 19 nt, Artificial Sequence
  Description of Artificial Sequence: Synthetic oligonucleotide
gguagguuucgguucccgg

SEQ ID NO: 1209882 - RNA, 19 nt, Artificial Sequence
  Description of Artificial Sequence: Synthetic oligonucleotide
acugucucgcuugucacga

SEQ ID NO: 1209883 - RNA, 19 nt, Artificial Sequence
  Description of Artificial Sequence: Synthetic oligonucleotide
agcagauugaguacucggu

SEQ ID NO: 1209884 - RNA, 19 nt, Artificial Sequence
  Description of Artificial Sequence: Synthetic oligonucleotide
gcuugugccaauaagaagu

SEQ ID NO: 1209885 - RNA, 19 nt, Artificial Sequence
  Description of Artificial Sequence: Synthetic oligonucleotide
gaaggcggucacuggggag

SEQ ID NO: 1209886 - RNA, 19 nt, Artificial Sequence
  Description of Artificial Sequence: Synthetic oligonucleotide
agcugcuaagggccucggc

SEQ ID NO: 1209887 - RNA, 19 nt, Artificial Sequence
  Description of Artificial Sequence: Synthetic oligonucleotide
cagcaggucgcacugguuc

SEQ ID NO: 1209888 - RNA, 19 nt, Artificial Sequence
  Description of Artificial Sequence: Synthetic oligonucleotide
caggcuaccccagccaccg

SEQ ID NO: 1209889 - RNA, 19 nt, Artificial Sequence
  Description of Artificial Sequence: Synthetic oligonucleotide
gaugagcagauugaguacu

SEQ ID NO: 1209890 - RNA, 19 nt, Artificial Sequence
  Description of Artificial Sequence: Synthetic oligonucleotide
gacgcucggagucacuguc

SEQ ID NO: 1209891 - RNA, 19 nt, Artificial Sequence
  Description of Artificial Sequence: Synthetic oligonucleotide
acgcgcaaacagcagcaag

SEQ ID NO: 1209892 - RNA, 19 nt, Artificial Sequence
  Description of Artificial Sequence: Synthetic oligonucleotide
uagcguugugccuuccagu

SEQ ID NO: 1209893 - RNA, 19 nt, Artificial Sequence
  Description of Artificial Sequence: Synthetic oligonucleotide
gagcuugugccaauaagaa

SEQ ID NO: 1209894 - RNA, 19 nt, Artificial Sequence
  Description of Artificial Sequence: Synthetic oligonucleotide
uggcgaugagcagauugag

SEQ ID NO: 1209895 - RNA, 19 nt, Artificial Sequence
  Description of Artificial Sequence: Synthetic oligonucleotide
ccuuagagagauagacacg

SEQ ID NO: 1209896 - RNA, 19 nt, Artificial Sequence
  Description of Artificial Sequence: Synthetic oligonucleotide
acugaucacguugcccagg

SEQ ID NO: 1209897 - RNA, 19 nt, Artificial Sequence
  Description of Artificial Sequence: Synthetic oligonucleotide
ugcgaccagcgcuuggcgc

SEQ ID NO: 1209898 - RNA, 19 nt, Artificial Sequence
  Description of Artificial Sequence: Synthetic oligonucleotide
uuucagacgcucggaguca

SEQ ID NO: 1209899 - RNA, 19 nt, Artificial Sequence
  Description of Artificial Sequence: Synthetic oligonucleotide
gucgcuguugucuuguacu

SEQ ID NO: 1209900 - RNA, 19 nt, Artificial Sequence
  Description of Artificial Sequence: Synthetic oligonucleotide
gcaagugagcccuacgaca

SEQ ID NO: 1209901 - RNA, 19 nt, Artificial Sequence
  Description of Artificial Sequence: Synthetic oligonucleotide
cgcagaggaacuuugccgg

SEQ ID NO: 1209902 - RNA, 19 nt, Artificial Sequence
  Description of Artificial Sequence: Synthetic oligonucleotide
acguacuggccgccgucgc

SEQ ID NO: 1209903 - RNA, 19 nt, Artificial Sequence
  Description of Artificial Sequence: Synthetic oligonucleotide
cugucggagagguagaggu

SEQ ID NO: 1209904 - RNA, 19 nt, Artificial Sequence
  Description of Artificial Sequence: Synthetic oligonucleotide
cgagcaucagccugcaugg

SEQ ID NO: 1209905 - RNA, 19 nt, Artificial Sequence
  Description of Artificial Sequence: Synthetic oligonucleotide
ccagcugucggagagguag

SEQ ID NO: 1209906 - RNA, 19 nt, Artificial Sequence
  Description of Artificial Sequence: Synthetic oligonucleotide
acuugaguacaguguugga

SEQ ID NO: 1209907 - RNA, 19 nt, Artificial Sequence
  Description of Artificial Sequence: Synthetic oligonucleotide
accuagaaauccaccagga

SEQ ID NO: 1209908 - RNA, 19 nt, Artificial Sequence
  Description of Artificial Sequence: Synthetic oligonucleotide
gcccaauaggaccugcucc

SEQ ID NO: 1209909 - RNA, 19 nt, Artificial Sequence
  Description of Artificial Sequence: Synthetic oligonucleotide
cacguugcccaggaaggcg

SEQ ID NO: 1209910 - RNA, 19 nt, Artificial Sequence
  Description of Artificial Sequence: Synthetic oligonucleotide
agugagcccuacgacaccu

SEQ ID NO: 1209911 - RNA, 19 nt, Artificial Sequence
  Description of Artificial Sequence: Synthetic oligonucleotide
agcagcucaaagacaccgg

SEQ ID NO: 1209912 - RNA, 19 nt, Artificial Sequence
  Description of Artificial Sequence: Synthetic oligonucleotide
cucgcuugucacgagcuug

SEQ ID NO: 1209913 - RNA, 19 nt, Artificial Sequence
  Description of Artificial Sequence: Synthetic oligonucleotide
uguaccccauccugggcaa

SEQ ID NO: 1209914 - RNA, 19 nt, Artificial Sequence
  Description of Artificial Sequence: Synthetic oligonucleotide
ccgagaguggaauucccgg

SEQ ID NO: 1209915 - RNA, 19 nt, Artificial Sequence
  Description of Artificial Sequence: Synthetic oligonucleotide
uggcgcagaggaacuuugc

SEQ ID NO: 1209916 - RNA, 19 nt, Artificial Sequence
  Description of Artificial Sequence: Synthetic oligonucleotide
gaggaacuuugccgggccc

SEQ ID NO: 1209917 - RNA, 19 nt, Artificial Sequence
  Description of Artificial Sequence: Synthetic oligonucleotide
agccgcagugugaagauca

SEQ ID NO: 1209918 - RNA, 19 nt, Artificial Sequence
  Description of Artificial Sequence: Synthetic oligonucleotide
cacaggggcaucgucgaag

SEQ ID NO: 1209919 - RNA, 19 nt, Artificial Sequence
  Description of Artificial Sequence: Synthetic oligonucleotide
aggaaggcggucacugggg

SEQ ID NO: 1209920 - RNA, 19 nt, Artificial Sequence
  Description of Artificial Sequence: Synthetic oligonucleotide
uugucacgagcuugugcca

SEQ ID NO: 1209921 - RNA, 19 nt, Artificial Sequence
  Description of Artificial Sequence: Synthetic oligonucleotide
acguugcccaggaaggcgg

SEQ ID NO: 1209922 - RNA, 19 nt, Artificial Sequence
  Description of Artificial Sequence: Synthetic oligonucleotide
agacaccggguguuccggg

SEQ ID NO: 1209923 - RNA, 19 nt, Artificial Sequence
  Description of Artificial Sequence: Synthetic oligonucleotide
gaagugcucgaaggcuggg

SEQ ID NO: 1209924 - RNA, 19 nt, Artificial Sequence
  Description of Artificial Sequence: Synthetic oligonucleotide
cacagacucccaagugagc

SEQ ID NO: 1209925 - RNA, 19 nt, Artificial Sequence
  Description of Artificial Sequence: Synthetic oligonucleotide
uuucgguucccggggcccg

SEQ ID NO: 1209926 - RNA, 19 nt, Artificial Sequence
  Description of Artificial Sequence: Synthetic oligonucleotide
agaauacauccuucaucau

SEQ ID NO: 1209927 - RNA, 19 nt, Artificial Sequence
  Description of Artificial Sequence: Synthetic oligonucleotide
gucgaagucaggguucuuc

SEQ ID NO: 1209928 - RNA, 19 nt, Artificial Sequence
  Description of Artificial Sequence: Synthetic oligonucleotide
cucuucgcacagcagcgug

SEQ ID NO: 1209929 - RNA, 19 nt, Artificial Sequence
  Description of Artificial Sequence: Synthetic oligonucleotide
cuguaccccauccugggca

SEQ ID NO: 1209930 - RNA, 19 nt, Artificial Sequence
  Description of Artificial Sequence: Synthetic oligonucleotide
cauaagccacaagccauac

SEQ ID NO: 1209931 - RNA, 19 nt, Artificial Sequence
  Description of Artificial Sequence: Synthetic oligonucleotide
ugcuaagggccucggccac

SEQ ID NO: 1209932 - RNA, 19 nt, Artificial Sequence
  Description of Artificial Sequence: Synthetic oligonucleotide
aauucccggaugaggcugu

SEQ ID NO: 1209933 - RNA, 19 nt, Artificial Sequence
  Description of Artificial Sequence: Synthetic oligonucleotide
cuugcgcucagcuuccuua

SEQ ID NO: 1209934 - RNA, 19 nt, Artificial Sequence
  Description of Artificial Sequence: Synthetic oligonucleotide
ugcguuucagacgcucgga

SEQ ID NO: 1209935 - RNA, 19 nt, Artificial Sequence
  Description of Artificial Sequence: Synthetic oligonucleotide
ggaaugaacucuccaugga

SEQ ID NO: 1209936 - RNA, 19 nt, Artificial Sequence
  Description of Artificial Sequence: Synthetic oligonucleotide
guaaggggcggggccagcg

SEQ ID NO: 1209937 - RNA, 19 nt, Artificial Sequence
  Description of Artificial Sequence: Synthetic oligonucleotide
uacgacaccugugcagcca

SEQ ID NO: 1209938 - RNA, 19 nt, Artificial Sequence
  Description of Artificial Sequence: Synthetic oligonucleotide
aagccacaagccauacgca

SEQ ID NO: 1209939 - RNA, 19 nt, Artificial Sequence
  Description of Artificial Sequence: Synthetic oligonucleotide
guagaggucgcuguugucu

SEQ ID NO: 1209940 - RNA, 19 nt, Artificial Sequence
  Description of Artificial Sequence: Synthetic oligonucleotide
cuuugcugaaaguguagcu

SEQ ID NO: 1209941 - RNA, 19 nt, Artificial Sequence
  Description of Artificial Sequence: Synthetic oligonucleotide
cccagaagugcgaccagcg

SEQ ID NO: 1209942 - RNA, 19 nt, Artificial Sequence
  Description of Artificial Sequence: Synthetic oligonucleotide
cuacgacaccugugcagcc

SEQ ID NO: 1209943 - RNA, 19 nt, Artificial Sequence
  Description of Artificial Sequence: Synthetic oligonucleotide
cugcuaagggccucggcca

SEQ ID NO: 1209944 - RNA, 19 nt, Artificial Sequence
  Description of Artificial Sequence: Synthetic oligonucleotide
ugucacgagcuugugccaa

SEQ ID NO: 1209945 - RNA, 19 nt, Artificial Sequence
  Description of Artificial Sequence: Synthetic oligonucleotide
uugugguaacacucuccaa

SEQ ID NO: 1209946 - RNA, 19 nt, Artificial Sequence
  Description of Artificial Sequence: Synthetic oligonucleotide
ucgcuguugucuuguacuu

SEQ ID NO: 1209947 - RNA, 19 nt, Artificial Sequence
  Description of Artificial Sequence: Synthetic oligonucleotide
ccuacgacaccugugcagc

SEQ ID NO: 1209948 - RNA, 19 nt, Artificial Sequence
  Description of Artificial Sequence: Synthetic oligonucleotide
acgugcguuucagacgcuc

SEQ ID NO: 1209949 - RNA, 19 nt, Artificial Sequence
  Description of Artificial Sequence: Synthetic oligonucleotide
cuaagggccucggccaccc

SEQ ID NO: 1209950 - RNA, 19 nt, Artificial Sequence
  Description of Artificial Sequence: Synthetic oligonucleotide
ggcaagugagcccuacgac

SEQ ID NO: 1209951 - RNA, 19 nt, Artificial Sequence
  Description of Artificial Sequence: Synthetic oligonucleotide
gauagacacggaagugcuc

SEQ ID NO: 1209952 - RNA, 19 nt, Artificial Sequence
  Description of Artificial Sequence: Synthetic oligonucleotide
cagcgugaagacccagaag

SEQ ID NO: 1209953 - RNA, 19 nt, Artificial Sequence
  Description of Artificial Sequence: Synthetic oligonucleotide
gaauagcagguaacugauc

SEQ ID NO: 1209954 - RNA, 19 nt, Artificial Sequence
  Description of Artificial Sequence: Synthetic oligonucleotide
agaggucgcuguugucuug

SEQ ID NO: 1209955 - RNA, 19 nt, Artificial Sequence
  Description of Artificial Sequence: Synthetic oligonucleotide
auugaguacucgguagguu

SEQ ID NO: 1209956 - RNA, 19 nt, Artificial Sequence
  Description of Artificial Sequence: Synthetic oligonucleotide
guacuuugcugaaagugua

SEQ ID NO: 1209957 - RNA, 19 nt, Artificial Sequence
  Description of Artificial Sequence: Synthetic oligonucleotide
guggcgaugagcagauuga

SEQ ID NO: 1209958 - RNA, 19 nt, Artificial Sequence
  Description of Artificial Sequence: Synthetic oligonucleotide
gucgcacugguuccagcug

SEQ ID NO: 1209959 - RNA, 19 nt, Artificial Sequence
  Description of Artificial Sequence: Synthetic oligonucleotide
cacguacuggccgccgucg

SEQ ID NO: 1209960 - RNA, 19 nt, Artificial Sequence
  Description of Artificial Sequence: Synthetic oligonucleotide
cagacgcucggagucacug

SEQ ID NO: 1209961 - RNA, 19 nt, Artificial Sequence
  Description of Artificial Sequence: Synthetic oligonucleotide
uucgcacagcagcgugaag

SEQ ID NO: 1209962 - RNA, 19 nt, Artificial Sequence
  Description of Artificial Sequence: Synthetic oligonucleotide
gugccaauaagaaguucuc

SEQ ID NO: 1209963 - RNA, 19 nt, Artificial Sequence
  Description of Artificial Sequence: Synthetic oligonucleotide
aggaacuuugccgggccca

SEQ ID NO: 1209964 - RNA, 19 nt, Artificial Sequence
  Description of Artificial Sequence: Synthetic oligonucleotide
cugaucacguugcccagga

SEQ ID NO: 1209965 - RNA, 19 nt, Artificial Sequence
  Description of Artificial Sequence: Synthetic oligonucleotide
agaagugcgaccagcgcuu

SEQ ID NO: 1209966 - RNA, 19 nt, Artificial Sequence
  Description of Artificial Sequence: Synthetic oligonucleotide
gauugaguacucgguaggu

SEQ ID NO: 1209967 - RNA, 19 nt, Artificial Sequence
  Description of Artificial Sequence: Synthetic oligonucleotide
cggaaggcccaauaggacc

SEQ ID NO: 1209968 - RNA, 19 nt, Artificial Sequence
  Description of Artificial Sequence: Synthetic oligonucleotide
acacgcgcaaacagcagca

SEQ ID NO: 1209969 - RNA, 19 nt, Artificial Sequence
  Description of Artificial Sequence: Synthetic oligonucleotide
ccuagcuguuuguucacug

SEQ ID NO: 1209970 - RNA, 19 nt, Artificial Sequence
  Description of Artificial Sequence: Synthetic oligonucleotide
guuucgguucccggggccc

SEQ ID NO: 1209971 - RNA, 19 nt, Artificial Sequence
  Description of Artificial Sequence: Synthetic oligonucleotide
uucagacgcucggagucac

SEQ ID NO: 1209972 - RNA, 19 nt, Artificial Sequence
  Description of Artificial Sequence: Synthetic oligonucleotide
cagaagugcgaccagcgcu

SEQ ID NO: 1209973 - RNA, 19 nt, Artificial Sequence
  Description of Artificial Sequence: Synthetic oligonucleotide
gaacuuugccgggcccagg

SEQ ID NO: 1209974 - RNA, 19 nt, Artificial Sequence
  Description of Artificial Sequence: Synthetic oligonucleotide
agacgcucggagucacugu

SEQ ID NO: 1209975 - RNA, 19 nt, Artificial Sequence
  Description of Artificial Sequence: Synthetic oligonucleotide
cagcaacacacgcgcaaac

SEQ ID NO: 1209976 - RNA, 19 nt, Artificial Sequence
  Description of Artificial Sequence: Synthetic oligonucleotide
agcugucggagagguagag

SEQ ID NO: 1209977 - RNA, 19 nt, Artificial Sequence
  Description of Artificial Sequence: Synthetic oligonucleotide
gcguuucagacgcucggag

SEQ ID NO: 1209978 - RNA, 19 nt, Artificial Sequence
  Description of Artificial Sequence: Synthetic oligonucleotide
ccaagugagcagcuugcgc

SEQ ID NO: 1209979 - RNA, 19 nt, Artificial Sequence
  Description of Artificial Sequence: Synthetic oligonucleotide
gggcaagugagcccuacga

SEQ ID NO: 1209980 - RNA, 19 nt, Artificial Sequence
  Description of Artificial Sequence: Synthetic oligonucleotide
aggaggcgcacaugagaga

SEQ ID NO: 1209981 - RNA, 19 nt, Artificial Sequence
  Description of Artificial Sequence: Synthetic oligonucleotide
ucggagucacugucucgcu

SEQ ID NO: 1209982 - RNA, 19 nt, Artificial Sequence
  Description of Artificial Sequence: Synthetic oligonucleotide
ucucgcuugucacgagcuu

SEQ ID NO: 1209983 - RNA, 19 nt, Artificial Sequence
  Description of Artificial Sequence: Synthetic oligonucleotide
acgucgcucauacucucua

SEQ ID NO: 1209984 - RNA, 19 nt, Artificial Sequence
  Description of Artificial Sequence: Synthetic oligonucleotide
ggggaggcgggcaagugag

SEQ ID NO: 1209985 - RNA, 19 nt, Artificial Sequence
  Description of Artificial Sequence: Synthetic oligonucleotide
cucggccacccaacugagg

SEQ ID NO: 1209986 - RNA, 19 nt, Artificial Sequence
  Description of Artificial Sequence: Synthetic oligonucleotide
ggacuguaugucccaaguc

SEQ ID NO: 1209987 - RNA, 19 nt, Artificial Sequence
  Description of Artificial Sequence: Synthetic oligonucleotide
ggaggcgggcaagugagcc

SEQ ID NO: 1209988 - RNA, 19 nt, Artificial Sequence
  Description of Artificial Sequence: Synthetic oligonucleotide
auccugggcaaagaaugaa

SEQ ID NO: 1209989 - RNA, 19 nt, Artificial Sequence
  Description of Artificial Sequence: Synthetic oligonucleotide
gagcccuacgacaccugug

SEQ ID NO: 1209990 - RNA, 19 nt, Artificial Sequence
  Description of Artificial Sequence: Synthetic oligonucleotide
ucagacgcucggagucacu

SEQ ID NO: 1209991 - RNA, 19 nt, Artificial Sequence
  Description of Artificial Sequence: Synthetic oligonucleotide
uucagacgucgcucauacu

SEQ ID NO: 1209992 - RNA, 19 nt, Artificial Sequence
  Description of Artificial Sequence: Synthetic oligonucleotide
cccuacgacaccugugcag

SEQ ID NO: 1209993 - RNA, 19 nt, Artificial Sequence
  Description of Artificial Sequence: Synthetic oligonucleotide
gcggacgccuagcaggaag

SEQ ID NO: 1209994 - RNA, 19 nt, Artificial Sequence
  Description of Artificial Sequence: Synthetic oligonucleotide
gucccaagucauacagccc

SEQ ID NO: 1209995 - RNA, 19 nt, Artificial Sequence
  Description of Artificial Sequence: Synthetic oligonucleotide
gccgagaguggaauucccg

SEQ ID NO: 1209996 - RNA, 19 nt, Artificial Sequence
  Description of Artificial Sequence: Synthetic oligonucleotide
agucacugucucgcuuguc

SEQ ID NO: 1209997 - RNA, 19 nt, Artificial Sequence
  Description of Artificial Sequence: Synthetic oligonucleotide
gaagugcgaccagcgcuug

SEQ ID NO: 1209998 - RNA, 19 nt, Artificial Sequence
  Description of Artificial Sequence: Synthetic oligonucleotide
agcgcaggccgagagugga

SEQ ID NO: 1209999 - RNA, 19 nt, Artificial Sequence
  Description of Artificial Sequence: Synthetic oligonucleotide
caggaacauucagcuuugg

SEQ ID NO: 1210000 - RNA, 19 nt, Artificial Sequence
  Description of Artificial Sequence: Synthetic oligonucleotide
caggguucuucugugugga

SEQ ID NO: 1210001 - RNA, 19 nt, Artificial Sequence
  Description of Artificial Sequence: Synthetic oligonucleotide
gcugucggagagguagagg

SEQ ID NO: 1210002 - RNA, 19 nt, Artificial Sequence
  Description of Artificial Sequence: Synthetic oligonucleotide
ggucgcuguugucuuguac

SEQ ID NO: 1210003 - RNA, 19 nt, Artificial Sequence
  Description of Artificial Sequence: Synthetic oligonucleotide
acacacgcgcaaacagcag

SEQ ID NO: 1210004 - RNA, 19 nt, Artificial Sequence
  Description of Artificial Sequence: Synthetic oligonucleotide
ccagaagugcgaccagcgc

SEQ ID NO: 1210005 - RNA, 19 nt, Artificial Sequence
  Description of Artificial Sequence: Synthetic oligonucleotide
cagacgucgcucauacucu

SEQ ID NO: 1210006 - RNA, 19 nt, Artificial Sequence
  Description of Artificial Sequence: Synthetic oligonucleotide
agaggacuguaugucccaa

SEQ ID NO: 1210007 - RNA, 19 nt, Artificial Sequence
  Description of Artificial Sequence: Synthetic oligonucleotide
ggaacuuugccgggcccag

SEQ ID NO: 1210008 - RNA, 19 nt, Artificial Sequence
  Description of Artificial Sequence: Synthetic oligonucleotide
gcucggagucacugucucg

SEQ ID NO: 1210009 - RNA, 19 nt, Artificial Sequence
  Description of Artificial Sequence: Synthetic oligonucleotide
cugucucgcuugucacgag

SEQ ID NO: 1210010 - RNA, 19 nt, Artificial Sequence
  Description of Artificial Sequence: Synthetic oligonucleotide
cacucaugcccucaaacuu

SEQ ID NO: 1210011 - RNA, 19 nt, Artificial Sequence
  Description of Artificial Sequence: Synthetic oligonucleotide
gcagcgugaagacccagaa

SEQ ID NO: 1210012 - RNA, 19 nt, Artificial Sequence
  Description of Artificial Sequence: Synthetic oligonucleotide
gagcugcuaagggccucgg

SEQ ID NO: 1210013 - RNA, 19 nt, Artificial Sequence
  Description of Artificial Sequence: Synthetic oligonucleotide
cgugaagacccagaaguac

SEQ ID NO: 1210014 - RNA, 19 nt, Artificial Sequence
  Description of Artificial Sequence: Synthetic oligonucleotide
ggcccaauaggaccugcuc

SEQ ID NO: 1210015 - RNA, 19 nt, Artificial Sequence
  Description of Artificial Sequence: Synthetic oligonucleotide
gucuacuauccaugucgaa

SEQ ID NO: 1210016 - RNA, 19 nt, Artificial Sequence
  Description of Artificial Sequence: Synthetic oligonucleotide
gucgcucauacucucuaau

SEQ ID NO: 1210017 - RNA, 19 nt, Artificial Sequence
  Description of Artificial Sequence: Synthetic oligonucleotide
gcacaugagagaugauaaa

SEQ ID NO: 1210018 - RNA, 19 nt, Artificial Sequence
  Description of Artificial Sequence: Synthetic oligonucleotide
cacccaacugaggacuuga

SEQ ID NO: 1210019 - RNA, 19 nt, Artificial Sequence
  Description of Artificial Sequence: Synthetic oligonucleotide
cagcggacgccuagcagga

SEQ ID NO: 1210020 - RNA, 19 nt, Artificial Sequence
  Description of Artificial Sequence: Synthetic oligonucleotide
guacucgguagguuucggu

SEQ ID NO: 1210021 - RNA, 19 nt, Artificial Sequence
  Description of Artificial Sequence: Synthetic oligonucleotide
gcgaccagcgcuuggcgca

SEQ ID NO: 1210022 - RNA, 19 nt, Artificial Sequence
  Description of Artificial Sequence: Synthetic oligonucleotide
ccggaaggcccaauaggac

SEQ ID NO: 1210023 - RNA, 19 nt, Artificial Sequence
  Description of Artificial Sequence: Synthetic oligonucleotide
ucgguagguuucgguuccc

SEQ ID NO: 1210024 - RNA, 19 nt, Artificial Sequence
  Description of Artificial Sequence: Synthetic oligonucleotide
gccauacgcagagaaagaa

SEQ ID NO: 1210025 - RNA, 19 nt, Artificial Sequence
  Description of Artificial Sequence: Synthetic oligonucleotide
cugacuuccugaaggugau

SEQ ID NO: 1210026 - RNA, 19 nt, Artificial Sequence
  Description of Artificial Sequence: Synthetic oligonucleotide
cgcgcaaacagcagcaaga

SEQ ID NO: 1210027 - RNA, 19 nt, Artificial Sequence
  Description of Artificial Sequence: Synthetic oligonucleotide
caccggguguuccgggcug

SEQ ID NO: 1210028 - RNA, 19 nt, Artificial Sequence
  Description of Artificial Sequence: Synthetic oligonucleotide
cuucgcacagcagcgugaa

SEQ ID NO: 1210029 - RNA, 19 nt, Artificial Sequence
  Description of Artificial Sequence: Synthetic oligonucleotide
gaggucgcuguugucuugu

SEQ ID NO: 1210030 - RNA, 19 nt, Artificial Sequence
  Description of Artificial Sequence: Synthetic oligonucleotide
gcggggccagcgcaggccg

SEQ ID NO: 1210031 - RNA, 19 nt, Artificial Sequence
  Description of Artificial Sequence: Synthetic oligonucleotide
gguguuccgggcuggaaau

SEQ ID NO: 1210032 - RNA, 19 nt, Artificial Sequence
  Description of Artificial Sequence: Synthetic oligonucleotide
cacgagcuugugccaauaa

SEQ ID NO: 1210033 - RNA, 19 nt, Artificial Sequence
  Description of Artificial Sequence: Synthetic oligonucleotide
ggaauucccggaugaggcu

SEQ ID NO: 1210034 - RNA, 19 nt, Artificial Sequence
  Description of Artificial Sequence: Synthetic oligonucleotide
ccgccgucgccuuuccagg

SEQ ID NO: 1210035 - RNA, 19 nt, Artificial Sequence
  Description of Artificial Sequence: Synthetic oligonucleotide
gucucgcuugucacgagcu

SEQ ID NO: 1210036 - RNA, 19 nt, Artificial Sequence
  Description of Artificial Sequence: Synthetic oligonucleotide
ugggcguggugcuguccau

SEQ ID NO: 1210037 - RNA, 19 nt, Artificial Sequence
  Description of Artificial Sequence: Synthetic oligonucleotide
gucgccuuuccagggccac

SEQ ID NO: 1210038 - RNA, 19 nt, Artificial Sequence
  Description of Artificial Sequence: Synthetic oligonucleotide
cucaaagacaccggguguu

SEQ ID NO: 1210039 - RNA, 19 nt, Artificial Sequence
  Description of Artificial Sequence: Synthetic oligonucleotide
cuguguggacuccuccucu

SEQ ID NO: 1210040 - RNA, 19 nt, Artificial Sequence
  Description of Artificial Sequence: Synthetic oligonucleotide
gcgggcacguacuggccgc

SEQ ID NO: 1210041 - RNA, 19 nt, Artificial Sequence
  Description of Artificial Sequence: Synthetic oligonucleotide
gcgcacaugagagaugaua

SEQ ID NO: 1210042 - RNA, 19 nt, Artificial Sequence
  Description of Artificial Sequence: Synthetic oligonucleotide
gggcccuagcuguuuguuc

SEQ ID NO: 1210043 - RNA, 19 nt, Artificial Sequence
  Description of Artificial Sequence: Synthetic oligonucleotide
gcaaagaaugaacgagcau

SEQ ID NO: 1210044 - RNA, 19 nt, Artificial Sequence
  Description of Artificial Sequence: Synthetic oligonucleotide
acgcucggagucacugucu

SEQ ID NO: 1210045 - RNA, 19 nt, Artificial Sequence
  Description of Artificial Sequence: Synthetic oligonucleotide
gccugcagcggacgccuag

SEQ ID NO: 1210046 - RNA, 19 nt, Artificial Sequence
  Description of Artificial Sequence: Synthetic oligonucleotide
cugcagcggacgccuagca

SEQ ID NO: 1210047 - RNA, 19 nt, Artificial Sequence
  Description of Artificial Sequence: Synthetic oligonucleotide
ccauaagccacaagccaua

SEQ ID NO: 1210048 - RNA, 19 nt, Artificial Sequence
  Description of Artificial Sequence: Synthetic oligonucleotide
ccgggcuggaaauccacca

SEQ ID NO: 1210049 - RNA, 19 nt, Artificial Sequence
  Description of Artificial Sequence: Synthetic oligonucleotide
ccgucgccuuuccagggcc

SEQ ID NO: 1210050 - RNA, 19 nt, Artificial Sequence
  Description of Artificial Sequence: Synthetic oligonucleotide
gucgaggcagaggacugua

SEQ ID NO: 1210051 - RNA, 19 nt, Artificial Sequence
  Description of Artificial Sequence: Synthetic oligonucleotide
guacuggccgccgucgccu

SEQ ID NO: 1210052 - RNA, 19 nt, Artificial Sequence
  Description of Artificial Sequence: Synthetic oligonucleotide
caccagcaacacacgcgca

SEQ ID NO: 1210053 - RNA, 19 nt, Artificial Sequence
  Description of Artificial Sequence: Synthetic oligonucleotide
gcuuuggacccaggugggc

SEQ ID NO: 1210054 - RNA, 19 nt, Artificial Sequence
  Description of Artificial Sequence: Synthetic oligonucleotide
guguuccgggcuggaaauc

SEQ ID NO: 1210055 - RNA, 19 nt, Artificial Sequence
  Description of Artificial Sequence: Synthetic oligonucleotide
gacgucgcucauacucucu

SEQ ID NO: 1210056 - RNA, 19 nt, Artificial Sequence
  Description of Artificial Sequence: Synthetic oligonucleotide
cagcagccgcagugugaag

SEQ ID NO: 1210057 - RNA, 19 nt, Artificial Sequence
  Description of Artificial Sequence: Synthetic oligonucleotide
cccacaggggcaucgucga

SEQ ID NO: 1210058 - RNA, 19 nt, Artificial Sequence
  Description of Artificial Sequence: Synthetic oligonucleotide
ggcguggugcuguccaugu

SEQ ID NO: 1210059 - RNA, 19 nt, Artificial Sequence
  Description of Artificial Sequence: Synthetic oligonucleotide
cguacuggccgccgucgcc

SEQ ID NO: 1210060 - RNA, 19 nt, Artificial Sequence
  Description of Artificial Sequence: Synthetic oligonucleotide
gcacguacuggccgccguc

SEQ ID NO: 1210061 - RNA, 19 nt, Artificial Sequence
  Description of Artificial Sequence: Synthetic oligonucleotide
gcuaagggccucggccacc

SEQ ID NO: 1210062 - RNA, 19 nt, Artificial Sequence
  Description of Artificial Sequence: Synthetic oligonucleotide
cagccgcagugugaagauc

SEQ ID NO: 1210063 - RNA, 19 nt, Artificial Sequence
  Description of Artificial Sequence: Synthetic oligonucleotide
gccccuucagacgucgcuc

SEQ ID NO: 1210064 - RNA, 19 nt, Artificial Sequence
  Description of Artificial Sequence: Synthetic oligonucleotide
gucacgagcuugugccaau

SEQ ID NO: 1210065 - RNA, 19 nt, Artificial Sequence
  Description of Artificial Sequence: Synthetic oligonucleotide
caauaggaccugcuccauu

SEQ ID NO: 1210066 - RNA, 19 nt, Artificial Sequence
  Description of Artificial Sequence: Synthetic oligonucleotide
ggccacccaacugaggacu

SEQ ID NO: 1210067 - RNA, 19 nt, Artificial Sequence
  Description of Artificial Sequence: Synthetic oligonucleotide
ggcuccggaaggcccaaua

SEQ ID NO: 1210068 - RNA, 19 nt, Artificial Sequence
  Description of Artificial Sequence: Synthetic oligonucleotide
caccuucugagacgugcgu

SEQ ID NO: 1210069 - RNA, 19 nt, Artificial Sequence
  Description of Artificial Sequence: Synthetic oligonucleotide
gggcguggugcuguccaug

SEQ ID NO: 1210070 - RNA, 19 nt, Artificial Sequence
  Description of Artificial Sequence: Synthetic oligonucleotide
cgggcaagugagcccuacg

SEQ ID NO: 1210071 - RNA, 19 nt, Artificial Sequence
  Description of Artificial Sequence: Synthetic oligonucleotide
gggcacguacuggccgccg

SEQ ID NO: 1210072 - RNA, 19 nt, Artificial Sequence
  Description of Artificial Sequence: Synthetic oligonucleotide
ccaugucgaagucaggguu

SEQ ID NO: 1210073 - RNA, 19 nt, Artificial Sequence
  Description of Artificial Sequence: Synthetic oligonucleotide
ggcgagaagcagggcccag

SEQ ID NO: 1210074 - RNA, 19 nt, Artificial Sequence
  Description of Artificial Sequence: Synthetic oligonucleotide
gcccuacgacaccugugca

SEQ ID NO: 1210075 - RNA, 19 nt, Artificial Sequence
  Description of Artificial Sequence: Synthetic oligonucleotide
cacgcgcaaacagcagcaa

SEQ ID NO: 1210076 - RNA, 19 nt, Artificial Sequence
  Description of Artificial Sequence: Synthetic oligonucleotide
gcgagaagcagggcccaga

SEQ ID NO: 1210077 - RNA, 19 nt, Artificial Sequence
  Description of Artificial Sequence: Synthetic oligonucleotide
gcagccgcagugugaagau

SEQ ID NO: 1210078 - RNA, 19 nt, Artificial Sequence
  Description of Artificial Sequence: Synthetic oligonucleotide
ccgcagugugaagaucaug

SEQ ID NO: 1210079 - RNA, 19 nt, Artificial Sequence
  Description of Artificial Sequence: Synthetic oligonucleotide
gcaggucgcacugguucca

SEQ ID NO: 1210080 - RNA, 19 nt, Artificial Sequence
  Description of Artificial Sequence: Synthetic oligonucleotide
ccaccccauaagccacaag

SEQ ID NO: 1210081 - RNA, 19 nt, Artificial Sequence
  Description of Artificial Sequence: Synthetic oligonucleotide
ccagcaacacacgcgcaaa

SEQ ID NO: 1210082 - RNA, 19 nt, Artificial Sequence
  Description of Artificial Sequence: Synthetic oligonucleotide
gggcccguccacggagucc

SEQ ID NO: 1210083 - RNA, 19 nt, Artificial Sequence
  Description of Artificial Sequence: Synthetic oligonucleotide
ccacccaacugaggacuug

SEQ ID NO: 1210084 - RNA, 19 nt, Artificial Sequence
  Description of Artificial Sequence: Synthetic oligonucleotide
cccgcuggccaggcuaccc

SEQ ID NO: 1210085 - RNA, 19 nt, Artificial Sequence
  Description of Artificial Sequence: Synthetic oligonucleotide
gcguggugcuguccauguc

SEQ ID NO: 1210086 - RNA, 19 nt, Artificial Sequence
  Description of Artificial Sequence: Synthetic oligonucleotide
ggcacguacuggccgccgu

SEQ ID NO: 1210087 - RNA, 19 nt, Artificial Sequence
  Description of Artificial Sequence: Synthetic oligonucleotide
cgacaccugugcagccacc

SEQ ID NO: 1210088 - RNA, 19 nt, Artificial Sequence
  Description of Artificial Sequence: Synthetic oligonucleotide
cggccacccaacugaggac

SEQ ID NO: 1210089 - RNA, 19 nt, Artificial Sequence
  Description of Artificial Sequence: Synthetic oligonucleotide
agcggacgccuagcaggaa

SEQ ID NO: 1210090 - RNA, 19 nt, Artificial Sequence
  Description of Artificial Sequence: Synthetic oligonucleotide
cugucccaacugcuucagu

SEQ ID NO: 1210091 - RNA, 19 nt, Artificial Sequence
  Description of Artificial Sequence: Synthetic oligonucleotide
guaccccauccugggcaaa

SEQ ID NO: 1210092 - RNA, 19 nt, Artificial Sequence
  Description of Artificial Sequence: Synthetic oligonucleotide
ccaccgcccaggcccuggc

SEQ ID NO: 1210093 - RNA, 19 nt, Artificial Sequence
  Description of Artificial Sequence: Synthetic oligonucleotide
gguggcgcagaggaacuuu

SEQ ID NO: 1210094 - RNA, 19 nt, Artificial Sequence
  Description of Artificial Sequence: Synthetic oligonucleotide
ggccaccccauaagccaca

SEQ ID NO: 1210095 - RNA, 19 nt, Artificial Sequence
  Description of Artificial Sequence: Synthetic oligonucleotide
cgucgcucauacucucuaa

SEQ ID NO: 1210096 - RNA, 19 nt, Artificial Sequence
  Description of Artificial Sequence: Synthetic oligonucleotide
gacgugcguuucagacgcu

SEQ ID NO: 1210097 - RNA, 19 nt, Artificial Sequence
  Description of Artificial Sequence: Synthetic oligonucleotide
gcucuucgcacagcagcgu

SEQ ID NO: 1210098 - RNA, 19 nt, Artificial Sequence
  Description of Artificial Sequence: Synthetic oligonucleotide
cccucuguggccaccccau

SEQ ID NO: 1210099 - RNA, 19 nt, Artificial Sequence
  Description of Artificial Sequence: Synthetic oligonucleotide
cgaccagcgcuuggcgcag

SEQ ID NO: 1210100 - RNA, 19 nt, Artificial Sequence
  Description of Artificial Sequence: Synthetic oligonucleotide
gggccucggccacccaacu

SEQ ID NO: 1210101 - RNA, 19 nt, Artificial Sequence
  Description of Artificial Sequence: Synthetic oligonucleotide
cgcuugucacgagcuugug

SEQ ID NO: 1210102 - RNA, 19 nt, Artificial Sequence
  Description of Artificial Sequence: Synthetic oligonucleotide
cgucgccuuuccagggcca

SEQ ID NO: 1210103 - RNA, 19 nt, Artificial Sequence
  Description of Artificial Sequence: Synthetic oligonucleotide
cgccuagcaggaagcaggu

SEQ ID NO: 1210104 - RNA, 19 nt, Artificial Sequence
  Description of Artificial Sequence: Synthetic oligonucleotide
ccacaggggcaucgucgaa

SEQ ID NO: 1210105 - RNA, 19 nt, Artificial Sequence
  Description of Artificial Sequence: Synthetic oligonucleotide
ccaauaggaccugcuccau

SEQ ID NO: 1210106 - RNA, 19 nt, Artificial Sequence
  Description of Artificial Sequence: Synthetic oligonucleotide
ccucuguggccaccccaua

SEQ ID NO: 1210107 - RNA, 19 nt, Artificial Sequence
  Description of Artificial Sequence: Synthetic oligonucleotide
gccgcagugugaagaucau

SEQ ID NO: 1210108 - RNA, 19 nt, Artificial Sequence
  Description of Artificial Sequence: Synthetic oligonucleotide
cccuagcuguuuguucacu

SEQ ID NO: 1210109 - RNA, 19 nt, Artificial Sequence
  Description of Artificial Sequence: Synthetic oligonucleotide
gggccagcgcaggccgaga

SEQ ID NO: 1210110 - RNA, 19 nt, Artificial Sequence
  Description of Artificial Sequence: Synthetic oligonucleotide
gcgcaggccgagaguggaa

SEQ ID NO: 1210111 - RNA, 19 nt, Artificial Sequence
  Description of Artificial Sequence: Synthetic oligonucleotide
gcccaggggucagccugca

SEQ ID NO: 1210112 - RNA, 19 nt, Artificial Sequence
  Description of Artificial Sequence: Synthetic oligonucleotide
gcccguccacggagucccc

SEQ ID NO: 1210113 - RNA, 19 nt, Artificial Sequence
  Description of Artificial Sequence: Synthetic oligonucleotide
cggagucacugucucgcuu

SEQ ID NO: 1210114 - RNA, 19 nt, Artificial Sequence
  Description of Artificial Sequence: Synthetic oligonucleotide
cgcaggccgagaguggaau

SEQ ID NO: 1210115 - RNA, 19 nt, Artificial Sequence
  Description of Artificial Sequence: Synthetic oligonucleotide
ggcgggcaagugagcccua

SEQ ID NO: 1210116 - RNA, 19 nt, Artificial Sequence
  Description of Artificial Sequence: Synthetic oligonucleotide
cgcuuggcgcagccaccaa

SEQ ID NO: 1210117 - RNA, 19 nt, Artificial Sequence
  Description of Artificial Sequence: Synthetic oligonucleotide
cgguggcgcagaggaacuu

SEQ ID NO: 1210118 - RNA, 19 nt, Artificial Sequence
  Description of Artificial Sequence: Synthetic oligonucleotide
aaggccauaagucuggauc

SEQ ID NO: 1210119 - RNA, 19 nt, Artificial Sequence
  Description of Artificial Sequence: Synthetic oligonucleotide
auaaauaccucucgcgugc

SEQ ID NO: 1210120 - RNA, 19 nt, Artificial Sequence
  Description of Artificial Sequence: Synthetic oligonucleotide
aaauaaauaccucucgcgu

SEQ ID NO: 1210121 - RNA, 19 nt, Artificial Sequence
  Description of Artificial Sequence: Synthetic oligonucleotide
aauaaauaccucucgcgug

SEQ ID NO: 1210122 - RNA, 19 nt, Artificial Sequence
  Description of Artificial Sequence: Synthetic oligonucleotide
uuaugaugaauaaauaaau

SEQ ID NO: 1210123 - RNA, 19 nt, Artificial Sequence
  Description of Artificial Sequence: Synthetic oligonucleotide
gaauggaugucccauacag

SEQ ID NO: 1210124 - RNA, 19 nt, Artificial Sequence
  Description of Artificial Sequence: Synthetic oligonucleotide
aauccugagcccuuucggc

SEQ ID NO: 1210125 - RNA, 19 nt, Artificial Sequence
  Description of Artificial Sequence: Synthetic oligonucleotide
uuagugaucuguauucucc

SEQ ID NO: 1210126 - RNA, 19 nt, Artificial Sequence
  Description of Artificial Sequence: Synthetic oligonucleotide
uugcuuaagguacugcagg

SEQ ID NO: 1210127 - RNA, 19 nt, Artificial Sequence
  Description of Artificial Sequence: Synthetic oligonucleotide
uggaucucaaagccgaagg

SEQ ID NO: 1210128 - RNA, 19 nt, Artificial Sequence
  Description of Artificial Sequence: Synthetic oligonucleotide
augauaucaacaaucuccc

SEQ ID NO: 1210129 - RNA, 19 nt, Artificial Sequence
  Description of Artificial Sequence: Synthetic oligonucleotide
uuugcuuaagguacugcag

SEQ ID NO: 1210130 - RNA, 19 nt, Artificial Sequence
  Description of Artificial Sequence: Synthetic oligonucleotide
ucaacaaucucccggugcc

SEQ ID NO: 1210131 - RNA, 19 nt, Artificial Sequence
  Description of Artificial Sequence: Synthetic oligonucleotide
aucaacaaucucccggugc

SEQ ID NO: 1210132 - RNA, 19 nt, Artificial Sequence
  Description of Artificial Sequence: Synthetic oligonucleotide
aagcacgugugguacacgg

SEQ ID NO: 1210133 - RNA, 19 nt, Artificial Sequence
  Description of Artificial Sequence: Synthetic oligonucleotide
gauaaacuugagcagccgc

SEQ ID NO: 1210134 - RNA, 19 nt, Artificial Sequence
  Description of Artificial Sequence: Synthetic oligonucleotide
ugaaccauuagugaucugu

SEQ ID NO: 1210135 - RNA, 19 nt, Artificial Sequence
  Description of Artificial Sequence: Synthetic oligonucleotide
auaaacuugagcagccgcc

SEQ ID NO: 1210136 - RNA, 19 nt, Artificial Sequence
  Description of Artificial Sequence: Synthetic oligonucleotide
caccacuaggccaugaacg

SEQ ID NO: 1210137 - RNA, 19 nt, Artificial Sequence
  Description of Artificial Sequence: Synthetic oligonucleotide
auuagugaucuguauucuc

SEQ ID NO: 1210138 - RNA, 19 nt, Artificial Sequence
  Description of Artificial Sequence: Synthetic oligonucleotide
uuaagguacugcaggcgcg

SEQ ID NO: 1210139 - RNA, 19 nt, Artificial Sequence
  Description of Artificial Sequence: Synthetic oligonucleotide
ugagaacguugccagaugc

SEQ ID NO: 1210140 - RNA, 19 nt, Artificial Sequence
  Description of Artificial Sequence: Synthetic oligonucleotide
ucuuccaacggaauccuga

SEQ ID NO: 1210141 - RNA, 19 nt, Artificial Sequence
  Description of Artificial Sequence: Synthetic oligonucleotide
agugaucuguauucucccc

SEQ ID NO: 1210142 - RNA, 19 nt, Artificial Sequence
  Description of Artificial Sequence: Synthetic oligonucleotide
aacccgggcagcgaggucc

SEQ ID NO: 1210143 - RNA, 19 nt, Artificial Sequence
  Description of Artificial Sequence: Synthetic oligonucleotide
guuaugaugaauaaauaaa

SEQ ID NO: 1210144 - RNA, 19 nt, Artificial Sequence
  Description of Artificial Sequence: Synthetic oligonucleotide
agucugagaacguugccag

SEQ ID NO: 1210145 - RNA, 19 nt, Artificial Sequence
  Description of Artificial Sequence: Synthetic oligonucleotide
uccgucuucuccaaaguca

SEQ ID NO: 1210146 - RNA, 19 nt, Artificial Sequence
  Description of Artificial Sequence: Synthetic oligonucleotide
gacugagauucuuccaacg

SEQ ID NO: 1210147 - RNA, 19 nt, Artificial Sequence
  Description of Artificial Sequence: Synthetic oligonucleotide
aaauaccucucgcgugccc

SEQ ID NO: 1210148 - RNA, 19 nt, Artificial Sequence
  Description of Artificial Sequence: Synthetic oligonucleotide
aacguugccagaugccuug

SEQ ID NO: 1210149 - RNA, 19 nt, Artificial Sequence
  Description of Artificial Sequence: Synthetic oligonucleotide
aguuuccagucugagaacg

SEQ ID NO: 1210150 - RNA, 19 nt, Artificial Sequence
  Description of Artificial Sequence: Synthetic oligonucleotide
ugaacucggcagacgaagg

SEQ ID NO: 1210151 - RNA, 19 nt, Artificial Sequence
  Description of Artificial Sequence: Synthetic oligonucleotide
uccagucugagaacguugc

SEQ ID NO: 1210152 - RNA, 19 nt, Artificial Sequence
  Description of Artificial Sequence: Synthetic oligonucleotide
ugacccaucauggaucucc

SEQ ID NO: 1210153 - RNA, 19 nt, Artificial Sequence
  Description of Artificial Sequence: Synthetic oligonucleotide
gagaccauugacacuggcg

SEQ ID NO: 1210154 - RNA, 19 nt, Artificial Sequence
  Description of Artificial Sequence: Synthetic oligonucleotide
ugucuauucuccccgugca

SEQ ID NO: 1210155 - RNA, 19 nt, Artificial Sequence
  Description of Artificial Sequence: Synthetic oligonucleotide
ucccauacagaguuuccag

SEQ ID NO: 1210156 - RNA, 19 nt, Artificial Sequence
  Description of Artificial Sequence: Synthetic oligonucleotide
guuugcuuaagguacugca

SEQ ID NO: 1210157 - RNA, 19 nt, Artificial Sequence
  Description of Artificial Sequence: Synthetic oligonucleotide
uuguccgucuucuccaaag

SEQ ID NO: 1210158 - RNA, 19 nt, Artificial Sequence
  Description of Artificial Sequence: Synthetic oligonucleotide
uacaggguuugcuuaaggu

SEQ ID NO: 1210159 - RNA, 19 nt, Artificial Sequence
  Description of Artificial Sequence: Synthetic oligonucleotide
gaggagagggcuucuuggg

SEQ ID NO: 1210160 - RNA, 19 nt, Artificial Sequence
  Description of Artificial Sequence: Synthetic oligonucleotide
agagcuagcaaggacccuc

SEQ ID NO: 1210161 - RNA, 19 nt, Artificial Sequence
  Description of Artificial Sequence: Synthetic oligonucleotide
uguuguaguguaggggagg

SEQ ID NO: 1210162 - RNA, 19 nt, Artificial Sequence
  Description of Artificial Sequence: Synthetic oligonucleotide
auacagaguuuccagucug

SEQ ID NO: 1210163 - RNA, 19 nt, Artificial Sequence
  Description of Artificial Sequence: Synthetic oligonucleotide
ugcuuaagguacugcaggc

SEQ ID NO: 1210164 - RNA, 19 nt, Artificial Sequence
  Description of Artificial Sequence: Synthetic oligonucleotide
uggugaaggccauaagucu

SEQ ID NO: 1210165 - RNA, 19 nt, Artificial Sequence
  Description of Artificial Sequence: Synthetic oligonucleotide
aacucggcagacgaagguc

SEQ ID NO: 1210166 - RNA, 19 nt, Artificial Sequence
  Description of Artificial Sequence: Synthetic oligonucleotide
uccuguuguaguguagggg

SEQ ID NO: 1210167 - RNA, 19 nt, Artificial Sequence
  Description of Artificial Sequence: Synthetic oligonucleotide
auccugagcccuuucggcg

SEQ ID NO: 1210168 - RNA, 19 nt, Artificial Sequence
  Description of Artificial Sequence: Synthetic oligonucleotide
cacuaggccaugaacgagc

SEQ ID NO: 1210169 - RNA, 19 nt, Artificial Sequence
  Description of Artificial Sequence: Synthetic oligonucleotide
ggacucaugaacucggcag

SEQ ID NO: 1210170 - RNA, 19 nt, Artificial Sequence
  Description of Artificial Sequence: Synthetic oligonucleotide
uuggucuugcguaggccgg

SEQ ID NO: 1210171 - RNA, 19 nt, Artificial Sequence
  Description of Artificial Sequence: Synthetic oligonucleotide
auacaggguuugcuuaagg

SEQ ID NO: 1210172 - RNA, 19 nt, Artificial Sequence
  Description of Artificial Sequence: Synthetic oligonucleotide
caaggcacaacugacccag

SEQ ID NO: 1210173 - RNA, 19 nt, Artificial Sequence
  Description of Artificial Sequence: Synthetic oligonucleotide
gaagcugcgguacuugguc

SEQ ID NO: 1210174 - RNA, 19 nt, Artificial Sequence
  Description of Artificial Sequence: Synthetic oligonucleotide
uccugaaccauuagugauc

SEQ ID NO: 1210175 - RNA, 19 nt, Artificial Sequence
  Description of Artificial Sequence: Synthetic oligonucleotide
augaacugaccagaccggc

SEQ ID NO: 1210176 - RNA, 19 nt, Artificial Sequence
  Description of Artificial Sequence: Synthetic oligonucleotide
uccggggauaaacuugagc

SEQ ID NO: 1210177 - RNA, 19 nt, Artificial Sequence
  Description of Artificial Sequence: Synthetic oligonucleotide
aggccauaagucuggaucu

SEQ ID NO: 1210178 - RNA, 19 nt, Artificial Sequence
  Description of Artificial Sequence: Synthetic oligonucleotide
augaacucggcagacgaag

SEQ ID NO: 1210179 - RNA, 19 nt, Artificial Sequence
  Description of Artificial Sequence: Synthetic oligonucleotide
aaccauuagugaucuguau

SEQ ID NO: 1210180 - RNA, 19 nt, Artificial Sequence
  Description of Artificial Sequence: Synthetic oligonucleotide
accauuagugaucuguauu

SEQ ID NO: 1210181 - RNA, 19 nt, Artificial Sequence
  Description of Artificial Sequence: Synthetic oligonucleotide
ucuauucuccccgugcaga

SEQ ID NO: 1210182 - RNA, 19 nt, Artificial Sequence
  Description of Artificial Sequence: Synthetic oligonucleotide
ugaucuguauucuccccac

SEQ ID NO: 1210183 - RNA, 19 nt, Artificial Sequence
  Description of Artificial Sequence: Synthetic oligonucleotide
aauaccucucgcgugccca

SEQ ID NO: 1210184 - RNA, 19 nt, Artificial Sequence
  Description of Artificial Sequence: Synthetic oligonucleotide
gaaugacccaucauggauc

SEQ ID NO: 1210185 - RNA, 19 nt, Artificial Sequence
  Description of Artificial Sequence: Synthetic oligonucleotide
ucaccacuaggccaugaac

SEQ ID NO: 1210186 - RNA, 19 nt, Artificial Sequence
  Description of Artificial Sequence: Synthetic oligonucleotide
guucaucuguauguguagg

SEQ ID NO: 1210187 - RNA, 19 nt, Artificial Sequence
  Description of Artificial Sequence: Synthetic oligonucleotide
uacacgcugcuccucucgg

SEQ ID NO: 1210188 - RNA, 19 nt, Artificial Sequence
  Description of Artificial Sequence: Synthetic oligonucleotide
aggcacaacugacccagac

SEQ ID NO: 1210189 - RNA, 19 nt, Artificial Sequence
  Description of Artificial Sequence: Synthetic oligonucleotide
ucuugcguaggccggcgcc

SEQ ID NO: 1210190 - RNA, 19 nt, Artificial Sequence
  Description of Artificial Sequence: Synthetic oligonucleotide
ucauacaggguuugcuuaa

SEQ ID NO: 1210191 - RNA, 19 nt, Artificial Sequence
  Description of Artificial Sequence: Synthetic oligonucleotide
uggacucaugaacucggca

SEQ ID NO: 1210192 - RNA, 19 nt, Artificial Sequence
  Description of Artificial Sequence: Synthetic oligonucleotide
accacuaggccaugaacga

SEQ ID NO: 1210193 - RNA, 19 nt, Artificial Sequence
  Description of Artificial Sequence: Synthetic oligonucleotide
cugucuguucaucuguaug

SEQ ID NO: 1210194 - RNA, 19 nt, Artificial Sequence
  Description of Artificial Sequence: Synthetic oligonucleotide
gguacuuggucuugcguag

SEQ ID NO: 1210195 - RNA, 19 nt, Artificial Sequence
  Description of Artificial Sequence: Synthetic oligonucleotide
agaacguugccagaugccu

SEQ ID NO: 1210196 - RNA, 19 nt, Artificial Sequence
  Description of Artificial Sequence: Synthetic oligonucleotide
uaucaacaaucucccggug

SEQ ID NO: 1210197 - RNA, 19 nt, Artificial Sequence
  Description of Artificial Sequence: Synthetic oligonucleotide
gugucuauucuccccgugc

SEQ ID NO: 1210198 - RNA, 19 nt, Artificial Sequence
  Description of Artificial Sequence: Synthetic oligonucleotide
gugugugugugucugucug

SEQ ID NO: 1210199 - RNA, 19 nt, Artificial Sequence
  Description of Artificial Sequence: Synthetic oligonucleotide
ugagaccauugacacuggc

SEQ ID NO: 1210200 - RNA, 19 nt, Artificial Sequence
  Description of Artificial Sequence: Synthetic oligonucleotide
cuggcaguuaugaugaaua

SEQ ID NO: 1210201 - RNA, 19 nt, Artificial Sequence
  Description of Artificial Sequence: Synthetic oligonucleotide
aacugaccagaccggccag

SEQ ID NO: 1210202 - RNA, 19 nt, Artificial Sequence
  Description of Artificial Sequence: Synthetic oligonucleotide
guaguguaggggaggaaag

SEQ ID NO: 1210203 - RNA, 19 nt, Artificial Sequence
  Description of Artificial Sequence: Synthetic oligonucleotide
aagaagcacgugugguaca

SEQ ID NO: 1210204 - RNA, 19 nt, Artificial Sequence
  Description of Artificial Sequence: Synthetic oligonucleotide
uguccgucuucuccaaagu

SEQ ID NO: 1210205 - RNA, 19 nt, Artificial Sequence
  Description of Artificial Sequence: Synthetic oligonucleotide
guggugaaggccauaaguc

SEQ ID NO: 1210206 - RNA, 19 nt, Artificial Sequence
  Description of Artificial Sequence: Synthetic oligonucleotide
gcacgugugguacacggcg

SEQ ID NO: 1210207 - RNA, 19 nt, Artificial Sequence
  Description of Artificial Sequence: Synthetic oligonucleotide
aacucccagugucuauucu

SEQ ID NO: 1210208 - RNA, 19 nt, Artificial Sequence
  Description of Artificial Sequence: Synthetic oligonucleotide
caucuguauguguagggca

SEQ ID NO: 1210209 - RNA, 19 nt, Artificial Sequence
  Description of Artificial Sequence: Synthetic oligonucleotide
acaacugacccagacugca

SEQ ID NO: 1210210 - RNA, 19 nt, Artificial Sequence
  Description of Artificial Sequence: Synthetic oligonucleotide
ucuccccgugcagagaucc

SEQ ID NO: 1210211 - RNA, 19 nt, Artificial Sequence
  Description of Artificial Sequence: Synthetic oligonucleotide
uaagguacugcaggcgcgc

SEQ ID NO: 1210212 - RNA, 19 nt, Artificial Sequence
  Description of Artificial Sequence: Synthetic oligonucleotide
aagcugcgguacuuggucu

SEQ ID NO: 1210213 - RNA, 19 nt, Artificial Sequence
  Description of Artificial Sequence: Synthetic oligonucleotide
ucgggacucugacugagau

SEQ ID NO: 1210214 - RNA, 19 nt, Artificial Sequence
  Description of Artificial Sequence: Synthetic oligonucleotide
cuguuguaguguaggggag

SEQ ID NO: 1210215 - RNA, 19 nt, Artificial Sequence
  Description of Artificial Sequence: Synthetic oligonucleotide
ccggggauaaacuugagca

SEQ ID NO: 1210216 - RNA, 19 nt, Artificial Sequence
  Description of Artificial Sequence: Synthetic oligonucleotide
ugugugugugugucugucu

SEQ ID NO: 1210217 - RNA, 19 nt, Artificial Sequence
  Description of Artificial Sequence: Synthetic oligonucleotide
cuacacgcugcuccucucg

SEQ ID NO: 1210218 - RNA, 19 nt, Artificial Sequence
  Description of Artificial Sequence: Synthetic oligonucleotide
auaccucucgcgugcccac

SEQ ID NO: 1210219 - RNA, 19 nt, Artificial Sequence
  Description of Artificial Sequence: Synthetic oligonucleotide
uggcaguuaugaugaauaa

SEQ ID NO: 1210220 - RNA, 19 nt, Artificial Sequence
  Description of Artificial Sequence: Synthetic oligonucleotide
acgugugguacacggcguc

SEQ ID NO: 1210221 - RNA, 19 nt, Artificial Sequence
  Description of Artificial Sequence: Synthetic oligonucleotide
cuccucucgguggugaagg

SEQ ID NO: 1210222 - RNA, 19 nt, Artificial Sequence
  Description of Artificial Sequence: Synthetic oligonucleotide
ggggauaaacuugagcagc

SEQ ID NO: 1210223 - RNA, 19 nt, Artificial Sequence
  Description of Artificial Sequence: Synthetic oligonucleotide
agugucuauucuccccgug

SEQ ID NO: 1210224 - RNA, 19 nt, Artificial Sequence
  Description of Artificial Sequence: Synthetic oligonucleotide
gagaacguugccagaugcc

SEQ ID NO: 1210225 - RNA, 19 nt, Artificial Sequence
  Description of Artificial Sequence: Synthetic oligonucleotide
uaggccggcgccacacagg

SEQ ID NO: 1210226 - RNA, 19 nt, Artificial Sequence
  Description of Artificial Sequence: Synthetic oligonucleotide
accucucgcgugcccaccc

SEQ ID NO: 1210227 - RNA, 19 nt, Artificial Sequence
  Description of Artificial Sequence: Synthetic oligonucleotide
uguucgcgggccucagucc

SEQ ID NO: 1210228 - RNA, 19 nt, Artificial Sequence
  Description of Artificial Sequence: Synthetic oligonucleotide
cacaacugacccagacugc

SEQ ID NO: 1210229 - RNA, 19 nt, Artificial Sequence
  Description of Artificial Sequence: Synthetic oligonucleotide
uacagcucgucgcccggag

SEQ ID NO: 1210230 - RNA, 19 nt, Artificial Sequence
  Description of Artificial Sequence: Synthetic oligonucleotide
gaaggguuggggaacaagu

SEQ ID NO: 1210231 - RNA, 19 nt, Artificial Sequence
  Description of Artificial Sequence: Synthetic oligonucleotide
ugaacgagccgcugcuccu

SEQ ID NO: 1210232 - RNA, 19 nt, Artificial Sequence
  Description of Artificial Sequence: Synthetic oligonucleotide
uaaauaccucucgcgugcc

SEQ ID NO: 1210233 - RNA, 19 nt, Artificial Sequence
  Description of Artificial Sequence: Synthetic oligonucleotide
agggcuggacucaugaacu

SEQ ID NO: 1210234 - RNA, 19 nt, Artificial Sequence
  Description of Artificial Sequence: Synthetic oligonucleotide
gucuauucuccccgugcag

SEQ ID NO: 1210235 - RNA, 19 nt, Artificial Sequence
  Description of Artificial Sequence: Synthetic oligonucleotide
ccuguuguaguguagggga

SEQ ID NO: 1210236 - RNA, 19 nt, Artificial Sequence
  Description of Artificial Sequence: Synthetic oligonucleotide
gaugcucgagccgcuuccg

SEQ ID NO: 1210237 - RNA, 19 nt, Artificial Sequence
  Description of Artificial Sequence: Synthetic oligonucleotide
cugaggagagggcuucuug

SEQ ID NO: 1210238 - RNA, 19 nt, Artificial Sequence
  Description of Artificial Sequence: Synthetic oligonucleotide
cuguucgcgggccucaguc

SEQ ID NO: 1210239 - RNA, 19 nt, Artificial Sequence
  Description of Artificial Sequence: Synthetic oligonucleotide
uuccgaauggaugucccau

SEQ ID NO: 1210240 - RNA, 19 nt, Artificial Sequence
  Description of Artificial Sequence: Synthetic oligonucleotide
guacacggcgucgucagug

SEQ ID NO: 1210241 - RNA, 19 nt, Artificial Sequence
  Description of Artificial Sequence: Synthetic oligonucleotide
caacugacccagacugcag

SEQ ID NO: 1210242 - RNA, 19 nt, Artificial Sequence
  Description of Artificial Sequence: Synthetic oligonucleotide
gaagcacgugugguacacg

SEQ ID NO: 1210243 - RNA, 19 nt, Artificial Sequence
  Description of Artificial Sequence: Synthetic oligonucleotide
ugcgggacacagcacugaa

SEQ ID NO: 1210244 - RNA, 19 nt, Artificial Sequence
  Description of Artificial Sequence: Synthetic oligonucleotide
agcacgugugguacacggc

SEQ ID NO: 1210245 - RNA, 19 nt, Artificial Sequence
  Description of Artificial Sequence: Synthetic oligonucleotide
gcuggacucaugaacucgg

SEQ ID NO: 1210246 - RNA, 19 nt, Artificial Sequence
  Description of Artificial Sequence: Synthetic oligonucleotide
guccuucaccacuaggcca

SEQ ID NO: 1210247 - RNA, 19 nt, Artificial Sequence
  Description of Artificial Sequence: Synthetic oligonucleotide
gguggugaaggccauaagu

SEQ ID NO: 1210248 - RNA, 19 nt, Artificial Sequence
  Description of Artificial Sequence: Synthetic oligonucleotide
cugagaacguugccagaug

SEQ ID NO: 1210249 - RNA, 19 nt, Artificial Sequence
  Description of Artificial Sequence: Synthetic oligonucleotide
guaggccggcgccacacag

SEQ ID NO: 1210250 - RNA, 19 nt, Artificial Sequence
  Description of Artificial Sequence: Synthetic oligonucleotide
uacacggcgucgucagugu

SEQ ID NO: 1210251 - RNA, 19 nt, Artificial Sequence
  Description of Artificial Sequence: Synthetic oligonucleotide
guuguaguguaggggagga

SEQ ID NO: 1210252 - RNA, 19 nt, Artificial Sequence
  Description of Artificial Sequence: Synthetic oligonucleotide
ccagagcuagcaaggaccc

SEQ ID NO: 1210253 - RNA, 19 nt, Artificial Sequence
  Description of Artificial Sequence: Synthetic oligonucleotide
gagauccuguuguagugua

SEQ ID NO: 1210254 - RNA, 19 nt, Artificial Sequence
  Description of Artificial Sequence: Synthetic oligonucleotide
gaaccauuagugaucugua

SEQ ID NO: 1210255 - RNA, 19 nt, Artificial Sequence
  Description of Artificial Sequence: Synthetic oligonucleotide
uccgaauggaugucccaua

SEQ ID NO: 1210256 - RNA, 19 nt, Artificial Sequence
  Description of Artificial Sequence: Synthetic oligonucleotide
gcgagcagaggcccaaagg

SEQ ID NO: 1210257 - RNA, 19 nt, Artificial Sequence
  Description of Artificial Sequence: Synthetic oligonucleotide
gggauaaacuugagcagcc

SEQ ID NO: 1210258 - RNA, 19 nt, Artificial Sequence
  Description of Artificial Sequence: Synthetic oligonucleotide
uguguagggcagggaauga

SEQ ID NO: 1210259 - RNA, 19 nt, Artificial Sequence
  Description of Artificial Sequence: Synthetic oligonucleotide
uagaugcuuggguccuuca

SEQ ID NO: 1210260 - RNA, 19 nt, Artificial Sequence
  Description of Artificial Sequence: Synthetic oligonucleotide
cacgcugcuccucucggug

SEQ ID NO: 1210261 - RNA, 19 nt, Artificial Sequence
  Description of Artificial Sequence: Synthetic oligonucleotide
cgggccucaguccagagcg

SEQ ID NO: 1210262 - RNA, 19 nt, Artificial Sequence
  Description of Artificial Sequence: Synthetic oligonucleotide
gacacgggcgagcgcgcgg

SEQ ID NO: 1210263 - RNA, 19 nt, Artificial Sequence
  Description of Artificial Sequence: Synthetic oligonucleotide
cagucugagaacguugcca

SEQ ID NO: 1210264 - RNA, 19 nt, Artificial Sequence
  Description of Artificial Sequence: Synthetic oligonucleotide
guacuuggucuugcguagg

SEQ ID NO: 1210265 - RNA, 19 nt, Artificial Sequence
  Description of Artificial Sequence: Synthetic oligonucleotide
aacgagccgcugcuccuga

SEQ ID NO: 1210266 - RNA, 19 nt, Artificial Sequence
  Description of Artificial Sequence: Synthetic oligonucleotide
gccggcgccacacagggcc

SEQ ID NO: 1210267 - RNA, 19 nt, Artificial Sequence
  Description of Artificial Sequence: Synthetic oligonucleotide
acggacuccagugugucau

SEQ ID NO: 1210268 - RNA, 19 nt, Artificial Sequence
  Description of Artificial Sequence: Synthetic oligonucleotide
ugccagaugccuugaugau

SEQ ID NO: 1210269 - RNA, 19 nt, Artificial Sequence
  Description of Artificial Sequence: Synthetic oligonucleotide
cagaguuuccagucugaga

SEQ ID NO: 1210270 - RNA, 19 nt, Artificial Sequence
  Description of Artificial Sequence: Synthetic oligonucleotide
agcgcacggacuccagugu

SEQ ID NO: 1210271 - RNA, 19 nt, Artificial Sequence
  Description of Artificial Sequence: Synthetic oligonucleotide
guccgucuucuccaaaguc

SEQ ID NO: 1210272 - RNA, 19 nt, Artificial Sequence
  Description of Artificial Sequence: Synthetic oligonucleotide
ggagcgguugaguccgggg

SEQ ID NO: 1210273 - RNA, 19 nt, Artificial Sequence
  Description of Artificial Sequence: Synthetic oligonucleotide
uccccgugcagagauccug

SEQ ID NO: 1210274 - RNA, 19 nt, Artificial Sequence
  Description of Artificial Sequence: Synthetic oligonucleotide
agcgguugaguccggggau

SEQ ID NO: 1210275 - RNA, 19 nt, Artificial Sequence
  Description of Artificial Sequence: Synthetic oligonucleotide
uuccccgggugaaggguug

SEQ ID NO: 1210276 - RNA, 19 nt, Artificial Sequence
  Description of Artificial Sequence: Synthetic oligonucleotide
caacaaucucccggugccg

SEQ ID NO: 1210277 - RNA, 19 nt, Artificial Sequence
  Description of Artificial Sequence: Synthetic oligonucleotide
ggcuggacucaugaacucg

SEQ ID NO: 1210278 - RNA, 19 nt, Artificial Sequence
  Description of Artificial Sequence: Synthetic oligonucleotide
gacgaaggucaccaucucu

SEQ ID NO: 1210279 - RNA, 19 nt, Artificial Sequence
  Description of Artificial Sequence: Synthetic oligonucleotide
caacucccagugucuauuc

SEQ ID NO: 1210280 - RNA, 19 nt, Artificial Sequence
  Description of Artificial Sequence: Synthetic oligonucleotide
agcccuuucggcggggcag

SEQ ID NO: 1210281 - RNA, 19 nt, Artificial Sequence
  Description of Artificial Sequence: Synthetic oligonucleotide
acacggcgucgucaguguc

SEQ ID NO: 1210282 - RNA, 19 nt, Artificial Sequence
  Description of Artificial Sequence: Synthetic oligonucleotide
uucgcgggccucaguccag

SEQ ID NO: 1210283 - RNA, 19 nt, Artificial Sequence
  Description of Artificial Sequence: Synthetic oligonucleotide
uauucuccccgugcagaga

SEQ ID NO: 1210284 - RNA, 19 nt, Artificial Sequence
  Description of Artificial Sequence: Synthetic oligonucleotide
guucgcgggccucagucca

SEQ ID NO: 1210285 - RNA, 19 nt, Artificial Sequence
  Description of Artificial Sequence: Synthetic oligonucleotide
uuucggcggggcaggggug

SEQ ID NO: 1210286 - RNA, 19 nt, Artificial Sequence
  Description of Artificial Sequence: Synthetic oligonucleotide
cuccggacgaagcggcggc

SEQ ID NO: 1210287 - RNA, 19 nt, Artificial Sequence
  Description of Artificial Sequence: Synthetic oligonucleotide
uguccccuggugugagccc

SEQ ID NO: 1210288 - RNA, 19 nt, Artificial Sequence
  Description of Artificial Sequence: Synthetic oligonucleotide
gaacucggcagacgaaggu

SEQ ID NO: 1210289 - RNA, 19 nt, Artificial Sequence
  Description of Artificial Sequence: Synthetic oligonucleotide
uuccgcugcugcucgggac

SEQ ID NO: 1210290 - RNA, 19 nt, Artificial Sequence
  Description of Artificial Sequence: Synthetic oligonucleotide
cuuccgagucgggaacccg

SEQ ID NO: 1210291 - RNA, 19 nt, Artificial Sequence
  Description of Artificial Sequence: Synthetic oligonucleotide
gcagacgaaggucaccauc

SEQ ID NO: 1210292 - RNA, 19 nt, Artificial Sequence
  Description of Artificial Sequence: Synthetic oligonucleotide
gguuugcuuaagguacugc

SEQ ID NO: 1210293 - RNA, 19 nt, Artificial Sequence
  Description of Artificial Sequence: Synthetic oligonucleotide
gccgcguacagcucgucgc

SEQ ID NO: 1210294 - RNA, 19 nt, Artificial Sequence
  Description of Artificial Sequence: Synthetic oligonucleotide
ucggcagacgaaggucacc

SEQ ID NO: 1210295 - RNA, 19 nt, Artificial Sequence
  Description of Artificial Sequence: Synthetic oligonucleotide
uggucuugcguaggccggc

SEQ ID NO: 1210296 - RNA, 19 nt, Artificial Sequence
  Description of Artificial Sequence: Synthetic oligonucleotide
guaguccuccagcgccgcg

SEQ ID NO: 1210297 - RNA, 19 nt, Artificial Sequence
  Description of Artificial Sequence: Synthetic oligonucleotide
gggaacaaguaaagcugag

SEQ ID NO: 1210298 - RNA, 19 nt, Artificial Sequence
  Description of Artificial Sequence: Synthetic oligonucleotide
cucgagccgcuuccgaguc

SEQ ID NO: 1210299 - RNA, 19 nt, Artificial Sequence
  Description of Artificial Sequence: Synthetic oligonucleotide
gacgaagcggcggcagcug

SEQ ID NO: 1210300 - RNA, 19 nt, Artificial Sequence
  Description of Artificial Sequence: Synthetic oligonucleotide
gcguacagcucgucgcccg

SEQ ID NO: 1210301 - RNA, 19 nt, Artificial Sequence
  Description of Artificial Sequence: Synthetic oligonucleotide
aggguuugcuuaagguacu

SEQ ID NO: 1210302 - RNA, 19 nt, Artificial Sequence
  Description of Artificial Sequence: Synthetic oligonucleotide
cugcggcugagcguggcgc

SEQ ID NO: 1210303 - RNA, 19 nt, Artificial Sequence
  Description of Artificial Sequence: Synthetic oligonucleotide
cucucgcgugcccacccgc

SEQ ID NO: 1210304 - RNA, 19 nt, Artificial Sequence
  Description of Artificial Sequence: Synthetic oligonucleotide
ggggaacaaguaaagcuga

SEQ ID NO: 1210305 - RNA, 19 nt, Artificial Sequence
  Description of Artificial Sequence: Synthetic oligonucleotide
cauuagugaucuguauucu

SEQ ID NO: 1210306 - RNA, 19 nt, Artificial Sequence
  Description of Artificial Sequence: Synthetic oligonucleotide
cggggauaaacuugagcag

SEQ ID NO: 1210307 - RNA, 19 nt, Artificial Sequence
  Description of Artificial Sequence: Synthetic oligonucleotide
ggacuccagugugucauag

SEQ ID NO: 1210308 - RNA, 19 nt, Artificial Sequence
  Description of Artificial Sequence: Synthetic oligonucleotide
ccggacacgggcgagcgcg

SEQ ID NO: 1210309 - RNA, 19 nt, Artificial Sequence
  Description of Artificial Sequence: Synthetic oligonucleotide
uccccgggugaaggguugg

SEQ ID NO: 1210310 - RNA, 19 nt, Artificial Sequence
  Description of Artificial Sequence: Synthetic oligonucleotide
agcgccguagaggcaggag

SEQ ID NO: 1210311 - RNA, 19 nt, Artificial Sequence
  Description of Artificial Sequence: Synthetic oligonucleotide
ugagcccuuucggcggggc

SEQ ID NO: 1210312 - RNA, 19 nt, Artificial Sequence
  Description of Artificial Sequence: Synthetic oligonucleotide
agcuccgcggggugguagu

SEQ ID NO: 1210313 - RNA, 19 nt, Artificial Sequence
  Description of Artificial Sequence: Synthetic oligonucleotide
ggaucucaaagccgaaggu

SEQ ID NO: 1210314 - RNA, 19 nt, Artificial Sequence
  Description of Artificial Sequence: Synthetic oligonucleotide
gagcguggcgcggggugcg

SEQ ID NO: 1210315 - RNA, 19 nt, Artificial Sequence
  Description of Artificial Sequence: Synthetic oligonucleotide
ggcagggaaugacccauca

SEQ ID NO: 1210316 - RNA, 19 nt, Artificial Sequence
  Description of Artificial Sequence: Synthetic oligonucleotide
gcccaaagggcagggagcc

SEQ ID NO: 1210317 - RNA, 19 nt, Artificial Sequence
  Description of Artificial Sequence: Synthetic oligonucleotide
augcucgagccgcuuccga

SEQ ID NO: 1210318 - RNA, 19 nt, Artificial Sequence
  Description of Artificial Sequence: Synthetic oligonucleotide
cauugagaccauugacacu

SEQ ID NO: 1210319 - RNA, 19 nt, Artificial Sequence
  Description of Artificial Sequence: Synthetic oligonucleotide
augguguccccugguguga

SEQ ID NO: 1210320 - RNA, 19 nt, Artificial Sequence
  Description of Artificial Sequence: Synthetic oligonucleotide
gucuugcguaggccggcgc

SEQ ID NO: 1210321 - RNA, 19 nt, Artificial Sequence
  Description of Artificial Sequence: Synthetic oligonucleotide
caugaacgagccgcugcuc

SEQ ID NO: 1210322 - RNA, 19 nt, Artificial Sequence
  Description of Artificial Sequence: Synthetic oligonucleotide
cugaaccauuagugaucug

SEQ ID NO: 1210323 - RNA, 19 nt, Artificial Sequence
  Description of Artificial Sequence: Synthetic oligonucleotide
cugcgguacuuggucuugc

SEQ ID NO: 1210324 - RNA, 19 nt, Artificial Sequence
  Description of Artificial Sequence: Synthetic oligonucleotide
gucggggcaggugaugcuc

SEQ ID NO: 1210325 - RNA, 19 nt, Artificial Sequence
  Description of Artificial Sequence: Synthetic oligonucleotide
uucuccccgugcagagauc

SEQ ID NO: 1210326 - RNA, 19 nt, Artificial Sequence
  Description of Artificial Sequence: Synthetic oligonucleotide
gguacugcaggcgcgccuc

SEQ ID NO: 1210327 - RNA, 19 nt, Artificial Sequence
  Description of Artificial Sequence: Synthetic oligonucleotide
ccagucugagaacguugcc

SEQ ID NO: 1210328 - RNA, 19 nt, Artificial Sequence
  Description of Artificial Sequence: Synthetic oligonucleotide
ugcguaggccggcgccaca

SEQ ID NO: 1210329 - RNA, 19 nt, Artificial Sequence
  Description of Artificial Sequence: Synthetic oligonucleotide
cuugcguaggccggcgcca

SEQ ID NO: 1210330 - RNA, 19 nt, Artificial Sequence
  Description of Artificial Sequence: Synthetic oligonucleotide
guacugcaggcgcgccucc

SEQ ID NO: 1210331 - RNA, 19 nt, Artificial Sequence
  Description of Artificial Sequence: Synthetic oligonucleotide
gguccuuggaccagcacua

SEQ ID NO: 1210332 - RNA, 19 nt, Artificial Sequence
  Description of Artificial Sequence: Synthetic oligonucleotide
ggucuugcguaggccggcg

SEQ ID NO: 1210333 - RNA, 19 nt, Artificial Sequence
  Description of Artificial Sequence: Synthetic oligonucleotide
augacccaucauggaucuc

SEQ ID NO: 1210334 - RNA, 19 nt, Artificial Sequence
  Description of Artificial Sequence: Synthetic oligonucleotide
uugcguaggccggcgccac

SEQ ID NO: 1210335 - RNA, 19 nt, Artificial Sequence
  Description of Artificial Sequence: Synthetic oligonucleotide
gagcccuuucggcggggca

SEQ ID NO: 1210336 - RNA, 19 nt, Artificial Sequence
  Description of Artificial Sequence: Synthetic oligonucleotide
cugcuccugaaccauuagu

SEQ ID NO: 1210337 - RNA, 19 nt, Artificial Sequence
  Description of Artificial Sequence: Synthetic oligonucleotide
guuguccgucuucuccaaa

SEQ ID NO: 1210338 - RNA, 19 nt, Artificial Sequence
  Description of Artificial Sequence: Synthetic oligonucleotide
ucgggaacccgggcagcga

SEQ ID NO: 1210339 - RNA, 19 nt, Artificial Sequence
  Description of Artificial Sequence: Synthetic oligonucleotide
gcuccggacgaagcggcgg

SEQ ID NO: 1210340 - RNA, 19 nt, Artificial Sequence
  Description of Artificial Sequence: Synthetic oligonucleotide
agggccuguucgcgggccu

SEQ ID NO: 1210341 - RNA, 19 nt, Artificial Sequence
  Description of Artificial Sequence: Synthetic oligonucleotide
acacgggcgagcgcgcggu

SEQ ID NO: 1210342 - RNA, 19 nt, Artificial Sequence
  Description of Artificial Sequence: Synthetic oligonucleotide
ggugcgggacacagcacug

SEQ ID NO: 1210343 - RNA, 19 nt, Artificial Sequence
  Description of Artificial Sequence: Synthetic oligonucleotide
ccgcgcaccgcacacuggc

SEQ ID NO: 1210344 - RNA, 19 nt, Artificial Sequence
  Description of Artificial Sequence: Synthetic oligonucleotide
uccggacgaagcggcggca

SEQ ID NO: 1210345 - RNA, 19 nt, Artificial Sequence
  Description of Artificial Sequence: Synthetic oligonucleotide
ugcccacccgcgccccuac

SEQ ID NO: 1210346 - RNA, 19 nt, Artificial Sequence
  Description of Artificial Sequence: Synthetic oligonucleotide
gccauaagucuggaucuca

SEQ ID NO: 1210347 - RNA, 19 nt, Artificial Sequence
  Description of Artificial Sequence: Synthetic oligonucleotide
caacggaauccugagcccu

SEQ ID NO: 1210348 - RNA, 19 nt, Artificial Sequence
  Description of Artificial Sequence: Synthetic oligonucleotide
ccauaagucuggaucucaa

SEQ ID NO: 1210349 - RNA, 19 nt, Artificial Sequence
  Description of Artificial Sequence: Synthetic oligonucleotide
ccgugcagagauccuguug

SEQ ID NO: 1210350 - RNA, 19 nt, Artificial Sequence
  Description of Artificial Sequence: Synthetic oligonucleotide
aggccaugaacgagccgcu

SEQ ID NO: 1210351 - RNA, 19 nt, Artificial Sequence
  Description of Artificial Sequence: Synthetic oligonucleotide
gggcuggacucaugaacuc

SEQ ID NO: 1210352 - RNA, 19 nt, Artificial Sequence
  Description of Artificial Sequence: Synthetic oligonucleotide
gaacccgggcagcgagguc

SEQ ID NO: 1210353 - RNA, 19 nt, Artificial Sequence
  Description of Artificial Sequence: Synthetic oligonucleotide
gcgcaccgcacacuggcac

SEQ ID NO: 1210354 - RNA, 19 nt, Artificial Sequence
  Description of Artificial Sequence: Synthetic oligonucleotide
guccuuggaccagcacuac

SEQ ID NO: 1210355 - RNA, 19 nt, Artificial Sequence
  Description of Artificial Sequence: Synthetic oligonucleotide
guccggggauaaacuugag

SEQ ID NO: 1210356 - RNA, 19 nt, Artificial Sequence
  Description of Artificial Sequence: Synthetic oligonucleotide
gaacguugccagaugccuu

SEQ ID NO: 1210357 - RNA, 19 nt, Artificial Sequence
  Description of Artificial Sequence: Synthetic oligonucleotide
cuucaccacuaggccauga

SEQ ID NO: 1210358 - RNA, 19 nt, Artificial Sequence
  Description of Artificial Sequence: Synthetic oligonucleotide
gcuuccgagucgggaaccc

SEQ ID NO: 1210359 - RNA, 19 nt, Artificial Sequence
  Description of Artificial Sequence: Synthetic oligonucleotide
gguuguccgucuucuccaa

SEQ ID NO: 1210360 - RNA, 19 nt, Artificial Sequence
  Description of Artificial Sequence: Synthetic oligonucleotide
cacgugugguacacggcgu

SEQ ID NO: 1210361 - RNA, 19 nt, Artificial Sequence
  Description of Artificial Sequence: Synthetic oligonucleotide
acguugccagaugccuuga

SEQ ID NO: 1210362 - RNA, 19 nt, Artificial Sequence
  Description of Artificial Sequence: Synthetic oligonucleotide
ggcugagcguggcgcgggg

SEQ ID NO: 1210363 - RNA, 19 nt, Artificial Sequence
  Description of Artificial Sequence: Synthetic oligonucleotide
gcgagguccggcgcagccg

SEQ ID NO: 1210364 - RNA, 19 nt, Artificial Sequence
  Description of Artificial Sequence: Synthetic oligonucleotide
acggaauccugagcccuuu

SEQ ID NO: 1210365 - RNA, 19 nt, Artificial Sequence
  Description of Artificial Sequence: Synthetic oligonucleotide
caccgcacacuggcacugc

SEQ ID NO: 1210366 - RNA, 19 nt, Artificial Sequence
  Description of Artificial Sequence: Synthetic oligonucleotide
gcgggacacagcacugaag

SEQ ID NO: 1210367 - RNA, 19 nt, Artificial Sequence
  Description of Artificial Sequence: Synthetic oligonucleotide
cccgggugaaggguugggg

SEQ ID NO: 1210368 - RNA, 19 nt, Artificial Sequence
  Description of Artificial Sequence: Synthetic oligonucleotide
cugagcccuuucggcgggg

SEQ ID NO: 1210369 - RNA, 19 nt, Artificial Sequence
  Description of Artificial Sequence: Synthetic oligonucleotide
gcggaagcugcgguacuug

SEQ ID NO: 1210370 - RNA, 19 nt, Artificial Sequence
  Description of Artificial Sequence: Synthetic oligonucleotide
gggagcgguugaguccggg

SEQ ID NO: 1210371 - RNA, 19 nt, Artificial Sequence
  Description of Artificial Sequence: Synthetic oligonucleotide
cgugugguacacggcgucg

SEQ ID NO: 1210372 - RNA, 19 nt, Artificial Sequence
  Description of Artificial Sequence: Synthetic oligonucleotide
cagagcgcgcccggcgcgc

SEQ ID NO: 1210373 - RNA, 19 nt, Artificial Sequence
  Description of Artificial Sequence: Synthetic oligonucleotide
ggccauaagucuggaucuc

SEQ ID NO: 1210374 - RNA, 19 nt, Artificial Sequence
  Description of Artificial Sequence: Synthetic oligonucleotide
ccugaaccauuagugaucu

SEQ ID NO: 1210375 - RNA, 19 nt, Artificial Sequence
  Description of Artificial Sequence: Synthetic oligonucleotide
ggacacgggcgagcgcgcg

SEQ ID NO: 1210376 - RNA, 19 nt, Artificial Sequence
  Description of Artificial Sequence: Synthetic oligonucleotide
caggagcgcacggacucca

SEQ ID NO: 1210377 - RNA, 19 nt, Artificial Sequence
  Description of Artificial Sequence: Synthetic oligonucleotide
cccauacagaguuuccagu

SEQ ID NO: 1210378 - RNA, 19 nt, Artificial Sequence
  Description of Artificial Sequence: Synthetic oligonucleotide
aggugaugcucgagccgcu

SEQ ID NO: 1210379 - RNA, 19 nt, Artificial Sequence
  Description of Artificial Sequence: Synthetic oligonucleotide
gcccuuucggcggggcagg

SEQ ID NO: 1210380 - RNA, 19 nt, Artificial Sequence
  Description of Artificial Sequence: Synthetic oligonucleotide
gugugguacacggcgucgu

SEQ ID NO: 1210381 - RNA, 19 nt, Artificial Sequence
  Description of Artificial Sequence: Synthetic oligonucleotide
gccguagaggcaggagcgc

SEQ ID NO: 1210382 - RNA, 19 nt, Artificial Sequence
  Description of Artificial Sequence: Synthetic oligonucleotide
cagugucuauucuccccgu

SEQ ID NO: 1210383 - RNA, 19 nt, Artificial Sequence
  Description of Artificial Sequence: Synthetic oligonucleotide
ccgcuuccgagucgggaac

SEQ ID NO: 1210384 - RNA, 19 nt, Artificial Sequence
  Description of Artificial Sequence: Synthetic oligonucleotide
cugacccagacugcaggcu

SEQ ID NO: 1210385 - RNA, 19 nt, Artificial Sequence
  Description of Artificial Sequence: Synthetic oligonucleotide
ccagcgccguagaggcagg

SEQ ID NO: 1210386 - RNA, 19 nt, Artificial Sequence
  Description of Artificial Sequence: Synthetic oligonucleotide
gcucgagccgcuuccgagu

SEQ ID NO: 1210387 - RNA, 19 nt, Artificial Sequence
  Description of Artificial Sequence: Synthetic oligonucleotide
ccgagucgggaacccgggc

SEQ ID NO: 1210388 - RNA, 19 nt, Artificial Sequence
  Description of Artificial Sequence: Synthetic oligonucleotide
ggccaugaacgagccgcug

SEQ ID NO: 1210389 - RNA, 19 nt, Artificial Sequence
  Description of Artificial Sequence: Synthetic oligonucleotide
ccaugaacgagccgcugcu

SEQ ID NO: 1210390 - RNA, 19 nt, Artificial Sequence
  Description of Artificial Sequence: Synthetic oligonucleotide
cgccgcguacagcucgucg

SEQ ID NO: 1210391 - RNA, 19 nt, Artificial Sequence
  Description of Artificial Sequence: Synthetic oligonucleotide
cgaauggaugucccauaca

SEQ ID NO: 1210392 - RNA, 19 nt, Artificial Sequence
  Description of Artificial Sequence: Synthetic oligonucleotide
gcguaggccggcgccacac

SEQ ID NO: 1210393 - RNA, 19 nt, Artificial Sequence
  Description of Artificial Sequence: Synthetic oligonucleotide
caaagccgaaggucugguu

SEQ ID NO: 1210394 - RNA, 19 nt, Artificial Sequence
  Description of Artificial Sequence: Synthetic oligonucleotide
agggagcgguugaguccgg

SEQ ID NO: 1210395 - RNA, 19 nt, Artificial Sequence
  Description of Artificial Sequence: Synthetic oligonucleotide
cgcggggugguaguccucc

SEQ ID NO: 1210396 - RNA, 19 nt, Artificial Sequence
  Description of Artificial Sequence: Synthetic oligonucleotide
ccccggacacgggcgagcg

SEQ ID NO: 1210397 - RNA, 19 nt, Artificial Sequence
  Description of Artificial Sequence: Synthetic oligonucleotide
guggcgcggggugcgggac

SEQ ID NO: 1210398 - RNA, 19 nt, Artificial Sequence
  Description of Artificial Sequence: Synthetic oligonucleotide
aggcgcgccuccaguucug

SEQ ID NO: 1210399 - RNA, 19 nt, Artificial Sequence
  Description of Artificial Sequence: Synthetic oligonucleotide
ggagcgcacggacuccagu

SEQ ID NO: 1210400 - RNA, 19 nt, Artificial Sequence
  Description of Artificial Sequence: Synthetic oligonucleotide
ggacgaagcggcggcagcu

SEQ ID NO: 1210401 - RNA, 19 nt, Artificial Sequence
  Description of Artificial Sequence: Synthetic oligonucleotide
ggaacccgggcagcgaggu

SEQ ID NO: 1210402 - RNA, 19 nt, Artificial Sequence
  Description of Artificial Sequence: Synthetic oligonucleotide
cccgcgcaccgcacacugg

SEQ ID NO: 1210403 - RNA, 19 nt, Artificial Sequence
  Description of Artificial Sequence: Synthetic oligonucleotide
ccggacgaagcggcggcag

SEQ ID NO: 1210404 - RNA, 19 nt, Artificial Sequence
  Description of Artificial Sequence: Synthetic oligonucleotide
gggcccgcgcaccgcacac

SEQ ID NO: 1210405 - RNA, 19 nt, Artificial Sequence
  Description of Artificial Sequence: Synthetic oligonucleotide
gccccuacagcuggcucuc

SEQ ID NO: 1210406 - RNA, 19 nt, Artificial Sequence
  Description of Artificial Sequence: Synthetic oligonucleotide
cucucccaacucccagugu

SEQ ID NO: 1210407 - RNA, 19 nt, Artificial Sequence
  Description of Artificial Sequence: Synthetic oligonucleotide
ggcgcgccuccaguucugc

SEQ ID NO: 1210408 - RNA, 19 nt, Artificial Sequence
  Description of Artificial Sequence: Synthetic oligonucleotide
ccguagaggcaggagcgca

SEQ ID NO: 1210409 - RNA, 19 nt, Artificial Sequence
  Description of Artificial Sequence: Synthetic oligonucleotide
ggcgcggggugcgggacac

SEQ ID NO: 1210410 - RNA, 19 nt, Artificial Sequence
  Description of Artificial Sequence: Synthetic oligonucleotide
gggccucaguccagagcgc

SEQ ID NO: 1210411 - RNA, 19 nt, Artificial Sequence
  Description of Artificial Sequence: Synthetic oligonucleotide
gguugaguccggggauaaa

SEQ ID NO: 1210412 - RNA, 19 nt, Artificial Sequence
  Description of Artificial Sequence: Synthetic oligonucleotide
cugcaggcgcgccuccagu

SEQ ID NO: 1210413 - RNA, 19 nt, Artificial Sequence
  Description of Artificial Sequence: Synthetic oligonucleotide
cgcuuccgagucgggaacc

SEQ ID NO: 1210414 - RNA, 19 nt, Artificial Sequence
  Description of Artificial Sequence: Synthetic oligonucleotide
gcgccccuacagcuggcuc

SEQ ID NO: 1210415 - RNA, 19 nt, Artificial Sequence
  Description of Artificial Sequence: Synthetic oligonucleotide
cucccggugccggaugccu

SEQ ID NO: 1210416 - RNA, 19 nt, Artificial Sequence
  Description of Artificial Sequence: Synthetic oligonucleotide
ggccuguucgcgggccuca

SEQ ID NO: 1210417 - RNA, 19 nt, Artificial Sequence
  Description of Artificial Sequence: Synthetic oligonucleotide
ccgccgcacgcucccgcgg

SEQ ID NO: 1210418 - RNA, 19 nt, Artificial Sequence
  Description of Artificial Sequence: Synthetic oligonucleotide
cgcgugcccacccgcgccc

SEQ ID NO: 1210419 - RNA, 19 nt, Artificial Sequence
  Description of Artificial Sequence: Synthetic oligonucleotide
cuccccgugcagagauccu

SEQ ID NO: 1210420 - RNA, 19 nt, Artificial Sequence
  Description of Artificial Sequence: Synthetic oligonucleotide
gcgguugaguccggggaua

SEQ ID NO: 1210421 - RNA, 19 nt, Artificial Sequence
  Description of Artificial Sequence: Synthetic oligonucleotide
ggcagacgaaggucaccau

SEQ ID NO: 1210422 - RNA, 19 nt, Artificial Sequence
  Description of Artificial Sequence: Synthetic oligonucleotide
ccggugccggaugccuucc

SEQ ID NO: 1210423 - RNA, 19 nt, Artificial Sequence
  Description of Artificial Sequence: Synthetic oligonucleotide
gcgccuccaguucugcuuu

SEQ ID NO: 1210424 - RNA, 19 nt, Artificial Sequence
  Description of Artificial Sequence: Synthetic oligonucleotide
gcggggugguaguccucca

SEQ ID NO: 1210425 - RNA, 19 nt, Artificial Sequence
  Description of Artificial Sequence: Synthetic oligonucleotide
cggacacgggcgagcgcgc

SEQ ID NO: 1210426 - RNA, 19 nt, Artificial Sequence
  Description of Artificial Sequence: Synthetic oligonucleotide
ccaacucccagugucuauu

SEQ ID NO: 1210427 - RNA, 19 nt, Artificial Sequence
  Description of Artificial Sequence: Synthetic oligonucleotide
gccuggcgugcgcgcgggg

SEQ ID NO: 1210428 - RNA, 19 nt, Artificial Sequence
  Description of Artificial Sequence: Synthetic oligonucleotide
cagcgccguagaggcagga

SEQ ID NO: 1210429 - RNA, 19 nt, Artificial Sequence
  Description of Artificial Sequence: Synthetic oligonucleotide
cccuuucggcggggcaggg

SEQ ID NO: 1210430 - RNA, 19 nt, Artificial Sequence
  Description of Artificial Sequence: Synthetic oligonucleotide
cccggacacgggcgagcgc

SEQ ID NO: 1210431 - RNA, 19 nt, Artificial Sequence
  Description of Artificial Sequence: Synthetic oligonucleotide
gcgcgcgguacagcuccgc

SEQ ID NO: 1210432 - RNA, 19 nt, Artificial Sequence
  Description of Artificial Sequence: Synthetic oligonucleotide
cgccccuacagcuggcucu

SEQ ID NO: 1210433 - RNA, 19 nt, Artificial Sequence
  Description of Artificial Sequence: Synthetic oligonucleotide
ggugaugcucgagccgcuu

SEQ ID NO: 1210434 - RNA, 19 nt, Artificial Sequence
  Description of Artificial Sequence: Synthetic oligonucleotide
ggcccgccgcacgcucccg

SEQ ID NO: 1210435 - RNA, 19 nt, Artificial Sequence
  Description of Artificial Sequence: Synthetic oligonucleotide
gcgugcccacccgcgcccc

SEQ ID NO: 1210436 - RNA, 19 nt, Artificial Sequence
  Description of Artificial Sequence: Synthetic oligonucleotide
cgcacggacuccagugugu

SEQ ID NO: 1210437 - RNA, 19 nt, Artificial Sequence
  Description of Artificial Sequence: Synthetic oligonucleotide
ccgcgccccuacagcuggc

SEQ ID NO: 1210438 - RNA, 19 nt, Artificial Sequence
  Description of Artificial Sequence: Synthetic oligonucleotide
ccccuacagcuggcucucc

SEQ ID NO: 1210439 - RNA, 19 nt, Artificial Sequence
  Description of Artificial Sequence: Synthetic oligonucleotide
cgcgcaccgcacacuggca

SEQ ID NO: 1210440 - RNA, 19 nt, Artificial Sequence
  Description of Artificial Sequence: Synthetic oligonucleotide
cacgggcgagcgcgcggua

SEQ ID NO: 1210441 - RNA, 19 nt, Artificial Sequence
  Description of Artificial Sequence: Synthetic oligonucleotide
cguaggccggcgccacaca

SEQ ID NO: 1210442 - RNA, 19 nt, Artificial Sequence
  Description of Artificial Sequence: Synthetic oligonucleotide
cgcaccgcacacuggcacu

SEQ ID NO: 1210443 - RNA, 19 nt, Artificial Sequence
  Description of Artificial Sequence: Synthetic oligonucleotide
ccgcggggugguaguccuc

SEQ ID NO: 1210444 - RNA, 19 nt, Artificial Sequence
  Description of Artificial Sequence: Synthetic oligonucleotide
gcugagcguggcgcggggu

SEQ ID NO: 1210445 - RNA, 19 nt, Artificial Sequence
  Description of Artificial Sequence: Synthetic oligonucleotide
gcgcgccuccaguucugcu

SEQ ID NO: 1210446 - RNA, 19 nt, Artificial Sequence
  Description of Artificial Sequence: Synthetic oligonucleotide
ggcgccacacagggccugu

SEQ ID NO: 1210447 - RNA, 19 nt, Artificial Sequence
  Description of Artificial Sequence: Synthetic oligonucleotide
gcgccgcguacagcucguc

SEQ ID NO: 1210448 - RNA, 19 nt, Artificial Sequence
  Description of Artificial Sequence: Synthetic oligonucleotide
cgggacucugacugagauu

SEQ ID NO: 1210449 - RNA, 19 nt, Artificial Sequence
  Description of Artificial Sequence: Synthetic oligonucleotide
ggcccgcgcaccgcacacu

SEQ ID NO: 1210450 - RNA, 19 nt, Artificial Sequence
  Description of Artificial Sequence: Synthetic oligonucleotide
ccggcgccacacagggccu

SEQ ID NO: 1210451 - RNA, 19 nt, Artificial Sequence
  Description of Artificial Sequence: Synthetic oligonucleotide
cguugccagaugccuugau

SEQ ID NO: 1210452 - RNA, 19 nt, Artificial Sequence
  Description of Artificial Sequence: Synthetic oligonucleotide
gcgcggggugcgggacaca

SEQ ID NO: 1210453 - RNA, 19 nt, Artificial Sequence
  Description of Artificial Sequence: Synthetic oligonucleotide
cgcgccccuacagcuggcu

SEQ ID NO: 1210454 - RNA, 19 nt, Artificial Sequence
  Description of Artificial Sequence: Synthetic oligonucleotide
aauuagaagucccuguccc

SEQ ID NO: 1210455 - RNA, 19 nt, Artificial Sequence
  Description of Artificial Sequence: Synthetic oligonucleotide
aaauucccagcuuuuaucg

SEQ ID NO: 1210456 - RNA, 19 nt, Artificial Sequence
  Description of Artificial Sequence: Synthetic oligonucleotide
aaaauuagaagucccuguc

SEQ ID NO: 1210457 - RNA, 19 nt, Artificial Sequence
  Description of Artificial Sequence: Synthetic oligonucleotide
aaauaauuggacacgaggg

SEQ ID NO: 1210458 - RNA, 19 nt, Artificial Sequence
  Description of Artificial Sequence: Synthetic oligonucleotide
aaauuagaagucccugucc

SEQ ID NO: 1210459 - RNA, 19 nt, Artificial Sequence
  Description of Artificial Sequence: Synthetic oligonucleotide
uaaagaugccucuuaaacg

SEQ ID NO: 1210460 - RNA, 19 nt, Artificial Sequence
  Description of Artificial Sequence: Synthetic oligonucleotide
ucuaauaaccauuaacucu

SEQ ID NO: 1210461 - RNA, 19 nt, Artificial Sequence
  Description of Artificial Sequence: Synthetic oligonucleotide
aaacgagacaaauuuucac

SEQ ID NO: 1210462 - RNA, 19 nt, Artificial Sequence
  Description of Artificial Sequence: Synthetic oligonucleotide
ugaucuaaaauaauuggac

SEQ ID NO: 1210463 - RNA, 19 nt, Artificial Sequence
  Description of Artificial Sequence: Synthetic oligonucleotide
aaacaagccagucuacaac

SEQ ID NO: 1210464 - RNA, 19 nt, Artificial Sequence
  Description of Artificial Sequence: Synthetic oligonucleotide
ucuuaaacgagacaaauuu

SEQ ID NO: 1210465 - RNA, 19 nt, Artificial Sequence
  Description of Artificial Sequence: Synthetic oligonucleotide
ugaaauuacacaaauucau

SEQ ID NO: 1210466 - RNA, 19 nt, Artificial Sequence
  Description of Artificial Sequence: Synthetic oligonucleotide
aauaauaaaucccuccaaa

SEQ ID NO: 1210467 - RNA, 19 nt, Artificial Sequence
  Description of Artificial Sequence: Synthetic oligonucleotide
ucuaaaauaauuggacacg

SEQ ID NO: 1210468 - RNA, 19 nt, Artificial Sequence
  Description of Artificial Sequence: Synthetic oligonucleotide
auaaccauuaacucucuuc

SEQ ID NO: 1210469 - RNA, 19 nt, Artificial Sequence
  Description of Artificial Sequence: Synthetic oligonucleotide
cuaauaaccauuaacucuc

SEQ ID NO: 1210470 - RNA, 19 nt, Artificial Sequence
  Description of Artificial Sequence: Synthetic oligonucleotide
gaugcaaucccaaaguuag

SEQ ID NO: 1210471 - RNA, 19 nt, Artificial Sequence
  Description of Artificial Sequence: Synthetic oligonucleotide
uguauaguuauuguacacg

SEQ ID NO: 1210472 - RNA, 19 nt, Artificial Sequence
  Description of Artificial Sequence: Synthetic oligonucleotide
uaaccauuaacucucuuca

SEQ ID NO: 1210473 - RNA, 19 nt, Artificial Sequence
  Description of Artificial Sequence: Synthetic oligonucleotide
aaagucacuaccuaaugaa

SEQ ID NO: 1210474 - RNA, 19 nt, Artificial Sequence
  Description of Artificial Sequence: Synthetic oligonucleotide
augauaucaacgcacagug

SEQ ID NO: 1210475 - RNA, 19 nt, Artificial Sequence
  Description of Artificial Sequence: Synthetic oligonucleotide
cagucuacaacccacaccc

SEQ ID NO: 1210476 - RNA, 19 nt, Artificial Sequence
  Description of Artificial Sequence: Synthetic oligonucleotide
uauuguacacguuuaggag

SEQ ID NO: 1210477 - RNA, 19 nt, Artificial Sequence
  Description of Artificial Sequence: Synthetic oligonucleotide
gaaaguaaccugcuauugg

SEQ ID NO: 1210478 - RNA, 19 nt, Artificial Sequence
  Description of Artificial Sequence: Synthetic oligonucleotide
agugacaagagaaaguaac

SEQ ID NO: 1210479 - RNA, 19 nt, Artificial Sequence
  Description of Artificial Sequence: Synthetic oligonucleotide
uggccaaugucuaauaacc

SEQ ID NO: 1210480 - RNA, 19 nt, Artificial Sequence
  Description of Artificial Sequence: Synthetic oligonucleotide
auguuguuguauuagacug

SEQ ID NO: 1210481 - RNA, 19 nt, Artificial Sequence
  Description of Artificial Sequence: Synthetic oligonucleotide
uuuuguacguucuuuucag

SEQ ID NO: 1210482 - RNA, 19 nt, Artificial Sequence
  Description of Artificial Sequence: Synthetic oligonucleotide
aguaugucaggguagaacu

SEQ ID NO: 1210483 - RNA, 19 nt, Artificial Sequence
  Description of Artificial Sequence: Synthetic oligonucleotide
uuguacacguuuaggaggg

SEQ ID NO: 1210484 - RNA, 19 nt, Artificial Sequence
  Description of Artificial Sequence: Synthetic oligonucleotide
agaaagaacaagugagggg

SEQ ID NO: 1210485 - RNA, 19 nt, Artificial Sequence
  Description of Artificial Sequence: Synthetic oligonucleotide
aaaguuuaucccuauccga

SEQ ID NO: 1210486 - RNA, 19 nt, Artificial Sequence
  Description of Artificial Sequence: Synthetic oligonucleotide
uuuaucggaagcaaaaguu

SEQ ID NO: 1210487 - RNA, 19 nt, Artificial Sequence
  Description of Artificial Sequence: Synthetic oligonucleotide
uuuuaucggaagcaaaagu

SEQ ID NO: 1210488 - RNA, 19 nt, Artificial Sequence
  Description of Artificial Sequence: Synthetic oligonucleotide
uaccuaaugaaagaaaaca

SEQ ID NO: 1210489 - RNA, 19 nt, Artificial Sequence
  Description of Artificial Sequence: Synthetic oligonucleotide
acaaguuuguagcagucuc

SEQ ID NO: 1210490 - RNA, 19 nt, Artificial Sequence
  Description of Artificial Sequence: Synthetic oligonucleotide
aaagggacgugacauguug

SEQ ID NO: 1210491 - RNA, 19 nt, Artificial Sequence
  Description of Artificial Sequence: Synthetic oligonucleotide
aaguuagcaauggccaugc

SEQ ID NO: 1210492 - RNA, 19 nt, Artificial Sequence
  Description of Artificial Sequence: Synthetic oligonucleotide
auagggagaguggugaucc

SEQ ID NO: 1210493 - RNA, 19 nt, Artificial Sequence
  Description of Artificial Sequence: Synthetic oligonucleotide
uguauaguggucuccacac

SEQ ID NO: 1210494 - RNA, 19 nt, Artificial Sequence
  Description of Artificial Sequence: Synthetic oligonucleotide
gauaucaacgcacagugaa

SEQ ID NO: 1210495 - RNA, 19 nt, Artificial Sequence
  Description of Artificial Sequence: Synthetic oligonucleotide
agacuguugacccaaguug

SEQ ID NO: 1210496 - RNA, 19 nt, Artificial Sequence
  Description of Artificial Sequence: Synthetic oligonucleotide
acacaaaaccuuucagggc

SEQ ID NO: 1210497 - RNA, 19 nt, Artificial Sequence
  Description of Artificial Sequence: Synthetic oligonucleotide
ucuguauaguuauuguaca

SEQ ID NO: 1210498 - RNA, 19 nt, Artificial Sequence
  Description of Artificial Sequence: Synthetic oligonucleotide
uaaacgagacaaauuuuca

SEQ ID NO: 1210499 - RNA, 19 nt, Artificial Sequence
  Description of Artificial Sequence: Synthetic oligonucleotide
aaagugacaagagaaagua

SEQ ID NO: 1210500 - RNA, 19 nt, Artificial Sequence
  Description of Artificial Sequence: Synthetic oligonucleotide
aaguuuaucccuauccgag

SEQ ID NO: 1210501 - RNA, 19 nt, Artificial Sequence
  Description of Artificial Sequence: Synthetic oligonucleotide
acgagacaaauuuucacag

SEQ ID NO: 1210502 - RNA, 19 nt, Artificial Sequence
  Description of Artificial Sequence: Synthetic oligonucleotide
ugaggggugugcaacauca

SEQ ID NO: 1210503 - RNA, 19 nt, Artificial Sequence
  Description of Artificial Sequence: Synthetic oligonucleotide
cagugaucuaaaauaauug

SEQ ID NO: 1210504 - RNA, 19 nt, Artificial Sequence
  Description of Artificial Sequence: Synthetic oligonucleotide
uuugaaagucacuaccuaa

SEQ ID NO: 1210505 - RNA, 19 nt, Artificial Sequence
  Description of Artificial Sequence: Synthetic oligonucleotide
ugaaagucacuaccuaaug

SEQ ID NO: 1210506 - RNA, 19 nt, Artificial Sequence
  Description of Artificial Sequence: Synthetic oligonucleotide
auuaacucucuucaugacu

SEQ ID NO: 1210507 - RNA, 19 nt, Artificial Sequence
  Description of Artificial Sequence: Synthetic oligonucleotide
cauaugguaaagaugccuc

SEQ ID NO: 1210508 - RNA, 19 nt, Artificial Sequence
  Description of Artificial Sequence: Synthetic oligonucleotide
uccgaguugaaauuacaca

SEQ ID NO: 1210509 - RNA, 19 nt, Artificial Sequence
  Description of Artificial Sequence: Synthetic oligonucleotide
acaugaauuccuuucuuca

SEQ ID NO: 1210510 - RNA, 19 nt, Artificial Sequence
  Description of Artificial Sequence: Synthetic oligonucleotide
aguaaccugcuauuggcag

SEQ ID NO: 1210511 - RNA, 19 nt, Artificial Sequence
  Description of Artificial Sequence: Synthetic oligonucleotide
acugcauccuccuguauag

SEQ ID NO: 1210512 - RNA, 19 nt, Artificial Sequence
  Description of Artificial Sequence: Synthetic oligonucleotide
uggugauccaaaauaaaua

SEQ ID NO: 1210513 - RNA, 19 nt, Artificial Sequence
  Description of Artificial Sequence: Synthetic oligonucleotide
uugaaagucacuaccuaau

SEQ ID NO: 1210514 - RNA, 19 nt, Artificial Sequence
  Description of Artificial Sequence: Synthetic oligonucleotide
ucuggcaauagugaaguca

SEQ ID NO: 1210515 - RNA, 19 nt, Artificial Sequence
  Description of Artificial Sequence: Synthetic oligonucleotide
guuuaggagggaucgaggc

SEQ ID NO: 1210516 - RNA, 19 nt, Artificial Sequence
  Description of Artificial Sequence: Synthetic oligonucleotide
uauaguggucuccacacau

SEQ ID NO: 1210517 - RNA, 19 nt, Artificial Sequence
  Description of Artificial Sequence: Synthetic oligonucleotide
aguuaagacccucugccug

SEQ ID NO: 1210518 - RNA, 19 nt, Artificial Sequence
  Description of Artificial Sequence: Synthetic oligonucleotide
aaucuuuacacaaaaccuu

SEQ ID NO: 1210519 - RNA, 19 nt, Artificial Sequence
  Description of Artificial Sequence: Synthetic oligonucleotide
uuaucggaagcaaaaguuu

SEQ ID NO: 1210520 - RNA, 19 nt, Artificial Sequence
  Description of Artificial Sequence: Synthetic oligonucleotide
uaucaacgcacagugaaug

SEQ ID NO: 1210521 - RNA, 19 nt, Artificial Sequence
  Description of Artificial Sequence: Synthetic oligonucleotide
ugacaagagaaaguaaccu

SEQ ID NO: 1210522 - RNA, 19 nt, Artificial Sequence
  Description of Artificial Sequence: Synthetic oligonucleotide
aaccuuucagggccauggc

SEQ ID NO: 1210523 - RNA, 19 nt, Artificial Sequence
  Description of Artificial Sequence: Synthetic oligonucleotide
caugaauuccuuucuucag

SEQ ID NO: 1210524 - RNA, 19 nt, Artificial Sequence
  Description of Artificial Sequence: Synthetic oligonucleotide
aggucuuaaagauggucag

SEQ ID NO: 1210525 - RNA, 19 nt, Artificial Sequence
  Description of Artificial Sequence: Synthetic oligonucleotide
aaacccaaacugcucucag

SEQ ID NO: 1210526 - RNA, 19 nt, Artificial Sequence
  Description of Artificial Sequence: Synthetic oligonucleotide
uuuaggagggaucgaggca

SEQ ID NO: 1210527 - RNA, 19 nt, Artificial Sequence
  Description of Artificial Sequence: Synthetic oligonucleotide
ccaaauaauaaaucccucc

SEQ ID NO: 1210528 - RNA, 19 nt, Artificial Sequence
  Description of Artificial Sequence: Synthetic oligonucleotide
agaagggcccaaaacaaac

SEQ ID NO: 1210529 - RNA, 19 nt, Artificial Sequence
  Description of Artificial Sequence: Synthetic oligonucleotide
ugaaauucccagcuuuuau

SEQ ID NO: 1210530 - RNA, 19 nt, Artificial Sequence
  Description of Artificial Sequence: Synthetic oligonucleotide
uuucguagcaguucuuccu

SEQ ID NO: 1210531 - RNA, 19 nt, Artificial Sequence
  Description of Artificial Sequence: Synthetic oligonucleotide
ugacauguuguuguauuag

SEQ ID NO: 1210532 - RNA, 19 nt, Artificial Sequence
  Description of Artificial Sequence: Synthetic oligonucleotide
ucugaggaacagaugaaau

SEQ ID NO: 1210533 - RNA, 19 nt, Artificial Sequence
  Description of Artificial Sequence: Synthetic oligonucleotide
gagggaucgaggcaagaag

SEQ ID NO: 1210534 - RNA, 19 nt, Artificial Sequence
  Description of Artificial Sequence: Synthetic oligonucleotide
gucuaauaaccauuaacuc

SEQ ID NO: 1210535 - RNA, 19 nt, Artificial Sequence
  Description of Artificial Sequence: Synthetic oligonucleotide
aaguuuguagcagucucug

SEQ ID NO: 1210536 - RNA, 19 nt, Artificial Sequence
  Description of Artificial Sequence: Synthetic oligonucleotide
acacguuuaggagggaucg

SEQ ID NO: 1210537 - RNA, 19 nt, Artificial Sequence
  Description of Artificial Sequence: Synthetic oligonucleotide
uggggagcaauuccaacug

SEQ ID NO: 1210538 - RNA, 19 nt, Artificial Sequence
  Description of Artificial Sequence: Synthetic oligonucleotide
uuuaucccuauccgaguug

SEQ ID NO: 1210539 - RNA, 19 nt, Artificial Sequence
  Description of Artificial Sequence: Synthetic oligonucleotide
uaugucaggguagaacuca

SEQ ID NO: 1210540 - RNA, 19 nt, Artificial Sequence
  Description of Artificial Sequence: Synthetic oligonucleotide
accugcuauuggcagauuc

SEQ ID NO: 1210541 - RNA, 19 nt, Artificial Sequence
  Description of Artificial Sequence: Synthetic oligonucleotide
agucacuaccuaaugaaag

SEQ ID NO: 1210542 - RNA, 19 nt, Artificial Sequence
  Description of Artificial Sequence: Synthetic oligonucleotide
uguacguucuuuucagaaa

SEQ ID NO: 1210543 - RNA, 19 nt, Artificial Sequence
  Description of Artificial Sequence: Synthetic oligonucleotide
cuuagguacagucugaggu

SEQ ID NO: 1210544 - RNA, 19 nt, Artificial Sequence
  Description of Artificial Sequence: Synthetic oligonucleotide
acguucuuuucagaaaagg

SEQ ID NO: 1210545 - RNA, 19 nt, Artificial Sequence
  Description of Artificial Sequence: Synthetic oligonucleotide
gugugcaacaucaaacaag

SEQ ID NO: 1210546 - RNA, 19 nt, Artificial Sequence
  Description of Artificial Sequence: Synthetic oligonucleotide
ucagcuugcuuugaaaguc

SEQ ID NO: 1210547 - RNA, 19 nt, Artificial Sequence
  Description of Artificial Sequence: Synthetic oligonucleotide
agaaaguaaccugcuauug

SEQ ID NO: 1210548 - RNA, 19 nt, Artificial Sequence
  Description of Artificial Sequence: Synthetic oligonucleotide
cuguauaguuauuguacac

SEQ ID NO: 1210549 - RNA, 19 nt, Artificial Sequence
  Description of Artificial Sequence: Synthetic oligonucleotide
uauccgaguugaaauuaca

SEQ ID NO: 1210550 - RNA, 19 nt, Artificial Sequence
  Description of Artificial Sequence: Synthetic oligonucleotide
auuggcagauuccaacaca

SEQ ID NO: 1210551 - RNA, 19 nt, Artificial Sequence
  Description of Artificial Sequence: Synthetic oligonucleotide
auaugguaaagaugccucu

SEQ ID NO: 1210552 - RNA, 19 nt, Artificial Sequence
  Description of Artificial Sequence: Synthetic oligonucleotide
aguaagguuggaguauguc

SEQ ID NO: 1210553 - RNA, 19 nt, Artificial Sequence
  Description of Artificial Sequence: Synthetic oligonucleotide
uacauaugguaaagaugcc

SEQ ID NO: 1210554 - RNA, 19 nt, Artificial Sequence
  Description of Artificial Sequence: Synthetic oligonucleotide
uuacaaguuuguagcaguc

SEQ ID NO: 1210555 - RNA, 19 nt, Artificial Sequence
  Description of Artificial Sequence: Synthetic oligonucleotide
gaagggauagggagagugg

SEQ ID NO: 1210556 - RNA, 19 nt, Artificial Sequence
  Description of Artificial Sequence: Synthetic oligonucleotide
auccgaguugaaauuacac

SEQ ID NO: 1210557 - RNA, 19 nt, Artificial Sequence
  Description of Artificial Sequence: Synthetic oligonucleotide
agggaucgaggcaagaagg

SEQ ID NO: 1210558 - RNA, 19 nt, Artificial Sequence
  Description of Artificial Sequence: Synthetic oligonucleotide
ccaguuaagacccucugcc

SEQ ID NO: 1210559 - RNA, 19 nt, Artificial Sequence
  Description of Artificial Sequence: Synthetic oligonucleotide
cuggccaaugucuaauaac

SEQ ID NO: 1210560 - RNA, 19 nt, Artificial Sequence
  Description of Artificial Sequence: Synthetic oligonucleotide
guaucagcuccuucugccg

SEQ ID NO: 1210561 - RNA, 19 nt, Artificial Sequence
  Description of Artificial Sequence: Synthetic oligonucleotide
uaguuauuguacacguuua

SEQ ID NO: 1210562 - RNA, 19 nt, Artificial Sequence
  Description of Artificial Sequence: Synthetic oligonucleotide
cuaaaauaauuggacacga

SEQ ID NO: 1210563 - RNA, 19 nt, Artificial Sequence
  Description of Artificial Sequence: Synthetic oligonucleotide
ucccuauccgaguugaaau

SEQ ID NO: 1210564 - RNA, 19 nt, Artificial Sequence
  Description of Artificial Sequence: Synthetic oligonucleotide
gucacuaccuaaugaaaga

SEQ ID NO: 1210565 - RNA, 19 nt, Artificial Sequence
  Description of Artificial Sequence: Synthetic oligonucleotide
gugacaagagaaaguaacc

SEQ ID NO: 1210566 - RNA, 19 nt, Artificial Sequence
  Description of Artificial Sequence: Synthetic oligonucleotide
aacucagcuugcuuugaaa

SEQ ID NO: 1210567 - RNA, 19 nt, Artificial Sequence
  Description of Artificial Sequence: Synthetic oligonucleotide
guauaguuauuguacacgu

SEQ ID NO: 1210568 - RNA, 19 nt, Artificial Sequence
  Description of Artificial Sequence: Synthetic oligonucleotide
ucaacgcacagugaaugug

SEQ ID NO: 1210569 - RNA, 19 nt, Artificial Sequence
  Description of Artificial Sequence: Synthetic oligonucleotide
uacacguuuaggagggauc

SEQ ID NO: 1210570 - RNA, 19 nt, Artificial Sequence
  Description of Artificial Sequence: Synthetic oligonucleotide
caucaaacaagccagucua

SEQ ID NO: 1210571 - RNA, 19 nt, Artificial Sequence
  Description of Artificial Sequence: Synthetic oligonucleotide
acagugaucuaaaauaauu

SEQ ID NO: 1210572 - RNA, 19 nt, Artificial Sequence
  Description of Artificial Sequence: Synthetic oligonucleotide
gaguaugucaggguagaac

SEQ ID NO: 1210573 - RNA, 19 nt, Artificial Sequence
  Description of Artificial Sequence: Synthetic oligonucleotide
cuauccgaguugaaauuac

SEQ ID NO: 1210574 - RNA, 19 nt, Artificial Sequence
  Description of Artificial Sequence: Synthetic oligonucleotide
ugauaucaacgcacaguga

SEQ ID NO: 1210575 - RNA, 19 nt, Artificial Sequence
  Description of Artificial Sequence: Synthetic oligonucleotide
aguuuaucccuauccgagu

SEQ ID NO: 1210576 - RNA, 19 nt, Artificial Sequence
  Description of Artificial Sequence: Synthetic oligonucleotide
uuuguacguucuuuucaga

SEQ ID NO: 1210577 - RNA, 19 nt, Artificial Sequence
  Description of Artificial Sequence: Synthetic oligonucleotide
acgcacagugaaugugugc

SEQ ID NO: 1210578 - RNA, 19 nt, Artificial Sequence
  Description of Artificial Sequence: Synthetic oligonucleotide
ucgccuuagugcaaucucu

SEQ ID NO: 1210579 - RNA, 19 nt, Artificial Sequence
  Description of Artificial Sequence: Synthetic oligonucleotide
guuagcaauggccaugcaa

SEQ ID NO: 1210580 - RNA, 19 nt, Artificial Sequence
  Description of Artificial Sequence: Synthetic oligonucleotide
gaugauaucaacgcacagu

SEQ ID NO: 1210581 - RNA, 19 nt, Artificial Sequence
  Description of Artificial Sequence: Synthetic oligonucleotide
cuauuggcagauuccaaca

SEQ ID NO: 1210582 - RNA, 19 nt, Artificial Sequence
  Description of Artificial Sequence: Synthetic oligonucleotide
ucacuaccuaaugaaagaa

SEQ ID NO: 1210583 - RNA, 19 nt, Artificial Sequence
  Description of Artificial Sequence: Synthetic oligonucleotide
uuccucgugccgaagucug

SEQ ID NO: 1210584 - RNA, 19 nt, Artificial Sequence
  Description of Artificial Sequence: Synthetic oligonucleotide
aacaagugaggggugugca

SEQ ID NO: 1210585 - RNA, 19 nt, Artificial Sequence
  Description of Artificial Sequence: Synthetic oligonucleotide
aauaaccauuaacucucuu

SEQ ID NO: 1210586 - RNA, 19 nt, Artificial Sequence
  Description of Artificial Sequence: Synthetic oligonucleotide
aagugaggggugugcaaca

SEQ ID NO: 1210587 - RNA, 19 nt, Artificial Sequence
  Description of Artificial Sequence: Synthetic oligonucleotide
aaccauuaacucucuucau

SEQ ID NO: 1210588 - RNA, 19 nt, Artificial Sequence
  Description of Artificial Sequence: Synthetic oligonucleotide
gagcauuuguugcuggcca

SEQ ID NO: 1210589 - RNA, 19 nt, Artificial Sequence
  Description of Artificial Sequence: Synthetic oligonucleotide
ucgcugucgccuuagugca

SEQ ID NO: 1210590 - RNA, 19 nt, Artificial Sequence
  Description of Artificial Sequence: Synthetic oligonucleotide
cacagugaaugugugcugc

SEQ ID NO: 1210591 - RNA, 19 nt, Artificial Sequence
  Description of Artificial Sequence: Synthetic oligonucleotide
auaaaucccuccaaaccca

SEQ ID NO: 1210592 - RNA, 19 nt, Artificial Sequence
  Description of Artificial Sequence: Synthetic oligonucleotide
acguuuaggagggaucgag

SEQ ID NO: 1210593 - RNA, 19 nt, Artificial Sequence
  Description of Artificial Sequence: Synthetic oligonucleotide
augcaaucuccagacacag

SEQ ID NO: 1210594 - RNA, 19 nt, Artificial Sequence
  Description of Artificial Sequence: Synthetic oligonucleotide
uccuguauaguggucucca

SEQ ID NO: 1210595 - RNA, 19 nt, Artificial Sequence
  Description of Artificial Sequence: Synthetic oligonucleotide
uucggagggccucuugcug

SEQ ID NO: 1210596 - RNA, 19 nt, Artificial Sequence
  Description of Artificial Sequence: Synthetic oligonucleotide
agugaaugugugcugccaa

SEQ ID NO: 1210597 - RNA, 19 nt, Artificial Sequence
  Description of Artificial Sequence: Synthetic oligonucleotide
aaguaaccugcuauuggca

SEQ ID NO: 1210598 - RNA, 19 nt, Artificial Sequence
  Description of Artificial Sequence: Synthetic oligonucleotide
ccuuagugcaaucucuugc

SEQ ID NO: 1210599 - RNA, 19 nt, Artificial Sequence
  Description of Artificial Sequence: Synthetic oligonucleotide
uccuuucuucagaaagaac

SEQ ID NO: 1210600 - RNA, 19 nt, Artificial Sequence
  Description of Artificial Sequence: Synthetic oligonucleotide
aucaacgcacagugaaugu

SEQ ID NO: 1210601 - RNA, 19 nt, Artificial Sequence
  Description of Artificial Sequence: Synthetic oligonucleotide
caauaucagcccugcuggg

SEQ ID NO: 1210602 - RNA, 19 nt, Artificial Sequence
  Description of Artificial Sequence: Synthetic oligonucleotide
aggaaaauuagaagucccu

SEQ ID NO: 1210603 - RNA, 19 nt, Artificial Sequence
  Description of Artificial Sequence: Synthetic oligonucleotide
cauguuguuguauuagacu

SEQ ID NO: 1210604 - RNA, 19 nt, Artificial Sequence
  Description of Artificial Sequence: Synthetic oligonucleotide
caugcaaucuccagacaca

SEQ ID NO: 1210605 - RNA, 19 nt, Artificial Sequence
  Description of Artificial Sequence: Synthetic oligonucleotide
ucgugccgaagucuggcug

SEQ ID NO: 1210606 - RNA, 19 nt, Artificial Sequence
  Description of Artificial Sequence: Synthetic oligonucleotide
aagucacuaccuaaugaaa

SEQ ID NO: 1210607 - RNA, 19 nt, Artificial Sequence
  Description of Artificial Sequence: Synthetic oligonucleotide
ugccucuggcguaucagcu

SEQ ID NO: 1210608 - RNA, 19 nt, Artificial Sequence
  Description of Artificial Sequence: Synthetic oligonucleotide
agcaaaaguuuaucccuau

SEQ ID NO: 1210609 - RNA, 19 nt, Artificial Sequence
  Description of Artificial Sequence: Synthetic oligonucleotide
uccuaguccuuugaaguaa

SEQ ID NO: 1210610 - RNA, 19 nt, Artificial Sequence
  Description of Artificial Sequence: Synthetic oligonucleotide
caagugaggggugugcaac

SEQ ID NO: 1210611 - RNA, 19 nt, Artificial Sequence
  Description of Artificial Sequence: Synthetic oligonucleotide
ugcuauuggcagauuccaa

SEQ ID NO: 1210612 - RNA, 19 nt, Artificial Sequence
  Description of Artificial Sequence: Synthetic oligonucleotide
cucaccaacagugaucuaa

SEQ ID NO: 1210613 - RNA, 19 nt, Artificial Sequence
  Description of Artificial Sequence: Synthetic oligonucleotide
uuggacacgaggggcuagg

SEQ ID NO: 1210614 - RNA, 19 nt, Artificial Sequence
  Description of Artificial Sequence: Synthetic oligonucleotide
aguuuguagcagucucugu

SEQ ID NO: 1210615 - RNA, 19 nt, Artificial Sequence
  Description of Artificial Sequence: Synthetic oligonucleotide
guagaacucagcuugcuuu

SEQ ID NO: 1210616 - RNA, 19 nt, Artificial Sequence
  Description of Artificial Sequence: Synthetic oligonucleotide
agcaauggccaugcaaucu

SEQ ID NO: 1210617 - RNA, 19 nt, Artificial Sequence
  Description of Artificial Sequence: Synthetic oligonucleotide
guugacccaaguugaagaa

SEQ ID NO: 1210618 - RNA, 19 nt, Artificial Sequence
  Description of Artificial Sequence: Synthetic oligonucleotide
uccaguaagguuggaguau

SEQ ID NO: 1210619 - RNA, 19 nt, Artificial Sequence
  Description of Artificial Sequence: Synthetic oligonucleotide
cugaggugcucaccaacag

SEQ ID NO: 1210620 - RNA, 19 nt, Artificial Sequence
  Description of Artificial Sequence: Synthetic oligonucleotide
guaaccugcuauuggcaga

SEQ ID NO: 1210621 - RNA, 19 nt, Artificial Sequence
  Description of Artificial Sequence: Synthetic oligonucleotide
uggcaauagugaagucacc

SEQ ID NO: 1210622 - RNA, 19 nt, Artificial Sequence
  Description of Artificial Sequence: Synthetic oligonucleotide
cuguauaguggucuccaca

SEQ ID NO: 1210623 - RNA, 19 nt, Artificial Sequence
  Description of Artificial Sequence: Synthetic oligonucleotide
ugaaugugugcugccaaua

SEQ ID NO: 1210624 - RNA, 19 nt, Artificial Sequence
  Description of Artificial Sequence: Synthetic oligonucleotide
uccucgugccgaagucugg

SEQ ID NO: 1210625 - RNA, 19 nt, Artificial Sequence
  Description of Artificial Sequence: Synthetic oligonucleotide
gauagggagaguggugauc

SEQ ID NO: 1210626 - RNA, 19 nt, Artificial Sequence
  Description of Artificial Sequence: Synthetic oligonucleotide
cuguugacccaaguugaag

SEQ ID NO: 1210627 - RNA, 19 nt, Artificial Sequence
  Description of Artificial Sequence: Synthetic oligonucleotide
ccgaguugaaauuacacaa

SEQ ID NO: 1210628 - RNA, 19 nt, Artificial Sequence
  Description of Artificial Sequence: Synthetic oligonucleotide
aagugacaagagaaaguaa

SEQ ID NO: 1210629 - RNA, 19 nt, Artificial Sequence
  Description of Artificial Sequence: Synthetic oligonucleotide
caaucucuugcucccgcug

SEQ ID NO: 1210630 - RNA, 19 nt, Artificial Sequence
  Description of Artificial Sequence: Synthetic oligonucleotide
gagaaaguaaccugcuauu

SEQ ID NO: 1210631 - RNA, 19 nt, Artificial Sequence
  Description of Artificial Sequence: Synthetic oligonucleotide
aggguagaacucagcuugc

SEQ ID NO: 1210632 - RNA, 19 nt, Artificial Sequence
  Description of Artificial Sequence: Synthetic oligonucleotide
gacccucugccuguacugg

SEQ ID NO: 1210633 - RNA, 19 nt, Artificial Sequence
  Description of Artificial Sequence: Synthetic oligonucleotide
aguugaaauuacacaaauu

SEQ ID NO: 1210634 - RNA, 19 nt, Artificial Sequence
  Description of Artificial Sequence: Synthetic oligonucleotide
uagcagucucuguauaguu

SEQ ID NO: 1210635 - RNA, 19 nt, Artificial Sequence
  Description of Artificial Sequence: Synthetic oligonucleotide
ggcaauagugaagucacca

SEQ ID NO: 1210636 - RNA, 19 nt, Artificial Sequence
  Description of Artificial Sequence: Synthetic oligonucleotide
gucgccuuagugcaaucuc

SEQ ID NO: 1210637 - RNA, 19 nt, Artificial Sequence
  Description of Artificial Sequence: Synthetic oligonucleotide
gguccuaguccuuugaagu

SEQ ID NO: 1210638 - RNA, 19 nt, Artificial Sequence
  Description of Artificial Sequence: Synthetic oligonucleotide
uuccguuccucuuccucgu

SEQ ID NO: 1210639 - RNA, 19 nt, Artificial Sequence
  Description of Artificial Sequence: Synthetic oligonucleotide
cuugcucccgcuggcgucg

SEQ ID NO: 1210640 - RNA, 19 nt, Artificial Sequence
  Description of Artificial Sequence: Synthetic oligonucleotide
ugucgccuuagugcaaucu

SEQ ID NO: 1210641 - RNA, 19 nt, Artificial Sequence
  Description of Artificial Sequence: Synthetic oligonucleotide
aagggacgugacauguugu

SEQ ID NO: 1210642 - RNA, 19 nt, Artificial Sequence
  Description of Artificial Sequence: Synthetic oligonucleotide
acaagugaggggugugcaa

SEQ ID NO: 1210643 - RNA, 19 nt, Artificial Sequence
  Description of Artificial Sequence: Synthetic oligonucleotide
auaguggucuccacacaug

SEQ ID NO: 1210644 - RNA, 19 nt, Artificial Sequence
  Description of Artificial Sequence: Synthetic oligonucleotide
gaaugugugcugccaauau

SEQ ID NO: 1210645 - RNA, 19 nt, Artificial Sequence
  Description of Artificial Sequence: Synthetic oligonucleotide
guuaagacccucugccugu

SEQ ID NO: 1210646 - RNA, 19 nt, Artificial Sequence
  Description of Artificial Sequence: Synthetic oligonucleotide
uguuccugcccaugccuuc

SEQ ID NO: 1210647 - RNA, 19 nt, Artificial Sequence
  Description of Artificial Sequence: Synthetic oligonucleotide
agucuacaacccacacccc

SEQ ID NO: 1210648 - RNA, 19 nt, Artificial Sequence
  Description of Artificial Sequence: Synthetic oligonucleotide
agcauuuguugcuggccaa

SEQ ID NO: 1210649 - RNA, 19 nt, Artificial Sequence
  Description of Artificial Sequence: Synthetic oligonucleotide
aauuggacacgaggggcua

SEQ ID NO: 1210650 - RNA, 19 nt, Artificial Sequence
  Description of Artificial Sequence: Synthetic oligonucleotide
agggacgugacauguuguu

SEQ ID NO: 1210651 - RNA, 19 nt, Artificial Sequence
  Description of Artificial Sequence: Synthetic oligonucleotide
ccaaucuucuaagagcuuc

SEQ ID NO: 1210652 - RNA, 19 nt, Artificial Sequence
  Description of Artificial Sequence: Synthetic oligonucleotide
guauaguggucuccacaca

SEQ ID NO: 1210653 - RNA, 19 nt, Artificial Sequence
  Description of Artificial Sequence: Synthetic oligonucleotide
cugccaauaucagcccugc

SEQ ID NO: 1210654 - RNA, 19 nt, Artificial Sequence
  Description of Artificial Sequence: Synthetic oligonucleotide
auaucaacgcacagugaau

SEQ ID NO: 1210655 - RNA, 19 nt, Artificial Sequence
  Description of Artificial Sequence: Synthetic oligonucleotide
ggagcauuuguugcuggcc

SEQ ID NO: 1210656 - RNA, 19 nt, Artificial Sequence
  Description of Artificial Sequence: Synthetic oligonucleotide
gaacucagcuugcuuugaa

SEQ ID NO: 1210657 - RNA, 19 nt, Artificial Sequence
  Description of Artificial Sequence: Synthetic oligonucleotide
cuuaaacgagacaaauuuu

SEQ ID NO: 1210658 - RNA, 19 nt, Artificial Sequence
  Description of Artificial Sequence: Synthetic oligonucleotide
gcuuuuaucggaagcaaaa

SEQ ID NO: 1210659 - RNA, 19 nt, Artificial Sequence
  Description of Artificial Sequence: Synthetic oligonucleotide
guggugauccaaaauaaau

SEQ ID NO: 1210660 - RNA, 19 nt, Artificial Sequence
  Description of Artificial Sequence: Synthetic oligonucleotide
cuggggagcaauuccaacu

SEQ ID NO: 1210661 - RNA, 19 nt, Artificial Sequence
  Description of Artificial Sequence: Synthetic oligonucleotide
aucccuauccgaguugaaa

SEQ ID NO: 1210662 - RNA, 19 nt, Artificial Sequence
  Description of Artificial Sequence: Synthetic oligonucleotide
gugacauguuguuguauua

SEQ ID NO: 1210663 - RNA, 19 nt, Artificial Sequence
  Description of Artificial Sequence: Synthetic oligonucleotide
ccagucuacaacccacacc

SEQ ID NO: 1210664 - RNA, 19 nt, Artificial Sequence
  Description of Artificial Sequence: Synthetic oligonucleotide
uccugcuuucguagcaguu

SEQ ID NO: 1210665 - RNA, 19 nt, Artificial Sequence
  Description of Artificial Sequence: Synthetic oligonucleotide
gaucgaggcaagaagggau

SEQ ID NO: 1210666 - RNA, 19 nt, Artificial Sequence
  Description of Artificial Sequence: Synthetic oligonucleotide
agaugccucuuaaacgaga

SEQ ID NO: 1210667 - RNA, 19 nt, Artificial Sequence
  Description of Artificial Sequence: Synthetic oligonucleotide
aaaagggacgugacauguu

SEQ ID NO: 1210668 - RNA, 19 nt, Artificial Sequence
  Description of Artificial Sequence: Synthetic oligonucleotide
gucuacaacccacaccccu

SEQ ID NO: 1210669 - RNA, 19 nt, Artificial Sequence
  Description of Artificial Sequence: Synthetic oligonucleotide
ccucuggcguaucagcucc

SEQ ID NO: 1210670 - RNA, 19 nt, Artificial Sequence
  Description of Artificial Sequence: Synthetic oligonucleotide
guaugucaggguagaacuc

SEQ ID NO: 1210671 - RNA, 19 nt, Artificial Sequence
  Description of Artificial Sequence: Synthetic oligonucleotide
auuggacacgaggggcuag

SEQ ID NO: 1210672 - RNA, 19 nt, Artificial Sequence
  Description of Artificial Sequence: Synthetic oligonucleotide
agcuuuuaucggaagcaaa

SEQ ID NO: 1210673 - RNA, 19 nt, Artificial Sequence
  Description of Artificial Sequence: Synthetic oligonucleotide
ggacgugacauguuguugu

SEQ ID NO: 1210674 - RNA, 19 nt, Artificial Sequence
  Description of Artificial Sequence: Synthetic oligonucleotide
gcaaaaguuuaucccuauc

SEQ ID NO: 1210675 - RNA, 19 nt, Artificial Sequence
  Description of Artificial Sequence: Synthetic oligonucleotide
cuccuguauaguggucucc

SEQ ID NO: 1210676 - RNA, 19 nt, Artificial Sequence
  Description of Artificial Sequence: Synthetic oligonucleotide
cuacaacccacaccccuca

SEQ ID NO: 1210677 - RNA, 19 nt, Artificial Sequence
  Description of Artificial Sequence: Synthetic oligonucleotide
cucugaggaacagaugaaa

SEQ ID NO: 1210678 - RNA, 19 nt, Artificial Sequence
  Description of Artificial Sequence: Synthetic oligonucleotide
agaacucagcuugcuuuga

SEQ ID NO: 1210679 - RNA, 19 nt, Artificial Sequence
  Description of Artificial Sequence: Synthetic oligonucleotide
uaucccuauccgaguugaa

SEQ ID NO: 1210680 - RNA, 19 nt, Artificial Sequence
  Description of Artificial Sequence: Synthetic oligonucleotide
guuuaucccuauccgaguu

SEQ ID NO: 1210681 - RNA, 19 nt, Artificial Sequence
  Description of Artificial Sequence: Synthetic oligonucleotide
cguuuaggagggaucgagg

SEQ ID NO: 1210682 - RNA, 19 nt, Artificial Sequence
  Description of Artificial Sequence: Synthetic oligonucleotide
caacugccaccuccaagac

SEQ ID NO: 1210683 - RNA, 19 nt, Artificial Sequence
  Description of Artificial Sequence: Synthetic oligonucleotide
cagaagggcccaaaacaaa

SEQ ID NO: 1210684 - RNA, 19 nt, Artificial Sequence
  Description of Artificial Sequence: Synthetic oligonucleotide
gacgugacauguuguugua

SEQ ID NO: 1210685 - RNA, 19 nt, Artificial Sequence
  Description of Artificial Sequence: Synthetic oligonucleotide
gggccucugaugcaauccc

SEQ ID NO: 1210686 - RNA, 19 nt, Artificial Sequence
  Description of Artificial Sequence: Synthetic oligonucleotide
ugccuguacuggggcaggg

SEQ ID NO: 1210687 - RNA, 19 nt, Artificial Sequence
  Description of Artificial Sequence: Synthetic oligonucleotide
cucuuaaacgagacaaauu

SEQ ID NO: 1210688 - RNA, 19 nt, Artificial Sequence
  Description of Artificial Sequence: Synthetic oligonucleotide
guagcagucucuguauagu

SEQ ID NO: 1210689 - RNA, 19 nt, Artificial Sequence
  Description of Artificial Sequence: Synthetic oligonucleotide
aguuagcaauggccaugca

SEQ ID NO: 1210690 - RNA, 19 nt, Artificial Sequence
  Description of Artificial Sequence: Synthetic oligonucleotide
ggagcaauuccaacugcca

SEQ ID NO: 1210691 - RNA, 19 nt, Artificial Sequence
  Description of Artificial Sequence: Synthetic oligonucleotide
ccaacacacuuucaggaga

SEQ ID NO: 1210692 - RNA, 19 nt, Artificial Sequence
  Description of Artificial Sequence: Synthetic oligonucleotide
uguacacguuuaggaggga

SEQ ID NO: 1210693 - RNA, 19 nt, Artificial Sequence
  Description of Artificial Sequence: Synthetic oligonucleotide
uuaagacccucugccugua

SEQ ID NO: 1210694 - RNA, 19 nt, Artificial Sequence
  Description of Artificial Sequence: Synthetic oligonucleotide
cuaguccuuugaaguaaaa

SEQ ID NO: 1210695 - RNA, 19 nt, Artificial Sequence
  Description of Artificial Sequence: Synthetic oligonucleotide
aucgaggcaagaagggaua

SEQ ID NO: 1210696 - RNA, 19 nt, Artificial Sequence
  Description of Artificial Sequence: Synthetic oligonucleotide
acuguugacccaaguugaa

SEQ ID NO: 1210697 - RNA, 19 nt, Artificial Sequence
  Description of Artificial Sequence: Synthetic oligonucleotide
ugcuuucguagcaguucuu

SEQ ID NO: 1210698 - RNA, 19 nt, Artificial Sequence
  Description of Artificial Sequence: Synthetic oligonucleotide
cuggcguaucagcuccuuc

SEQ ID NO: 1210699 - RNA, 19 nt, Artificial Sequence
  Description of Artificial Sequence: Synthetic oligonucleotide
gugaggggugugcaacauc

SEQ ID NO: 1210700 - RNA, 19 nt, Artificial Sequence
  Description of Artificial Sequence: Synthetic oligonucleotide
ccagcuuuuaucggaagca

SEQ ID NO: 1210701 - RNA, 19 nt, Artificial Sequence
  Description of Artificial Sequence: Synthetic oligonucleotide
cugcuuucguagcaguucu

SEQ ID NO: 1210702 - RNA, 19 nt, Artificial Sequence
  Description of Artificial Sequence: Synthetic oligonucleotide
ggagaguggugauccaaaa

SEQ ID NO: 1210703 - RNA, 19 nt, Artificial Sequence
  Description of Artificial Sequence: Synthetic oligonucleotide
cagccgacgcugugcuucc

SEQ ID NO: 1210704 - RNA, 19 nt, Artificial Sequence
  Description of Artificial Sequence: Synthetic oligonucleotide
ccaguaagguuggaguaug

SEQ ID NO: 1210705 - RNA, 19 nt, Artificial Sequence
  Description of Artificial Sequence: Synthetic oligonucleotide
cccaaacugcucucagagc

SEQ ID NO: 1210706 - RNA, 19 nt, Artificial Sequence
  Description of Artificial Sequence: Synthetic oligonucleotide
gcguaucagcuccuucugc

SEQ ID NO: 1210707 - RNA, 19 nt, Artificial Sequence
  Description of Artificial Sequence: Synthetic oligonucleotide
cucuggcaauagugaaguc

SEQ ID NO: 1210708 - RNA, 19 nt, Artificial Sequence
  Description of Artificial Sequence: Synthetic oligonucleotide
ccugcuuucguagcaguuc

SEQ ID NO: 1210709 - RNA, 19 nt, Artificial Sequence
  Description of Artificial Sequence: Synthetic oligonucleotide
gcuggggagcaauuccaac

SEQ ID NO: 1210710 - RNA, 19 nt, Artificial Sequence
  Description of Artificial Sequence: Synthetic oligonucleotide
cuucaugacugcaccaguu

SEQ ID NO: 1210711 - RNA, 19 nt, Artificial Sequence
  Description of Artificial Sequence: Synthetic oligonucleotide
ggaucgaggcaagaaggga

SEQ ID NO: 1210712 - RNA, 19 nt, Artificial Sequence
  Description of Artificial Sequence: Synthetic oligonucleotide
cgugccgaagucuggcugc

SEQ ID NO: 1210713 - RNA, 19 nt, Artificial Sequence
  Description of Artificial Sequence: Synthetic oligonucleotide
gucagguuuuguacguucu

SEQ ID NO: 1210714 - RNA, 19 nt, Artificial Sequence
  Description of Artificial Sequence: Synthetic oligonucleotide
cugguccuaguccuuugaa

SEQ ID NO: 1210715 - RNA, 19 nt, Artificial Sequence
  Description of Artificial Sequence: Synthetic oligonucleotide
ggccaaugucuaauaacca

SEQ ID NO: 1210716 - RNA, 19 nt, Artificial Sequence
  Description of Artificial Sequence: Synthetic oligonucleotide
acgugacauguuguuguau

SEQ ID NO: 1210717 - RNA, 19 nt, Artificial Sequence
  Description of Artificial Sequence: Synthetic oligonucleotide
cucugccuguacuggggca

SEQ ID NO: 1210718 - RNA, 19 nt, Artificial Sequence
  Description of Artificial Sequence: Synthetic oligonucleotide
ccgacgcugugcuuccucc

SEQ ID NO: 1210719 - RNA, 19 nt, Artificial Sequence
  Description of Artificial Sequence: Synthetic oligonucleotide
gcuggccaaugucuaauaa

SEQ ID NO: 1210720 - RNA, 19 nt, Artificial Sequence
  Description of Artificial Sequence: Synthetic oligonucleotide
ucuggcguaucagcuccuu

SEQ ID NO: 1210721 - RNA, 19 nt, Artificial Sequence
  Description of Artificial Sequence: Synthetic oligonucleotide
ggagggaucgaggcaagaa

SEQ ID NO: 1210722 - RNA, 19 nt, Artificial Sequence
  Description of Artificial Sequence: Synthetic oligonucleotide
cgaguugaaauuacacaaa

SEQ ID NO: 1210723 - RNA, 19 nt, Artificial Sequence
  Description of Artificial Sequence: Synthetic oligonucleotide
ccuccuguauaguggucuc

SEQ ID NO: 1210724 - RNA, 19 nt, Artificial Sequence
  Description of Artificial Sequence: Synthetic oligonucleotide
ccucgugccgaagucuggc

SEQ ID NO: 1210725 - RNA, 19 nt, Artificial Sequence
  Description of Artificial Sequence: Synthetic oligonucleotide
guacacguuuaggagggau

SEQ ID NO: 1210726 - RNA, 19 nt, Artificial Sequence
  Description of Artificial Sequence: Synthetic oligonucleotide
gccucuggcguaucagcuc

SEQ ID NO: 1210727 - RNA, 19 nt, Artificial Sequence
  Description of Artificial Sequence: Synthetic oligonucleotide
cgagacaaauuuucacaga

SEQ ID NO: 1210728 - RNA, 19 nt, Artificial Sequence
  Description of Artificial Sequence: Synthetic oligonucleotide
ccauaggguuuccuuuguc

SEQ ID NO: 1210729 - RNA, 19 nt, Artificial Sequence
  Description of Artificial Sequence: Synthetic oligonucleotide
cugcuuccgccuuucuucu

SEQ ID NO: 1210730 - RNA, 19 nt, Artificial Sequence
  Description of Artificial Sequence: Synthetic oligonucleotide
ggacacgaggggcuaggaa

SEQ ID NO: 1210731 - RNA, 19 nt, Artificial Sequence
  Description of Artificial Sequence: Synthetic oligonucleotide
ccuaguccuuugaaguaaa

SEQ ID NO: 1210732 - RNA, 19 nt, Artificial Sequence
  Description of Artificial Sequence: Synthetic oligonucleotide
caggccauaggguuuccuu

SEQ ID NO: 1210733 - RNA, 19 nt, Artificial Sequence
  Description of Artificial Sequence: Synthetic oligonucleotide
caguaagguuggaguaugu

SEQ ID NO: 1210734 - RNA, 19 nt, Artificial Sequence
  Description of Artificial Sequence: Synthetic oligonucleotide
ggcccaaaacaaacugguc

SEQ ID NO: 1210735 - RNA, 19 nt, Artificial Sequence
  Description of Artificial Sequence: Synthetic oligonucleotide
cacguuuaggagggaucga

SEQ ID NO: 1210736 - RNA, 19 nt, Artificial Sequence
  Description of Artificial Sequence: Synthetic oligonucleotide
cuuccucgugccgaagucu

SEQ ID NO: 1210737 - RNA, 19 nt, Artificial Sequence
  Description of Artificial Sequence: Synthetic oligonucleotide
ccuauccgaguugaaauua

SEQ ID NO: 1210738 - RNA, 19 nt, Artificial Sequence
  Description of Artificial Sequence: Synthetic oligonucleotide
cagguuuuguacguucuuu

SEQ ID NO: 1210739 - RNA, 19 nt, Artificial Sequence
  Description of Artificial Sequence: Synthetic oligonucleotide
cccgggcccauuuggcagc

SEQ ID NO: 1210740 - RNA, 19 nt, Artificial Sequence
  Description of Artificial Sequence: Synthetic oligonucleotide
ugccgaagucuggcugccu

SEQ ID NO: 1210741 - RNA, 19 nt, Artificial Sequence
  Description of Artificial Sequence: Synthetic oligonucleotide
gccucuuaaacgagacaaa

SEQ ID NO: 1210742 - RNA, 19 nt, Artificial Sequence
  Description of Artificial Sequence: Synthetic oligonucleotide
gccaugcaaucuccagaca

SEQ ID NO: 1210743 - RNA, 19 nt, Artificial Sequence
  Description of Artificial Sequence: Synthetic oligonucleotide
ccaugccuucaccccacug

SEQ ID NO: 1210744 - RNA, 19 nt, Artificial Sequence
  Description of Artificial Sequence: Synthetic oligonucleotide
ccucuuaaacgagacaaau

SEQ ID NO: 1210745 - RNA, 19 nt, Artificial Sequence
  Description of Artificial Sequence: Synthetic oligonucleotide
gccucugaugcaaucccaa

SEQ ID NO: 1210746 - RNA, 19 nt, Artificial Sequence
  Description of Artificial Sequence: Synthetic oligonucleotide
cucgugccgaagucuggcu

SEQ ID NO: 1210747 - RNA, 19 nt, Artificial Sequence
  Description of Artificial Sequence: Synthetic oligonucleotide
uccagccgacgcugugcuu

SEQ ID NO: 1210748 - RNA, 19 nt, Artificial Sequence
  Description of Artificial Sequence: Synthetic oligonucleotide
ggaguaugucaggguagaa

SEQ ID NO: 1210749 - RNA, 19 nt, Artificial Sequence
  Description of Artificial Sequence: Synthetic oligonucleotide
gccauaggguuuccuuugu

SEQ ID NO: 1210750 - RNA, 19 nt, Artificial Sequence
  Description of Artificial Sequence: Synthetic oligonucleotide
cgugacauguuguuguauu

SEQ ID NO: 1210751 - RNA, 19 nt, Artificial Sequence
  Description of Artificial Sequence: Synthetic oligonucleotide
ugcucccgcuggcgucgaa

SEQ ID NO: 1210752 - RNA, 19 nt, Artificial Sequence
  Description of Artificial Sequence: Synthetic oligonucleotide
cucuggcguaucagcuccu

SEQ ID NO: 1210753 - RNA, 19 nt, Artificial Sequence
  Description of Artificial Sequence: Synthetic oligonucleotide
gcauuuguugcuggccaau

SEQ ID NO: 1210754 - RNA, 19 nt, Artificial Sequence
  Description of Artificial Sequence: Synthetic oligonucleotide
cccuauccgaguugaaauu

SEQ ID NO: 1210755 - RNA, 19 nt, Artificial Sequence
  Description of Artificial Sequence: Synthetic oligonucleotide
gcugucgccuuagugcaau

SEQ ID NO: 1210756 - RNA, 19 nt, Artificial Sequence
  Description of Artificial Sequence: Synthetic oligonucleotide
cugccaccuccaagacaaa

SEQ ID NO: 1210757 - RNA, 19 nt, Artificial Sequence
  Description of Artificial Sequence: Synthetic oligonucleotide
cugcauccuccuguauagu

SEQ ID NO: 1210758 - RNA, 19 nt, Artificial Sequence
  Description of Artificial Sequence: Synthetic oligonucleotide
agccgacgcugugcuuccu

SEQ ID NO: 1210759 - RNA, 19 nt, Artificial Sequence
  Description of Artificial Sequence: Synthetic oligonucleotide
gcucaccaacagugaucua

SEQ ID NO: 1210760 - RNA, 19 nt, Artificial Sequence
  Description of Artificial Sequence: Synthetic oligonucleotide
cccaugccuucaccccacu

SEQ ID NO: 1210761 - RNA, 19 nt, Artificial Sequence
  Description of Artificial Sequence: Synthetic oligonucleotide
ccgggcccauuuggcagcu

SEQ ID NO: 1210762 - RNA, 19 nt, Artificial Sequence
  Description of Artificial Sequence: Synthetic oligonucleotide
cgggcccauuuggcagcuu

SEQ ID NO: 1210763 - RNA, 19 nt, Artificial Sequence
  Description of Artificial Sequence: Synthetic oligonucleotide
aaguacauugccucaagcc

SEQ ID NO: 1210764 - RNA, 19 nt, Artificial Sequence
  Description of Artificial Sequence: Synthetic oligonucleotide
aauucacccaugcugggcc

SEQ ID NO: 1210765 - RNA, 19 nt, Artificial Sequence
  Description of Artificial Sequence: Synthetic oligonucleotide
aguauauaggaacaugggg

SEQ ID NO: 1210766 - RNA, 19 nt, Artificial Sequence
  Description of Artificial Sequence: Synthetic oligonucleotide
aagugguaaacccauguuc

SEQ ID NO: 1210767 - RNA, 19 nt, Artificial Sequence
  Description of Artificial Sequence: Synthetic oligonucleotide
cuagauagguguuugaagc

SEQ ID NO: 1210768 - RNA, 19 nt, Artificial Sequence
  Description of Artificial Sequence: Synthetic oligonucleotide
ugaaguacaagcguaacag

SEQ ID NO: 1210769 - RNA, 19 nt, Artificial Sequence
  Description of Artificial Sequence: Synthetic oligonucleotide
acaacaguggaacucuugc

SEQ ID NO: 1210770 - RNA, 19 nt, Artificial Sequence
  Description of Artificial Sequence: Synthetic oligonucleotide
auuagucacacccuugugg

SEQ ID NO: 1210771 - RNA, 19 nt, Artificial Sequence
  Description of Artificial Sequence: Synthetic oligonucleotide
gaucuugccacuccuaugg

SEQ ID NO: 1210772 - RNA, 19 nt, Artificial Sequence
  Description of Artificial Sequence: Synthetic oligonucleotide
uguaguaucaaccccggca

SEQ ID NO: 1210773 - RNA, 19 nt, Artificial Sequence
  Description of Artificial Sequence: Synthetic oligonucleotide
augaaagguaccuagacca

SEQ ID NO: 1210774 - RNA, 19 nt, Artificial Sequence
  Description of Artificial Sequence: Synthetic oligonucleotide
gccucuauaagucagaagg

SEQ ID NO: 1210775 - RNA, 19 nt, Artificial Sequence
  Description of Artificial Sequence: Synthetic oligonucleotide
aaggacggcauauacagug

SEQ ID NO: 1210776 - RNA, 19 nt, Artificial Sequence
  Description of Artificial Sequence: Synthetic oligonucleotide
uugagauucuccuugagcu

SEQ ID NO: 1210777 - RNA, 19 nt, Artificial Sequence
  Description of Artificial Sequence: Synthetic oligonucleotide
accuagaccacccagaaug

SEQ ID NO: 1210778 - RNA, 19 nt, Artificial Sequence
  Description of Artificial Sequence: Synthetic oligonucleotide
aggaacauggggcauuugc

SEQ ID NO: 1210779 - RNA, 19 nt, Artificial Sequence
  Description of Artificial Sequence: Synthetic oligonucleotide
uagacauaggccaggaugc

SEQ ID NO: 1210780 - RNA, 19 nt, Artificial Sequence
  Description of Artificial Sequence: Synthetic oligonucleotide
guauauaggaacauggggc

SEQ ID NO: 1210781 - RNA, 19 nt, Artificial Sequence
  Description of Artificial Sequence: Synthetic oligonucleotide
aaucuaaacccaauucuac

SEQ ID NO: 1210782 - RNA, 19 nt, Artificial Sequence
  Description of Artificial Sequence: Synthetic oligonucleotide
uauauaggaacauggggca

SEQ ID NO: 1210783 - RNA, 19 nt, Artificial Sequence
  Description of Artificial Sequence: Synthetic oligonucleotide
uucuguauaagcagcaggu

SEQ ID NO: 1210784 - RNA, 19 nt, Artificial Sequence
  Description of Artificial Sequence: Synthetic oligonucleotide
guagacauaggccaggaug

SEQ ID NO: 1210785 - RNA, 19 nt, Artificial Sequence
  Description of Artificial Sequence: Synthetic oligonucleotide
acaguauauaggaacaugg

SEQ ID NO: 1210786 - RNA, 19 nt, Artificial Sequence
  Description of Artificial Sequence: Synthetic oligonucleotide
augcaaaucacagcuaccc

SEQ ID NO: 1210787 - RNA, 19 nt, Artificial Sequence
  Description of Artificial Sequence: Synthetic oligonucleotide
aagaccuguacacaggcga

SEQ ID NO: 1210788 - RNA, 19 nt, Artificial Sequence
  Description of Artificial Sequence: Synthetic oligonucleotide
uuagucacacccuuguggc

SEQ ID NO: 1210789 - RNA, 19 nt, Artificial Sequence
  Description of Artificial Sequence: Synthetic oligonucleotide
aagcguaacagguuccguc

SEQ ID NO: 1210790 - RNA, 19 nt, Artificial Sequence
  Description of Artificial Sequence: Synthetic oligonucleotide
cuugccacuccuauggugg

SEQ ID NO: 1210791 - RNA, 19 nt, Artificial Sequence
  Description of Artificial Sequence: Synthetic oligonucleotide
aguacauugccucaagccu

SEQ ID NO: 1210792 - RNA, 19 nt, Artificial Sequence
  Description of Artificial Sequence: Synthetic oligonucleotide
agcuuacugauacagccac

SEQ ID NO: 1210793 - RNA, 19 nt, Artificial Sequence
  Description of Artificial Sequence: Synthetic oligonucleotide
ugaggcuucuguauaagca

SEQ ID NO: 1210794 - RNA, 19 nt, Artificial Sequence
  Description of Artificial Sequence: Synthetic oligonucleotide
caugacaacgccaccagcc

SEQ ID NO: 1210795 - RNA, 19 nt, Artificial Sequence
  Description of Artificial Sequence: Synthetic oligonucleotide
guaggcuguggcuagauag

SEQ ID NO: 1210796 - RNA, 19 nt, Artificial Sequence
  Description of Artificial Sequence: Synthetic oligonucleotide
aaaagucaguggucugccc

SEQ ID NO: 1210797 - RNA, 19 nt, Artificial Sequence
  Description of Artificial Sequence: Synthetic oligonucleotide
uguauaagcagcaggugaa

SEQ ID NO: 1210798 - RNA, 19 nt, Artificial Sequence
  Description of Artificial Sequence: Synthetic oligonucleotide
uguccaaaugcccacugcc

SEQ ID NO: 1210799 - RNA, 19 nt, Artificial Sequence
  Description of Artificial Sequence: Synthetic oligonucleotide
ucacucuugaguaccaaug

SEQ ID NO: 1210800 - RNA, 19 nt, Artificial Sequence
  Description of Artificial Sequence: Synthetic oligonucleotide
aguggucagaaugauuucc

SEQ ID NO: 1210801 - RNA, 19 nt, Artificial Sequence
  Description of Artificial Sequence: Synthetic oligonucleotide
aaagucaguggucugcccu

SEQ ID NO: 1210802 - RNA, 19 nt, Artificial Sequence
  Description of Artificial Sequence: Synthetic oligonucleotide
auggcaugaggacagcuac

SEQ ID NO: 1210803 - RNA, 19 nt, Artificial Sequence
  Description of Artificial Sequence: Synthetic oligonucleotide
aguguuaucagaagugggg

SEQ ID NO: 1210804 - RNA, 19 nt, Artificial Sequence
  Description of Artificial Sequence: Synthetic oligonucleotide
acacaggcgaugccgaugc

SEQ ID NO: 1210805 - RNA, 19 nt, Artificial Sequence
  Description of Artificial Sequence: Synthetic oligonucleotide
acuuuugucaaauaaucua

SEQ ID NO: 1210806 - RNA, 19 nt, Artificial Sequence
  Description of Artificial Sequence: Synthetic oligonucleotide
uucagagauguuccaaaag

SEQ ID NO: 1210807 - RNA, 19 nt, Artificial Sequence
  Description of Artificial Sequence: Synthetic oligonucleotide
acccaauucuaccagguag

SEQ ID NO: 1210808 - RNA, 19 nt, Artificial Sequence
  Description of Artificial Sequence: Synthetic oligonucleotide
guaguaucaaccccggcag

SEQ ID NO: 1210809 - RNA, 19 nt, Artificial Sequence
  Description of Artificial Sequence: Synthetic oligonucleotide
uuacaaagcaggagcaugu

SEQ ID NO: 1210810 - RNA, 19 nt, Artificial Sequence
  Description of Artificial Sequence: Synthetic oligonucleotide
cuauaagucagaaggacca

SEQ ID NO: 1210811 - RNA, 19 nt, Artificial Sequence
  Description of Artificial Sequence: Synthetic oligonucleotide
cuacccaccaugcaagugg

SEQ ID NO: 1210812 - RNA, 19 nt, Artificial Sequence
  Description of Artificial Sequence: Synthetic oligonucleotide
agcggauccauucacuguc

SEQ ID NO: 1210813 - RNA, 19 nt, Artificial Sequence
  Description of Artificial Sequence: Synthetic oligonucleotide
uguuaggagcaagagaagc

SEQ ID NO: 1210814 - RNA, 19 nt, Artificial Sequence
  Description of Artificial Sequence: Synthetic oligonucleotide
cauagugcaaggcuggcag

SEQ ID NO: 1210815 - RNA, 19 nt, Artificial Sequence
  Description of Artificial Sequence: Synthetic oligonucleotide
cuaacucaguaguacuucg

SEQ ID NO: 1210816 - RNA, 19 nt, Artificial Sequence
  Description of Artificial Sequence: Synthetic oligonucleotide
caguauauaggaacauggg

SEQ ID NO: 1210817 - RNA, 19 nt, Artificial Sequence
  Description of Artificial Sequence: Synthetic oligonucleotide
agcguaacagguuccgucg

SEQ ID NO: 1210818 - RNA, 19 nt, Artificial Sequence
  Description of Artificial Sequence: Synthetic oligonucleotide
agcagucuaacucaguagu

SEQ ID NO: 1210819 - RNA, 19 nt, Artificial Sequence
  Description of Artificial Sequence: Synthetic oligonucleotide
uuauugagcaccuguuaca

SEQ ID NO: 1210820 - RNA, 19 nt, Artificial Sequence
  Description of Artificial Sequence: Synthetic oligonucleotide
cuuacugauacagccaccc

SEQ ID NO: 1210821 - RNA, 19 nt, Artificial Sequence
  Description of Artificial Sequence: Synthetic oligonucleotide
uuuugucaaauaaucuaaa

SEQ ID NO: 1210822 - RNA, 19 nt, Artificial Sequence
  Description of Artificial Sequence: Synthetic oligonucleotide
caacacuuaaugcaaauca

SEQ ID NO: 1210823 - RNA, 19 nt, Artificial Sequence
  Description of Artificial Sequence: Synthetic oligonucleotide
acaguguuaucagaagugg

SEQ ID NO: 1210824 - RNA, 19 nt, Artificial Sequence
  Description of Artificial Sequence: Synthetic oligonucleotide
accauguggacaguagugc

SEQ ID NO: 1210825 - RNA, 19 nt, Artificial Sequence
  Description of Artificial Sequence: Synthetic oligonucleotide
ugccccauugcuuuggagc

SEQ ID NO: 1210826 - RNA, 19 nt, Artificial Sequence
  Description of Artificial Sequence: Synthetic oligonucleotide
uagauagguguuugaagcc

SEQ ID NO: 1210827 - RNA, 19 nt, Artificial Sequence
  Description of Artificial Sequence: Synthetic oligonucleotide
gcaagagaagccuggaugg

SEQ ID NO: 1210828 - RNA, 19 nt, Artificial Sequence
  Description of Artificial Sequence: Synthetic oligonucleotide
uacaacaguggauggaaac

SEQ ID NO: 1210829 - RNA, 19 nt, Artificial Sequence
  Description of Artificial Sequence: Synthetic oligonucleotide
cacaguguuaucagaagug

SEQ ID NO: 1210830 - RNA, 19 nt, Artificial Sequence
  Description of Artificial Sequence: Synthetic oligonucleotide
ugggacauagugcaaggcu

SEQ ID NO: 1210831 - RNA, 19 nt, Artificial Sequence
  Description of Artificial Sequence: Synthetic oligonucleotide
aggacagcuaccucucugg

SEQ ID NO: 1210832 - RNA, 19 nt, Artificial Sequence
  Description of Artificial Sequence: Synthetic oligonucleotide
ucagcagucuaacucagua

SEQ ID NO: 1210833 - RNA, 19 nt, Artificial Sequence
  Description of Artificial Sequence: Synthetic oligonucleotide
aggguuacaacaguggaug

SEQ ID NO: 1210834 - RNA, 19 nt, Artificial Sequence
  Description of Artificial Sequence: Synthetic oligonucleotide
uuugaagccagcagacuaa

SEQ ID NO: 1210835 - RNA, 19 nt, Artificial Sequence
  Description of Artificial Sequence: Synthetic oligonucleotide
cuucuacccaccaugcaag

SEQ ID NO: 1210836 - RNA, 19 nt, Artificial Sequence
  Description of Artificial Sequence: Synthetic oligonucleotide
ccuguuacaaagcaggagc

SEQ ID NO: 1210837 - RNA, 19 nt, Artificial Sequence
  Description of Artificial Sequence: Synthetic oligonucleotide
gaacauggggcauuugcac

SEQ ID NO: 1210838 - RNA, 19 nt, Artificial Sequence
  Description of Artificial Sequence: Synthetic oligonucleotide
augaaguacaagcguaaca

SEQ ID NO: 1210839 - RNA, 19 nt, Artificial Sequence
  Description of Artificial Sequence: Synthetic oligonucleotide
aaugacccgcaggugcucc

SEQ ID NO: 1210840 - RNA, 19 nt, Artificial Sequence
  Description of Artificial Sequence: Synthetic oligonucleotide
uaggugaacagcagguacu

SEQ ID NO: 1210841 - RNA, 19 nt, Artificial Sequence
  Description of Artificial Sequence: Synthetic oligonucleotide
ucuacagcauuagucacac

SEQ ID NO: 1210842 - RNA, 19 nt, Artificial Sequence
  Description of Artificial Sequence: Synthetic oligonucleotide
auguccaaaugcccacugc

SEQ ID NO: 1210843 - RNA, 19 nt, Artificial Sequence
  Description of Artificial Sequence: Synthetic oligonucleotide
agucuaacucaguaguacu

SEQ ID NO: 1210844 - RNA, 19 nt, Artificial Sequence
  Description of Artificial Sequence: Synthetic oligonucleotide
acggcauauacagugagug

SEQ ID NO: 1210845 - RNA, 19 nt, Artificial Sequence
  Description of Artificial Sequence: Synthetic oligonucleotide
aguacuucguaguggggug

SEQ ID NO: 1210846 - RNA, 19 nt, Artificial Sequence
  Description of Artificial Sequence: Synthetic oligonucleotide
uguacacaggcgaugccga

SEQ ID NO: 1210847 - RNA, 19 nt, Artificial Sequence
  Description of Artificial Sequence: Synthetic oligonucleotide
agugguaaacccauguucu

SEQ ID NO: 1210848 - RNA, 19 nt, Artificial Sequence
  Description of Artificial Sequence: Synthetic oligonucleotide
caggaugccagcaaugauc

SEQ ID NO: 1210849 - RNA, 19 nt, Artificial Sequence
  Description of Artificial Sequence: Synthetic oligonucleotide
uuauagauguuggaggcau

SEQ ID NO: 1210850 - RNA, 19 nt, Artificial Sequence
  Description of Artificial Sequence: Synthetic oligonucleotide
gguaccacagucuuacagc

SEQ ID NO: 1210851 - RNA, 19 nt, Artificial Sequence
  Description of Artificial Sequence: Synthetic oligonucleotide
uaucuacagcauuagucac

SEQ ID NO: 1210852 - RNA, 19 nt, Artificial Sequence
  Description of Artificial Sequence: Synthetic oligonucleotide
ccagcuuacugauacagcc

SEQ ID NO: 1210853 - RNA, 19 nt, Artificial Sequence
  Description of Artificial Sequence: Synthetic oligonucleotide
uuccgucgcuccuugaaag

SEQ ID NO: 1210854 - RNA, 19 nt, Artificial Sequence
  Description of Artificial Sequence: Synthetic oligonucleotide
agagcggauccauucacug

SEQ ID NO: 1210855 - RNA, 19 nt, Artificial Sequence
  Description of Artificial Sequence: Synthetic oligonucleotide
gauacagccacccuccacu

SEQ ID NO: 1210856 - RNA, 19 nt, Artificial Sequence
  Description of Artificial Sequence: Synthetic oligonucleotide
cucuauaagucagaaggac

SEQ ID NO: 1210857 - RNA, 19 nt, Artificial Sequence
  Description of Artificial Sequence: Synthetic oligonucleotide
ugguaaacccauguucucc

SEQ ID NO: 1210858 - RNA, 19 nt, Artificial Sequence
  Description of Artificial Sequence: Synthetic oligonucleotide
ugcaaaucacagcuaccca

SEQ ID NO: 1210859 - RNA, 19 nt, Artificial Sequence
  Description of Artificial Sequence: Synthetic oligonucleotide
uugaggcuucuguauaagc

SEQ ID NO: 1210860 - RNA, 19 nt, Artificial Sequence
  Description of Artificial Sequence: Synthetic oligonucleotide
gaaaguggcacagcagccc

SEQ ID NO: 1210861 - RNA, 19 nt, Artificial Sequence
  Description of Artificial Sequence: Synthetic oligonucleotide
ugaaagguaccuagaccac

SEQ ID NO: 1210862 - RNA, 19 nt, Artificial Sequence
  Description of Artificial Sequence: Synthetic oligonucleotide
uacaagcguaacagguucc

SEQ ID NO: 1210863 - RNA, 19 nt, Artificial Sequence
  Description of Artificial Sequence: Synthetic oligonucleotide
uacauugccucaagccuug

SEQ ID NO: 1210864 - RNA, 19 nt, Artificial Sequence
  Description of Artificial Sequence: Synthetic oligonucleotide
gagacaguauauaggaaca

SEQ ID NO: 1210865 - RNA, 19 nt, Artificial Sequence
  Description of Artificial Sequence: Synthetic oligonucleotide
gauagguguuugaagccag

SEQ ID NO: 1210866 - RNA, 19 nt, Artificial Sequence
  Description of Artificial Sequence: Synthetic oligonucleotide
uuuauagauguuggaggca

SEQ ID NO: 1210867 - RNA, 19 nt, Artificial Sequence
  Description of Artificial Sequence: Synthetic oligonucleotide
ucuaacucaguaguacuuc

SEQ ID NO: 1210868 - RNA, 19 nt, Artificial Sequence
  Description of Artificial Sequence: Synthetic oligonucleotide
uauaagucagaaggaccag

SEQ ID NO: 1210869 - RNA, 19 nt, Artificial Sequence
  Description of Artificial Sequence: Synthetic oligonucleotide
uauugagcaccuguuacaa

SEQ ID NO: 1210870 - RNA, 19 nt, Artificial Sequence
  Description of Artificial Sequence: Synthetic oligonucleotide
cacagcuacccaaggaaag

SEQ ID NO: 1210871 - RNA, 19 nt, Artificial Sequence
  Description of Artificial Sequence: Synthetic oligonucleotide
cuguauaagcagcagguga

SEQ ID NO: 1210872 - RNA, 19 nt, Artificial Sequence
  Description of Artificial Sequence: Synthetic oligonucleotide
ggcauucuuauccuggggc

SEQ ID NO: 1210873 - RNA, 19 nt, Artificial Sequence
  Description of Artificial Sequence: Synthetic oligonucleotide
gagaagccuggauggaaag

SEQ ID NO: 1210874 - RNA, 19 nt, Artificial Sequence
  Description of Artificial Sequence: Synthetic oligonucleotide
uaacucaguaguacuucgu

SEQ ID NO: 1210875 - RNA, 19 nt, Artificial Sequence
  Description of Artificial Sequence: Synthetic oligonucleotide
aaacagccauaccccguuc

SEQ ID NO: 1210876 - RNA, 19 nt, Artificial Sequence
  Description of Artificial Sequence: Synthetic oligonucleotide
cagacuaauguagucacuc

SEQ ID NO: 1210877 - RNA, 19 nt, Artificial Sequence
  Description of Artificial Sequence: Synthetic oligonucleotide
aagauguaggcuguggcua

SEQ ID NO: 1210878 - RNA, 19 nt, Artificial Sequence
  Description of Artificial Sequence: Synthetic oligonucleotide
acaggcgaugccgaugccc

SEQ ID NO: 1210879 - RNA, 19 nt, Artificial Sequence
  Description of Artificial Sequence: Synthetic oligonucleotide
gcuagauagguguuugaag

SEQ ID NO: 1210880 - RNA, 19 nt, Artificial Sequence
  Description of Artificial Sequence: Synthetic oligonucleotide
aaaguagccugugggcaag

SEQ ID NO: 1210881 - RNA, 19 nt, Artificial Sequence
  Description of Artificial Sequence: Synthetic oligonucleotide
aaacccaauucuaccaggu

SEQ ID NO: 1210882 - RNA, 19 nt, Artificial Sequence
  Description of Artificial Sequence: Synthetic oligonucleotide
gucaaauaaucuaaaccca

SEQ ID NO: 1210883 - RNA, 19 nt, Artificial Sequence
  Description of Artificial Sequence: Synthetic oligonucleotide
acaagcguaacagguuccg

SEQ ID NO: 1210884 - RNA, 19 nt, Artificial Sequence
  Description of Artificial Sequence: Synthetic oligonucleotide
ugggcaagaggcacuuuug

SEQ ID NO: 1210885 - RNA, 19 nt, Artificial Sequence
  Description of Artificial Sequence: Synthetic oligonucleotide
gguaaacccauguucuccc

SEQ ID NO: 1210886 - RNA, 19 nt, Artificial Sequence
  Description of Artificial Sequence: Synthetic oligonucleotide
guuugaagccagcagacua

SEQ ID NO: 1210887 - RNA, 19 nt, Artificial Sequence
  Description of Artificial Sequence: Synthetic oligonucleotide
accccguucagagauguuc

SEQ ID NO: 1210888 - RNA, 19 nt, Artificial Sequence
  Description of Artificial Sequence: Synthetic oligonucleotide
uucguaguggggugggaca

SEQ ID NO: 1210889 - RNA, 19 nt, Artificial Sequence
  Description of Artificial Sequence: Synthetic oligonucleotide
uggucaguaguguuccaac

SEQ ID NO: 1210890 - RNA, 19 nt, Artificial Sequence
  Description of Artificial Sequence: Synthetic oligonucleotide
gaugaaguacaagcguaac

SEQ ID NO: 1210891 - RNA, 19 nt, Artificial Sequence
  Description of Artificial Sequence: Synthetic oligonucleotide
caugcugggccucuauaag

SEQ ID NO: 1210892 - RNA, 19 nt, Artificial Sequence
  Description of Artificial Sequence: Synthetic oligonucleotide
acuggugguauuucuuggu

SEQ ID NO: 1210893 - RNA, 19 nt, Artificial Sequence
  Description of Artificial Sequence: Synthetic oligonucleotide
ugaguaccaauguccaaau

SEQ ID NO: 1210894 - RNA, 19 nt, Artificial Sequence
  Description of Artificial Sequence: Synthetic oligonucleotide
guaguagacauaggccagg

SEQ ID NO: 1210895 - RNA, 19 nt, Artificial Sequence
  Description of Artificial Sequence: Synthetic oligonucleotide
acagccauaccccguucag

SEQ ID NO: 1210896 - RNA, 19 nt, Artificial Sequence
  Description of Artificial Sequence: Synthetic oligonucleotide
ugagauucuccuugagcuc

SEQ ID NO: 1210897 - RNA, 19 nt, Artificial Sequence
  Description of Artificial Sequence: Synthetic oligonucleotide
agguaccuagaccacccag

SEQ ID NO: 1210898 - RNA, 19 nt, Artificial Sequence
  Description of Artificial Sequence: Synthetic oligonucleotide
aagccuugguacuuuggua

SEQ ID NO: 1210899 - RNA, 19 nt, Artificial Sequence
  Description of Artificial Sequence: Synthetic oligonucleotide
cagucuaacucaguaguac

SEQ ID NO: 1210900 - RNA, 19 nt, Artificial Sequence
  Description of Artificial Sequence: Synthetic oligonucleotide
ugaggauguuaggagcaag

SEQ ID NO: 1210901 - RNA, 19 nt, Artificial Sequence
  Description of Artificial Sequence: Synthetic oligonucleotide
gaauucacccaugcugggc

SEQ ID NO: 1210902 - RNA, 19 nt, Artificial Sequence
  Description of Artificial Sequence: Synthetic oligonucleotide
caguuguaggugaacagca

SEQ ID NO: 1210903 - RNA, 19 nt, Artificial Sequence
  Description of Artificial Sequence: Synthetic oligonucleotide
cuugguacuuugguaugcc

SEQ ID NO: 1210904 - RNA, 19 nt, Artificial Sequence
  Description of Artificial Sequence: Synthetic oligonucleotide
ugauuuccagagccaccag

SEQ ID NO: 1210905 - RNA, 19 nt, Artificial Sequence
  Description of Artificial Sequence: Synthetic oligonucleotide
agaaggaccagcagguaca

SEQ ID NO: 1210906 - RNA, 19 nt, Artificial Sequence
  Description of Artificial Sequence: Synthetic oligonucleotide
uuacugauacagccacccu

SEQ ID NO: 1210907 - RNA, 19 nt, Artificial Sequence
  Description of Artificial Sequence: Synthetic oligonucleotide
cugcuucuacccaccaugc

SEQ ID NO: 1210908 - RNA, 19 nt, Artificial Sequence
  Description of Artificial Sequence: Synthetic oligonucleotide
uugguacuuugguaugcca

SEQ ID NO: 1210909 - RNA, 19 nt, Artificial Sequence
  Description of Artificial Sequence: Synthetic oligonucleotide
agcuuaucuacagcauuag

SEQ ID NO: 1210910 - RNA, 19 nt, Artificial Sequence
  Description of Artificial Sequence: Synthetic oligonucleotide
accuguuacaaagcaggag

SEQ ID NO: 1210911 - RNA, 19 nt, Artificial Sequence
  Description of Artificial Sequence: Synthetic oligonucleotide
cuaccagguaggccuagcc

SEQ ID NO: 1210912 - RNA, 19 nt, Artificial Sequence
  Description of Artificial Sequence: Synthetic oligonucleotide
ugcaagugguaaacccaug

SEQ ID NO: 1210913 - RNA, 19 nt, Artificial Sequence
  Description of Artificial Sequence: Synthetic oligonucleotide
aggucaaaagucagugguc

SEQ ID NO: 1210914 - RNA, 19 nt, Artificial Sequence
  Description of Artificial Sequence: Synthetic oligonucleotide
uuguaguaucaaccccggc

SEQ ID NO: 1210915 - RNA, 19 nt, Artificial Sequence
  Description of Artificial Sequence: Synthetic oligonucleotide
aguggaacucuugcuguag

SEQ ID NO: 1210916 - RNA, 19 nt, Artificial Sequence
  Description of Artificial Sequence: Synthetic oligonucleotide
ugacaacgccaccagccac

SEQ ID NO: 1210917 - RNA, 19 nt, Artificial Sequence
  Description of Artificial Sequence: Synthetic oligonucleotide
guauaagcagcaggugaag

SEQ ID NO: 1210918 - RNA, 19 nt, Artificial Sequence
  Description of Artificial Sequence: Synthetic oligonucleotide
agucacacccuuguggccu

SEQ ID NO: 1210919 - RNA, 19 nt, Artificial Sequence
  Description of Artificial Sequence: Synthetic oligonucleotide
caugccgaagaccuguaca

SEQ ID NO: 1210920 - RNA, 19 nt, Artificial Sequence
  Description of Artificial Sequence: Synthetic oligonucleotide
gguacaggucaaaagucag

SEQ ID NO: 1210921 - RNA, 19 nt, Artificial Sequence
  Description of Artificial Sequence: Synthetic oligonucleotide
aagucaguggucugcccuu

SEQ ID NO: 1210922 - RNA, 19 nt, Artificial Sequence
  Description of Artificial Sequence: Synthetic oligonucleotide
uagucacucuugaguacca

SEQ ID NO: 1210923 - RNA, 19 nt, Artificial Sequence
  Description of Artificial Sequence: Synthetic oligonucleotide
agguacaggucaaaaguca

SEQ ID NO: 1210924 - RNA, 19 nt, Artificial Sequence
  Description of Artificial Sequence: Synthetic oligonucleotide
acagccacccuccacuuua

SEQ ID NO: 1210925 - RNA, 19 nt, Artificial Sequence
  Description of Artificial Sequence: Synthetic oligonucleotide
augacggccaagccggcca

SEQ ID NO: 1210926 - RNA, 19 nt, Artificial Sequence
  Description of Artificial Sequence: Synthetic oligonucleotide
aacccaauucuaccaggua

SEQ ID NO: 1210927 - RNA, 19 nt, Artificial Sequence
  Description of Artificial Sequence: Synthetic oligonucleotide
guggacaguagugcaaggc

SEQ ID NO: 1210928 - RNA, 19 nt, Artificial Sequence
  Description of Artificial Sequence: Synthetic oligonucleotide
acuccuaugguggcugaag

SEQ ID NO: 1210929 - RNA, 19 nt, Artificial Sequence
  Description of Artificial Sequence: Synthetic oligonucleotide
gccaccacuaagauguagg

SEQ ID NO: 1210930 - RNA, 19 nt, Artificial Sequence
  Description of Artificial Sequence: Synthetic oligonucleotide
caauucuaccagguaggcc

SEQ ID NO: 1210931 - RNA, 19 nt, Artificial Sequence
  Description of Artificial Sequence: Synthetic oligonucleotide
aagguaccuagaccaccca

SEQ ID NO: 1210932 - RNA, 19 nt, Artificial Sequence
  Description of Artificial Sequence: Synthetic oligonucleotide
uauaggaacauggggcauu

SEQ ID NO: 1210933 - RNA, 19 nt, Artificial Sequence
  Description of Artificial Sequence: Synthetic oligonucleotide
cauuagucacacccuugug

SEQ ID NO: 1210934 - RNA, 19 nt, Artificial Sequence
  Description of Artificial Sequence: Synthetic oligonucleotide
accagagcggauccauuca

SEQ ID NO: 1210935 - RNA, 19 nt, Artificial Sequence
  Description of Artificial Sequence: Synthetic oligonucleotide
ugcuucuacccaccaugca

SEQ ID NO: 1210936 - RNA, 19 nt, Artificial Sequence
  Description of Artificial Sequence: Synthetic oligonucleotide
augggaucuugccacuccu

SEQ ID NO: 1210937 - RNA, 19 nt, Artificial Sequence
  Description of Artificial Sequence: Synthetic oligonucleotide
gacagcuaccucucuggca

SEQ ID NO: 1210938 - RNA, 19 nt, Artificial Sequence
  Description of Artificial Sequence: Synthetic oligonucleotide
ugggccucuauaagucaga

SEQ ID NO: 1210939 - RNA, 19 nt, Artificial Sequence
  Description of Artificial Sequence: Synthetic oligonucleotide
ucuacccaccaugcaagug

SEQ ID NO: 1210940 - RNA, 19 nt, Artificial Sequence
  Description of Artificial Sequence: Synthetic oligonucleotide
ucaugccgaagaccuguac

SEQ ID NO: 1210941 - RNA, 19 nt, Artificial Sequence
  Description of Artificial Sequence: Synthetic oligonucleotide
gguaguagacauaggccag

SEQ ID NO: 1210942 - RNA, 19 nt, Artificial Sequence
  Description of Artificial Sequence: Synthetic oligonucleotide
uagucacacccuuguggcc

SEQ ID NO: 1210943 - RNA, 19 nt, Artificial Sequence
  Description of Artificial Sequence: Synthetic oligonucleotide
ggucccgccuaccacagcc

SEQ ID NO: 1210944 - RNA, 19 nt, Artificial Sequence
  Description of Artificial Sequence: Synthetic oligonucleotide
cccaaugacccgcaggugc

SEQ ID NO: 1210945 - RNA, 19 nt, Artificial Sequence
  Description of Artificial Sequence: Synthetic oligonucleotide
gcagguacaggucaaaagu

SEQ ID NO: 1210946 - RNA, 19 nt, Artificial Sequence
  Description of Artificial Sequence: Synthetic oligonucleotide
aggcacuugaaggauggca

SEQ ID NO: 1210947 - RNA, 19 nt, Artificial Sequence
  Description of Artificial Sequence: Synthetic oligonucleotide
aucuacagcauuagucaca

SEQ ID NO: 1210948 - RNA, 19 nt, Artificial Sequence
  Description of Artificial Sequence: Synthetic oligonucleotide
ucacacuuuguaguaucaa

SEQ ID NO: 1210949 - RNA, 19 nt, Artificial Sequence
  Description of Artificial Sequence: Synthetic oligonucleotide
guacuuugguaugccagug

SEQ ID NO: 1210950 - RNA, 19 nt, Artificial Sequence
  Description of Artificial Sequence: Synthetic oligonucleotide
ggcaucaggguuacaacag

SEQ ID NO: 1210951 - RNA, 19 nt, Artificial Sequence
  Description of Artificial Sequence: Synthetic oligonucleotide
gcaguuguaggugaacagc

SEQ ID NO: 1210952 - RNA, 19 nt, Artificial Sequence
  Description of Artificial Sequence: Synthetic oligonucleotide
guggcuagauagguguuug

SEQ ID NO: 1210953 - RNA, 19 nt, Artificial Sequence
  Description of Artificial Sequence: Synthetic oligonucleotide
auacagugagugggguugg

SEQ ID NO: 1210954 - RNA, 19 nt, Artificial Sequence
  Description of Artificial Sequence: Synthetic oligonucleotide
guacuucguaguggggugg

SEQ ID NO: 1210955 - RNA, 19 nt, Artificial Sequence
  Description of Artificial Sequence: Synthetic oligonucleotide
caccagaucaaucacacuu

SEQ ID NO: 1210956 - RNA, 19 nt, Artificial Sequence
  Description of Artificial Sequence: Synthetic oligonucleotide
uucuacccaccaugcaagu

SEQ ID NO: 1210957 - RNA, 19 nt, Artificial Sequence
  Description of Artificial Sequence: Synthetic oligonucleotide
ggguuacaacaguggaugg

SEQ ID NO: 1210958 - RNA, 19 nt, Artificial Sequence
  Description of Artificial Sequence: Synthetic oligonucleotide
ccuaugguggcugaagcag

SEQ ID NO: 1210959 - RNA, 19 nt, Artificial Sequence
  Description of Artificial Sequence: Synthetic oligonucleotide
guagugcaaggcuggcagc

SEQ ID NO: 1210960 - RNA, 19 nt, Artificial Sequence
  Description of Artificial Sequence: Synthetic oligonucleotide
guaccuagaccacccagaa

SEQ ID NO: 1210961 - RNA, 19 nt, Artificial Sequence
  Description of Artificial Sequence: Synthetic oligonucleotide
cuagaccacccagaauggc

SEQ ID NO: 1210962 - RNA, 19 nt, Artificial Sequence
  Description of Artificial Sequence: Synthetic oligonucleotide
agaugggaucuugccacuc

SEQ ID NO: 1210963 - RNA, 19 nt, Artificial Sequence
  Description of Artificial Sequence: Synthetic oligonucleotide
uccgucgcuccuugaaagu

SEQ ID NO: 1210964 - RNA, 19 nt, Artificial Sequence
  Description of Artificial Sequence: Synthetic oligonucleotide
ggacggcauauacagugag

SEQ ID NO: 1210965 - RNA, 19 nt, Artificial Sequence
  Description of Artificial Sequence: Synthetic oligonucleotide
agcauuagucacacccuug

SEQ ID NO: 1210966 - RNA, 19 nt, Artificial Sequence
  Description of Artificial Sequence: Synthetic oligonucleotide
uguaggcuguggcuagaua

SEQ ID NO: 1210967 - RNA, 19 nt, Artificial Sequence
  Description of Artificial Sequence: Synthetic oligonucleotide
uggcuagauagguguuuga

SEQ ID NO: 1210968 - RNA, 19 nt, Artificial Sequence
  Description of Artificial Sequence: Synthetic oligonucleotide
ucuaccagguaggccuagc

SEQ ID NO: 1210969 - RNA, 19 nt, Artificial Sequence
  Description of Artificial Sequence: Synthetic oligonucleotide
ucggguugccccauugcuu

SEQ ID NO: 1210970 - RNA, 19 nt, Artificial Sequence
  Description of Artificial Sequence: Synthetic oligonucleotide
aucacacuuuguaguauca

SEQ ID NO: 1210971 - RNA, 19 nt, Artificial Sequence
  Description of Artificial Sequence: Synthetic oligonucleotide
ccuagaccacccagaaugg

SEQ ID NO: 1210972 - RNA, 19 nt, Artificial Sequence
  Description of Artificial Sequence: Synthetic oligonucleotide
gugguaaacccauguucuc

SEQ ID NO: 1210973 - RNA, 19 nt, Artificial Sequence
  Description of Artificial Sequence: Synthetic oligonucleotide
auggggcauuugcacagug

SEQ ID NO: 1210974 - RNA, 19 nt, Artificial Sequence
  Description of Artificial Sequence: Synthetic oligonucleotide
caguggauggaaacagcca

SEQ ID NO: 1210975 - RNA, 19 nt, Artificial Sequence
  Description of Artificial Sequence: Synthetic oligonucleotide
ggacaguagugcaaggcug

SEQ ID NO: 1210976 - RNA, 19 nt, Artificial Sequence
  Description of Artificial Sequence: Synthetic oligonucleotide
auaccccguucagagaugu

SEQ ID NO: 1210977 - RNA, 19 nt, Artificial Sequence
  Description of Artificial Sequence: Synthetic oligonucleotide
ccaccacuaagauguaggc

SEQ ID NO: 1210978 - RNA, 19 nt, Artificial Sequence
  Description of Artificial Sequence: Synthetic oligonucleotide
cagcuuacugauacagcca

SEQ ID NO: 1210979 - RNA, 19 nt, Artificial Sequence
  Description of Artificial Sequence: Synthetic oligonucleotide
uccuugaaaguggcacagc

SEQ ID NO: 1210980 - RNA, 19 nt, Artificial Sequence
  Description of Artificial Sequence: Synthetic oligonucleotide
gggguuggaguuccccucg

SEQ ID NO: 1210981 - RNA, 19 nt, Artificial Sequence
  Description of Artificial Sequence: Synthetic oligonucleotide
ccagucuugagaguuguug

SEQ ID NO: 1210982 - RNA, 19 nt, Artificial Sequence
  Description of Artificial Sequence: Synthetic oligonucleotide
cugcccuucaccuggcaga

SEQ ID NO: 1210983 - RNA, 19 nt, Artificial Sequence
  Description of Artificial Sequence: Synthetic oligonucleotide
uucuuauccuggggcaagu

SEQ ID NO: 1210984 - RNA, 19 nt, Artificial Sequence
  Description of Artificial Sequence: Synthetic oligonucleotide
ggcaagaggcacuuuuguc

SEQ ID NO: 1210985 - RNA, 19 nt, Artificial Sequence
  Description of Artificial Sequence: Synthetic oligonucleotide
cauaccccguucagagaug

SEQ ID NO: 1210986 - RNA, 19 nt, Artificial Sequence
  Description of Artificial Sequence: Synthetic oligonucleotide
aagcaguggucagaaugau

SEQ ID NO: 1210987 - RNA, 19 nt, Artificial Sequence
  Description of Artificial Sequence: Synthetic oligonucleotide
agguaggccuagcccaaca

SEQ ID NO: 1210988 - RNA, 19 nt, Artificial Sequence
  Description of Artificial Sequence: Synthetic oligonucleotide
caguggucagaaugauuuc

SEQ ID NO: 1210989 - RNA, 19 nt, Artificial Sequence
  Description of Artificial Sequence: Synthetic oligonucleotide
uaccuagaccacccagaau

SEQ ID NO: 1210990 - RNA, 19 nt, Artificial Sequence
  Description of Artificial Sequence: Synthetic oligonucleotide
ggaacauggggcauuugca

SEQ ID NO: 1210991 - RNA, 19 nt, Artificial Sequence
  Description of Artificial Sequence: Synthetic oligonucleotide
caacacuggcauucuuauc

SEQ ID NO: 1210992 - RNA, 19 nt, Artificial Sequence
  Description of Artificial Sequence: Synthetic oligonucleotide
auggucaguaguguuccaa

SEQ ID NO: 1210993 - RNA, 19 nt, Artificial Sequence
  Description of Artificial Sequence: Synthetic oligonucleotide
gaggcauggucccgccuac

SEQ ID NO: 1210994 - RNA, 19 nt, Artificial Sequence
  Description of Artificial Sequence: Synthetic oligonucleotide
cuuugguaugccagugaaa

SEQ ID NO: 1210995 - RNA, 19 nt, Artificial Sequence
  Description of Artificial Sequence: Synthetic oligonucleotide
cuggccuggcaccaugguc

SEQ ID NO: 1210996 - RNA, 19 nt, Artificial Sequence
  Description of Artificial Sequence: Synthetic oligonucleotide
ccccguucagagauguucc

SEQ ID NO: 1210997 - RNA, 19 nt, Artificial Sequence
  Description of Artificial Sequence: Synthetic oligonucleotide
gguacuuugguaugccagu

SEQ ID NO: 1210998 - RNA, 19 nt, Artificial Sequence
  Description of Artificial Sequence: Synthetic oligonucleotide
ccagaucaaucacacuuug

SEQ ID NO: 1210999 - RNA, 19 nt, Artificial Sequence
  Description of Artificial Sequence: Synthetic oligonucleotide
guuggaguuccccucgggu

SEQ ID NO: 1211000 - RNA, 19 nt, Artificial Sequence
  Description of Artificial Sequence: Synthetic oligonucleotide
ccagggcugaggauguuag

SEQ ID NO: 1211001 - RNA, 19 nt, Artificial Sequence
  Description of Artificial Sequence: Synthetic oligonucleotide
gugggacauagugcaaggc

SEQ ID NO: 1211002 - RNA, 19 nt, Artificial Sequence
  Description of Artificial Sequence: Synthetic oligonucleotide
gguaccuagaccacccaga

SEQ ID NO: 1211003 - RNA, 19 nt, Artificial Sequence
  Description of Artificial Sequence: Synthetic oligonucleotide
gggugggacauagugcaag

SEQ ID NO: 1211004 - RNA, 19 nt, Artificial Sequence
  Description of Artificial Sequence: Synthetic oligonucleotide
accacacgguuuucugccu

SEQ ID NO: 1211005 - RNA, 19 nt, Artificial Sequence
  Description of Artificial Sequence: Synthetic oligonucleotide
aguuccccucggguugccc

SEQ ID NO: 1211006 - RNA, 19 nt, Artificial Sequence
  Description of Artificial Sequence: Synthetic oligonucleotide
guccaaaugcccacugcca

SEQ ID NO: 1211007 - RNA, 19 nt, Artificial Sequence
  Description of Artificial Sequence: Synthetic oligonucleotide
auaggaacauggggcauuu

SEQ ID NO: 1211008 - RNA, 19 nt, Artificial Sequence
  Description of Artificial Sequence: Synthetic oligonucleotide
caccuguuacaaagcagga

SEQ ID NO: 1211009 - RNA, 19 nt, Artificial Sequence
  Description of Artificial Sequence: Synthetic oligonucleotide
ucguaguggggugggacau

SEQ ID NO: 1211010 - RNA, 19 nt, Artificial Sequence
  Description of Artificial Sequence: Synthetic oligonucleotide
cuugaguaccaauguccaa

SEQ ID NO: 1211011 - RNA, 19 nt, Artificial Sequence
  Description of Artificial Sequence: Synthetic oligonucleotide
uucuaccagguaggccuag

SEQ ID NO: 1211012 - RNA, 19 nt, Artificial Sequence
  Description of Artificial Sequence: Synthetic oligonucleotide
ggccucuauaagucagaag

SEQ ID NO: 1211013 - RNA, 19 nt, Artificial Sequence
  Description of Artificial Sequence: Synthetic oligonucleotide
guuccgucgcuccuugaaa

SEQ ID NO: 1211014 - RNA, 19 nt, Artificial Sequence
  Description of Artificial Sequence: Synthetic oligonucleotide
cuacagcauuagucacacc

SEQ ID NO: 1211015 - RNA, 19 nt, Artificial Sequence
  Description of Artificial Sequence: Synthetic oligonucleotide
gcaagugguaaacccaugu

SEQ ID NO: 1211016 - RNA, 19 nt, Artificial Sequence
  Description of Artificial Sequence: Synthetic oligonucleotide
gguugccccauugcuuugg

SEQ ID NO: 1211017 - RNA, 19 nt, Artificial Sequence
  Description of Artificial Sequence: Synthetic oligonucleotide
ccaacacuuaaugcaaauc

SEQ ID NO: 1211018 - RNA, 19 nt, Artificial Sequence
  Description of Artificial Sequence: Synthetic oligonucleotide
aggacggcauauacaguga

SEQ ID NO: 1211019 - RNA, 19 nt, Artificial Sequence
  Description of Artificial Sequence: Synthetic oligonucleotide
aggcagacugugccacaug

SEQ ID NO: 1211020 - RNA, 19 nt, Artificial Sequence
  Description of Artificial Sequence: Synthetic oligonucleotide
gcauuagucacacccuugu

SEQ ID NO: 1211021 - RNA, 19 nt, Artificial Sequence
  Description of Artificial Sequence: Synthetic oligonucleotide
uguggccugacugguggua

SEQ ID NO: 1211022 - RNA, 19 nt, Artificial Sequence
  Description of Artificial Sequence: Synthetic oligonucleotide
uggaggcauggucccgccu

SEQ ID NO: 1211023 - RNA, 19 nt, Artificial Sequence
  Description of Artificial Sequence: Synthetic oligonucleotide
ggaugaaguacaagcguaa

SEQ ID NO: 1211024 - RNA, 19 nt, Artificial Sequence
  Description of Artificial Sequence: Synthetic oligonucleotide
agaccuguacacaggcgau

SEQ ID NO: 1211025 - RNA, 19 nt, Artificial Sequence
  Description of Artificial Sequence: Synthetic oligonucleotide
cuaugguggcugaagcagu

SEQ ID NO: 1211026 - RNA, 19 nt, Artificial Sequence
  Description of Artificial Sequence: Synthetic oligonucleotide
gguaugccagugaaaggca

SEQ ID NO: 1211027 - RNA, 19 nt, Artificial Sequence
  Description of Artificial Sequence: Synthetic oligonucleotide
aaguagccugugggcaaga

SEQ ID NO: 1211028 - RNA, 19 nt, Artificial Sequence
  Description of Artificial Sequence: Synthetic oligonucleotide
ggcuagauagguguuugaa

SEQ ID NO: 1211029 - RNA, 19 nt, Artificial Sequence
  Description of Artificial Sequence: Synthetic oligonucleotide
auggucccgccuaccacag

SEQ ID NO: 1211030 - RNA, 19 nt, Artificial Sequence
  Description of Artificial Sequence: Synthetic oligonucleotide
cggcauauacagugagugg

SEQ ID NO: 1211031 - RNA, 19 nt, Artificial Sequence
  Description of Artificial Sequence: Synthetic oligonucleotide
ggcagacugugccacaugu

SEQ ID NO: 1211032 - RNA, 19 nt, Artificial Sequence
  Description of Artificial Sequence: Synthetic oligonucleotide
cccuccacuuuauagaugu

SEQ ID NO: 1211033 - RNA, 19 nt, Artificial Sequence
  Description of Artificial Sequence: Synthetic oligonucleotide
cagaucaaucacacuuugu

SEQ ID NO: 1211034 - RNA, 19 nt, Artificial Sequence
  Description of Artificial Sequence: Synthetic oligonucleotide
gguuccgucgcuccuugaa

SEQ ID NO: 1211035 - RNA, 19 nt, Artificial Sequence
  Description of Artificial Sequence: Synthetic oligonucleotide
ggcacuuuugucaaauaau

SEQ ID NO: 1211036 - RNA, 19 nt, Artificial Sequence
  Description of Artificial Sequence: Synthetic oligonucleotide
ggucaguaguguuccaacu

SEQ ID NO: 1211037 - RNA, 19 nt, Artificial Sequence
  Description of Artificial Sequence: Synthetic oligonucleotide
caggguuacaacaguggau

SEQ ID NO: 1211038 - RNA, 19 nt, Artificial Sequence
  Description of Artificial Sequence: Synthetic oligonucleotide
gacggcauauacagugagu

SEQ ID NO: 1211039 - RNA, 19 nt, Artificial Sequence
  Description of Artificial Sequence: Synthetic oligonucleotide
gugggcaagaggcacuuuu

SEQ ID NO: 1211040 - RNA, 19 nt, Artificial Sequence
  Description of Artificial Sequence: Synthetic oligonucleotide
cauauacagugaguggggu

SEQ ID NO: 1211041 - RNA, 19 nt, Artificial Sequence
  Description of Artificial Sequence: Synthetic oligonucleotide
cugucaggaaccacacggu

SEQ ID NO: 1211042 - RNA, 19 nt, Artificial Sequence
  Description of Artificial Sequence: Synthetic oligonucleotide
ggcauggucccgccuacca

SEQ ID NO: 1211043 - RNA, 19 nt, Artificial Sequence
  Description of Artificial Sequence: Synthetic oligonucleotide
gcguaacagguuccgucgc

SEQ ID NO: 1211044 - RNA, 19 nt, Artificial Sequence
  Description of Artificial Sequence: Synthetic oligonucleotide
cucggguugccccauugcu

SEQ ID NO: 1211045 - RNA, 19 nt, Artificial Sequence
  Description of Artificial Sequence: Synthetic oligonucleotide
ggaggcauggucccgccua

SEQ ID NO: 1211046 - RNA, 19 nt, Artificial Sequence
  Description of Artificial Sequence: Synthetic oligonucleotide
auguaggcuguggcuagau

SEQ ID NO: 1211047 - RNA, 19 nt, Artificial Sequence
  Description of Artificial Sequence: Synthetic oligonucleotide
acagguuccgucgcuccuu

SEQ ID NO: 1211048 - RNA, 19 nt, Artificial Sequence
  Description of Artificial Sequence: Synthetic oligonucleotide
ccacuuuauagauguugga

SEQ ID NO: 1211049 - RNA, 19 nt, Artificial Sequence
  Description of Artificial Sequence: Synthetic oligonucleotide
gcuuacugauacagccacc

SEQ ID NO: 1211050 - RNA, 19 nt, Artificial Sequence
  Description of Artificial Sequence: Synthetic oligonucleotide
uggucccgccuaccacagc

SEQ ID NO: 1211051 - RNA, 19 nt, Artificial Sequence
  Description of Artificial Sequence: Synthetic oligonucleotide
gcacaucugaguguuccca

SEQ ID NO: 1211052 - RNA, 19 nt, Artificial Sequence
  Description of Artificial Sequence: Synthetic oligonucleotide
cacccuccacuuuauagau

SEQ ID NO: 1211053 - RNA, 19 nt, Artificial Sequence
  Description of Artificial Sequence: Synthetic oligonucleotide
ggggcauuugcacaguguu

SEQ ID NO: 1211054 - RNA, 19 nt, Artificial Sequence
  Description of Artificial Sequence: Synthetic oligonucleotide
cagagcggauccauucacu

SEQ ID NO: 1211055 - RNA, 19 nt, Artificial Sequence
  Description of Artificial Sequence: Synthetic oligonucleotide
ggagcaugugugggcauca

SEQ ID NO: 1211056 - RNA, 19 nt, Artificial Sequence
  Description of Artificial Sequence: Synthetic oligonucleotide
caaugacccgcaggugcuc

SEQ ID NO: 1211057 - RNA, 19 nt, Artificial Sequence
  Description of Artificial Sequence: Synthetic oligonucleotide
cugaggauguuaggagcaa

SEQ ID NO: 1211058 - RNA, 19 nt, Artificial Sequence
  Description of Artificial Sequence: Synthetic oligonucleotide
cacaggcgaugccgaugcc

SEQ ID NO: 1211059 - RNA, 19 nt, Artificial Sequence
  Description of Artificial Sequence: Synthetic oligonucleotide
ccucggguugccccauugc

SEQ ID NO: 1211060 - RNA, 19 nt, Artificial Sequence
  Description of Artificial Sequence: Synthetic oligonucleotide
caccacuaagauguaggcu

SEQ ID NO: 1211061 - RNA, 19 nt, Artificial Sequence
  Description of Artificial Sequence: Synthetic oligonucleotide
ccagugaaaggcacuugaa

SEQ ID NO: 1211062 - RNA, 19 nt, Artificial Sequence
  Description of Artificial Sequence: Synthetic oligonucleotide
agguuccgucgcuccuuga

SEQ ID NO: 1211063 - RNA, 19 nt, Artificial Sequence
  Description of Artificial Sequence: Synthetic oligonucleotide
cagcagguacaggucaaaa

SEQ ID NO: 1211064 - RNA, 19 nt, Artificial Sequence
  Description of Artificial Sequence: Synthetic oligonucleotide
gaggcagacugugccacau

SEQ ID NO: 1211065 - RNA, 19 nt, Artificial Sequence
  Description of Artificial Sequence: Synthetic oligonucleotide
gcaagcacaucugaguguu

SEQ ID NO: 1211066 - RNA, 19 nt, Artificial Sequence
  Description of Artificial Sequence: Synthetic oligonucleotide
ccauaccccguucagagau

SEQ ID NO: 1211067 - RNA, 19 nt, Artificial Sequence
  Description of Artificial Sequence: Synthetic oligonucleotide
ccaacacuggcauucuuau

SEQ ID NO: 1211068 - RNA, 19 nt, Artificial Sequence
  Description of Artificial Sequence: Synthetic oligonucleotide
gacggccaagccggccagc

SEQ ID NO: 1211069 - RNA, 19 nt, Artificial Sequence
  Description of Artificial Sequence: Synthetic oligonucleotide
caauguccaaaugcccacu

SEQ ID NO: 1211070 - RNA, 19 nt, Artificial Sequence
  Description of Artificial Sequence: Synthetic oligonucleotide
aucaugccgaagaccugua

SEQ ID NO: 1211071 - RNA, 19 nt, Artificial Sequence
  Description of Artificial Sequence: Synthetic oligonucleotide
ggguugccccauugcuuug

SEQ ID NO: 1211072 - RNA, 19 nt, Artificial Sequence
  Description of Artificial Sequence: Synthetic oligonucleotide
gcagucuaacucaguagua

SEQ ID NO: 1211073 - RNA, 19 nt, Artificial Sequence
  Description of Artificial Sequence: Synthetic oligonucleotide
guuccaacuugaggcuucu

SEQ ID NO: 1211074 - RNA, 19 nt, Artificial Sequence
  Description of Artificial Sequence: Synthetic oligonucleotide
agccacccuccacuuuaua

SEQ ID NO: 1211075 - RNA, 19 nt, Artificial Sequence
  Description of Artificial Sequence: Synthetic oligonucleotide
gccauaccccguucagaga

SEQ ID NO: 1211076 - RNA, 19 nt, Artificial Sequence
  Description of Artificial Sequence: Synthetic oligonucleotide
cacacccuuguggccugac

SEQ ID NO: 1211077 - RNA, 19 nt, Artificial Sequence
  Description of Artificial Sequence: Synthetic oligonucleotide
guacacaggcgaugccgau

SEQ ID NO: 1211078 - RNA, 19 nt, Artificial Sequence
  Description of Artificial Sequence: Synthetic oligonucleotide
caccauggucaguaguguu

SEQ ID NO: 1211079 - RNA, 19 nt, Artificial Sequence
  Description of Artificial Sequence: Synthetic oligonucleotide
ccaaugacccgcaggugcu

SEQ ID NO: 1211080 - RNA, 19 nt, Artificial Sequence
  Description of Artificial Sequence: Synthetic oligonucleotide
caagcguaacagguuccgu

SEQ ID NO: 1211081 - RNA, 19 nt, Artificial Sequence
  Description of Artificial Sequence: Synthetic oligonucleotide
gggcauuugcacaguguua

SEQ ID NO: 1211082 - RNA, 19 nt, Artificial Sequence
  Description of Artificial Sequence: Synthetic oligonucleotide
gucccgccuaccacagcca

SEQ ID NO: 1211083 - RNA, 19 nt, Artificial Sequence
  Description of Artificial Sequence: Synthetic oligonucleotide
gucagcagucuaacucagu

SEQ ID NO: 1211084 - RNA, 19 nt, Artificial Sequence
  Description of Artificial Sequence: Synthetic oligonucleotide
ccuagcccaacacuggcau

SEQ ID NO: 1211085 - RNA, 19 nt, Artificial Sequence
  Description of Artificial Sequence: Synthetic oligonucleotide
gccugacuggugguauuuc

SEQ ID NO: 1211086 - RNA, 19 nt, Artificial Sequence
  Description of Artificial Sequence: Synthetic oligonucleotide
ccccaacacuuaaugcaaa

SEQ ID NO: 1211087 - RNA, 19 nt, Artificial Sequence
  Description of Artificial Sequence: Synthetic oligonucleotide
cccaggacuccggucacca

SEQ ID NO: 1211088 - RNA, 19 nt, Artificial Sequence
  Description of Artificial Sequence: Synthetic oligonucleotide
uccccucggguugccccau

SEQ ID NO: 1211089 - RNA, 19 nt, Artificial Sequence
  Description of Artificial Sequence: Synthetic oligonucleotide
cggauccauucacugucuc

SEQ ID NO: 1211090 - RNA, 19 nt, Artificial Sequence
  Description of Artificial Sequence: Synthetic oligonucleotide
cauggggcauuugcacagu

SEQ ID NO: 1211091 - RNA, 19 nt, Artificial Sequence
  Description of Artificial Sequence: Synthetic oligonucleotide
cugaagcaguggucagaau

SEQ ID NO: 1211092 - RNA, 19 nt, Artificial Sequence
  Description of Artificial Sequence: Synthetic oligonucleotide
cccaugcugggccucuaua

SEQ ID NO: 1211093 - RNA, 19 nt, Artificial Sequence
  Description of Artificial Sequence: Synthetic oligonucleotide
cguaacagguuccgucgcu

SEQ ID NO: 1211094 - RNA, 19 nt, Artificial Sequence
  Description of Artificial Sequence: Synthetic oligonucleotide
gcggauccauucacugucu

SEQ ID NO: 1211095 - RNA, 19 nt, Artificial Sequence
  Description of Artificial Sequence: Synthetic oligonucleotide
gccaagccggccagccaga

SEQ ID NO: 1211096 - RNA, 19 nt, Artificial Sequence
  Description of Artificial Sequence: Synthetic oligonucleotide
cugccucaccagagcggau

SEQ ID NO: 1211097 - RNA, 19 nt, Artificial Sequence
  Description of Artificial Sequence: Synthetic oligonucleotide
cccuuguggccugacuggu

SEQ ID NO: 1211098 - RNA, 19 nt, Artificial Sequence
  Description of Artificial Sequence: Synthetic oligonucleotide
ccccauugcuuuggagcaa

SEQ ID NO: 1211099 - RNA, 19 nt, Artificial Sequence
  Description of Artificial Sequence: Synthetic oligonucleotide
ccaagccggccagccagaa

SEQ ID NO: 1211100 - RNA, 19 nt, Artificial Sequence
  Description of Artificial Sequence: Synthetic oligonucleotide
gcccaacacuggcauucuu

SEQ ID NO: 1211101 - RNA, 19 nt, Artificial Sequence
  Description of Artificial Sequence: Synthetic oligonucleotide
aaauuuaucaauaauuucc

SEQ ID NO: 1211102 - RNA, 19 nt, Artificial Sequence
  Description of Artificial Sequence: Synthetic oligonucleotide
aaagugacggguuugauuc

SEQ ID NO: 1211103 - RNA, 19 nt, Artificial Sequence
  Description of Artificial Sequence: Synthetic oligonucleotide
uuaguuaaaaugcaagggg

SEQ ID NO: 1211104 - RNA, 19 nt, Artificial Sequence
  Description of Artificial Sequence: Synthetic oligonucleotide
aaauggacauaacuggucc

SEQ ID NO: 1211105 - RNA, 19 nt, Artificial Sequence
  Description of Artificial Sequence: Synthetic oligonucleotide
aaauuuuaauuuaggaucc

SEQ ID NO: 1211106 - RNA, 19 nt, Artificial Sequence
  Description of Artificial Sequence: Synthetic oligonucleotide
uguaaauuuaucaauaauu

SEQ ID NO: 1211107 - RNA, 19 nt, Artificial Sequence
  Description of Artificial Sequence: Synthetic oligonucleotide
cuuauauccaccaaagggc

SEQ ID NO: 1211108 - RNA, 19 nt, Artificial Sequence
  Description of Artificial Sequence: Synthetic oligonucleotide
aaugauaaaauggacauaa

SEQ ID NO: 1211109 - RNA, 19 nt, Artificial Sequence
  Description of Artificial Sequence: Synthetic oligonucleotide
aaacccaaagacccguucc

SEQ ID NO: 1211110 - RNA, 19 nt, Artificial Sequence
  Description of Artificial Sequence: Synthetic oligonucleotide
uaguuguuaauguagcagg

SEQ ID NO: 1211111 - RNA, 19 nt, Artificial Sequence
  Description of Artificial Sequence: Synthetic oligonucleotide
gaaggcuuaaagaucaugg

SEQ ID NO: 1211112 - RNA, 19 nt, Artificial Sequence
  Description of Artificial Sequence: Synthetic oligonucleotide
aaacuuacuuccuuuucuc

SEQ ID NO: 1211113 - RNA, 19 nt, Artificial Sequence
  Description of Artificial Sequence: Synthetic oligonucleotide
uuuaaaggcagucuuugca

SEQ ID NO: 1211114 - RNA, 19 nt, Artificial Sequence
  Description of Artificial Sequence: Synthetic oligonucleotide
aaauauggacuuuccauug

SEQ ID NO: 1211115 - RNA, 19 nt, Artificial Sequence
  Description of Artificial Sequence: Synthetic oligonucleotide
acagaaacuggccuguagc

SEQ ID NO: 1211116 - RNA, 19 nt, Artificial Sequence
  Description of Artificial Sequence: Synthetic oligonucleotide
uuuaggauccuucggaaca

SEQ ID NO: 1211117 - RNA, 19 nt, Artificial Sequence
  Description of Artificial Sequence: Synthetic oligonucleotide
ucaauaauuuccuuuugca

SEQ ID NO: 1211118 - RNA, 19 nt, Artificial Sequence
  Description of Artificial Sequence: Synthetic oligonucleotide
uguuccuuuaucauccgag

SEQ ID NO: 1211119 - RNA, 19 nt, Artificial Sequence
  Description of Artificial Sequence: Synthetic oligonucleotide
ugugaguaguacucaaugg

SEQ ID NO: 1211120 - RNA, 19 nt, Artificial Sequence
  Description of Artificial Sequence: Synthetic oligonucleotide
guagcuaucacucggccgg

SEQ ID NO: 1211121 - RNA, 19 nt, Artificial Sequence
  Description of Artificial Sequence: Synthetic oligonucleotide
auuaccacaugccaaagca

SEQ ID NO: 1211122 - RNA, 19 nt, Artificial Sequence
  Description of Artificial Sequence: Synthetic oligonucleotide
uuuuaauuuaggauccuuc

SEQ ID NO: 1211123 - RNA, 19 nt, Artificial Sequence
  Description of Artificial Sequence: Synthetic oligonucleotide
gaagugucaacauccaggc

SEQ ID NO: 1211124 - RNA, 19 nt, Artificial Sequence
  Description of Artificial Sequence: Synthetic oligonucleotide
aacauacugaucuccacca

SEQ ID NO: 1211125 - RNA, 19 nt, Artificial Sequence
  Description of Artificial Sequence: Synthetic oligonucleotide
uucaaaaggugacuccacg

SEQ ID NO: 1211126 - RNA, 19 nt, Artificial Sequence
  Description of Artificial Sequence: Synthetic oligonucleotide
auaauauccaaauuuuaau

SEQ ID NO: 1211127 - RNA, 19 nt, Artificial Sequence
  Description of Artificial Sequence: Synthetic oligonucleotide
gauccuucggaacauacug

SEQ ID NO: 1211128 - RNA, 19 nt, Artificial Sequence
  Description of Artificial Sequence: Synthetic oligonucleotide
uaauguagcagguuccugc

SEQ ID NO: 1211129 - RNA, 19 nt, Artificial Sequence
  Description of Artificial Sequence: Synthetic oligonucleotide
uccuuuugcacaaacacuc

SEQ ID NO: 1211130 - RNA, 19 nt, Artificial Sequence
  Description of Artificial Sequence: Synthetic oligonucleotide
acauacaccgucuuuagcu

SEQ ID NO: 1211131 - RNA, 19 nt, Artificial Sequence
  Description of Artificial Sequence: Synthetic oligonucleotide
uuuucgacugggaaggggc

SEQ ID NO: 1211132 - RNA, 19 nt, Artificial Sequence
  Description of Artificial Sequence: Synthetic oligonucleotide
auuggcccgcuucagaacc

SEQ ID NO: 1211133 - RNA, 19 nt, Artificial Sequence
  Description of Artificial Sequence: Synthetic oligonucleotide
cuucuuauauccaccaaag

SEQ ID NO: 1211134 - RNA, 19 nt, Artificial Sequence
  Description of Artificial Sequence: Synthetic oligonucleotide
uuauauccaccaaagggca

SEQ ID NO: 1211135 - RNA, 19 nt, Artificial Sequence
  Description of Artificial Sequence: Synthetic oligonucleotide
ugcaauuaguuaaaaugca

SEQ ID NO: 1211136 - RNA, 19 nt, Artificial Sequence
  Description of Artificial Sequence: Synthetic oligonucleotide
acauuuucgacugggaagg

SEQ ID NO: 1211137 - RNA, 19 nt, Artificial Sequence
  Description of Artificial Sequence: Synthetic oligonucleotide
gaaguuagccaacaaugcc

SEQ ID NO: 1211138 - RNA, 19 nt, Artificial Sequence
  Description of Artificial Sequence: Synthetic oligonucleotide
augauaagaggagauuugc

SEQ ID NO: 1211139 - RNA, 19 nt, Artificial Sequence
  Description of Artificial Sequence: Synthetic oligonucleotide
aaaauggacauaacugguc

SEQ ID NO: 1211140 - RNA, 19 nt, Artificial Sequence
  Description of Artificial Sequence: Synthetic oligonucleotide
aaauccugacuucuuauau

SEQ ID NO: 1211141 - RNA, 19 nt, Artificial Sequence
  Description of Artificial Sequence: Synthetic oligonucleotide
aagauggaagacaauacug

SEQ ID NO: 1211142 - RNA, 19 nt, Artificial Sequence
  Description of Artificial Sequence: Synthetic oligonucleotide
aguaguacucaauggucac

SEQ ID NO: 1211143 - RNA, 19 nt, Artificial Sequence
  Description of Artificial Sequence: Synthetic oligonucleotide
uaaagaucauggcauuacc

SEQ ID NO: 1211144 - RNA, 19 nt, Artificial Sequence
  Description of Artificial Sequence: Synthetic oligonucleotide
acucaauggucacuuggcc

SEQ ID NO: 1211145 - RNA, 19 nt, Artificial Sequence
  Description of Artificial Sequence: Synthetic oligonucleotide
cauaaagcacgguagcacc

SEQ ID NO: 1211146 - RNA, 19 nt, Artificial Sequence
  Description of Artificial Sequence: Synthetic oligonucleotide
cugagaagaugauaagagg

SEQ ID NO: 1211147 - RNA, 19 nt, Artificial Sequence
  Description of Artificial Sequence: Synthetic oligonucleotide
aaggacuuggcagcgcucc

SEQ ID NO: 1211148 - RNA, 19 nt, Artificial Sequence
  Description of Artificial Sequence: Synthetic oligonucleotide
aagggguaauuccaugcuc

SEQ ID NO: 1211149 - RNA, 19 nt, Artificial Sequence
  Description of Artificial Sequence: Synthetic oligonucleotide
acuguaaaguagcuaucac

SEQ ID NO: 1211150 - RNA, 19 nt, Artificial Sequence
  Description of Artificial Sequence: Synthetic oligonucleotide
acuugugcacauuuucgac

SEQ ID NO: 1211151 - RNA, 19 nt, Artificial Sequence
  Description of Artificial Sequence: Synthetic oligonucleotide
uguugauugacuccauggu

SEQ ID NO: 1211152 - RNA, 19 nt, Artificial Sequence
  Description of Artificial Sequence: Synthetic oligonucleotide
caacaggcaaucuggaagg

SEQ ID NO: 1211153 - RNA, 19 nt, Artificial Sequence
  Description of Artificial Sequence: Synthetic oligonucleotide
aauuuaggauccuucggaa

SEQ ID NO: 1211154 - RNA, 19 nt, Artificial Sequence
  Description of Artificial Sequence: Synthetic oligonucleotide
gaaacuggccuguagcagc

SEQ ID NO: 1211155 - RNA, 19 nt, Artificial Sequence
  Description of Artificial Sequence: Synthetic oligonucleotide
cuuugcugacuuuauaaac

SEQ ID NO: 1211156 - RNA, 19 nt, Artificial Sequence
  Description of Artificial Sequence: Synthetic oligonucleotide
uacucaauggucacuuggc

SEQ ID NO: 1211157 - RNA, 19 nt, Artificial Sequence
  Description of Artificial Sequence: Synthetic oligonucleotide
auugcgucgaggcagccag

SEQ ID NO: 1211158 - RNA, 19 nt, Artificial Sequence
  Description of Artificial Sequence: Synthetic oligonucleotide
guacucaauggucacuugg

SEQ ID NO: 1211159 - RNA, 19 nt, Artificial Sequence
  Description of Artificial Sequence: Synthetic oligonucleotide
ugaaaaggcacuugugcac

SEQ ID NO: 1211160 - RNA, 19 nt, Artificial Sequence
  Description of Artificial Sequence: Synthetic oligonucleotide
cucaaaugauaaaauggac

SEQ ID NO: 1211161 - RNA, 19 nt, Artificial Sequence
  Description of Artificial Sequence: Synthetic oligonucleotide
ugcauaguauuccaggcau

SEQ ID NO: 1211162 - RNA, 19 nt, Artificial Sequence
  Description of Artificial Sequence: Synthetic oligonucleotide
aacacucuggugccauuac

SEQ ID NO: 1211163 - RNA, 19 nt, Artificial Sequence
  Description of Artificial Sequence: Synthetic oligonucleotide
guaguuguuaauguagcag

SEQ ID NO: 1211164 - RNA, 19 nt, Artificial Sequence
  Description of Artificial Sequence: Synthetic oligonucleotide
aaguggaaucauuggcccg

SEQ ID NO: 1211165 - RNA, 19 nt, Artificial Sequence
  Description of Artificial Sequence: Synthetic oligonucleotide
aggaaguuagccaacaaug

SEQ ID NO: 1211166 - RNA, 19 nt, Artificial Sequence
  Description of Artificial Sequence: Synthetic oligonucleotide
aguuagccaacaaugcccc

SEQ ID NO: 1211167 - RNA, 19 nt, Artificial Sequence
  Description of Artificial Sequence: Synthetic oligonucleotide
uuaaagaucauggcauuac

SEQ ID NO: 1211168 - RNA, 19 nt, Artificial Sequence
  Description of Artificial Sequence: Synthetic oligonucleotide
augucccugguaaagaccc

SEQ ID NO: 1211169 - RNA, 19 nt, Artificial Sequence
  Description of Artificial Sequence: Synthetic oligonucleotide
ucuuacuccagacuuuaaa

SEQ ID NO: 1211170 - RNA, 19 nt, Artificial Sequence
  Description of Artificial Sequence: Synthetic oligonucleotide
augccagacuucuuacucc

SEQ ID NO: 1211171 - RNA, 19 nt, Artificial Sequence
  Description of Artificial Sequence: Synthetic oligonucleotide
uuugcacaaacacucuggu

SEQ ID NO: 1211172 - RNA, 19 nt, Artificial Sequence
  Description of Artificial Sequence: Synthetic oligonucleotide
uccaccauaaagcacggua

SEQ ID NO: 1211173 - RNA, 19 nt, Artificial Sequence
  Description of Artificial Sequence: Synthetic oligonucleotide
aguagcuaucacucggccg

SEQ ID NO: 1211174 - RNA, 19 nt, Artificial Sequence
  Description of Artificial Sequence: Synthetic oligonucleotide
cauuacagcaaaccuggcc

SEQ ID NO: 1211175 - RNA, 19 nt, Artificial Sequence
  Description of Artificial Sequence: Synthetic oligonucleotide
agacaauacugacccauuc

SEQ ID NO: 1211176 - RNA, 19 nt, Artificial Sequence
  Description of Artificial Sequence: Synthetic oligonucleotide
uguaguuguuaauguagca

SEQ ID NO: 1211177 - RNA, 19 nt, Artificial Sequence
  Description of Artificial Sequence: Synthetic oligonucleotide
gacuuuccauuguugauug

SEQ ID NO: 1211178 - RNA, 19 nt, Artificial Sequence
  Description of Artificial Sequence: Synthetic oligonucleotide
guugauugacuccauggug

SEQ ID NO: 1211179 - RNA, 19 nt, Artificial Sequence
  Description of Artificial Sequence: Synthetic oligonucleotide
uaauuccaugcuccuaucc

SEQ ID NO: 1211180 - RNA, 19 nt, Artificial Sequence
  Description of Artificial Sequence: Synthetic oligonucleotide
cuaagcagcuauugcgucg

SEQ ID NO: 1211181 - RNA, 19 nt, Artificial Sequence
  Description of Artificial Sequence: Synthetic oligonucleotide
gaugauaagaggagauuug

SEQ ID NO: 1211182 - RNA, 19 nt, Artificial Sequence
  Description of Artificial Sequence: Synthetic oligonucleotide
cauucucucauccugcgug

SEQ ID NO: 1211183 - RNA, 19 nt, Artificial Sequence
  Description of Artificial Sequence: Synthetic oligonucleotide
aauggacauaacuggucca

SEQ ID NO: 1211184 - RNA, 19 nt, Artificial Sequence
  Description of Artificial Sequence: Synthetic oligonucleotide
aaagaucauggcauuacca

SEQ ID NO: 1211185 - RNA, 19 nt, Artificial Sequence
  Description of Artificial Sequence: Synthetic oligonucleotide
aagugacggguuugauucc

SEQ ID NO: 1211186 - RNA, 19 nt, Artificial Sequence
  Description of Artificial Sequence: Synthetic oligonucleotide
ucaauggucacuuggccau

SEQ ID NO: 1211187 - RNA, 19 nt, Artificial Sequence
  Description of Artificial Sequence: Synthetic oligonucleotide
caaaggacccuccugggag

SEQ ID NO: 1211188 - RNA, 19 nt, Artificial Sequence
  Description of Artificial Sequence: Synthetic oligonucleotide
ugcuaagcagcuauugcgu

SEQ ID NO: 1211189 - RNA, 19 nt, Artificial Sequence
  Description of Artificial Sequence: Synthetic oligonucleotide
auauccaccaaagggcaac

SEQ ID NO: 1211190 - RNA, 19 nt, Artificial Sequence
  Description of Artificial Sequence: Synthetic oligonucleotide
uuuugcuaagcagcuauug

SEQ ID NO: 1211191 - RNA, 19 nt, Artificial Sequence
  Description of Artificial Sequence: Synthetic oligonucleotide
gacauaacugguccaaaga

SEQ ID NO: 1211192 - RNA, 19 nt, Artificial Sequence
  Description of Artificial Sequence: Synthetic oligonucleotide
uauaaacccaaagacccgu

SEQ ID NO: 1211193 - RNA, 19 nt, Artificial Sequence
  Description of Artificial Sequence: Synthetic oligonucleotide
cuuuuaacagccaaacuua

SEQ ID NO: 1211194 - RNA, 19 nt, Artificial Sequence
  Description of Artificial Sequence: Synthetic oligonucleotide
acuccaugguggcaauugc

SEQ ID NO: 1211195 - RNA, 19 nt, Artificial Sequence
  Description of Artificial Sequence: Synthetic oligonucleotide
gagauuugccuccaaguuc

SEQ ID NO: 1211196 - RNA, 19 nt, Artificial Sequence
  Description of Artificial Sequence: Synthetic oligonucleotide
uauuccaggcauugccagg

SEQ ID NO: 1211197 - RNA, 19 nt, Artificial Sequence
  Description of Artificial Sequence: Synthetic oligonucleotide
cuuuaaaggcagucuuugc

SEQ ID NO: 1211198 - RNA, 19 nt, Artificial Sequence
  Description of Artificial Sequence: Synthetic oligonucleotide
auaaagcacgguagcaccc

SEQ ID NO: 1211199 - RNA, 19 nt, Artificial Sequence
  Description of Artificial Sequence: Synthetic oligonucleotide
ugccaguaggcacacuucc

SEQ ID NO: 1211200 - RNA, 19 nt, Artificial Sequence
  Description of Artificial Sequence: Synthetic oligonucleotide
agaaccucggcuucagucu

SEQ ID NO: 1211201 - RNA, 19 nt, Artificial Sequence
  Description of Artificial Sequence: Synthetic oligonucleotide
aggagauuugccuccaagu

SEQ ID NO: 1211202 - RNA, 19 nt, Artificial Sequence
  Description of Artificial Sequence: Synthetic oligonucleotide
auggcauuaccacaugcca

SEQ ID NO: 1211203 - RNA, 19 nt, Artificial Sequence
  Description of Artificial Sequence: Synthetic oligonucleotide
auggacuuuccauuguuga

SEQ ID NO: 1211204 - RNA, 19 nt, Artificial Sequence
  Description of Artificial Sequence: Synthetic oligonucleotide
auuccuuuagcugccaucu

SEQ ID NO: 1211205 - RNA, 19 nt, Artificial Sequence
  Description of Artificial Sequence: Synthetic oligonucleotide
uuccauuguugauugacuc

SEQ ID NO: 1211206 - RNA, 19 nt, Artificial Sequence
  Description of Artificial Sequence: Synthetic oligonucleotide
guuccuuuaucauccgagc

SEQ ID NO: 1211207 - RNA, 19 nt, Artificial Sequence
  Description of Artificial Sequence: Synthetic oligonucleotide
ugcgugagugacaaccuga

SEQ ID NO: 1211208 - RNA, 19 nt, Artificial Sequence
  Description of Artificial Sequence: Synthetic oligonucleotide
agcuauugcgucgaggcag

SEQ ID NO: 1211209 - RNA, 19 nt, Artificial Sequence
  Description of Artificial Sequence: Synthetic oligonucleotide
aggcaugccagcuuuggug

SEQ ID NO: 1211210 - RNA, 19 nt, Artificial Sequence
  Description of Artificial Sequence: Synthetic oligonucleotide
auguuaucucugcaauuag

SEQ ID NO: 1211211 - RNA, 19 nt, Artificial Sequence
  Description of Artificial Sequence: Synthetic oligonucleotide
auaaccaaaggacccuccu

SEQ ID NO: 1211212 - RNA, 19 nt, Artificial Sequence
  Description of Artificial Sequence: Synthetic oligonucleotide
gaaucauuggcccgcuuca

SEQ ID NO: 1211213 - RNA, 19 nt, Artificial Sequence
  Description of Artificial Sequence: Synthetic oligonucleotide
uccugaacacuguaaagua

SEQ ID NO: 1211214 - RNA, 19 nt, Artificial Sequence
  Description of Artificial Sequence: Synthetic oligonucleotide
guuaaaaugcaagggguca

SEQ ID NO: 1211215 - RNA, 19 nt, Artificial Sequence
  Description of Artificial Sequence: Synthetic oligonucleotide
cuccuauccccacacauac

SEQ ID NO: 1211216 - RNA, 19 nt, Artificial Sequence
  Description of Artificial Sequence: Synthetic oligonucleotide
guauuccaggcauugccag

SEQ ID NO: 1211217 - RNA, 19 nt, Artificial Sequence
  Description of Artificial Sequence: Synthetic oligonucleotide
gcagcuauugcgucgaggc

SEQ ID NO: 1211218 - RNA, 19 nt, Artificial Sequence
  Description of Artificial Sequence: Synthetic oligonucleotide
ugcaaggggucauauaaua

SEQ ID NO: 1211219 - RNA, 19 nt, Artificial Sequence
  Description of Artificial Sequence: Synthetic oligonucleotide
agaugauaagaggagauuu

SEQ ID NO: 1211220 - RNA, 19 nt, Artificial Sequence
  Description of Artificial Sequence: Synthetic oligonucleotide
ugugggccauugaugagug

SEQ ID NO: 1211221 - RNA, 19 nt, Artificial Sequence
  Description of Artificial Sequence: Synthetic oligonucleotide
ugaacaggauucacuggcu

SEQ ID NO: 1211222 - RNA, 19 nt, Artificial Sequence
  Description of Artificial Sequence: Synthetic oligonucleotide
caugccagacuucuuacuc

SEQ ID NO: 1211223 - RNA, 19 nt, Artificial Sequence
  Description of Artificial Sequence: Synthetic oligonucleotide
cauacaccgucuuuagcug

SEQ ID NO: 1211224 - RNA, 19 nt, Artificial Sequence
  Description of Artificial Sequence: Synthetic oligonucleotide
gauuccuuuagcugccauc

SEQ ID NO: 1211225 - RNA, 19 nt, Artificial Sequence
  Description of Artificial Sequence: Synthetic oligonucleotide
ucauuggcccgcuucagaa

SEQ ID NO: 1211226 - RNA, 19 nt, Artificial Sequence
  Description of Artificial Sequence: Synthetic oligonucleotide
aauggucacuuggccauuc

SEQ ID NO: 1211227 - RNA, 19 nt, Artificial Sequence
  Description of Artificial Sequence: Synthetic oligonucleotide
cauuaccacaugccaaagc

SEQ ID NO: 1211228 - RNA, 19 nt, Artificial Sequence
  Description of Artificial Sequence: Synthetic oligonucleotide
uugcacuuuuaacagccaa

SEQ ID NO: 1211229 - RNA, 19 nt, Artificial Sequence
  Description of Artificial Sequence: Synthetic oligonucleotide
aaagaccccagcugcuagu

SEQ ID NO: 1211230 - RNA, 19 nt, Artificial Sequence
  Description of Artificial Sequence: Synthetic oligonucleotide
accggacugacauuguagu

SEQ ID NO: 1211231 - RNA, 19 nt, Artificial Sequence
  Description of Artificial Sequence: Synthetic oligonucleotide
uuucgacugggaaggggcc

SEQ ID NO: 1211232 - RNA, 19 nt, Artificial Sequence
  Description of Artificial Sequence: Synthetic oligonucleotide
auuuucgacugggaagggg

SEQ ID NO: 1211233 - RNA, 19 nt, Artificial Sequence
  Description of Artificial Sequence: Synthetic oligonucleotide
aagggcaacuccaccggac

SEQ ID NO: 1211234 - RNA, 19 nt, Artificial Sequence
  Description of Artificial Sequence: Synthetic oligonucleotide
cugacccauucucucaucc

SEQ ID NO: 1211235 - RNA, 19 nt, Artificial Sequence
  Description of Artificial Sequence: Synthetic oligonucleotide
uggcauuaccacaugccaa

SEQ ID NO: 1211236 - RNA, 19 nt, Artificial Sequence
  Description of Artificial Sequence: Synthetic oligonucleotide
cagaugugggccauugaug

SEQ ID NO: 1211237 - RNA, 19 nt, Artificial Sequence
  Description of Artificial Sequence: Synthetic oligonucleotide
cuaguccaaaaguggaauc

SEQ ID NO: 1211238 - RNA, 19 nt, Artificial Sequence
  Description of Artificial Sequence: Synthetic oligonucleotide
uccuucggaacauacugau

SEQ ID NO: 1211239 - RNA, 19 nt, Artificial Sequence
  Description of Artificial Sequence: Synthetic oligonucleotide
cuuuaucauccgagcagcc

SEQ ID NO: 1211240 - RNA, 19 nt, Artificial Sequence
  Description of Artificial Sequence: Synthetic oligonucleotide
caaguuccaaagugacggg

SEQ ID NO: 1211241 - RNA, 19 nt, Artificial Sequence
  Description of Artificial Sequence: Synthetic oligonucleotide
ccuauccccacacauaccc

SEQ ID NO: 1211242 - RNA, 19 nt, Artificial Sequence
  Description of Artificial Sequence: Synthetic oligonucleotide
cuuucaaaaggugacucca

SEQ ID NO: 1211243 - RNA, 19 nt, Artificial Sequence
  Description of Artificial Sequence: Synthetic oligonucleotide
uaagcagcuauugcgucga

SEQ ID NO: 1211244 - RNA, 19 nt, Artificial Sequence
  Description of Artificial Sequence: Synthetic oligonucleotide
aggaagugucaacauccag

SEQ ID NO: 1211245 - RNA, 19 nt, Artificial Sequence
  Description of Artificial Sequence: Synthetic oligonucleotide
aagaugauaagaggagauu

SEQ ID NO: 1211246 - RNA, 19 nt, Artificial Sequence
  Description of Artificial Sequence: Synthetic oligonucleotide
aaguuccaaagugacgggu

SEQ ID NO: 1211247 - RNA, 19 nt, Artificial Sequence
  Description of Artificial Sequence: Synthetic oligonucleotide
aaagcacgguagcacccug

SEQ ID NO: 1211248 - RNA, 19 nt, Artificial Sequence
  Description of Artificial Sequence: Synthetic oligonucleotide
ggcucgaacgccuucuccg

SEQ ID NO: 1211249 - RNA, 19 nt, Artificial Sequence
  Description of Artificial Sequence: Synthetic oligonucleotide
ugcugacuuuauaaaccca

SEQ ID NO: 1211250 - RNA, 19 nt, Artificial Sequence
  Description of Artificial Sequence: Synthetic oligonucleotide
aaagggcaacuccaccgga

SEQ ID NO: 1211251 - RNA, 19 nt, Artificial Sequence
  Description of Artificial Sequence: Synthetic oligonucleotide
augauaaaauggacauaac

SEQ ID NO: 1211252 - RNA, 19 nt, Artificial Sequence
  Description of Artificial Sequence: Synthetic oligonucleotide
uuaauguagcagguuccug

SEQ ID NO: 1211253 - RNA, 19 nt, Artificial Sequence
  Description of Artificial Sequence: Synthetic oligonucleotide
gaaaaggcacuugugcaca

SEQ ID NO: 1211254 - RNA, 19 nt, Artificial Sequence
  Description of Artificial Sequence: Synthetic oligonucleotide
aguccugcauaguauucca

SEQ ID NO: 1211255 - RNA, 19 nt, Artificial Sequence
  Description of Artificial Sequence: Synthetic oligonucleotide
auugacuccaugguggcaa

SEQ ID NO: 1211256 - RNA, 19 nt, Artificial Sequence
  Description of Artificial Sequence: Synthetic oligonucleotide
agacuucuuacuccagacu

SEQ ID NO: 1211257 - RNA, 19 nt, Artificial Sequence
  Description of Artificial Sequence: Synthetic oligonucleotide
aggugacuccacgucaccc

SEQ ID NO: 1211258 - RNA, 19 nt, Artificial Sequence
  Description of Artificial Sequence: Synthetic oligonucleotide
ggaaguuagccaacaaugc

SEQ ID NO: 1211259 - RNA, 19 nt, Artificial Sequence
  Description of Artificial Sequence: Synthetic oligonucleotide
cuuggcagcgcuccaugcc

SEQ ID NO: 1211260 - RNA, 19 nt, Artificial Sequence
  Description of Artificial Sequence: Synthetic oligonucleotide
ccacacauaccccaagugg

SEQ ID NO: 1211261 - RNA, 19 nt, Artificial Sequence
  Description of Artificial Sequence: Synthetic oligonucleotide
ucgaacgccuucuccgugc

SEQ ID NO: 1211262 - RNA, 19 nt, Artificial Sequence
  Description of Artificial Sequence: Synthetic oligonucleotide
aguggcucucuucugguau

SEQ ID NO: 1211263 - RNA, 19 nt, Artificial Sequence
  Description of Artificial Sequence: Synthetic oligonucleotide
caccggacugacauuguag

SEQ ID NO: 1211264 - RNA, 19 nt, Artificial Sequence
  Description of Artificial Sequence: Synthetic oligonucleotide
aagcacgguagcacccugc

SEQ ID NO: 1211265 - RNA, 19 nt, Artificial Sequence
  Description of Artificial Sequence: Synthetic oligonucleotide
gacaauacugacccauucu

SEQ ID NO: 1211266 - RNA, 19 nt, Artificial Sequence
  Description of Artificial Sequence: Synthetic oligonucleotide
ugacauuguaguuguuaau

SEQ ID NO: 1211267 - RNA, 19 nt, Artificial Sequence
  Description of Artificial Sequence: Synthetic oligonucleotide
agaaggcuuaaagaucaug

SEQ ID NO: 1211268 - RNA, 19 nt, Artificial Sequence
  Description of Artificial Sequence: Synthetic oligonucleotide
agcugcuaguccaaaagug

SEQ ID NO: 1211269 - RNA, 19 nt, Artificial Sequence
  Description of Artificial Sequence: Synthetic oligonucleotide
auauggacuuuccauuguu

SEQ ID NO: 1211270 - RNA, 19 nt, Artificial Sequence
  Description of Artificial Sequence: Synthetic oligonucleotide
uaucacucggccggugccg

SEQ ID NO: 1211271 - RNA, 19 nt, Artificial Sequence
  Description of Artificial Sequence: Synthetic oligonucleotide
uccaaagugacggguuuga

SEQ ID NO: 1211272 - RNA, 19 nt, Artificial Sequence
  Description of Artificial Sequence: Synthetic oligonucleotide
cuaucacucggccggugcc

SEQ ID NO: 1211273 - RNA, 19 nt, Artificial Sequence
  Description of Artificial Sequence: Synthetic oligonucleotide
aguauuccaggcauugcca

SEQ ID NO: 1211274 - RNA, 19 nt, Artificial Sequence
  Description of Artificial Sequence: Synthetic oligonucleotide
agacuuccaacaggcaauc

SEQ ID NO: 1211275 - RNA, 19 nt, Artificial Sequence
  Description of Artificial Sequence: Synthetic oligonucleotide
aguacucaauggucacuug

SEQ ID NO: 1211276 - RNA, 19 nt, Artificial Sequence
  Description of Artificial Sequence: Synthetic oligonucleotide
uaguacucaauggucacuu

SEQ ID NO: 1211277 - RNA, 19 nt, Artificial Sequence
  Description of Artificial Sequence: Synthetic oligonucleotide
accgucuuuagcugugagu

SEQ ID NO: 1211278 - RNA, 19 nt, Artificial Sequence
  Description of Artificial Sequence: Synthetic oligonucleotide
auacaccgucuuuagcugu

SEQ ID NO: 1211279 - RNA, 19 nt, Artificial Sequence
  Description of Artificial Sequence: Synthetic oligonucleotide
gcuuucaaaaggugacucc

SEQ ID NO: 1211280 - RNA, 19 nt, Artificial Sequence
  Description of Artificial Sequence: Synthetic oligonucleotide
caaacuuacuuccuuuucu

SEQ ID NO: 1211281 - RNA, 19 nt, Artificial Sequence
  Description of Artificial Sequence: Synthetic oligonucleotide
ucauccugcgugagugaca

SEQ ID NO: 1211282 - RNA, 19 nt, Artificial Sequence
  Description of Artificial Sequence: Synthetic oligonucleotide
gaagacaauacugacccau

SEQ ID NO: 1211283 - RNA, 19 nt, Artificial Sequence
  Description of Artificial Sequence: Synthetic oligonucleotide
ucauccgagcagccucuag

SEQ ID NO: 1211284 - RNA, 19 nt, Artificial Sequence
  Description of Artificial Sequence: Synthetic oligonucleotide
cauuguaguuguuaaugua

SEQ ID NO: 1211285 - RNA, 19 nt, Artificial Sequence
  Description of Artificial Sequence: Synthetic oligonucleotide
aggcgggccucaaauaugg

SEQ ID NO: 1211286 - RNA, 19 nt, Artificial Sequence
  Description of Artificial Sequence: Synthetic oligonucleotide
acauaccccaaguggcucu

SEQ ID NO: 1211287 - RNA, 19 nt, Artificial Sequence
  Description of Artificial Sequence: Synthetic oligonucleotide
cugcuaguccaaaagugga

SEQ ID NO: 1211288 - RNA, 19 nt, Artificial Sequence
  Description of Artificial Sequence: Synthetic oligonucleotide
cacauugaagagcccauga

SEQ ID NO: 1211289 - RNA, 19 nt, Artificial Sequence
  Description of Artificial Sequence: Synthetic oligonucleotide
gaagaugauaagaggagau

SEQ ID NO: 1211290 - RNA, 19 nt, Artificial Sequence
  Description of Artificial Sequence: Synthetic oligonucleotide
gaggaaguuagccaacaau

SEQ ID NO: 1211291 - RNA, 19 nt, Artificial Sequence
  Description of Artificial Sequence: Synthetic oligonucleotide
aaacacucuggugccauua

SEQ ID NO: 1211292 - RNA, 19 nt, Artificial Sequence
  Description of Artificial Sequence: Synthetic oligonucleotide
uggucacaugaacaggauu

SEQ ID NO: 1211293 - RNA, 19 nt, Artificial Sequence
  Description of Artificial Sequence: Synthetic oligonucleotide
uccuauccccacacauacc

SEQ ID NO: 1211294 - RNA, 19 nt, Artificial Sequence
  Description of Artificial Sequence: Synthetic oligonucleotide
aggucauguuaucucugca

SEQ ID NO: 1211295 - RNA, 19 nt, Artificial Sequence
  Description of Artificial Sequence: Synthetic oligonucleotide
uuccaaagugacggguuug

SEQ ID NO: 1211296 - RNA, 19 nt, Artificial Sequence
  Description of Artificial Sequence: Synthetic oligonucleotide
acacuguaaaguagcuauc

SEQ ID NO: 1211297 - RNA, 19 nt, Artificial Sequence
  Description of Artificial Sequence: Synthetic oligonucleotide
agcaaaccuggccuuggga

SEQ ID NO: 1211298 - RNA, 19 nt, Artificial Sequence
  Description of Artificial Sequence: Synthetic oligonucleotide
cacuguaaaguagcuauca

SEQ ID NO: 1211299 - RNA, 19 nt, Artificial Sequence
  Description of Artificial Sequence: Synthetic oligonucleotide
gcacuugugcacauuuucg

SEQ ID NO: 1211300 - RNA, 19 nt, Artificial Sequence
  Description of Artificial Sequence: Synthetic oligonucleotide
uaaaaugcaaggggucaua

SEQ ID NO: 1211301 - RNA, 19 nt, Artificial Sequence
  Description of Artificial Sequence: Synthetic oligonucleotide
aucauggcauuaccacaug

SEQ ID NO: 1211302 - RNA, 19 nt, Artificial Sequence
  Description of Artificial Sequence: Synthetic oligonucleotide
gccggugccggcucgaacg

SEQ ID NO: 1211303 - RNA, 19 nt, Artificial Sequence
  Description of Artificial Sequence: Synthetic oligonucleotide
caucuccacauacaccguc

SEQ ID NO: 1211304 - RNA, 19 nt, Artificial Sequence
  Description of Artificial Sequence: Synthetic oligonucleotide
agcagcuauugcgucgagg

SEQ ID NO: 1211305 - RNA, 19 nt, Artificial Sequence
  Description of Artificial Sequence: Synthetic oligonucleotide
agcacgguagcacccugcu

SEQ ID NO: 1211306 - RNA, 19 nt, Artificial Sequence
  Description of Artificial Sequence: Synthetic oligonucleotide
acacucuggugccauuaca

SEQ ID NO: 1211307 - RNA, 19 nt, Artificial Sequence
  Description of Artificial Sequence: Synthetic oligonucleotide
cuuuagcugugaguaguac

SEQ ID NO: 1211308 - RNA, 19 nt, Artificial Sequence
  Description of Artificial Sequence: Synthetic oligonucleotide
cuugugcacauuuucgacu

SEQ ID NO: 1211309 - RNA, 19 nt, Artificial Sequence
  Description of Artificial Sequence: Synthetic oligonucleotide
gagugacaaccugaauuug

SEQ ID NO: 1211310 - RNA, 19 nt, Artificial Sequence
  Description of Artificial Sequence: Synthetic oligonucleotide
ugucccugguaaagacccc

SEQ ID NO: 1211311 - RNA, 19 nt, Artificial Sequence
  Description of Artificial Sequence: Synthetic oligonucleotide
gacaugcucuccugccaug

SEQ ID NO: 1211312 - RNA, 19 nt, Artificial Sequence
  Description of Artificial Sequence: Synthetic oligonucleotide
auggacauaacugguccaa

SEQ ID NO: 1211313 - RNA, 19 nt, Artificial Sequence
  Description of Artificial Sequence: Synthetic oligonucleotide
aagacaauacugacccauu

SEQ ID NO: 1211314 - RNA, 19 nt, Artificial Sequence
  Description of Artificial Sequence: Synthetic oligonucleotide
ggaugucccugguaaagac

SEQ ID NO: 1211315 - RNA, 19 nt, Artificial Sequence
  Description of Artificial Sequence: Synthetic oligonucleotide
gucauguuaucucugcaau

SEQ ID NO: 1211316 - RNA, 19 nt, Artificial Sequence
  Description of Artificial Sequence: Synthetic oligonucleotide
uauugcgucgaggcagcca

SEQ ID NO: 1211317 - RNA, 19 nt, Artificial Sequence
  Description of Artificial Sequence: Synthetic oligonucleotide
ggcauuaccacaugccaaa

SEQ ID NO: 1211318 - RNA, 19 nt, Artificial Sequence
  Description of Artificial Sequence: Synthetic oligonucleotide
agugacggguuugauuccu

SEQ ID NO: 1211319 - RNA, 19 nt, Artificial Sequence
  Description of Artificial Sequence: Synthetic oligonucleotide
cauuggcccgcuucagaac

SEQ ID NO: 1211320 - RNA, 19 nt, Artificial Sequence
  Description of Artificial Sequence: Synthetic oligonucleotide
guuaucucugcaauuaguu

SEQ ID NO: 1211321 - RNA, 19 nt, Artificial Sequence
  Description of Artificial Sequence: Synthetic oligonucleotide
cauacugaucuccaccaua

SEQ ID NO: 1211322 - RNA, 19 nt, Artificial Sequence
  Description of Artificial Sequence: Synthetic oligonucleotide
acaucaggaugcugacaca

SEQ ID NO: 1211323 - RNA, 19 nt, Artificial Sequence
  Description of Artificial Sequence: Synthetic oligonucleotide
augccaguaggcacacuuc

SEQ ID NO: 1211324 - RNA, 19 nt, Artificial Sequence
  Description of Artificial Sequence: Synthetic oligonucleotide
gcagacuuccaacaggcaa

SEQ ID NO: 1211325 - RNA, 19 nt, Artificial Sequence
  Description of Artificial Sequence: Synthetic oligonucleotide
aaguggcucucuucuggua

SEQ ID NO: 1211326 - RNA, 19 nt, Artificial Sequence
  Description of Artificial Sequence: Synthetic oligonucleotide
cuccaugguggcaauugca

SEQ ID NO: 1211327 - RNA, 19 nt, Artificial Sequence
  Description of Artificial Sequence: Synthetic oligonucleotide
augcucuccugccauggau

SEQ ID NO: 1211328 - RNA, 19 nt, Artificial Sequence
  Description of Artificial Sequence: Synthetic oligonucleotide
acaaacacucuggugccau

SEQ ID NO: 1211329 - RNA, 19 nt, Artificial Sequence
  Description of Artificial Sequence: Synthetic oligonucleotide
ugaagggagaaggcuuaaa

SEQ ID NO: 1211330 - RNA, 19 nt, Artificial Sequence
  Description of Artificial Sequence: Synthetic oligonucleotide
caauugcauccuucuguuc

SEQ ID NO: 1211331 - RNA, 19 nt, Artificial Sequence
  Description of Artificial Sequence: Synthetic oligonucleotide
guagcacccugcuccuuug

SEQ ID NO: 1211332 - RNA, 19 nt, Artificial Sequence
  Description of Artificial Sequence: Synthetic oligonucleotide
acaggucauguuaucucug

SEQ ID NO: 1211333 - RNA, 19 nt, Artificial Sequence
  Description of Artificial Sequence: Synthetic oligonucleotide
gacggguuugauuccuuua

SEQ ID NO: 1211334 - RNA, 19 nt, Artificial Sequence
  Description of Artificial Sequence: Synthetic oligonucleotide
aaggagacuuuggccacau

SEQ ID NO: 1211335 - RNA, 19 nt, Artificial Sequence
  Description of Artificial Sequence: Synthetic oligonucleotide
ucgacugggaaggggccug

SEQ ID NO: 1211336 - RNA, 19 nt, Artificial Sequence
  Description of Artificial Sequence: Synthetic oligonucleotide
augccaaagcaggagcaga

SEQ ID NO: 1211337 - RNA, 19 nt, Artificial Sequence
  Description of Artificial Sequence: Synthetic oligonucleotide
cauuuucgacugggaaggg

SEQ ID NO: 1211338 - RNA, 19 nt, Artificial Sequence
  Description of Artificial Sequence: Synthetic oligonucleotide
aucucugcaauuaguuaaa

SEQ ID NO: 1211339 - RNA, 19 nt, Artificial Sequence
  Description of Artificial Sequence: Synthetic oligonucleotide
aagcagcuauugcgucgag

SEQ ID NO: 1211340 - RNA, 19 nt, Artificial Sequence
  Description of Artificial Sequence: Synthetic oligonucleotide
ugccaaauccugacuucuu

SEQ ID NO: 1211341 - RNA, 19 nt, Artificial Sequence
  Description of Artificial Sequence: Synthetic oligonucleotide
gaacgccuucuccgugccg

SEQ ID NO: 1211342 - RNA, 19 nt, Artificial Sequence
  Description of Artificial Sequence: Synthetic oligonucleotide
uggacauaacugguccaaa

SEQ ID NO: 1211343 - RNA, 19 nt, Artificial Sequence
  Description of Artificial Sequence: Synthetic oligonucleotide
acagccaaacuuacuuccu

SEQ ID NO: 1211344 - RNA, 19 nt, Artificial Sequence
  Description of Artificial Sequence: Synthetic oligonucleotide
ugacggguuugauuccuuu

SEQ ID NO: 1211345 - RNA, 19 nt, Artificial Sequence
  Description of Artificial Sequence: Synthetic oligonucleotide
aguuccaaagugacggguu

SEQ ID NO: 1211346 - RNA, 19 nt, Artificial Sequence
  Description of Artificial Sequence: Synthetic oligonucleotide
uucgacugggaaggggccu

SEQ ID NO: 1211347 - RNA, 19 nt, Artificial Sequence
  Description of Artificial Sequence: Synthetic oligonucleotide
cugcgugagugacaaccug

SEQ ID NO: 1211348 - RNA, 19 nt, Artificial Sequence
  Description of Artificial Sequence: Synthetic oligonucleotide
gcuaucacucggccggugc

SEQ ID NO: 1211349 - RNA, 19 nt, Artificial Sequence
  Description of Artificial Sequence: Synthetic oligonucleotide
cacaggucauguuaucucu

SEQ ID NO: 1211350 - RNA, 19 nt, Artificial Sequence
  Description of Artificial Sequence: Synthetic oligonucleotide
auccuucggaacauacuga

SEQ ID NO: 1211351 - RNA, 19 nt, Artificial Sequence
  Description of Artificial Sequence: Synthetic oligonucleotide
cacgucacccaucuccaca

SEQ ID NO: 1211352 - RNA, 19 nt, Artificial Sequence
  Description of Artificial Sequence: Synthetic oligonucleotide
gucugugcgucugggacac

SEQ ID NO: 1211353 - RNA, 19 nt, Artificial Sequence
  Description of Artificial Sequence: Synthetic oligonucleotide
cacaacuucuucuguaaau

SEQ ID NO: 1211354 - RNA, 19 nt, Artificial Sequence
  Description of Artificial Sequence: Synthetic oligonucleotide
uccaccggacugacauugu

SEQ ID NO: 1211355 - RNA, 19 nt, Artificial Sequence
  Description of Artificial Sequence: Synthetic oligonucleotide
uuggcccgcuucagaaccu

SEQ ID NO: 1211356 - RNA, 19 nt, Artificial Sequence
  Description of Artificial Sequence: Synthetic oligonucleotide
cagacuuccaacaggcaau

SEQ ID NO: 1211357 - RNA, 19 nt, Artificial Sequence
  Description of Artificial Sequence: Synthetic oligonucleotide
gcacauuuucgacugggaa

SEQ ID NO: 1211358 - RNA, 19 nt, Artificial Sequence
  Description of Artificial Sequence: Synthetic oligonucleotide
cauccugcgugagugacaa

SEQ ID NO: 1211359 - RNA, 19 nt, Artificial Sequence
  Description of Artificial Sequence: Synthetic oligonucleotide
cucgaacgccuucuccgug

SEQ ID NO: 1211360 - RNA, 19 nt, Artificial Sequence
  Description of Artificial Sequence: Synthetic oligonucleotide
gauugacuccaugguggca

SEQ ID NO: 1211361 - RNA, 19 nt, Artificial Sequence
  Description of Artificial Sequence: Synthetic oligonucleotide
ggacccuccugggaguugg

SEQ ID NO: 1211362 - RNA, 19 nt, Artificial Sequence
  Description of Artificial Sequence: Synthetic oligonucleotide
gaugaguggccccauccuu

SEQ ID NO: 1211363 - RNA, 19 nt, Artificial Sequence
  Description of Artificial Sequence: Synthetic oligonucleotide
ggacugacauuguaguugu

SEQ ID NO: 1211364 - RNA, 19 nt, Artificial Sequence
  Description of Artificial Sequence: Synthetic oligonucleotide
cacauaccccaaguggcuc

SEQ ID NO: 1211365 - RNA, 19 nt, Artificial Sequence
  Description of Artificial Sequence: Synthetic oligonucleotide
caugccaguaggcacacuu

SEQ ID NO: 1211366 - RNA, 19 nt, Artificial Sequence
  Description of Artificial Sequence: Synthetic oligonucleotide
cuccgugccgcagcugucc

SEQ ID NO: 1211367 - RNA, 19 nt, Artificial Sequence
  Description of Artificial Sequence: Synthetic oligonucleotide
gggucauauaauauccaaa

SEQ ID NO: 1211368 - RNA, 19 nt, Artificial Sequence
  Description of Artificial Sequence: Synthetic oligonucleotide
ggagauuugccuccaaguu

SEQ ID NO: 1211369 - RNA, 19 nt, Artificial Sequence
  Description of Artificial Sequence: Synthetic oligonucleotide
cggacugacauuguaguug

SEQ ID NO: 1211370 - RNA, 19 nt, Artificial Sequence
  Description of Artificial Sequence: Synthetic oligonucleotide
uggccccauccuuguaucu

SEQ ID NO: 1211371 - RNA, 19 nt, Artificial Sequence
  Description of Artificial Sequence: Synthetic oligonucleotide
uaccccaaguggcucucuu

SEQ ID NO: 1211372 - RNA, 19 nt, Artificial Sequence
  Description of Artificial Sequence: Synthetic oligonucleotide
gugggccauugaugagugg

SEQ ID NO: 1211373 - RNA, 19 nt, Artificial Sequence
  Description of Artificial Sequence: Synthetic oligonucleotide
ggucugugcgucugggaca

SEQ ID NO: 1211374 - RNA, 19 nt, Artificial Sequence
  Description of Artificial Sequence: Synthetic oligonucleotide
augcaaggggucauauaau

SEQ ID NO: 1211375 - RNA, 19 nt, Artificial Sequence
  Description of Artificial Sequence: Synthetic oligonucleotide
gcuauugcgucgaggcagc

SEQ ID NO: 1211376 - RNA, 19 nt, Artificial Sequence
  Description of Artificial Sequence: Synthetic oligonucleotide
ggaguuggacaugcucucc

SEQ ID NO: 1211377 - RNA, 19 nt, Artificial Sequence
  Description of Artificial Sequence: Synthetic oligonucleotide
acgcgguggucugugcguc

SEQ ID NO: 1211378 - RNA, 19 nt, Artificial Sequence
  Description of Artificial Sequence: Synthetic oligonucleotide
ucuccgugccgcagcuguc

SEQ ID NO: 1211379 - RNA, 19 nt, Artificial Sequence
  Description of Artificial Sequence: Synthetic oligonucleotide
gccucuagaaggacuuggc

SEQ ID NO: 1211380 - RNA, 19 nt, Artificial Sequence
  Description of Artificial Sequence: Synthetic oligonucleotide
gcauuaccacaugccaaag

SEQ ID NO: 1211381 - RNA, 19 nt, Artificial Sequence
  Description of Artificial Sequence: Synthetic oligonucleotide
guuccaaagugacggguuu

SEQ ID NO: 1211382 - RNA, 19 nt, Artificial Sequence
  Description of Artificial Sequence: Synthetic oligonucleotide
ccgucuuuagcugugagua

SEQ ID NO: 1211383 - RNA, 19 nt, Artificial Sequence
  Description of Artificial Sequence: Synthetic oligonucleotide
aaggacccuccugggaguu

SEQ ID NO: 1211384 - RNA, 19 nt, Artificial Sequence
  Description of Artificial Sequence: Synthetic oligonucleotide
auccugcgugagugacaac

SEQ ID NO: 1211385 - RNA, 19 nt, Artificial Sequence
  Description of Artificial Sequence: Synthetic oligonucleotide
augcuccuauccccacaca

SEQ ID NO: 1211386 - RNA, 19 nt, Artificial Sequence
  Description of Artificial Sequence: Synthetic oligonucleotide
aagacccguuccagaugug

SEQ ID NO: 1211387 - RNA, 19 nt, Artificial Sequence
  Description of Artificial Sequence: Synthetic oligonucleotide
cugugcgucugggacacga

SEQ ID NO: 1211388 - RNA, 19 nt, Artificial Sequence
  Description of Artificial Sequence: Synthetic oligonucleotide
gccugcaagauggaagaca

SEQ ID NO: 1211389 - RNA, 19 nt, Artificial Sequence
  Description of Artificial Sequence: Synthetic oligonucleotide
cuauugcgucgaggcagcc

SEQ ID NO: 1211390 - RNA, 19 nt, Artificial Sequence
  Description of Artificial Sequence: Synthetic oligonucleotide
ggaagacaauacugaccca

SEQ ID NO: 1211391 - RNA, 19 nt, Artificial Sequence
  Description of Artificial Sequence: Synthetic oligonucleotide
cagcuauugcgucgaggca

SEQ ID NO: 1211392 - RNA, 19 nt, Artificial Sequence
  Description of Artificial Sequence: Synthetic oligonucleotide
cagcugcuaguccaaaagu

SEQ ID NO: 1211393 - RNA, 19 nt, Artificial Sequence
  Description of Artificial Sequence: Synthetic oligonucleotide
agcagacuuccaacaggca

SEQ ID NO: 1211394 - RNA, 19 nt, Artificial Sequence
  Description of Artificial Sequence: Synthetic oligonucleotide
guccgccggcuccacgcgg

SEQ ID NO: 1211395 - RNA, 19 nt, Artificial Sequence
  Description of Artificial Sequence: Synthetic oligonucleotide
gcaauugcauccuucuguu

SEQ ID NO: 1211396 - RNA, 19 nt, Artificial Sequence
  Description of Artificial Sequence: Synthetic oligonucleotide
ccuucggaacauacugauc

SEQ ID NO: 1211397 - RNA, 19 nt, Artificial Sequence
  Description of Artificial Sequence: Synthetic oligonucleotide
gugagcccucuggaugucc

SEQ ID NO: 1211398 - RNA, 19 nt, Artificial Sequence
  Description of Artificial Sequence: Synthetic oligonucleotide
uagcuaucacucggccggu

SEQ ID NO: 1211399 - RNA, 19 nt, Artificial Sequence
  Description of Artificial Sequence: Synthetic oligonucleotide
acaccgucuuuagcuguga

SEQ ID NO: 1211400 - RNA, 19 nt, Artificial Sequence
  Description of Artificial Sequence: Synthetic oligonucleotide
cgucuuuagcugugaguag

SEQ ID NO: 1211401 - RNA, 19 nt, Artificial Sequence
  Description of Artificial Sequence: Synthetic oligonucleotide
ugugagcccucuggauguc

SEQ ID NO: 1211402 - RNA, 19 nt, Artificial Sequence
  Description of Artificial Sequence: Synthetic oligonucleotide
acuccaccggacugacauu

SEQ ID NO: 1211403 - RNA, 19 nt, Artificial Sequence
  Description of Artificial Sequence: Synthetic oligonucleotide
agcuaucacucggccggug

SEQ ID NO: 1211404 - RNA, 19 nt, Artificial Sequence
  Description of Artificial Sequence: Synthetic oligonucleotide
cugccaaauccugacuucu

SEQ ID NO: 1211405 - RNA, 19 nt, Artificial Sequence
  Description of Artificial Sequence: Synthetic oligonucleotide
ucugugcgucugggacacg

SEQ ID NO: 1211406 - RNA, 19 nt, Artificial Sequence
  Description of Artificial Sequence: Synthetic oligonucleotide
gcuaguccaaaaguggaau

SEQ ID NO: 1211407 - RNA, 19 nt, Artificial Sequence
  Description of Artificial Sequence: Synthetic oligonucleotide
caacauccaggcgggccuc

SEQ ID NO: 1211408 - RNA, 19 nt, Artificial Sequence
  Description of Artificial Sequence: Synthetic oligonucleotide
ccacauugaagagcccaug

SEQ ID NO: 1211409 - RNA, 19 nt, Artificial Sequence
  Description of Artificial Sequence: Synthetic oligonucleotide
aggcaaucuggaaggggua

SEQ ID NO: 1211410 - RNA, 19 nt, Artificial Sequence
  Description of Artificial Sequence: Synthetic oligonucleotide
uggcccgcuucagaaccuc

SEQ ID NO: 1211411 - RNA, 19 nt, Artificial Sequence
  Description of Artificial Sequence: Synthetic oligonucleotide
cuuucacacaggucauguu

SEQ ID NO: 1211412 - RNA, 19 nt, Artificial Sequence
  Description of Artificial Sequence: Synthetic oligonucleotide
cuggucacaugaacaggau

SEQ ID NO: 1211413 - RNA, 19 nt, Artificial Sequence
  Description of Artificial Sequence: Synthetic oligonucleotide
ccagaugugggccauugau

SEQ ID NO: 1211414 - RNA, 19 nt, Artificial Sequence
  Description of Artificial Sequence: Synthetic oligonucleotide
gcuguccgccggcuccacg

SEQ ID NO: 1211415 - RNA, 19 nt, Artificial Sequence
  Description of Artificial Sequence: Synthetic oligonucleotide
aggacccuccugggaguug

SEQ ID NO: 1211416 - RNA, 19 nt, Artificial Sequence
  Description of Artificial Sequence: Synthetic oligonucleotide
cacgcgguggucugugcgu

SEQ ID NO: 1211417 - RNA, 19 nt, Artificial Sequence
  Description of Artificial Sequence: Synthetic oligonucleotide
gccaguaggcacacuucca

SEQ ID NO: 1211418 - RNA, 19 nt, Artificial Sequence
  Description of Artificial Sequence: Synthetic oligonucleotide
ucgaggcagccaguucauu

SEQ ID NO: 1211419 - RNA, 19 nt, Artificial Sequence
  Description of Artificial Sequence: Synthetic oligonucleotide
gcaaggggucauauaauau

SEQ ID NO: 1211420 - RNA, 19 nt, Artificial Sequence
  Description of Artificial Sequence: Synthetic oligonucleotide
gcgugagugacaaccugaa

SEQ ID NO: 1211421 - RNA, 19 nt, Artificial Sequence
  Description of Artificial Sequence: Synthetic oligonucleotide
gcuccuauccccacacaua

SEQ ID NO: 1211422 - RNA, 19 nt, Artificial Sequence
  Description of Artificial Sequence: Synthetic oligonucleotide
caaucuggaagggguaauu

SEQ ID NO: 1211423 - RNA, 19 nt, Artificial Sequence
  Description of Artificial Sequence: Synthetic oligonucleotide
ggcagccaguucauuccac

SEQ ID NO: 1211424 - RNA, 19 nt, Artificial Sequence
  Description of Artificial Sequence: Synthetic oligonucleotide
ccuuuugcacaaacacucu

SEQ ID NO: 1211425 - RNA, 19 nt, Artificial Sequence
  Description of Artificial Sequence: Synthetic oligonucleotide
cgaacgccuucuccgugcc

SEQ ID NO: 1211426 - RNA, 19 nt, Artificial Sequence
  Description of Artificial Sequence: Synthetic oligonucleotide
cggcuucagucucaaauga

SEQ ID NO: 1211427 - RNA, 19 nt, Artificial Sequence
  Description of Artificial Sequence: Synthetic oligonucleotide
ucggccggugccggcucga

SEQ ID NO: 1211428 - RNA, 19 nt, Artificial Sequence
  Description of Artificial Sequence: Synthetic oligonucleotide
gcucgaacgccuucuccgu

SEQ ID NO: 1211429 - RNA, 19 nt, Artificial Sequence
  Description of Artificial Sequence: Synthetic oligonucleotide
ccggugccggcucgaacgc

SEQ ID NO: 1211430 - RNA, 19 nt, Artificial Sequence
  Description of Artificial Sequence: Synthetic oligonucleotide
gaguggccccauccuugua

SEQ ID NO: 1211431 - RNA, 19 nt, Artificial Sequence
  Description of Artificial Sequence: Synthetic oligonucleotide
ggguaauuccaugcuccua

SEQ ID NO: 1211432 - RNA, 19 nt, Artificial Sequence
  Description of Artificial Sequence: Synthetic oligonucleotide
gcgguggucugugcgucug

SEQ ID NO: 1211433 - RNA, 19 nt, Artificial Sequence
  Description of Artificial Sequence: Synthetic oligonucleotide
gcacgguagcacccugcuc

SEQ ID NO: 1211434 - RNA, 19 nt, Artificial Sequence
  Description of Artificial Sequence: Synthetic oligonucleotide
gcagccucuagaaggacuu

SEQ ID NO: 1211435 - RNA, 19 nt, Artificial Sequence
  Description of Artificial Sequence: Synthetic oligonucleotide
gcugugaguaguacucaau

SEQ ID NO: 1211436 - RNA, 19 nt, Artificial Sequence
  Description of Artificial Sequence: Synthetic oligonucleotide
ggccugcaagauggaagac

SEQ ID NO: 1211437 - RNA, 19 nt, Artificial Sequence
  Description of Artificial Sequence: Synthetic oligonucleotide
ggcagcgcuccaugccaga

SEQ ID NO: 1211438 - RNA, 19 nt, Artificial Sequence
  Description of Artificial Sequence: Synthetic oligonucleotide
ccugcgugagugacaaccu

SEQ ID NO: 1211439 - RNA, 19 nt, Artificial Sequence
  Description of Artificial Sequence: Synthetic oligonucleotide
caaacacucuggugccauu

SEQ ID NO: 1211440 - RNA, 19 nt, Artificial Sequence
  Description of Artificial Sequence: Synthetic oligonucleotide
ggcuucagucucaaaugau

SEQ ID NO: 1211441 - RNA, 19 nt, Artificial Sequence
  Description of Artificial Sequence: Synthetic oligonucleotide
ggugccggcucgaacgccu

SEQ ID NO: 1211442 - RNA, 19 nt, Artificial Sequence
  Description of Artificial Sequence: Synthetic oligonucleotide
gcaccacauugaagagccc

SEQ ID NO: 1211443 - RNA, 19 nt, Artificial Sequence
  Description of Artificial Sequence: Synthetic oligonucleotide
gucgaggcagccaguucau

SEQ ID NO: 1211444 - RNA, 19 nt, Artificial Sequence
  Description of Artificial Sequence: Synthetic oligonucleotide
ccaugccagacuucuuacu

SEQ ID NO: 1211445 - RNA, 19 nt, Artificial Sequence
  Description of Artificial Sequence: Synthetic oligonucleotide
cauugaugaguggccccau

SEQ ID NO: 1211446 - RNA, 19 nt, Artificial Sequence
  Description of Artificial Sequence: Synthetic oligonucleotide
ccaccggacugacauugua

SEQ ID NO: 1211447 - RNA, 19 nt, Artificial Sequence
  Description of Artificial Sequence: Synthetic oligonucleotide
ccggcucgaacgccuucuc

SEQ ID NO: 1211448 - RNA, 19 nt, Artificial Sequence
  Description of Artificial Sequence: Synthetic oligonucleotide
gccggcuccacgcgguggu

SEQ ID NO: 1211449 - RNA, 19 nt, Artificial Sequence
  Description of Artificial Sequence: Synthetic oligonucleotide
gggaaggggccugcaagau

SEQ ID NO: 1211450 - RNA, 19 nt, Artificial Sequence
  Description of Artificial Sequence: Synthetic oligonucleotide
ccauucucucauccugcgu

SEQ ID NO: 1211451 - RNA, 19 nt, Artificial Sequence
  Description of Artificial Sequence: Synthetic oligonucleotide
ggcgggccucaaauaugga

SEQ ID NO: 1211452 - RNA, 19 nt, Artificial Sequence
  Description of Artificial Sequence: Synthetic oligonucleotide
gugacggguuugauuccuu

SEQ ID NO: 1211453 - RNA, 19 nt, Artificial Sequence
  Description of Artificial Sequence: Synthetic oligonucleotide
gccggcucgaacgccuucu

SEQ ID NO: 1211454 - RNA, 19 nt, Artificial Sequence
  Description of Artificial Sequence: Synthetic oligonucleotide
ggccccauccuuguaucuu

SEQ ID NO: 1211455 - RNA, 19 nt, Artificial Sequence
  Description of Artificial Sequence: Synthetic oligonucleotide
ccggacugacauuguaguu

SEQ ID NO: 1211456 - RNA, 19 nt, Artificial Sequence
  Description of Artificial Sequence: Synthetic oligonucleotide
ggccucaaauauggacuuu

SEQ ID NO: 1211457 - RNA, 19 nt, Artificial Sequence
  Description of Artificial Sequence: Synthetic oligonucleotide
cggugccggcucgaacgcc

SEQ ID NO: 1211458 - RNA, 19 nt, Artificial Sequence
  Description of Artificial Sequence: Synthetic oligonucleotide
ccucggcuucagucucaaa

SEQ ID NO: 1211459 - RNA, 19 nt, Artificial Sequence
  Description of Artificial Sequence: Synthetic oligonucleotide
gugccggcucgaacgccuu

SEQ ID NO: 1211460 - RNA, 19 nt, Artificial Sequence
  Description of Artificial Sequence: Synthetic oligonucleotide
ccggcuccacgcggugguc

SEQ ID NO: 1211461 - RNA, 19 nt, Artificial Sequence
  Description of Artificial Sequence: Synthetic oligonucleotide
gcuccacgcgguggucugu

SEQ ID NO: 1211462 - RNA, 19 nt, Artificial Sequence
  Description of Artificial Sequence: Synthetic oligonucleotide
cgcgguggucugugcgucu

SEQ ID NO: 1211463 - RNA, 19 nt, Artificial Sequence
  Description of Artificial Sequence: Synthetic oligonucleotide
cggccggugccggcucgaa

SEQ ID NO: 1211464 - RNA, 19 nt, Artificial Sequence
  Description of Artificial Sequence: Synthetic oligonucleotide
uuuucauucgcuguagggg

SEQ ID NO: 1211465 - RNA, 19 nt, Artificial Sequence
  Description of Artificial Sequence: Synthetic oligonucleotide
aaucguugacuccccaacc

SEQ ID NO: 1211466 - RNA, 19 nt, Artificial Sequence
  Description of Artificial Sequence: Synthetic oligonucleotide
gaagucagcacgcugguag

SEQ ID NO: 1211467 - RNA, 19 nt, Artificial Sequence
  Description of Artificial Sequence: Synthetic oligonucleotide
ugggucuagaggaacaggg

SEQ ID NO: 1211468 - RNA, 19 nt, Artificial Sequence
  Description of Artificial Sequence: Synthetic oligonucleotide
aguacuuggagucagcggu

SEQ ID NO: 1211469 - RNA, 19 nt, Artificial Sequence
  Description of Artificial Sequence: Synthetic oligonucleotide
caugggauggaccaggucc

SEQ ID NO: 1211470 - RNA, 19 nt, Artificial Sequence
  Description of Artificial Sequence: Synthetic oligonucleotide
uuagcugcgacgcugcaag

SEQ ID NO: 1211471 - RNA, 19 nt, Artificial Sequence
  Description of Artificial Sequence: Synthetic oligonucleotide
agacaauugggucuagagg

SEQ ID NO: 1211472 - RNA, 19 nt, Artificial Sequence
  Description of Artificial Sequence: Synthetic oligonucleotide
uuuauuuucauucgcugua

SEQ ID NO: 1211473 - RNA, 19 nt, Artificial Sequence
  Description of Artificial Sequence: Synthetic oligonucleotide
caucuuucgguacagggcg

SEQ ID NO: 1211474 - RNA, 19 nt, Artificial Sequence
  Description of Artificial Sequence: Synthetic oligonucleotide
uacccuaucaagcaccuca

SEQ ID NO: 1211475 - RNA, 19 nt, Artificial Sequence
  Description of Artificial Sequence: Synthetic oligonucleotide
gauaacaucgcagucuccc

SEQ ID NO: 1211476 - RNA, 19 nt, Artificial Sequence
  Description of Artificial Sequence: Synthetic oligonucleotide
ucaagcaccucaaaguccu

SEQ ID NO: 1211477 - RNA, 19 nt, Artificial Sequence
  Description of Artificial Sequence: Synthetic oligonucleotide
gaggcuuuauuuucauucg

SEQ ID NO: 1211478 - RNA, 19 nt, Artificial Sequence
  Description of Artificial Sequence: Synthetic oligonucleotide
ucuucuacccuaucaagca

SEQ ID NO: 1211479 - RNA, 19 nt, Artificial Sequence
  Description of Artificial Sequence: Synthetic oligonucleotide
agcaucuuucgguacaggg

SEQ ID NO: 1211480 - RNA, 19 nt, Artificial Sequence
  Description of Artificial Sequence: Synthetic oligonucleotide
ugagcauugccacacuccc

SEQ ID NO: 1211481 - RNA, 19 nt, Artificial Sequence
  Description of Artificial Sequence: Synthetic oligonucleotide
aucguugacuccccaaccc

SEQ ID NO: 1211482 - RNA, 19 nt, Artificial Sequence
  Description of Artificial Sequence: Synthetic oligonucleotide
uuucgcagcaauccguucc

SEQ ID NO: 1211483 - RNA, 19 nt, Artificial Sequence
  Description of Artificial Sequence: Synthetic oligonucleotide
uaucaagcaccucaaaguc

SEQ ID NO: 1211484 - RNA, 19 nt, Artificial Sequence
  Description of Artificial Sequence: Synthetic oligonucleotide
auguaugggcuccugcugc

SEQ ID NO: 1211485 - RNA, 19 nt, Artificial Sequence
  Description of Artificial Sequence: Synthetic oligonucleotide
uuucauucgcuguagggga

SEQ ID NO: 1211486 - RNA, 19 nt, Artificial Sequence
  Description of Artificial Sequence: Synthetic oligonucleotide
uuucuuuaccagcuuggag

SEQ ID NO: 1211487 - RNA, 19 nt, Artificial Sequence
  Description of Artificial Sequence: Synthetic oligonucleotide
aucuucuacccuaucaagc

SEQ ID NO: 1211488 - RNA, 19 nt, Artificial Sequence
  Description of Artificial Sequence: Synthetic oligonucleotide
cacgaagucagcacgcugg

SEQ ID NO: 1211489 - RNA, 19 nt, Artificial Sequence
  Description of Artificial Sequence: Synthetic oligonucleotide
uucuacccuaucaagcacc

SEQ ID NO: 1211490 - RNA, 19 nt, Artificial Sequence
  Description of Artificial Sequence: Synthetic oligonucleotide
ucuuccuguacucgggugc

SEQ ID NO: 1211491 - RNA, 19 nt, Artificial Sequence
  Description of Artificial Sequence: Synthetic oligonucleotide
aggcuuuauuuucauucgc

SEQ ID NO: 1211492 - RNA, 19 nt, Artificial Sequence
  Description of Artificial Sequence: Synthetic oligonucleotide
ucaggaacugacccugcgg

SEQ ID NO: 1211493 - RNA, 19 nt, Artificial Sequence
  Description of Artificial Sequence: Synthetic oligonucleotide
gcauggaucgucuuguugg

SEQ ID NO: 1211494 - RNA, 19 nt, Artificial Sequence
  Description of Artificial Sequence: Synthetic oligonucleotide
aggaacguagugcugcgcg

SEQ ID NO: 1211495 - RNA, 19 nt, Artificial Sequence
  Description of Artificial Sequence: Synthetic oligonucleotide
cuuguuggaagguuccagc

SEQ ID NO: 1211496 - RNA, 19 nt, Artificial Sequence
  Description of Artificial Sequence: Synthetic oligonucleotide
ugucccauguccucuagug

SEQ ID NO: 1211497 - RNA, 19 nt, Artificial Sequence
  Description of Artificial Sequence: Synthetic oligonucleotide
uccagcuuuagcugcgacg

SEQ ID NO: 1211498 - RNA, 19 nt, Artificial Sequence
  Description of Artificial Sequence: Synthetic oligonucleotide
uggaucgucuuguuggaag

SEQ ID NO: 1211499 - RNA, 19 nt, Artificial Sequence
  Description of Artificial Sequence: Synthetic oligonucleotide
agcaccuggcuacaggaac

SEQ ID NO: 1211500 - RNA, 19 nt, Artificial Sequence
  Description of Artificial Sequence: Synthetic oligonucleotide
aaugggacagagacaauug

SEQ ID NO: 1211501 - RNA, 19 nt, Artificial Sequence
  Description of Artificial Sequence: Synthetic oligonucleotide
gaaccguagcaguacuugg

SEQ ID NO: 1211502 - RNA, 19 nt, Artificial Sequence
  Description of Artificial Sequence: Synthetic oligonucleotide
acauuuggcgggcagccgg

SEQ ID NO: 1211503 - RNA, 19 nt, Artificial Sequence
  Description of Artificial Sequence: Synthetic oligonucleotide
aggacuaguaguaagggcu

SEQ ID NO: 1211504 - RNA, 19 nt, Artificial Sequence
  Description of Artificial Sequence: Synthetic oligonucleotide
uggauaacaucgcagucuc

SEQ ID NO: 1211505 - RNA, 19 nt, Artificial Sequence
  Description of Artificial Sequence: Synthetic oligonucleotide
uuauuuucauucgcuguag

SEQ ID NO: 1211506 - RNA, 19 nt, Artificial Sequence
  Description of Artificial Sequence: Synthetic oligonucleotide
uguaugacccucaaucguu

SEQ ID NO: 1211507 - RNA, 19 nt, Artificial Sequence
  Description of Artificial Sequence: Synthetic oligonucleotide
gacacuugaccuucaguug

SEQ ID NO: 1211508 - RNA, 19 nt, Artificial Sequence
  Description of Artificial Sequence: Synthetic oligonucleotide
uugccaggacauuuggcgg

SEQ ID NO: 1211509 - RNA, 19 nt, Artificial Sequence
  Description of Artificial Sequence: Synthetic oligonucleotide
gacaucugcaggugcacag

SEQ ID NO: 1211510 - RNA, 19 nt, Artificial Sequence
  Description of Artificial Sequence: Synthetic oligonucleotide
uuguuggagguguaugacc

SEQ ID NO: 1211511 - RNA, 19 nt, Artificial Sequence
  Description of Artificial Sequence: Synthetic oligonucleotide
aauggccucacuguauuca

SEQ ID NO: 1211512 - RNA, 19 nt, Artificial Sequence
  Description of Artificial Sequence: Synthetic oligonucleotide
accaccuggcccuugagug

SEQ ID NO: 1211513 - RNA, 19 nt, Artificial Sequence
  Description of Artificial Sequence: Synthetic oligonucleotide
gacgcugcaagguuguuca

SEQ ID NO: 1211514 - RNA, 19 nt, Artificial Sequence
  Description of Artificial Sequence: Synthetic oligonucleotide
aucaagcaccucaaagucc

SEQ ID NO: 1211515 - RNA, 19 nt, Artificial Sequence
  Description of Artificial Sequence: Synthetic oligonucleotide
gauguaugggcuccugcug

SEQ ID NO: 1211516 - RNA, 19 nt, Artificial Sequence
  Description of Artificial Sequence: Synthetic oligonucleotide
acuaguaguaagggcugcc

SEQ ID NO: 1211517 - RNA, 19 nt, Artificial Sequence
  Description of Artificial Sequence: Synthetic oligonucleotide
gacuccccaacccagagga

SEQ ID NO: 1211518 - RNA, 19 nt, Artificial Sequence
  Description of Artificial Sequence: Synthetic oligonucleotide
ucccauguccucuaguggu

SEQ ID NO: 1211519 - RNA, 19 nt, Artificial Sequence
  Description of Artificial Sequence: Synthetic oligonucleotide
agucgccccaaacagccac

SEQ ID NO: 1211520 - RNA, 19 nt, Artificial Sequence
  Description of Artificial Sequence: Synthetic oligonucleotide
cuucuuucgcagcaauccg

SEQ ID NO: 1211521 - RNA, 19 nt, Artificial Sequence
  Description of Artificial Sequence: Synthetic oligonucleotide
aauccguuccccaggaugu

SEQ ID NO: 1211522 - RNA, 19 nt, Artificial Sequence
  Description of Artificial Sequence: Synthetic oligonucleotide
aggucauguccacuuuggc

SEQ ID NO: 1211523 - RNA, 19 nt, Artificial Sequence
  Description of Artificial Sequence: Synthetic oligonucleotide
uucuuucgcagcaauccgu

SEQ ID NO: 1211524 - RNA, 19 nt, Artificial Sequence
  Description of Artificial Sequence: Synthetic oligonucleotide
ucuucagggugacuuccag

SEQ ID NO: 1211525 - RNA, 19 nt, Artificial Sequence
  Description of Artificial Sequence: Synthetic oligonucleotide
auugccacacucccgcuug

SEQ ID NO: 1211526 - RNA, 19 nt, Artificial Sequence
  Description of Artificial Sequence: Synthetic oligonucleotide
cagcgugaaggccaguucg

SEQ ID NO: 1211527 - RNA, 19 nt, Artificial Sequence
  Description of Artificial Sequence: Synthetic oligonucleotide
uuguuggaagguuccagcu

SEQ ID NO: 1211528 - RNA, 19 nt, Artificial Sequence
  Description of Artificial Sequence: Synthetic oligonucleotide
uggggagggauguaugggc

SEQ ID NO: 1211529 - RNA, 19 nt, Artificial Sequence
  Description of Artificial Sequence: Synthetic oligonucleotide
uucgcagcaauccguuccc

SEQ ID NO: 1211530 - RNA, 19 nt, Artificial Sequence
  Description of Artificial Sequence: Synthetic oligonucleotide
ugguagugagcauugccac

SEQ ID NO: 1211531 - RNA, 19 nt, Artificial Sequence
  Description of Artificial Sequence: Synthetic oligonucleotide
uacucgggugccauuuucc

SEQ ID NO: 1211532 - RNA, 19 nt, Artificial Sequence
  Description of Artificial Sequence: Synthetic oligonucleotide
caauccguuccccaggaug

SEQ ID NO: 1211533 - RNA, 19 nt, Artificial Sequence
  Description of Artificial Sequence: Synthetic oligonucleotide
uuggagucagcggugacca

SEQ ID NO: 1211534 - RNA, 19 nt, Artificial Sequence
  Description of Artificial Sequence: Synthetic oligonucleotide
ucuacccuaucaagcaccu

SEQ ID NO: 1211535 - RNA, 19 nt, Artificial Sequence
  Description of Artificial Sequence: Synthetic oligonucleotide
caaucguugacuccccaac

SEQ ID NO: 1211536 - RNA, 19 nt, Artificial Sequence
  Description of Artificial Sequence: Synthetic oligonucleotide
uucauucgcuguaggggag

SEQ ID NO: 1211537 - RNA, 19 nt, Artificial Sequence
  Description of Artificial Sequence: Synthetic oligonucleotide
gagcgggacacugaggucc

SEQ ID NO: 1211538 - RNA, 19 nt, Artificial Sequence
  Description of Artificial Sequence: Synthetic oligonucleotide
aacagugccuugauguugu

SEQ ID NO: 1211539 - RNA, 19 nt, Artificial Sequence
  Description of Artificial Sequence: Synthetic oligonucleotide
ugcccugccuccuccaccg

SEQ ID NO: 1211540 - RNA, 19 nt, Artificial Sequence
  Description of Artificial Sequence: Synthetic oligonucleotide
caggacuaguaguaagggc

SEQ ID NO: 1211541 - RNA, 19 nt, Artificial Sequence
  Description of Artificial Sequence: Synthetic oligonucleotide
ugccuugggaaccguagca

SEQ ID NO: 1211542 - RNA, 19 nt, Artificial Sequence
  Description of Artificial Sequence: Synthetic oligonucleotide
ugacuccccaacccagagg

SEQ ID NO: 1211543 - RNA, 19 nt, Artificial Sequence
  Description of Artificial Sequence: Synthetic oligonucleotide
ccuaucaagcaccucaaag

SEQ ID NO: 1211544 - RNA, 19 nt, Artificial Sequence
  Description of Artificial Sequence: Synthetic oligonucleotide
cauaggaguuggcagccag

SEQ ID NO: 1211545 - RNA, 19 nt, Artificial Sequence
  Description of Artificial Sequence: Synthetic oligonucleotide
agucucccagcgugaaggc

SEQ ID NO: 1211546 - RNA, 19 nt, Artificial Sequence
  Description of Artificial Sequence: Synthetic oligonucleotide
aggacauuuggcgggcagc

SEQ ID NO: 1211547 - RNA, 19 nt, Artificial Sequence
  Description of Artificial Sequence: Synthetic oligonucleotide
caguacuuggagucagcgg

SEQ ID NO: 1211548 - RNA, 19 nt, Artificial Sequence
  Description of Artificial Sequence: Synthetic oligonucleotide
ggcggguagagccuggugg

SEQ ID NO: 1211549 - RNA, 19 nt, Artificial Sequence
  Description of Artificial Sequence: Synthetic oligonucleotide
ucguugacuccccaaccca

SEQ ID NO: 1211550 - RNA, 19 nt, Artificial Sequence
  Description of Artificial Sequence: Synthetic oligonucleotide
ucgucuuguuggaagguuc

SEQ ID NO: 1211551 - RNA, 19 nt, Artificial Sequence
  Description of Artificial Sequence: Synthetic oligonucleotide
ugggccagggaccaguguc

SEQ ID NO: 1211552 - RNA, 19 nt, Artificial Sequence
  Description of Artificial Sequence: Synthetic oligonucleotide
uccccaacccagaggaggc

SEQ ID NO: 1211553 - RNA, 19 nt, Artificial Sequence
  Description of Artificial Sequence: Synthetic oligonucleotide
ugcggcucguuucuuuacc

SEQ ID NO: 1211554 - RNA, 19 nt, Artificial Sequence
  Description of Artificial Sequence: Synthetic oligonucleotide
gaacagugccuugauguug

SEQ ID NO: 1211555 - RNA, 19 nt, Artificial Sequence
  Description of Artificial Sequence: Synthetic oligonucleotide
aagucagcacgcugguagu

SEQ ID NO: 1211556 - RNA, 19 nt, Artificial Sequence
  Description of Artificial Sequence: Synthetic oligonucleotide
auaacaucgcagucuccca

SEQ ID NO: 1211557 - RNA, 19 nt, Artificial Sequence
  Description of Artificial Sequence: Synthetic oligonucleotide
uguaugggcuccugcugcc

SEQ ID NO: 1211558 - RNA, 19 nt, Artificial Sequence
  Description of Artificial Sequence: Synthetic oligonucleotide
cuaguaguaagggcugccc

SEQ ID NO: 1211559 - RNA, 19 nt, Artificial Sequence
  Description of Artificial Sequence: Synthetic oligonucleotide
ucaaucguugacuccccaa

SEQ ID NO: 1211560 - RNA, 19 nt, Artificial Sequence
  Description of Artificial Sequence: Synthetic oligonucleotide
acccucaaucguugacucc

SEQ ID NO: 1211561 - RNA, 19 nt, Artificial Sequence
  Description of Artificial Sequence: Synthetic oligonucleotide
auugggucuagaggaacag

SEQ ID NO: 1211562 - RNA, 19 nt, Artificial Sequence
  Description of Artificial Sequence: Synthetic oligonucleotide
uugggucuagaggaacagg

SEQ ID NO: 1211563 - RNA, 19 nt, Artificial Sequence
  Description of Artificial Sequence: Synthetic oligonucleotide
gucccauguccucuagugg

SEQ ID NO: 1211564 - RNA, 19 nt, Artificial Sequence
  Description of Artificial Sequence: Synthetic oligonucleotide
uguccucuagugguggcag

SEQ ID NO: 1211565 - RNA, 19 nt, Artificial Sequence
  Description of Artificial Sequence: Synthetic oligonucleotide
cagggugacuuccaggcac

SEQ ID NO: 1211566 - RNA, 19 nt, Artificial Sequence
  Description of Artificial Sequence: Synthetic oligonucleotide
cagcagucgccccaaacag

SEQ ID NO: 1211567 - RNA, 19 nt, Artificial Sequence
  Description of Artificial Sequence: Synthetic oligonucleotide
ggggaucaggaacugaccc

SEQ ID NO: 1211568 - RNA, 19 nt, Artificial Sequence
  Description of Artificial Sequence: Synthetic oligonucleotide
gaccauggcugucucgccc

SEQ ID NO: 1211569 - RNA, 19 nt, Artificial Sequence
  Description of Artificial Sequence: Synthetic oligonucleotide
guagugguccagcuuuagc

SEQ ID NO: 1211570 - RNA, 19 nt, Artificial Sequence
  Description of Artificial Sequence: Synthetic oligonucleotide
cuuguuggagguguaugac

SEQ ID NO: 1211571 - RNA, 19 nt, Artificial Sequence
  Description of Artificial Sequence: Synthetic oligonucleotide
aaccguagcaguacuugga

SEQ ID NO: 1211572 - RNA, 19 nt, Artificial Sequence
  Description of Artificial Sequence: Synthetic oligonucleotide
guugcccagcaucuuucgg

SEQ ID NO: 1211573 - RNA, 19 nt, Artificial Sequence
  Description of Artificial Sequence: Synthetic oligonucleotide
cugaggcgaggccugaccc

SEQ ID NO: 1211574 - RNA, 19 nt, Artificial Sequence
  Description of Artificial Sequence: Synthetic oligonucleotide
cuucuacccuaucaagcac

SEQ ID NO: 1211575 - RNA, 19 nt, Artificial Sequence
  Description of Artificial Sequence: Synthetic oligonucleotide
uaugacccucaaucguuga

SEQ ID NO: 1211576 - RNA, 19 nt, Artificial Sequence
  Description of Artificial Sequence: Synthetic oligonucleotide
gacccucaaucguugacuc

SEQ ID NO: 1211577 - RNA, 19 nt, Artificial Sequence
  Description of Artificial Sequence: Synthetic oligonucleotide
uccgcauggaucgucuugu

SEQ ID NO: 1211578 - RNA, 19 nt, Artificial Sequence
  Description of Artificial Sequence: Synthetic oligonucleotide
uccaugagcgggacacuga

SEQ ID NO: 1211579 - RNA, 19 nt, Artificial Sequence
  Description of Artificial Sequence: Synthetic oligonucleotide
aacagggccccucccucug

SEQ ID NO: 1211580 - RNA, 19 nt, Artificial Sequence
  Description of Artificial Sequence: Synthetic oligonucleotide
gugagcauugccacacucc

SEQ ID NO: 1211581 - RNA, 19 nt, Artificial Sequence
  Description of Artificial Sequence: Synthetic oligonucleotide
ccuggcuacaggaacguag

SEQ ID NO: 1211582 - RNA, 19 nt, Artificial Sequence
  Description of Artificial Sequence: Synthetic oligonucleotide
agcuuuagcugcgacgcug

SEQ ID NO: 1211583 - RNA, 19 nt, Artificial Sequence
  Description of Artificial Sequence: Synthetic oligonucleotide
ugcugcgcgguaguggucc

SEQ ID NO: 1211584 - RNA, 19 nt, Artificial Sequence
  Description of Artificial Sequence: Synthetic oligonucleotide
gcugcaagguuguucagac

SEQ ID NO: 1211585 - RNA, 19 nt, Artificial Sequence
  Description of Artificial Sequence: Synthetic oligonucleotide
ucuagugguggcagcccac

SEQ ID NO: 1211586 - RNA, 19 nt, Artificial Sequence
  Description of Artificial Sequence: Synthetic oligonucleotide
uggagguguaugacccuca

SEQ ID NO: 1211587 - RNA, 19 nt, Artificial Sequence
  Description of Artificial Sequence: Synthetic oligonucleotide
agggcggucucugugcuuc

SEQ ID NO: 1211588 - RNA, 19 nt, Artificial Sequence
  Description of Artificial Sequence: Synthetic oligonucleotide
agcacgcugguagugagca

SEQ ID NO: 1211589 - RNA, 19 nt, Artificial Sequence
  Description of Artificial Sequence: Synthetic oligonucleotide
caugagcgggacacugagg

SEQ ID NO: 1211590 - RNA, 19 nt, Artificial Sequence
  Description of Artificial Sequence: Synthetic oligonucleotide
ccagcuuuagcugcgacgc

SEQ ID NO: 1211591 - RNA, 19 nt, Artificial Sequence
  Description of Artificial Sequence: Synthetic oligonucleotide
agcagucgccccaaacagc

SEQ ID NO: 1211592 - RNA, 19 nt, Artificial Sequence
  Description of Artificial Sequence: Synthetic oligonucleotide
uuggaagguuccagcuuca

SEQ ID NO: 1211593 - RNA, 19 nt, Artificial Sequence
  Description of Artificial Sequence: Synthetic oligonucleotide
agggcagcccucaggaugg

SEQ ID NO: 1211594 - RNA, 19 nt, Artificial Sequence
  Description of Artificial Sequence: Synthetic oligonucleotide
ugugcuucgcugugcggcu

SEQ ID NO: 1211595 - RNA, 19 nt, Artificial Sequence
  Description of Artificial Sequence: Synthetic oligonucleotide
ugggaaccguagcaguacu

SEQ ID NO: 1211596 - RNA, 19 nt, Artificial Sequence
  Description of Artificial Sequence: Synthetic oligonucleotide
uccugcuuguuggaggugu

SEQ ID NO: 1211597 - RNA, 19 nt, Artificial Sequence
  Description of Artificial Sequence: Synthetic oligonucleotide
cucaggaugggaauggccu

SEQ ID NO: 1211598 - RNA, 19 nt, Artificial Sequence
  Description of Artificial Sequence: Synthetic oligonucleotide
uugggaaccguagcaguac

SEQ ID NO: 1211599 - RNA, 19 nt, Artificial Sequence
  Description of Artificial Sequence: Synthetic oligonucleotide
agcaauccguuccccagga

SEQ ID NO: 1211600 - RNA, 19 nt, Artificial Sequence
  Description of Artificial Sequence: Synthetic oligonucleotide
gauggaccagguccccuug

SEQ ID NO: 1211601 - RNA, 19 nt, Artificial Sequence
  Description of Artificial Sequence: Synthetic oligonucleotide
accgucagcugucccaugu

SEQ ID NO: 1211602 - RNA, 19 nt, Artificial Sequence
  Description of Artificial Sequence: Synthetic oligonucleotide
cagcacgaagucagcacgc

SEQ ID NO: 1211603 - RNA, 19 nt, Artificial Sequence
  Description of Artificial Sequence: Synthetic oligonucleotide
ggaacucccgagcaagggc

SEQ ID NO: 1211604 - RNA, 19 nt, Artificial Sequence
  Description of Artificial Sequence: Synthetic oligonucleotide
ugcgacgcugcaagguugu

SEQ ID NO: 1211605 - RNA, 19 nt, Artificial Sequence
  Description of Artificial Sequence: Synthetic oligonucleotide
gcugguagugagcauugcc

SEQ ID NO: 1211606 - RNA, 19 nt, Artificial Sequence
  Description of Artificial Sequence: Synthetic oligonucleotide
agggccuggauaacaucgc

SEQ ID NO: 1211607 - RNA, 19 nt, Artificial Sequence
  Description of Artificial Sequence: Synthetic oligonucleotide
ccagcacgaagucagcacg

SEQ ID NO: 1211608 - RNA, 19 nt, Artificial Sequence
  Description of Artificial Sequence: Synthetic oligonucleotide
agggcuccgcccaggaugc

SEQ ID NO: 1211609 - RNA, 19 nt, Artificial Sequence
  Description of Artificial Sequence: Synthetic oligonucleotide
ggaacguagugcugcgcgg

SEQ ID NO: 1211610 - RNA, 19 nt, Artificial Sequence
  Description of Artificial Sequence: Synthetic oligonucleotide
gcaggacuaguaguaaggg

SEQ ID NO: 1211611 - RNA, 19 nt, Artificial Sequence
  Description of Artificial Sequence: Synthetic oligonucleotide
gacuaguaguaagggcugc

SEQ ID NO: 1211612 - RNA, 19 nt, Artificial Sequence
  Description of Artificial Sequence: Synthetic oligonucleotide
uucgcugugcggcucguuu

SEQ ID NO: 1211613 - RNA, 19 nt, Artificial Sequence
  Description of Artificial Sequence: Synthetic oligonucleotide
ggcucguuucuuuaccagc

SEQ ID NO: 1211614 - RNA, 19 nt, Artificial Sequence
  Description of Artificial Sequence: Synthetic oligonucleotide
cacuuccaugggauggacc

SEQ ID NO: 1211615 - RNA, 19 nt, Artificial Sequence
  Description of Artificial Sequence: Synthetic oligonucleotide
ggaucaggaacugacccug

SEQ ID NO: 1211616 - RNA, 19 nt, Artificial Sequence
  Description of Artificial Sequence: Synthetic oligonucleotide
cuguaggggagccuggaca

SEQ ID NO: 1211617 - RNA, 19 nt, Artificial Sequence
  Description of Artificial Sequence: Synthetic oligonucleotide
uggcuacaggaacguagug

SEQ ID NO: 1211618 - RNA, 19 nt, Artificial Sequence
  Description of Artificial Sequence: Synthetic oligonucleotide
uauucaccuugcugagcca

SEQ ID NO: 1211619 - RNA, 19 nt, Artificial Sequence
  Description of Artificial Sequence: Synthetic oligonucleotide
ggaaccguagcaguacuug

SEQ ID NO: 1211620 - RNA, 19 nt, Artificial Sequence
  Description of Artificial Sequence: Synthetic oligonucleotide
guaugacccucaaucguug

SEQ ID NO: 1211621 - RNA, 19 nt, Artificial Sequence
  Description of Artificial Sequence: Synthetic oligonucleotide
ucauucgcuguaggggagc

SEQ ID NO: 1211622 - RNA, 19 nt, Artificial Sequence
  Description of Artificial Sequence: Synthetic oligonucleotide
cuuccuguacucgggugcc

SEQ ID NO: 1211623 - RNA, 19 nt, Artificial Sequence
  Description of Artificial Sequence: Synthetic oligonucleotide
ugugcggcucguuucuuua

SEQ ID NO: 1211624 - RNA, 19 nt, Artificial Sequence
  Description of Artificial Sequence: Synthetic oligonucleotide
agcaguacuuggagucagc

SEQ ID NO: 1211625 - RNA, 19 nt, Artificial Sequence
  Description of Artificial Sequence: Synthetic oligonucleotide
gacauuuggcgggcagccg

SEQ ID NO: 1211626 - RNA, 19 nt, Artificial Sequence
  Description of Artificial Sequence: Synthetic oligonucleotide
uuuagcugcgacgcugcaa

SEQ ID NO: 1211627 - RNA, 19 nt, Artificial Sequence
  Description of Artificial Sequence: Synthetic oligonucleotide
uggagagcuccgcauggau

SEQ ID NO: 1211628 - RNA, 19 nt, Artificial Sequence
  Description of Artificial Sequence: Synthetic oligonucleotide
gcuacaggaacguagugcu

SEQ ID NO: 1211629 - RNA, 19 nt, Artificial Sequence
  Description of Artificial Sequence: Synthetic oligonucleotide
cuugagugggcggguagag

SEQ ID NO: 1211630 - RNA, 19 nt, Artificial Sequence
  Description of Artificial Sequence: Synthetic oligonucleotide
gcaguacuuggagucagcg

SEQ ID NO: 1211631 - RNA, 19 nt, Artificial Sequence
  Description of Artificial Sequence: Synthetic oligonucleotide
uuggagguguaugacccuc

SEQ ID NO: 1211632 - RNA, 19 nt, Artificial Sequence
  Description of Artificial Sequence: Synthetic oligonucleotide
ucccgcuugcgguuggcca

SEQ ID NO: 1211633 - RNA, 19 nt, Artificial Sequence
  Description of Artificial Sequence: Synthetic oligonucleotide
agcgugaaggccaguucgg

SEQ ID NO: 1211634 - RNA, 19 nt, Artificial Sequence
  Description of Artificial Sequence: Synthetic oligonucleotide
ugcauggggagggauguau

SEQ ID NO: 1211635 - RNA, 19 nt, Artificial Sequence
  Description of Artificial Sequence: Synthetic oligonucleotide
auggccuugauggccaggu

SEQ ID NO: 1211636 - RNA, 19 nt, Artificial Sequence
  Description of Artificial Sequence: Synthetic oligonucleotide
acgaagucagcacgcuggu

SEQ ID NO: 1211637 - RNA, 19 nt, Artificial Sequence
  Description of Artificial Sequence: Synthetic oligonucleotide
caaaugggcaggacuagua

SEQ ID NO: 1211638 - RNA, 19 nt, Artificial Sequence
  Description of Artificial Sequence: Synthetic oligonucleotide
gguugcccagcaucuuucg

SEQ ID NO: 1211639 - RNA, 19 nt, Artificial Sequence
  Description of Artificial Sequence: Synthetic oligonucleotide
gcggguagagccugguggg

SEQ ID NO: 1211640 - RNA, 19 nt, Artificial Sequence
  Description of Artificial Sequence: Synthetic oligonucleotide
gguucuguagcugccagga

SEQ ID NO: 1211641 - RNA, 19 nt, Artificial Sequence
  Description of Artificial Sequence: Synthetic oligonucleotide
cauggaucgucuuguugga

SEQ ID NO: 1211642 - RNA, 19 nt, Artificial Sequence
  Description of Artificial Sequence: Synthetic oligonucleotide
cuacaggaacguagugcug

SEQ ID NO: 1211643 - RNA, 19 nt, Artificial Sequence
  Description of Artificial Sequence: Synthetic oligonucleotide
gcagucgccccaaacagcc

SEQ ID NO: 1211644 - RNA, 19 nt, Artificial Sequence
  Description of Artificial Sequence: Synthetic oligonucleotide
cagggcugcauggggaggg

SEQ ID NO: 1211645 - RNA, 19 nt, Artificial Sequence
  Description of Artificial Sequence: Synthetic oligonucleotide
gaccacagagagagccacg

SEQ ID NO: 1211646 - RNA, 19 nt, Artificial Sequence
  Description of Artificial Sequence: Synthetic oligonucleotide
ugcggggugaggcuuuauu

SEQ ID NO: 1211647 - RNA, 19 nt, Artificial Sequence
  Description of Artificial Sequence: Synthetic oligonucleotide
cuccgcauggaucgucuug

SEQ ID NO: 1211648 - RNA, 19 nt, Artificial Sequence
  Description of Artificial Sequence: Synthetic oligonucleotide
guguaugacccucaaucgu

SEQ ID NO: 1211649 - RNA, 19 nt, Artificial Sequence
  Description of Artificial Sequence: Synthetic oligonucleotide
aacguagugcugcgcggua

SEQ ID NO: 1211650 - RNA, 19 nt, Artificial Sequence
  Description of Artificial Sequence: Synthetic oligonucleotide
ucucugugcuucgcugugc

SEQ ID NO: 1211651 - RNA, 19 nt, Artificial Sequence
  Description of Artificial Sequence: Synthetic oligonucleotide
ugggaccccagcagacggc

SEQ ID NO: 1211652 - RNA, 19 nt, Artificial Sequence
  Description of Artificial Sequence: Synthetic oligonucleotide
cugcgacgcugcaagguug

SEQ ID NO: 1211653 - RNA, 19 nt, Artificial Sequence
  Description of Artificial Sequence: Synthetic oligonucleotide
cagcagacggcccggcagc

SEQ ID NO: 1211654 - RNA, 19 nt, Artificial Sequence
  Description of Artificial Sequence: Synthetic oligonucleotide
cuugggaaccguagcagua

SEQ ID NO: 1211655 - RNA, 19 nt, Artificial Sequence
  Description of Artificial Sequence: Synthetic oligonucleotide
cauucgcuguaggggagcc

SEQ ID NO: 1211656 - RNA, 19 nt, Artificial Sequence
  Description of Artificial Sequence: Synthetic oligonucleotide
cuuucgcagcaauccguuc

SEQ ID NO: 1211657 - RNA, 19 nt, Artificial Sequence
  Description of Artificial Sequence: Synthetic oligonucleotide
caggucauaggaguuggca

SEQ ID NO: 1211658 - RNA, 19 nt, Artificial Sequence
  Description of Artificial Sequence: Synthetic oligonucleotide
gaucaggaacugacccugc

SEQ ID NO: 1211659 - RNA, 19 nt, Artificial Sequence
  Description of Artificial Sequence: Synthetic oligonucleotide
agagacaauugggucuaga

SEQ ID NO: 1211660 - RNA, 19 nt, Artificial Sequence
  Description of Artificial Sequence: Synthetic oligonucleotide
ggacauuuggcgggcagcc

SEQ ID NO: 1211661 - RNA, 19 nt, Artificial Sequence
  Description of Artificial Sequence: Synthetic oligonucleotide
ggggugaggcuuuauuuuc

SEQ ID NO: 1211662 - RNA, 19 nt, Artificial Sequence
  Description of Artificial Sequence: Synthetic oligonucleotide
guacucgggugccauuuuc

SEQ ID NO: 1211663 - RNA, 19 nt, Artificial Sequence
  Description of Artificial Sequence: Synthetic oligonucleotide
uagcugcgacgcugcaagg

SEQ ID NO: 1211664 - RNA, 19 nt, Artificial Sequence
  Description of Artificial Sequence: Synthetic oligonucleotide
agcaaugaccacagagaga

SEQ ID NO: 1211665 - RNA, 19 nt, Artificial Sequence
  Description of Artificial Sequence: Synthetic oligonucleotide
aucuuucgguacagggcgg

SEQ ID NO: 1211666 - RNA, 19 nt, Artificial Sequence
  Description of Artificial Sequence: Synthetic oligonucleotide
ugcgcgguagugguccagc

SEQ ID NO: 1211667 - RNA, 19 nt, Artificial Sequence
  Description of Artificial Sequence: Synthetic oligonucleotide
ggagucagcggugaccaug

SEQ ID NO: 1211668 - RNA, 19 nt, Artificial Sequence
  Description of Artificial Sequence: Synthetic oligonucleotide
ggacuaguaguaagggcug

SEQ ID NO: 1211669 - RNA, 19 nt, Artificial Sequence
  Description of Artificial Sequence: Synthetic oligonucleotide
ucggguccauccucugcug

SEQ ID NO: 1211670 - RNA, 19 nt, Artificial Sequence
  Description of Artificial Sequence: Synthetic oligonucleotide
augggcaggacuaguagua

SEQ ID NO: 1211671 - RNA, 19 nt, Artificial Sequence
  Description of Artificial Sequence: Synthetic oligonucleotide
cuggcccuugagugggcgg

SEQ ID NO: 1211672 - RNA, 19 nt, Artificial Sequence
  Description of Artificial Sequence: Synthetic oligonucleotide
ggagggauguaugggcucc

SEQ ID NO: 1211673 - RNA, 19 nt, Artificial Sequence
  Description of Artificial Sequence: Synthetic oligonucleotide
gggauguaugggcuccugc

SEQ ID NO: 1211674 - RNA, 19 nt, Artificial Sequence
  Description of Artificial Sequence: Synthetic oligonucleotide
gguagugagcauugccaca

SEQ ID NO: 1211675 - RNA, 19 nt, Artificial Sequence
  Description of Artificial Sequence: Synthetic oligonucleotide
ucgcagucucccagcguga

SEQ ID NO: 1211676 - RNA, 19 nt, Artificial Sequence
  Description of Artificial Sequence: Synthetic oligonucleotide
ucgcugugcggcucguuuc

SEQ ID NO: 1211677 - RNA, 19 nt, Artificial Sequence
  Description of Artificial Sequence: Synthetic oligonucleotide
ccaugagcgggacacugag

SEQ ID NO: 1211678 - RNA, 19 nt, Artificial Sequence
  Description of Artificial Sequence: Synthetic oligonucleotide
acguagugcugcgcgguag

SEQ ID NO: 1211679 - RNA, 19 nt, Artificial Sequence
  Description of Artificial Sequence: Synthetic oligonucleotide
uagaggaacagggccccuc

SEQ ID NO: 1211680 - RNA, 19 nt, Artificial Sequence
  Description of Artificial Sequence: Synthetic oligonucleotide
cuggcuacaggaacguagu

SEQ ID NO: 1211681 - RNA, 19 nt, Artificial Sequence
  Description of Artificial Sequence: Synthetic oligonucleotide
agcugcgacgcugcaaggu

SEQ ID NO: 1211682 - RNA, 19 nt, Artificial Sequence
  Description of Artificial Sequence: Synthetic oligonucleotide
cuuuaccagcuuggagagc

SEQ ID NO: 1211683 - RNA, 19 nt, Artificial Sequence
  Description of Artificial Sequence: Synthetic oligonucleotide
uccccuugccaggacauuu

SEQ ID NO: 1211684 - RNA, 19 nt, Artificial Sequence
  Description of Artificial Sequence: Synthetic oligonucleotide
cagcacgcugguagugagc

SEQ ID NO: 1211685 - RNA, 19 nt, Artificial Sequence
  Description of Artificial Sequence: Synthetic oligonucleotide
agcacgaagucagcacgcu

SEQ ID NO: 1211686 - RNA, 19 nt, Artificial Sequence
  Description of Artificial Sequence: Synthetic oligonucleotide
cucuagugguggcagccca

SEQ ID NO: 1211687 - RNA, 19 nt, Artificial Sequence
  Description of Artificial Sequence: Synthetic oligonucleotide
agugggcggguagagccug

SEQ ID NO: 1211688 - RNA, 19 nt, Artificial Sequence
  Description of Artificial Sequence: Synthetic oligonucleotide
cgucuuguuggaagguucc

SEQ ID NO: 1211689 - RNA, 19 nt, Artificial Sequence
  Description of Artificial Sequence: Synthetic oligonucleotide
aucgucuuguuggaagguu

SEQ ID NO: 1211690 - RNA, 19 nt, Artificial Sequence
  Description of Artificial Sequence: Synthetic oligonucleotide
cugcccugccuccuccacc

SEQ ID NO: 1211691 - RNA, 19 nt, Artificial Sequence
  Description of Artificial Sequence: Synthetic oligonucleotide
gccagcacgaagucagcac

SEQ ID NO: 1211692 - RNA, 19 nt, Artificial Sequence
  Description of Artificial Sequence: Synthetic oligonucleotide
ggugggaccccagcagacg

SEQ ID NO: 1211693 - RNA, 19 nt, Artificial Sequence
  Description of Artificial Sequence: Synthetic oligonucleotide
cuccugcugccuugggaac

SEQ ID NO: 1211694 - RNA, 19 nt, Artificial Sequence
  Description of Artificial Sequence: Synthetic oligonucleotide
ggugacuuccaggcacagg

SEQ ID NO: 1211695 - RNA, 19 nt, Artificial Sequence
  Description of Artificial Sequence: Synthetic oligonucleotide
guucgggcucuuccuguac

SEQ ID NO: 1211696 - RNA, 19 nt, Artificial Sequence
  Description of Artificial Sequence: Synthetic oligonucleotide
gucagcacgcugguaguga

SEQ ID NO: 1211697 - RNA, 19 nt, Artificial Sequence
  Description of Artificial Sequence: Synthetic oligonucleotide
ggaacagggccccucccuc

SEQ ID NO: 1211698 - RNA, 19 nt, Artificial Sequence
  Description of Artificial Sequence: Synthetic oligonucleotide
agcagacggcccggcagcg

SEQ ID NO: 1211699 - RNA, 19 nt, Artificial Sequence
  Description of Artificial Sequence: Synthetic oligonucleotide
accuugcccuugcggaaca

SEQ ID NO: 1211700 - RNA, 19 nt, Artificial Sequence
  Description of Artificial Sequence: Synthetic oligonucleotide
gcuuuagcugcgacgcugc

SEQ ID NO: 1211701 - RNA, 19 nt, Artificial Sequence
  Description of Artificial Sequence: Synthetic oligonucleotide
acgcugguagugagcauug

SEQ ID NO: 1211702 - RNA, 19 nt, Artificial Sequence
  Description of Artificial Sequence: Synthetic oligonucleotide
auccguuccccaggauguc

SEQ ID NO: 1211703 - RNA, 19 nt, Artificial Sequence
  Description of Artificial Sequence: Synthetic oligonucleotide
gguagugguccagcuuuag

SEQ ID NO: 1211704 - RNA, 19 nt, Artificial Sequence
  Description of Artificial Sequence: Synthetic oligonucleotide
aggucaggauccaggugug

SEQ ID NO: 1211705 - RNA, 19 nt, Artificial Sequence
  Description of Artificial Sequence: Synthetic oligonucleotide
gucucccagcgugaaggcc

SEQ ID NO: 1211706 - RNA, 19 nt, Artificial Sequence
  Description of Artificial Sequence: Synthetic oligonucleotide
gaacguagugcugcgcggu

SEQ ID NO: 1211707 - RNA, 19 nt, Artificial Sequence
  Description of Artificial Sequence: Synthetic oligonucleotide
caggaacguagugcugcgc

SEQ ID NO: 1211708 - RNA, 19 nt, Artificial Sequence
  Description of Artificial Sequence: Synthetic oligonucleotide
cucaaucguugacucccca

SEQ ID NO: 1211709 - RNA, 19 nt, Artificial Sequence
  Description of Artificial Sequence: Synthetic oligonucleotide
ggucggguccauccucugc

SEQ ID NO: 1211710 - RNA, 19 nt, Artificial Sequence
  Description of Artificial Sequence: Synthetic oligonucleotide
ggccucacuguauucaccu

SEQ ID NO: 1211711 - RNA, 19 nt, Artificial Sequence
  Description of Artificial Sequence: Synthetic oligonucleotide
acgcugcaagguuguucag

SEQ ID NO: 1211712 - RNA, 19 nt, Artificial Sequence
  Description of Artificial Sequence: Synthetic oligonucleotide
gugcggcucguuucuuuac

SEQ ID NO: 1211713 - RNA, 19 nt, Artificial Sequence
  Description of Artificial Sequence: Synthetic oligonucleotide
ggcuuuauuuucauucgcu

SEQ ID NO: 1211714 - RNA, 19 nt, Artificial Sequence
  Description of Artificial Sequence: Synthetic oligonucleotide
caccuugcccuugcggaac

SEQ ID NO: 1211715 - RNA, 19 nt, Artificial Sequence
  Description of Artificial Sequence: Synthetic oligonucleotide
ggggcaaaugggcaggacu

SEQ ID NO: 1211716 - RNA, 19 nt, Artificial Sequence
  Description of Artificial Sequence: Synthetic oligonucleotide
ccgagcaagggcuccuggc

SEQ ID NO: 1211717 - RNA, 19 nt, Artificial Sequence
  Description of Artificial Sequence: Synthetic oligonucleotide
gcacgaagucagcacgcug

SEQ ID NO: 1211718 - RNA, 19 nt, Artificial Sequence
  Description of Artificial Sequence: Synthetic oligonucleotide
cguugacuccccaacccag

SEQ ID NO: 1211719 - RNA, 19 nt, Artificial Sequence
  Description of Artificial Sequence: Synthetic oligonucleotide
agggugacuuccaggcaca

SEQ ID NO: 1211720 - RNA, 19 nt, Artificial Sequence
  Description of Artificial Sequence: Synthetic oligonucleotide
agggauguaugggcuccug

SEQ ID NO: 1211721 - RNA, 19 nt, Artificial Sequence
  Description of Artificial Sequence: Synthetic oligonucleotide
cccuugccaggacauuugg

SEQ ID NO: 1211722 - RNA, 19 nt, Artificial Sequence
  Description of Artificial Sequence: Synthetic oligonucleotide
aggucggguccauccucug

SEQ ID NO: 1211723 - RNA, 19 nt, Artificial Sequence
  Description of Artificial Sequence: Synthetic oligonucleotide
uggaggugauggccuugau

SEQ ID NO: 1211724 - RNA, 19 nt, Artificial Sequence
  Description of Artificial Sequence: Synthetic oligonucleotide
agcuccgcauggaucgucu

SEQ ID NO: 1211725 - RNA, 19 nt, Artificial Sequence
  Description of Artificial Sequence: Synthetic oligonucleotide
ucgcagcaauccguucccc

SEQ ID NO: 1211726 - RNA, 19 nt, Artificial Sequence
  Description of Artificial Sequence: Synthetic oligonucleotide
gaucgucuuguuggaaggu

SEQ ID NO: 1211727 - RNA, 19 nt, Artificial Sequence
  Description of Artificial Sequence: Synthetic oligonucleotide
gcgugaaggccaguucggg

SEQ ID NO: 1211728 - RNA, 19 nt, Artificial Sequence
  Description of Artificial Sequence: Synthetic oligonucleotide
acccuaucaagcaccucaa

SEQ ID NO: 1211729 - RNA, 19 nt, Artificial Sequence
  Description of Artificial Sequence: Synthetic oligonucleotide
agcugucccauguccucua

SEQ ID NO: 1211730 - RNA, 19 nt, Artificial Sequence
  Description of Artificial Sequence: Synthetic oligonucleotide
gaacagggccccucccucu

SEQ ID NO: 1211731 - RNA, 19 nt, Artificial Sequence
  Description of Artificial Sequence: Synthetic oligonucleotide
cugcaagguuguucagaca

SEQ ID NO: 1211732 - RNA, 19 nt, Artificial Sequence
  Description of Artificial Sequence: Synthetic oligonucleotide
uuccuguacucgggugcca

SEQ ID NO: 1211733 - RNA, 19 nt, Artificial Sequence
  Description of Artificial Sequence: Synthetic oligonucleotide
gggcaaaugggcaggacua

SEQ ID NO: 1211734 - RNA, 19 nt, Artificial Sequence
  Description of Artificial Sequence: Synthetic oligonucleotide
cagcccacucagguccucc

SEQ ID NO: 1211735 - RNA, 19 nt, Artificial Sequence
  Description of Artificial Sequence: Synthetic oligonucleotide
caguuccuggcagcaauga

SEQ ID NO: 1211736 - RNA, 19 nt, Artificial Sequence
  Description of Artificial Sequence: Synthetic oligonucleotide
cuuuagcugcgacgcugca

SEQ ID NO: 1211737 - RNA, 19 nt, Artificial Sequence
  Description of Artificial Sequence: Synthetic oligonucleotide
auggaucgucuuguuggaa

SEQ ID NO: 1211738 - RNA, 19 nt, Artificial Sequence
  Description of Artificial Sequence: Synthetic oligonucleotide
gggagggauguaugggcuc

SEQ ID NO: 1211739 - RNA, 19 nt, Artificial Sequence
  Description of Artificial Sequence: Synthetic oligonucleotide
gggaucaggaacugacccu

SEQ ID NO: 1211740 - RNA, 19 nt, Artificial Sequence
  Description of Artificial Sequence: Synthetic oligonucleotide
agagggcuccgcccaggau

SEQ ID NO: 1211741 - RNA, 19 nt, Artificial Sequence
  Description of Artificial Sequence: Synthetic oligonucleotide
ggcugcauggggagggaug

SEQ ID NO: 1211742 - RNA, 19 nt, Artificial Sequence
  Description of Artificial Sequence: Synthetic oligonucleotide
cacucccgcuugcgguugg

SEQ ID NO: 1211743 - RNA, 19 nt, Artificial Sequence
  Description of Artificial Sequence: Synthetic oligonucleotide
cccggcagcgggcucagag

SEQ ID NO: 1211744 - RNA, 19 nt, Artificial Sequence
  Description of Artificial Sequence: Synthetic oligonucleotide
cuccaccgucagcuguccc

SEQ ID NO: 1211745 - RNA, 19 nt, Artificial Sequence
  Description of Artificial Sequence: Synthetic oligonucleotide
auucgcuguaggggagccu

SEQ ID NO: 1211746 - RNA, 19 nt, Artificial Sequence
  Description of Artificial Sequence: Synthetic oligonucleotide
acacucccgcuugcgguug

SEQ ID NO: 1211747 - RNA, 19 nt, Artificial Sequence
  Description of Artificial Sequence: Synthetic oligonucleotide
gggugaggcuuuauuuuca

SEQ ID NO: 1211748 - RNA, 19 nt, Artificial Sequence
  Description of Artificial Sequence: Synthetic oligonucleotide
caagguuguucagacacuu

SEQ ID NO: 1211749 - RNA, 19 nt, Artificial Sequence
  Description of Artificial Sequence: Synthetic oligonucleotide
gagguguaugacccucaau

SEQ ID NO: 1211750 - RNA, 19 nt, Artificial Sequence
  Description of Artificial Sequence: Synthetic oligonucleotide
gcauggggagggauguaug

SEQ ID NO: 1211751 - RNA, 19 nt, Artificial Sequence
  Description of Artificial Sequence: Synthetic oligonucleotide
ggagguguaugacccucaa

SEQ ID NO: 1211752 - RNA, 19 nt, Artificial Sequence
  Description of Artificial Sequence: Synthetic oligonucleotide
gcggcucguuucuuuacca

SEQ ID NO: 1211753 - RNA, 19 nt, Artificial Sequence
  Description of Artificial Sequence: Synthetic oligonucleotide
cucccgcuugcgguuggcc

SEQ ID NO: 1211754 - RNA, 19 nt, Artificial Sequence
  Description of Artificial Sequence: Synthetic oligonucleotide
auuuggcgggcagccggcu

SEQ ID NO: 1211755 - RNA, 19 nt, Artificial Sequence
  Description of Artificial Sequence: Synthetic oligonucleotide
gcucguuucuuuaccagcu

SEQ ID NO: 1211756 - RNA, 19 nt, Artificial Sequence
  Description of Artificial Sequence: Synthetic oligonucleotide
cagagacaauugggucuag

SEQ ID NO: 1211757 - RNA, 19 nt, Artificial Sequence
  Description of Artificial Sequence: Synthetic oligonucleotide
gagcuccgcauggaucguc

SEQ ID NO: 1211758 - RNA, 19 nt, Artificial Sequence
  Description of Artificial Sequence: Synthetic oligonucleotide
ugggcggguagagccuggu

SEQ ID NO: 1211759 - RNA, 19 nt, Artificial Sequence
  Description of Artificial Sequence: Synthetic oligonucleotide
ccccuugccaggacauuug

SEQ ID NO: 1211760 - RNA, 19 nt, Artificial Sequence
  Description of Artificial Sequence: Synthetic oligonucleotide
agagcuccgcauggaucgu

SEQ ID NO: 1211761 - RNA, 19 nt, Artificial Sequence
  Description of Artificial Sequence: Synthetic oligonucleotide
gcgaggccugaccccagag

SEQ ID NO: 1211762 - RNA, 19 nt, Artificial Sequence
  Description of Artificial Sequence: Synthetic oligonucleotide
cuacccuaucaagcaccuc

SEQ ID NO: 1211763 - RNA, 19 nt, Artificial Sequence
  Description of Artificial Sequence: Synthetic oligonucleotide
gggacaucugcaggugcac

SEQ ID NO: 1211764 - RNA, 19 nt, Artificial Sequence
  Description of Artificial Sequence: Synthetic oligonucleotide
ggugaggcuuuauuuucau

SEQ ID NO: 1211765 - RNA, 19 nt, Artificial Sequence
  Description of Artificial Sequence: Synthetic oligonucleotide
ucgccccaaacagccacuu

SEQ ID NO: 1211766 - RNA, 19 nt, Artificial Sequence
  Description of Artificial Sequence: Synthetic oligonucleotide
cgcauggaucgucuuguug

SEQ ID NO: 1211767 - RNA, 19 nt, Artificial Sequence
  Description of Artificial Sequence: Synthetic oligonucleotide
caggucggguccauccucu

SEQ ID NO: 1211768 - RNA, 19 nt, Artificial Sequence
  Description of Artificial Sequence: Synthetic oligonucleotide
cccuugagugggcggguag

SEQ ID NO: 1211769 - RNA, 19 nt, Artificial Sequence
  Description of Artificial Sequence: Synthetic oligonucleotide
ggucaggauccaggugugc

SEQ ID NO: 1211770 - RNA, 19 nt, Artificial Sequence
  Description of Artificial Sequence: Synthetic oligonucleotide
gccaggacauuuggcgggc

SEQ ID NO: 1211771 - RNA, 19 nt, Artificial Sequence
  Description of Artificial Sequence: Synthetic oligonucleotide
ccucuagugguggcagccc

SEQ ID NO: 1211772 - RNA, 19 nt, Artificial Sequence
  Description of Artificial Sequence: Synthetic oligonucleotide
cggcucguuucuuuaccag

SEQ ID NO: 1211773 - RNA, 19 nt, Artificial Sequence
  Description of Artificial Sequence: Synthetic oligonucleotide
cacgcugguagugagcauu

SEQ ID NO: 1211774 - RNA, 19 nt, Artificial Sequence
  Description of Artificial Sequence: Synthetic oligonucleotide
cccgagcaagggcuccugg

SEQ ID NO: 1211775 - RNA, 19 nt, Artificial Sequence
  Description of Artificial Sequence: Synthetic oligonucleotide
cuagugguggcagcccacu

SEQ ID NO: 1211776 - RNA, 19 nt, Artificial Sequence
  Description of Artificial Sequence: Synthetic oligonucleotide
gccuggugggccagggacc

SEQ ID NO: 1211777 - RNA, 19 nt, Artificial Sequence
  Description of Artificial Sequence: Synthetic oligonucleotide
gcugcauggggagggaugu

SEQ ID NO: 1211778 - RNA, 19 nt, Artificial Sequence
  Description of Artificial Sequence: Synthetic oligonucleotide
cuccgcccaggaugccaug

SEQ ID NO: 1211779 - RNA, 19 nt, Artificial Sequence
  Description of Artificial Sequence: Synthetic oligonucleotide
gggugacuuccaggcacag

SEQ ID NO: 1211780 - RNA, 19 nt, Artificial Sequence
  Description of Artificial Sequence: Synthetic oligonucleotide
cagucgccccaaacagcca

SEQ ID NO: 1211781 - RNA, 19 nt, Artificial Sequence
  Description of Artificial Sequence: Synthetic oligonucleotide
gggcggguagagccuggug

SEQ ID NO: 1211782 - RNA, 19 nt, Artificial Sequence
  Description of Artificial Sequence: Synthetic oligonucleotide
cugcgcgguagugguccag

SEQ ID NO: 1211783 - RNA, 19 nt, Artificial Sequence
  Description of Artificial Sequence: Synthetic oligonucleotide
gcccagcaucuuucgguac

SEQ ID NO: 1211784 - RNA, 19 nt, Artificial Sequence
  Description of Artificial Sequence: Synthetic oligonucleotide
gcggggugaggcuuuauuu

SEQ ID NO: 1211785 - RNA, 19 nt, Artificial Sequence
  Description of Artificial Sequence: Synthetic oligonucleotide
gagugggcggguagagccu

SEQ ID NO: 1211786 - RNA, 19 nt, Artificial Sequence
  Description of Artificial Sequence: Synthetic oligonucleotide
gaaggccaguucgggcucu

SEQ ID NO: 1211787 - RNA, 19 nt, Artificial Sequence
  Description of Artificial Sequence: Synthetic oligonucleotide
gagggauguaugggcuccu

SEQ ID NO: 1211788 - RNA, 19 nt, Artificial Sequence
  Description of Artificial Sequence: Synthetic oligonucleotide
cacacucccgcuugcgguu

SEQ ID NO: 1211789 - RNA, 19 nt, Artificial Sequence
  Description of Artificial Sequence: Synthetic oligonucleotide
cauggcugucucgcccaca

SEQ ID NO: 1211790 - RNA, 19 nt, Artificial Sequence
  Description of Artificial Sequence: Synthetic oligonucleotide
ccguuccccaggaugucca

SEQ ID NO: 1211791 - RNA, 19 nt, Artificial Sequence
  Description of Artificial Sequence: Synthetic oligonucleotide
cugucccauguccucuagu

SEQ ID NO: 1211792 - RNA, 19 nt, Artificial Sequence
  Description of Artificial Sequence: Synthetic oligonucleotide
gcagacggcccggcagcgg

SEQ ID NO: 1211793 - RNA, 19 nt, Artificial Sequence
  Description of Artificial Sequence: Synthetic oligonucleotide
gcugcgacgcugcaagguu

SEQ ID NO: 1211794 - RNA, 19 nt, Artificial Sequence
  Description of Artificial Sequence: Synthetic oligonucleotide
ggcggucucugugcuucgc

SEQ ID NO: 1211795 - RNA, 19 nt, Artificial Sequence
  Description of Artificial Sequence: Synthetic oligonucleotide
accuggcuacaggaacgua

SEQ ID NO: 1211796 - RNA, 19 nt, Artificial Sequence
  Description of Artificial Sequence: Synthetic oligonucleotide
ccuugagugggcggguaga

SEQ ID NO: 1211797 - RNA, 19 nt, Artificial Sequence
  Description of Artificial Sequence: Synthetic oligonucleotide
guaugggcuccugcugccu

SEQ ID NO: 1211798 - RNA, 19 nt, Artificial Sequence
  Description of Artificial Sequence: Synthetic oligonucleotide
ccacuuccaugggauggac

SEQ ID NO: 1211799 - RNA, 19 nt, Artificial Sequence
  Description of Artificial Sequence: Synthetic oligonucleotide
gugcuucgcugugcggcuc

SEQ ID NO: 1211800 - RNA, 19 nt, Artificial Sequence
  Description of Artificial Sequence: Synthetic oligonucleotide
gguccagggccuggauaac

SEQ ID NO: 1211801 - RNA, 19 nt, Artificial Sequence
  Description of Artificial Sequence: Synthetic oligonucleotide
cacaggucauguccacuuu

SEQ ID NO: 1211802 - RNA, 19 nt, Artificial Sequence
  Description of Artificial Sequence: Synthetic oligonucleotide
ccacacucccgcuugcggu

SEQ ID NO: 1211803 - RNA, 19 nt, Artificial Sequence
  Description of Artificial Sequence: Synthetic oligonucleotide
gggaauggccucacuguau

SEQ ID NO: 1211804 - RNA, 19 nt, Artificial Sequence
  Description of Artificial Sequence: Synthetic oligonucleotide
cgacgcugcaagguuguuc

SEQ ID NO: 1211805 - RNA, 19 nt, Artificial Sequence
  Description of Artificial Sequence: Synthetic oligonucleotide
cugugcggcucguuucuuu

SEQ ID NO: 1211806 - RNA, 19 nt, Artificial Sequence
  Description of Artificial Sequence: Synthetic oligonucleotide
gggcagccggcugggguug

SEQ ID NO: 1211807 - RNA, 19 nt, Artificial Sequence
  Description of Artificial Sequence: Synthetic oligonucleotide
ccggcugggguugcccagc

SEQ ID NO: 1211808 - RNA, 19 nt, Artificial Sequence
  Description of Artificial Sequence: Synthetic oligonucleotide
gacggcccggcagcgggcu

SEQ ID NO: 1211809 - RNA, 19 nt, Artificial Sequence
  Description of Artificial Sequence: Synthetic oligonucleotide
cacuggaggugauggccuu

SEQ ID NO: 1211810 - RNA, 19 nt, Artificial Sequence
  Description of Artificial Sequence: Synthetic oligonucleotide
cagcuuuagcugcgacgcu

SEQ ID NO: 1211811 - RNA, 19 nt, Artificial Sequence
  Description of Artificial Sequence: Synthetic oligonucleotide
gcggugaccauggcugucu

SEQ ID NO: 1211812 - RNA, 19 nt, Artificial Sequence
  Description of Artificial Sequence: Synthetic oligonucleotide
cauccaugagcgggacacu

SEQ ID NO: 1211813 - RNA, 19 nt, Artificial Sequence
  Description of Artificial Sequence: Synthetic oligonucleotide
ccguagcaguacuuggagu

SEQ ID NO: 1211814 - RNA, 19 nt, Artificial Sequence
  Description of Artificial Sequence: Synthetic oligonucleotide
ucccagcgugaaggccagu

SEQ ID NO: 1211815 - RNA, 19 nt, Artificial Sequence
  Description of Artificial Sequence: Synthetic oligonucleotide
cugcuuguuggagguguau

SEQ ID NO: 1211816 - RNA, 19 nt, Artificial Sequence
  Description of Artificial Sequence: Synthetic oligonucleotide
ggaugggaauggccucacu

SEQ ID NO: 1211817 - RNA, 19 nt, Artificial Sequence
  Description of Artificial Sequence: Synthetic oligonucleotide
cccuaucaagcaccucaaa

SEQ ID NO: 1211818 - RNA, 19 nt, Artificial Sequence
  Description of Artificial Sequence: Synthetic oligonucleotide
gcugcgcgguaguggucca

SEQ ID NO: 1211819 - RNA, 19 nt, Artificial Sequence
  Description of Artificial Sequence: Synthetic oligonucleotide
gggcagcccucaggauggg

SEQ ID NO: 1211820 - RNA, 19 nt, Artificial Sequence
  Description of Artificial Sequence: Synthetic oligonucleotide
cugcauggggagggaugua

SEQ ID NO: 1211821 - RNA, 19 nt, Artificial Sequence
  Description of Artificial Sequence: Synthetic oligonucleotide
ccaggccuacugagaggga

SEQ ID NO: 1211822 - RNA, 19 nt, Artificial Sequence
  Description of Artificial Sequence: Synthetic oligonucleotide
gcgcgguagugguccagcu

SEQ ID NO: 1211823 - RNA, 19 nt, Artificial Sequence
  Description of Artificial Sequence: Synthetic oligonucleotide
gggaaccguagcaguacuu

SEQ ID NO: 1211824 - RNA, 19 nt, Artificial Sequence
  Description of Artificial Sequence: Synthetic oligonucleotide
ggcccggcagcgggcucag

SEQ ID NO: 1211825 - RNA, 19 nt, Artificial Sequence
  Description of Artificial Sequence: Synthetic oligonucleotide
cguagugcugcgcgguagu

SEQ ID NO: 1211826 - RNA, 19 nt, Artificial Sequence
  Description of Artificial Sequence: Synthetic oligonucleotide
cccaaacagccacuuccau

SEQ ID NO: 1211827 - RNA, 19 nt, Artificial Sequence
  Description of Artificial Sequence: Synthetic oligonucleotide
gcuccgcccaggaugccau

SEQ ID NO: 1211828 - RNA, 19 nt, Artificial Sequence
  Description of Artificial Sequence: Synthetic oligonucleotide
cgguagugguccagcuuua

SEQ ID NO: 1211829 - RNA, 19 nt, Artificial Sequence
  Description of Artificial Sequence: Synthetic oligonucleotide
cccagcgugaaggccaguu

SEQ ID NO: 1211830 - RNA, 19 nt, Artificial Sequence
  Description of Artificial Sequence: Synthetic oligonucleotide
gcuccgcauggaucgucuu

SEQ ID NO: 1211831 - RNA, 19 nt, Artificial Sequence
  Description of Artificial Sequence: Synthetic oligonucleotide
gcccuugagugggcgggua

SEQ ID NO: 1211832 - RNA, 19 nt, Artificial Sequence
  Description of Artificial Sequence: Synthetic oligonucleotide
gggcuccgcccaggaugcc

SEQ ID NO: 1211833 - RNA, 19 nt, Artificial Sequence
  Description of Artificial Sequence: Synthetic oligonucleotide
cggguccauccucugcugu

SEQ ID NO: 1211834 - RNA, 19 nt, Artificial Sequence
  Description of Artificial Sequence: Synthetic oligonucleotide
gcuucgcugugcggcucgu

SEQ ID NO: 1211835 - RNA, 19 nt, Artificial Sequence
  Description of Artificial Sequence: Synthetic oligonucleotide
gugcggggugaggcuuuau

SEQ ID NO: 1211836 - RNA, 19 nt, Artificial Sequence
  Description of Artificial Sequence: Synthetic oligonucleotide
ccucugggcugcaccccau

SEQ ID NO: 1211837 - RNA, 19 nt, Artificial Sequence
  Description of Artificial Sequence: Synthetic oligonucleotide
ccgcauggaucgucuuguu

SEQ ID NO: 1211838 - RNA, 19 nt, Artificial Sequence
  Description of Artificial Sequence: Synthetic oligonucleotide
cggcccggcagcgggcuca

SEQ ID NO: 1211839 - RNA, 19 nt, Artificial Sequence
  Description of Artificial Sequence: Synthetic oligonucleotide
gcgacgcugcaagguuguu

SEQ ID NO: 1211840 - RNA, 19 nt, Artificial Sequence
  Description of Artificial Sequence: Synthetic oligonucleotide
gcccggcagcgggcucaga

SEQ ID NO: 1211841 - RNA, 19 nt, Artificial Sequence
  Description of Artificial Sequence: Synthetic oligonucleotide
ccccucccucugggcugca

SEQ ID NO: 1211842 - RNA, 19 nt, Artificial Sequence
  Description of Artificial Sequence: Synthetic oligonucleotide
aaugugguaagucuguuac

SEQ ID NO: 1211843 - RNA, 19 nt, Artificial Sequence
  Description of Artificial Sequence: Synthetic oligonucleotide
auaaagaccaaaucgaauc

SEQ ID NO: 1211844 - RNA, 19 nt, Artificial Sequence
  Description of Artificial Sequence: Synthetic oligonucleotide
aguauuugaaucuugacug

SEQ ID NO: 1211845 - RNA, 19 nt, Artificial Sequence
  Description of Artificial Sequence: Synthetic oligonucleotide
ucuuauugcaaucacaugu

SEQ ID NO: 1211846 - RNA, 19 nt, Artificial Sequence
  Description of Artificial Sequence: Synthetic oligonucleotide
auagaaguccugcagagcc

SEQ ID NO: 1211847 - RNA, 19 nt, Artificial Sequence
  Description of Artificial Sequence: Synthetic oligonucleotide
aaucugacgaaguugauga

SEQ ID NO: 1211848 - RNA, 19 nt, Artificial Sequence
  Description of Artificial Sequence: Synthetic oligonucleotide
ugagcuauuaauaagccac

SEQ ID NO: 1211849 - RNA, 19 nt, Artificial Sequence
  Description of Artificial Sequence: Synthetic oligonucleotide
aaguauuugaaucuugacu

SEQ ID NO: 1211850 - RNA, 19 nt, Artificial Sequence
  Description of Artificial Sequence: Synthetic oligonucleotide
aaggcuaauacucugcugu

SEQ ID NO: 1211851 - RNA, 19 nt, Artificial Sequence
  Description of Artificial Sequence: Synthetic oligonucleotide
uuauuauaaguucuuucag

SEQ ID NO: 1211852 - RNA, 19 nt, Artificial Sequence
  Description of Artificial Sequence: Synthetic oligonucleotide
acaacuaucuacaagauca

SEQ ID NO: 1211853 - RNA, 19 nt, Artificial Sequence
  Description of Artificial Sequence: Synthetic oligonucleotide
aauguuuaguucuuuggca

SEQ ID NO: 1211854 - RNA, 19 nt, Artificial Sequence
  Description of Artificial Sequence: Synthetic oligonucleotide
aaaauacuaccagaggaac

SEQ ID NO: 1211855 - RNA, 19 nt, Artificial Sequence
  Description of Artificial Sequence: Synthetic oligonucleotide
aaagaguuacagucagccc

SEQ ID NO: 1211856 - RNA, 19 nt, Artificial Sequence
  Description of Artificial Sequence: Synthetic oligonucleotide
auucaucugaguaaguucc

SEQ ID NO: 1211857 - RNA, 19 nt, Artificial Sequence
  Description of Artificial Sequence: Synthetic oligonucleotide
uuuucuuauuccgagaacc

SEQ ID NO: 1211858 - RNA, 19 nt, Artificial Sequence
  Description of Artificial Sequence: Synthetic oligonucleotide
gaguaaacgacuucccucg

SEQ ID NO: 1211859 - RNA, 19 nt, Artificial Sequence
  Description of Artificial Sequence: Synthetic oligonucleotide
aauacuaccagaggaacug

SEQ ID NO: 1211860 - RNA, 19 nt, Artificial Sequence
  Description of Artificial Sequence: Synthetic oligonucleotide
gaagauugacuucccaucg

SEQ ID NO: 1211861 - RNA, 19 nt, Artificial Sequence
  Description of Artificial Sequence: Synthetic oligonucleotide
auguucagaaaguaagugg

SEQ ID NO: 1211862 - RNA, 19 nt, Artificial Sequence
  Description of Artificial Sequence: Synthetic oligonucleotide
uaauggaaguucuugcagg

SEQ ID NO: 1211863 - RNA, 19 nt, Artificial Sequence
  Description of Artificial Sequence: Synthetic oligonucleotide
uccaaagcaaaauacuacc

SEQ ID NO: 1211864 - RNA, 19 nt, Artificial Sequence
  Description of Artificial Sequence: Synthetic oligonucleotide
gacaauuccaguaauaguc

SEQ ID NO: 1211865 - RNA, 19 nt, Artificial Sequence
  Description of Artificial Sequence: Synthetic oligonucleotide
uauaaguucuuucagcaau

SEQ ID NO: 1211866 - RNA, 19 nt, Artificial Sequence
  Description of Artificial Sequence: Synthetic oligonucleotide
uuugagcuauuaauaagcc

SEQ ID NO: 1211867 - RNA, 19 nt, Artificial Sequence
  Description of Artificial Sequence: Synthetic oligonucleotide
auucuaaccuugcucgugc

SEQ ID NO: 1211868 - RNA, 19 nt, Artificial Sequence
  Description of Artificial Sequence: Synthetic oligonucleotide
uuguaugucaucuuucaga

SEQ ID NO: 1211869 - RNA, 19 nt, Artificial Sequence
  Description of Artificial Sequence: Synthetic oligonucleotide
auaaccaacguacuuccuc

SEQ ID NO: 1211870 - RNA, 19 nt, Artificial Sequence
  Description of Artificial Sequence: Synthetic oligonucleotide
cauacugccgugcauaacc

SEQ ID NO: 1211871 - RNA, 19 nt, Artificial Sequence
  Description of Artificial Sequence: Synthetic oligonucleotide
agacauacacaccacgagg

SEQ ID NO: 1211872 - RNA, 19 nt, Artificial Sequence
  Description of Artificial Sequence: Synthetic oligonucleotide
uucgcaaaggaguaaacga

SEQ ID NO: 1211873 - RNA, 19 nt, Artificial Sequence
  Description of Artificial Sequence: Synthetic oligonucleotide
ugaccuauugcucauucca

SEQ ID NO: 1211874 - RNA, 19 nt, Artificial Sequence
  Description of Artificial Sequence: Synthetic oligonucleotide
uuuggguggacauacugcc

SEQ ID NO: 1211875 - RNA, 19 nt, Artificial Sequence
  Description of Artificial Sequence: Synthetic oligonucleotide
gagacuuugacaauuccag

SEQ ID NO: 1211876 - RNA, 19 nt, Artificial Sequence
  Description of Artificial Sequence: Synthetic oligonucleotide
uuauaagaguuguauguca

SEQ ID NO: 1211877 - RNA, 19 nt, Artificial Sequence
  Description of Artificial Sequence: Synthetic oligonucleotide
aucugaguaaguuccuagc

SEQ ID NO: 1211878 - RNA, 19 nt, Artificial Sequence
  Description of Artificial Sequence: Synthetic oligonucleotide
uauugcaaucacauguuca

SEQ ID NO: 1211879 - RNA, 19 nt, Artificial Sequence
  Description of Artificial Sequence: Synthetic oligonucleotide
aucgaaucuggacaguagg

SEQ ID NO: 1211880 - RNA, 19 nt, Artificial Sequence
  Description of Artificial Sequence: Synthetic oligonucleotide
aaccacgccagcuuuagca

SEQ ID NO: 1211881 - RNA, 19 nt, Artificial Sequence
  Description of Artificial Sequence: Synthetic oligonucleotide
acauucuauuguucgaggg

SEQ ID NO: 1211882 - RNA, 19 nt, Artificial Sequence
  Description of Artificial Sequence: Synthetic oligonucleotide
ucagacggaucaaagauuc

SEQ ID NO: 1211883 - RNA, 19 nt, Artificial Sequence
  Description of Artificial Sequence: Synthetic oligonucleotide
uguaacugugagaggagag

SEQ ID NO: 1211884 - RNA, 19 nt, Artificial Sequence
  Description of Artificial Sequence: Synthetic oligonucleotide
aucaugaacaaguucacau

SEQ ID NO: 1211885 - RNA, 19 nt, Artificial Sequence
  Description of Artificial Sequence: Synthetic oligonucleotide
ucgaaucuggacaguaggg

SEQ ID NO: 1211886 - RNA, 19 nt, Artificial Sequence
  Description of Artificial Sequence: Synthetic oligonucleotide
aguauuggagacuuugaca

SEQ ID NO: 1211887 - RNA, 19 nt, Artificial Sequence
  Description of Artificial Sequence: Synthetic oligonucleotide
acgacuucccucgacaugc

SEQ ID NO: 1211888 - RNA, 19 nt, Artificial Sequence
  Description of Artificial Sequence: Synthetic oligonucleotide
uaauagucacuguaucucc

SEQ ID NO: 1211889 - RNA, 19 nt, Artificial Sequence
  Description of Artificial Sequence: Synthetic oligonucleotide
uucggcguaucuaacaaga

SEQ ID NO: 1211890 - RNA, 19 nt, Artificial Sequence
  Description of Artificial Sequence: Synthetic oligonucleotide
ucuaaugugguaagucugu

SEQ ID NO: 1211891 - RNA, 19 nt, Artificial Sequence
  Description of Artificial Sequence: Synthetic oligonucleotide
uaaacgacuucccucgaca

SEQ ID NO: 1211892 - RNA, 19 nt, Artificial Sequence
  Description of Artificial Sequence: Synthetic oligonucleotide
agauugacuucccaucggg

SEQ ID NO: 1211893 - RNA, 19 nt, Artificial Sequence
  Description of Artificial Sequence: Synthetic oligonucleotide
acggaucaaagauuccagc

SEQ ID NO: 1211894 - RNA, 19 nt, Artificial Sequence
  Description of Artificial Sequence: Synthetic oligonucleotide
cugggaucgcucaaaaucc

SEQ ID NO: 1211895 - RNA, 19 nt, Artificial Sequence
  Description of Artificial Sequence: Synthetic oligonucleotide
aaguuuucaaagucggcaa

SEQ ID NO: 1211896 - RNA, 19 nt, Artificial Sequence
  Description of Artificial Sequence: Synthetic oligonucleotide
aauucaucuauuccacaaa

SEQ ID NO: 1211897 - RNA, 19 nt, Artificial Sequence
  Description of Artificial Sequence: Synthetic oligonucleotide
uauaagaguuguaugucau

SEQ ID NO: 1211898 - RNA, 19 nt, Artificial Sequence
  Description of Artificial Sequence: Synthetic oligonucleotide
acuaucuacaagaucauga

SEQ ID NO: 1211899 - RNA, 19 nt, Artificial Sequence
  Description of Artificial Sequence: Synthetic oligonucleotide
caaagauuccagcugccgg

SEQ ID NO: 1211900 - RNA, 19 nt, Artificial Sequence
  Description of Artificial Sequence: Synthetic oligonucleotide
aguuguaugucaucuuuca

SEQ ID NO: 1211901 - RNA, 19 nt, Artificial Sequence
  Description of Artificial Sequence: Synthetic oligonucleotide
ucuauuguucgagggaucc

SEQ ID NO: 1211902 - RNA, 19 nt, Artificial Sequence
  Description of Artificial Sequence: Synthetic oligonucleotide
uaaccaacguacuuccuca

SEQ ID NO: 1211903 - RNA, 19 nt, Artificial Sequence
  Description of Artificial Sequence: Synthetic oligonucleotide
ucgugccucugucagacgg

SEQ ID NO: 1211904 - RNA, 19 nt, Artificial Sequence
  Description of Artificial Sequence: Synthetic oligonucleotide
gaaguauuugaaucuugac

SEQ ID NO: 1211905 - RNA, 19 nt, Artificial Sequence
  Description of Artificial Sequence: Synthetic oligonucleotide
aaauucaucugaguaaguu

SEQ ID NO: 1211906 - RNA, 19 nt, Artificial Sequence
  Description of Artificial Sequence: Synthetic oligonucleotide
ucgcaaaggaguaaacgac

SEQ ID NO: 1211907 - RNA, 19 nt, Artificial Sequence
  Description of Artificial Sequence: Synthetic oligonucleotide
uguaucuccuggcacacaa

SEQ ID NO: 1211908 - RNA, 19 nt, Artificial Sequence
  Description of Artificial Sequence: Synthetic oligonucleotide
agcaaugcuguugagagca

SEQ ID NO: 1211909 - RNA, 19 nt, Artificial Sequence
  Description of Artificial Sequence: Synthetic oligonucleotide
uaucuacaagaucaugaac

SEQ ID NO: 1211910 - RNA, 19 nt, Artificial Sequence
  Description of Artificial Sequence: Synthetic oligonucleotide
auugacuucccaucgggca

SEQ ID NO: 1211911 - RNA, 19 nt, Artificial Sequence
  Description of Artificial Sequence: Synthetic oligonucleotide
uaaguuccuagcaugcuau

SEQ ID NO: 1211912 - RNA, 19 nt, Artificial Sequence
  Description of Artificial Sequence: Synthetic oligonucleotide
ucaaagauuccagcugccg

SEQ ID NO: 1211913 - RNA, 19 nt, Artificial Sequence
  Description of Artificial Sequence: Synthetic oligonucleotide
acugccaguccacuguaac

SEQ ID NO: 1211914 - RNA, 19 nt, Artificial Sequence
  Description of Artificial Sequence: Synthetic oligonucleotide
acacuuuguaggaagauug

SEQ ID NO: 1211915 - RNA, 19 nt, Artificial Sequence
  Description of Artificial Sequence: Synthetic oligonucleotide
aauucuaaccuugcucgug

SEQ ID NO: 1211916 - RNA, 19 nt, Artificial Sequence
  Description of Artificial Sequence: Synthetic oligonucleotide
uugagcuauuaauaagcca

SEQ ID NO: 1211917 - RNA, 19 nt, Artificial Sequence
  Description of Artificial Sequence: Synthetic oligonucleotide
gaucugucgucucuccagg

SEQ ID NO: 1211918 - RNA, 19 nt, Artificial Sequence
  Description of Artificial Sequence: Synthetic oligonucleotide
cuucgcaaaggaguaaacg

SEQ ID NO: 1211919 - RNA, 19 nt, Artificial Sequence
  Description of Artificial Sequence: Synthetic oligonucleotide
gaaaccacuucaaguacag

SEQ ID NO: 1211920 - RNA, 19 nt, Artificial Sequence
  Description of Artificial Sequence: Synthetic oligonucleotide
ugcauaaccaacguacuuc

SEQ ID NO: 1211921 - RNA, 19 nt, Artificial Sequence
  Description of Artificial Sequence: Synthetic oligonucleotide
auucaucuauuccacaaau

SEQ ID NO: 1211922 - RNA, 19 nt, Artificial Sequence
  Description of Artificial Sequence: Synthetic oligonucleotide
uggacaguagggcacuccc

SEQ ID NO: 1211923 - RNA, 19 nt, Artificial Sequence
  Description of Artificial Sequence: Synthetic oligonucleotide
cuucccucgacaugcaggc

SEQ ID NO: 1211924 - RNA, 19 nt, Artificial Sequence
  Description of Artificial Sequence: Synthetic oligonucleotide
ugacaauuccaguaauagu

SEQ ID NO: 1211925 - RNA, 19 nt, Artificial Sequence
  Description of Artificial Sequence: Synthetic oligonucleotide
ucgacaugcaggcacggga

SEQ ID NO: 1211926 - RNA, 19 nt, Artificial Sequence
  Description of Artificial Sequence: Synthetic oligonucleotide
gaccaaaucgaaucuggac

SEQ ID NO: 1211927 - RNA, 19 nt, Artificial Sequence
  Description of Artificial Sequence: Synthetic oligonucleotide
caacaaucaggaugugugg

SEQ ID NO: 1211928 - RNA, 19 nt, Artificial Sequence
  Description of Artificial Sequence: Synthetic oligonucleotide
ucugucgucucuccaggag

SEQ ID NO: 1211929 - RNA, 19 nt, Artificial Sequence
  Description of Artificial Sequence: Synthetic oligonucleotide
uuaagagguaacccugguc

SEQ ID NO: 1211930 - RNA, 19 nt, Artificial Sequence
  Description of Artificial Sequence: Synthetic oligonucleotide
gacuuugacaauuccagua

SEQ ID NO: 1211931 - RNA, 19 nt, Artificial Sequence
  Description of Artificial Sequence: Synthetic oligonucleotide
auaagccacagguggaucu

SEQ ID NO: 1211932 - RNA, 19 nt, Artificial Sequence
  Description of Artificial Sequence: Synthetic oligonucleotide
uguugguuccccauuuuau

SEQ ID NO: 1211933 - RNA, 19 nt, Artificial Sequence
  Description of Artificial Sequence: Synthetic oligonucleotide
cacagguggaucuaaugug

SEQ ID NO: 1211934 - RNA, 19 nt, Artificial Sequence
  Description of Artificial Sequence: Synthetic oligonucleotide
ugucgucucuccaggagcc

SEQ ID NO: 1211935 - RNA, 19 nt, Artificial Sequence
  Description of Artificial Sequence: Synthetic oligonucleotide
uuauaaguucuuucagcaa

SEQ ID NO: 1211936 - RNA, 19 nt, Artificial Sequence
  Description of Artificial Sequence: Synthetic oligonucleotide
aaauacuaccagaggaacu

SEQ ID NO: 1211937 - RNA, 19 nt, Artificial Sequence
  Description of Artificial Sequence: Synthetic oligonucleotide
aaucaggaugugugggucu

SEQ ID NO: 1211938 - RNA, 19 nt, Artificial Sequence
  Description of Artificial Sequence: Synthetic oligonucleotide
ugguaauuaagaugguuuu

SEQ ID NO: 1211939 - RNA, 19 nt, Artificial Sequence
  Description of Artificial Sequence: Synthetic oligonucleotide
aguucuugcagggaggcug

SEQ ID NO: 1211940 - RNA, 19 nt, Artificial Sequence
  Description of Artificial Sequence: Synthetic oligonucleotide
ucauucggcguaucuaaca

SEQ ID NO: 1211941 - RNA, 19 nt, Artificial Sequence
  Description of Artificial Sequence: Synthetic oligonucleotide
cuugacugagcgcacgagc

SEQ ID NO: 1211942 - RNA, 19 nt, Artificial Sequence
  Description of Artificial Sequence: Synthetic oligonucleotide
gcuauuaauaagccacagg

SEQ ID NO: 1211943 - RNA, 19 nt, Artificial Sequence
  Description of Artificial Sequence: Synthetic oligonucleotide
caacguacuuccucaacag

SEQ ID NO: 1211944 - RNA, 19 nt, Artificial Sequence
  Description of Artificial Sequence: Synthetic oligonucleotide
aaucgaaucuggacaguag

SEQ ID NO: 1211945 - RNA, 19 nt, Artificial Sequence
  Description of Artificial Sequence: Synthetic oligonucleotide
aaucggaucugucgucucu

SEQ ID NO: 1211946 - RNA, 19 nt, Artificial Sequence
  Description of Artificial Sequence: Synthetic oligonucleotide
aaguacagaaguauuugaa

SEQ ID NO: 1211947 - RNA, 19 nt, Artificial Sequence
  Description of Artificial Sequence: Synthetic oligonucleotide
agaguuguaugucaucuuu

SEQ ID NO: 1211948 - RNA, 19 nt, Artificial Sequence
  Description of Artificial Sequence: Synthetic oligonucleotide
uguucgagggauccguccu

SEQ ID NO: 1211949 - RNA, 19 nt, Artificial Sequence
  Description of Artificial Sequence: Synthetic oligonucleotide
guuguaugucaucuuucag

SEQ ID NO: 1211950 - RNA, 19 nt, Artificial Sequence
  Description of Artificial Sequence: Synthetic oligonucleotide
agaaguauuugaaucuuga

SEQ ID NO: 1211951 - RNA, 19 nt, Artificial Sequence
  Description of Artificial Sequence: Synthetic oligonucleotide
cacauuacaugcugccugc

SEQ ID NO: 1211952 - RNA, 19 nt, Artificial Sequence
  Description of Artificial Sequence: Synthetic oligonucleotide
agcaaggcuaauacucugc

SEQ ID NO: 1211953 - RNA, 19 nt, Artificial Sequence
  Description of Artificial Sequence: Synthetic oligonucleotide
ucuaacaaggcuugauguu

SEQ ID NO: 1211954 - RNA, 19 nt, Artificial Sequence
  Description of Artificial Sequence: Synthetic oligonucleotide
uugaaucuugacugagcgc

SEQ ID NO: 1211955 - RNA, 19 nt, Artificial Sequence
  Description of Artificial Sequence: Synthetic oligonucleotide
uauuguucgagggauccgu

SEQ ID NO: 1211956 - RNA, 19 nt, Artificial Sequence
  Description of Artificial Sequence: Synthetic oligonucleotide
guuauaagaguuguauguc

SEQ ID NO: 1211957 - RNA, 19 nt, Artificial Sequence
  Description of Artificial Sequence: Synthetic oligonucleotide
uggagacuuugacaauucc

SEQ ID NO: 1211958 - RNA, 19 nt, Artificial Sequence
  Description of Artificial Sequence: Synthetic oligonucleotide
cagacauacacaccacgag

SEQ ID NO: 1211959 - RNA, 19 nt, Artificial Sequence
  Description of Artificial Sequence: Synthetic oligonucleotide
aacgacuucccucgacaug

SEQ ID NO: 1211960 - RNA, 19 nt, Artificial Sequence
  Description of Artificial Sequence: Synthetic oligonucleotide
uggguggacauacugccgu

SEQ ID NO: 1211961 - RNA, 19 nt, Artificial Sequence
  Description of Artificial Sequence: Synthetic oligonucleotide
uuuaguucuuuggcaaucu

SEQ ID NO: 1211962 - RNA, 19 nt, Artificial Sequence
  Description of Artificial Sequence: Synthetic oligonucleotide
cauucagugauccaaugaa

SEQ ID NO: 1211963 - RNA, 19 nt, Artificial Sequence
  Description of Artificial Sequence: Synthetic oligonucleotide
uuggguggacauacugccg

SEQ ID NO: 1211964 - RNA, 19 nt, Artificial Sequence
  Description of Artificial Sequence: Synthetic oligonucleotide
auagucacuguaucuccug

SEQ ID NO: 1211965 - RNA, 19 nt, Artificial Sequence
  Description of Artificial Sequence: Synthetic oligonucleotide
acuguggcacugcuaacag

SEQ ID NO: 1211966 - RNA, 19 nt, Artificial Sequence
  Description of Artificial Sequence: Synthetic oligonucleotide
gacggaucaaagauuccag

SEQ ID NO: 1211967 - RNA, 19 nt, Artificial Sequence
  Description of Artificial Sequence: Synthetic oligonucleotide
accaacguacuuccucaac

SEQ ID NO: 1211968 - RNA, 19 nt, Artificial Sequence
  Description of Artificial Sequence: Synthetic oligonucleotide
aguuacagucagcccagag

SEQ ID NO: 1211969 - RNA, 19 nt, Artificial Sequence
  Description of Artificial Sequence: Synthetic oligonucleotide
ggucaugcugcucauucgg

SEQ ID NO: 1211970 - RNA, 19 nt, Artificial Sequence
  Description of Artificial Sequence: Synthetic oligonucleotide
gcugggaucgcucaaaauc

SEQ ID NO: 1211971 - RNA, 19 nt, Artificial Sequence
  Description of Artificial Sequence: Synthetic oligonucleotide
acgaaguugaugaaauuga

SEQ ID NO: 1211972 - RNA, 19 nt, Artificial Sequence
  Description of Artificial Sequence: Synthetic oligonucleotide
aaacgacuucccucgacau

SEQ ID NO: 1211973 - RNA, 19 nt, Artificial Sequence
  Description of Artificial Sequence: Synthetic oligonucleotide
uuugguaauuaagaugguu

SEQ ID NO: 1211974 - RNA, 19 nt, Artificial Sequence
  Description of Artificial Sequence: Synthetic oligonucleotide
agucugaaguugguaaauc

SEQ ID NO: 1211975 - RNA, 19 nt, Artificial Sequence
  Description of Artificial Sequence: Synthetic oligonucleotide
aaaucgaaucuggacagua

SEQ ID NO: 1211976 - RNA, 19 nt, Artificial Sequence
  Description of Artificial Sequence: Synthetic oligonucleotide
uugaccuauugcucauucc

SEQ ID NO: 1211977 - RNA, 19 nt, Artificial Sequence
  Description of Artificial Sequence: Synthetic oligonucleotide
ucuauuccacaaaugccuu

SEQ ID NO: 1211978 - RNA, 19 nt, Artificial Sequence
  Description of Artificial Sequence: Synthetic oligonucleotide
acugccgugcauaaccaac

SEQ ID NO: 1211979 - RNA, 19 nt, Artificial Sequence
  Description of Artificial Sequence: Synthetic oligonucleotide
agacggaucaaagauucca

SEQ ID NO: 1211980 - RNA, 19 nt, Artificial Sequence
  Description of Artificial Sequence: Synthetic oligonucleotide
aucuaaugugguaagucug

SEQ ID NO: 1211981 - RNA, 19 nt, Artificial Sequence
  Description of Artificial Sequence: Synthetic oligonucleotide
caauuccaguaauagucac

SEQ ID NO: 1211982 - RNA, 19 nt, Artificial Sequence
  Description of Artificial Sequence: Synthetic oligonucleotide
uccucgaaugggaauccug

SEQ ID NO: 1211983 - RNA, 19 nt, Artificial Sequence
  Description of Artificial Sequence: Synthetic oligonucleotide
agcaugcuauguuucauaa

SEQ ID NO: 1211984 - RNA, 19 nt, Artificial Sequence
  Description of Artificial Sequence: Synthetic oligonucleotide
auucagugauccaaugaag

SEQ ID NO: 1211985 - RNA, 19 nt, Artificial Sequence
  Description of Artificial Sequence: Synthetic oligonucleotide
ucccucgacaugcaggcac

SEQ ID NO: 1211986 - RNA, 19 nt, Artificial Sequence
  Description of Artificial Sequence: Synthetic oligonucleotide
uacauagucugaaguuggu

SEQ ID NO: 1211987 - RNA, 19 nt, Artificial Sequence
  Description of Artificial Sequence: Synthetic oligonucleotide
guggaucuaaugugguaag

SEQ ID NO: 1211988 - RNA, 19 nt, Artificial Sequence
  Description of Artificial Sequence: Synthetic oligonucleotide
uuguucgagggauccgucc

SEQ ID NO: 1211989 - RNA, 19 nt, Artificial Sequence
  Description of Artificial Sequence: Synthetic oligonucleotide
auucggcguaucuaacaag

SEQ ID NO: 1211990 - RNA, 19 nt, Artificial Sequence
  Description of Artificial Sequence: Synthetic oligonucleotide
gauagaaguccugcagagc

SEQ ID NO: 1211991 - RNA, 19 nt, Artificial Sequence
  Description of Artificial Sequence: Synthetic oligonucleotide
gcacgggacacuuuguagg

SEQ ID NO: 1211992 - RNA, 19 nt, Artificial Sequence
  Description of Artificial Sequence: Synthetic oligonucleotide
uguuuaguucuuuggcaau

SEQ ID NO: 1211993 - RNA, 19 nt, Artificial Sequence
  Description of Artificial Sequence: Synthetic oligonucleotide
ccaaaucgaaucuggacag

SEQ ID NO: 1211994 - RNA, 19 nt, Artificial Sequence
  Description of Artificial Sequence: Synthetic oligonucleotide
ugauguugguuccccauuu

SEQ ID NO: 1211995 - RNA, 19 nt, Artificial Sequence
  Description of Artificial Sequence: Synthetic oligonucleotide
agacuuugacaauuccagu

SEQ ID NO: 1211996 - RNA, 19 nt, Artificial Sequence
  Description of Artificial Sequence: Synthetic oligonucleotide
ucuaaccuugcucgugccu

SEQ ID NO: 1211997 - RNA, 19 nt, Artificial Sequence
  Description of Artificial Sequence: Synthetic oligonucleotide
gguuuugagcuauuaauaa

SEQ ID NO: 1211998 - RNA, 19 nt, Artificial Sequence
  Description of Artificial Sequence: Synthetic oligonucleotide
acuucccucgacaugcagg

SEQ ID NO: 1211999 - RNA, 19 nt, Artificial Sequence
  Description of Artificial Sequence: Synthetic oligonucleotide
cauuacaugcugccugcag

SEQ ID NO: 1212000 - RNA, 19 nt, Artificial Sequence
  Description of Artificial Sequence: Synthetic oligonucleotide
gcauaaccaacguacuucc

SEQ ID NO: 1212001 - RNA, 19 nt, Artificial Sequence
  Description of Artificial Sequence: Synthetic oligonucleotide
caaucugacgaaguugaug

SEQ ID NO: 1212002 - RNA, 19 nt, Artificial Sequence
  Description of Artificial Sequence: Synthetic oligonucleotide
cauucuauuguucgaggga

SEQ ID NO: 1212003 - RNA, 19 nt, Artificial Sequence
  Description of Artificial Sequence: Synthetic oligonucleotide
ccgugcauaaccaacguac

SEQ ID NO: 1212004 - RNA, 19 nt, Artificial Sequence
  Description of Artificial Sequence: Synthetic oligonucleotide
caugcuauguuucauaauu

SEQ ID NO: 1212005 - RNA, 19 nt, Artificial Sequence
  Description of Artificial Sequence: Synthetic oligonucleotide
gaccuauugcucauuccag

SEQ ID NO: 1212006 - RNA, 19 nt, Artificial Sequence
  Description of Artificial Sequence: Synthetic oligonucleotide
uaaugugguaagucuguua

SEQ ID NO: 1212007 - RNA, 19 nt, Artificial Sequence
  Description of Artificial Sequence: Synthetic oligonucleotide
ggaguaaacgacuucccuc

SEQ ID NO: 1212008 - RNA, 19 nt, Artificial Sequence
  Description of Artificial Sequence: Synthetic oligonucleotide
gauugacuucccaucgggc

SEQ ID NO: 1212009 - RNA, 19 nt, Artificial Sequence
  Description of Artificial Sequence: Synthetic oligonucleotide
uccuagcaugcuauguuuc

SEQ ID NO: 1212010 - RNA, 19 nt, Artificial Sequence
  Description of Artificial Sequence: Synthetic oligonucleotide
ggcguaucuaacaagauaa

SEQ ID NO: 1212011 - RNA, 19 nt, Artificial Sequence
  Description of Artificial Sequence: Synthetic oligonucleotide
cacaacuaucuacaagauc

SEQ ID NO: 1212012 - RNA, 19 nt, Artificial Sequence
  Description of Artificial Sequence: Synthetic oligonucleotide
acagacauacacaccacga

SEQ ID NO: 1212013 - RNA, 19 nt, Artificial Sequence
  Description of Artificial Sequence: Synthetic oligonucleotide
guugaccuauugcucauuc

SEQ ID NO: 1212014 - RNA, 19 nt, Artificial Sequence
  Description of Artificial Sequence: Synthetic oligonucleotide
ugggaucgcucaaaaucca

SEQ ID NO: 1212015 - RNA, 19 nt, Artificial Sequence
  Description of Artificial Sequence: Synthetic oligonucleotide
ggaucugucgucucuccag

SEQ ID NO: 1212016 - RNA, 19 nt, Artificial Sequence
  Description of Artificial Sequence: Synthetic oligonucleotide
cagauagaaguccugcaga

SEQ ID NO: 1212017 - RNA, 19 nt, Artificial Sequence
  Description of Artificial Sequence: Synthetic oligonucleotide
gguaauuaagaugguuuug

SEQ ID NO: 1212018 - RNA, 19 nt, Artificial Sequence
  Description of Artificial Sequence: Synthetic oligonucleotide
uacuaccagaggaacuguc

SEQ ID NO: 1212019 - RNA, 19 nt, Artificial Sequence
  Description of Artificial Sequence: Synthetic oligonucleotide
uuguaggaagauugacuuc

SEQ ID NO: 1212020 - RNA, 19 nt, Artificial Sequence
  Description of Artificial Sequence: Synthetic oligonucleotide
ucauuccagagccgugcug

SEQ ID NO: 1212021 - RNA, 19 nt, Artificial Sequence
  Description of Artificial Sequence: Synthetic oligonucleotide
uuccuagcaugcuauguuu

SEQ ID NO: 1212022 - RNA, 19 nt, Artificial Sequence
  Description of Artificial Sequence: Synthetic oligonucleotide
cuaaccuugcucgugccuc

SEQ ID NO: 1212023 - RNA, 19 nt, Artificial Sequence
  Description of Artificial Sequence: Synthetic oligonucleotide
ugccggguggugaugggug

SEQ ID NO: 1212024 - RNA, 19 nt, Artificial Sequence
  Description of Artificial Sequence: Synthetic oligonucleotide
gcagcaauaauggaaguuc

SEQ ID NO: 1212025 - RNA, 19 nt, Artificial Sequence
  Description of Artificial Sequence: Synthetic oligonucleotide
uucuaaccuugcucgugcc

SEQ ID NO: 1212026 - RNA, 19 nt, Artificial Sequence
  Description of Artificial Sequence: Synthetic oligonucleotide
guaaacgacuucccucgac

SEQ ID NO: 1212027 - RNA, 19 nt, Artificial Sequence
  Description of Artificial Sequence: Synthetic oligonucleotide
gcugauguggaaucggauc

SEQ ID NO: 1212028 - RNA, 19 nt, Artificial Sequence
  Description of Artificial Sequence: Synthetic oligonucleotide
gauccguccugcuucucuc

SEQ ID NO: 1212029 - RNA, 19 nt, Artificial Sequence
  Description of Artificial Sequence: Synthetic oligonucleotide
gauaaagaccaaaucgaau

SEQ ID NO: 1212030 - RNA, 19 nt, Artificial Sequence
  Description of Artificial Sequence: Synthetic oligonucleotide
gaucgcucaaaauccagau

SEQ ID NO: 1212031 - RNA, 19 nt, Artificial Sequence
  Description of Artificial Sequence: Synthetic oligonucleotide
caaguaccagggcaccagc

SEQ ID NO: 1212032 - RNA, 19 nt, Artificial Sequence
  Description of Artificial Sequence: Synthetic oligonucleotide
ugcucauuccagagccgug

SEQ ID NO: 1212033 - RNA, 19 nt, Artificial Sequence
  Description of Artificial Sequence: Synthetic oligonucleotide
acuguaacugugagaggag

SEQ ID NO: 1212034 - RNA, 19 nt, Artificial Sequence
  Description of Artificial Sequence: Synthetic oligonucleotide
caaaccacgccagcuuuag

SEQ ID NO: 1212035 - RNA, 19 nt, Artificial Sequence
  Description of Artificial Sequence: Synthetic oligonucleotide
aucggaucugucgucucuc

SEQ ID NO: 1212036 - RNA, 19 nt, Artificial Sequence
  Description of Artificial Sequence: Synthetic oligonucleotide
ggaucuaaugugguaaguc

SEQ ID NO: 1212037 - RNA, 19 nt, Artificial Sequence
  Description of Artificial Sequence: Synthetic oligonucleotide
aaccaacguacuuccucaa

SEQ ID NO: 1212038 - RNA, 19 nt, Artificial Sequence
  Description of Artificial Sequence: Synthetic oligonucleotide
cucauucggcguaucuaac

SEQ ID NO: 1212039 - RNA, 19 nt, Artificial Sequence
  Description of Artificial Sequence: Synthetic oligonucleotide
uggaucuaaugugguaagu

SEQ ID NO: 1212040 - RNA, 19 nt, Artificial Sequence
  Description of Artificial Sequence: Synthetic oligonucleotide
auguugguuccccauuuua

SEQ ID NO: 1212041 - RNA, 19 nt, Artificial Sequence
  Description of Artificial Sequence: Synthetic oligonucleotide
uagggcacuccccaucuuu

SEQ ID NO: 1212042 - RNA, 19 nt, Artificial Sequence
  Description of Artificial Sequence: Synthetic oligonucleotide
uucuuauuccgagaaccuu

SEQ ID NO: 1212043 - RNA, 19 nt, Artificial Sequence
  Description of Artificial Sequence: Synthetic oligonucleotide
ugccgugcauaaccaacgu

SEQ ID NO: 1212044 - RNA, 19 nt, Artificial Sequence
  Description of Artificial Sequence: Synthetic oligonucleotide
uaaccuugcucgugccucu

SEQ ID NO: 1212045 - RNA, 19 nt, Artificial Sequence
  Description of Artificial Sequence: Synthetic oligonucleotide
cauucggcguaucuaacaa

SEQ ID NO: 1212046 - RNA, 19 nt, Artificial Sequence
  Description of Artificial Sequence: Synthetic oligonucleotide
gacuucccucgacaugcag

SEQ ID NO: 1212047 - RNA, 19 nt, Artificial Sequence
  Description of Artificial Sequence: Synthetic oligonucleotide
auuguucgagggauccguc

SEQ ID NO: 1212048 - RNA, 19 nt, Artificial Sequence
  Description of Artificial Sequence: Synthetic oligonucleotide
gacauacugccgugcauaa

SEQ ID NO: 1212049 - RNA, 19 nt, Artificial Sequence
  Description of Artificial Sequence: Synthetic oligonucleotide
agcucuuauugcaaucaca

SEQ ID NO: 1212050 - RNA, 19 nt, Artificial Sequence
  Description of Artificial Sequence: Synthetic oligonucleotide
guauuuugaucaacugcca

SEQ ID NO: 1212051 - RNA, 19 nt, Artificial Sequence
  Description of Artificial Sequence: Synthetic oligonucleotide
aguaaacgacuucccucga

SEQ ID NO: 1212052 - RNA, 19 nt, Artificial Sequence
  Description of Artificial Sequence: Synthetic oligonucleotide
uggacauacugccgugcau

SEQ ID NO: 1212053 - RNA, 19 nt, Artificial Sequence
  Description of Artificial Sequence: Synthetic oligonucleotide
uucgagggauccguccugc

SEQ ID NO: 1212054 - RNA, 19 nt, Artificial Sequence
  Description of Artificial Sequence: Synthetic oligonucleotide
cacuuuguaggaagauuga

SEQ ID NO: 1212055 - RNA, 19 nt, Artificial Sequence
  Description of Artificial Sequence: Synthetic oligonucleotide
gguggaucuaaugugguaa

SEQ ID NO: 1212056 - RNA, 19 nt, Artificial Sequence
  Description of Artificial Sequence: Synthetic oligonucleotide
cagacggaucaaagauucc

SEQ ID NO: 1212057 - RNA, 19 nt, Artificial Sequence
  Description of Artificial Sequence: Synthetic oligonucleotide
ggagacuuugacaauucca

SEQ ID NO: 1212058 - RNA, 19 nt, Artificial Sequence
  Description of Artificial Sequence: Synthetic oligonucleotide
ucggcguaucuaacaagau

SEQ ID NO: 1212059 - RNA, 19 nt, Artificial Sequence
  Description of Artificial Sequence: Synthetic oligonucleotide
acauacugccgugcauaac

SEQ ID NO: 1212060 - RNA, 19 nt, Artificial Sequence
  Description of Artificial Sequence: Synthetic oligonucleotide
guggaaucggaucugucgu

SEQ ID NO: 1212061 - RNA, 19 nt, Artificial Sequence
  Description of Artificial Sequence: Synthetic oligonucleotide
cuguuacauagucugaagu

SEQ ID NO: 1212062 - RNA, 19 nt, Artificial Sequence
  Description of Artificial Sequence: Synthetic oligonucleotide
aucgcucaaaauccagauu

SEQ ID NO: 1212063 - RNA, 19 nt, Artificial Sequence
  Description of Artificial Sequence: Synthetic oligonucleotide
ugcucauucggcguaucua

SEQ ID NO: 1212064 - RNA, 19 nt, Artificial Sequence
  Description of Artificial Sequence: Synthetic oligonucleotide
ugacgaaguugaugaaauu

SEQ ID NO: 1212065 - RNA, 19 nt, Artificial Sequence
  Description of Artificial Sequence: Synthetic oligonucleotide
agcuuuagcaaggcuaaua

SEQ ID NO: 1212066 - RNA, 19 nt, Artificial Sequence
  Description of Artificial Sequence: Synthetic oligonucleotide
cuuauuccgagaaccuucu

SEQ ID NO: 1212067 - RNA, 19 nt, Artificial Sequence
  Description of Artificial Sequence: Synthetic oligonucleotide
accacgccagcuuuagcaa

SEQ ID NO: 1212068 - RNA, 19 nt, Artificial Sequence
  Description of Artificial Sequence: Synthetic oligonucleotide
ugguaaaucuuugggccuu

SEQ ID NO: 1212069 - RNA, 19 nt, Artificial Sequence
  Description of Artificial Sequence: Synthetic oligonucleotide
cuuuagcaaggcuaauacu

SEQ ID NO: 1212070 - RNA, 19 nt, Artificial Sequence
  Description of Artificial Sequence: Synthetic oligonucleotide
guucgagggauccguccug

SEQ ID NO: 1212071 - RNA, 19 nt, Artificial Sequence
  Description of Artificial Sequence: Synthetic oligonucleotide
cagaacuuauuucagcuuu

SEQ ID NO: 1212072 - RNA, 19 nt, Artificial Sequence
  Description of Artificial Sequence: Synthetic oligonucleotide
cacgaggugccacauuaca

SEQ ID NO: 1212073 - RNA, 19 nt, Artificial Sequence
  Description of Artificial Sequence: Synthetic oligonucleotide
ucgggcaaagggagcucug

SEQ ID NO: 1212074 - RNA, 19 nt, Artificial Sequence
  Description of Artificial Sequence: Synthetic oligonucleotide
gcucauucggcguaucuaa

SEQ ID NO: 1212075 - RNA, 19 nt, Artificial Sequence
  Description of Artificial Sequence: Synthetic oligonucleotide
auacuaccagaggaacugu

SEQ ID NO: 1212076 - RNA, 19 nt, Artificial Sequence
  Description of Artificial Sequence: Synthetic oligonucleotide
cucgacaugcaggcacggg

SEQ ID NO: 1212077 - RNA, 19 nt, Artificial Sequence
  Description of Artificial Sequence: Synthetic oligonucleotide
cacuucaaguacagaagua

SEQ ID NO: 1212078 - RNA, 19 nt, Artificial Sequence
  Description of Artificial Sequence: Synthetic oligonucleotide
augcuauguuucauaauuu

SEQ ID NO: 1212079 - RNA, 19 nt, Artificial Sequence
  Description of Artificial Sequence: Synthetic oligonucleotide
aggcuaauacucugcuguu

SEQ ID NO: 1212080 - RNA, 19 nt, Artificial Sequence
  Description of Artificial Sequence: Synthetic oligonucleotide
ugcugggaucgcucaaaau

SEQ ID NO: 1212081 - RNA, 19 nt, Artificial Sequence
  Description of Artificial Sequence: Synthetic oligonucleotide
agagccgugcugggaucgc

SEQ ID NO: 1212082 - RNA, 19 nt, Artificial Sequence
  Description of Artificial Sequence: Synthetic oligonucleotide
cuacuguggcacugcuaac

SEQ ID NO: 1212083 - RNA, 19 nt, Artificial Sequence
  Description of Artificial Sequence: Synthetic oligonucleotide
aucugacgaaguugaugaa

SEQ ID NO: 1212084 - RNA, 19 nt, Artificial Sequence
  Description of Artificial Sequence: Synthetic oligonucleotide
caguagggcacuccccauc

SEQ ID NO: 1212085 - RNA, 19 nt, Artificial Sequence
  Description of Artificial Sequence: Synthetic oligonucleotide
cagcugauguggaaucgga

SEQ ID NO: 1212086 - RNA, 19 nt, Artificial Sequence
  Description of Artificial Sequence: Synthetic oligonucleotide
auacugccgugcauaacca

SEQ ID NO: 1212087 - RNA, 19 nt, Artificial Sequence
  Description of Artificial Sequence: Synthetic oligonucleotide
ggauuugcagcagcaauaa

SEQ ID NO: 1212088 - RNA, 19 nt, Artificial Sequence
  Description of Artificial Sequence: Synthetic oligonucleotide
acgaggugccacauuacau

SEQ ID NO: 1212089 - RNA, 19 nt, Artificial Sequence
  Description of Artificial Sequence: Synthetic oligonucleotide
acgagcuacuguggcacug

SEQ ID NO: 1212090 - RNA, 19 nt, Artificial Sequence
  Description of Artificial Sequence: Synthetic oligonucleotide
gcucuuauugcaaucacau

SEQ ID NO: 1212091 - RNA, 19 nt, Artificial Sequence
  Description of Artificial Sequence: Synthetic oligonucleotide
caugcugcucauucggcgu

SEQ ID NO: 1212092 - RNA, 19 nt, Artificial Sequence
  Description of Artificial Sequence: Synthetic oligonucleotide
gggaucgcucaaaauccag

SEQ ID NO: 1212093 - RNA, 19 nt, Artificial Sequence
  Description of Artificial Sequence: Synthetic oligonucleotide
acauuacaugcugccugca

SEQ ID NO: 1212094 - RNA, 19 nt, Artificial Sequence
  Description of Artificial Sequence: Synthetic oligonucleotide
cucgugccucugucagacg

SEQ ID NO: 1212095 - RNA, 19 nt, Artificial Sequence
  Description of Artificial Sequence: Synthetic oligonucleotide
uguugaccuauugcucauu

SEQ ID NO: 1212096 - RNA, 19 nt, Artificial Sequence
  Description of Artificial Sequence: Synthetic oligonucleotide
gcucgugccucugucagac

SEQ ID NO: 1212097 - RNA, 19 nt, Artificial Sequence
  Description of Artificial Sequence: Synthetic oligonucleotide
guaucuccuggcacacaac

SEQ ID NO: 1212098 - RNA, 19 nt, Artificial Sequence
  Description of Artificial Sequence: Synthetic oligonucleotide
cugagcgcacgagcuacug

SEQ ID NO: 1212099 - RNA, 19 nt, Artificial Sequence
  Description of Artificial Sequence: Synthetic oligonucleotide
ccucucucaauucuaaccu

SEQ ID NO: 1212100 - RNA, 19 nt, Artificial Sequence
  Description of Artificial Sequence: Synthetic oligonucleotide
accuugcucgugccucugu

SEQ ID NO: 1212101 - RNA, 19 nt, Artificial Sequence
  Description of Artificial Sequence: Synthetic oligonucleotide
cuuugguaauuaagauggu

SEQ ID NO: 1212102 - RNA, 19 nt, Artificial Sequence
  Description of Artificial Sequence: Synthetic oligonucleotide
ugccucugucagacggauc

SEQ ID NO: 1212103 - RNA, 19 nt, Artificial Sequence
  Description of Artificial Sequence: Synthetic oligonucleotide
gauuugcagcagcaauaau

SEQ ID NO: 1212104 - RNA, 19 nt, Artificial Sequence
  Description of Artificial Sequence: Synthetic oligonucleotide
caacuaucuacaagaucau

SEQ ID NO: 1212105 - RNA, 19 nt, Artificial Sequence
  Description of Artificial Sequence: Synthetic oligonucleotide
gcaaggcuaauacucugcu

SEQ ID NO: 1212106 - RNA, 19 nt, Artificial Sequence
  Description of Artificial Sequence: Synthetic oligonucleotide
ggacaguagggcacucccc

SEQ ID NO: 1212107 - RNA, 19 nt, Artificial Sequence
  Description of Artificial Sequence: Synthetic oligonucleotide
ccacgccagcuuuagcaag

SEQ ID NO: 1212108 - RNA, 19 nt, Artificial Sequence
  Description of Artificial Sequence: Synthetic oligonucleotide
ccagcucuuauugcaauca

SEQ ID NO: 1212109 - RNA, 19 nt, Artificial Sequence
  Description of Artificial Sequence: Synthetic oligonucleotide
cgacaugcaggcacgggac

SEQ ID NO: 1212110 - RNA, 19 nt, Artificial Sequence
  Description of Artificial Sequence: Synthetic oligonucleotide
gugcauaaccaacguacuu

SEQ ID NO: 1212111 - RNA, 19 nt, Artificial Sequence
  Description of Artificial Sequence: Synthetic oligonucleotide
cauaaccaacguacuuccu

SEQ ID NO: 1212112 - RNA, 19 nt, Artificial Sequence
  Description of Artificial Sequence: Synthetic oligonucleotide
ccacagguggaucuaaugu

SEQ ID NO: 1212113 - RNA, 19 nt, Artificial Sequence
  Description of Artificial Sequence: Synthetic oligonucleotide
cgaaguugaugaaauugaa

SEQ ID NO: 1212114 - RNA, 19 nt, Artificial Sequence
  Description of Artificial Sequence: Synthetic oligonucleotide
uucccucgacaugcaggca

SEQ ID NO: 1212115 - RNA, 19 nt, Artificial Sequence
  Description of Artificial Sequence: Synthetic oligonucleotide
gcuccuguauuuugaucaa

SEQ ID NO: 1212116 - RNA, 19 nt, Artificial Sequence
  Description of Artificial Sequence: Synthetic oligonucleotide
gguaagucuguuacauagu

SEQ ID NO: 1212117 - RNA, 19 nt, Artificial Sequence
  Description of Artificial Sequence: Synthetic oligonucleotide
gucagacggaucaaagauu

SEQ ID NO: 1212118 - RNA, 19 nt, Artificial Sequence
  Description of Artificial Sequence: Synthetic oligonucleotide
ggcaaagggagcucuggau

SEQ ID NO: 1212119 - RNA, 19 nt, Artificial Sequence
  Description of Artificial Sequence: Synthetic oligonucleotide
agggcacuccccaucuuua

SEQ ID NO: 1212120 - RNA, 19 nt, Artificial Sequence
  Description of Artificial Sequence: Synthetic oligonucleotide
cucucucaauucuaaccuu

SEQ ID NO: 1212121 - RNA, 19 nt, Artificial Sequence
  Description of Artificial Sequence: Synthetic oligonucleotide
acgggacacuuuguaggaa

SEQ ID NO: 1212122 - RNA, 19 nt, Artificial Sequence
  Description of Artificial Sequence: Synthetic oligonucleotide
ggauccguccugcuucucu

SEQ ID NO: 1212123 - RNA, 19 nt, Artificial Sequence
  Description of Artificial Sequence: Synthetic oligonucleotide
cucauuccagagccgugcu

SEQ ID NO: 1212124 - RNA, 19 nt, Artificial Sequence
  Description of Artificial Sequence: Synthetic oligonucleotide
ccuugcucgugccucuguc

SEQ ID NO: 1212125 - RNA, 19 nt, Artificial Sequence
  Description of Artificial Sequence: Synthetic oligonucleotide
cacuccccaucuuuaaauu

SEQ ID NO: 1212126 - RNA, 19 nt, Artificial Sequence
  Description of Artificial Sequence: Synthetic oligonucleotide
ccacgaggugccacauuac

SEQ ID NO: 1212127 - RNA, 19 nt, Artificial Sequence
  Description of Artificial Sequence: Synthetic oligonucleotide
ggauagcuuuggguggaca

SEQ ID NO: 1212128 - RNA, 19 nt, Artificial Sequence
  Description of Artificial Sequence: Synthetic oligonucleotide
agccacagguggaucuaau

SEQ ID NO: 1212129 - RNA, 19 nt, Artificial Sequence
  Description of Artificial Sequence: Synthetic oligonucleotide
cugcucauucggcguaucu

SEQ ID NO: 1212130 - RNA, 19 nt, Artificial Sequence
  Description of Artificial Sequence: Synthetic oligonucleotide
cuaaugugguaagucuguu

SEQ ID NO: 1212131 - RNA, 19 nt, Artificial Sequence
  Description of Artificial Sequence: Synthetic oligonucleotide
caaaucgaaucuggacagu

SEQ ID NO: 1212132 - RNA, 19 nt, Artificial Sequence
  Description of Artificial Sequence: Synthetic oligonucleotide
gcuucuaacaaggcuugau

SEQ ID NO: 1212133 - RNA, 19 nt, Artificial Sequence
  Description of Artificial Sequence: Synthetic oligonucleotide
gcguaucuaacaagauaaa

SEQ ID NO: 1212134 - RNA, 19 nt, Artificial Sequence
  Description of Artificial Sequence: Synthetic oligonucleotide
cgagcuacuguggcacugc

SEQ ID NO: 1212135 - RNA, 19 nt, Artificial Sequence
  Description of Artificial Sequence: Synthetic oligonucleotide
ccucaacagcugaugugga

SEQ ID NO: 1212136 - RNA, 19 nt, Artificial Sequence
  Description of Artificial Sequence: Synthetic oligonucleotide
cucuuucccaagccuggau

SEQ ID NO: 1212137 - RNA, 19 nt, Artificial Sequence
  Description of Artificial Sequence: Synthetic oligonucleotide
gccgugcauaaccaacgua

SEQ ID NO: 1212138 - RNA, 19 nt, Artificial Sequence
  Description of Artificial Sequence: Synthetic oligonucleotide
gggcacuccccaucuuuaa

SEQ ID NO: 1212139 - RNA, 19 nt, Artificial Sequence
  Description of Artificial Sequence: Synthetic oligonucleotide
cuguaucuccuggcacaca

SEQ ID NO: 1212140 - RNA, 19 nt, Artificial Sequence
  Description of Artificial Sequence: Synthetic oligonucleotide
gcaugcuauguuucauaau

SEQ ID NO: 1212141 - RNA, 19 nt, Artificial Sequence
  Description of Artificial Sequence: Synthetic oligonucleotide
ccucgacaugcaggcacgg

SEQ ID NO: 1212142 - RNA, 19 nt, Artificial Sequence
  Description of Artificial Sequence: Synthetic oligonucleotide
ggcuucuaacaaggcuuga

SEQ ID NO: 1212143 - RNA, 19 nt, Artificial Sequence
  Description of Artificial Sequence: Synthetic oligonucleotide
cggcguaucuaacaagaua

SEQ ID NO: 1212144 - RNA, 19 nt, Artificial Sequence
  Description of Artificial Sequence: Synthetic oligonucleotide
cacgagcuacuguggcacu

SEQ ID NO: 1212145 - RNA, 19 nt, Artificial Sequence
  Description of Artificial Sequence: Synthetic oligonucleotide
gcugcucauucggcguauc

SEQ ID NO: 1212146 - RNA, 19 nt, Artificial Sequence
  Description of Artificial Sequence: Synthetic oligonucleotide
cuccucgaaugggaauccu

SEQ ID NO: 1212147 - RNA, 19 nt, Artificial Sequence
  Description of Artificial Sequence: Synthetic oligonucleotide
cggaucugucgucucucca

SEQ ID NO: 1212148 - RNA, 19 nt, Artificial Sequence
  Description of Artificial Sequence: Synthetic oligonucleotide
cgugcugggaucgcucaaa

SEQ ID NO: 1212149 - RNA, 19 nt, Artificial Sequence
  Description of Artificial Sequence: Synthetic oligonucleotide
cagcuuuagcaaggcuaau

SEQ ID NO: 1212150 - RNA, 19 nt, Artificial Sequence
  Description of Artificial Sequence: Synthetic oligonucleotide
ccguccugcuucucucugu

SEQ ID NO: 1212151 - RNA, 19 nt, Artificial Sequence
  Description of Artificial Sequence: Synthetic oligonucleotide
gggauccguccugcuucuc

SEQ ID NO: 1212152 - RNA, 19 nt, Artificial Sequence
  Description of Artificial Sequence: Synthetic oligonucleotide
aauaccagcgcacacaggc

SEQ ID NO: 1212153 - RNA, 19 nt, Artificial Sequence
  Description of Artificial Sequence: Synthetic oligonucleotide
  modified_base (4)..(4): a, c, u, g, unknown or other
aaangcucgggacugaugg

SEQ ID NO: 1212154 - RNA, 19 nt, Artificial Sequence
  Description of Artificial Sequence: Synthetic oligonucleotide
aagacguauacuucaggcc

SEQ ID NO: 1212155 - RNA, 19 nt, Artificial Sequence
  Description of Artificial Sequence: Synthetic oligonucleotide
agacguauacuucaggccc

SEQ ID NO: 1212156 - RNA, 19 nt, Artificial Sequence
  Description of Artificial Sequence: Synthetic oligonucleotide
agacaagggaguuagugcc

SEQ ID NO: 1212157 - RNA, 19 nt, Artificial Sequence
  Description of Artificial Sequence: Synthetic oligonucleotide
guaaccaguacauggaugg

SEQ ID NO: 1212158 - RNA, 19 nt, Artificial Sequence
  Description of Artificial Sequence: Synthetic oligonucleotide
uguuggugcaaucauaagc

SEQ ID NO: 1212159 - RNA, 19 nt, Artificial Sequence
  Description of Artificial Sequence: Synthetic oligonucleotide
  modified_base (17)..(17): a, c, u, g, unknown or other
agaagugcuugguaaangc

SEQ ID NO: 1212160 - RNA, 19 nt, Artificial Sequence
  Description of Artificial Sequence: Synthetic oligonucleotide
gaugcguucagugaaggcg

SEQ ID NO: 1212161 - RNA, 19 nt, Artificial Sequence
  Description of Artificial Sequence: Synthetic oligonucleotide
acauggauaauguuuaacu

SEQ ID NO: 1212162 - RNA, 19 nt, Artificial Sequence
  Description of Artificial Sequence: Synthetic oligonucleotide
caugcuauuuucuccaccg

SEQ ID NO: 1212163 - RNA, 19 nt, Artificial Sequence
  Description of Artificial Sequence: Synthetic oligonucleotide
ucuaaugguggacacaggu

SEQ ID NO: 1212164 - RNA, 19 nt, Artificial Sequence
  Description of Artificial Sequence: Synthetic oligonucleotide
  modified_base (10)..(10): a, c, u, g, unknown or other
cuugguaaangcucgggac

SEQ ID NO: 1212165 - RNA, 19 nt, Artificial Sequence
  Description of Artificial Sequence: Synthetic oligonucleotide
caagacguauacuucaggc

SEQ ID NO: 1212166 - RNA, 19 nt, Artificial Sequence
  Description of Artificial Sequence: Synthetic oligonucleotide
agcguagucaaacuggcag

SEQ ID NO: 1212167 - RNA, 19 nt, Artificial Sequence
  Description of Artificial Sequence: Synthetic oligonucleotide
auugaugcgaauccguuca

SEQ ID NO: 1212168 - RNA, 19 nt, Artificial Sequence
  Description of Artificial Sequence: Synthetic oligonucleotide
aaucauaagccccaccaau

SEQ ID NO: 1212169 - RNA, 19 nt, Artificial Sequence
  Description of Artificial Sequence: Synthetic oligonucleotide
auguuuaacugauucaagu

SEQ ID NO: 1212170 - RNA, 19 nt, Artificial Sequence
  Description of Artificial Sequence: Synthetic oligonucleotide
ugaagagcaagacguauac

SEQ ID NO: 1212171 - RNA, 19 nt, Artificial Sequence
  Description of Artificial Sequence: Synthetic oligonucleotide
aguuagugcccguagagug

SEQ ID NO: 1212172 - RNA, 19 nt, Artificial Sequence
  Description of Artificial Sequence: Synthetic oligonucleotide
ugaaagaugggaucccggc

SEQ ID NO: 1212173 - RNA, 19 nt, Artificial Sequence
  Description of Artificial Sequence: Synthetic oligonucleotide
ucauaagccccaccaaugc

SEQ ID NO: 1212174 - RNA, 19 nt, Artificial Sequence
  Description of Artificial Sequence: Synthetic oligonucleotide
gaugcgaauccguucacgc

SEQ ID NO: 1212175 - RNA, 19 nt, Artificial Sequence
  Description of Artificial Sequence: Synthetic oligonucleotide
uucccauugaugcgaaucc

SEQ ID NO: 1212176 - RNA, 19 nt, Artificial Sequence
  Description of Artificial Sequence: Synthetic oligonucleotide
  modified_base (9)..(9): a, c, u, g, unknown or other
uugguaaangcucgggacu

SEQ ID NO: 1212177 - RNA, 19 nt, Artificial Sequence
  Description of Artificial Sequence: Synthetic oligonucleotide
aauaccuguguccggccag

SEQ ID NO: 1212178 - RNA, 19 nt, Artificial Sequence
  Description of Artificial Sequence: Synthetic oligonucleotide
ugcuauuuucuccaccgug

SEQ ID NO: 1212179 - RNA, 19 nt, Artificial Sequence
  Description of Artificial Sequence: Synthetic oligonucleotide
uuuaggacuccacccacca

SEQ ID NO: 1212180 - RNA, 19 nt, Artificial Sequence
  Description of Artificial Sequence: Synthetic oligonucleotide
  modified_base (2)..(2): a, c, u, g, unknown or other
unaugaggcgccagaagug

SEQ ID NO: 1212181 - RNA, 19 nt, Artificial Sequence
  Description of Artificial Sequence: Synthetic oligonucleotide
augacuggcaauaccagcg

SEQ ID NO: 1212182 - RNA, 19 nt, Artificial Sequence
  Description of Artificial Sequence: Synthetic oligonucleotide
gggagauacagcuaaagac

SEQ ID NO: 1212183 - RNA, 19 nt, Artificial Sequence
  Description of Artificial Sequence: Synthetic oligonucleotide
ugcgaauccguucacgcac

SEQ ID NO: 1212184 - RNA, 19 nt, Artificial Sequence
  Description of Artificial Sequence: Synthetic oligonucleotide
  modified_base (3)..(3): a, c, u, g, unknown or other
aangcucgggacugauggg

SEQ ID NO: 1212185 - RNA, 19 nt, Artificial Sequence
  Description of Artificial Sequence: Synthetic oligonucleotide
ugcaaugacuggcaauacc

SEQ ID NO: 1212186 - RNA, 19 nt, Artificial Sequence
  Description of Artificial Sequence: Synthetic oligonucleotide
caaugggccaguugcaagg

SEQ ID NO: 1212187 - RNA, 19 nt, Artificial Sequence
  Description of Artificial Sequence: Synthetic oligonucleotide
uggugcaaucauaagcccc

SEQ ID NO: 1212188 - RNA, 19 nt, Artificial Sequence
  Description of Artificial Sequence: Synthetic oligonucleotide
aaugggccaguugcaaggc

SEQ ID NO: 1212189 - RNA, 19 nt, Artificial Sequence
  Description of Artificial Sequence: Synthetic oligonucleotide
ugcauuggaccgcuggugc

SEQ ID NO: 1212190 - RNA, 19 nt, Artificial Sequence
  Description of Artificial Sequence: Synthetic oligonucleotide
aguaagcaggcauggcaac

SEQ ID NO: 1212191 - RNA, 19 nt, Artificial Sequence
  Description of Artificial Sequence: Synthetic oligonucleotide
agggucacuccguuggcgc

SEQ ID NO: 1212192 - RNA, 19 nt, Artificial Sequence
  Description of Artificial Sequence: Synthetic oligonucleotide
ugucucaugugggaagugg

SEQ ID NO: 1212193 - RNA, 19 nt, Artificial Sequence
  Description of Artificial Sequence: Synthetic oligonucleotide
uuggcugauccacugcaag

SEQ ID NO: 1212194 - RNA, 19 nt, Artificial Sequence
  Description of Artificial Sequence: Synthetic oligonucleotide
aaugcuugccccacuacug

SEQ ID NO: 1212195 - RNA, 19 nt, Artificial Sequence
  Description of Artificial Sequence: Synthetic oligonucleotide
ggaguugaagagcaagacg

SEQ ID NO: 1212196 - RNA, 19 nt, Artificial Sequence
  Description of Artificial Sequence: Synthetic oligonucleotide
ucuucaggccauaacuccu

SEQ ID NO: 1212197 - RNA, 19 nt, Artificial Sequence
  Description of Artificial Sequence: Synthetic oligonucleotide
uggcugauccacugcaagg

SEQ ID NO: 1212198 - RNA, 19 nt, Artificial Sequence
  Description of Artificial Sequence: Synthetic oligonucleotide
uguugcugguguuggaggc

SEQ ID NO: 1212199 - RNA, 19 nt, Artificial Sequence
  Description of Artificial Sequence: Synthetic oligonucleotide
gaugauguuggugcaauca

SEQ ID NO: 1212200 - RNA, 19 nt, Artificial Sequence
  Description of Artificial Sequence: Synthetic oligonucleotide
agugcccguagagugaggc

SEQ ID NO: 1212201 - RNA, 19 nt, Artificial Sequence
  Description of Artificial Sequence: Synthetic oligonucleotide
ugguccaugccaagagagg

SEQ ID NO: 1212202 - RNA, 19 nt, Artificial Sequence
  Description of Artificial Sequence: Synthetic oligonucleotide
ugcccguagagugaggcgg

SEQ ID NO: 1212203 - RNA, 19 nt, Artificial Sequence
  Description of Artificial Sequence: Synthetic oligonucleotide
ugauccacugcaaggcgug

SEQ ID NO: 1212204 - RNA, 19 nt, Artificial Sequence
  Description of Artificial Sequence: Synthetic oligonucleotide
acacuccacacacuacugg

SEQ ID NO: 1212205 - RNA, 19 nt, Artificial Sequence
  Description of Artificial Sequence: Synthetic oligonucleotide
augcguucagugaaggcgc

SEQ ID NO: 1212206 - RNA, 19 nt, Artificial Sequence
  Description of Artificial Sequence: Synthetic oligonucleotide
uggguuucccauugaugcg

SEQ ID NO: 1212207 - RNA, 19 nt, Artificial Sequence
  Description of Artificial Sequence: Synthetic oligonucleotide
agcuaaagaagccugucuu

SEQ ID NO: 1212208 - RNA, 19 nt, Artificial Sequence
  Description of Artificial Sequence: Synthetic oligonucleotide
uugaagagcaagacguaua

SEQ ID NO: 1212209 - RNA, 19 nt, Artificial Sequence
  Description of Artificial Sequence: Synthetic oligonucleotide
  modified_base (5)..(5): a, c, u, g, unknown or other
uaaangcucgggacugaug

SEQ ID NO: 1212210 - RNA, 19 nt, Artificial Sequence
  Description of Artificial Sequence: Synthetic oligonucleotide
guauacuucaggcccacca

SEQ ID NO: 1212211 - RNA, 19 nt, Artificial Sequence
  Description of Artificial Sequence: Synthetic oligonucleotide
cugaaagaugggaucccgg

SEQ ID NO: 1212212 - RNA, 19 nt, Artificial Sequence
  Description of Artificial Sequence: Synthetic oligonucleotide
aggcgugggagauacagcu

SEQ ID NO: 1212213 - RNA, 19 nt, Artificial Sequence
  Description of Artificial Sequence: Synthetic oligonucleotide
accaguacauggauggcac

SEQ ID NO: 1212214 - RNA, 19 nt, Artificial Sequence
  Description of Artificial Sequence: Synthetic oligonucleotide
  modified_base (3)..(3): a, c, u, g, unknown or other
gunaugaggcgccagaagu

SEQ ID NO: 1212215 - RNA, 19 nt, Artificial Sequence
  Description of Artificial Sequence: Synthetic oligonucleotide
acaaugggccaguugcaag

SEQ ID NO: 1212216 - RNA, 19 nt, Artificial Sequence
  Description of Artificial Sequence: Synthetic oligonucleotide
gacaccuccgucagguugg

SEQ ID NO: 1212217 - RNA, 19 nt, Artificial Sequence
  Description of Artificial Sequence: Synthetic oligonucleotide
uccguuggcgcuuuaccug

SEQ ID NO: 1212218 - RNA, 19 nt, Artificial Sequence
  Description of Artificial Sequence: Synthetic oligonucleotide
augagugucaggaagcgga

SEQ ID NO: 1212219 - RNA, 19 nt, Artificial Sequence
  Description of Artificial Sequence: Synthetic oligonucleotide
agacagcguagucaaacug

SEQ ID NO: 1212220 - RNA, 19 nt, Artificial Sequence
  Description of Artificial Sequence: Synthetic oligonucleotide
agcuuuaggacuccaccca

SEQ ID NO: 1212221 - RNA, 19 nt, Artificial Sequence
  Description of Artificial Sequence: Synthetic oligonucleotide
  modified_base (8)..(8): a, c, u, g, unknown or other
ugguaaangcucgggacug

SEQ ID NO: 1212222 - RNA, 19 nt, Artificial Sequence
  Description of Artificial Sequence: Synthetic oligonucleotide
agcaacuucagcagggcag

SEQ ID NO: 1212223 - RNA, 19 nt, Artificial Sequence
  Description of Artificial Sequence: Synthetic oligonucleotide
ggagauacagcuaaagaca

SEQ ID NO: 1212224 - RNA, 19 nt, Artificial Sequence
  Description of Artificial Sequence: Synthetic oligonucleotide
uucuaaugguggacacagg

SEQ ID NO: 1212225 - RNA, 19 nt, Artificial Sequence
  Description of Artificial Sequence: Synthetic oligonucleotide
  modified_base (12)..(12): a, c, u, g, unknown or other
ugcuugguaaangcucggg

SEQ ID NO: 1212226 - RNA, 19 nt, Artificial Sequence
  Description of Artificial Sequence: Synthetic oligonucleotide
aggaagcggaaguaagcag

SEQ ID NO: 1212227 - RNA, 19 nt, Artificial Sequence
  Description of Artificial Sequence: Synthetic oligonucleotide
uuagugcccguagagugag

SEQ ID NO: 1212228 - RNA, 19 nt, Artificial Sequence
  Description of Artificial Sequence: Synthetic oligonucleotide
ugacuggcaauaccagcgc

SEQ ID NO: 1212229 - RNA, 19 nt, Artificial Sequence
  Description of Artificial Sequence: Synthetic oligonucleotide
ugaaggcgcagguggagcc

SEQ ID NO: 1212230 - RNA, 19 nt, Artificial Sequence
  Description of Artificial Sequence: Synthetic oligonucleotide
aaguaagcaggcauggcaa

SEQ ID NO: 1212231 - RNA, 19 nt, Artificial Sequence
  Description of Artificial Sequence: Synthetic oligonucleotide
cuuuaggacuccacccacc

SEQ ID NO: 1212232 - RNA, 19 nt, Artificial Sequence
  Description of Artificial Sequence: Synthetic oligonucleotide
ugaugcgaauccguucacg

SEQ ID NO: 1212233 - RNA, 19 nt, Artificial Sequence
  Description of Artificial Sequence: Synthetic oligonucleotide
cuuggcuacugggacaggg

SEQ ID NO: 1212234 - RNA, 19 nt, Artificial Sequence
  Description of Artificial Sequence: Synthetic oligonucleotide
gacauggauaauguuuaac

SEQ ID NO: 1212235 - RNA, 19 nt, Artificial Sequence
  Description of Artificial Sequence: Synthetic oligonucleotide
  modified_base (11)..(11): a, c, u, g, unknown or other
uccagcuggunaugaggcg

SEQ ID NO: 1212236 - RNA, 19 nt, Artificial Sequence
  Description of Artificial Sequence: Synthetic oligonucleotide
gaagcggaaguaagcaggc

SEQ ID NO: 1212237 - RNA, 19 nt, Artificial Sequence
  Description of Artificial Sequence: Synthetic oligonucleotide
ugcgcugcaaugacuggca

SEQ ID NO: 1212238 - RNA, 19 nt, Artificial Sequence
  Description of Artificial Sequence: Synthetic oligonucleotide
ggaguuagugcccguagag

SEQ ID NO: 1212239 - RNA, 19 nt, Artificial Sequence
  Description of Artificial Sequence: Synthetic oligonucleotide
augauguuggugcaaucau

SEQ ID NO: 1212240 - RNA, 19 nt, Artificial Sequence
  Description of Artificial Sequence: Synthetic oligonucleotide
guaagcaggcauggcaacg

SEQ ID NO: 1212241 - RNA, 19 nt, Artificial Sequence
  Description of Artificial Sequence: Synthetic oligonucleotide
cauugaugcgaauccguuc

SEQ ID NO: 1212242 - RNA, 19 nt, Artificial Sequence
  Description of Artificial Sequence: Synthetic oligonucleotide
acaagggaguuagugcccg

SEQ ID NO: 1212243 - RNA, 19 nt, Artificial Sequence
  Description of Artificial Sequence: Synthetic oligonucleotide
ugcaaggcgugggagauac

SEQ ID NO: 1212244 - RNA, 19 nt, Artificial Sequence
  Description of Artificial Sequence: Synthetic oligonucleotide
uucacgcaccugcaccagg

SEQ ID NO: 1212245 - RNA, 19 nt, Artificial Sequence
  Description of Artificial Sequence: Synthetic oligonucleotide
auacuucaggcccaccacu

SEQ ID NO: 1212246 - RNA, 19 nt, Artificial Sequence
  Description of Artificial Sequence: Synthetic oligonucleotide
ucccggagaaugcuugccc

SEQ ID NO: 1212247 - RNA, 19 nt, Artificial Sequence
  Description of Artificial Sequence: Synthetic oligonucleotide
gucccagugacauggauaa

SEQ ID NO: 1212248 - RNA, 19 nt, Artificial Sequence
  Description of Artificial Sequence: Synthetic oligonucleotide
aaguacaccuccauggcuu

SEQ ID NO: 1212249 - RNA, 19 nt, Artificial Sequence
  Description of Artificial Sequence: Synthetic oligonucleotide
  modified_base (4)..(4): a, c, u, g, unknown or other
ggunaugaggcgccagaag

SEQ ID NO: 1212250 - RNA, 19 nt, Artificial Sequence
  Description of Artificial Sequence: Synthetic oligonucleotide
  modified_base (2)..(2): a, c, u, g, unknown or other
angcucgggacugaugggu

SEQ ID NO: 1212251 - RNA, 19 nt, Artificial Sequence
  Description of Artificial Sequence: Synthetic oligonucleotide
aggccauaacuccucagga

SEQ ID NO: 1212252 - RNA, 19 nt, Artificial Sequence
  Description of Artificial Sequence: Synthetic oligonucleotide
uguuugcugcgcugcaaug

SEQ ID NO: 1212253 - RNA, 19 nt, Artificial Sequence
  Description of Artificial Sequence: Synthetic oligonucleotide
agggaguuagugcccguag

SEQ ID NO: 1212254 - RNA, 19 nt, Artificial Sequence
  Description of Artificial Sequence: Synthetic oligonucleotide
acccguggaguugaagagc

SEQ ID NO: 1212255 - RNA, 19 nt, Artificial Sequence
  Description of Artificial Sequence: Synthetic oligonucleotide
acuacuggccguggggugg

SEQ ID NO: 1212256 - RNA, 19 nt, Artificial Sequence
  Description of Artificial Sequence: Synthetic oligonucleotide
gcaauaccagcgcacacag

SEQ ID NO: 1212257 - RNA, 19 nt, Artificial Sequence
  Description of Artificial Sequence: Synthetic oligonucleotide
ugggcucgaucccucagca

SEQ ID NO: 1212258 - RNA, 19 nt, Artificial Sequence
  Description of Artificial Sequence: Synthetic oligonucleotide
agggcuucuaaugguggac

SEQ ID NO: 1212259 - RNA, 19 nt, Artificial Sequence
  Description of Artificial Sequence: Synthetic oligonucleotide
accaggcuugaagaugccc

SEQ ID NO: 1212260 - RNA, 19 nt, Artificial Sequence
  Description of Artificial Sequence: Synthetic oligonucleotide
gguaccaggugagaggucc

SEQ ID NO: 1212261 - RNA, 19 nt, Artificial Sequence
  Description of Artificial Sequence: Synthetic oligonucleotide
aacaaugggccaguugcaa

SEQ ID NO: 1212262 - RNA, 19 nt, Artificial Sequence
  Description of Artificial Sequence: Synthetic oligonucleotide
cauaacuccucaggaugcg

SEQ ID NO: 1212263 - RNA, 19 nt, Artificial Sequence
  Description of Artificial Sequence: Synthetic oligonucleotide
gguggggagagcuaaagaa

SEQ ID NO: 1212264 - RNA, 19 nt, Artificial Sequence
  Description of Artificial Sequence: Synthetic oligonucleotide
aguacauggauggcaccag

SEQ ID NO: 1212265 - RNA, 19 nt, Artificial Sequence
  Description of Artificial Sequence: Synthetic oligonucleotide
accgcuggugcucucccuc

SEQ ID NO: 1212266 - RNA, 19 nt, Artificial Sequence
  Description of Artificial Sequence: Synthetic oligonucleotide
ugagugucaggaagcggaa

SEQ ID NO: 1212267 - RNA, 19 nt, Artificial Sequence
  Description of Artificial Sequence: Synthetic oligonucleotide
guugagcaugcgcacagca

SEQ ID NO: 1212268 - RNA, 19 nt, Artificial Sequence
  Description of Artificial Sequence: Synthetic oligonucleotide
  modified_base (18)..(18): a, c, u, g, unknown or other
cagaagugcuugguaaang

SEQ ID NO: 1212269 - RNA, 19 nt, Artificial Sequence
  Description of Artificial Sequence: Synthetic oligonucleotide
uagcacagugaaggcaggg

SEQ ID NO: 1212270 - RNA, 19 nt, Artificial Sequence
  Description of Artificial Sequence: Synthetic oligonucleotide
gaaugcuugccccacuacu

SEQ ID NO: 1212271 - RNA, 19 nt, Artificial Sequence
  Description of Artificial Sequence: Synthetic oligonucleotide
  modified_base (9)..(9): a, c, u, g, unknown or other
cagcuggunaugaggcgcc

SEQ ID NO: 1212272 - RNA, 19 nt, Artificial Sequence
  Description of Artificial Sequence: Synthetic oligonucleotide
gacaagggaguuagugccc

SEQ ID NO: 1212273 - RNA, 19 nt, Artificial Sequence
  Description of Artificial Sequence: Synthetic oligonucleotide
cuucaggccauaacuccuc

SEQ ID NO: 1212274 - RNA, 19 nt, Artificial Sequence
  Description of Artificial Sequence: Synthetic oligonucleotide
aggaugcguucagugaagg

SEQ ID NO: 1212275 - RNA, 19 nt, Artificial Sequence
  Description of Artificial Sequence: Synthetic oligonucleotide
ugugcgccauccagguacc

SEQ ID NO: 1212276 - RNA, 19 nt, Artificial Sequence
  Description of Artificial Sequence: Synthetic oligonucleotide
guagcuggcauuggucugc

SEQ ID NO: 1212277 - RNA, 19 nt, Artificial Sequence
  Description of Artificial Sequence: Synthetic oligonucleotide
gcaaaagacagcguaguca

SEQ ID NO: 1212278 - RNA, 19 nt, Artificial Sequence
  Description of Artificial Sequence: Synthetic oligonucleotide
gcaagacguauacuucagg

SEQ ID NO: 1212279 - RNA, 19 nt, Artificial Sequence
  Description of Artificial Sequence: Synthetic oligonucleotide
gccgcaauaccuguguccg

SEQ ID NO: 1212280 - RNA, 19 nt, Artificial Sequence
  Description of Artificial Sequence: Synthetic oligonucleotide
caugagugucaggaagcgg

SEQ ID NO: 1212281 - RNA, 19 nt, Artificial Sequence
  Description of Artificial Sequence: Synthetic oligonucleotide
augcgaauccguucacgca

SEQ ID NO: 1212282 - RNA, 19 nt, Artificial Sequence
  Description of Artificial Sequence: Synthetic oligonucleotide
agucaaacuggcagggcug

SEQ ID NO: 1212283 - RNA, 19 nt, Artificial Sequence
  Description of Artificial Sequence: Synthetic oligonucleotide
aaggcugcauuggaccgcu

SEQ ID NO: 1212284 - RNA, 19 nt, Artificial Sequence
  Description of Artificial Sequence: Synthetic oligonucleotide
  modified_base (10)..(10): a, c, u, g, unknown or other
ccagcuggunaugaggcgc

SEQ ID NO: 1212285 - RNA, 19 nt, Artificial Sequence
  Description of Artificial Sequence: Synthetic oligonucleotide
auggcaacguggcugucau

SEQ ID NO: 1212286 - RNA, 19 nt, Artificial Sequence
  Description of Artificial Sequence: Synthetic oligonucleotide
ggagagcuaaagaagccug

SEQ ID NO: 1212287 - RNA, 19 nt, Artificial Sequence
  Description of Artificial Sequence: Synthetic oligonucleotide
uugaugcgaauccguucac

SEQ ID NO: 1212288 - RNA, 19 nt, Artificial Sequence
  Description of Artificial Sequence: Synthetic oligonucleotide
cacuccgugccaaguacac

SEQ ID NO: 1212289 - RNA, 19 nt, Artificial Sequence
  Description of Artificial Sequence: Synthetic oligonucleotide
  modified_base (5)..(5): a, c, u, g, unknown or other
uggunaugaggcgccagaa

SEQ ID NO: 1212290 - RNA, 19 nt, Artificial Sequence
  Description of Artificial Sequence: Synthetic oligonucleotide
gcugauccacugcaaggcg

SEQ ID NO: 1212291 - RNA, 19 nt, Artificial Sequence
  Description of Artificial Sequence: Synthetic oligonucleotide
cuaaugguggacacaggua

SEQ ID NO: 1212292 - RNA, 19 nt, Artificial Sequence
  Description of Artificial Sequence: Synthetic oligonucleotide
gcuaaagaagccugucuuc

SEQ ID NO: 1212293 - RNA, 19 nt, Artificial Sequence
  Description of Artificial Sequence: Synthetic oligonucleotide
gugucuccgagcaggcugg

SEQ ID NO: 1212294 - RNA, 19 nt, Artificial Sequence
  Description of Artificial Sequence: Synthetic oligonucleotide
uggcaauaccagcgcacac

SEQ ID NO: 1212295 - RNA, 19 nt, Artificial Sequence
  Description of Artificial Sequence: Synthetic oligonucleotide
auaccuguguccggccagg

SEQ ID NO: 1212296 - RNA, 19 nt, Artificial Sequence
  Description of Artificial Sequence: Synthetic oligonucleotide
caauaccagcgcacacagg

SEQ ID NO: 1212297 - RNA, 19 nt, Artificial Sequence
  Description of Artificial Sequence: Synthetic oligonucleotide
cugggcucgaucccucagc

SEQ ID NO: 1212298 - RNA, 19 nt, Artificial Sequence
  Description of Artificial Sequence: Synthetic oligonucleotide
gagcuaaagaagccugucu

SEQ ID NO: 1212299 - RNA, 19 nt, Artificial Sequence
  Description of Artificial Sequence: Synthetic oligonucleotide
ucgaucccucagcacggcc

SEQ ID NO: 1212300 - RNA, 19 nt, Artificial Sequence
  Description of Artificial Sequence: Synthetic oligonucleotide
uccguucacgcaccugcac

SEQ ID NO: 1212301 - RNA, 19 nt, Artificial Sequence
  Description of Artificial Sequence: Synthetic oligonucleotide
cacuacuggcuuucugaug

SEQ ID NO: 1212302 - RNA, 19 nt, Artificial Sequence
  Description of Artificial Sequence: Synthetic oligonucleotide
acguauacuucaggcccac

SEQ ID NO: 1212303 - RNA, 19 nt, Artificial Sequence
  Description of Artificial Sequence: Synthetic oligonucleotide
guuugcugcgcugcaauga

SEQ ID NO: 1212304 - RNA, 19 nt, Artificial Sequence
  Description of Artificial Sequence: Synthetic oligonucleotide
ggugcaaucauaagcccca

SEQ ID NO: 1212305 - RNA, 19 nt, Artificial Sequence
  Description of Artificial Sequence: Synthetic oligonucleotide
ugcguucagugaaggcgca

SEQ ID NO: 1212306 - RNA, 19 nt, Artificial Sequence
  Description of Artificial Sequence: Synthetic oligonucleotide
gugcccguagagugaggcg

SEQ ID NO: 1212307 - RNA, 19 nt, Artificial Sequence
  Description of Artificial Sequence: Synthetic oligonucleotide
uccggccaggccauucugu

SEQ ID NO: 1212308 - RNA, 19 nt, Artificial Sequence
  Description of Artificial Sequence: Synthetic oligonucleotide
gacguauacuucaggccca

SEQ ID NO: 1212309 - RNA, 19 nt, Artificial Sequence
  Description of Artificial Sequence: Synthetic oligonucleotide
  modified_base (11)..(11): a, c, u, g, unknown or other
gcuugguaaangcucggga

SEQ ID NO: 1212310 - RNA, 19 nt, Artificial Sequence
  Description of Artificial Sequence: Synthetic oligonucleotide
ugcgccugagggucacucc

SEQ ID NO: 1212311 - RNA, 19 nt, Artificial Sequence
  Description of Artificial Sequence: Synthetic oligonucleotide
uagagugaggcgggcgcag

SEQ ID NO: 1212312 - RNA, 19 nt, Artificial Sequence
  Description of Artificial Sequence: Synthetic oligonucleotide
gcaugcucggccuggacac

SEQ ID NO: 1212313 - RNA, 19 nt, Artificial Sequence
  Description of Artificial Sequence: Synthetic oligonucleotide
guuagugcccguagaguga

SEQ ID NO: 1212314 - RNA, 19 nt, Artificial Sequence
  Description of Artificial Sequence: Synthetic oligonucleotide
  modified_base (6)..(6): a, c, u, g, unknown or other
cuggunaugaggcgccaga

SEQ ID NO: 1212315 - RNA, 19 nt, Artificial Sequence
  Description of Artificial Sequence: Synthetic oligonucleotide
caguacauggauggcacca

SEQ ID NO: 1212316 - RNA, 19 nt, Artificial Sequence
  Description of Artificial Sequence: Synthetic oligonucleotide
auaacuccucaggaugcgu

SEQ ID NO: 1212317 - RNA, 19 nt, Artificial Sequence
  Description of Artificial Sequence: Synthetic oligonucleotide
cagguacagaggacaugag

SEQ ID NO: 1212318 - RNA, 19 nt, Artificial Sequence
  Description of Artificial Sequence: Synthetic oligonucleotide
gagugaggcgggcgcagug

SEQ ID NO: 1212319 - RNA, 19 nt, Artificial Sequence
  Description of Artificial Sequence: Synthetic oligonucleotide
cacugggguguuugcugcg

SEQ ID NO: 1212320 - RNA, 19 nt, Artificial Sequence
  Description of Artificial Sequence: Synthetic oligonucleotide
caacaaugggccaguugca

SEQ ID NO: 1212321 - RNA, 19 nt, Artificial Sequence
  Description of Artificial Sequence: Synthetic oligonucleotide
gguggagcccuuuccuuug

SEQ ID NO: 1212322 - RNA, 19 nt, Artificial Sequence
  Description of Artificial Sequence: Synthetic oligonucleotide
cagguggggagagcuaaag

SEQ ID NO: 1212323 - RNA, 19 nt, Artificial Sequence
  Description of Artificial Sequence: Synthetic oligonucleotide
cagcuaaagacaagggagu

SEQ ID NO: 1212324 - RNA, 19 nt, Artificial Sequence
  Description of Artificial Sequence: Synthetic oligonucleotide
ccagggcuucuaauggugg

SEQ ID NO: 1212325 - RNA, 19 nt, Artificial Sequence
  Description of Artificial Sequence: Synthetic oligonucleotide
accgugucuccgagcaggc

SEQ ID NO: 1212326 - RNA, 19 nt, Artificial Sequence
  Description of Artificial Sequence: Synthetic oligonucleotide
gaaggcgcagguggagccc

SEQ ID NO: 1212327 - RNA, 19 nt, Artificial Sequence
  Description of Artificial Sequence: Synthetic oligonucleotide
aagcggaaguaagcaggca

SEQ ID NO: 1212328 - RNA, 19 nt, Artificial Sequence
  Description of Artificial Sequence: Synthetic oligonucleotide
ccaguaaccaguacaugga

SEQ ID NO: 1212329 - RNA, 19 nt, Artificial Sequence
  Description of Artificial Sequence: Synthetic oligonucleotide
gaauccguucacgcaccug

SEQ ID NO: 1212330 - RNA, 19 nt, Artificial Sequence
  Description of Artificial Sequence: Synthetic oligonucleotide
gcgccugagggucacuccg

SEQ ID NO: 1212331 - RNA, 19 nt, Artificial Sequence
  Description of Artificial Sequence: Synthetic oligonucleotide
gcaacuucagcagggcagc

SEQ ID NO: 1212332 - RNA, 19 nt, Artificial Sequence
  Description of Artificial Sequence: Synthetic oligonucleotide
ggaugcguucagugaaggc

SEQ ID NO: 1212333 - RNA, 19 nt, Artificial Sequence
  Description of Artificial Sequence: Synthetic oligonucleotide
uccacacacuacuggcuuu

SEQ ID NO: 1212334 - RNA, 19 nt, Artificial Sequence
  Description of Artificial Sequence: Synthetic oligonucleotide
aaggcgcagguggagcccu

SEQ ID NO: 1212335 - RNA, 19 nt, Artificial Sequence
  Description of Artificial Sequence: Synthetic oligonucleotide
uagugcccguagagugagg

SEQ ID NO: 1212336 - RNA, 19 nt, Artificial Sequence
  Description of Artificial Sequence: Synthetic oligonucleotide
ucccugucacccguggagu

SEQ ID NO: 1212337 - RNA, 19 nt, Artificial Sequence
  Description of Artificial Sequence: Synthetic oligonucleotide
ccugaaagaugggaucccg

SEQ ID NO: 1212338 - RNA, 19 nt, Artificial Sequence
  Description of Artificial Sequence: Synthetic oligonucleotide
cauuggaccgcuggugcuc

SEQ ID NO: 1212339 - RNA, 19 nt, Artificial Sequence
  Description of Artificial Sequence: Synthetic oligonucleotide
ggcaaaagacagcguaguc

SEQ ID NO: 1212340 - RNA, 19 nt, Artificial Sequence
  Description of Artificial Sequence: Synthetic oligonucleotide
cacuacuggccguggggug

SEQ ID NO: 1212341 - RNA, 19 nt, Artificial Sequence
  Description of Artificial Sequence: Synthetic oligonucleotide
guguuggaggcagcggagc

SEQ ID NO: 1212342 - RNA, 19 nt, Artificial Sequence
  Description of Artificial Sequence: Synthetic oligonucleotide
uggaccgcuggugcucucc

SEQ ID NO: 1212343 - RNA, 19 nt, Artificial Sequence
  Description of Artificial Sequence: Synthetic oligonucleotide
ggcuucuaaugguggacac

SEQ ID NO: 1212344 - RNA, 19 nt, Artificial Sequence
  Description of Artificial Sequence: Synthetic oligonucleotide
caauaccuguguccggcca

SEQ ID NO: 1212345 - RNA, 19 nt, Artificial Sequence
  Description of Artificial Sequence: Synthetic oligonucleotide
ccaugcuauuuucuccacc

SEQ ID NO: 1212346 - RNA, 19 nt, Artificial Sequence
  Description of Artificial Sequence: Synthetic oligonucleotide
cacagguacagaggacaug

SEQ ID NO: 1212347 - RNA, 19 nt, Artificial Sequence
  Description of Artificial Sequence: Synthetic oligonucleotide
ccaugagugucaggaagcg

SEQ ID NO: 1212348 - RNA, 19 nt, Artificial Sequence
  Description of Artificial Sequence: Synthetic oligonucleotide
agucccugucacccgugga

SEQ ID NO: 1212349 - RNA, 19 nt, Artificial Sequence
  Description of Artificial Sequence: Synthetic oligonucleotide
auuggaccgcuggugcucu

SEQ ID NO: 1212350 - RNA, 19 nt, Artificial Sequence
  Description of Artificial Sequence: Synthetic oligonucleotide
ucaaacuggcagggcugca

SEQ ID NO: 1212351 - RNA, 19 nt, Artificial Sequence
  Description of Artificial Sequence: Synthetic oligonucleotide
ugccccacuacuggccgug

SEQ ID NO: 1212352 - RNA, 19 nt, Artificial Sequence
  Description of Artificial Sequence: Synthetic oligonucleotide
gaguuagugcccguagagu

SEQ ID NO: 1212353 - RNA, 19 nt, Artificial Sequence
  Description of Artificial Sequence: Synthetic oligonucleotide
ccguucacgcaccugcacc

SEQ ID NO: 1212354 - RNA, 19 nt, Artificial Sequence
  Description of Artificial Sequence: Synthetic oligonucleotide
ggggagagcuaaagaagcc

SEQ ID NO: 1212355 - RNA, 19 nt, Artificial Sequence
  Description of Artificial Sequence: Synthetic oligonucleotide
gcggaaguaagcaggcaug

SEQ ID NO: 1212356 - RNA, 19 nt, Artificial Sequence
  Description of Artificial Sequence: Synthetic oligonucleotide
cucacucaggcagcuccag

SEQ ID NO: 1212357 - RNA, 19 nt, Artificial Sequence
  Description of Artificial Sequence: Synthetic oligonucleotide
  modified_base (7)..(7): a, c, u, g, unknown or other
gcuggunaugaggcgccag

SEQ ID NO: 1212358 - RNA, 19 nt, Artificial Sequence
  Description of Artificial Sequence: Synthetic oligonucleotide
ccacugggguguuugcugc

SEQ ID NO: 1212359 - RNA, 19 nt, Artificial Sequence
  Description of Artificial Sequence: Synthetic oligonucleotide
gggccugaaagaugggauc

SEQ ID NO: 1212360 - RNA, 19 nt, Artificial Sequence
  Description of Artificial Sequence: Synthetic oligonucleotide
gagagcuaaagaagccugu

SEQ ID NO: 1212361 - RNA, 19 nt, Artificial Sequence
  Description of Artificial Sequence: Synthetic oligonucleotide
uggcaccagccucccggag

SEQ ID NO: 1212362 - RNA, 19 nt, Artificial Sequence
  Description of Artificial Sequence: Synthetic oligonucleotide
ccguuggcgcuuuaccugc

SEQ ID NO: 1212363 - RNA, 19 nt, Artificial Sequence
  Description of Artificial Sequence: Synthetic oligonucleotide
guucagugaaggcgcaggu

SEQ ID NO: 1212364 - RNA, 19 nt, Artificial Sequence
  Description of Artificial Sequence: Synthetic oligonucleotide
uggcauuggucugcagggu

SEQ ID NO: 1212365 - RNA, 19 nt, Artificial Sequence
  Description of Artificial Sequence: Synthetic oligonucleotide
ugcaaggcuaaggcugcau

SEQ ID NO: 1212366 - RNA, 19 nt, Artificial Sequence
  Description of Artificial Sequence: Synthetic oligonucleotide
cuuggcugauccacugcaa

SEQ ID NO: 1212367 - RNA, 19 nt, Artificial Sequence
  Description of Artificial Sequence: Synthetic oligonucleotide
gaagagcaagacguauacu

SEQ ID NO: 1212368 - RNA, 19 nt, Artificial Sequence
  Description of Artificial Sequence: Synthetic oligonucleotide
gcgugggagauacagcuaa

SEQ ID NO: 1212369 - RNA, 19 nt, Artificial Sequence
  Description of Artificial Sequence: Synthetic oligonucleotide
gcgcuuuaccugcuccagg

SEQ ID NO: 1212370 - RNA, 19 nt, Artificial Sequence
  Description of Artificial Sequence: Synthetic oligonucleotide
ggcuuguuucucacucagg

SEQ ID NO: 1212371 - RNA, 19 nt, Artificial Sequence
  Description of Artificial Sequence: Synthetic oligonucleotide
gcuauuuucuccaccgugu

SEQ ID NO: 1212372 - RNA, 19 nt, Artificial Sequence
  Description of Artificial Sequence: Synthetic oligonucleotide
augucucaugugggaagug

SEQ ID NO: 1212373 - RNA, 19 nt, Artificial Sequence
  Description of Artificial Sequence: Synthetic oligonucleotide
cgugucuccgagcaggcug

SEQ ID NO: 1212374 - RNA, 19 nt, Artificial Sequence
  Description of Artificial Sequence: Synthetic oligonucleotide
cugauccacugcaaggcgu

SEQ ID NO: 1212375 - RNA, 19 nt, Artificial Sequence
  Description of Artificial Sequence: Synthetic oligonucleotide
gggaguuagugcccguaga

SEQ ID NO: 1212376 - RNA, 19 nt, Artificial Sequence
  Description of Artificial Sequence: Synthetic oligonucleotide
guuggcgcuuuaccugcuc

SEQ ID NO: 1212377 - RNA, 19 nt, Artificial Sequence
  Description of Artificial Sequence: Synthetic oligonucleotide
guaccaggugagagguccc

SEQ ID NO: 1212378 - RNA, 19 nt, Artificial Sequence
  Description of Artificial Sequence: Synthetic oligonucleotide
caccaggcuugaagaugcc

SEQ ID NO: 1212379 - RNA, 19 nt, Artificial Sequence
  Description of Artificial Sequence: Synthetic oligonucleotide
cugugaaguucugcugguc

SEQ ID NO: 1212380 - RNA, 19 nt, Artificial Sequence
  Description of Artificial Sequence: Synthetic oligonucleotide
guagagugaggcgggcgca

SEQ ID NO: 1212381 - RNA, 19 nt, Artificial Sequence
  Description of Artificial Sequence: Synthetic oligonucleotide
acguggcugucauccuuga

SEQ ID NO: 1212382 - RNA, 19 nt, Artificial Sequence
  Description of Artificial Sequence: Synthetic oligonucleotide
  modified_base (7)..(7): a, c, u, g, unknown or other
gguaaangcucgggacuga

SEQ ID NO: 1212383 - RNA, 19 nt, Artificial Sequence
  Description of Artificial Sequence: Synthetic oligonucleotide
guccccgccgcaauaccug

SEQ ID NO: 1212384 - RNA, 19 nt, Artificial Sequence
  Description of Artificial Sequence: Synthetic oligonucleotide
agaggacaugaggucugcu

SEQ ID NO: 1212385 - RNA, 19 nt, Artificial Sequence
  Description of Artificial Sequence: Synthetic oligonucleotide
cccguggaguugaagagca

SEQ ID NO: 1212386 - RNA, 19 nt, Artificial Sequence
  Description of Artificial Sequence: Synthetic oligonucleotide
cuacuggccgugggguggc

SEQ ID NO: 1212387 - RNA, 19 nt, Artificial Sequence
  Description of Artificial Sequence: Synthetic oligonucleotide
cgcaauaccuguguccggc

SEQ ID NO: 1212388 - RNA, 19 nt, Artificial Sequence
  Description of Artificial Sequence: Synthetic oligonucleotide
cacuccguuggcgcuuuac

SEQ ID NO: 1212389 - RNA, 19 nt, Artificial Sequence
  Description of Artificial Sequence: Synthetic oligonucleotide
augcucggccuggacaccu

SEQ ID NO: 1212390 - RNA, 19 nt, Artificial Sequence
  Description of Artificial Sequence: Synthetic oligonucleotide
uugcaaggcuaaggcugca

SEQ ID NO: 1212391 - RNA, 19 nt, Artificial Sequence
  Description of Artificial Sequence: Synthetic oligonucleotide
uaccuguguccggccaggc

SEQ ID NO: 1212392 - RNA, 19 nt, Artificial Sequence
  Description of Artificial Sequence: Synthetic oligonucleotide
gguguugagcaugcgcaca

SEQ ID NO: 1212393 - RNA, 19 nt, Artificial Sequence
  Description of Artificial Sequence: Synthetic oligonucleotide
cucgaucccucagcacggc

SEQ ID NO: 1212394 - RNA, 19 nt, Artificial Sequence
  Description of Artificial Sequence: Synthetic oligonucleotide
guguuugcugcgcugcaau

SEQ ID NO: 1212395 - RNA, 19 nt, Artificial Sequence
  Description of Artificial Sequence: Synthetic oligonucleotide
ccagcugcgccugaggguc

SEQ ID NO: 1212396 - RNA, 19 nt, Artificial Sequence
  Description of Artificial Sequence: Synthetic oligonucleotide
acaccuccgucagguuggg

SEQ ID NO: 1212397 - RNA, 19 nt, Artificial Sequence
  Description of Artificial Sequence: Synthetic oligonucleotide
gcuugccccacuacuggcc

SEQ ID NO: 1212398 - RNA, 19 nt, Artificial Sequence
  Description of Artificial Sequence: Synthetic oligonucleotide
augaggcgccagaagugcu

SEQ ID NO: 1212399 - RNA, 19 nt, Artificial Sequence
  Description of Artificial Sequence: Synthetic oligonucleotide
gacugauggguuucccauu

SEQ ID NO: 1212400 - RNA, 19 nt, Artificial Sequence
  Description of Artificial Sequence: Synthetic oligonucleotide
gcuucuaaugguggacaca

SEQ ID NO: 1212401 - RNA, 19 nt, Artificial Sequence
  Description of Artificial Sequence: Synthetic oligonucleotide
cgccgcaauaccugugucc

SEQ ID NO: 1212402 - RNA, 19 nt, Artificial Sequence
  Description of Artificial Sequence: Synthetic oligonucleotide
gcuaaagacaagggaguua

SEQ ID NO: 1212403 - RNA, 19 nt, Artificial Sequence
  Description of Artificial Sequence: Synthetic oligonucleotide
cagcccacuccgugccaag

SEQ ID NO: 1212404 - RNA, 19 nt, Artificial Sequence
  Description of Artificial Sequence: Synthetic oligonucleotide
auccguucacgcaccugca

SEQ ID NO: 1212405 - RNA, 19 nt, Artificial Sequence
  Description of Artificial Sequence: Synthetic oligonucleotide
gugcaaucauaagccccac

SEQ ID NO: 1212406 - RNA, 19 nt, Artificial Sequence
  Description of Artificial Sequence: Synthetic oligonucleotide
  modified_base (6)..(6): a, c, u, g, unknown or other
guaaangcucgggacugau

SEQ ID NO: 1212407 - RNA, 19 nt, Artificial Sequence
  Description of Artificial Sequence: Synthetic oligonucleotide
gggagagcuaaagaagccu

SEQ ID NO: 1212408 - RNA, 19 nt, Artificial Sequence
  Description of Artificial Sequence: Synthetic oligonucleotide
cugcaccagguggggagag

SEQ ID NO: 1212409 - RNA, 19 nt, Artificial Sequence
  Description of Artificial Sequence: Synthetic oligonucleotide
cugcgccugagggucacuc

SEQ ID NO: 1212410 - RNA, 19 nt, Artificial Sequence
  Description of Artificial Sequence: Synthetic oligonucleotide
agagucccugucacccgug

SEQ ID NO: 1212411 - RNA, 19 nt, Artificial Sequence
  Description of Artificial Sequence: Synthetic oligonucleotide
cucaugugggaagugggau

SEQ ID NO: 1212412 - RNA, 19 nt, Artificial Sequence
  Description of Artificial Sequence: Synthetic oligonucleotide
gagggcucuagcagcuuua

SEQ ID NO: 1212413 - RNA, 19 nt, Artificial Sequence
  Description of Artificial Sequence: Synthetic oligonucleotide
gccaugcuauuuucuccac

SEQ ID NO: 1212414 - RNA, 19 nt, Artificial Sequence
  Description of Artificial Sequence: Synthetic oligonucleotide
ugucacccguggaguugaa

SEQ ID NO: 1212415 - RNA, 19 nt, Artificial Sequence
  Description of Artificial Sequence: Synthetic oligonucleotide
  modified_base (8)..(8): a, c, u, g, unknown or other
agcuggunaugaggcgcca

SEQ ID NO: 1212416 - RNA, 19 nt, Artificial Sequence
  Description of Artificial Sequence: Synthetic oligonucleotide
ugaggucugcugggcucga

SEQ ID NO: 1212417 - RNA, 19 nt, Artificial Sequence
  Description of Artificial Sequence: Synthetic oligonucleotide
gcuuggggccugaaagaug

SEQ ID NO: 1212418 - RNA, 19 nt, Artificial Sequence
  Description of Artificial Sequence: Synthetic oligonucleotide
gcgaauccguucacgcacc

SEQ ID NO: 1212419 - RNA, 19 nt, Artificial Sequence
  Description of Artificial Sequence: Synthetic oligonucleotide
agcccacuccgugccaagu

SEQ ID NO: 1212420 - RNA, 19 nt, Artificial Sequence
  Description of Artificial Sequence: Synthetic oligonucleotide
gcccguagagugaggcggg

SEQ ID NO: 1212421 - RNA, 19 nt, Artificial Sequence
  Description of Artificial Sequence: Synthetic oligonucleotide
aggcuuccaguaaccagua

SEQ ID NO: 1212422 - RNA, 19 nt, Artificial Sequence
  Description of Artificial Sequence: Synthetic oligonucleotide
ugcucggccuggacaccuu

SEQ ID NO: 1212423 - RNA, 19 nt, Artificial Sequence
  Description of Artificial Sequence: Synthetic oligonucleotide
ccgcaauaccuguguccgg

SEQ ID NO: 1212424 - RNA, 19 nt, Artificial Sequence
  Description of Artificial Sequence: Synthetic oligonucleotide
ccuccgucagguuggggca

SEQ ID NO: 1212425 - RNA, 19 nt, Artificial Sequence
  Description of Artificial Sequence: Synthetic oligonucleotide
ccguagagugaggcgggcg

SEQ ID NO: 1212426 - RNA, 19 nt, Artificial Sequence
  Description of Artificial Sequence: Synthetic oligonucleotide
ugucuccgagcaggcuggu

SEQ ID NO: 1212427 - RNA, 19 nt, Artificial Sequence
  Description of Artificial Sequence: Synthetic oligonucleotide
gagagguccccgccgcaau

SEQ ID NO: 1212428 - RNA, 19 nt, Artificial Sequence
  Description of Artificial Sequence: Synthetic oligonucleotide
ccgaagcccaugucucaug

SEQ ID NO: 1212429 - RNA, 19 nt, Artificial Sequence
  Description of Artificial Sequence: Synthetic oligonucleotide
gucuccgagcaggcuggug

SEQ ID NO: 1212430 - RNA, 19 nt, Artificial Sequence
  Description of Artificial Sequence: Synthetic oligonucleotide
ggaucccggccuuggcuga

SEQ ID NO: 1212431 - RNA, 19 nt, Artificial Sequence
  Description of Artificial Sequence: Synthetic oligonucleotide
gggucagcggcagcccacc

SEQ ID NO: 1212432 - RNA, 19 nt, Artificial Sequence
  Description of Artificial Sequence: Synthetic oligonucleotide
uuggaccgcuggugcucuc

SEQ ID NO: 1212433 - RNA, 19 nt, Artificial Sequence
  Description of Artificial Sequence: Synthetic oligonucleotide
accgcaugcucggccugga

SEQ ID NO: 1212434 - RNA, 19 nt, Artificial Sequence
  Description of Artificial Sequence: Synthetic oligonucleotide
ccacuccgugccaaguaca

SEQ ID NO: 1212435 - RNA, 19 nt, Artificial Sequence
  Description of Artificial Sequence: Synthetic oligonucleotide
ccccacuacuggccguggg

SEQ ID NO: 1212436 - RNA, 19 nt, Artificial Sequence
  Description of Artificial Sequence: Synthetic oligonucleotide
gcuuuaccugcuccaggua

SEQ ID NO: 1212437 - RNA, 19 nt, Artificial Sequence
  Description of Artificial Sequence: Synthetic oligonucleotide
gcguucagugaaggcgcag

SEQ ID NO: 1212438 - RNA, 19 nt, Artificial Sequence
  Description of Artificial Sequence: Synthetic oligonucleotide
gcaaggcuaaggcugcauu

SEQ ID NO: 1212439 - RNA, 19 nt, Artificial Sequence
  Description of Artificial Sequence: Synthetic oligonucleotide
caccuccgucagguugggg

SEQ ID NO: 1212440 - RNA, 19 nt, Artificial Sequence
  Description of Artificial Sequence: Synthetic oligonucleotide
gcauuggaccgcuggugcu

SEQ ID NO: 1212441 - RNA, 19 nt, Artificial Sequence
  Description of Artificial Sequence: Synthetic oligonucleotide
agcacggccaggggaccuu

SEQ ID NO: 1212442 - RNA, 19 nt, Artificial Sequence
  Description of Artificial Sequence: Synthetic oligonucleotide
gggccaguugcaaggcuaa

SEQ ID NO: 1212443 - RNA, 19 nt, Artificial Sequence
  Description of Artificial Sequence: Synthetic oligonucleotide
ccauugaugcgaauccguu

SEQ ID NO: 1212444 - RNA, 19 nt, Artificial Sequence
  Description of Artificial Sequence: Synthetic oligonucleotide
ucacuccguuggcgcuuua

SEQ ID NO: 1212445 - RNA, 19 nt, Artificial Sequence
  Description of Artificial Sequence: Synthetic oligonucleotide
cuacuggcuuucugaugau

SEQ ID NO: 1212446 - RNA, 19 nt, Artificial Sequence
  Description of Artificial Sequence: Synthetic oligonucleotide
agccaacaaugggccaguu

SEQ ID NO: 1212447 - RNA, 19 nt, Artificial Sequence
  Description of Artificial Sequence: Synthetic oligonucleotide
gcgccagaagugcuuggua

SEQ ID NO: 1212448 - RNA, 19 nt, Artificial Sequence
  Description of Artificial Sequence: Synthetic oligonucleotide
ggauaauguuuaacugauu

SEQ ID NO: 1212449 - RNA, 19 nt, Artificial Sequence
  Description of Artificial Sequence: Synthetic oligonucleotide
cuguguccggccaggccau

SEQ ID NO: 1212450 - RNA, 19 nt, Artificial Sequence
  Description of Artificial Sequence: Synthetic oligonucleotide
gcaacguggcugucauccu

SEQ ID NO: 1212451 - RNA, 19 nt, Artificial Sequence
  Description of Artificial Sequence: Synthetic oligonucleotide
gggucacuccguuggcgcu

SEQ ID NO: 1212452 - RNA, 19 nt, Artificial Sequence
  Description of Artificial Sequence: Synthetic oligonucleotide
uacuggccgugggguggcu

SEQ ID NO: 1212453 - RNA, 19 nt, Artificial Sequence
  Description of Artificial Sequence: Synthetic oligonucleotide
uguguccggccaggccauu

SEQ ID NO: 1212454 - RNA, 19 nt, Artificial Sequence
  Description of Artificial Sequence: Synthetic oligonucleotide
cuccgucagguuggggcaa

SEQ ID NO: 1212455 - RNA, 19 nt, Artificial Sequence
  Description of Artificial Sequence: Synthetic oligonucleotide
cccguagagugaggcgggc

SEQ ID NO: 1212456 - RNA, 19 nt, Artificial Sequence
  Description of Artificial Sequence: Synthetic oligonucleotide
ggcuggcuuguuucucacu

SEQ ID NO: 1212457 - RNA, 19 nt, Artificial Sequence
  Description of Artificial Sequence: Synthetic oligonucleotide
gguccccgccgcaauaccu

SEQ ID NO: 1212458 - RNA, 19 nt, Artificial Sequence
  Description of Artificial Sequence: Synthetic oligonucleotide
cacacacuacuggcuuucu

SEQ ID NO: 1212459 - RNA, 19 nt, Artificial Sequence
  Description of Artificial Sequence: Synthetic oligonucleotide
gccccacuacuggccgugg

SEQ ID NO: 1212460 - RNA, 19 nt, Artificial Sequence
  Description of Artificial Sequence: Synthetic oligonucleotide
ccgccgcaauaccuguguc

SEQ ID NO: 1212461 - RNA, 19 nt, Artificial Sequence
  Description of Artificial Sequence: Synthetic oligonucleotide
gcgcugcaaugacuggcaa

SEQ ID NO: 1212462 - RNA, 19 nt, Artificial Sequence
  Description of Artificial Sequence: Synthetic oligonucleotide
ccccgccgcaauaccugug

SEQ ID NO: 1212463 - RNA, 19 nt, Artificial Sequence
  Description of Artificial Sequence: Synthetic oligonucleotide
agccugucuucaggccaua

SEQ ID NO: 1212464 - RNA, 19 nt, Artificial Sequence
  Description of Artificial Sequence: Synthetic oligonucleotide
gaucccggccuuggcugau

SEQ ID NO: 1212465 - RNA, 19 nt, Artificial Sequence
  Description of Artificial Sequence: Synthetic oligonucleotide
gugcgccauccagguacca

SEQ ID NO: 1212466 - RNA, 19 nt, Artificial Sequence
  Description of Artificial Sequence: Synthetic oligonucleotide
cgugggagauacagcuaaa

SEQ ID NO: 1212467 - RNA, 19 nt, Artificial Sequence
  Description of Artificial Sequence: Synthetic oligonucleotide
cccgccgcaauaccugugu

SEQ ID NO: 1212468 - RNA, 19 nt, Artificial Sequence
  Description of Artificial Sequence: Synthetic oligonucleotide
cugcaaggcgugggagaua

SEQ ID NO: 1212469 - RNA, 19 nt, Artificial Sequence
  Description of Artificial Sequence: Synthetic oligonucleotide
cacggccaggggaccuucu

SEQ ID NO: 1212470 - RNA, 19 nt, Artificial Sequence
  Description of Artificial Sequence: Synthetic oligonucleotide
ccccaccaaugcccacuuc

SEQ ID NO: 1212471 - RNA, 19 nt, Artificial Sequence
  Description of Artificial Sequence: Synthetic oligonucleotide
gcauggcaacguggcuguc

SEQ ID NO: 1212472 - RNA, 19 nt, Artificial Sequence
  Description of Artificial Sequence: Synthetic oligonucleotide
aggcgcagguggagcccuu

SEQ ID NO: 1212473 - RNA, 19 nt, Artificial Sequence
  Description of Artificial Sequence: Synthetic oligonucleotide
cccgaagcccaugucucau

SEQ ID NO: 1212474 - RNA, 19 nt, Artificial Sequence
  Description of Artificial Sequence: Synthetic oligonucleotide
cccugucacccguggaguu

SEQ ID NO: 1212475 - RNA, 19 nt, Artificial Sequence
  Description of Artificial Sequence: Synthetic oligonucleotide
cgaauccguucacgcaccu

SEQ ID NO: 1212476 - RNA, 19 nt, Artificial Sequence
  Description of Artificial Sequence: Synthetic oligonucleotide
gcugcgccugagggucacu

SEQ ID NO: 1212477 - RNA, 19 nt, Artificial Sequence
  Description of Artificial Sequence: Synthetic oligonucleotide
ccgugucuccgagcaggcu

SEQ ID NO: 1212478 - RNA, 19 nt, Artificial Sequence
  Description of Artificial Sequence: Synthetic oligonucleotide
  modified_base (1)..(1): a, c, u, g, unknown or other
ngcucgggacugauggguu

SEQ ID NO: 1212479 - RNA, 19 nt, Artificial Sequence
  Description of Artificial Sequence: Synthetic oligonucleotide
auuucagugaaucaggucc

SEQ ID NO: 1212480 - RNA, 19 nt, Artificial Sequence
  Description of Artificial Sequence: Synthetic oligonucleotide
auuaaaagaagauuuacag

SEQ ID NO: 1212481 - RNA, 19 nt, Artificial Sequence
  Description of Artificial Sequence: Synthetic oligonucleotide
cuuaauuagcuuuagguag

SEQ ID NO: 1212482 - RNA, 19 nt, Artificial Sequence
  Description of Artificial Sequence: Synthetic oligonucleotide
uuuacuaugacuuuagaua

SEQ ID NO: 1212483 - RNA, 19 nt, Artificial Sequence
  Description of Artificial Sequence: Synthetic oligonucleotide
aauugcccaucccaaaucc

SEQ ID NO: 1212484 - RNA, 19 nt, Artificial Sequence
  Description of Artificial Sequence: Synthetic oligonucleotide
aaaauggucagacucguug

SEQ ID NO: 1212485 - RNA, 19 nt, Artificial Sequence
  Description of Artificial Sequence: Synthetic oligonucleotide
uauacauguacaaacucag

SEQ ID NO: 1212486 - RNA, 19 nt, Artificial Sequence
  Description of Artificial Sequence: Synthetic oligonucleotide
agacgcagcacucaaagcc

SEQ ID NO: 1212487 - RNA, 19 nt, Artificial Sequence
  Description of Artificial Sequence: Synthetic oligonucleotide
ugaucauaaagguaucugg

SEQ ID NO: 1212488 - RNA, 19 nt, Artificial Sequence
  Description of Artificial Sequence: Synthetic oligonucleotide
aaugccuucccgcaagagc

SEQ ID NO: 1212489 - RNA, 19 nt, Artificial Sequence
  Description of Artificial Sequence: Synthetic oligonucleotide
uauugaaucauaccgagau

SEQ ID NO: 1212490 - RNA, 19 nt, Artificial Sequence
  Description of Artificial Sequence: Synthetic oligonucleotide
uagauuucguuaucgaugg

SEQ ID NO: 1212491 - RNA, 19 nt, Artificial Sequence
  Description of Artificial Sequence: Synthetic oligonucleotide
ucauuaguucuccagaagc

SEQ ID NO: 1212492 - RNA, 19 nt, Artificial Sequence
  Description of Artificial Sequence: Synthetic oligonucleotide
aguuauuauacugucuugc

SEQ ID NO: 1212493 - RNA, 19 nt, Artificial Sequence
  Description of Artificial Sequence: Synthetic oligonucleotide
uggacauucacauaauuca

SEQ ID NO: 1212494 - RNA, 19 nt, Artificial Sequence
  Description of Artificial Sequence: Synthetic oligonucleotide
agauuuacuaauccuaaag

SEQ ID NO: 1212495 - RNA, 19 nt, Artificial Sequence
  Description of Artificial Sequence: Synthetic oligonucleotide
ugaaauaaaacauccccug

SEQ ID NO: 1212496 - RNA, 19 nt, Artificial Sequence
  Description of Artificial Sequence: Synthetic oligonucleotide
gaggcuauaauuuaucuca

SEQ ID NO: 1212497 - RNA, 19 nt, Artificial Sequence
  Description of Artificial Sequence: Synthetic oligonucleotide
aaauggucagacucguugg

SEQ ID NO: 1212498 - RNA, 19 nt, Artificial Sequence
  Description of Artificial Sequence: Synthetic oligonucleotide
aagagucgcuuuuaccucc

SEQ ID NO: 1212499 - RNA, 19 nt, Artificial Sequence
  Description of Artificial Sequence: Synthetic oligonucleotide
guuaucgauggucaggucg

SEQ ID NO: 1212500 - RNA, 19 nt, Artificial Sequence
  Description of Artificial Sequence: Synthetic oligonucleotide
aaaacggagacgcagcacu

SEQ ID NO: 1212501 - RNA, 19 nt, Artificial Sequence
  Description of Artificial Sequence: Synthetic oligonucleotide
ugaauauucucaaaauggu

SEQ ID NO: 1212502 - RNA, 19 nt, Artificial Sequence
  Description of Artificial Sequence: Synthetic oligonucleotide
uuuaccuacugaaggaagc

SEQ ID NO: 1212503 - RNA, 19 nt, Artificial Sequence
  Description of Artificial Sequence: Synthetic oligonucleotide
ucaguuauuauacugucuu

SEQ ID NO: 1212504 - RNA, 19 nt, Artificial Sequence
  Description of Artificial Sequence: Synthetic oligonucleotide
ucagauuuaccuacugaag

SEQ ID NO: 1212505 - RNA, 19 nt, Artificial Sequence
  Description of Artificial Sequence: Synthetic oligonucleotide
uuacuaugacuuuagauau

SEQ ID NO: 1212506 - RNA, 19 nt, Artificial Sequence
  Description of Artificial Sequence: Synthetic oligonucleotide
uuaaaucucauugucugcc

SEQ ID NO: 1212507 - RNA, 19 nt, Artificial Sequence
  Description of Artificial Sequence: Synthetic oligonucleotide
aaauccugauccaaguaac

SEQ ID NO: 1212508 - RNA, 19 nt, Artificial Sequence
  Description of Artificial Sequence: Synthetic oligonucleotide
aaagcgauuguucuucaga

SEQ ID NO: 1212509 - RNA, 19 nt, Artificial Sequence
  Description of Artificial Sequence: Synthetic oligonucleotide
cucaaaauggucagacucg

SEQ ID NO: 1212510 - RNA, 19 nt, Artificial Sequence
  Description of Artificial Sequence: Synthetic oligonucleotide
uuacuaauccuaaagcgau

SEQ ID NO: 1212511 - RNA, 19 nt, Artificial Sequence
  Description of Artificial Sequence: Synthetic oligonucleotide
uuaauuagcuuuagguagu

SEQ ID NO: 1212512 - RNA, 19 nt, Artificial Sequence
  Description of Artificial Sequence: Synthetic oligonucleotide
aauauggucuggcuuagaa

SEQ ID NO: 1212513 - RNA, 19 nt, Artificial Sequence
  Description of Artificial Sequence: Synthetic oligonucleotide
aaagaugaucaaugccuuc

SEQ ID NO: 1212514 - RNA, 19 nt, Artificial Sequence
  Description of Artificial Sequence: Synthetic oligonucleotide
aaagaagauuuacaguaaa

SEQ ID NO: 1212515 - RNA, 19 nt, Artificial Sequence
  Description of Artificial Sequence: Synthetic oligonucleotide
cuugcuuguagucagggug

SEQ ID NO: 1212516 - RNA, 19 nt, Artificial Sequence
  Description of Artificial Sequence: Synthetic oligonucleotide
aacucuggaaugcagguau

SEQ ID NO: 1212517 - RNA, 19 nt, Artificial Sequence
  Description of Artificial Sequence: Synthetic oligonucleotide
cucgguaaaacggagacgc

SEQ ID NO: 1212518 - RNA, 19 nt, Artificial Sequence
  Description of Artificial Sequence: Synthetic oligonucleotide
auaaguagcuaucuauuga

SEQ ID NO: 1212519 - RNA, 19 nt, Artificial Sequence
  Description of Artificial Sequence: Synthetic oligonucleotide
agccauaacaauugggcag

SEQ ID NO: 1212520 - RNA, 19 nt, Artificial Sequence
  Description of Artificial Sequence: Synthetic oligonucleotide
ugaacucuacucuccaucc

SEQ ID NO: 1212521 - RNA, 19 nt, Artificial Sequence
  Description of Artificial Sequence: Synthetic oligonucleotide
aaagguaucuggcuucaga

SEQ ID NO: 1212522 - RNA, 19 nt, Artificial Sequence
  Description of Artificial Sequence: Synthetic oligonucleotide
caauugggcagauaguggc

SEQ ID NO: 1212523 - RNA, 19 nt, Artificial Sequence
  Description of Artificial Sequence: Synthetic oligonucleotide
gaucauaaagguaucuggc

SEQ ID NO: 1212524 - RNA, 19 nt, Artificial Sequence
  Description of Artificial Sequence: Synthetic oligonucleotide
accacacuuagauaaguag

SEQ ID NO: 1212525 - RNA, 19 nt, Artificial Sequence
  Description of Artificial Sequence: Synthetic oligonucleotide
cuugcuacacccauccacc

SEQ ID NO: 1212526 - RNA, 19 nt, Artificial Sequence
  Description of Artificial Sequence: Synthetic oligonucleotide
uuuagguaguucagaauac

SEQ ID NO: 1212527 - RNA, 19 nt, Artificial Sequence
  Description of Artificial Sequence: Synthetic oligonucleotide
acauaauucauuugcaauu

SEQ ID NO: 1212528 - RNA, 19 nt, Artificial Sequence
  Description of Artificial Sequence: Synthetic oligonucleotide
uuuucuaaauccugaucca

SEQ ID NO: 1212529 - RNA, 19 nt, Artificial Sequence
  Description of Artificial Sequence: Synthetic oligonucleotide
ucccagguaguauuaaaag

SEQ ID NO: 1212530 - RNA, 19 nt, Artificial Sequence
  Description of Artificial Sequence: Synthetic oligonucleotide
acaaucaaugucugacacg

SEQ ID NO: 1212531 - RNA, 19 nt, Artificial Sequence
  Description of Artificial Sequence: Synthetic oligonucleotide
aaucaaguuuguaggagag

SEQ ID NO: 1212532 - RNA, 19 nt, Artificial Sequence
  Description of Artificial Sequence: Synthetic oligonucleotide
uuaucgauggucaggucga

SEQ ID NO: 1212533 - RNA, 19 nt, Artificial Sequence
  Description of Artificial Sequence: Synthetic oligonucleotide
gacaaucaaugucugacac

SEQ ID NO: 1212534 - RNA, 19 nt, Artificial Sequence
  Description of Artificial Sequence: Synthetic oligonucleotide
ggaggcuuaaaucucauug

SEQ ID NO: 1212535 - RNA, 19 nt, Artificial Sequence
  Description of Artificial Sequence: Synthetic oligonucleotide
agauuuaccuacugaagga

SEQ ID NO: 1212536 - RNA, 19 nt, Artificial Sequence
  Description of Artificial Sequence: Synthetic oligonucleotide
gauaguggccagcugauca

SEQ ID NO: 1212537 - RNA, 19 nt, Artificial Sequence
  Description of Artificial Sequence: Synthetic oligonucleotide
uacauuucgaaacgaggcu

SEQ ID NO: 1212538 - RNA, 19 nt, Artificial Sequence
  Description of Artificial Sequence: Synthetic oligonucleotide
ugcaauuugguuacauuuc

SEQ ID NO: 1212539 - RNA, 19 nt, Artificial Sequence
  Description of Artificial Sequence: Synthetic oligonucleotide
uacucuccauccaauaucu

SEQ ID NO: 1212540 - RNA, 19 nt, Artificial Sequence
  Description of Artificial Sequence: Synthetic oligonucleotide
ucucuaaugaagagaugug

SEQ ID NO: 1212541 - RNA, 19 nt, Artificial Sequence
  Description of Artificial Sequence: Synthetic oligonucleotide
uugcaauuugguuacauuu

SEQ ID NO: 1212542 - RNA, 19 nt, Artificial Sequence
  Description of Artificial Sequence: Synthetic oligonucleotide
agauauaauguuauuaaaa

SEQ ID NO: 1212543 - RNA, 19 nt, Artificial Sequence
  Description of Artificial Sequence: Synthetic oligonucleotide
cuuaaaucucauugucugc

SEQ ID NO: 1212544 - RNA, 19 nt, Artificial Sequence
  Description of Artificial Sequence: Synthetic oligonucleotide
cuucuagucacuugcuggc

SEQ ID NO: 1212545 - RNA, 19 nt, Artificial Sequence
  Description of Artificial Sequence: Synthetic oligonucleotide
aaucauaccgagauuuacu

SEQ ID NO: 1212546 - RNA, 19 nt, Artificial Sequence
  Description of Artificial Sequence: Synthetic oligonucleotide
gcuuaaaucucauugucug

SEQ ID NO: 1212547 - RNA, 19 nt, Artificial Sequence
  Description of Artificial Sequence: Synthetic oligonucleotide
cuggacauucacauaauuc

SEQ ID NO: 1212548 - RNA, 19 nt, Artificial Sequence
  Description of Artificial Sequence: Synthetic oligonucleotide
gauaggaguucagaauggg

SEQ ID NO: 1212549 - RNA, 19 nt, Artificial Sequence
  Description of Artificial Sequence: Synthetic oligonucleotide
cuuuagguaguucagaaua

SEQ ID NO: 1212550 - RNA, 19 nt, Artificial Sequence
  Description of Artificial Sequence: Synthetic oligonucleotide
ucauagauuucguuaucga

SEQ ID NO: 1212551 - RNA, 19 nt, Artificial Sequence
  Description of Artificial Sequence: Synthetic oligonucleotide
uucguuaucgauggucagg

SEQ ID NO: 1212552 - RNA, 19 nt, Artificial Sequence
  Description of Artificial Sequence: Synthetic oligonucleotide
uuagauaaguagcuaucua

SEQ ID NO: 1212553 - RNA, 19 nt, Artificial Sequence
  Description of Artificial Sequence: Synthetic oligonucleotide
aacgaggcuauaauuuauc

SEQ ID NO: 1212554 - RNA, 19 nt, Artificial Sequence
  Description of Artificial Sequence: Synthetic oligonucleotide
ucugguguccacaucuacu

SEQ ID NO: 1212555 - RNA, 19 nt, Artificial Sequence
  Description of Artificial Sequence: Synthetic oligonucleotide
uaccgagauuuacuaaucc

SEQ ID NO: 1212556 - RNA, 19 nt, Artificial Sequence
  Description of Artificial Sequence: Synthetic oligonucleotide
acuuagauaaguagcuauc

SEQ ID NO: 1212557 - RNA, 19 nt, Artificial Sequence
  Description of Artificial Sequence: Synthetic oligonucleotide
uuauuauacugucuugcuu

SEQ ID NO: 1212558 - RNA, 19 nt, Artificial Sequence
  Description of Artificial Sequence: Synthetic oligonucleotide
cauccauguaaauaugguc

SEQ ID NO: 1212559 - RNA, 19 nt, Artificial Sequence
  Description of Artificial Sequence: Synthetic oligonucleotide
ugcucauagauuucguuau

SEQ ID NO: 1212560 - RNA, 19 nt, Artificial Sequence
  Description of Artificial Sequence: Synthetic oligonucleotide
aacgugcugugccaaaaga

SEQ ID NO: 1212561 - RNA, 19 nt, Artificial Sequence
  Description of Artificial Sequence: Synthetic oligonucleotide
uucgaaacgaggcuauaau

SEQ ID NO: 1212562 - RNA, 19 nt, Artificial Sequence
  Description of Artificial Sequence: Synthetic oligonucleotide
gauuucguuaucgaugguc

SEQ ID NO: 1212563 - RNA, 19 nt, Artificial Sequence
  Description of Artificial Sequence: Synthetic oligonucleotide
ucuggcaaccgucauuagu

SEQ ID NO: 1212564 - RNA, 19 nt, Artificial Sequence
  Description of Artificial Sequence: Synthetic oligonucleotide
cauguaaauauggucuggc

SEQ ID NO: 1212565 - RNA, 19 nt, Artificial Sequence
  Description of Artificial Sequence: Synthetic oligonucleotide
gcuucuagucacuugcugg

SEQ ID NO: 1212566 - RNA, 19 nt, Artificial Sequence
  Description of Artificial Sequence: Synthetic oligonucleotide
uaucaucuacagaugcaga

SEQ ID NO: 1212567 - RNA, 19 nt, Artificial Sequence
  Description of Artificial Sequence: Synthetic oligonucleotide
auggugucuaugcucauga

SEQ ID NO: 1212568 - RNA, 19 nt, Artificial Sequence
  Description of Artificial Sequence: Synthetic oligonucleotide
ucuagucacuugcuggcca

SEQ ID NO: 1212569 - RNA, 19 nt, Artificial Sequence
  Description of Artificial Sequence: Synthetic oligonucleotide
uugguguucacagcauccg

SEQ ID NO: 1212570 - RNA, 19 nt, Artificial Sequence
  Description of Artificial Sequence: Synthetic oligonucleotide
accgucauuaguucuccag

SEQ ID NO: 1212571 - RNA, 19 nt, Artificial Sequence
  Description of Artificial Sequence: Synthetic oligonucleotide
gcgauuguucuucagaggc

SEQ ID NO: 1212572 - RNA, 19 nt, Artificial Sequence
  Description of Artificial Sequence: Synthetic oligonucleotide
caucaguuauuauacuguc

SEQ ID NO: 1212573 - RNA, 19 nt, Artificial Sequence
  Description of Artificial Sequence: Synthetic oligonucleotide
accgagauuuacuaauccu

SEQ ID NO: 1212574 - RNA, 19 nt, Artificial Sequence
  Description of Artificial Sequence: Synthetic oligonucleotide
agcgauuguucuucagagg

SEQ ID NO: 1212575 - RNA, 19 nt, Artificial Sequence
  Description of Artificial Sequence: Synthetic oligonucleotide
aucauaccgagauuuacua

SEQ ID NO: 1212576 - RNA, 19 nt, Artificial Sequence
  Description of Artificial Sequence: Synthetic oligonucleotide
cugucuugcuuguagucag

SEQ ID NO: 1212577 - RNA, 19 nt, Artificial Sequence
  Description of Artificial Sequence: Synthetic oligonucleotide
auuucguuaucgaugguca

SEQ ID NO: 1212578 - RNA, 19 nt, Artificial Sequence
  Description of Artificial Sequence: Synthetic oligonucleotide
gaaacgaggcuauaauuua

SEQ ID NO: 1212579 - RNA, 19 nt, Artificial Sequence
  Description of Artificial Sequence: Synthetic oligonucleotide
gguaguucagaauacugca

SEQ ID NO: 1212580 - RNA, 19 nt, Artificial Sequence
  Description of Artificial Sequence: Synthetic oligonucleotide
auuauacugucuugcuugu

SEQ ID NO: 1212581 - RNA, 19 nt, Artificial Sequence
  Description of Artificial Sequence: Synthetic oligonucleotide
acucagauuuaccuacuga

SEQ ID NO: 1212582 - RNA, 19 nt, Artificial Sequence
  Description of Artificial Sequence: Synthetic oligonucleotide
ugacacguagccucgguaa

SEQ ID NO: 1212583 - RNA, 19 nt, Artificial Sequence
  Description of Artificial Sequence: Synthetic oligonucleotide
uuugcaauuugguuacauu

SEQ ID NO: 1212584 - RNA, 19 nt, Artificial Sequence
  Description of Artificial Sequence: Synthetic oligonucleotide
uuagguaguucagaauacu

SEQ ID NO: 1212585 - RNA, 19 nt, Artificial Sequence
  Description of Artificial Sequence: Synthetic oligonucleotide
uuucguuaucgauggucag

SEQ ID NO: 1212586 - RNA, 19 nt, Artificial Sequence
  Description of Artificial Sequence: Synthetic oligonucleotide
auaggaguucagaaugggg

SEQ ID NO: 1212587 - RNA, 19 nt, Artificial Sequence
  Description of Artificial Sequence: Synthetic oligonucleotide
ucaaaauggucagacucgu

SEQ ID NO: 1212588 - RNA, 19 nt, Artificial Sequence
  Description of Artificial Sequence: Synthetic oligonucleotide
agaggaucacccuggugag

SEQ ID NO: 1212589 - RNA, 19 nt, Artificial Sequence
  Description of Artificial Sequence: Synthetic oligonucleotide
gagugggucucuaaugaag

SEQ ID NO: 1212590 - RNA, 19 nt, Artificial Sequence
  Description of Artificial Sequence: Synthetic oligonucleotide
agauaggaguucagaaugg

SEQ ID NO: 1212591 - RNA, 19 nt, Artificial Sequence
  Description of Artificial Sequence: Synthetic oligonucleotide
uccccugcaagacagcauc

SEQ ID NO: 1212592 - RNA, 19 nt, Artificial Sequence
  Description of Artificial Sequence: Synthetic oligonucleotide
agggugguuugcaauaaac

SEQ ID NO: 1212593 - RNA, 19 nt, Artificial Sequence
  Description of Artificial Sequence: Synthetic oligonucleotide
acgaggcuauaauuuaucu

SEQ ID NO: 1212594 - RNA, 19 nt, Artificial Sequence
  Description of Artificial Sequence: Synthetic oligonucleotide
cugaucauaaagguaucug

SEQ ID NO: 1212595 - RNA, 19 nt, Artificial Sequence
  Description of Artificial Sequence: Synthetic oligonucleotide
ggagacgcagcacucaaag

SEQ ID NO: 1212596 - RNA, 19 nt, Artificial Sequence
  Description of Artificial Sequence: Synthetic oligonucleotide
ucguuaucgauggucaggu

SEQ ID NO: 1212597 - RNA, 19 nt, Artificial Sequence
  Description of Artificial Sequence: Synthetic oligonucleotide
cacucacugaacagugacg

SEQ ID NO: 1212598 - RNA, 19 nt, Artificial Sequence
  Description of Artificial Sequence: Synthetic oligonucleotide
cugaacucuacucuccauc

SEQ ID NO: 1212599 - RNA, 19 nt, Artificial Sequence
  Description of Artificial Sequence: Synthetic oligonucleotide
aucuauugaaucauaccga

SEQ ID NO: 1212600 - RNA, 19 nt, Artificial Sequence
  Description of Artificial Sequence: Synthetic oligonucleotide
auuuaccuacugaaggaag

SEQ ID NO: 1212601 - RNA, 19 nt, Artificial Sequence
  Description of Artificial Sequence: Synthetic oligonucleotide
ugcuccagaguaagaauuc

SEQ ID NO: 1212602 - RNA, 19 nt, Artificial Sequence
  Description of Artificial Sequence: Synthetic oligonucleotide
ccaaaagaugaucaaugcc

SEQ ID NO: 1212603 - RNA, 19 nt, Artificial Sequence
  Description of Artificial Sequence: Synthetic oligonucleotide
agugacgcaccucuuucug

SEQ ID NO: 1212604 - RNA, 19 nt, Artificial Sequence
  Description of Artificial Sequence: Synthetic oligonucleotide
uccgagagggccaggaguc

SEQ ID NO: 1212605 - RNA, 19 nt, Artificial Sequence
  Description of Artificial Sequence: Synthetic oligonucleotide
agguaguauuaaaagaaga

SEQ ID NO: 1212606 - RNA, 19 nt, Artificial Sequence
  Description of Artificial Sequence: Synthetic oligonucleotide
augcagguauuauuguaca

SEQ ID NO: 1212607 - RNA, 19 nt, Artificial Sequence
  Description of Artificial Sequence: Synthetic oligonucleotide
uuucuaaauccugauccaa

SEQ ID NO: 1212608 - RNA, 19 nt, Artificial Sequence
  Description of Artificial Sequence: Synthetic oligonucleotide
acgcaccucuuucugaaag

SEQ ID NO: 1212609 - RNA, 19 nt, Artificial Sequence
  Description of Artificial Sequence: Synthetic oligonucleotide
ucgaaacgaggcuauaauu

SEQ ID NO: 1212610 - RNA, 19 nt, Artificial Sequence
  Description of Artificial Sequence: Synthetic oligonucleotide
ugggucucuaaugaagaga

SEQ ID NO: 1212611 - RNA, 19 nt, Artificial Sequence
  Description of Artificial Sequence: Synthetic oligonucleotide
gacuuuagauauaauguua

SEQ ID NO: 1212612 - RNA, 19 nt, Artificial Sequence
  Description of Artificial Sequence: Synthetic oligonucleotide
gugagugggucucuaauga

SEQ ID NO: 1212613 - RNA, 19 nt, Artificial Sequence
  Description of Artificial Sequence: Synthetic oligonucleotide
uuucgaaacgaggcuauaa

SEQ ID NO: 1212614 - RNA, 19 nt, Artificial Sequence
  Description of Artificial Sequence: Synthetic oligonucleotide
aguugcuccagaguaagaa

SEQ ID NO: 1212615 - RNA, 19 nt, Artificial Sequence
  Description of Artificial Sequence: Synthetic oligonucleotide
auaccgagauuuacuaauc

SEQ ID NO: 1212616 - RNA, 19 nt, Artificial Sequence
  Description of Artificial Sequence: Synthetic oligonucleotide
caguuauuauacugucuug

SEQ ID NO: 1212617 - RNA, 19 nt, Artificial Sequence
  Description of Artificial Sequence: Synthetic oligonucleotide
ucauaccgagauuuacuaa

SEQ ID NO: 1212618 - RNA, 19 nt, Artificial Sequence
  Description of Artificial Sequence: Synthetic oligonucleotide
aauccugauccaaguaacu

SEQ ID NO: 1212619 - RNA, 19 nt, Artificial Sequence
  Description of Artificial Sequence: Synthetic oligonucleotide
augagcccagggaacaccc

SEQ ID NO: 1212620 - RNA, 19 nt, Artificial Sequence
  Description of Artificial Sequence: Synthetic oligonucleotide
auugcccaucccaaauccc

SEQ ID NO: 1212621 - RNA, 19 nt, Artificial Sequence
  Description of Artificial Sequence: Synthetic oligonucleotide
gucgcuuuuaccuccacua

SEQ ID NO: 1212622 - RNA, 19 nt, Artificial Sequence
  Description of Artificial Sequence: Synthetic oligonucleotide
aggucgaugucauuguauu

SEQ ID NO: 1212623 - RNA, 19 nt, Artificial Sequence
  Description of Artificial Sequence: Synthetic oligonucleotide
agaugucuaguuggaagag

SEQ ID NO: 1212624 - RNA, 19 nt, Artificial Sequence
  Description of Artificial Sequence: Synthetic oligonucleotide
guuauuauacugucuugcu

SEQ ID NO: 1212625 - RNA, 19 nt, Artificial Sequence
  Description of Artificial Sequence: Synthetic oligonucleotide
gauuuaccuacugaaggaa

SEQ ID NO: 1212626 - RNA, 19 nt, Artificial Sequence
  Description of Artificial Sequence: Synthetic oligonucleotide
ugacgcaccucuuucugaa

SEQ ID NO: 1212627 - RNA, 19 nt, Artificial Sequence
  Description of Artificial Sequence: Synthetic oligonucleotide
guaaaacggagacgcagca

SEQ ID NO: 1212628 - RNA, 19 nt, Artificial Sequence
  Description of Artificial Sequence: Synthetic oligonucleotide
aaacggagacgcagcacuc

SEQ ID NO: 1212629 - RNA, 19 nt, Artificial Sequence
  Description of Artificial Sequence: Synthetic oligonucleotide
aaucacuccccagcgacaa

SEQ ID NO: 1212630 - RNA, 19 nt, Artificial Sequence
  Description of Artificial Sequence: Synthetic oligonucleotide
auccgagagggccaggagu

SEQ ID NO: 1212631 - RNA, 19 nt, Artificial Sequence
  Description of Artificial Sequence: Synthetic oligonucleotide
aaacgaggcuauaauuuau

SEQ ID NO: 1212632 - RNA, 19 nt, Artificial Sequence
  Description of Artificial Sequence: Synthetic oligonucleotide
acucaaagccauaacaauu

SEQ ID NO: 1212633 - RNA, 19 nt, Artificial Sequence
  Description of Artificial Sequence: Synthetic oligonucleotide
gcuacacccauccaccacc

SEQ ID NO: 1212634 - RNA, 19 nt, Artificial Sequence
  Description of Artificial Sequence: Synthetic oligonucleotide
gagacgcagcacucaaagc

SEQ ID NO: 1212635 - RNA, 19 nt, Artificial Sequence
  Description of Artificial Sequence: Synthetic oligonucleotide
ggugagugggucucuaaug

SEQ ID NO: 1212636 - RNA, 19 nt, Artificial Sequence
  Description of Artificial Sequence: Synthetic oligonucleotide
ugcagguauuauuguacaa

SEQ ID NO: 1212637 - RNA, 19 nt, Artificial Sequence
  Description of Artificial Sequence: Synthetic oligonucleotide
gguaaaacggagacgcagc

SEQ ID NO: 1212638 - RNA, 19 nt, Artificial Sequence
  Description of Artificial Sequence: Synthetic oligonucleotide
ggcuuagaagccuuugcug

SEQ ID NO: 1212639 - RNA, 19 nt, Artificial Sequence
  Description of Artificial Sequence: Synthetic oligonucleotide
cauaccgagauuuacuaau

SEQ ID NO: 1212640 - RNA, 19 nt, Artificial Sequence
  Description of Artificial Sequence: Synthetic oligonucleotide
cuagucacuugcuggccac

SEQ ID NO: 1212641 - RNA, 19 nt, Artificial Sequence
  Description of Artificial Sequence: Synthetic oligonucleotide
gcuuuuaccuccacuauac

SEQ ID NO: 1212642 - RNA, 19 nt, Artificial Sequence
  Description of Artificial Sequence: Synthetic oligonucleotide
ugagugggucucuaaugaa

SEQ ID NO: 1212643 - RNA, 19 nt, Artificial Sequence
  Description of Artificial Sequence: Synthetic oligonucleotide
caauugcccaucccaaauc

SEQ ID NO: 1212644 - RNA, 19 nt, Artificial Sequence
  Description of Artificial Sequence: Synthetic oligonucleotide
ucugacacguagccucggu

SEQ ID NO: 1212645 - RNA, 19 nt, Artificial Sequence
  Description of Artificial Sequence: Synthetic oligonucleotide
cguagccucgguaaaacgg

SEQ ID NO: 1212646 - RNA, 19 nt, Artificial Sequence
  Description of Artificial Sequence: Synthetic oligonucleotide
ugcugugccaaaagaugau

SEQ ID NO: 1212647 - RNA, 19 nt, Artificial Sequence
  Description of Artificial Sequence: Synthetic oligonucleotide
uagcuaucuauugaaucau

SEQ ID NO: 1212648 - RNA, 19 nt, Artificial Sequence
  Description of Artificial Sequence: Synthetic oligonucleotide
uaaaacggagacgcagcac

SEQ ID NO: 1212649 - RNA, 19 nt, Artificial Sequence
  Description of Artificial Sequence: Synthetic oligonucleotide
ugcuacacccauccaccac

SEQ ID NO: 1212650 - RNA, 19 nt, Artificial Sequence
  Description of Artificial Sequence: Synthetic oligonucleotide
cuauugaaucauaccgaga

SEQ ID NO: 1212651 - RNA, 19 nt, Artificial Sequence
  Description of Artificial Sequence: Synthetic oligonucleotide
aacucuggacauucacaua

SEQ ID NO: 1212652 - RNA, 19 nt, Artificial Sequence
  Description of Artificial Sequence: Synthetic oligonucleotide
gcgacaaucaaugucugac

SEQ ID NO: 1212653 - RNA, 19 nt, Artificial Sequence
  Description of Artificial Sequence: Synthetic oligonucleotide
aaacugccuagaugcuagu

SEQ ID NO: 1212654 - RNA, 19 nt, Artificial Sequence
  Description of Artificial Sequence: Synthetic oligonucleotide
auuugcaauuugguuacau

SEQ ID NO: 1212655 - RNA, 19 nt, Artificial Sequence
  Description of Artificial Sequence: Synthetic oligonucleotide
ugguuacauuucgaaacga

SEQ ID NO: 1212656 - RNA, 19 nt, Artificial Sequence
  Description of Artificial Sequence: Synthetic oligonucleotide
uucuagucacuugcuggcc

SEQ ID NO: 1212657 - RNA, 19 nt, Artificial Sequence
  Description of Artificial Sequence: Synthetic oligonucleotide
acauuucgaaacgaggcua

SEQ ID NO: 1212658 - RNA, 19 nt, Artificial Sequence
  Description of Artificial Sequence: Synthetic oligonucleotide
caauuugguuacauuucga

SEQ ID NO: 1212659 - RNA, 19 nt, Artificial Sequence
  Description of Artificial Sequence: Synthetic oligonucleotide
aaguagcuaucuauugaau

SEQ ID NO: 1212660 - RNA, 19 nt, Artificial Sequence
  Description of Artificial Sequence: Synthetic oligonucleotide
uggugucuaugcucaugag

SEQ ID NO: 1212661 - RNA, 19 nt, Artificial Sequence
  Description of Artificial Sequence: Synthetic oligonucleotide
cauuaguucuccagaagcu

SEQ ID NO: 1212662 - RNA, 19 nt, Artificial Sequence
  Description of Artificial Sequence: Synthetic oligonucleotide
ucgcuuuuaccuccacuau

SEQ ID NO: 1212663 - RNA, 19 nt, Artificial Sequence
  Description of Artificial Sequence: Synthetic oligonucleotide
guacaagccaguuuacuau

SEQ ID NO: 1212664 - RNA, 19 nt, Artificial Sequence
  Description of Artificial Sequence: Synthetic oligonucleotide
aaaucacuccccagcgaca

SEQ ID NO: 1212665 - RNA, 19 nt, Artificial Sequence
  Description of Artificial Sequence: Synthetic oligonucleotide
caacgugcugugccaaaag

SEQ ID NO: 1212666 - RNA, 19 nt, Artificial Sequence
  Description of Artificial Sequence: Synthetic oligonucleotide
ucgguaaaacggagacgca

SEQ ID NO: 1212667 - RNA, 19 nt, Artificial Sequence
  Description of Artificial Sequence: Synthetic oligonucleotide
auguacaagccaguuuacu

SEQ ID NO: 1212668 - RNA, 19 nt, Artificial Sequence
  Description of Artificial Sequence: Synthetic oligonucleotide
agcaauugcccaucccaaa

SEQ ID NO: 1212669 - RNA, 19 nt, Artificial Sequence
  Description of Artificial Sequence: Synthetic oligonucleotide
cuuagauaaguagcuaucu

SEQ ID NO: 1212670 - RNA, 19 nt, Artificial Sequence
  Description of Artificial Sequence: Synthetic oligonucleotide
acugaacagugacgcaccu

SEQ ID NO: 1212671 - RNA, 19 nt, Artificial Sequence
  Description of Artificial Sequence: Synthetic oligonucleotide
uugcuacacccauccacca

SEQ ID NO: 1212672 - RNA, 19 nt, Artificial Sequence
  Description of Artificial Sequence: Synthetic oligonucleotide
guagccucgguaaaacgga

SEQ ID NO: 1212673 - RNA, 19 nt, Artificial Sequence
  Description of Artificial Sequence: Synthetic oligonucleotide
ugaggaaaucaaguuugua

SEQ ID NO: 1212674 - RNA, 19 nt, Artificial Sequence
  Description of Artificial Sequence: Synthetic oligonucleotide
ccuugcuacacccauccac

SEQ ID NO: 1212675 - RNA, 19 nt, Artificial Sequence
  Description of Artificial Sequence: Synthetic oligonucleotide
agcgacaaucaaugucuga

SEQ ID NO: 1212676 - RNA, 19 nt, Artificial Sequence
  Description of Artificial Sequence: Synthetic oligonucleotide
caaccgucauuaguucucc

SEQ ID NO: 1212677 - RNA, 19 nt, Artificial Sequence
  Description of Artificial Sequence: Synthetic oligonucleotide
aaucaggucccagguagua

SEQ ID NO: 1212678 - RNA, 19 nt, Artificial Sequence
  Description of Artificial Sequence: Synthetic oligonucleotide
uaguugcuccagaguaaga

SEQ ID NO: 1212679 - RNA, 19 nt, Artificial Sequence
  Description of Artificial Sequence: Synthetic oligonucleotide
gguaguauuaaaagaagau

SEQ ID NO: 1212680 - RNA, 19 nt, Artificial Sequence
  Description of Artificial Sequence: Synthetic oligonucleotide
ugccuagaugcuaguugcu

SEQ ID NO: 1212681 - RNA, 19 nt, Artificial Sequence
  Description of Artificial Sequence: Synthetic oligonucleotide
aaccgucauuaguucucca

SEQ ID NO: 1212682 - RNA, 19 nt, Artificial Sequence
  Description of Artificial Sequence: Synthetic oligonucleotide
cuaaauccugauccaagua

SEQ ID NO: 1212683 - RNA, 19 nt, Artificial Sequence
  Description of Artificial Sequence: Synthetic oligonucleotide
uagaugcuaguugcuccag

SEQ ID NO: 1212684 - RNA, 19 nt, Artificial Sequence
  Description of Artificial Sequence: Synthetic oligonucleotide
ccuaaagcgauuguucuuc

SEQ ID NO: 1212685 - RNA, 19 nt, Artificial Sequence
  Description of Artificial Sequence: Synthetic oligonucleotide
cacuuagauaaguagcuau

SEQ ID NO: 1212686 - RNA, 19 nt, Artificial Sequence
  Description of Artificial Sequence: Synthetic oligonucleotide
agguaucuggcuucagaua

SEQ ID NO: 1212687 - RNA, 19 nt, Artificial Sequence
  Description of Artificial Sequence: Synthetic oligonucleotide
caccgcauugccaccuuug

SEQ ID NO: 1212688 - RNA, 19 nt, Artificial Sequence
  Description of Artificial Sequence: Synthetic oligonucleotide
ucagggugguuugcaauaa

SEQ ID NO: 1212689 - RNA, 19 nt, Artificial Sequence
  Description of Artificial Sequence: Synthetic oligonucleotide
uggcaaccgucauuaguuc

SEQ ID NO: 1212690 - RNA, 19 nt, Artificial Sequence
  Description of Artificial Sequence: Synthetic oligonucleotide
uaguuggaagagucgcuuu

SEQ ID NO: 1212691 - RNA, 19 nt, Artificial Sequence
  Description of Artificial Sequence: Synthetic oligonucleotide
cacguagccucgguaaaac

SEQ ID NO: 1212692 - RNA, 19 nt, Artificial Sequence
  Description of Artificial Sequence: Synthetic oligonucleotide
cuggcaaccgucauuaguu

SEQ ID NO: 1212693 - RNA, 19 nt, Artificial Sequence
  Description of Artificial Sequence: Synthetic oligonucleotide
cauugucugccaguuugug

SEQ ID NO: 1212694 - RNA, 19 nt, Artificial Sequence
  Description of Artificial Sequence: Synthetic oligonucleotide
gacacguagccucgguaaa

SEQ ID NO: 1212695 - RNA, 19 nt, Artificial Sequence
  Description of Artificial Sequence: Synthetic oligonucleotide
uggucugggccuugcuaca

SEQ ID NO: 1212696 - RNA, 19 nt, Artificial Sequence
  Description of Artificial Sequence: Synthetic oligonucleotide
agguauuauuguacaauua

SEQ ID NO: 1212697 - RNA, 19 nt, Artificial Sequence
  Description of Artificial Sequence: Synthetic oligonucleotide
caucuggcaaccgucauua

SEQ ID NO: 1212698 - RNA, 19 nt, Artificial Sequence
  Description of Artificial Sequence: Synthetic oligonucleotide
aaguaacucuggacauuca

SEQ ID NO: 1212699 - RNA, 19 nt, Artificial Sequence
  Description of Artificial Sequence: Synthetic oligonucleotide
cccagguaguauuaaaaga

SEQ ID NO: 1212700 - RNA, 19 nt, Artificial Sequence
  Description of Artificial Sequence: Synthetic oligonucleotide
ccagcgacaaucaaugucu

SEQ ID NO: 1212701 - RNA, 19 nt, Artificial Sequence
  Description of Artificial Sequence: Synthetic oligonucleotide
acggagacgcagcacucaa

SEQ ID NO: 1212702 - RNA, 19 nt, Artificial Sequence
  Description of Artificial Sequence: Synthetic oligonucleotide
gaugucuaguuggaagagu

SEQ ID NO: 1212703 - RNA, 19 nt, Artificial Sequence
  Description of Artificial Sequence: Synthetic oligonucleotide
uacacccauccaccaccgc

SEQ ID NO: 1212704 - RNA, 19 nt, Artificial Sequence
  Description of Artificial Sequence: Synthetic oligonucleotide
gcaggcuuggaaugucacc

SEQ ID NO: 1212705 - RNA, 19 nt, Artificial Sequence
  Description of Artificial Sequence: Synthetic oligonucleotide
ccauguaaauauggucugg

SEQ ID NO: 1212706 - RNA, 19 nt, Artificial Sequence
  Description of Artificial Sequence: Synthetic oligonucleotide
agauuucguuaucgauggu

SEQ ID NO: 1212707 - RNA, 19 nt, Artificial Sequence
  Description of Artificial Sequence: Synthetic oligonucleotide
uccaugggucugaacucua

SEQ ID NO: 1212708 - RNA, 19 nt, Artificial Sequence
  Description of Artificial Sequence: Synthetic oligonucleotide
ugcaacgugcugugccaaa

SEQ ID NO: 1212709 - RNA, 19 nt, Artificial Sequence
  Description of Artificial Sequence: Synthetic oligonucleotide
cccguguucuaucaucuac

SEQ ID NO: 1212710 - RNA, 19 nt, Artificial Sequence
  Description of Artificial Sequence: Synthetic oligonucleotide
gaucacccuggugagcaga

SEQ ID NO: 1212711 - RNA, 19 nt, Artificial Sequence
  Description of Artificial Sequence: Synthetic oligonucleotide
gugacgcaccucuuucuga

SEQ ID NO: 1212712 - RNA, 19 nt, Artificial Sequence
  Description of Artificial Sequence: Synthetic oligonucleotide
ucccgcaagagcugcucau

SEQ ID NO: 1212713 - RNA, 19 nt, Artificial Sequence
  Description of Artificial Sequence: Synthetic oligonucleotide
cagcaauugcccaucccaa

SEQ ID NO: 1212714 - RNA, 19 nt, Artificial Sequence
  Description of Artificial Sequence: Synthetic oligonucleotide
ugccaguuuguggacugaa

SEQ ID NO: 1212715 - RNA, 19 nt, Artificial Sequence
  Description of Artificial Sequence: Synthetic oligonucleotide
ccgagauuuacuaauccua

SEQ ID NO: 1212716 - RNA, 19 nt, Artificial Sequence
  Description of Artificial Sequence: Synthetic oligonucleotide
auccaucuggcaaccguca

SEQ ID NO: 1212717 - RNA, 19 nt, Artificial Sequence
  Description of Artificial Sequence: Synthetic oligonucleotide
gccauaacaauugggcaga

SEQ ID NO: 1212718 - RNA, 19 nt, Artificial Sequence
  Description of Artificial Sequence: Synthetic oligonucleotide
cugcaagacagcaucucgu

SEQ ID NO: 1212719 - RNA, 19 nt, Artificial Sequence
  Description of Artificial Sequence: Synthetic oligonucleotide
cgaggcuauaauuuaucuc

SEQ ID NO: 1212720 - RNA, 19 nt, Artificial Sequence
  Description of Artificial Sequence: Synthetic oligonucleotide
cauuucgaaacgaggcuau

SEQ ID NO: 1212721 - RNA, 19 nt, Artificial Sequence
  Description of Artificial Sequence: Synthetic oligonucleotide
aggcuauaauuuaucucau

SEQ ID NO: 1212722 - RNA, 19 nt, Artificial Sequence
  Description of Artificial Sequence: Synthetic oligonucleotide
gcaaccgucauuaguucuc

SEQ ID NO: 1212723 - RNA, 19 nt, Artificial Sequence
  Description of Artificial Sequence: Synthetic oligonucleotide
acacguagccucgguaaaa

SEQ ID NO: 1212724 - RNA, 19 nt, Artificial Sequence
  Description of Artificial Sequence: Synthetic oligonucleotide
cugaacagugacgcaccuc

SEQ ID NO: 1212725 - RNA, 19 nt, Artificial Sequence
  Description of Artificial Sequence: Synthetic oligonucleotide
uccucccguguucuaucau

SEQ ID NO: 1212726 - RNA, 19 nt, Artificial Sequence
  Description of Artificial Sequence: Synthetic oligonucleotide
cuaauccuaaagcgauugu

SEQ ID NO: 1212727 - RNA, 19 nt, Artificial Sequence
  Description of Artificial Sequence: Synthetic oligonucleotide
acucuacucuccauccaau

SEQ ID NO: 1212728 - RNA, 19 nt, Artificial Sequence
  Description of Artificial Sequence: Synthetic oligonucleotide
agggugagugggucucuaa

SEQ ID NO: 1212729 - RNA, 19 nt, Artificial Sequence
  Description of Artificial Sequence: Synthetic oligonucleotide
cgagauuuacuaauccuaa

SEQ ID NO: 1212730 - RNA, 19 nt, Artificial Sequence
  Description of Artificial Sequence: Synthetic oligonucleotide
agcuaucuauugaaucaua

SEQ ID NO: 1212731 - RNA, 19 nt, Artificial Sequence
  Description of Artificial Sequence: Synthetic oligonucleotide
uagucacuugcuggccacu

SEQ ID NO: 1212732 - RNA, 19 nt, Artificial Sequence
  Description of Artificial Sequence: Synthetic oligonucleotide
ucccguguucuaucaucua

SEQ ID NO: 1212733 - RNA, 19 nt, Artificial Sequence
  Description of Artificial Sequence: Synthetic oligonucleotide
gucugacacguagccucgg

SEQ ID NO: 1212734 - RNA, 19 nt, Artificial Sequence
  Description of Artificial Sequence: Synthetic oligonucleotide
gucacucacugaacaguga

SEQ ID NO: 1212735 - RNA, 19 nt, Artificial Sequence
  Description of Artificial Sequence: Synthetic oligonucleotide
gagucgcuuuuaccuccac

SEQ ID NO: 1212736 - RNA, 19 nt, Artificial Sequence
  Description of Artificial Sequence: Synthetic oligonucleotide
cucucucauccaucuggca

SEQ ID NO: 1212737 - RNA, 19 nt, Artificial Sequence
  Description of Artificial Sequence: Synthetic oligonucleotide
ggucagacucguuggcauc

SEQ ID NO: 1212738 - RNA, 19 nt, Artificial Sequence
  Description of Artificial Sequence: Synthetic oligonucleotide
agagucgcuuuuaccucca

SEQ ID NO: 1212739 - RNA, 19 nt, Artificial Sequence
  Description of Artificial Sequence: Synthetic oligonucleotide
guaguucagaauacugcau

SEQ ID NO: 1212740 - RNA, 19 nt, Artificial Sequence
  Description of Artificial Sequence: Synthetic oligonucleotide
auuucgaaacgaggcuaua

SEQ ID NO: 1212741 - RNA, 19 nt, Artificial Sequence
  Description of Artificial Sequence: Synthetic oligonucleotide
gauaugcugcaggcuugga

SEQ ID NO: 1212742 - RNA, 19 nt, Artificial Sequence
  Description of Artificial Sequence: Synthetic oligonucleotide
ggcuuaaaucucauugucu

SEQ ID NO: 1212743 - RNA, 19 nt, Artificial Sequence
  Description of Artificial Sequence: Synthetic oligonucleotide
gacgcaccucuuucugaaa

SEQ ID NO: 1212744 - RNA, 19 nt, Artificial Sequence
  Description of Artificial Sequence: Synthetic oligonucleotide
ccgucauuaguucuccaga

SEQ ID NO: 1212745 - RNA, 19 nt, Artificial Sequence
  Description of Artificial Sequence: Synthetic oligonucleotide
uaucgauggucaggucgau

SEQ ID NO: 1212746 - RNA, 19 nt, Artificial Sequence
  Description of Artificial Sequence: Synthetic oligonucleotide
cugacacguagccucggua

SEQ ID NO: 1212747 - RNA, 19 nt, Artificial Sequence
  Description of Artificial Sequence: Synthetic oligonucleotide
gggugguuugcaauaaacu

SEQ ID NO: 1212748 - RNA, 19 nt, Artificial Sequence
  Description of Artificial Sequence: Synthetic oligonucleotide
gaaucaggucccagguagu

SEQ ID NO: 1212749 - RNA, 19 nt, Artificial Sequence
  Description of Artificial Sequence: Synthetic oligonucleotide
caggucgaugucauuguau

SEQ ID NO: 1212750 - RNA, 19 nt, Artificial Sequence
  Description of Artificial Sequence: Synthetic oligonucleotide
ggagucagugcagcaucug

SEQ ID NO: 1212751 - RNA, 19 nt, Artificial Sequence
  Description of Artificial Sequence: Synthetic oligonucleotide
ggcaaccgucauuaguucu

SEQ ID NO: 1212752 - RNA, 19 nt, Artificial Sequence
  Description of Artificial Sequence: Synthetic oligonucleotide
cauaacaauugggcagaua

SEQ ID NO: 1212753 - RNA, 19 nt, Artificial Sequence
  Description of Artificial Sequence: Synthetic oligonucleotide
cgaaacgaggcuauaauuu

SEQ ID NO: 1212754 - RNA, 19 nt, Artificial Sequence
  Description of Artificial Sequence: Synthetic oligonucleotide
gcuaguugcuccagaguaa

SEQ ID NO: 1212755 - RNA, 19 nt, Artificial Sequence
  Description of Artificial Sequence: Synthetic oligonucleotide
cgacaaucaaugucugaca

SEQ ID NO: 1212756 - RNA, 19 nt, Artificial Sequence
  Description of Artificial Sequence: Synthetic oligonucleotide
gcugaucauaaagguaucu

SEQ ID NO: 1212757 - RNA, 19 nt, Artificial Sequence
  Description of Artificial Sequence: Synthetic oligonucleotide
cgucauuaguucuccagaa

SEQ ID NO: 1212758 - RNA, 19 nt, Artificial Sequence
  Description of Artificial Sequence: Synthetic oligonucleotide
ggucugggccuugcuacac

SEQ ID NO: 1212759 - RNA, 19 nt, Artificial Sequence
  Description of Artificial Sequence: Synthetic oligonucleotide
gggugagugggucucuaau

SEQ ID NO: 1212760 - RNA, 19 nt, Artificial Sequence
  Description of Artificial Sequence: Synthetic oligonucleotide
gcaacgugcugugccaaaa

SEQ ID NO: 1212761 - RNA, 19 nt, Artificial Sequence
  Description of Artificial Sequence: Synthetic oligonucleotide
ggucgaugucauuguauuu

SEQ ID NO: 1212762 - RNA, 19 nt, Artificial Sequence
  Description of Artificial Sequence: Synthetic oligonucleotide
gcaucucguuucugugcca

SEQ ID NO: 1212763 - RNA, 19 nt, Artificial Sequence
  Description of Artificial Sequence: Synthetic oligonucleotide
ccaccaccgcauugccacc

SEQ ID NO: 1212764 - RNA, 19 nt, Artificial Sequence
  Description of Artificial Sequence: Synthetic oligonucleotide
cgcaccucuuucugaaaga

SEQ ID NO: 1212765 - RNA, 19 nt, Artificial Sequence
  Description of Artificial Sequence: Synthetic oligonucleotide
cgcuuuuaccuccacuaua

SEQ ID NO: 1212766 - RNA, 19 nt, Artificial Sequence
  Description of Artificial Sequence: Synthetic oligonucleotide
cguuaucgauggucagguc

SEQ ID NO: 1212767 - RNA, 19 nt, Artificial Sequence
  Description of Artificial Sequence: Synthetic oligonucleotide
ggucuggcuuagaagccuu

SEQ ID NO: 1212768 - RNA, 19 nt, Artificial Sequence
  Description of Artificial Sequence: Synthetic oligonucleotide
cccgcaagagcugcucaua

SEQ ID NO: 1212769 - RNA, 19 nt, Artificial Sequence
  Description of Artificial Sequence: Synthetic oligonucleotide
cgcagcacucaaagccaua

SEQ ID NO: 1212770 - RNA, 19 nt, Artificial Sequence
  Description of Artificial Sequence: Synthetic oligonucleotide
aaaucagucaacaugacuc

SEQ ID NO: 1212771 - RNA, 19 nt, Artificial Sequence
  Description of Artificial Sequence: Synthetic oligonucleotide
ucuuaaaacuucaugaccc

SEQ ID NO: 1212772 - RNA, 19 nt, Artificial Sequence
  Description of Artificial Sequence: Synthetic oligonucleotide
uuuacuaacuuaaauauuc

SEQ ID NO: 1212773 - RNA, 19 nt, Artificial Sequence
  Description of Artificial Sequence: Synthetic oligonucleotide
acaaucuagguauauauac

SEQ ID NO: 1212774 - RNA, 19 nt, Artificial Sequence
  Description of Artificial Sequence: Synthetic oligonucleotide
ucuggauaugccaugaugg

SEQ ID NO: 1212775 - RNA, 19 nt, Artificial Sequence
  Description of Artificial Sequence: Synthetic oligonucleotide
auuaugaucuguuuuguac

SEQ ID NO: 1212776 - RNA, 19 nt, Artificial Sequence
  Description of Artificial Sequence: Synthetic oligonucleotide
aauaauauugugcuaagau

SEQ ID NO: 1212777 - RNA, 19 nt, Artificial Sequence
  Description of Artificial Sequence: Synthetic oligonucleotide
aauaauaaagugcuuacaa

SEQ ID NO: 1212778 - RNA, 19 nt, Artificial Sequence
  Description of Artificial Sequence: Synthetic oligonucleotide
auaaagacugucuugcucg

SEQ ID NO: 1212779 - RNA, 19 nt, Artificial Sequence
  Description of Artificial Sequence: Synthetic oligonucleotide
gagggagucacauugaagg

SEQ ID NO: 1212780 - RNA, 19 nt, Artificial Sequence
  Description of Artificial Sequence: Synthetic oligonucleotide
aaucagucaacaugacucc

SEQ ID NO: 1212781 - RNA, 19 nt, Artificial Sequence
  Description of Artificial Sequence: Synthetic oligonucleotide
auugauaauagcuuuagaa

SEQ ID NO: 1212782 - RNA, 19 nt, Artificial Sequence
  Description of Artificial Sequence: Synthetic oligonucleotide
uagucuaugacgcaaggcc

SEQ ID NO: 1212783 - RNA, 19 nt, Artificial Sequence
  Description of Artificial Sequence: Synthetic oligonucleotide
aaucauaacccauuuugug

SEQ ID NO: 1212784 - RNA, 19 nt, Artificial Sequence
  Description of Artificial Sequence: Synthetic oligonucleotide
uccauuacuauuuucugag

SEQ ID NO: 1212785 - RNA, 19 nt, Artificial Sequence
  Description of Artificial Sequence: Synthetic oligonucleotide
aguaugaucucucaggaca

SEQ ID NO: 1212786 - RNA, 19 nt, Artificial Sequence
  Description of Artificial Sequence: Synthetic oligonucleotide
auuaguuuguuuucaaaug

SEQ ID NO: 1212787 - RNA, 19 nt, Artificial Sequence
  Description of Artificial Sequence: Synthetic oligonucleotide
uuaguuuguuuucaaaugu

SEQ ID NO: 1212788 - RNA, 19 nt, Artificial Sequence
  Description of Artificial Sequence: Synthetic oligonucleotide
ucuaacggcagcuacaacu

SEQ ID NO: 1212789 - RNA, 19 nt, Artificial Sequence
  Description of Artificial Sequence: Synthetic oligonucleotide
uacuguuugacaucauugg

SEQ ID NO: 1212790 - RNA, 19 nt, Artificial Sequence
  Description of Artificial Sequence: Synthetic oligonucleotide
ucuguuauguauauuaguu

SEQ ID NO: 1212791 - RNA, 19 nt, Artificial Sequence
  Description of Artificial Sequence: Synthetic oligonucleotide
acagauguccaguaguaac

SEQ ID NO: 1212792 - RNA, 19 nt, Artificial Sequence
  Description of Artificial Sequence: Synthetic oligonucleotide
uaaagugcuuacaaucuag

SEQ ID NO: 1212793 - RNA, 19 nt, Artificial Sequence
  Description of Artificial Sequence: Synthetic oligonucleotide
uggacucucucacauaagg

SEQ ID NO: 1212794 - RNA, 19 nt, Artificial Sequence
  Description of Artificial Sequence: Synthetic oligonucleotide
ugacauagguuuaaaauaa

SEQ ID NO: 1212795 - RNA, 19 nt, Artificial Sequence
  Description of Artificial Sequence: Synthetic oligonucleotide
uguuugacaucauugguca

SEQ ID NO: 1212796 - RNA, 19 nt, Artificial Sequence
  Description of Artificial Sequence: Synthetic oligonucleotide
uguauuuaucuguucaaug

SEQ ID NO: 1212797 - RNA, 19 nt, Artificial Sequence
  Description of Artificial Sequence: Synthetic oligonucleotide
ugagacaacuaccaaacgu

SEQ ID NO: 1212798 - RNA, 19 nt, Artificial Sequence
  Description of Artificial Sequence: Synthetic oligonucleotide
auuaauaauauugugcuaa

SEQ ID NO: 1212799 - RNA, 19 nt, Artificial Sequence
  Description of Artificial Sequence: Synthetic oligonucleotide
ucagcuacaccaauaguug

SEQ ID NO: 1212800 - RNA, 19 nt, Artificial Sequence
  Description of Artificial Sequence: Synthetic oligonucleotide
auguauauuaguuuguuuu

SEQ ID NO: 1212801 - RNA, 19 nt, Artificial Sequence
  Description of Artificial Sequence: Synthetic oligonucleotide
aagacggagauuuuggaau

SEQ ID NO: 1212802 - RNA, 19 nt, Artificial Sequence
  Description of Artificial Sequence: Synthetic oligonucleotide
uugacauagguuuaaaaua

SEQ ID NO: 1212803 - RNA, 19 nt, Artificial Sequence
  Description of Artificial Sequence: Synthetic oligonucleotide
uccgcuuucuguuauguag

SEQ ID NO: 1212804 - RNA, 19 nt, Artificial Sequence
  Description of Artificial Sequence: Synthetic oligonucleotide
ucuguuauguagucuauga

SEQ ID NO: 1212805 - RNA, 19 nt, Artificial Sequence
  Description of Artificial Sequence: Synthetic oligonucleotide
gacucucucacauaaggcc

SEQ ID NO: 1212806 - RNA, 19 nt, Artificial Sequence
  Description of Artificial Sequence: Synthetic oligonucleotide
auugcgguugaacauuugg

SEQ ID NO: 1212807 - RNA, 19 nt, Artificial Sequence
  Description of Artificial Sequence: Synthetic oligonucleotide
agauaccugaauucucugc

SEQ ID NO: 1212808 - RNA, 19 nt, Artificial Sequence
  Description of Artificial Sequence: Synthetic oligonucleotide
aagauauuucuucucgaca

SEQ ID NO: 1212809 - RNA, 19 nt, Artificial Sequence
  Description of Artificial Sequence: Synthetic oligonucleotide
uuaauaauauugugcuaag

SEQ ID NO: 1212810 - RNA, 19 nt, Artificial Sequence
  Description of Artificial Sequence: Synthetic oligonucleotide
ugcuagauguacuuucagg

SEQ ID NO: 1212811 - RNA, 19 nt, Artificial Sequence
  Description of Artificial Sequence: Synthetic oligonucleotide
uguaccaaacaaucuauac

SEQ ID NO: 1212812 - RNA, 19 nt, Artificial Sequence
  Description of Artificial Sequence: Synthetic oligonucleotide
guuauguagucuaugacgc

SEQ ID NO: 1212813 - RNA, 19 nt, Artificial Sequence
  Description of Artificial Sequence: Synthetic oligonucleotide
agaauauucgccugguaug

SEQ ID NO: 1212814 - RNA, 19 nt, Artificial Sequence
  Description of Artificial Sequence: Synthetic oligonucleotide
ucucacauaaggccugagg

SEQ ID NO: 1212815 - RNA, 19 nt, Artificial Sequence
  Description of Artificial Sequence: Synthetic oligonucleotide
cuagauguacuuucaggcg

SEQ ID NO: 1212816 - RNA, 19 nt, Artificial Sequence
  Description of Artificial Sequence: Synthetic oligonucleotide
aacguauuuuguuuucugu

SEQ ID NO: 1212817 - RNA, 19 nt, Artificial Sequence
  Description of Artificial Sequence: Synthetic oligonucleotide
agauauuucuucucgacaa

SEQ ID NO: 1212818 - RNA, 19 nt, Artificial Sequence
  Description of Artificial Sequence: Synthetic oligonucleotide
aagagauaaagacugucuu

SEQ ID NO: 1212819 - RNA, 19 nt, Artificial Sequence
  Description of Artificial Sequence: Synthetic oligonucleotide
uuuaucuguucaaugaauu

SEQ ID NO: 1212820 - RNA, 19 nt, Artificial Sequence
  Description of Artificial Sequence: Synthetic oligonucleotide
uguauauuaguuuguuuuc

SEQ ID NO: 1212821 - RNA, 19 nt, Artificial Sequence
  Description of Artificial Sequence: Synthetic oligonucleotide
uaagauauuucuucucgac

SEQ ID NO: 1212822 - RNA, 19 nt, Artificial Sequence
  Description of Artificial Sequence: Synthetic oligonucleotide
aaugugucacaacuugaca

SEQ ID NO: 1212823 - RNA, 19 nt, Artificial Sequence
  Description of Artificial Sequence: Synthetic oligonucleotide
auaauauugugcuaagaua

SEQ ID NO: 1212824 - RNA, 19 nt, Artificial Sequence
  Description of Artificial Sequence: Synthetic oligonucleotide
acccauucagacuggaaac

SEQ ID NO: 1212825 - RNA, 19 nt, Artificial Sequence
  Description of Artificial Sequence: Synthetic oligonucleotide
acaacuaccaaacguauuu

SEQ ID NO: 1212826 - RNA, 19 nt, Artificial Sequence
  Description of Artificial Sequence: Synthetic oligonucleotide
ugucgcuuguaugaaaagg

SEQ ID NO: 1212827 - RNA, 19 nt, Artificial Sequence
  Description of Artificial Sequence: Synthetic oligonucleotide
ucgugaucugcuacuaccg

SEQ ID NO: 1212828 - RNA, 19 nt, Artificial Sequence
  Description of Artificial Sequence: Synthetic oligonucleotide
ugagaaauuaugaucuguu

SEQ ID NO: 1212829 - RNA, 19 nt, Artificial Sequence
  Description of Artificial Sequence: Synthetic oligonucleotide
gaaacggccaucuuuccac

SEQ ID NO: 1212830 - RNA, 19 nt, Artificial Sequence
  Description of Artificial Sequence: Synthetic oligonucleotide
uucucgacaacauauuuua

SEQ ID NO: 1212831 - RNA, 19 nt, Artificial Sequence
  Description of Artificial Sequence: Synthetic oligonucleotide
ucgacaacauauuuuaaua

SEQ ID NO: 1212832 - RNA, 19 nt, Artificial Sequence
  Description of Artificial Sequence: Synthetic oligonucleotide
ucauaacccauuuugugaa

SEQ ID NO: 1212833 - RNA, 19 nt, Artificial Sequence
  Description of Artificial Sequence: Synthetic oligonucleotide
aaacggccaucuuuccacc

SEQ ID NO: 1212834 - RNA, 19 nt, Artificial Sequence
  Description of Artificial Sequence: Synthetic oligonucleotide
gcuagauguacuuucaggc

SEQ ID NO: 1212835 - RNA, 19 nt, Artificial Sequence
  Description of Artificial Sequence: Synthetic oligonucleotide
auauugauaauagcuuuag

SEQ ID NO: 1212836 - RNA, 19 nt, Artificial Sequence
  Description of Artificial Sequence: Synthetic oligonucleotide
ugucuauucucugagagau

SEQ ID NO: 1212837 - RNA, 19 nt, Artificial Sequence
  Description of Artificial Sequence: Synthetic oligonucleotide
gauaaagacugucuugcuc

SEQ ID NO: 1212838 - RNA, 19 nt, Artificial Sequence
  Description of Artificial Sequence: Synthetic oligonucleotide
aauauucaaggacuugauu

SEQ ID NO: 1212839 - RNA, 19 nt, Artificial Sequence
  Description of Artificial Sequence: Synthetic oligonucleotide
ucccuuaggacuuucuucu

SEQ ID NO: 1212840 - RNA, 19 nt, Artificial Sequence
  Description of Artificial Sequence: Synthetic oligonucleotide
agugcuuacaaucuaggua

SEQ ID NO: 1212841 - RNA, 19 nt, Artificial Sequence
  Description of Artificial Sequence: Synthetic oligonucleotide
auaaggauugcgguugaac

SEQ ID NO: 1212842 - RNA, 19 nt, Artificial Sequence
  Description of Artificial Sequence: Synthetic oligonucleotide
ucaugacccacuuuuaaau

SEQ ID NO: 1212843 - RNA, 19 nt, Artificial Sequence
  Description of Artificial Sequence: Synthetic oligonucleotide
uuugcuacuuggcaaugcu

SEQ ID NO: 1212844 - RNA, 19 nt, Artificial Sequence
  Description of Artificial Sequence: Synthetic oligonucleotide
uccucuaccaagacggaga

SEQ ID NO: 1212845 - RNA, 19 nt, Artificial Sequence
  Description of Artificial Sequence: Synthetic oligonucleotide
uauauuaguuuguuuucaa

SEQ ID NO: 1212846 - RNA, 19 nt, Artificial Sequence
  Description of Artificial Sequence: Synthetic oligonucleotide
uucugagacaacuaccaaa

SEQ ID NO: 1212847 - RNA, 19 nt, Artificial Sequence
  Description of Artificial Sequence: Synthetic oligonucleotide
uuucaggaaauccaaugua

SEQ ID NO: 1212848 - RNA, 19 nt, Artificial Sequence
  Description of Artificial Sequence: Synthetic oligonucleotide
ugaucugcuacuaccgaac

SEQ ID NO: 1212849 - RNA, 19 nt, Artificial Sequence
  Description of Artificial Sequence: Synthetic oligonucleotide
ucacauaaggccugaggug

SEQ ID NO: 1212850 - RNA, 19 nt, Artificial Sequence
  Description of Artificial Sequence: Synthetic oligonucleotide
aagucaugaggacacucca

SEQ ID NO: 1212851 - RNA, 19 nt, Artificial Sequence
  Description of Artificial Sequence: Synthetic oligonucleotide
aucuauacaguucuguauu

SEQ ID NO: 1212852 - RNA, 19 nt, Artificial Sequence
  Description of Artificial Sequence: Synthetic oligonucleotide
gaauauucgccugguaugc

SEQ ID NO: 1212853 - RNA, 19 nt, Artificial Sequence
  Description of Artificial Sequence: Synthetic oligonucleotide
uacuaccgaaccuugcaag

SEQ ID NO: 1212854 - RNA, 19 nt, Artificial Sequence
  Description of Artificial Sequence: Synthetic oligonucleotide
auagcuuuagaaauuucug

SEQ ID NO: 1212855 - RNA, 19 nt, Artificial Sequence
  Description of Artificial Sequence: Synthetic oligonucleotide
aaggauugcgguugaacau

SEQ ID NO: 1212856 - RNA, 19 nt, Artificial Sequence
  Description of Artificial Sequence: Synthetic oligonucleotide
uauucgccugguaugcucc

SEQ ID NO: 1212857 - RNA, 19 nt, Artificial Sequence
  Description of Artificial Sequence: Synthetic oligonucleotide
agaugcucaucccaggugu

SEQ ID NO: 1212858 - RNA, 19 nt, Artificial Sequence
  Description of Artificial Sequence: Synthetic oligonucleotide
accacauaaggauugcggu

SEQ ID NO: 1212859 - RNA, 19 nt, Artificial Sequence
  Description of Artificial Sequence: Synthetic oligonucleotide
uucuauauuccaagaguuc

SEQ ID NO: 1212860 - RNA, 19 nt, Artificial Sequence
  Description of Artificial Sequence: Synthetic oligonucleotide
auauucgccugguaugcuc

SEQ ID NO: 1212861 - RNA, 19 nt, Artificial Sequence
  Description of Artificial Sequence: Synthetic oligonucleotide
uguagucgugaucugcuac

SEQ ID NO: 1212862 - RNA, 19 nt, Artificial Sequence
  Description of Artificial Sequence: Synthetic oligonucleotide
ugagggagucacauugaag

SEQ ID NO: 1212863 - RNA, 19 nt, Artificial Sequence
  Description of Artificial Sequence: Synthetic oligonucleotide
augacccacuuuuaaauga

SEQ ID NO: 1212864 - RNA, 19 nt, Artificial Sequence
  Description of Artificial Sequence: Synthetic oligonucleotide
uugauugugcuagauguac

SEQ ID NO: 1212865 - RNA, 19 nt, Artificial Sequence
  Description of Artificial Sequence: Synthetic oligonucleotide
uagaaauuucugacgcuga

SEQ ID NO: 1212866 - RNA, 19 nt, Artificial Sequence
  Description of Artificial Sequence: Synthetic oligonucleotide
ugacacuuccggaagcaug

SEQ ID NO: 1212867 - RNA, 19 nt, Artificial Sequence
  Description of Artificial Sequence: Synthetic oligonucleotide
ugauaggucuuuucagucu

SEQ ID NO: 1212868 - RNA, 19 nt, Artificial Sequence
  Description of Artificial Sequence: Synthetic oligonucleotide
gucgugaucugcuacuacc

SEQ ID NO: 1212869 - RNA, 19 nt, Artificial Sequence
  Description of Artificial Sequence: Synthetic oligonucleotide
uguaugaaaaggucccauc

SEQ ID NO: 1212870 - RNA, 19 nt, Artificial Sequence
  Description of Artificial Sequence: Synthetic oligonucleotide
ugacgcugaaacaucacau

SEQ ID NO: 1212871 - RNA, 19 nt, Artificial Sequence
  Description of Artificial Sequence: Synthetic oligonucleotide
cauuacuauuuucugagga

SEQ ID NO: 1212872 - RNA, 19 nt, Artificial Sequence
  Description of Artificial Sequence: Synthetic oligonucleotide
uugccuguugccaauaauu

SEQ ID NO: 1212873 - RNA, 19 nt, Artificial Sequence
  Description of Artificial Sequence: Synthetic oligonucleotide
ugcaucggccucucuaacg

SEQ ID NO: 1212874 - RNA, 19 nt, Artificial Sequence
  Description of Artificial Sequence: Synthetic oligonucleotide
gauauuucuucucgacaac

SEQ ID NO: 1212875 - RNA, 19 nt, Artificial Sequence
  Description of Artificial Sequence: Synthetic oligonucleotide
ugaacaaaucagucaacau

SEQ ID NO: 1212876 - RNA, 19 nt, Artificial Sequence
  Description of Artificial Sequence: Synthetic oligonucleotide
uucaugacccacuuuuaaa

SEQ ID NO: 1212877 - RNA, 19 nt, Artificial Sequence
  Description of Artificial Sequence: Synthetic oligonucleotide
ggucccaucagaucggcgg

SEQ ID NO: 1212878 - RNA, 19 nt, Artificial Sequence
  Description of Artificial Sequence: Synthetic oligonucleotide
augacgcaaggcccaaccc

SEQ ID NO: 1212879 - RNA, 19 nt, Artificial Sequence
  Description of Artificial Sequence: Synthetic oligonucleotide
ugaaauggauuuagcugcu

SEQ ID NO: 1212880 - RNA, 19 nt, Artificial Sequence
  Description of Artificial Sequence: Synthetic oligonucleotide
uucuaagcaggcauuugaa

SEQ ID NO: 1212881 - RNA, 19 nt, Artificial Sequence
  Description of Artificial Sequence: Synthetic oligonucleotide
uucugacgcugaaacauca

SEQ ID NO: 1212882 - RNA, 19 nt, Artificial Sequence
  Description of Artificial Sequence: Synthetic oligonucleotide
uugugcuagauguacuuuc

SEQ ID NO: 1212883 - RNA, 19 nt, Artificial Sequence
  Description of Artificial Sequence: Synthetic oligonucleotide
uaguaacuggacuccacca

SEQ ID NO: 1212884 - RNA, 19 nt, Artificial Sequence
  Description of Artificial Sequence: Synthetic oligonucleotide
cuuucuguuauguagucua

SEQ ID NO: 1212885 - RNA, 19 nt, Artificial Sequence
  Description of Artificial Sequence: Synthetic oligonucleotide
gaaaaggucccaucagauc

SEQ ID NO: 1212886 - RNA, 19 nt, Artificial Sequence
  Description of Artificial Sequence: Synthetic oligonucleotide
cuugacauagguuuaaaau

SEQ ID NO: 1212887 - RNA, 19 nt, Artificial Sequence
  Description of Artificial Sequence: Synthetic oligonucleotide
ucuaagcaggcauuugaaa

SEQ ID NO: 1212888 - RNA, 19 nt, Artificial Sequence
  Description of Artificial Sequence: Synthetic oligonucleotide
gacaucauuggucacagau

SEQ ID NO: 1212889 - RNA, 19 nt, Artificial Sequence
  Description of Artificial Sequence: Synthetic oligonucleotide
ugauugugcuagauguacu

SEQ ID NO: 1212890 - RNA, 19 nt, Artificial Sequence
  Description of Artificial Sequence: Synthetic oligonucleotide
ugccuguugccaauaauuc

SEQ ID NO: 1212891 - RNA, 19 nt, Artificial Sequence
  Description of Artificial Sequence: Synthetic oligonucleotide
uugucuauucucugagaga

SEQ ID NO: 1212892 - RNA, 19 nt, Artificial Sequence
  Description of Artificial Sequence: Synthetic oligonucleotide
caugacccacuuuuaaaug

SEQ ID NO: 1212893 - RNA, 19 nt, Artificial Sequence
  Description of Artificial Sequence: Synthetic oligonucleotide
agugccguuuucauggcac

SEQ ID NO: 1212894 - RNA, 19 nt, Artificial Sequence
  Description of Artificial Sequence: Synthetic oligonucleotide
uucauggcacucccuuagg

SEQ ID NO: 1212895 - RNA, 19 nt, Artificial Sequence
  Description of Artificial Sequence: Synthetic oligonucleotide
caauaguugcaucuuccac

SEQ ID NO: 1212896 - RNA, 19 nt, Artificial Sequence
  Description of Artificial Sequence: Synthetic oligonucleotide
aucagcuacaccaauaguu

SEQ ID NO: 1212897 - RNA, 19 nt, Artificial Sequence
  Description of Artificial Sequence: Synthetic oligonucleotide
gacauagguuuaaaauaag

SEQ ID NO: 1212898 - RNA, 19 nt, Artificial Sequence
  Description of Artificial Sequence: Synthetic oligonucleotide
acuuuuaaaugaaauggau

SEQ ID NO: 1212899 - RNA, 19 nt, Artificial Sequence
  Description of Artificial Sequence: Synthetic oligonucleotide
uaccaaacguauuuuguuu

SEQ ID NO: 1212900 - RNA, 19 nt, Artificial Sequence
  Description of Artificial Sequence: Synthetic oligonucleotide
gaguucaugauccuugccu

SEQ ID NO: 1212901 - RNA, 19 nt, Artificial Sequence
  Description of Artificial Sequence: Synthetic oligonucleotide
agacugucuugcucggugg

SEQ ID NO: 1212902 - RNA, 19 nt, Artificial Sequence
  Description of Artificial Sequence: Synthetic oligonucleotide
uuugauugugcuagaugua

SEQ ID NO: 1212903 - RNA, 19 nt, Artificial Sequence
  Description of Artificial Sequence: Synthetic oligonucleotide
acuaccgaaccuugcaaga

SEQ ID NO: 1212904 - RNA, 19 nt, Artificial Sequence
  Description of Artificial Sequence: Synthetic oligonucleotide
gaucugcuacuaccgaacc

SEQ ID NO: 1212905 - RNA, 19 nt, Artificial Sequence
  Description of Artificial Sequence: Synthetic oligonucleotide
accaagacggagauuuugg

SEQ ID NO: 1212906 - RNA, 19 nt, Artificial Sequence
  Description of Artificial Sequence: Synthetic oligonucleotide
uuaaaacuucaugacccac

SEQ ID NO: 1212907 - RNA, 19 nt, Artificial Sequence
  Description of Artificial Sequence: Synthetic oligonucleotide
aucggcggucacuacacuc

SEQ ID NO: 1212908 - RNA, 19 nt, Artificial Sequence
  Description of Artificial Sequence: Synthetic oligonucleotide
ugacccacuuuuaaaugaa

SEQ ID NO: 1212909 - RNA, 19 nt, Artificial Sequence
  Description of Artificial Sequence: Synthetic oligonucleotide
cuguuauguagucuaugac

SEQ ID NO: 1212910 - RNA, 19 nt, Artificial Sequence
  Description of Artificial Sequence: Synthetic oligonucleotide
gauuuagcugcuuugguuu

SEQ ID NO: 1212911 - RNA, 19 nt, Artificial Sequence
  Description of Artificial Sequence: Synthetic oligonucleotide
gagacaacuaccaaacgua

SEQ ID NO: 1212912 - RNA, 19 nt, Artificial Sequence
  Description of Artificial Sequence: Synthetic oligonucleotide
agucgugaucugcuacuac

SEQ ID NO: 1212913 - RNA, 19 nt, Artificial Sequence
  Description of Artificial Sequence: Synthetic oligonucleotide
guauauuaguuuguuuuca

SEQ ID NO: 1212914 - RNA, 19 nt, Artificial Sequence
  Description of Artificial Sequence: Synthetic oligonucleotide
acgcugaaacaucacauaa

SEQ ID NO: 1212915 - RNA, 19 nt, Artificial Sequence
  Description of Artificial Sequence: Synthetic oligonucleotide
agaaauuucugacgcugaa

SEQ ID NO: 1212916 - RNA, 19 nt, Artificial Sequence
  Description of Artificial Sequence: Synthetic oligonucleotide
ugcucaucccagguguugg

SEQ ID NO: 1212917 - RNA, 19 nt, Artificial Sequence
  Description of Artificial Sequence: Synthetic oligonucleotide
augauggacaccagugccg

SEQ ID NO: 1212918 - RNA, 19 nt, Artificial Sequence
  Description of Artificial Sequence: Synthetic oligonucleotide
agguauauauacauucuaa

SEQ ID NO: 1212919 - RNA, 19 nt, Artificial Sequence
  Description of Artificial Sequence: Synthetic oligonucleotide
agaucggcggucacuacac

SEQ ID NO: 1212920 - RNA, 19 nt, Artificial Sequence
  Description of Artificial Sequence: Synthetic oligonucleotide
cccacuuuuaaaugaaaug

SEQ ID NO: 1212921 - RNA, 19 nt, Artificial Sequence
  Description of Artificial Sequence: Synthetic oligonucleotide
uaccaagacggagauuuug

SEQ ID NO: 1212922 - RNA, 19 nt, Artificial Sequence
  Description of Artificial Sequence: Synthetic oligonucleotide
auuuaucuguucaaugaau

SEQ ID NO: 1212923 - RNA, 19 nt, Artificial Sequence
  Description of Artificial Sequence: Synthetic oligonucleotide
cagcuacaccaauaguugc

SEQ ID NO: 1212924 - RNA, 19 nt, Artificial Sequence
  Description of Artificial Sequence: Synthetic oligonucleotide
guaacuggacuccaccaga

SEQ ID NO: 1212925 - RNA, 19 nt, Artificial Sequence
  Description of Artificial Sequence: Synthetic oligonucleotide
uuucuguuauguagucuau

SEQ ID NO: 1212926 - RNA, 19 nt, Artificial Sequence
  Description of Artificial Sequence: Synthetic oligonucleotide
cugagacaacuaccaaacg

SEQ ID NO: 1212927 - RNA, 19 nt, Artificial Sequence
  Description of Artificial Sequence: Synthetic oligonucleotide
cucacauaaggccugaggu

SEQ ID NO: 1212928 - RNA, 19 nt, Artificial Sequence
  Description of Artificial Sequence: Synthetic oligonucleotide
gaguucuggauaugccaug

SEQ ID NO: 1212929 - RNA, 19 nt, Artificial Sequence
  Description of Artificial Sequence: Synthetic oligonucleotide
auacuucuguuauguauau

SEQ ID NO: 1212930 - RNA, 19 nt, Artificial Sequence
  Description of Artificial Sequence: Synthetic oligonucleotide
ucucuaacggcagcuacaa

SEQ ID NO: 1212931 - RNA, 19 nt, Artificial Sequence
  Description of Artificial Sequence: Synthetic oligonucleotide
uuuucagucuggccccagu

SEQ ID NO: 1212932 - RNA, 19 nt, Artificial Sequence
  Description of Artificial Sequence: Synthetic oligonucleotide
gcaucggccucucuaacgg

SEQ ID NO: 1212933 - RNA, 19 nt, Artificial Sequence
  Description of Artificial Sequence: Synthetic oligonucleotide
agucaugaggacacuccac

SEQ ID NO: 1212934 - RNA, 19 nt, Artificial Sequence
  Description of Artificial Sequence: Synthetic oligonucleotide
uucuucucgacaacauauu

SEQ ID NO: 1212935 - RNA, 19 nt, Artificial Sequence
  Description of Artificial Sequence: Synthetic oligonucleotide
caagagauaaagacugucu

SEQ ID NO: 1212936 - RNA, 19 nt, Artificial Sequence
  Description of Artificial Sequence: Synthetic oligonucleotide
guagucuaugacgcaaggc

SEQ ID NO: 1212937 - RNA, 19 nt, Artificial Sequence
  Description of Artificial Sequence: Synthetic oligonucleotide
uggugucuuguucucuaac

SEQ ID NO: 1212938 - RNA, 19 nt, Artificial Sequence
  Description of Artificial Sequence: Synthetic oligonucleotide
aauauucgccugguaugcu

SEQ ID NO: 1212939 - RNA, 19 nt, Artificial Sequence
  Description of Artificial Sequence: Synthetic oligonucleotide
gaacauuuggaaauacggu

SEQ ID NO: 1212940 - RNA, 19 nt, Artificial Sequence
  Description of Artificial Sequence: Synthetic oligonucleotide
ucacaacuugacauagguu

SEQ ID NO: 1212941 - RNA, 19 nt, Artificial Sequence
  Description of Artificial Sequence: Synthetic oligonucleotide
caggcauauacuguuugac

SEQ ID NO: 1212942 - RNA, 19 nt, Artificial Sequence
  Description of Artificial Sequence: Synthetic oligonucleotide
uguauacuucuguuaugua

SEQ ID NO: 1212943 - RNA, 19 nt, Artificial Sequence
  Description of Artificial Sequence: Synthetic oligonucleotide
uuuagucggcucugaggga

SEQ ID NO: 1212944 - RNA, 19 nt, Artificial Sequence
  Description of Artificial Sequence: Synthetic oligonucleotide
aguucuggauaugccauga

SEQ ID NO: 1212945 - RNA, 19 nt, Artificial Sequence
  Description of Artificial Sequence: Synthetic oligonucleotide
cauaacccauuuugugaac

SEQ ID NO: 1212946 - RNA, 19 nt, Artificial Sequence
  Description of Artificial Sequence: Synthetic oligonucleotide
uuggaaauacgguguguuu

SEQ ID NO: 1212947 - RNA, 19 nt, Artificial Sequence
  Description of Artificial Sequence: Synthetic oligonucleotide
cuaccgaaccuugcaagag

SEQ ID NO: 1212948 - RNA, 19 nt, Artificial Sequence
  Description of Artificial Sequence: Synthetic oligonucleotide
aguguauucuuugcuacuu

SEQ ID NO: 1212949 - RNA, 19 nt, Artificial Sequence
  Description of Artificial Sequence: Synthetic oligonucleotide
aucugcuacuaccgaaccu

SEQ ID NO: 1212950 - RNA, 19 nt, Artificial Sequence
  Description of Artificial Sequence: Synthetic oligonucleotide
gcccaacccauucagacug

SEQ ID NO: 1212951 - RNA, 19 nt, Artificial Sequence
  Description of Artificial Sequence: Synthetic oligonucleotide
gcggucacuacacuccacg

SEQ ID NO: 1212952 - RNA, 19 nt, Artificial Sequence
  Description of Artificial Sequence: Synthetic oligonucleotide
gcaguguauucuuugcuac

SEQ ID NO: 1212953 - RNA, 19 nt, Artificial Sequence
  Description of Artificial Sequence: Synthetic oligonucleotide
uguuuggcucuuccaaauu

SEQ ID NO: 1212954 - RNA, 19 nt, Artificial Sequence
  Description of Artificial Sequence: Synthetic oligonucleotide
ucggccucucuaacggcag

SEQ ID NO: 1212955 - RNA, 19 nt, Artificial Sequence
  Description of Artificial Sequence: Synthetic oligonucleotide
gugcuagauguacuuucag

SEQ ID NO: 1212956 - RNA, 19 nt, Artificial Sequence
  Description of Artificial Sequence: Synthetic oligonucleotide
uccaagaguucaugauccu

SEQ ID NO: 1212957 - RNA, 19 nt, Artificial Sequence
  Description of Artificial Sequence: Synthetic oligonucleotide
caagacggagauuuuggaa

SEQ ID NO: 1212958 - RNA, 19 nt, Artificial Sequence
  Description of Artificial Sequence: Synthetic oligonucleotide
caguaugaucucucaggac

SEQ ID NO: 1212959 - RNA, 19 nt, Artificial Sequence
  Description of Artificial Sequence: Synthetic oligonucleotide
cugucgcuuguaugaaaag

SEQ ID NO: 1212960 - RNA, 19 nt, Artificial Sequence
  Description of Artificial Sequence: Synthetic oligonucleotide
cuggauaugccaugaugga

SEQ ID NO: 1212961 - RNA, 19 nt, Artificial Sequence
  Description of Artificial Sequence: Synthetic oligonucleotide
acaugacuccugucgcuug

SEQ ID NO: 1212962 - RNA, 19 nt, Artificial Sequence
  Description of Artificial Sequence: Synthetic oligonucleotide
gucggcgcaguguuuggag

SEQ ID NO: 1212963 - RNA, 19 nt, Artificial Sequence
  Description of Artificial Sequence: Synthetic oligonucleotide
agcuacaccaauaguugca

SEQ ID NO: 1212964 - RNA, 19 nt, Artificial Sequence
  Description of Artificial Sequence: Synthetic oligonucleotide
uaacggcagcuacaacucu

SEQ ID NO: 1212965 - RNA, 19 nt, Artificial Sequence
  Description of Artificial Sequence: Synthetic oligonucleotide
cagaauauucgccugguau

SEQ ID NO: 1212966 - RNA, 19 nt, Artificial Sequence
  Description of Artificial Sequence: Synthetic oligonucleotide
gagaaauuaugaucuguuu

SEQ ID NO: 1212967 - RNA, 19 nt, Artificial Sequence
  Description of Artificial Sequence: Synthetic oligonucleotide
gguggacucucucacauaa

SEQ ID NO: 1212968 - RNA, 19 nt, Artificial Sequence
  Description of Artificial Sequence: Synthetic oligonucleotide
acggcagcuacaacucugg

SEQ ID NO: 1212969 - RNA, 19 nt, Artificial Sequence
  Description of Artificial Sequence: Synthetic oligonucleotide
cauucuaagcaggcauuug

SEQ ID NO: 1212970 - RNA, 19 nt, Artificial Sequence
  Description of Artificial Sequence: Synthetic oligonucleotide
auccucuaccaagacggag

SEQ ID NO: 1212971 - RNA, 19 nt, Artificial Sequence
  Description of Artificial Sequence: Synthetic oligonucleotide
acgggcuucccaccgugag

SEQ ID NO: 1212972 - RNA, 19 nt, Artificial Sequence
  Description of Artificial Sequence: Synthetic oligonucleotide
cucucuaacggcagcuaca

SEQ ID NO: 1212973 - RNA, 19 nt, Artificial Sequence
  Description of Artificial Sequence: Synthetic oligonucleotide
gcuacuaccgaaccuugca

SEQ ID NO: 1212974 - RNA, 19 nt, Artificial Sequence
  Description of Artificial Sequence: Synthetic oligonucleotide
ucggcgcaguguuuggaga

SEQ ID NO: 1212975 - RNA, 19 nt, Artificial Sequence
  Description of Artificial Sequence: Synthetic oligonucleotide
cuaacacugcaucggccuc

SEQ ID NO: 1212976 - RNA, 19 nt, Artificial Sequence
  Description of Artificial Sequence: Synthetic oligonucleotide
gugaucugcuacuaccgaa

SEQ ID NO: 1212977 - RNA, 19 nt, Artificial Sequence
  Description of Artificial Sequence: Synthetic oligonucleotide
cagauguccaguaguaacu

SEQ ID NO: 1212978 - RNA, 19 nt, Artificial Sequence
  Description of Artificial Sequence: Synthetic oligonucleotide
ucgccugguaugcuccaac

SEQ ID NO: 1212979 - RNA, 19 nt, Artificial Sequence
  Description of Artificial Sequence: Synthetic oligonucleotide
acauccgcuuucuguuaug

SEQ ID NO: 1212980 - RNA, 19 nt, Artificial Sequence
  Description of Artificial Sequence: Synthetic oligonucleotide
guagucgugaucugcuacu

SEQ ID NO: 1212981 - RNA, 19 nt, Artificial Sequence
  Description of Artificial Sequence: Synthetic oligonucleotide
aucagucaacaugacuccu

SEQ ID NO: 1212982 - RNA, 19 nt, Artificial Sequence
  Description of Artificial Sequence: Synthetic oligonucleotide
aggauugcgguugaacauu

SEQ ID NO: 1212983 - RNA, 19 nt, Artificial Sequence
  Description of Artificial Sequence: Synthetic oligonucleotide
uggucggcgcaguguuugg

SEQ ID NO: 1212984 - RNA, 19 nt, Artificial Sequence
  Description of Artificial Sequence: Synthetic oligonucleotide
gugcuaagauauuucuucu

SEQ ID NO: 1212985 - RNA, 19 nt, Artificial Sequence
  Description of Artificial Sequence: Synthetic oligonucleotide
gguguugggguggucggcg

SEQ ID NO: 1212986 - RNA, 19 nt, Artificial Sequence
  Description of Artificial Sequence: Synthetic oligonucleotide
ggacucucucacauaaggc

SEQ ID NO: 1212987 - RNA, 19 nt, Artificial Sequence
  Description of Artificial Sequence: Synthetic oligonucleotide
aggacagcacauccgcuuu

SEQ ID NO: 1212988 - RNA, 19 nt, Artificial Sequence
  Description of Artificial Sequence: Synthetic oligonucleotide
agacauuuugauaggucuu

SEQ ID NO: 1212989 - RNA, 19 nt, Artificial Sequence
  Description of Artificial Sequence: Synthetic oligonucleotide
auugugcuagauguacuuu

SEQ ID NO: 1212990 - RNA, 19 nt, Artificial Sequence
  Description of Artificial Sequence: Synthetic oligonucleotide
caucggccucucuaacggc

SEQ ID NO: 1212991 - RNA, 19 nt, Artificial Sequence
  Description of Artificial Sequence: Synthetic oligonucleotide
gucuaugacgcaaggccca

SEQ ID NO: 1212992 - RNA, 19 nt, Artificial Sequence
  Description of Artificial Sequence: Synthetic oligonucleotide
cuguuauguauauuaguuu

SEQ ID NO: 1212993 - RNA, 19 nt, Artificial Sequence
  Description of Artificial Sequence: Synthetic oligonucleotide
ucuaugacgcaaggcccaa

SEQ ID NO: 1212994 - RNA, 19 nt, Artificial Sequence
  Description of Artificial Sequence: Synthetic oligonucleotide
cuacuaccgaaccuugcaa

SEQ ID NO: 1212995 - RNA, 19 nt, Artificial Sequence
  Description of Artificial Sequence: Synthetic oligonucleotide
cagaucggcggucacuaca

SEQ ID NO: 1212996 - RNA, 19 nt, Artificial Sequence
  Description of Artificial Sequence: Synthetic oligonucleotide
gauugcgguugaacauuug

SEQ ID NO: 1212997 - RNA, 19 nt, Artificial Sequence
  Description of Artificial Sequence: Synthetic oligonucleotide
aucuagguauauauacauu

SEQ ID NO: 1212998 - RNA, 19 nt, Artificial Sequence
  Description of Artificial Sequence: Synthetic oligonucleotide
ggaaacggccaucuuucca

SEQ ID NO: 1212999 - RNA, 19 nt, Artificial Sequence
  Description of Artificial Sequence: Synthetic oligonucleotide
acauaaggccugaggugag

SEQ ID NO: 1213000 - RNA, 19 nt, Artificial Sequence
  Description of Artificial Sequence: Synthetic oligonucleotide
cagucuggccccaguauga

SEQ ID NO: 1213001 - RNA, 19 nt, Artificial Sequence
  Description of Artificial Sequence: Synthetic oligonucleotide
accgaaccuugcaagagau

SEQ ID NO: 1213002 - RNA, 19 nt, Artificial Sequence
  Description of Artificial Sequence: Synthetic oligonucleotide
auggugucuuguucucuaa

SEQ ID NO: 1213003 - RNA, 19 nt, Artificial Sequence
  Description of Artificial Sequence: Synthetic oligonucleotide
gauguacuuucaggcggac

SEQ ID NO: 1213004 - RNA, 19 nt, Artificial Sequence
  Description of Artificial Sequence: Synthetic oligonucleotide
cuucucgacaacauauuuu

SEQ ID NO: 1213005 - RNA, 19 nt, Artificial Sequence
  Description of Artificial Sequence: Synthetic oligonucleotide
guaugcuccaacugggauu

SEQ ID NO: 1213006 - RNA, 19 nt, Artificial Sequence
  Description of Artificial Sequence: Synthetic oligonucleotide
ucagaucggcggucacuac

SEQ ID NO: 1213007 - RNA, 19 nt, Artificial Sequence
  Description of Artificial Sequence: Synthetic oligonucleotide
auguagucgugaucugcua

SEQ ID NO: 1213008 - RNA, 19 nt, Artificial Sequence
  Description of Artificial Sequence: Synthetic oligonucleotide
auucgccugguaugcucca

SEQ ID NO: 1213009 - RNA, 19 nt, Artificial Sequence
  Description of Artificial Sequence: Synthetic oligonucleotide
aagcgcuggcagaugcuca

SEQ ID NO: 1213010 - RNA, 19 nt, Artificial Sequence
  Description of Artificial Sequence: Synthetic oligonucleotide
aucggccucucuaacggca

SEQ ID NO: 1213011 - RNA, 19 nt, Artificial Sequence
  Description of Artificial Sequence: Synthetic oligonucleotide
gcgguugaacauuuggaaa

SEQ ID NO: 1213012 - RNA, 19 nt, Artificial Sequence
  Description of Artificial Sequence: Synthetic oligonucleotide
auguacuuucaggcggacu

SEQ ID NO: 1213013 - RNA, 19 nt, Artificial Sequence
  Description of Artificial Sequence: Synthetic oligonucleotide
uagucggcucugagggagu

SEQ ID NO: 1213014 - RNA, 19 nt, Artificial Sequence
  Description of Artificial Sequence: Synthetic oligonucleotide
uagucgugaucugcuacua

SEQ ID NO: 1213015 - RNA, 19 nt, Artificial Sequence
  Description of Artificial Sequence: Synthetic oligonucleotide
uugcucgguggacucucuc

SEQ ID NO: 1213016 - RNA, 19 nt, Artificial Sequence
  Description of Artificial Sequence: Synthetic oligonucleotide
cacccaagucaugaggaca

SEQ ID NO: 1213017 - RNA, 19 nt, Artificial Sequence
  Description of Artificial Sequence: Synthetic oligonucleotide
guggacucucucacauaag

SEQ ID NO: 1213018 - RNA, 19 nt, Artificial Sequence
  Description of Artificial Sequence: Synthetic oligonucleotide
gccugguaugcuccaacug

SEQ ID NO: 1213019 - RNA, 19 nt, Artificial Sequence
  Description of Artificial Sequence: Synthetic oligonucleotide
acuccaccacauaaggauu

SEQ ID NO: 1213020 - RNA, 19 nt, Artificial Sequence
  Description of Artificial Sequence: Synthetic oligonucleotide
caaacguauuuuguuuucu

SEQ ID NO: 1213021 - RNA, 19 nt, Artificial Sequence
  Description of Artificial Sequence: Synthetic oligonucleotide
ggauuuagcugcuuugguu

SEQ ID NO: 1213022 - RNA, 19 nt, Artificial Sequence
  Description of Artificial Sequence: Synthetic oligonucleotide
ccguuuucauggcacuccc

SEQ ID NO: 1213023 - RNA, 19 nt, Artificial Sequence
  Description of Artificial Sequence: Synthetic oligonucleotide
cugcaucggccucucuaac

SEQ ID NO: 1213024 - RNA, 19 nt, Artificial Sequence
  Description of Artificial Sequence: Synthetic oligonucleotide
cucuaacggcagcuacaac

SEQ ID NO: 1213025 - RNA, 19 nt, Artificial Sequence
  Description of Artificial Sequence: Synthetic oligonucleotide
gauccucuaccaagacgga

SEQ ID NO: 1213026 - RNA, 19 nt, Artificial Sequence
  Description of Artificial Sequence: Synthetic oligonucleotide
auccgcuuucuguuaugua

SEQ ID NO: 1213027 - RNA, 19 nt, Artificial Sequence
  Description of Artificial Sequence: Synthetic oligonucleotide
cagucaacaugacuccugu

SEQ ID NO: 1213028 - RNA, 19 nt, Artificial Sequence
  Description of Artificial Sequence: Synthetic oligonucleotide
aggaaagcgcuggcagaug

SEQ ID NO: 1213029 - RNA, 19 nt, Artificial Sequence
  Description of Artificial Sequence: Synthetic oligonucleotide
gacgcaaggcccaacccau

SEQ ID NO: 1213030 - RNA, 19 nt, Artificial Sequence
  Description of Artificial Sequence: Synthetic oligonucleotide
uacacuccacgggcuuccc

SEQ ID NO: 1213031 - RNA, 19 nt, Artificial Sequence
  Description of Artificial Sequence: Synthetic oligonucleotide
ccaagacggagauuuugga

SEQ ID NO: 1213032 - RNA, 19 nt, Artificial Sequence
  Description of Artificial Sequence: Synthetic oligonucleotide
cuaugacgcaaggcccaac

SEQ ID NO: 1213033 - RNA, 19 nt, Artificial Sequence
  Description of Artificial Sequence: Synthetic oligonucleotide
gacaacuaccaaacguauu

SEQ ID NO: 1213034 - RNA, 19 nt, Artificial Sequence
  Description of Artificial Sequence: Synthetic oligonucleotide
cggucacuacacuccacgg

SEQ ID NO: 1213035 - RNA, 19 nt, Artificial Sequence
  Description of Artificial Sequence: Synthetic oligonucleotide
gucccaucagaucggcggu

SEQ ID NO: 1213036 - RNA, 19 nt, Artificial Sequence
  Description of Artificial Sequence: Synthetic oligonucleotide
cuugccuguugccaauaau

SEQ ID NO: 1213037 - RNA, 19 nt, Artificial Sequence
  Description of Artificial Sequence: Synthetic oligonucleotide
cagugccguuuucauggca

SEQ ID NO: 1213038 - RNA, 19 nt, Artificial Sequence
  Description of Artificial Sequence: Synthetic oligonucleotide
gcggacugacacuuccgga

SEQ ID NO: 1213039 - RNA, 19 nt, Artificial Sequence
  Description of Artificial Sequence: Synthetic oligonucleotide
cauccgcuuucuguuaugu

SEQ ID NO: 1213040 - RNA, 19 nt, Artificial Sequence
  Description of Artificial Sequence: Synthetic oligonucleotide
uucccaccgugagcaggug

SEQ ID NO: 1213041 - RNA, 19 nt, Artificial Sequence
  Description of Artificial Sequence: Synthetic oligonucleotide
ccagugccguuuucauggc

SEQ ID NO: 1213042 - RNA, 19 nt, Artificial Sequence
  Description of Artificial Sequence: Synthetic oligonucleotide
gugccguuuucauggcacu

SEQ ID NO: 1213043 - RNA, 19 nt, Artificial Sequence
  Description of Artificial Sequence: Synthetic oligonucleotide
cggacugacacuuccggaa

SEQ ID NO: 1213044 - RNA, 19 nt, Artificial Sequence
  Description of Artificial Sequence: Synthetic oligonucleotide
gaucggcggucacuacacu

SEQ ID NO: 1213045 - RNA, 19 nt, Artificial Sequence
  Description of Artificial Sequence: Synthetic oligonucleotide
cgguugaacauuuggaaau

SEQ ID NO: 1213046 - RNA, 19 nt, Artificial Sequence
  Description of Artificial Sequence: Synthetic oligonucleotide
caucagaucggcggucacu

SEQ ID NO: 1213047 - RNA, 19 nt, Artificial Sequence
  Description of Artificial Sequence: Synthetic oligonucleotide
cacauccgcuuucuguuau

SEQ ID NO: 1213048 - RNA, 19 nt, Artificial Sequence
  Description of Artificial Sequence: Synthetic oligonucleotide
gacggagauuuuggaauuu

SEQ ID NO: 1213049 - RNA, 19 nt, Artificial Sequence
  Description of Artificial Sequence: Synthetic oligonucleotide
gucuauucucugagagaua

SEQ ID NO: 1213050 - RNA, 19 nt, Artificial Sequence
  Description of Artificial Sequence: Synthetic oligonucleotide
ggcccaacccauucagacu

SEQ ID NO: 1213051 - RNA, 19 nt, Artificial Sequence
  Description of Artificial Sequence: Synthetic oligonucleotide
gcuacaccaauaguugcau

SEQ ID NO: 1213052 - RNA, 19 nt, Artificial Sequence
  Description of Artificial Sequence: Synthetic oligonucleotide
cacucccuuaggacuuucu

SEQ ID NO: 1213053 - RNA, 19 nt, Artificial Sequence
  Description of Artificial Sequence: Synthetic oligonucleotide
ccgcuuucuguuauguagu

SEQ ID NO: 1213054 - RNA, 19 nt, Artificial Sequence
  Description of Artificial Sequence: Synthetic oligonucleotide
gucggcucugagggaguca

SEQ ID NO: 1213055 - RNA, 19 nt, Artificial Sequence
  Description of Artificial Sequence: Synthetic oligonucleotide
ccaucagaucggcggucac

SEQ ID NO: 1213056 - RNA, 19 nt, Artificial Sequence
  Description of Artificial Sequence: Synthetic oligonucleotide
ccggaagcaugagaaauua

SEQ ID NO: 1213057 - RNA, 19 nt, Artificial Sequence
  Description of Artificial Sequence: Synthetic oligonucleotide
cuaccaagacggagauuuu

SEQ ID NO: 1213058 - RNA, 19 nt, Artificial Sequence
  Description of Artificial Sequence: Synthetic oligonucleotide
ggacaccagugccguuuuc

SEQ ID NO: 1213059 - RNA, 19 nt, Artificial Sequence
  Description of Artificial Sequence: Synthetic oligonucleotide
gcgcaguguuuggagagaa

SEQ ID NO: 1213060 - RNA, 19 nt, Artificial Sequence
  Description of Artificial Sequence: Synthetic oligonucleotide
ggguggucggcgcaguguu

SEQ ID NO: 1213061 - RNA, 19 nt, Artificial Sequence
  Description of Artificial Sequence: Synthetic oligonucleotide
cccaucagaucggcgguca

SEQ ID NO: 1213062 - RNA, 19 nt, Artificial Sequence
  Description of Artificial Sequence: Synthetic oligonucleotide
cugacacuuccggaagcau

SEQ ID NO: 1213063 - RNA, 19 nt, Artificial Sequence
  Description of Artificial Sequence: Synthetic oligonucleotide
ccucuaccaagacggagau

SEQ ID NO: 1213064 - RNA, 19 nt, Artificial Sequence
  Description of Artificial Sequence: Synthetic oligonucleotide
acgcaaggcccaacccauu

SEQ ID NO: 1213065 - RNA, 19 nt, Artificial Sequence
  Description of Artificial Sequence: Synthetic oligonucleotide
ccaccagagugagaguucu

SEQ ID NO: 1213066 - RNA, 19 nt, Artificial Sequence
  Description of Artificial Sequence: Synthetic oligonucleotide
ccgaaccuugcaagagaua

SEQ ID NO: 1213067 - RNA, 19 nt, Artificial Sequence
  Description of Artificial Sequence: Synthetic oligonucleotide
gcgcuggcagaugcucauc

SEQ ID NO: 1213068 - RNA, 19 nt, Artificial Sequence
  Description of Artificial Sequence: Synthetic oligonucleotide
cgccugguaugcuccaacu

SEQ ID NO: 1213069 - RNA, 19 nt, Artificial Sequence
  Description of Artificial Sequence: Synthetic oligonucleotide
cggaagcaugagaaauuau

SEQ ID NO: 1213070 - RNA, 19 nt, Artificial Sequence
  Description of Artificial Sequence: Synthetic oligonucleotide
cgguggacucucucacaua

SEQ ID NO: 1213071 - RNA, 19 nt, Artificial Sequence
  Description of Artificial Sequence: Synthetic oligonucleotide
gguggucggcgcaguguuu

SEQ ID NO: 1213072 - RNA, 19 nt, Artificial Sequence
  Description of Artificial Sequence: Synthetic oligonucleotide
cccaagucaugaggacacu

SEQ ID NO: 1213073 - RNA, 19 nt, Artificial Sequence
  Description of Artificial Sequence: Synthetic oligonucleotide
gccugaggugagacauuuu

SEQ ID NO: 1213074 - RNA, 19 nt, Artificial Sequence
  Description of Artificial Sequence: Synthetic oligonucleotide
cuugagaaaaucaauaucc

SEQ ID NO: 1213075 - RNA, 19 nt, Artificial Sequence
  Description of Artificial Sequence: Synthetic oligonucleotide
uguagaagcuccaagagcc

SEQ ID NO: 1213076 - RNA, 19 nt, Artificial Sequence
  Description of Artificial Sequence: Synthetic oligonucleotide
aaaucaauaucccuugaag

SEQ ID NO: 1213077 - RNA, 19 nt, Artificial Sequence
  Description of Artificial Sequence: Synthetic oligonucleotide
aaucaaauaagggacgaac

SEQ ID NO: 1213078 - RNA, 19 nt, Artificial Sequence
  Description of Artificial Sequence: Synthetic oligonucleotide
aauaccuccuguaagcgcc

SEQ ID NO: 1213079 - RNA, 19 nt, Artificial Sequence
  Description of Artificial Sequence: Synthetic oligonucleotide
cuucucauacgaaugaagg

SEQ ID NO: 1213080 - RNA, 19 nt, Artificial Sequence
  Description of Artificial Sequence: Synthetic oligonucleotide
aauaugacccacauuuugg

SEQ ID NO: 1213081 - RNA, 19 nt, Artificial Sequence
  Description of Artificial Sequence: Synthetic oligonucleotide
gaucuucuuaguuagagca

SEQ ID NO: 1213082 - RNA, 19 nt, Artificial Sequence
  Description of Artificial Sequence: Synthetic oligonucleotide
uuaguuagagcagagguca

SEQ ID NO: 1213083 - RNA, 19 nt, Artificial Sequence
  Description of Artificial Sequence: Synthetic oligonucleotide
ucuguccgagcaaugaugg

SEQ ID NO: 1213084 - RNA, 19 nt, Artificial Sequence
  Description of Artificial Sequence: Synthetic oligonucleotide
aaauaucgguucuggcugc

SEQ ID NO: 1213085 - RNA, 19 nt, Artificial Sequence
  Description of Artificial Sequence: Synthetic oligonucleotide
agucgauauacccaggaag

SEQ ID NO: 1213086 - RNA, 19 nt, Artificial Sequence
  Description of Artificial Sequence: Synthetic oligonucleotide
uaagggacgaacuugugga

SEQ ID NO: 1213087 - RNA, 19 nt, Artificial Sequence
  Description of Artificial Sequence: Synthetic oligonucleotide
gauauacccaggaagaaug

SEQ ID NO: 1213088 - RNA, 19 nt, Artificial Sequence
  Description of Artificial Sequence: Synthetic oligonucleotide
auaagggacgaacuugugg

SEQ ID NO: 1213089 - RNA, 19 nt, Artificial Sequence
  Description of Artificial Sequence: Synthetic oligonucleotide
uugagaaaaucaauauccc

SEQ ID NO: 1213090 - RNA, 19 nt, Artificial Sequence
  Description of Artificial Sequence: Synthetic oligonucleotide
gaaacggucaugcucuucc

SEQ ID NO: 1213091 - RNA, 19 nt, Artificial Sequence
  Description of Artificial Sequence: Synthetic oligonucleotide
ugaguaaugcagauggaac

SEQ ID NO: 1213092 - RNA, 19 nt, Artificial Sequence
  Description of Artificial Sequence: Synthetic oligonucleotide
aaaaucaauaucccuugaa

SEQ ID NO: 1213093 - RNA, 19 nt, Artificial Sequence
  Description of Artificial Sequence: Synthetic oligonucleotide
caagagaacccauaccacg

SEQ ID NO: 1213094 - RNA, 19 nt, Artificial Sequence
  Description of Artificial Sequence: Synthetic oligonucleotide
agaaugagaaaaucguugu

SEQ ID NO: 1213095 - RNA, 19 nt, Artificial Sequence
  Description of Artificial Sequence: Synthetic oligonucleotide
accagcaagagccaguaag

SEQ ID NO: 1213096 - RNA, 19 nt, Artificial Sequence
  Description of Artificial Sequence: Synthetic oligonucleotide
acuuggguuaaacucuugg

SEQ ID NO: 1213097 - RNA, 19 nt, Artificial Sequence
  Description of Artificial Sequence: Synthetic oligonucleotide
aggaagaaugagaaaaucg

SEQ ID NO: 1213098 - RNA, 19 nt, Artificial Sequence
  Description of Artificial Sequence: Synthetic oligonucleotide
ucucauacgaaugaaggcu

SEQ ID NO: 1213099 - RNA, 19 nt, Artificial Sequence
  Description of Artificial Sequence: Synthetic oligonucleotide
uccucaugaguaccaaugg

SEQ ID NO: 1213100 - RNA, 19 nt, Artificial Sequence
  Description of Artificial Sequence: Synthetic oligonucleotide
uuuacugcgcugcagaauu

SEQ ID NO: 1213101 - RNA, 19 nt, Artificial Sequence
  Description of Artificial Sequence: Synthetic oligonucleotide
gacuacauugccuccaaug

SEQ ID NO: 1213102 - RNA, 19 nt, Artificial Sequence
  Description of Artificial Sequence: Synthetic oligonucleotide
aagagaacccauaccacgg

SEQ ID NO: 1213103 - RNA, 19 nt, Artificial Sequence
  Description of Artificial Sequence: Synthetic oligonucleotide
aguaaguccagccuauacu

SEQ ID NO: 1213104 - RNA, 19 nt, Artificial Sequence
  Description of Artificial Sequence: Synthetic oligonucleotide
caauggguaaucacgauuc

SEQ ID NO: 1213105 - RNA, 19 nt, Artificial Sequence
  Description of Artificial Sequence: Synthetic oligonucleotide
aggugaggaaaccaguggg

SEQ ID NO: 1213106 - RNA, 19 nt, Artificial Sequence
  Description of Artificial Sequence: Synthetic oligonucleotide
aucacgauucuucuucagg

SEQ ID NO: 1213107 - RNA, 19 nt, Artificial Sequence
  Description of Artificial Sequence: Synthetic oligonucleotide
uccccagaguacaucaugg

SEQ ID NO: 1213108 - RNA, 19 nt, Artificial Sequence
  Description of Artificial Sequence: Synthetic oligonucleotide
uggguaaucacgauucuuc

SEQ ID NO: 1213109 - RNA, 19 nt, Artificial Sequence
  Description of Artificial Sequence: Synthetic oligonucleotide
uucucauacgaaugaaggc

SEQ ID NO: 1213110 - RNA, 19 nt, Artificial Sequence
  Description of Artificial Sequence: Synthetic oligonucleotide
uguggauagacccuuuguc

SEQ ID NO: 1213111 - RNA, 19 nt, Artificial Sequence
  Description of Artificial Sequence: Synthetic oligonucleotide
uggaucucuuuucagaaaa

SEQ ID NO: 1213112 - RNA, 19 nt, Artificial Sequence
  Description of Artificial Sequence: Synthetic oligonucleotide
cuuggguuaaacucuuggc

SEQ ID NO: 1213113 - RNA, 19 nt, Artificial Sequence
  Description of Artificial Sequence: Synthetic oligonucleotide
agaaaugaugcccaccagu

SEQ ID NO: 1213114 - RNA, 19 nt, Artificial Sequence
  Description of Artificial Sequence: Synthetic oligonucleotide
ucaaauaagggacgaacuu

SEQ ID NO: 1213115 - RNA, 19 nt, Artificial Sequence
  Description of Artificial Sequence: Synthetic oligonucleotide
ucacgauucuucuucaggu

SEQ ID NO: 1213116 - RNA, 19 nt, Artificial Sequence
  Description of Artificial Sequence: Synthetic oligonucleotide
uugaucauauugauuugga

SEQ ID NO: 1213117 - RNA, 19 nt, Artificial Sequence
  Description of Artificial Sequence: Synthetic oligonucleotide
aaauccacuuggucggcag

SEQ ID NO: 1213118 - RNA, 19 nt, Artificial Sequence
  Description of Artificial Sequence: Synthetic oligonucleotide
agguguacaguuguggugg

SEQ ID NO: 1213119 - RNA, 19 nt, Artificial Sequence
  Description of Artificial Sequence: Synthetic oligonucleotide
acugaaauaucgguucugg

SEQ ID NO: 1213120 - RNA, 19 nt, Artificial Sequence
  Description of Artificial Sequence: Synthetic oligonucleotide
uacgaaugaaggcugugga

SEQ ID NO: 1213121 - RNA, 19 nt, Artificial Sequence
  Description of Artificial Sequence: Synthetic oligonucleotide
guggauagacccuuugucc

SEQ ID NO: 1213122 - RNA, 19 nt, Artificial Sequence
  Description of Artificial Sequence: Synthetic oligonucleotide
ugaucuucuuaguuagagc

SEQ ID NO: 1213123 - RNA, 19 nt, Artificial Sequence
  Description of Artificial Sequence: Synthetic oligonucleotide
caauaugacccacauuuug

SEQ ID NO: 1213124 - RNA, 19 nt, Artificial Sequence
  Description of Artificial Sequence: Synthetic oligonucleotide
cuuaguuagagcagagguc

SEQ ID NO: 1213125 - RNA, 19 nt, Artificial Sequence
  Description of Artificial Sequence: Synthetic oligonucleotide
uuggucggcagugaagucg

SEQ ID NO: 1213126 - RNA, 19 nt, Artificial Sequence
  Description of Artificial Sequence: Synthetic oligonucleotide
ugacuguagaagcuccaag

SEQ ID NO: 1213127 - RNA, 19 nt, Artificial Sequence
  Description of Artificial Sequence: Synthetic oligonucleotide
aagaaaugaugcccaccag

SEQ ID NO: 1213128 - RNA, 19 nt, Artificial Sequence
  Description of Artificial Sequence: Synthetic oligonucleotide
cuuggcuugagcagcagug

SEQ ID NO: 1213129 - RNA, 19 nt, Artificial Sequence
  Description of Artificial Sequence: Synthetic oligonucleotide
uacuggaucucuuuucaga

SEQ ID NO: 1213130 - RNA, 19 nt, Artificial Sequence
  Description of Artificial Sequence: Synthetic oligonucleotide
uggauagacccuuuguccu

SEQ ID NO: 1213131 - RNA, 19 nt, Artificial Sequence
  Description of Artificial Sequence: Synthetic oligonucleotide
uccuugagaaaaucaauau

SEQ ID NO: 1213132 - RNA, 19 nt, Artificial Sequence
  Description of Artificial Sequence: Synthetic oligonucleotide
uuuacuuuccgaacuucau

SEQ ID NO: 1213133 - RNA, 19 nt, Artificial Sequence
  Description of Artificial Sequence: Synthetic oligonucleotide
ucaagagaacccauaccac

SEQ ID NO: 1213134 - RNA, 19 nt, Artificial Sequence
  Description of Artificial Sequence: Synthetic oligonucleotide
ucuaugagguucuuggcuu

SEQ ID NO: 1213135 - RNA, 19 nt, Artificial Sequence
  Description of Artificial Sequence: Synthetic oligonucleotide
uuuuagccggaucccaucu

SEQ ID NO: 1213136 - RNA, 19 nt, Artificial Sequence
  Description of Artificial Sequence: Synthetic oligonucleotide
aguugaagagcugcugcgc

SEQ ID NO: 1213137 - RNA, 19 nt, Artificial Sequence
  Description of Artificial Sequence: Synthetic oligonucleotide
aggucaaauccacuugguc

SEQ ID NO: 1213138 - RNA, 19 nt, Artificial Sequence
  Description of Artificial Sequence: Synthetic oligonucleotide
auacgaaugaaggcugugg

SEQ ID NO: 1213139 - RNA, 19 nt, Artificial Sequence
  Description of Artificial Sequence: Synthetic oligonucleotide
aaaagccgcuucucauacg

SEQ ID NO: 1213140 - RNA, 19 nt, Artificial Sequence
  Description of Artificial Sequence: Synthetic oligonucleotide
uccuguaagcgccauugca

SEQ ID NO: 1213141 - RNA, 19 nt, Artificial Sequence
  Description of Artificial Sequence: Synthetic oligonucleotide
gaagccaauggguaaucac

SEQ ID NO: 1213142 - RNA, 19 nt, Artificial Sequence
  Description of Artificial Sequence: Synthetic oligonucleotide
uggccaacgaggagcacgg

SEQ ID NO: 1213143 - RNA, 19 nt, Artificial Sequence
  Description of Artificial Sequence: Synthetic oligonucleotide
ggcaccaauguccugacag

SEQ ID NO: 1213144 - RNA, 19 nt, Artificial Sequence
  Description of Artificial Sequence: Synthetic oligonucleotide
cucauacgaaugaaggcug

SEQ ID NO: 1213145 - RNA, 19 nt, Artificial Sequence
  Description of Artificial Sequence: Synthetic oligonucleotide
ucagguguacaguuguggu

SEQ ID NO: 1213146 - RNA, 19 nt, Artificial Sequence
  Description of Artificial Sequence: Synthetic oligonucleotide
cagccuauacuugucaucc

SEQ ID NO: 1213147 - RNA, 19 nt, Artificial Sequence
  Description of Artificial Sequence: Synthetic oligonucleotide
uuagccggaucccaucuga

SEQ ID NO: 1213148 - RNA, 19 nt, Artificial Sequence
  Description of Artificial Sequence: Synthetic oligonucleotide
aauggguaaucacgauucu

SEQ ID NO: 1213149 - RNA, 19 nt, Artificial Sequence
  Description of Artificial Sequence: Synthetic oligonucleotide
aggaucaguuaugaauccc

SEQ ID NO: 1213150 - RNA, 19 nt, Artificial Sequence
  Description of Artificial Sequence: Synthetic oligonucleotide
gcgucuaugagguucuugg

SEQ ID NO: 1213151 - RNA, 19 nt, Artificial Sequence
  Description of Artificial Sequence: Synthetic oligonucleotide
gugaucuucuuaguuagag

SEQ ID NO: 1213152 - RNA, 19 nt, Artificial Sequence
  Description of Artificial Sequence: Synthetic oligonucleotide
agcaaucaaauaagggacg

SEQ ID NO: 1213153 - RNA, 19 nt, Artificial Sequence
  Description of Artificial Sequence: Synthetic oligonucleotide
gaagucgauauacccagga

SEQ ID NO: 1213154 - RNA, 19 nt, Artificial Sequence
  Description of Artificial Sequence: Synthetic oligonucleotide
uggggcuaaggacuacagg

SEQ ID NO: 1213155 - RNA, 19 nt, Artificial Sequence
  Description of Artificial Sequence: Synthetic oligonucleotide
ugaagucgauauacccagg

SEQ ID NO: 1213156 - RNA, 19 nt, Artificial Sequence
  Description of Artificial Sequence: Synthetic oligonucleotide
guaucugugauggggauac

SEQ ID NO: 1213157 - RNA, 19 nt, Artificial Sequence
  Description of Artificial Sequence: Synthetic oligonucleotide
caguugaagagcugcugcg

SEQ ID NO: 1213158 - RNA, 19 nt, Artificial Sequence
  Description of Artificial Sequence: Synthetic oligonucleotide
uguccgagcaaugauggcu

SEQ ID NO: 1213159 - RNA, 19 nt, Artificial Sequence
  Description of Artificial Sequence: Synthetic oligonucleotide
ugaagaaaugaugcccacc

SEQ ID NO: 1213160 - RNA, 19 nt, Artificial Sequence
  Description of Artificial Sequence: Synthetic oligonucleotide
aagccaauaccuccuguaa

SEQ ID NO: 1213161 - RNA, 19 nt, Artificial Sequence
  Description of Artificial Sequence: Synthetic oligonucleotide
cgaacuuguggauagaccc

SEQ ID NO: 1213162 - RNA, 19 nt, Artificial Sequence
  Description of Artificial Sequence: Synthetic oligonucleotide
uuguggauagacccuuugu

SEQ ID NO: 1213163 - RNA, 19 nt, Artificial Sequence
  Description of Artificial Sequence: Synthetic oligonucleotide
agccaauaccuccuguaag

SEQ ID NO: 1213164 - RNA, 19 nt, Artificial Sequence
  Description of Artificial Sequence: Synthetic oligonucleotide
ggcaauaugacccacauuu

SEQ ID NO: 1213165 - RNA, 19 nt, Artificial Sequence
  Description of Artificial Sequence: Synthetic oligonucleotide
ucuccuccaagaaacgguc

SEQ ID NO: 1213166 - RNA, 19 nt, Artificial Sequence
  Description of Artificial Sequence: Synthetic oligonucleotide
agaguccaaaaccacuaca

SEQ ID NO: 1213167 - RNA, 19 nt, Artificial Sequence
  Description of Artificial Sequence: Synthetic oligonucleotide
uuacuuuccgaacuucauu

SEQ ID NO: 1213168 - RNA, 19 nt, Artificial Sequence
  Description of Artificial Sequence: Synthetic oligonucleotide
uccaccugagcugaggaug

SEQ ID NO: 1213169 - RNA, 19 nt, Artificial Sequence
  Description of Artificial Sequence: Synthetic oligonucleotide
agaacccauaccacgguac

SEQ ID NO: 1213170 - RNA, 19 nt, Artificial Sequence
  Description of Artificial Sequence: Synthetic oligonucleotide
uggggauaccacagaagcc

SEQ ID NO: 1213171 - RNA, 19 nt, Artificial Sequence
  Description of Artificial Sequence: Synthetic oligonucleotide
aagucgauauacccaggaa

SEQ ID NO: 1213172 - RNA, 19 nt, Artificial Sequence
  Description of Artificial Sequence: Synthetic oligonucleotide
accagucgacuccccaucc

SEQ ID NO: 1213173 - RNA, 19 nt, Artificial Sequence
  Description of Artificial Sequence: Synthetic oligonucleotide
ugccccacauaguagcugc

SEQ ID NO: 1213174 - RNA, 19 nt, Artificial Sequence
  Description of Artificial Sequence: Synthetic oligonucleotide
aucaguuaugaaucccugu

SEQ ID NO: 1213175 - RNA, 19 nt, Artificial Sequence
  Description of Artificial Sequence: Synthetic oligonucleotide
uuaaacucuuggcaccaau

SEQ ID NO: 1213176 - RNA, 19 nt, Artificial Sequence
  Description of Artificial Sequence: Synthetic oligonucleotide
uggaguuucccugggaaga

SEQ ID NO: 1213177 - RNA, 19 nt, Artificial Sequence
  Description of Artificial Sequence: Synthetic oligonucleotide
cuucuuaguuagagcagag

SEQ ID NO: 1213178 - RNA, 19 nt, Artificial Sequence
  Description of Artificial Sequence: Synthetic oligonucleotide
auggccaacgaggagcacg

SEQ ID NO: 1213179 - RNA, 19 nt, Artificial Sequence
  Description of Artificial Sequence: Synthetic oligonucleotide
caagaaacggucaugcucu

SEQ ID NO: 1213180 - RNA, 19 nt, Artificial Sequence
  Description of Artificial Sequence: Synthetic oligonucleotide
cuuuacuuuccgaacuuca

SEQ ID NO: 1213181 - RNA, 19 nt, Artificial Sequence
  Description of Artificial Sequence: Synthetic oligonucleotide
ggggcuaaggacuacagga

SEQ ID NO: 1213182 - RNA, 19 nt, Artificial Sequence
  Description of Artificial Sequence: Synthetic oligonucleotide
uggaugaagccaauaccuc

SEQ ID NO: 1213183 - RNA, 19 nt, Artificial Sequence
  Description of Artificial Sequence: Synthetic oligonucleotide
cuacauugccuccaaugac

SEQ ID NO: 1213184 - RNA, 19 nt, Artificial Sequence
  Description of Artificial Sequence: Synthetic oligonucleotide
caauaccuccuguaagcgc

SEQ ID NO: 1213185 - RNA, 19 nt, Artificial Sequence
  Description of Artificial Sequence: Synthetic oligonucleotide
ucgucgggcacguaagaug

SEQ ID NO: 1213186 - RNA, 19 nt, Artificial Sequence
  Description of Artificial Sequence: Synthetic oligonucleotide
ugcgcugugagcccgucgu

SEQ ID NO: 1213187 - RNA, 19 nt, Artificial Sequence
  Description of Artificial Sequence: Synthetic oligonucleotide
ugauuuugucagcuucacu

SEQ ID NO: 1213188 - RNA, 19 nt, Artificial Sequence
  Description of Artificial Sequence: Synthetic oligonucleotide
ccgcuaaucagguaguccg

SEQ ID NO: 1213189 - RNA, 19 nt, Artificial Sequence
  Description of Artificial Sequence: Synthetic oligonucleotide
aaggacuacaggaucaguu

SEQ ID NO: 1213190 - RNA, 19 nt, Artificial Sequence
  Description of Artificial Sequence: Synthetic oligonucleotide
gggugaucuucuuaguuag

SEQ ID NO: 1213191 - RNA, 19 nt, Artificial Sequence
  Description of Artificial Sequence: Synthetic oligonucleotide
uggaauucagguguacagu

SEQ ID NO: 1213192 - RNA, 19 nt, Artificial Sequence
  Description of Artificial Sequence: Synthetic oligonucleotide
auaucccuugaagaaauga

SEQ ID NO: 1213193 - RNA, 19 nt, Artificial Sequence
  Description of Artificial Sequence: Synthetic oligonucleotide
auccucaugaguaccaaug

SEQ ID NO: 1213194 - RNA, 19 nt, Artificial Sequence
  Description of Artificial Sequence: Synthetic oligonucleotide
gucgauauacccaggaaga

SEQ ID NO: 1213195 - RNA, 19 nt, Artificial Sequence
  Description of Artificial Sequence: Synthetic oligonucleotide
acuuggucggcagugaagu

SEQ ID NO: 1213196 - RNA, 19 nt, Artificial Sequence
  Description of Artificial Sequence: Synthetic oligonucleotide
ucauacgaaugaaggcugu

SEQ ID NO: 1213197 - RNA, 19 nt, Artificial Sequence
  Description of Artificial Sequence: Synthetic oligonucleotide
auacuggaucucuuuucag

SEQ ID NO: 1213198 - RNA, 19 nt, Artificial Sequence
  Description of Artificial Sequence: Synthetic oligonucleotide
uuagagcagaggucaaauc

SEQ ID NO: 1213199 - RNA, 19 nt, Artificial Sequence
  Description of Artificial Sequence: Synthetic oligonucleotide
uuuagccggaucccaucug

SEQ ID NO: 1213200 - RNA, 19 nt, Artificial Sequence
  Description of Artificial Sequence: Synthetic oligonucleotide
caggaucaguuaugaaucc

SEQ ID NO: 1213201 - RNA, 19 nt, Artificial Sequence
  Description of Artificial Sequence: Synthetic oligonucleotide
gccaauaccuccuguaagc

SEQ ID NO: 1213202 - RNA, 19 nt, Artificial Sequence
  Description of Artificial Sequence: Synthetic oligonucleotide
uccauaggugaggaaacca

SEQ ID NO: 1213203 - RNA, 19 nt, Artificial Sequence
  Description of Artificial Sequence: Synthetic oligonucleotide
aacuugaguuccccagagu

SEQ ID NO: 1213204 - RNA, 19 nt, Artificial Sequence
  Description of Artificial Sequence: Synthetic oligonucleotide
ccaacgaggagcacggacg

SEQ ID NO: 1213205 - RNA, 19 nt, Artificial Sequence
  Description of Artificial Sequence: Synthetic oligonucleotide
aggagcacggacgcgugcc

SEQ ID NO: 1213206 - RNA, 19 nt, Artificial Sequence
  Description of Artificial Sequence: Synthetic oligonucleotide
aggacuacaggaucaguua

SEQ ID NO: 1213207 - RNA, 19 nt, Artificial Sequence
  Description of Artificial Sequence: Synthetic oligonucleotide
agaugugccuccgcuaauc

SEQ ID NO: 1213208 - RNA, 19 nt, Artificial Sequence
  Description of Artificial Sequence: Synthetic oligonucleotide
gauagacccuuuguccugc

SEQ ID NO: 1213209 - RNA, 19 nt, Artificial Sequence
  Description of Artificial Sequence: Synthetic oligonucleotide
aauccacuuggucggcagu

SEQ ID NO: 1213210 - RNA, 19 nt, Artificial Sequence
  Description of Artificial Sequence: Synthetic oligonucleotide
aauaagggacgaacuugug

SEQ ID NO: 1213211 - RNA, 19 nt, Artificial Sequence
  Description of Artificial Sequence: Synthetic oligonucleotide
gggacgaacuuguggauag

SEQ ID NO: 1213212 - RNA, 19 nt, Artificial Sequence
  Description of Artificial Sequence: Synthetic oligonucleotide
aaacggucaugcucuuccu

SEQ ID NO: 1213213 - RNA, 19 nt, Artificial Sequence
  Description of Artificial Sequence: Synthetic oligonucleotide
acguaagaugugccuccgc

SEQ ID NO: 1213214 - RNA, 19 nt, Artificial Sequence
  Description of Artificial Sequence: Synthetic oligonucleotide
gacuacaggaucaguuaug

SEQ ID NO: 1213215 - RNA, 19 nt, Artificial Sequence
  Description of Artificial Sequence: Synthetic oligonucleotide
uccgcuaaucagguagucc

SEQ ID NO: 1213216 - RNA, 19 nt, Artificial Sequence
  Description of Artificial Sequence: Synthetic oligonucleotide
caguuaugaaucccuguuc

SEQ ID NO: 1213217 - RNA, 19 nt, Artificial Sequence
  Description of Artificial Sequence: Synthetic oligonucleotide
gaaaaucguuguaggugag

SEQ ID NO: 1213218 - RNA, 19 nt, Artificial Sequence
  Description of Artificial Sequence: Synthetic oligonucleotide
cuuguggauagacccuuug

SEQ ID NO: 1213219 - RNA, 19 nt, Artificial Sequence
  Description of Artificial Sequence: Synthetic oligonucleotide
aauaucccuugaagaaaug

SEQ ID NO: 1213220 - RNA, 19 nt, Artificial Sequence
  Description of Artificial Sequence: Synthetic oligonucleotide
cuaaggacuacaggaucag

SEQ ID NO: 1213221 - RNA, 19 nt, Artificial Sequence
  Description of Artificial Sequence: Synthetic oligonucleotide
auacccaggaagaaugaga

SEQ ID NO: 1213222 - RNA, 19 nt, Artificial Sequence
  Description of Artificial Sequence: Synthetic oligonucleotide
caguaaguccagccuauac

SEQ ID NO: 1213223 - RNA, 19 nt, Artificial Sequence
  Description of Artificial Sequence: Synthetic oligonucleotide
gacgaacuuguggauagac

SEQ ID NO: 1213224 - RNA, 19 nt, Artificial Sequence
  Description of Artificial Sequence: Synthetic oligonucleotide
cuaugagguucuuggcuug

SEQ ID NO: 1213225 - RNA, 19 nt, Artificial Sequence
  Description of Artificial Sequence: Synthetic oligonucleotide
caacgaggagcacggacgc

SEQ ID NO: 1213226 - RNA, 19 nt, Artificial Sequence
  Description of Artificial Sequence: Synthetic oligonucleotide
cagucgacuccccauccgg

SEQ ID NO: 1213227 - RNA, 19 nt, Artificial Sequence
  Description of Artificial Sequence: Synthetic oligonucleotide
ggcagugaagucgauauac

SEQ ID NO: 1213228 - RNA, 19 nt, Artificial Sequence
  Description of Artificial Sequence: Synthetic oligonucleotide
ucgggcacguaagaugugc

SEQ ID NO: 1213229 - RNA, 19 nt, Artificial Sequence
  Description of Artificial Sequence: Synthetic oligonucleotide
agcgccauugcaauggcca

SEQ ID NO: 1213230 - RNA, 19 nt, Artificial Sequence
  Description of Artificial Sequence: Synthetic oligonucleotide
gcaucaagagaacccauac

SEQ ID NO: 1213231 - RNA, 19 nt, Artificial Sequence
  Description of Artificial Sequence: Synthetic oligonucleotide
agugacuacauugccucca

SEQ ID NO: 1213232 - RNA, 19 nt, Artificial Sequence
  Description of Artificial Sequence: Synthetic oligonucleotide
ggguuaaacucuuggcacc

SEQ ID NO: 1213233 - RNA, 19 nt, Artificial Sequence
  Description of Artificial Sequence: Synthetic oligonucleotide
ccaagaaacggucaugcuc

SEQ ID NO: 1213234 - RNA, 19 nt, Artificial Sequence
  Description of Artificial Sequence: Synthetic oligonucleotide
agagaacccauaccacggu

SEQ ID NO: 1213235 - RNA, 19 nt, Artificial Sequence
  Description of Artificial Sequence: Synthetic oligonucleotide
aacuuguggauagacccuu

SEQ ID NO: 1213236 - RNA, 19 nt, Artificial Sequence
  Description of Artificial Sequence: Synthetic oligonucleotide
agcauccacaccugcgucu

SEQ ID NO: 1213237 - RNA, 19 nt, Artificial Sequence
  Description of Artificial Sequence: Synthetic oligonucleotide
uccccauccggccuguauc

SEQ ID NO: 1213238 - RNA, 19 nt, Artificial Sequence
  Description of Artificial Sequence: Synthetic oligonucleotide
ggugaggaaaccagugggg

SEQ ID NO: 1213239 - RNA, 19 nt, Artificial Sequence
  Description of Artificial Sequence: Synthetic oligonucleotide
augugccuccgcuaaucag

SEQ ID NO: 1213240 - RNA, 19 nt, Artificial Sequence
  Description of Artificial Sequence: Synthetic oligonucleotide
ugacuuggguuaaacucuu

SEQ ID NO: 1213241 - RNA, 19 nt, Artificial Sequence
  Description of Artificial Sequence: Synthetic oligonucleotide
gccagcaaucaaauaaggg

SEQ ID NO: 1213242 - RNA, 19 nt, Artificial Sequence
  Description of Artificial Sequence: Synthetic oligonucleotide
cauccccgcaguugaagag

SEQ ID NO: 1213243 - RNA, 19 nt, Artificial Sequence
  Description of Artificial Sequence: Synthetic oligonucleotide
gaugugccuccgcuaauca

SEQ ID NO: 1213244 - RNA, 19 nt, Artificial Sequence
  Description of Artificial Sequence: Synthetic oligonucleotide
guaaguccagccuauacuu

SEQ ID NO: 1213245 - RNA, 19 nt, Artificial Sequence
  Description of Artificial Sequence: Synthetic oligonucleotide
augaaggcuguggacacca

SEQ ID NO: 1213246 - RNA, 19 nt, Artificial Sequence
  Description of Artificial Sequence: Synthetic oligonucleotide
ccuuguacacugcuguugc

SEQ ID NO: 1213247 - RNA, 19 nt, Artificial Sequence
  Description of Artificial Sequence: Synthetic oligonucleotide
uugggguauuucucuuuca

SEQ ID NO: 1213248 - RNA, 19 nt, Artificial Sequence
  Description of Artificial Sequence: Synthetic oligonucleotide
gcaagagccaguaagucca

SEQ ID NO: 1213249 - RNA, 19 nt, Artificial Sequence
  Description of Artificial Sequence: Synthetic oligonucleotide
uuuuacugcgcugcagaau

SEQ ID NO: 1213250 - RNA, 19 nt, Artificial Sequence
  Description of Artificial Sequence: Synthetic oligonucleotide
ucacacgauccuuggggcu

SEQ ID NO: 1213251 - RNA, 19 nt, Artificial Sequence
  Description of Artificial Sequence: Synthetic oligonucleotide
aggcauauacuggaucucu

SEQ ID NO: 1213252 - RNA, 19 nt, Artificial Sequence
  Description of Artificial Sequence: Synthetic oligonucleotide
agucgacuccccauccggc

SEQ ID NO: 1213253 - RNA, 19 nt, Artificial Sequence
  Description of Artificial Sequence: Synthetic oligonucleotide
gccgagcauacucagaaac

SEQ ID NO: 1213254 - RNA, 19 nt, Artificial Sequence
  Description of Artificial Sequence: Synthetic oligonucleotide
cacuuggucggcagugaag

SEQ ID NO: 1213255 - RNA, 19 nt, Artificial Sequence
  Description of Artificial Sequence: Synthetic oligonucleotide
uuggcuugagcagcaguga

SEQ ID NO: 1213256 - RNA, 19 nt, Artificial Sequence
  Description of Artificial Sequence: Synthetic oligonucleotide
gacaggaaugcuggaugcc

SEQ ID NO: 1213257 - RNA, 19 nt, Artificial Sequence
  Description of Artificial Sequence: Synthetic oligonucleotide
aucuccuccaagaaacggu

SEQ ID NO: 1213258 - RNA, 19 nt, Artificial Sequence
  Description of Artificial Sequence: Synthetic oligonucleotide
ucgauauacccaggaagaa

SEQ ID NO: 1213259 - RNA, 19 nt, Artificial Sequence
  Description of Artificial Sequence: Synthetic oligonucleotide
ucuucaggucuguccgagc

SEQ ID NO: 1213260 - RNA, 19 nt, Artificial Sequence
  Description of Artificial Sequence: Synthetic oligonucleotide
gaaaccaguggggucuuca

SEQ ID NO: 1213261 - RNA, 19 nt, Artificial Sequence
  Description of Artificial Sequence: Synthetic oligonucleotide
gucuaugagguucuuggcu

SEQ ID NO: 1213262 - RNA, 19 nt, Artificial Sequence
  Description of Artificial Sequence: Synthetic oligonucleotide
aauaucgguucuggcugcu

SEQ ID NO: 1213263 - RNA, 19 nt, Artificial Sequence
  Description of Artificial Sequence: Synthetic oligonucleotide
uucggugguggcagccaag

SEQ ID NO: 1213264 - RNA, 19 nt, Artificial Sequence
  Description of Artificial Sequence: Synthetic oligonucleotide
aacgaggagcacggacgcg

SEQ ID NO: 1213265 - RNA, 19 nt, Artificial Sequence
  Description of Artificial Sequence: Synthetic oligonucleotide
guacucaccaggggcuucg

SEQ ID NO: 1213266 - RNA, 19 nt, Artificial Sequence
  Description of Artificial Sequence: Synthetic oligonucleotide
ucgacuccccauccggccu

SEQ ID NO: 1213267 - RNA, 19 nt, Artificial Sequence
  Description of Artificial Sequence: Synthetic oligonucleotide
acaucccucacacgauccu

SEQ ID NO: 1213268 - RNA, 19 nt, Artificial Sequence
  Description of Artificial Sequence: Synthetic oligonucleotide
ugugagcccgucgucgggc

SEQ ID NO: 1213269 - RNA, 19 nt, Artificial Sequence
  Description of Artificial Sequence: Synthetic oligonucleotide
uucaggucuguccgagcaa

SEQ ID NO: 1213270 - RNA, 19 nt, Artificial Sequence
  Description of Artificial Sequence: Synthetic oligonucleotide
gaaguacucaccaggggcu

SEQ ID NO: 1213271 - RNA, 19 nt, Artificial Sequence
  Description of Artificial Sequence: Synthetic oligonucleotide
accccaugccaacucgcag

SEQ ID NO: 1213272 - RNA, 19 nt, Artificial Sequence
  Description of Artificial Sequence: Synthetic oligonucleotide
aagaugugccuccgcuaau

SEQ ID NO: 1213273 - RNA, 19 nt, Artificial Sequence
  Description of Artificial Sequence: Synthetic oligonucleotide
gucgacuccccauccggcc

SEQ ID NO: 1213274 - RNA, 19 nt, Artificial Sequence
  Description of Artificial Sequence: Synthetic oligonucleotide
uagaagcuccaagagccaa

SEQ ID NO: 1213275 - RNA, 19 nt, Artificial Sequence
  Description of Artificial Sequence: Synthetic oligonucleotide
gaguaccaauggcugcccc

SEQ ID NO: 1213276 - RNA, 19 nt, Artificial Sequence
  Description of Artificial Sequence: Synthetic oligonucleotide
cauacgaaugaaggcugug

SEQ ID NO: 1213277 - RNA, 19 nt, Artificial Sequence
  Description of Artificial Sequence: Synthetic oligonucleotide
agaaacggucaugcucuuc

SEQ ID NO: 1213278 - RNA, 19 nt, Artificial Sequence
  Description of Artificial Sequence: Synthetic oligonucleotide
gaagaaugagaaaaucguu

SEQ ID NO: 1213279 - RNA, 19 nt, Artificial Sequence
  Description of Artificial Sequence: Synthetic oligonucleotide
ccgagcauacucagaaacc

SEQ ID NO: 1213280 - RNA, 19 nt, Artificial Sequence
  Description of Artificial Sequence: Synthetic oligonucleotide
augaugcccaccagucgac

SEQ ID NO: 1213281 - RNA, 19 nt, Artificial Sequence
  Description of Artificial Sequence: Synthetic oligonucleotide
caacucgcagagcauccac

SEQ ID NO: 1213282 - RNA, 19 nt, Artificial Sequence
  Description of Artificial Sequence: Synthetic oligonucleotide
ugcgucuaugagguucuug

SEQ ID NO: 1213283 - RNA, 19 nt, Artificial Sequence
  Description of Artificial Sequence: Synthetic oligonucleotide
cagugacuacauugccucc

SEQ ID NO: 1213284 - RNA, 19 nt, Artificial Sequence
  Description of Artificial Sequence: Synthetic oligonucleotide
uaguuagagcagaggucaa

SEQ ID NO: 1213285 - RNA, 19 nt, Artificial Sequence
  Description of Artificial Sequence: Synthetic oligonucleotide
ccucaugaguaccaauggc

SEQ ID NO: 1213286 - RNA, 19 nt, Artificial Sequence
  Description of Artificial Sequence: Synthetic oligonucleotide
auauacccaggaagaauga

SEQ ID NO: 1213287 - RNA, 19 nt, Artificial Sequence
  Description of Artificial Sequence: Synthetic oligonucleotide
uaaggacuacaggaucagu

SEQ ID NO: 1213288 - RNA, 19 nt, Artificial Sequence
  Description of Artificial Sequence: Synthetic oligonucleotide
ggauagacccuuuguccug

SEQ ID NO: 1213289 - RNA, 19 nt, Artificial Sequence
  Description of Artificial Sequence: Synthetic oligonucleotide
acgaggagcacggacgcgu

SEQ ID NO: 1213290 - RNA, 19 nt, Artificial Sequence
  Description of Artificial Sequence: Synthetic oligonucleotide
aguacucaccaggggcuuc

SEQ ID NO: 1213291 - RNA, 19 nt, Artificial Sequence
  Description of Artificial Sequence: Synthetic oligonucleotide
guugcuuggggccgaccac

SEQ ID NO: 1213292 - RNA, 19 nt, Artificial Sequence
  Description of Artificial Sequence: Synthetic oligonucleotide
ugccaacucgcagagcauc

SEQ ID NO: 1213293 - RNA, 19 nt, Artificial Sequence
  Description of Artificial Sequence: Synthetic oligonucleotide
aagccaugccuggcuuugg

SEQ ID NO: 1213294 - RNA, 19 nt, Artificial Sequence
  Description of Artificial Sequence: Synthetic oligonucleotide
agccggaucccaucugaga

SEQ ID NO: 1213295 - RNA, 19 nt, Artificial Sequence
  Description of Artificial Sequence: Synthetic oligonucleotide
gcuaaggacuacaggauca

SEQ ID NO: 1213296 - RNA, 19 nt, Artificial Sequence
  Description of Artificial Sequence: Synthetic oligonucleotide
cauaggugaggaaaccagu

SEQ ID NO: 1213297 - RNA, 19 nt, Artificial Sequence
  Description of Artificial Sequence: Synthetic oligonucleotide
acggacgcgugccuccgag

SEQ ID NO: 1213298 - RNA, 19 nt, Artificial Sequence
  Description of Artificial Sequence: Synthetic oligonucleotide
gaacaccaaagcgccgagc

SEQ ID NO: 1213299 - RNA, 19 nt, Artificial Sequence
  Description of Artificial Sequence: Synthetic oligonucleotide
gaacccauaccacgguacu

SEQ ID NO: 1213300 - RNA, 19 nt, Artificial Sequence
  Description of Artificial Sequence: Synthetic oligonucleotide
ccaauaccuccuguaagcg

SEQ ID NO: 1213301 - RNA, 19 nt, Artificial Sequence
  Description of Artificial Sequence: Synthetic oligonucleotide
cuccuguaagcgccauugc

SEQ ID NO: 1213302 - RNA, 19 nt, Artificial Sequence
  Description of Artificial Sequence: Synthetic oligonucleotide
cuguccgagcaaugauggc

SEQ ID NO: 1213303 - RNA, 19 nt, Artificial Sequence
  Description of Artificial Sequence: Synthetic oligonucleotide
cacagaagccaugccuggc

SEQ ID NO: 1213304 - RNA, 19 nt, Artificial Sequence
  Description of Artificial Sequence: Synthetic oligonucleotide
gcugugagcccgucgucgg

SEQ ID NO: 1213305 - RNA, 19 nt, Artificial Sequence
  Description of Artificial Sequence: Synthetic oligonucleotide
gagaacccauaccacggua

SEQ ID NO: 1213306 - RNA, 19 nt, Artificial Sequence
  Description of Artificial Sequence: Synthetic oligonucleotide
gcugagaugcuuguccaug

SEQ ID NO: 1213307 - RNA, 19 nt, Artificial Sequence
  Description of Artificial Sequence: Synthetic oligonucleotide
gcuaaucagguaguccgcc

SEQ ID NO: 1213308 - RNA, 19 nt, Artificial Sequence
  Description of Artificial Sequence: Synthetic oligonucleotide
auucagguguacaguugug

SEQ ID NO: 1213309 - RNA, 19 nt, Artificial Sequence
  Description of Artificial Sequence: Synthetic oligonucleotide
uggcuaccagcucaucauu

SEQ ID NO: 1213310 - RNA, 19 nt, Artificial Sequence
  Description of Artificial Sequence: Synthetic oligonucleotide
agccuauacuugucauccu

SEQ ID NO: 1213311 - RNA, 19 nt, Artificial Sequence
  Description of Artificial Sequence: Synthetic oligonucleotide
gccuauacuugucauccuc

SEQ ID NO: 1213312 - RNA, 19 nt, Artificial Sequence
  Description of Artificial Sequence: Synthetic oligonucleotide
ugacuacauugccuccaau

SEQ ID NO: 1213313 - RNA, 19 nt, Artificial Sequence
  Description of Artificial Sequence: Synthetic oligonucleotide
guccagccuauacuuguca

SEQ ID NO: 1213314 - RNA, 19 nt, Artificial Sequence
  Description of Artificial Sequence: Synthetic oligonucleotide
gaggagcacggacgcgugc

SEQ ID NO: 1213315 - RNA, 19 nt, Artificial Sequence
  Description of Artificial Sequence: Synthetic oligonucleotide
ugaaacuccuugggccacu

SEQ ID NO: 1213316 - RNA, 19 nt, Artificial Sequence
  Description of Artificial Sequence: Synthetic oligonucleotide
uggcaauaugacccacauu

SEQ ID NO: 1213317 - RNA, 19 nt, Artificial Sequence
  Description of Artificial Sequence: Synthetic oligonucleotide
uccgagcaaugauggcuac

SEQ ID NO: 1213318 - RNA, 19 nt, Artificial Sequence
  Description of Artificial Sequence: Synthetic oligonucleotide
gguuaaacucuuggcacca

SEQ ID NO: 1213319 - RNA, 19 nt, Artificial Sequence
  Description of Artificial Sequence: Synthetic oligonucleotide
cuuggucggcagugaaguc

SEQ ID NO: 1213320 - RNA, 19 nt, Artificial Sequence
  Description of Artificial Sequence: Synthetic oligonucleotide
caccagucgacuccccauc

SEQ ID NO: 1213321 - RNA, 19 nt, Artificial Sequence
  Description of Artificial Sequence: Synthetic oligonucleotide
ccuccuguaagcgccauug

SEQ ID NO: 1213322 - RNA, 19 nt, Artificial Sequence
  Description of Artificial Sequence: Synthetic oligonucleotide
guuagagcagaggucaaau

SEQ ID NO: 1213323 - RNA, 19 nt, Artificial Sequence
  Description of Artificial Sequence: Synthetic oligonucleotide
aaguacucaccaggggcuu

SEQ ID NO: 1213324 - RNA, 19 nt, Artificial Sequence
  Description of Artificial Sequence: Synthetic oligonucleotide
cugugagcccgucgucggg

SEQ ID NO: 1213325 - RNA, 19 nt, Artificial Sequence
  Description of Artificial Sequence: Synthetic oligonucleotide
gaacuuguggauagacccu

SEQ ID NO: 1213326 - RNA, 19 nt, Artificial Sequence
  Description of Artificial Sequence: Synthetic oligonucleotide
ccuguaucugugaugggga

SEQ ID NO: 1213327 - RNA, 19 nt, Artificial Sequence
  Description of Artificial Sequence: Synthetic oligonucleotide
uuacugcgcugcagaauuu

SEQ ID NO: 1213328 - RNA, 19 nt, Artificial Sequence
  Description of Artificial Sequence: Synthetic oligonucleotide
ccuguaagcgccauugcaa

SEQ ID NO: 1213329 - RNA, 19 nt, Artificial Sequence
  Description of Artificial Sequence: Synthetic oligonucleotide
cugaaacuccuugggccac

SEQ ID NO: 1213330 - RNA, 19 nt, Artificial Sequence
  Description of Artificial Sequence: Synthetic oligonucleotide
gccaacgaggagcacggac

SEQ ID NO: 1213331 - RNA, 19 nt, Artificial Sequence
  Description of Artificial Sequence: Synthetic oligonucleotide
ggaucaguuaugaaucccu

SEQ ID NO: 1213332 - RNA, 19 nt, Artificial Sequence
  Description of Artificial Sequence: Synthetic oligonucleotide
guagaagcuccaagagcca

SEQ ID NO: 1213333 - RNA, 19 nt, Artificial Sequence
  Description of Artificial Sequence: Synthetic oligonucleotide
gccaagagggagcccauca

SEQ ID NO: 1213334 - RNA, 19 nt, Artificial Sequence
  Description of Artificial Sequence: Synthetic oligonucleotide
agcagaggucaaauccacu

SEQ ID NO: 1213335 - RNA, 19 nt, Artificial Sequence
  Description of Artificial Sequence: Synthetic oligonucleotide
ccagccuauacuugucauc

SEQ ID NO: 1213336 - RNA, 19 nt, Artificial Sequence
  Description of Artificial Sequence: Synthetic oligonucleotide
gccauugcaauggccauuc

SEQ ID NO: 1213337 - RNA, 19 nt, Artificial Sequence
  Description of Artificial Sequence: Synthetic oligonucleotide
agggacgaacuuguggaua

SEQ ID NO: 1213338 - RNA, 19 nt, Artificial Sequence
  Description of Artificial Sequence: Synthetic oligonucleotide
cuccuccaagaaacgguca

SEQ ID NO: 1213339 - RNA, 19 nt, Artificial Sequence
  Description of Artificial Sequence: Synthetic oligonucleotide
cuguaagcgccauugcaau

SEQ ID NO: 1213340 - RNA, 19 nt, Artificial Sequence
  Description of Artificial Sequence: Synthetic oligonucleotide
accacaccccaugccaacu

SEQ ID NO: 1213341 - RNA, 19 nt, Artificial Sequence
  Description of Artificial Sequence: Synthetic oligonucleotide
gacuuggagauugggguau

SEQ ID NO: 1213342 - RNA, 19 nt, Artificial Sequence
  Description of Artificial Sequence: Synthetic oligonucleotide
cugcgcugugagcccgucg

SEQ ID NO: 1213343 - RNA, 19 nt, Artificial Sequence
  Description of Artificial Sequence: Synthetic oligonucleotide
gcagaggucaaauccacuu

SEQ ID NO: 1213344 - RNA, 19 nt, Artificial Sequence
  Description of Artificial Sequence: Synthetic oligonucleotide
gcgccgagcauacucagaa

SEQ ID NO: 1213345 - RNA, 19 nt, Artificial Sequence
  Description of Artificial Sequence: Synthetic oligonucleotide
caccccaugccaacucgca

SEQ ID NO: 1213346 - RNA, 19 nt, Artificial Sequence
  Description of Artificial Sequence: Synthetic oligonucleotide
guccgagcaaugauggcua

SEQ ID NO: 1213347 - RNA, 19 nt, Artificial Sequence
  Description of Artificial Sequence: Synthetic oligonucleotide
agccaaagcuuuggcaaua

SEQ ID NO: 1213348 - RNA, 19 nt, Artificial Sequence
  Description of Artificial Sequence: Synthetic oligonucleotide
gccaacucgcagagcaucc

SEQ ID NO: 1213349 - RNA, 19 nt, Artificial Sequence
  Description of Artificial Sequence: Synthetic oligonucleotide
ccagucgacuccccauccg

SEQ ID NO: 1213350 - RNA, 19 nt, Artificial Sequence
  Description of Artificial Sequence: Synthetic oligonucleotide
aguccgccauggccaacga

SEQ ID NO: 1213351 - RNA, 19 nt, Artificial Sequence
  Description of Artificial Sequence: Synthetic oligonucleotide
ccauuccagccucugugac

SEQ ID NO: 1213352 - RNA, 19 nt, Artificial Sequence
  Description of Artificial Sequence: Synthetic oligonucleotide
ggacuacaggaucaguuau

SEQ ID NO: 1213353 - RNA, 19 nt, Artificial Sequence
  Description of Artificial Sequence: Synthetic oligonucleotide
caaauccacuuggucggca

SEQ ID NO: 1213354 - RNA, 19 nt, Artificial Sequence
  Description of Artificial Sequence: Synthetic oligonucleotide
cuccgcuaaucagguaguc

SEQ ID NO: 1213355 - RNA, 19 nt, Artificial Sequence
  Description of Artificial Sequence: Synthetic oligonucleotide
guuaaacucuuggcaccaa

SEQ ID NO: 1213356 - RNA, 19 nt, Artificial Sequence
  Description of Artificial Sequence: Synthetic oligonucleotide
ugcugcgcugugagcccgu

SEQ ID NO: 1213357 - RNA, 19 nt, Artificial Sequence
  Description of Artificial Sequence: Synthetic oligonucleotide
cgcuaaucagguaguccgc

SEQ ID NO: 1213358 - RNA, 19 nt, Artificial Sequence
  Description of Artificial Sequence: Synthetic oligonucleotide
auaccuccuguaagcgcca

SEQ ID NO: 1213359 - RNA, 19 nt, Artificial Sequence
  Description of Artificial Sequence: Synthetic oligonucleotide
cuucggugguggcagccaa

SEQ ID NO: 1213360 - RNA, 19 nt, Artificial Sequence
  Description of Artificial Sequence: Synthetic oligonucleotide
gguguacaguuguggugga

SEQ ID NO: 1213361 - RNA, 19 nt, Artificial Sequence
  Description of Artificial Sequence: Synthetic oligonucleotide
cuuguacacugcuguugcu

SEQ ID NO: 1213362 - RNA, 19 nt, Artificial Sequence
  Description of Artificial Sequence: Synthetic oligonucleotide
gcuuggggccgaccacagg

SEQ ID NO: 1213363 - RNA, 19 nt, Artificial Sequence
  Description of Artificial Sequence: Synthetic oligonucleotide
gguaguccgccauggccaa

SEQ ID NO: 1213364 - RNA, 19 nt, Artificial Sequence
  Description of Artificial Sequence: Synthetic oligonucleotide
accuccuguaagcgccauu

SEQ ID NO: 1213365 - RNA, 19 nt, Artificial Sequence
  Description of Artificial Sequence: Synthetic oligonucleotide
ggugaucuucuuaguuaga

SEQ ID NO: 1213366 - RNA, 19 nt, Artificial Sequence
  Description of Artificial Sequence: Synthetic oligonucleotide
ccauggccaacgaggagca

SEQ ID NO: 1213367 - RNA, 19 nt, Artificial Sequence
  Description of Artificial Sequence: Synthetic oligonucleotide
acacgauccuuggggcuaa

SEQ ID NO: 1213368 - RNA, 19 nt, Artificial Sequence
  Description of Artificial Sequence: Synthetic oligonucleotide
ccauccccgcaguugaaga

SEQ ID NO: 1213369 - RNA, 19 nt, Artificial Sequence
  Description of Artificial Sequence: Synthetic oligonucleotide
cgggcacguaagaugugcc

SEQ ID NO: 1213370 - RNA, 19 nt, Artificial Sequence
  Description of Artificial Sequence: Synthetic oligonucleotide
gccgaccacaggccaacac

SEQ ID NO: 1213371 - RNA, 19 nt, Artificial Sequence
  Description of Artificial Sequence: Synthetic oligonucleotide
ccgcuucucauacgaauga

SEQ ID NO: 1213372 - RNA, 19 nt, Artificial Sequence
  Description of Artificial Sequence: Synthetic oligonucleotide
ccaauguccugacaggaau

SEQ ID NO: 1213373 - RNA, 19 nt, Artificial Sequence
  Description of Artificial Sequence: Synthetic oligonucleotide
gugguggaugaagccaaua

SEQ ID NO: 1213374 - RNA, 19 nt, Artificial Sequence
  Description of Artificial Sequence: Synthetic oligonucleotide
cgcugugagcccgucgucg

SEQ ID NO: 1213375 - RNA, 19 nt, Artificial Sequence
  Description of Artificial Sequence: Synthetic oligonucleotide
gucgggcacguaagaugug

SEQ ID NO: 1213376 - RNA, 19 nt, Artificial Sequence
  Description of Artificial Sequence: Synthetic oligonucleotide
ggcuucggugguggcagcc

SEQ ID NO: 1213377 - RNA, 19 nt, Artificial Sequence
  Description of Artificial Sequence: Synthetic oligonucleotide
ggucuguccgagcaaugau

SEQ ID NO: 1213378 - RNA, 19 nt, Artificial Sequence
  Description of Artificial Sequence: Synthetic oligonucleotide
gggcacguaagaugugccu

SEQ ID NO: 1213379 - RNA, 19 nt, Artificial Sequence
  Description of Artificial Sequence: Synthetic oligonucleotide
cguaagaugugccuccgcu

SEQ ID NO: 1213380 - RNA, 19 nt, Artificial Sequence
  Description of Artificial Sequence: Synthetic oligonucleotide
ugccuccgcuaaucaggua

SEQ ID NO: 1213381 - RNA, 19 nt, Artificial Sequence
  Description of Artificial Sequence: Synthetic oligonucleotide
uaccuccuguaagcgccau

SEQ ID NO: 1213382 - RNA, 19 nt, Artificial Sequence
  Description of Artificial Sequence: Synthetic oligonucleotide
ccaauggguaaucacgauu

SEQ ID NO: 1213383 - RNA, 19 nt, Artificial Sequence
  Description of Artificial Sequence: Synthetic oligonucleotide
gugccuccgcuaaucaggu

SEQ ID NO: 1213384 - RNA, 19 nt, Artificial Sequence
  Description of Artificial Sequence: Synthetic oligonucleotide
cgucgggcacguaagaugu

SEQ ID NO: 1213385 - RNA, 19 nt, Artificial Sequence
  Description of Artificial Sequence: Synthetic oligonucleotide
ccugcgucuaugagguucu

SEQ ID NO: 1213386 - RNA, 19 nt, Artificial Sequence
  Description of Artificial Sequence: Synthetic oligonucleotide
cacgauccuuggggcuaag

SEQ ID NO: 1213387 - RNA, 19 nt, Artificial Sequence
  Description of Artificial Sequence: Synthetic oligonucleotide
cuccuugggccacuuugau

SEQ ID NO: 1213388 - RNA, 19 nt, Artificial Sequence
  Description of Artificial Sequence: Synthetic oligonucleotide
gggccgaccacaggccaac

SEQ ID NO: 1213389 - RNA, 19 nt, Artificial Sequence
  Description of Artificial Sequence: Synthetic oligonucleotide
ggacgaacuuguggauaga

SEQ ID NO: 1213390 - RNA, 19 nt, Artificial Sequence
  Description of Artificial Sequence: Synthetic oligonucleotide
gcuucggugguggcagcca

SEQ ID NO: 1213391 - RNA, 19 nt, Artificial Sequence
  Description of Artificial Sequence: Synthetic oligonucleotide
gccaauggguaaucacgau

SEQ ID NO: 1213392 - RNA, 19 nt, Artificial Sequence
  Description of Artificial Sequence: Synthetic oligonucleotide
gcaauaugacccacauuuu

SEQ ID NO: 1213393 - RNA, 19 nt, Artificial Sequence
  Description of Artificial Sequence: Synthetic oligonucleotide
ccaacucgcagagcaucca

SEQ ID NO: 1213394 - RNA, 19 nt, Artificial Sequence
  Description of Artificial Sequence: Synthetic oligonucleotide
caucccucacacgauccuu

SEQ ID NO: 1213395 - RNA, 19 nt, Artificial Sequence
  Description of Artificial Sequence: Synthetic oligonucleotide
ccacuuggucggcagugaa

SEQ ID NO: 1213396 - RNA, 19 nt, Artificial Sequence
  Description of Artificial Sequence: Synthetic oligonucleotide
cuccccauccggccuguau

SEQ ID NO: 1213397 - RNA, 19 nt, Artificial Sequence
  Description of Artificial Sequence: Synthetic oligonucleotide
ccauccggccuguaucugu

SEQ ID NO: 1213398 - RNA, 19 nt, Artificial Sequence
  Description of Artificial Sequence: Synthetic oligonucleotide
guguacaguugugguggau

SEQ ID NO: 1213399 - RNA, 19 nt, Artificial Sequence
  Description of Artificial Sequence: Synthetic oligonucleotide
gggauaccacagaagccau

SEQ ID NO: 1213400 - RNA, 19 nt, Artificial Sequence
  Description of Artificial Sequence: Synthetic oligonucleotide
ccuccgcuaaucagguagu

SEQ ID NO: 1213401 - RNA, 19 nt, Artificial Sequence
  Description of Artificial Sequence: Synthetic oligonucleotide
cacggacgcgugccuccga

SEQ ID NO: 1213402 - RNA, 19 nt, Artificial Sequence
  Description of Artificial Sequence: Synthetic oligonucleotide
cgacuccccauccggccug

SEQ ID NO: 1213403 - RNA, 19 nt, Artificial Sequence
  Description of Artificial Sequence: Synthetic oligonucleotide
cgauauacccaggaagaau

SEQ ID NO: 1213404 - RNA, 19 nt, Artificial Sequence
  Description of Artificial Sequence: Synthetic oligonucleotide
gcgcugugagcccgucguc

SEQ ID NO: 1213405 - RNA, 19 nt, Artificial Sequence
  Description of Artificial Sequence: Synthetic oligonucleotide
ccccgcaguugaagagcug

SEQ ID NO: 1213406 - RNA, 19 nt, Artificial Sequence
  Description of Artificial Sequence: Synthetic oligonucleotide
ccaagagggagcccaucau

SEQ ID NO: 1213407 - RNA, 19 nt, Artificial Sequence
  Description of Artificial Sequence: Synthetic oligonucleotide
cgcuucucauacgaaugaa

SEQ ID NO: 1213408 - RNA, 19 nt, Artificial Sequence
  Description of Artificial Sequence: Synthetic oligonucleotide
ggggccgaccacaggccaa

SEQ ID NO: 1213409 - RNA, 19 nt, Artificial Sequence
  Description of Artificial Sequence: Synthetic oligonucleotide
cgucgucgggcacguaaga

SEQ ID NO: 1213410 - RNA, 19 nt, Artificial Sequence
  Description of Artificial Sequence: Synthetic oligonucleotide
gcugcgcugugagcccguc

SEQ ID NO: 1213411 - RNA, 19 nt, Artificial Sequence
  Description of Artificial Sequence: Synthetic oligonucleotide
ggccgaccacaggccaaca

SEQ ID NO: 1213412 - RNA, 19 nt, Artificial Sequence
  Description of Artificial Sequence: Synthetic oligonucleotide
ggccaacgaggagcacgga

SEQ ID NO: 1213413 - RNA, 19 nt, Artificial Sequence
  Description of Artificial Sequence: Synthetic oligonucleotide
cgccgagcauacucagaaa

SEQ ID NO: 1213414 - RNA, 19 nt, Artificial Sequence
  Description of Artificial Sequence: Synthetic oligonucleotide
gccccacauaguagcugcu

SEQ ID NO: 1213415 - RNA, 19 nt, Artificial Sequence
  Description of Artificial Sequence: Synthetic oligonucleotide
caccugcgucuaugagguu

SEQ ID NO: 1213416 - RNA, 19 nt, Artificial Sequence
  Description of Artificial Sequence: Synthetic oligonucleotide
cugcgucuaugagguucuu

SEQ ID NO: 1213417 - RNA, 19 nt, Artificial Sequence
  Description of Artificial Sequence: Synthetic oligonucleotide
gaacauaucacuuccaggg

SEQ ID NO: 1213418 - RNA, 19 nt, Artificial Sequence
  Description of Artificial Sequence: Synthetic oligonucleotide
aauacaugaggguucaguc

SEQ ID NO: 1213419 - RNA, 19 nt, Artificial Sequence
  Description of Artificial Sequence: Synthetic oligonucleotide
guugauagcauuuggaagg

SEQ ID NO: 1213420 - RNA, 19 nt, Artificial Sequence
  Description of Artificial Sequence: Synthetic oligonucleotide
ucaacuugaagucuguucc

SEQ ID NO: 1213421 - RNA, 19 nt, Artificial Sequence
  Description of Artificial Sequence: Synthetic oligonucleotide
aaggcguagaaguaggugg

SEQ ID NO: 1213422 - RNA, 19 nt, Artificial Sequence
  Description of Artificial Sequence: Synthetic oligonucleotide
acuaguuaaacuuuuauau

SEQ ID NO: 1213423 - RNA, 19 nt, Artificial Sequence
  Description of Artificial Sequence: Synthetic oligonucleotide
uggacuaggacuuagggga

SEQ ID NO: 1213424 - RNA, 19 nt, Artificial Sequence
  Description of Artificial Sequence: Synthetic oligonucleotide
aacauguuuccauucauga

SEQ ID NO: 1213425 - RNA, 19 nt, Artificial Sequence
  Description of Artificial Sequence: Synthetic oligonucleotide
augugaacauaucacuucc

SEQ ID NO: 1213426 - RNA, 19 nt, Artificial Sequence
  Description of Artificial Sequence: Synthetic oligonucleotide
auuuacaauauucucuuca

SEQ ID NO: 1213427 - RNA, 19 nt, Artificial Sequence
  Description of Artificial Sequence: Synthetic oligonucleotide
cauggaauuguuuggaaag

SEQ ID NO: 1213428 - RNA, 19 nt, Artificial Sequence
  Description of Artificial Sequence: Synthetic oligonucleotide
agaccaaggauucuggauc

SEQ ID NO: 1213429 - RNA, 19 nt, Artificial Sequence
  Description of Artificial Sequence: Synthetic oligonucleotide
aaaggaacuacauuuccau

SEQ ID NO: 1213430 - RNA, 19 nt, Artificial Sequence
  Description of Artificial Sequence: Synthetic oligonucleotide
ugugacaugugccaugccc

SEQ ID NO: 1213431 - RNA, 19 nt, Artificial Sequence
  Description of Artificial Sequence: Synthetic oligonucleotide
acuacauuuccaugggugg

SEQ ID NO: 1213432 - RNA, 19 nt, Artificial Sequence
  Description of Artificial Sequence: Synthetic oligonucleotide
gucaguagaagucagcacc

SEQ ID NO: 1213433 - RNA, 19 nt, Artificial Sequence
  Description of Artificial Sequence: Synthetic oligonucleotide
accagugccccuuaagacc

SEQ ID NO: 1213434 - RNA, 19 nt, Artificial Sequence
  Description of Artificial Sequence: Synthetic oligonucleotide
aacuaguuaaacuuuuaua

SEQ ID NO: 1213435 - RNA, 19 nt, Artificial Sequence
  Description of Artificial Sequence: Synthetic oligonucleotide
ucuuuugccagguuuaaaa

SEQ ID NO: 1213436 - RNA, 19 nt, Artificial Sequence
  Description of Artificial Sequence: Synthetic oligonucleotide
aagaauugcuagaccaggc

SEQ ID NO: 1213437 - RNA, 19 nt, Artificial Sequence
  Description of Artificial Sequence: Synthetic oligonucleotide
gaauugcuagaccaggcag

SEQ ID NO: 1213438 - RNA, 19 nt, Artificial Sequence
  Description of Artificial Sequence: Synthetic oligonucleotide
uuaggucaaacaugcacag

SEQ ID NO: 1213439 - RNA, 19 nt, Artificial Sequence
  Description of Artificial Sequence: Synthetic oligonucleotide
aauugcuagaccaggcagg

SEQ ID NO: 1213440 - RNA, 19 nt, Artificial Sequence
  Description of Artificial Sequence: Synthetic oligonucleotide
uuaagaccuuuccugaugu

SEQ ID NO: 1213441 - RNA, 19 nt, Artificial Sequence
  Description of Artificial Sequence: Synthetic oligonucleotide
agugacgucguucuuggag

SEQ ID NO: 1213442 - RNA, 19 nt, Artificial Sequence
  Description of Artificial Sequence: Synthetic oligonucleotide
ucguucuuggagaaguugc

SEQ ID NO: 1213443 - RNA, 19 nt, Artificial Sequence
  Description of Artificial Sequence: Synthetic oligonucleotide
aguacugggaugcacagau

SEQ ID NO: 1213444 - RNA, 19 nt, Artificial Sequence
  Description of Artificial Sequence: Synthetic oligonucleotide
ugcuagaccaggcagggga

SEQ ID NO: 1213445 - RNA, 19 nt, Artificial Sequence
  Description of Artificial Sequence: Synthetic oligonucleotide
ugguggucggugaacagcg

SEQ ID NO: 1213446 - RNA, 19 nt, Artificial Sequence
  Description of Artificial Sequence: Synthetic oligonucleotide
uuuacaauauucucuucau

SEQ ID NO: 1213447 - RNA, 19 nt, Artificial Sequence
  Description of Artificial Sequence: Synthetic oligonucleotide
uccccagagguccaaaucc

SEQ ID NO: 1213448 - RNA, 19 nt, Artificial Sequence
  Description of Artificial Sequence: Synthetic oligonucleotide
aaauguguccuggaccacg

SEQ ID NO: 1213449 - RNA, 19 nt, Artificial Sequence
  Description of Artificial Sequence: Synthetic oligonucleotide
uguacaugaacuugauggu

SEQ ID NO: 1213450 - RNA, 19 nt, Artificial Sequence
  Description of Artificial Sequence: Synthetic oligonucleotide
uucaugaaauguguccugg

SEQ ID NO: 1213451 - RNA, 19 nt, Artificial Sequence
  Description of Artificial Sequence: Synthetic oligonucleotide
gaacacguagggcaccucg

SEQ ID NO: 1213452 - RNA, 19 nt, Artificial Sequence
  Description of Artificial Sequence: Synthetic oligonucleotide
uggaauuguuuggaaaggg

SEQ ID NO: 1213453 - RNA, 19 nt, Artificial Sequence
  Description of Artificial Sequence: Synthetic oligonucleotide
uguguacagagccgcaaag

SEQ ID NO: 1213454 - RNA, 19 nt, Artificial Sequence
  Description of Artificial Sequence: Synthetic oligonucleotide
agaagucagcaccccaccc

SEQ ID NO: 1213455 - RNA, 19 nt, Artificial Sequence
  Description of Artificial Sequence: Synthetic oligonucleotide
aaggaacuacauuuccaug

SEQ ID NO: 1213456 - RNA, 19 nt, Artificial Sequence
  Description of Artificial Sequence: Synthetic oligonucleotide
gugaacauaucacuuccag

SEQ ID NO: 1213457 - RNA, 19 nt, Artificial Sequence
  Description of Artificial Sequence: Synthetic oligonucleotide
cuggacuaggacuuagggg

SEQ ID NO: 1213458 - RNA, 19 nt, Artificial Sequence
  Description of Artificial Sequence: Synthetic oligonucleotide
aagaccaaggauucuggau

SEQ ID NO: 1213459 - RNA, 19 nt, Artificial Sequence
  Description of Artificial Sequence: Synthetic oligonucleotide
ucaagggucacuguauaug

SEQ ID NO: 1213460 - RNA, 19 nt, Artificial Sequence
  Description of Artificial Sequence: Synthetic oligonucleotide
uugauggucucgcgcagcg

SEQ ID NO: 1213461 - RNA, 19 nt, Artificial Sequence
  Description of Artificial Sequence: Synthetic oligonucleotide
aagugcuagggagagcagg

SEQ ID NO: 1213462 - RNA, 19 nt, Artificial Sequence
  Description of Artificial Sequence: Synthetic oligonucleotide
gauaccacccuguauuguc

SEQ ID NO: 1213463 - RNA, 19 nt, Artificial Sequence
  Description of Artificial Sequence: Synthetic oligonucleotide
cagagguccaaauccaaag

SEQ ID NO: 1213464 - RNA, 19 nt, Artificial Sequence
  Description of Artificial Sequence: Synthetic oligonucleotide
gggaagguaaguuuccagg

SEQ ID NO: 1213465 - RNA, 19 nt, Artificial Sequence
  Description of Artificial Sequence: Synthetic oligonucleotide
acuaggacuuaggggaucc

SEQ ID NO: 1213466 - RNA, 19 nt, Artificial Sequence
  Description of Artificial Sequence: Synthetic oligonucleotide
gguugauagcauuuggaag

SEQ ID NO: 1213467 - RNA, 19 nt, Artificial Sequence
  Description of Artificial Sequence: Synthetic oligonucleotide
agaauugcuagaccaggca

SEQ ID NO: 1213468 - RNA, 19 nt, Artificial Sequence
  Description of Artificial Sequence: Synthetic oligonucleotide
cuuaagaccuuuccugaug

SEQ ID NO: 1213469 - RNA, 19 nt, Artificial Sequence
  Description of Artificial Sequence: Synthetic oligonucleotide
gcagguaagugcuagggag

SEQ ID NO: 1213470 - RNA, 19 nt, Artificial Sequence
  Description of Artificial Sequence: Synthetic oligonucleotide
agguugauagcauuuggaa

SEQ ID NO: 1213471 - RNA, 19 nt, Artificial Sequence
  Description of Artificial Sequence: Synthetic oligonucleotide
auacaugaggguucaguca

SEQ ID NO: 1213472 - RNA, 19 nt, Artificial Sequence
  Description of Artificial Sequence: Synthetic oligonucleotide
guaagugcuagggagagca

SEQ ID NO: 1213473 - RNA, 19 nt, Artificial Sequence
  Description of Artificial Sequence: Synthetic oligonucleotide
agggucacuguauauguga

SEQ ID NO: 1213474 - RNA, 19 nt, Artificial Sequence
  Description of Artificial Sequence: Synthetic oligonucleotide
gaugcacagaucuccuccc

SEQ ID NO: 1213475 - RNA, 19 nt, Artificial Sequence
  Description of Artificial Sequence: Synthetic oligonucleotide
ggaacuacauuuccauggg

SEQ ID NO: 1213476 - RNA, 19 nt, Artificial Sequence
  Description of Artificial Sequence: Synthetic oligonucleotide
auggaauuguuuggaaagg

SEQ ID NO: 1213477 - RNA, 19 nt, Artificial Sequence
  Description of Artificial Sequence: Synthetic oligonucleotide
gucacuguauaugugaaca

SEQ ID NO: 1213478 - RNA, 19 nt, Artificial Sequence
  Description of Artificial Sequence: Synthetic oligonucleotide
ugauuucuuagcugcuccc

SEQ ID NO: 1213479 - RNA, 19 nt, Artificial Sequence
  Description of Artificial Sequence: Synthetic oligonucleotide
ugugaacauaucacuucca

SEQ ID NO: 1213480 - RNA, 19 nt, Artificial Sequence
  Description of Artificial Sequence: Synthetic oligonucleotide
cugaugucguucuuuuccc

SEQ ID NO: 1213481 - RNA, 19 nt, Artificial Sequence
  Description of Artificial Sequence: Synthetic oligonucleotide
uagaagucagcaccccacc

SEQ ID NO: 1213482 - RNA, 19 nt, Artificial Sequence
  Description of Artificial Sequence: Synthetic oligonucleotide
ugugugacaugugccaugc

SEQ ID NO: 1213483 - RNA, 19 nt, Artificial Sequence
  Description of Artificial Sequence: Synthetic oligonucleotide
acgccgaacacguagggca

SEQ ID NO: 1213484 - RNA, 19 nt, Artificial Sequence
  Description of Artificial Sequence: Synthetic oligonucleotide
agagcuuaggucaaacaug

SEQ ID NO: 1213485 - RNA, 19 nt, Artificial Sequence
  Description of Artificial Sequence: Synthetic oligonucleotide
uggaaggcauggcuguucc

SEQ ID NO: 1213486 - RNA, 19 nt, Artificial Sequence
  Description of Artificial Sequence: Synthetic oligonucleotide
uuccaagaauugcuagacc

SEQ ID NO: 1213487 - RNA, 19 nt, Artificial Sequence
  Description of Artificial Sequence: Synthetic oligonucleotide
gauuucuuagcugcucccc

SEQ ID NO: 1213488 - RNA, 19 nt, Artificial Sequence
  Description of Artificial Sequence: Synthetic oligonucleotide
cugggugucaguagaaguc

SEQ ID NO: 1213489 - RNA, 19 nt, Artificial Sequence
  Description of Artificial Sequence: Synthetic oligonucleotide
accccuauacaaguuuggc

SEQ ID NO: 1213490 - RNA, 19 nt, Artificial Sequence
  Description of Artificial Sequence: Synthetic oligonucleotide
caucaccugacuugugccg

SEQ ID NO: 1213491 - RNA, 19 nt, Artificial Sequence
  Description of Artificial Sequence: Synthetic oligonucleotide
gaaaggaacuacauuucca

SEQ ID NO: 1213492 - RNA, 19 nt, Artificial Sequence
  Description of Artificial Sequence: Synthetic oligonucleotide
gagaacgugcaucaccuga

SEQ ID NO: 1213493 - RNA, 19 nt, Artificial Sequence
  Description of Artificial Sequence: Synthetic oligonucleotide
gucaacuugaagucuguuc

SEQ ID NO: 1213494 - RNA, 19 nt, Artificial Sequence
  Description of Artificial Sequence: Synthetic oligonucleotide
acccuguauugucuggugg

SEQ ID NO: 1213495 - RNA, 19 nt, Artificial Sequence
  Description of Artificial Sequence: Synthetic oligonucleotide
agaacgugcaucaccugac

SEQ ID NO: 1213496 - RNA, 19 nt, Artificial Sequence
  Description of Artificial Sequence: Synthetic oligonucleotide
ugccccuuaagaccuuucc

SEQ ID NO: 1213497 - RNA, 19 nt, Artificial Sequence
  Description of Artificial Sequence: Synthetic oligonucleotide
ucuguucccaccugcuaug

SEQ ID NO: 1213498 - RNA, 19 nt, Artificial Sequence
  Description of Artificial Sequence: Synthetic oligonucleotide
gaugucguucuuuucccca

SEQ ID NO: 1213499 - RNA, 19 nt, Artificial Sequence
  Description of Artificial Sequence: Synthetic oligonucleotide
ugcagguaagugcuaggga

SEQ ID NO: 1213500 - RNA, 19 nt, Artificial Sequence
  Description of Artificial Sequence: Synthetic oligonucleotide
augcagguaagugcuaggg

SEQ ID NO: 1213501 - RNA, 19 nt, Artificial Sequence
  Description of Artificial Sequence: Synthetic oligonucleotide
gcuuaggucaaacaugcac

SEQ ID NO: 1213502 - RNA, 19 nt, Artificial Sequence
  Description of Artificial Sequence: Synthetic oligonucleotide
ggaauuguuuggaaagggg

SEQ ID NO: 1213503 - RNA, 19 nt, Artificial Sequence
  Description of Artificial Sequence: Synthetic oligonucleotide
cucaagaccaaggauucug

SEQ ID NO: 1213504 - RNA, 19 nt, Artificial Sequence
  Description of Artificial Sequence: Synthetic oligonucleotide
ucaugaaauguguccugga

SEQ ID NO: 1213505 - RNA, 19 nt, Artificial Sequence
  Description of Artificial Sequence: Synthetic oligonucleotide
agggccagaaaggaacuac

SEQ ID NO: 1213506 - RNA, 19 nt, Artificial Sequence
  Description of Artificial Sequence: Synthetic oligonucleotide
caacuugaagucuguuccc

SEQ ID NO: 1213507 - RNA, 19 nt, Artificial Sequence
  Description of Artificial Sequence: Synthetic oligonucleotide
uuggcacuaacaucccaca

SEQ ID NO: 1213508 - RNA, 19 nt, Artificial Sequence
  Description of Artificial Sequence: Synthetic oligonucleotide
cacauuuugagucucccaa

SEQ ID NO: 1213509 - RNA, 19 nt, Artificial Sequence
  Description of Artificial Sequence: Synthetic oligonucleotide
ggggaaugcagguaagugc

SEQ ID NO: 1213510 - RNA, 19 nt, Artificial Sequence
  Description of Artificial Sequence: Synthetic oligonucleotide
ggagugacgucguucuugg

SEQ ID NO: 1213511 - RNA, 19 nt, Artificial Sequence
  Description of Artificial Sequence: Synthetic oligonucleotide
ugaugucguucuuuucccc

SEQ ID NO: 1213512 - RNA, 19 nt, Artificial Sequence
  Description of Artificial Sequence: Synthetic oligonucleotide
guguacagagccgcaaagg

SEQ ID NO: 1213513 - RNA, 19 nt, Artificial Sequence
  Description of Artificial Sequence: Synthetic oligonucleotide
uguccuggaccacgggaag

SEQ ID NO: 1213514 - RNA, 19 nt, Artificial Sequence
  Description of Artificial Sequence: Synthetic oligonucleotide
uugugugacaugugccaug

SEQ ID NO: 1213515 - RNA, 19 nt, Artificial Sequence
  Description of Artificial Sequence: Synthetic oligonucleotide
ugcgcguggaggucggcgg

SEQ ID NO: 1213516 - RNA, 19 nt, Artificial Sequence
  Description of Artificial Sequence: Synthetic oligonucleotide
ugggugucaguagaaguca

SEQ ID NO: 1213517 - RNA, 19 nt, Artificial Sequence
  Description of Artificial Sequence: Synthetic oligonucleotide
ucagcgucucccuccaagu

SEQ ID NO: 1213518 - RNA, 19 nt, Artificial Sequence
  Description of Artificial Sequence: Synthetic oligonucleotide
gugacgucguucuuggaga

SEQ ID NO: 1213519 - RNA, 19 nt, Artificial Sequence
  Description of Artificial Sequence: Synthetic oligonucleotide
aaguaggugggcgacccgu

SEQ ID NO: 1213520 - RNA, 19 nt, Artificial Sequence
  Description of Artificial Sequence: Synthetic oligonucleotide
ggacuuaggggauccuugg

SEQ ID NO: 1213521 - RNA, 19 nt, Artificial Sequence
  Description of Artificial Sequence: Synthetic oligonucleotide
ucgggguagccguacaggu

SEQ ID NO: 1213522 - RNA, 19 nt, Artificial Sequence
  Description of Artificial Sequence: Synthetic oligonucleotide
gaacucaagaccaaggauu

SEQ ID NO: 1213523 - RNA, 19 nt, Artificial Sequence
  Description of Artificial Sequence: Synthetic oligonucleotide
caccagugccccuuaagac

SEQ ID NO: 1213524 - RNA, 19 nt, Artificial Sequence
  Description of Artificial Sequence: Synthetic oligonucleotide
cacgggaagguaaguuucc

SEQ ID NO: 1213525 - RNA, 19 nt, Artificial Sequence
  Description of Artificial Sequence: Synthetic oligonucleotide
ugacaugugccaugcccca

SEQ ID NO: 1213526 - RNA, 19 nt, Artificial Sequence
  Description of Artificial Sequence: Synthetic oligonucleotide
gggguagccguacagguug

SEQ ID NO: 1213527 - RNA, 19 nt, Artificial Sequence
  Description of Artificial Sequence: Synthetic oligonucleotide
ugggaugcacagaucuccu

SEQ ID NO: 1213528 - RNA, 19 nt, Artificial Sequence
  Description of Artificial Sequence: Synthetic oligonucleotide
cagguugauagcauuugga

SEQ ID NO: 1213529 - RNA, 19 nt, Artificial Sequence
  Description of Artificial Sequence: Synthetic oligonucleotide
acgucguucuuggagaagu

SEQ ID NO: 1213530 - RNA, 19 nt, Artificial Sequence
  Description of Artificial Sequence: Synthetic oligonucleotide
gccacacaauacaugaggg

SEQ ID NO: 1213531 - RNA, 19 nt, Artificial Sequence
  Description of Artificial Sequence: Synthetic oligonucleotide
ugucguucuuuuccccaga

SEQ ID NO: 1213532 - RNA, 19 nt, Artificial Sequence
  Description of Artificial Sequence: Synthetic oligonucleotide
ugcuaugugugugcugggc

SEQ ID NO: 1213533 - RNA, 19 nt, Artificial Sequence
  Description of Artificial Sequence: Synthetic oligonucleotide
gguucagucacaccuccac

SEQ ID NO: 1213534 - RNA, 19 nt, Artificial Sequence
  Description of Artificial Sequence: Synthetic oligonucleotide
agccgcaaaggguuggggu

SEQ ID NO: 1213535 - RNA, 19 nt, Artificial Sequence
  Description of Artificial Sequence: Synthetic oligonucleotide
ucauggacugagggaaggc

SEQ ID NO: 1213536 - RNA, 19 nt, Artificial Sequence
  Description of Artificial Sequence: Synthetic oligonucleotide
aggacuuaggggauccuug

SEQ ID NO: 1213537 - RNA, 19 nt, Artificial Sequence
  Description of Artificial Sequence: Synthetic oligonucleotide
uccagagggccugugauuu

SEQ ID NO: 1213538 - RNA, 19 nt, Artificial Sequence
  Description of Artificial Sequence: Synthetic oligonucleotide
gugggcgacccguacugcg

SEQ ID NO: 1213539 - RNA, 19 nt, Artificial Sequence
  Description of Artificial Sequence: Synthetic oligonucleotide
ugcuuacagggcucagggc

SEQ ID NO: 1213540 - RNA, 19 nt, Artificial Sequence
  Description of Artificial Sequence: Synthetic oligonucleotide
ugggcgacccguacugcgc

SEQ ID NO: 1213541 - RNA, 19 nt, Artificial Sequence
  Description of Artificial Sequence: Synthetic oligonucleotide
cuccaaguuuguacucccc

SEQ ID NO: 1213542 - RNA, 19 nt, Artificial Sequence
  Description of Artificial Sequence: Synthetic oligonucleotide
uguucccaccugcuaugug

SEQ ID NO: 1213543 - RNA, 19 nt, Artificial Sequence
  Description of Artificial Sequence: Synthetic oligonucleotide
ccucuugugugacaugugc

SEQ ID NO: 1213544 - RNA, 19 nt, Artificial Sequence
  Description of Artificial Sequence: Synthetic oligonucleotide
guagccguacagguugucc

SEQ ID NO: 1213545 - RNA, 19 nt, Artificial Sequence
  Description of Artificial Sequence: Synthetic oligonucleotide
gagggagugacgucguucu

SEQ ID NO: 1213546 - RNA, 19 nt, Artificial Sequence
  Description of Artificial Sequence: Synthetic oligonucleotide
ccccuuaagaccuuuccug

SEQ ID NO: 1213547 - RNA, 19 nt, Artificial Sequence
  Description of Artificial Sequence: Synthetic oligonucleotide
ggggacgccgaacacguag

SEQ ID NO: 1213548 - RNA, 19 nt, Artificial Sequence
  Description of Artificial Sequence: Synthetic oligonucleotide
cauucaugaaauguguccu

SEQ ID NO: 1213549 - RNA, 19 nt, Artificial Sequence
  Description of Artificial Sequence: Synthetic oligonucleotide
acugggaugcacagaucuc

SEQ ID NO: 1213550 - RNA, 19 nt, Artificial Sequence
  Description of Artificial Sequence: Synthetic oligonucleotide
gcggcgucggcccagggcg

SEQ ID NO: 1213551 - RNA, 19 nt, Artificial Sequence
  Description of Artificial Sequence: Synthetic oligonucleotide
agcgucucccuccaaguuu

SEQ ID NO: 1213552 - RNA, 19 nt, Artificial Sequence
  Description of Artificial Sequence: Synthetic oligonucleotide
caagggucacuguauaugu

SEQ ID NO: 1213553 - RNA, 19 nt, Artificial Sequence
  Description of Artificial Sequence: Synthetic oligonucleotide
ggaucugggugucaguaga

SEQ ID NO: 1213554 - RNA, 19 nt, Artificial Sequence
  Description of Artificial Sequence: Synthetic oligonucleotide
ugacgucguucuuggagaa

SEQ ID NO: 1213555 - RNA, 19 nt, Artificial Sequence
  Description of Artificial Sequence: Synthetic oligonucleotide
cuugcgccgcgucuccgcg

SEQ ID NO: 1213556 - RNA, 19 nt, Artificial Sequence
  Description of Artificial Sequence: Synthetic oligonucleotide
gacgccgaacacguagggc

SEQ ID NO: 1213557 - RNA, 19 nt, Artificial Sequence
  Description of Artificial Sequence: Synthetic oligonucleotide
augcacaaacauguuucca

SEQ ID NO: 1213558 - RNA, 19 nt, Artificial Sequence
  Description of Artificial Sequence: Synthetic oligonucleotide
cuggugucugccccuuagc

SEQ ID NO: 1213559 - RNA, 19 nt, Artificial Sequence
  Description of Artificial Sequence: Synthetic oligonucleotide
gucgguggggccgagcaug

SEQ ID NO: 1213560 - RNA, 19 nt, Artificial Sequence
  Description of Artificial Sequence: Synthetic oligonucleotide
uagggcaccucgucgccgu

SEQ ID NO: 1213561 - RNA, 19 nt, Artificial Sequence
  Description of Artificial Sequence: Synthetic oligonucleotide
gccgcaaaggguuggggug

SEQ ID NO: 1213562 - RNA, 19 nt, Artificial Sequence
  Description of Artificial Sequence: Synthetic oligonucleotide
cacccuguauugucuggug

SEQ ID NO: 1213563 - RNA, 19 nt, Artificial Sequence
  Description of Artificial Sequence: Synthetic oligonucleotide
uggaguccguggcuguauc

SEQ ID NO: 1213564 - RNA, 19 nt, Artificial Sequence
  Description of Artificial Sequence: Synthetic oligonucleotide
caguagaagucagcacccc

SEQ ID NO: 1213565 - RNA, 19 nt, Artificial Sequence
  Description of Artificial Sequence: Synthetic oligonucleotide
agcgucuugcgccgcgucu

SEQ ID NO: 1213566 - RNA, 19 nt, Artificial Sequence
  Description of Artificial Sequence: Synthetic oligonucleotide
gcguagaaguaggugggcg

SEQ ID NO: 1213567 - RNA, 19 nt, Artificial Sequence
  Description of Artificial Sequence: Synthetic oligonucleotide
cauggcuguuccaagaauu

SEQ ID NO: 1213568 - RNA, 19 nt, Artificial Sequence
  Description of Artificial Sequence: Synthetic oligonucleotide
gacgucguucuuggagaag

SEQ ID NO: 1213569 - RNA, 19 nt, Artificial Sequence
  Description of Artificial Sequence: Synthetic oligonucleotide
gaggguucagucacaccuc

SEQ ID NO: 1213570 - RNA, 19 nt, Artificial Sequence
  Description of Artificial Sequence: Synthetic oligonucleotide
gagccgcaaaggguugggg

SEQ ID NO: 1213571 - RNA, 19 nt, Artificial Sequence
  Description of Artificial Sequence: Synthetic oligonucleotide
guaggugggcgacccguac

SEQ ID NO: 1213572 - RNA, 19 nt, Artificial Sequence
  Description of Artificial Sequence: Synthetic oligonucleotide
accucgucgccgugcgcgg

SEQ ID NO: 1213573 - RNA, 19 nt, Artificial Sequence
  Description of Artificial Sequence: Synthetic oligonucleotide
caauacaugaggguucagu

SEQ ID NO: 1213574 - RNA, 19 nt, Artificial Sequence
  Description of Artificial Sequence: Synthetic oligonucleotide
cucuagcaggacaccugug

SEQ ID NO: 1213575 - RNA, 19 nt, Artificial Sequence
  Description of Artificial Sequence: Synthetic oligonucleotide
gggagugacgucguucuug

SEQ ID NO: 1213576 - RNA, 19 nt, Artificial Sequence
  Description of Artificial Sequence: Synthetic oligonucleotide
agcgcguccuugcccucgg

SEQ ID NO: 1213577 - RNA, 19 nt, Artificial Sequence
  Description of Artificial Sequence: Synthetic oligonucleotide
uggcuguaucauggggucc

SEQ ID NO: 1213578 - RNA, 19 nt, Artificial Sequence
  Description of Artificial Sequence: Synthetic oligonucleotide
ggacgccgaacacguaggg

SEQ ID NO: 1213579 - RNA, 19 nt, Artificial Sequence
  Description of Artificial Sequence: Synthetic oligonucleotide
gcccaguccguguacauga

SEQ ID NO: 1213580 - RNA, 19 nt, Artificial Sequence
  Description of Artificial Sequence: Synthetic oligonucleotide
cauguucccaccucagcgu

SEQ ID NO: 1213581 - RNA, 19 nt, Artificial Sequence
  Description of Artificial Sequence: Synthetic oligonucleotide
agguaaguuuccaggcagu

SEQ ID NO: 1213582 - RNA, 19 nt, Artificial Sequence
  Description of Artificial Sequence: Synthetic oligonucleotide
ccacgggaagguaaguuuc

SEQ ID NO: 1213583 - RNA, 19 nt, Artificial Sequence
  Description of Artificial Sequence: Synthetic oligonucleotide
gggaaugcagguaagugcu

SEQ ID NO: 1213584 - RNA, 19 nt, Artificial Sequence
  Description of Artificial Sequence: Synthetic oligonucleotide
gacuaggacuuaggggauc

SEQ ID NO: 1213585 - RNA, 19 nt, Artificial Sequence
  Description of Artificial Sequence: Synthetic oligonucleotide
gaacgugcaucaccugacu

SEQ ID NO: 1213586 - RNA, 19 nt, Artificial Sequence
  Description of Artificial Sequence: Synthetic oligonucleotide
gaucugggugucaguagaa

SEQ ID NO: 1213587 - RNA, 19 nt, Artificial Sequence
  Description of Artificial Sequence: Synthetic oligonucleotide
ggaacucaagaccaaggau

SEQ ID NO: 1213588 - RNA, 19 nt, Artificial Sequence
  Description of Artificial Sequence: Synthetic oligonucleotide
ggccccaugagagcuuagg

SEQ ID NO: 1213589 - RNA, 19 nt, Artificial Sequence
  Description of Artificial Sequence: Synthetic oligonucleotide
aucuuuugccagguuuaaa

SEQ ID NO: 1213590 - RNA, 19 nt, Artificial Sequence
  Description of Artificial Sequence: Synthetic oligonucleotide
gggacgccgaacacguagg

SEQ ID NO: 1213591 - RNA, 19 nt, Artificial Sequence
  Description of Artificial Sequence: Synthetic oligonucleotide
cugcgcguggaggucggcg

SEQ ID NO: 1213592 - RNA, 19 nt, Artificial Sequence
  Description of Artificial Sequence: Synthetic oligonucleotide
ccagggagaacgugcauca

SEQ ID NO: 1213593 - RNA, 19 nt, Artificial Sequence
  Description of Artificial Sequence: Synthetic oligonucleotide
gcauuggaguccguggcug

SEQ ID NO: 1213594 - RNA, 19 nt, Artificial Sequence
  Description of Artificial Sequence: Synthetic oligonucleotide
cuccgcguucucgcggucg

SEQ ID NO: 1213595 - RNA, 19 nt, Artificial Sequence
  Description of Artificial Sequence: Synthetic oligonucleotide
ccccuacccaguuuggcac

SEQ ID NO: 1213596 - RNA, 19 nt, Artificial Sequence
  Description of Artificial Sequence: Synthetic oligonucleotide
cccuuaagaccuuuccuga

SEQ ID NO: 1213597 - RNA, 19 nt, Artificial Sequence
  Description of Artificial Sequence: Synthetic oligonucleotide
gucggugaacagcgccacc

SEQ ID NO: 1213598 - RNA, 19 nt, Artificial Sequence
  Description of Artificial Sequence: Synthetic oligonucleotide
uggggccgagcauggggac

SEQ ID NO: 1213599 - RNA, 19 nt, Artificial Sequence
  Description of Artificial Sequence: Synthetic oligonucleotide
cacugguggucggugaaca

SEQ ID NO: 1213600 - RNA, 19 nt, Artificial Sequence
  Description of Artificial Sequence: Synthetic oligonucleotide
cccuccaaguuuguacucc

SEQ ID NO: 1213601 - RNA, 19 nt, Artificial Sequence
  Description of Artificial Sequence: Synthetic oligonucleotide
gcgucucccuccaaguuug

SEQ ID NO: 1213602 - RNA, 19 nt, Artificial Sequence
  Description of Artificial Sequence: Synthetic oligonucleotide
ugcgccgcgucuccgcguu

SEQ ID NO: 1213603 - RNA, 19 nt, Artificial Sequence
  Description of Artificial Sequence: Synthetic oligonucleotide
gucgccgugcgcggcgucg

SEQ ID NO: 1213604 - RNA, 19 nt, Artificial Sequence
  Description of Artificial Sequence: Synthetic oligonucleotide
ccaccagcgucuugcgccg

SEQ ID NO: 1213605 - RNA, 19 nt, Artificial Sequence
  Description of Artificial Sequence: Synthetic oligonucleotide
ucgccgugcgcggcgucgg

SEQ ID NO: 1213606 - RNA, 19 nt, Artificial Sequence
  Description of Artificial Sequence: Synthetic oligonucleotide
gggcgccacccacuggugg

SEQ ID NO: 1213607 - RNA, 19 nt, Artificial Sequence
  Description of Artificial Sequence: Synthetic oligonucleotide
gccguacagguuguccacg

SEQ ID NO: 1213608 - RNA, 19 nt, Artificial Sequence
  Description of Artificial Sequence: Synthetic oligonucleotide
auuggaguccguggcugua

SEQ ID NO: 1213609 - RNA, 19 nt, Artificial Sequence
  Description of Artificial Sequence: Synthetic oligonucleotide
cauggacugagggaaggcu

SEQ ID NO: 1213610 - RNA, 19 nt, Artificial Sequence
  Description of Artificial Sequence: Synthetic oligonucleotide
guucucgcggucggcccag

SEQ ID NO: 1213611 - RNA, 19 nt, Artificial Sequence
  Description of Artificial Sequence: Synthetic oligonucleotide
ccgcaaaggguuggggugg

SEQ ID NO: 1213612 - RNA, 19 nt, Artificial Sequence
  Description of Artificial Sequence: Synthetic oligonucleotide
agcuuaggucaaacaugca

SEQ ID NO: 1213613 - RNA, 19 nt, Artificial Sequence
  Description of Artificial Sequence: Synthetic oligonucleotide
gaguccguggcuguaucau

SEQ ID NO: 1213614 - RNA, 19 nt, Artificial Sequence
  Description of Artificial Sequence: Synthetic oligonucleotide
cuagcaggacaccuguguu

SEQ ID NO: 1213615 - RNA, 19 nt, Artificial Sequence
  Description of Artificial Sequence: Synthetic oligonucleotide
cugugauuucuuagcugcu

SEQ ID NO: 1213616 - RNA, 19 nt, Artificial Sequence
  Description of Artificial Sequence: Synthetic oligonucleotide
cguagaaguaggugggcga

SEQ ID NO: 1213617 - RNA, 19 nt, Artificial Sequence
  Description of Artificial Sequence: Synthetic oligonucleotide
gggaugcacagaucuccuc

SEQ ID NO: 1213618 - RNA, 19 nt, Artificial Sequence
  Description of Artificial Sequence: Synthetic oligonucleotide
gagugacgucguucuugga

SEQ ID NO: 1213619 - RNA, 19 nt, Artificial Sequence
  Description of Artificial Sequence: Synthetic oligonucleotide
gucuugcgccgcgucuccg

SEQ ID NO: 1213620 - RNA, 19 nt, Artificial Sequence
  Description of Artificial Sequence: Synthetic oligonucleotide
cugucaacuugaagucugu

SEQ ID NO: 1213621 - RNA, 19 nt, Artificial Sequence
  Description of Artificial Sequence: Synthetic oligonucleotide
ccuguauugucuggugguc

SEQ ID NO: 1213622 - RNA, 19 nt, Artificial Sequence
  Description of Artificial Sequence: Synthetic oligonucleotide
cacuaacaucccacagaaa

SEQ ID NO: 1213623 - RNA, 19 nt, Artificial Sequence
  Description of Artificial Sequence: Synthetic oligonucleotide
gggccgagcauggggacgc

SEQ ID NO: 1213624 - RNA, 19 nt, Artificial Sequence
  Description of Artificial Sequence: Synthetic oligonucleotide
ggucggugaacagcgccac

SEQ ID NO: 1213625 - RNA, 19 nt, Artificial Sequence
  Description of Artificial Sequence: Synthetic oligonucleotide
gcgucuccgcguucucgcg

SEQ ID NO: 1213626 - RNA, 19 nt, Artificial Sequence
  Description of Artificial Sequence: Synthetic oligonucleotide
agugccccuuaagaccuuu

SEQ ID NO: 1213627 - RNA, 19 nt, Artificial Sequence
  Description of Artificial Sequence: Synthetic oligonucleotide
uggucucgcgcagcgcguc

SEQ ID NO: 1213628 - RNA, 19 nt, Artificial Sequence
  Description of Artificial Sequence: Synthetic oligonucleotide
guacugggaugcacagauc

SEQ ID NO: 1213629 - RNA, 19 nt, Artificial Sequence
  Description of Artificial Sequence: Synthetic oligonucleotide
gacccguacugcgcgugga

SEQ ID NO: 1213630 - RNA, 19 nt, Artificial Sequence
  Description of Artificial Sequence: Synthetic oligonucleotide
cauuggaguccguggcugu

SEQ ID NO: 1213631 - RNA, 19 nt, Artificial Sequence
  Description of Artificial Sequence: Synthetic oligonucleotide
ggggcuccgagggagugac

SEQ ID NO: 1213632 - RNA, 19 nt, Artificial Sequence
  Description of Artificial Sequence: Synthetic oligonucleotide
agggagugacgucguucuu

SEQ ID NO: 1213633 - RNA, 19 nt, Artificial Sequence
  Description of Artificial Sequence: Synthetic oligonucleotide
aguaggugggcgacccgua

SEQ ID NO: 1213634 - RNA, 19 nt, Artificial Sequence
  Description of Artificial Sequence: Synthetic oligonucleotide
gcguucucgcggucggccc

SEQ ID NO: 1213635 - RNA, 19 nt, Artificial Sequence
  Description of Artificial Sequence: Synthetic oligonucleotide
ggggccgagcauggggacg

SEQ ID NO: 1213636 - RNA, 19 nt, Artificial Sequence
  Description of Artificial Sequence: Synthetic oligonucleotide
ccagugccccuuaagaccu

SEQ ID NO: 1213637 - RNA, 19 nt, Artificial Sequence
  Description of Artificial Sequence: Synthetic oligonucleotide
ggcccaguccguguacaug

SEQ ID NO: 1213638 - RNA, 19 nt, Artificial Sequence
  Description of Artificial Sequence: Synthetic oligonucleotide
caguacugggaugcacaga

SEQ ID NO: 1213639 - RNA, 19 nt, Artificial Sequence
  Description of Artificial Sequence: Synthetic oligonucleotide
cuagaccaggcaggggaaa

SEQ ID NO: 1213640 - RNA, 19 nt, Artificial Sequence
  Description of Artificial Sequence: Synthetic oligonucleotide
auggucucgcgcagcgcgu

SEQ ID NO: 1213641 - RNA, 19 nt, Artificial Sequence
  Description of Artificial Sequence: Synthetic oligonucleotide
ggucaaacaugcacagccu

SEQ ID NO: 1213642 - RNA, 19 nt, Artificial Sequence
  Description of Artificial Sequence: Synthetic oligonucleotide
ggucucgcgcagcgcgucc

SEQ ID NO: 1213643 - RNA, 19 nt, Artificial Sequence
  Description of Artificial Sequence: Synthetic oligonucleotide
ccuauacaaguuuggcacu

SEQ ID NO: 1213644 - RNA, 19 nt, Artificial Sequence
  Description of Artificial Sequence: Synthetic oligonucleotide
gcauggggacgccgaacac

SEQ ID NO: 1213645 - RNA, 19 nt, Artificial Sequence
  Description of Artificial Sequence: Synthetic oligonucleotide
gccccuuaagaccuuuccu

SEQ ID NO: 1213646 - RNA, 19 nt, Artificial Sequence
  Description of Artificial Sequence: Synthetic oligonucleotide
aggggcuccgagggaguga

SEQ ID NO: 1213647 - RNA, 19 nt, Artificial Sequence
  Description of Artificial Sequence: Synthetic oligonucleotide
gugggaggcgagggccucc

SEQ ID NO: 1213648 - RNA, 19 nt, Artificial Sequence
  Description of Artificial Sequence: Synthetic oligonucleotide
gcguggaggucggcggugg

SEQ ID NO: 1213649 - RNA, 19 nt, Artificial Sequence
  Description of Artificial Sequence: Synthetic oligonucleotide
gcuguaucauggggucccc

SEQ ID NO: 1213650 - RNA, 19 nt, Artificial Sequence
  Description of Artificial Sequence: Synthetic oligonucleotide
gguggucggugaacagcgc

SEQ ID NO: 1213651 - RNA, 19 nt, Artificial Sequence
  Description of Artificial Sequence: Synthetic oligonucleotide
cccuguauugucugguggu

SEQ ID NO: 1213652 - RNA, 19 nt, Artificial Sequence
  Description of Artificial Sequence: Synthetic oligonucleotide
ggcuccgagggagugacgu

SEQ ID NO: 1213653 - RNA, 19 nt, Artificial Sequence
  Description of Artificial Sequence: Synthetic oligonucleotide
cgcguccuugcccucgggg

SEQ ID NO: 1213654 - RNA, 19 nt, Artificial Sequence
  Description of Artificial Sequence: Synthetic oligonucleotide
ggugggcgacccguacugc

SEQ ID NO: 1213655 - RNA, 19 nt, Artificial Sequence
  Description of Artificial Sequence: Synthetic oligonucleotide
cgucuccgcguucucgcgg

SEQ ID NO: 1213656 - RNA, 19 nt, Artificial Sequence
  Description of Artificial Sequence: Synthetic oligonucleotide
ccguacagguuguccacga

SEQ ID NO: 1213657 - RNA, 19 nt, Artificial Sequence
  Description of Artificial Sequence: Synthetic oligonucleotide
ccgagcauggggacgccga

SEQ ID NO: 1213658 - RNA, 19 nt, Artificial Sequence
  Description of Artificial Sequence: Synthetic oligonucleotide
gugccccuuaagaccuuuc

SEQ ID NO: 1213659 - RNA, 19 nt, Artificial Sequence
  Description of Artificial Sequence: Synthetic oligonucleotide
gccgagcauggggacgccg

SEQ ID NO: 1213660 - RNA, 19 nt, Artificial Sequence
  Description of Artificial Sequence: Synthetic oligonucleotide
gccgaacacguagggcacc

SEQ ID NO: 1213661 - RNA, 19 nt, Artificial Sequence
  Description of Artificial Sequence: Synthetic oligonucleotide
gcuccgagggagugacguc

SEQ ID NO: 1213662 - RNA, 19 nt, Artificial Sequence
  Description of Artificial Sequence: Synthetic oligonucleotide
agggcggcuuggcgucgcu

SEQ ID NO: 1213663 - RNA, 19 nt, Artificial Sequence
  Description of Artificial Sequence: Synthetic oligonucleotide
ucgucgccgugcgcggcgu

SEQ ID NO: 1213664 - RNA, 19 nt, Artificial Sequence
  Description of Artificial Sequence: Synthetic oligonucleotide
cagggcggcuuggcgucgc

SEQ ID NO: 1213665 - RNA, 19 nt, Artificial Sequence
  Description of Artificial Sequence: Synthetic oligonucleotide
cgagggagugacgucguuc

SEQ ID NO: 1213666 - RNA, 19 nt, Artificial Sequence
  Description of Artificial Sequence: Synthetic oligonucleotide
cgccgaacacguagggcac

SEQ ID NO: 1213667 - RNA, 19 nt, Artificial Sequence
  Description of Artificial Sequence: Synthetic oligonucleotide
caugugccaugccccacau

SEQ ID NO: 1213668 - RNA, 19 nt, Artificial Sequence
  Description of Artificial Sequence: Synthetic oligonucleotide
caccugucccuggcauuuc

SEQ ID NO: 1213669 - RNA, 19 nt, Artificial Sequence
  Description of Artificial Sequence: Synthetic oligonucleotide
ggguuggggugggaacaug

SEQ ID NO: 1213670 - RNA, 19 nt, Artificial Sequence
  Description of Artificial Sequence: Synthetic oligonucleotide
gguagccguacagguuguc

SEQ ID NO: 1213671 - RNA, 19 nt, Artificial Sequence
  Description of Artificial Sequence: Synthetic oligonucleotide
cuacccaguuuggcacaga

SEQ ID NO: 1213672 - RNA, 19 nt, Artificial Sequence
  Description of Artificial Sequence: Synthetic oligonucleotide
gguggccacggcgggcgcc

SEQ ID NO: 1213673 - RNA, 19 nt, Artificial Sequence
  Description of Artificial Sequence: Synthetic oligonucleotide
ccuuaagaccuuuccugau

SEQ ID NO: 1213674 - RNA, 19 nt, Artificial Sequence
  Description of Artificial Sequence: Synthetic oligonucleotide
gcgacccguacugcgcgug

SEQ ID NO: 1213675 - RNA, 19 nt, Artificial Sequence
  Description of Artificial Sequence: Synthetic oligonucleotide
cgacccguacugcgcgugg

SEQ ID NO: 1213676 - RNA, 19 nt, Artificial Sequence
  Description of Artificial Sequence: Synthetic oligonucleotide
cgcguucucgcggucggcc

SEQ ID NO: 1213677 - RNA, 19 nt, Artificial Sequence
  Description of Artificial Sequence: Synthetic oligonucleotide
cgucuugcgccgcgucucc

SEQ ID NO: 1213678 - RNA, 19 nt, Artificial Sequence
  Description of Artificial Sequence: Synthetic oligonucleotide
ggggauccuuggcacauuu

SEQ ID NO: 1213679 - RNA, 19 nt, Artificial Sequence
  Description of Artificial Sequence: Synthetic oligonucleotide
caccagcgucuugcgccgc

SEQ ID NO: 1213680 - RNA, 19 nt, Artificial Sequence
  Description of Artificial Sequence: Synthetic oligonucleotide
cccuacccaguuuggcaca

SEQ ID NO: 1213681 - RNA, 19 nt, Artificial Sequence
  Description of Artificial Sequence: Synthetic oligonucleotide
ccgcgucuccgcguucucg

SEQ ID NO: 1213682 - RNA, 19 nt, Artificial Sequence
  Description of Artificial Sequence: Synthetic oligonucleotide
gugcgcggcgucggcccag

SEQ ID NO: 1213683 - RNA, 19 nt, Artificial Sequence
  Description of Artificial Sequence: Synthetic oligonucleotide
caccugcuaugugugugcu

SEQ ID NO: 1213684 - RNA, 19 nt, Artificial Sequence
  Description of Artificial Sequence: Synthetic oligonucleotide
cgcggcgucggcccagggc

SEQ ID NO: 1213685 - RNA, 19 nt, Artificial Sequence
  Description of Artificial Sequence: Synthetic oligonucleotide
ccccuuagcugccaccugu

SEQ ID NO: 1213686 - RNA, 19 nt, Artificial Sequence
  Description of Artificial Sequence: Synthetic oligonucleotide
cagcgucucccuccaaguu

SEQ ID NO: 1213687 - RNA, 19 nt, Artificial Sequence
  Description of Artificial Sequence: Synthetic oligonucleotide
gcgcguccuugcccucggg

SEQ ID NO: 1213688 - RNA, 19 nt, Artificial Sequence
  Description of Artificial Sequence: Synthetic oligonucleotide
ggacuaggacuuaggggau

SEQ ID NO: 1213689 - RNA, 19 nt, Artificial Sequence
  Description of Artificial Sequence: Synthetic oligonucleotide
gucucgcgcagcgcguccu

SEQ ID NO: 1213690 - RNA, 19 nt, Artificial Sequence
  Description of Artificial Sequence: Synthetic oligonucleotide
cggcuuggcgucgcucugg

SEQ ID NO: 1213691 - RNA, 19 nt, Artificial Sequence
  Description of Artificial Sequence: Synthetic oligonucleotide
gggcuccgagggagugacg

SEQ ID NO: 1213692 - RNA, 19 nt, Artificial Sequence
  Description of Artificial Sequence: Synthetic oligonucleotide
cgccaccagcgucuugcgc

SEQ ID NO: 1213693 - RNA, 19 nt, Artificial Sequence
  Description of Artificial Sequence: Synthetic oligonucleotide
cguacagguuguccacgaa

SEQ ID NO: 1213694 - RNA, 19 nt, Artificial Sequence
  Description of Artificial Sequence: Synthetic oligonucleotide
ccguguacaugaacuugau

SEQ ID NO: 1213695 - RNA, 19 nt, Artificial Sequence
  Description of Artificial Sequence: Synthetic oligonucleotide
cguucucgcggucggccca

SEQ ID NO: 1213696 - RNA, 19 nt, Artificial Sequence
  Description of Artificial Sequence: Synthetic oligonucleotide
ccccagauaccacccugua

SEQ ID NO: 1213697 - RNA, 19 nt, Artificial Sequence
  Description of Artificial Sequence: Synthetic oligonucleotide
gcccucgggguagccguac

SEQ ID NO: 1213698 - RNA, 19 nt, Artificial Sequence
  Description of Artificial Sequence: Synthetic oligonucleotide
ggaccacgggaagguaagu

SEQ ID NO: 1213699 - RNA, 19 nt, Artificial Sequence
  Description of Artificial Sequence: Synthetic oligonucleotide
gcgccacccacuggugguc

SEQ ID NO: 1213700 - RNA, 19 nt, Artificial Sequence
  Description of Artificial Sequence: Synthetic oligonucleotide
gugccaugccccacauguu

SEQ ID NO: 1213701 - RNA, 19 nt, Artificial Sequence
  Description of Artificial Sequence: Synthetic oligonucleotide
ggccgagcauggggacgcc

SEQ ID NO: 1213702 - RNA, 19 nt, Artificial Sequence
  Description of Artificial Sequence: Synthetic oligonucleotide
cggcgucggcccagggcgg

SEQ ID NO: 1213703 - RNA, 19 nt, Artificial Sequence
  Description of Artificial Sequence: Synthetic oligonucleotide
gccgcgucuccgcguucuc

SEQ ID NO: 1213704 - RNA, 19 nt, Artificial Sequence
  Description of Artificial Sequence: Synthetic oligonucleotide
ggguagccguacagguugu

SEQ ID NO: 1213705 - RNA, 19 nt, Artificial Sequence
  Description of Artificial Sequence: Synthetic oligonucleotide
ggucgguggggccgagcau

SEQ ID NO: 1213706 - RNA, 19 nt, Artificial Sequence
  Description of Artificial Sequence: Synthetic oligonucleotide
ggcgacccguacugcgcgu

SEQ ID NO: 1213707 - RNA, 19 nt, Artificial Sequence
  Description of Artificial Sequence: Synthetic oligonucleotide
gcgcggcgucggcccaggg

SEQ ID NO: 1213708 - RNA, 19 nt, Artificial Sequence
  Description of Artificial Sequence: Synthetic oligonucleotide
gcgcguggaggucggcggu

SEQ ID NO: 1213709 - RNA, 19 nt, Artificial Sequence
  Description of Artificial Sequence: Synthetic oligonucleotide
cagugccccuuaagaccuu

SEQ ID NO: 1213710 - RNA, 19 nt, Artificial Sequence
  Description of Artificial Sequence: Synthetic oligonucleotide
cgucguucuuggagaaguu

SEQ ID NO: 1213711 - RNA, 19 nt, Artificial Sequence
  Description of Artificial Sequence: Synthetic oligonucleotide
gcgccgcgucuccgcguuc

SEQ ID NO: 1213712 - RNA, 19 nt, Artificial Sequence
  Description of Artificial Sequence: Synthetic oligonucleotide
cgucgccgugcgcggcguc

SEQ ID NO: 1213713 - RNA, 19 nt, Artificial Sequence
  Description of Artificial Sequence: Synthetic oligonucleotide
cgucucccuccaaguuugu

SEQ ID NO: 1213714 - RNA, 19 nt, Artificial Sequence
  Description of Artificial Sequence: Synthetic oligonucleotide
ccgagggagugacgucguu

SEQ ID NO: 1213715 - RNA, 19 nt, Artificial Sequence
  Description of Artificial Sequence: Synthetic oligonucleotide
cgccgcgucuccgcguucu

SEQ ID NO: 1213716 - RNA, 19 nt, Artificial Sequence
  Description of Artificial Sequence: Synthetic oligonucleotide
ucuaaguagagucugaugc

SEQ ID NO: 1213717 - RNA, 19 nt, Artificial Sequence
  Description of Artificial Sequence: Synthetic oligonucleotide
aauaaggacugucaaauuc

SEQ ID NO: 1213718 - RNA, 19 nt, Artificial Sequence
  Description of Artificial Sequence: Synthetic oligonucleotide
uaauaaacagguaaaaggc

SEQ ID NO: 1213719 - RNA, 19 nt, Artificial Sequence
  Description of Artificial Sequence: Synthetic oligonucleotide
aacuuguacaaucagaaga

SEQ ID NO: 1213720 - RNA, 19 nt, Artificial Sequence
  Description of Artificial Sequence: Synthetic oligonucleotide
auuauucgaauuuaguuuc

SEQ ID NO: 1213721 - RNA, 19 nt, Artificial Sequence
  Description of Artificial Sequence: Synthetic oligonucleotide
gaaugaaaggcacacauag

SEQ ID NO: 1213722 - RNA, 19 nt, Artificial Sequence
  Description of Artificial Sequence: Synthetic oligonucleotide
acauguauaaaucuucaac

SEQ ID NO: 1213723 - RNA, 19 nt, Artificial Sequence
  Description of Artificial Sequence: Synthetic oligonucleotide
ugcagauugucauugaacg

SEQ ID NO: 1213724 - RNA, 19 nt, Artificial Sequence
  Description of Artificial Sequence: Synthetic oligonucleotide
aguaauuuaguguuaaaug

SEQ ID NO: 1213725 - RNA, 19 nt, Artificial Sequence
  Description of Artificial Sequence: Synthetic oligonucleotide
aacauuggcauugauuugc

SEQ ID NO: 1213726 - RNA, 19 nt, Artificial Sequence
  Description of Artificial Sequence: Synthetic oligonucleotide
auugauuugcuauuuacag

SEQ ID NO: 1213727 - RNA, 19 nt, Artificial Sequence
  Description of Artificial Sequence: Synthetic oligonucleotide
uuauauucugcuaguaccg

SEQ ID NO: 1213728 - RNA, 19 nt, Artificial Sequence
  Description of Artificial Sequence: Synthetic oligonucleotide
aaauuaucgaaacauguau

SEQ ID NO: 1213729 - RNA, 19 nt, Artificial Sequence
  Description of Artificial Sequence: Synthetic oligonucleotide
uuuacgaaagccuugagau

SEQ ID NO: 1213730 - RNA, 19 nt, Artificial Sequence
  Description of Artificial Sequence: Synthetic oligonucleotide
aauccagucaccuaaaaua

SEQ ID NO: 1213731 - RNA, 19 nt, Artificial Sequence
  Description of Artificial Sequence: Synthetic oligonucleotide
aagccuauuagaguuauac

SEQ ID NO: 1213732 - RNA, 19 nt, Artificial Sequence
  Description of Artificial Sequence: Synthetic oligonucleotide
aauauaacaauaguugcca

SEQ ID NO: 1213733 - RNA, 19 nt, Artificial Sequence
  Description of Artificial Sequence: Synthetic oligonucleotide
acuauaagaagcauucucc

SEQ ID NO: 1213734 - RNA, 19 nt, Artificial Sequence
  Description of Artificial Sequence: Synthetic oligonucleotide
uuuaccuacaaaauuuaca

SEQ ID NO: 1213735 - RNA, 19 nt, Artificial Sequence
  Description of Artificial Sequence: Synthetic oligonucleotide
agaagacugguuuagguuc

SEQ ID NO: 1213736 - RNA, 19 nt, Artificial Sequence
  Description of Artificial Sequence: Synthetic oligonucleotide
aagaaggacaccuuuugug

SEQ ID NO: 1213737 - RNA, 19 nt, Artificial Sequence
  Description of Artificial Sequence: Synthetic oligonucleotide
uucgaauuuaguuucauau

SEQ ID NO: 1213738 - RNA, 19 nt, Artificial Sequence
  Description of Artificial Sequence: Synthetic oligonucleotide
acagaauacccucuuauag

SEQ ID NO: 1213739 - RNA, 19 nt, Artificial Sequence
  Description of Artificial Sequence: Synthetic oligonucleotide
uauuauucgaauuuaguuu

SEQ ID NO: 1213740 - RNA, 19 nt, Artificial Sequence
  Description of Artificial Sequence: Synthetic oligonucleotide
uuuauacacaggaaaguca

SEQ ID NO: 1213741 - RNA, 19 nt, Artificial Sequence
  Description of Artificial Sequence: Synthetic oligonucleotide
ggagaugccaagcagaugg

SEQ ID NO: 1213742 - RNA, 19 nt, Artificial Sequence
  Description of Artificial Sequence: Synthetic oligonucleotide
ucuaauaaacagguaaaag

SEQ ID NO: 1213743 - RNA, 19 nt, Artificial Sequence
  Description of Artificial Sequence: Synthetic oligonucleotide
agaguuauacagcuaauug

SEQ ID NO: 1213744 - RNA, 19 nt, Artificial Sequence
  Description of Artificial Sequence: Synthetic oligonucleotide
aauauugcacgcuucuugu

SEQ ID NO: 1213745 - RNA, 19 nt, Artificial Sequence
  Description of Artificial Sequence: Synthetic oligonucleotide
uguaugccagcaaagaaca

SEQ ID NO: 1213746 - RNA, 19 nt, Artificial Sequence
  Description of Artificial Sequence: Synthetic oligonucleotide
uuuaugcacauauuuaccu

SEQ ID NO: 1213747 - RNA, 19 nt, Artificial Sequence
  Description of Artificial Sequence: Synthetic oligonucleotide
auuagaguuauacagcuaa

SEQ ID NO: 1213748 - RNA, 19 nt, Artificial Sequence
  Description of Artificial Sequence: Synthetic oligonucleotide
aagacauauuauauucugc

SEQ ID NO: 1213749 - RNA, 19 nt, Artificial Sequence
  Description of Artificial Sequence: Synthetic oligonucleotide
uaagaagcauucuccagcg

SEQ ID NO: 1213750 - RNA, 19 nt, Artificial Sequence
  Description of Artificial Sequence: Synthetic oligonucleotide
guacuuuaaguauuuacag

SEQ ID NO: 1213751 - RNA, 19 nt, Artificial Sequence
  Description of Artificial Sequence: Synthetic oligonucleotide
aauacccucuuauagaguu

SEQ ID NO: 1213752 - RNA, 19 nt, Artificial Sequence
  Description of Artificial Sequence: Synthetic oligonucleotide
gaguugaaguauuaaagug

SEQ ID NO: 1213753 - RNA, 19 nt, Artificial Sequence
  Description of Artificial Sequence: Synthetic oligonucleotide
uaucgaaacauguauaaau

SEQ ID NO: 1213754 - RNA, 19 nt, Artificial Sequence
  Description of Artificial Sequence: Synthetic oligonucleotide
uuauacacaggaaagucaa

SEQ ID NO: 1213755 - RNA, 19 nt, Artificial Sequence
  Description of Artificial Sequence: Synthetic oligonucleotide
agucaccuaaaauaaggac

SEQ ID NO: 1213756 - RNA, 19 nt, Artificial Sequence
  Description of Artificial Sequence: Synthetic oligonucleotide
accuacaaaauuuacagaa

SEQ ID NO: 1213757 - RNA, 19 nt, Artificial Sequence
  Description of Artificial Sequence: Synthetic oligonucleotide
ugcaggagaacaaagucca

SEQ ID NO: 1213758 - RNA, 19 nt, Artificial Sequence
  Description of Artificial Sequence: Synthetic oligonucleotide
ucauauuagaugaaauuua

SEQ ID NO: 1213759 - RNA, 19 nt, Artificial Sequence
  Description of Artificial Sequence: Synthetic oligonucleotide
uuaaguauuuacagcaauc

SEQ ID NO: 1213760 - RNA, 19 nt, Artificial Sequence
  Description of Artificial Sequence: Synthetic oligonucleotide
aagaugaacacguuaguua

SEQ ID NO: 1213761 - RNA, 19 nt, Artificial Sequence
  Description of Artificial Sequence: Synthetic oligonucleotide
ugaaaggcacacauaguag

SEQ ID NO: 1213762 - RNA, 19 nt, Artificial Sequence
  Description of Artificial Sequence: Synthetic oligonucleotide
gucacuuguugcuaaaccg

SEQ ID NO: 1213763 - RNA, 19 nt, Artificial Sequence
  Description of Artificial Sequence: Synthetic oligonucleotide
gaacacguuaguuaauggc

SEQ ID NO: 1213764 - RNA, 19 nt, Artificial Sequence
  Description of Artificial Sequence: Synthetic oligonucleotide
ugcaauucaaagaaugcaa

SEQ ID NO: 1213765 - RNA, 19 nt, Artificial Sequence
  Description of Artificial Sequence: Synthetic oligonucleotide
acuuguacaaucagaagac

SEQ ID NO: 1213766 - RNA, 19 nt, Artificial Sequence
  Description of Artificial Sequence: Synthetic oligonucleotide
ugucucaggaucuauuagc

SEQ ID NO: 1213767 - RNA, 19 nt, Artificial Sequence
  Description of Artificial Sequence: Synthetic oligonucleotide
cucaggaucuauuagccag

SEQ ID NO: 1213768 - RNA, 19 nt, Artificial Sequence
  Description of Artificial Sequence: Synthetic oligonucleotide
ucuagguuucaaaauuagc

SEQ ID NO: 1213769 - RNA, 19 nt, Artificial Sequence
  Description of Artificial Sequence: Synthetic oligonucleotide
auuaucgaaacauguauaa

SEQ ID NO: 1213770 - RNA, 19 nt, Artificial Sequence
  Description of Artificial Sequence: Synthetic oligonucleotide
uuagguucccuaacaacag

SEQ ID NO: 1213771 - RNA, 19 nt, Artificial Sequence
  Description of Artificial Sequence: Synthetic oligonucleotide
uauaacaauaguugccaga

SEQ ID NO: 1213772 - RNA, 19 nt, Artificial Sequence
  Description of Artificial Sequence: Synthetic oligonucleotide
uugcuaaaccgucacauac

SEQ ID NO: 1213773 - RNA, 19 nt, Artificial Sequence
  Description of Artificial Sequence: Synthetic oligonucleotide
accacuauaagaagcauuc

SEQ ID NO: 1213774 - RNA, 19 nt, Artificial Sequence
  Description of Artificial Sequence: Synthetic oligonucleotide
ucaaauucccagacaauac

SEQ ID NO: 1213775 - RNA, 19 nt, Artificial Sequence
  Description of Artificial Sequence: Synthetic oligonucleotide
ugagguuugguuucuaagu

SEQ ID NO: 1213776 - RNA, 19 nt, Artificial Sequence
  Description of Artificial Sequence: Synthetic oligonucleotide
ccauuguucauuuucaggg

SEQ ID NO: 1213777 - RNA, 19 nt, Artificial Sequence
  Description of Artificial Sequence: Synthetic oligonucleotide
acuacucuuuuguguaugc

SEQ ID NO: 1213778 - RNA, 19 nt, Artificial Sequence
  Description of Artificial Sequence: Synthetic oligonucleotide
auaaucugggcaaauauug

SEQ ID NO: 1213779 - RNA, 19 nt, Artificial Sequence
  Description of Artificial Sequence: Synthetic oligonucleotide
gccuauuagaguuauacag

SEQ ID NO: 1213780 - RNA, 19 nt, Artificial Sequence
  Description of Artificial Sequence: Synthetic oligonucleotide
gagcagcuauaauugaugg

SEQ ID NO: 1213781 - RNA, 19 nt, Artificial Sequence
  Description of Artificial Sequence: Synthetic oligonucleotide
uaaaaggcaccucuaguac

SEQ ID NO: 1213782 - RNA, 19 nt, Artificial Sequence
  Description of Artificial Sequence: Synthetic oligonucleotide
caguaugccaucaacacuc

SEQ ID NO: 1213783 - RNA, 19 nt, Artificial Sequence
  Description of Artificial Sequence: Synthetic oligonucleotide
uacaaucagaagacuuugg

SEQ ID NO: 1213784 - RNA, 19 nt, Artificial Sequence
  Description of Artificial Sequence: Synthetic oligonucleotide
uccuauuauucgaauuuag

SEQ ID NO: 1213785 - RNA, 19 nt, Artificial Sequence
  Description of Artificial Sequence: Synthetic oligonucleotide
uacgaaagccuugagaucu

SEQ ID NO: 1213786 - RNA, 19 nt, Artificial Sequence
  Description of Artificial Sequence: Synthetic oligonucleotide
ugcucaugaaauaauuuaa

SEQ ID NO: 1213787 - RNA, 19 nt, Artificial Sequence
  Description of Artificial Sequence: Synthetic oligonucleotide
uauugcacgcuucuuguca

SEQ ID NO: 1213788 - RNA, 19 nt, Artificial Sequence
  Description of Artificial Sequence: Synthetic oligonucleotide
ugaacacguuaguuaaugg

SEQ ID NO: 1213789 - RNA, 19 nt, Artificial Sequence
  Description of Artificial Sequence: Synthetic oligonucleotide
uguccuauuauucgaauuu

SEQ ID NO: 1213790 - RNA, 19 nt, Artificial Sequence
  Description of Artificial Sequence: Synthetic oligonucleotide
ucgaaacauguauaaaucu

SEQ ID NO: 1213791 - RNA, 19 nt, Artificial Sequence
  Description of Artificial Sequence: Synthetic oligonucleotide
aaaaggcaccucuaguacu

SEQ ID NO: 1213792 - RNA, 19 nt, Artificial Sequence
  Description of Artificial Sequence: Synthetic oligonucleotide
uucccuaacaacagugcag

SEQ ID NO: 1213793 - RNA, 19 nt, Artificial Sequence
  Description of Artificial Sequence: Synthetic oligonucleotide
guuuuaaggagcuguggag

SEQ ID NO: 1213794 - RNA, 19 nt, Artificial Sequence
  Description of Artificial Sequence: Synthetic oligonucleotide
uuauacagcuaauugugaa

SEQ ID NO: 1213795 - RNA, 19 nt, Artificial Sequence
  Description of Artificial Sequence: Synthetic oligonucleotide
aucgaaacauguauaaauc

SEQ ID NO: 1213796 - RNA, 19 nt, Artificial Sequence
  Description of Artificial Sequence: Synthetic oligonucleotide
uaaucugggcaaauauugc

SEQ ID NO: 1213797 - RNA, 19 nt, Artificial Sequence
  Description of Artificial Sequence: Synthetic oligonucleotide
uaccguucgacaucgagca

SEQ ID NO: 1213798 - RNA, 19 nt, Artificial Sequence
  Description of Artificial Sequence: Synthetic oligonucleotide
gauuuucucagucuaagua

SEQ ID NO: 1213799 - RNA, 19 nt, Artificial Sequence
  Description of Artificial Sequence: Synthetic oligonucleotide
agaugaacacguuaguuaa

SEQ ID NO: 1213800 - RNA, 19 nt, Artificial Sequence
  Description of Artificial Sequence: Synthetic oligonucleotide
gcuacugugguacacgugg

SEQ ID NO: 1213801 - RNA, 19 nt, Artificial Sequence
  Description of Artificial Sequence: Synthetic oligonucleotide
acaucgagcagcuauaauu

SEQ ID NO: 1213802 - RNA, 19 nt, Artificial Sequence
  Description of Artificial Sequence: Synthetic oligonucleotide
uuuuaaggagcuguggaga

SEQ ID NO: 1213803 - RNA, 19 nt, Artificial Sequence
  Description of Artificial Sequence: Synthetic oligonucleotide
uucgacaucgagcagcuau

SEQ ID NO: 1213804 - RNA, 19 nt, Artificial Sequence
  Description of Artificial Sequence: Synthetic oligonucleotide
caucgagcagcuauaauug

SEQ ID NO: 1213805 - RNA, 19 nt, Artificial Sequence
  Description of Artificial Sequence: Synthetic oligonucleotide
uucauuuucagggcuacug

SEQ ID NO: 1213806 - RNA, 19 nt, Artificial Sequence
  Description of Artificial Sequence: Synthetic oligonucleotide
auggacugggcccaucagc

SEQ ID NO: 1213807 - RNA, 19 nt, Artificial Sequence
  Description of Artificial Sequence: Synthetic oligonucleotide
cuagguuucaaaauuagcu

SEQ ID NO: 1213808 - RNA, 19 nt, Artificial Sequence
  Description of Artificial Sequence: Synthetic oligonucleotide
ucuucuuuacgaaagccuu

SEQ ID NO: 1213809 - RNA, 19 nt, Artificial Sequence
  Description of Artificial Sequence: Synthetic oligonucleotide
ugcagaacauacagaauac

SEQ ID NO: 1213810 - RNA, 19 nt, Artificial Sequence
  Description of Artificial Sequence: Synthetic oligonucleotide
ugaauauacucaguaaguc

SEQ ID NO: 1213811 - RNA, 19 nt, Artificial Sequence
  Description of Artificial Sequence: Synthetic oligonucleotide
uugcucaugaaauaauuua

SEQ ID NO: 1213812 - RNA, 19 nt, Artificial Sequence
  Description of Artificial Sequence: Synthetic oligonucleotide
uaaggagcuguggagaugc

SEQ ID NO: 1213813 - RNA, 19 nt, Artificial Sequence
  Description of Artificial Sequence: Synthetic oligonucleotide
cauacccaacuccaaaagg

SEQ ID NO: 1213814 - RNA, 19 nt, Artificial Sequence
  Description of Artificial Sequence: Synthetic oligonucleotide
aaaauuaucgaaacaugua

SEQ ID NO: 1213815 - RNA, 19 nt, Artificial Sequence
  Description of Artificial Sequence: Synthetic oligonucleotide
aguugaaguauuaaaguga

SEQ ID NO: 1213816 - RNA, 19 nt, Artificial Sequence
  Description of Artificial Sequence: Synthetic oligonucleotide
accucuaguacuuuaagua

SEQ ID NO: 1213817 - RNA, 19 nt, Artificial Sequence
  Description of Artificial Sequence: Synthetic oligonucleotide
agacaccacuauaagaagc

SEQ ID NO: 1213818 - RNA, 19 nt, Artificial Sequence
  Description of Artificial Sequence: Synthetic oligonucleotide
aaacauguauaaaucuuca

SEQ ID NO: 1213819 - RNA, 19 nt, Artificial Sequence
  Description of Artificial Sequence: Synthetic oligonucleotide
cuuaguaacauacacacau

SEQ ID NO: 1213820 - RNA, 19 nt, Artificial Sequence
  Description of Artificial Sequence: Synthetic oligonucleotide
ugacuuauuugaagaagac

SEQ ID NO: 1213821 - RNA, 19 nt, Artificial Sequence
  Description of Artificial Sequence: Synthetic oligonucleotide
uauucugcuaguaccguuc

SEQ ID NO: 1213822 - RNA, 19 nt, Artificial Sequence
  Description of Artificial Sequence: Synthetic oligonucleotide
uuagcuuuccuguaucauc

SEQ ID NO: 1213823 - RNA, 19 nt, Artificial Sequence
  Description of Artificial Sequence: Synthetic oligonucleotide
ugcuaaaccgucacauacc

SEQ ID NO: 1213824 - RNA, 19 nt, Artificial Sequence
  Description of Artificial Sequence: Synthetic oligonucleotide
cacaguaugccaucaacac

SEQ ID NO: 1213825 - RNA, 19 nt, Artificial Sequence
  Description of Artificial Sequence: Synthetic oligonucleotide
uguguaugccagcaaagaa

SEQ ID NO: 1213826 - RNA, 19 nt, Artificial Sequence
  Description of Artificial Sequence: Synthetic oligonucleotide
auugcacgcuucuugucac

SEQ ID NO: 1213827 - RNA, 19 nt, Artificial Sequence
  Description of Artificial Sequence: Synthetic oligonucleotide
ugaggucuagguuucaaaa

SEQ ID NO: 1213828 - RNA, 19 nt, Artificial Sequence
  Description of Artificial Sequence: Synthetic oligonucleotide
auauaacaauaguugccag

SEQ ID NO: 1213829 - RNA, 19 nt, Artificial Sequence
  Description of Artificial Sequence: Synthetic oligonucleotide
ucuaguacuuuaaguauuu

SEQ ID NO: 1213830 - RNA, 19 nt, Artificial Sequence
  Description of Artificial Sequence: Synthetic oligonucleotide
uuuuguccuauuauucgaa

SEQ ID NO: 1213831 - RNA, 19 nt, Artificial Sequence
  Description of Artificial Sequence: Synthetic oligonucleotide
aauccucuauggcguuugc

SEQ ID NO: 1213832 - RNA, 19 nt, Artificial Sequence
  Description of Artificial Sequence: Synthetic oligonucleotide
cacuauaagaagcauucuc

SEQ ID NO: 1213833 - RNA, 19 nt, Artificial Sequence
  Description of Artificial Sequence: Synthetic oligonucleotide
aucgagauaaucugggcaa

SEQ ID NO: 1213834 - RNA, 19 nt, Artificial Sequence
  Description of Artificial Sequence: Synthetic oligonucleotide
uacuagucuaacaugucua

SEQ ID NO: 1213835 - RNA, 19 nt, Artificial Sequence
  Description of Artificial Sequence: Synthetic oligonucleotide
gaauauacucaguaagucu

SEQ ID NO: 1213836 - RNA, 19 nt, Artificial Sequence
  Description of Artificial Sequence: Synthetic oligonucleotide
ucagucuaaguagagucug

SEQ ID NO: 1213837 - RNA, 19 nt, Artificial Sequence
  Description of Artificial Sequence: Synthetic oligonucleotide
ugguuuagguucccuaaca

SEQ ID NO: 1213838 - RNA, 19 nt, Artificial Sequence
  Description of Artificial Sequence: Synthetic oligonucleotide
aaagugacacuaauacuga

SEQ ID NO: 1213839 - RNA, 19 nt, Artificial Sequence
  Description of Artificial Sequence: Synthetic oligonucleotide
aguaccguucgacaucgag

SEQ ID NO: 1213840 - RNA, 19 nt, Artificial Sequence
  Description of Artificial Sequence: Synthetic oligonucleotide
agguaaaaggcaccucuag

SEQ ID NO: 1213841 - RNA, 19 nt, Artificial Sequence
  Description of Artificial Sequence: Synthetic oligonucleotide
cucaguaagucuucuuuac

SEQ ID NO: 1213842 - RNA, 19 nt, Artificial Sequence
  Description of Artificial Sequence: Synthetic oligonucleotide
ugagagcucagucaucauc

SEQ ID NO: 1213843 - RNA, 19 nt, Artificial Sequence
  Description of Artificial Sequence: Synthetic oligonucleotide
augacgugaagaaggacac

SEQ ID NO: 1213844 - RNA, 19 nt, Artificial Sequence
  Description of Artificial Sequence: Synthetic oligonucleotide
ccuauuagaguuauacagc

SEQ ID NO: 1213845 - RNA, 19 nt, Artificial Sequence
  Description of Artificial Sequence: Synthetic oligonucleotide
aauuaucgaaacauguaua

SEQ ID NO: 1213846 - RNA, 19 nt, Artificial Sequence
  Description of Artificial Sequence: Synthetic oligonucleotide
ccagucaccuaaaauaagg

SEQ ID NO: 1213847 - RNA, 19 nt, Artificial Sequence
  Description of Artificial Sequence: Synthetic oligonucleotide
accuaaaauaaggacuguc

SEQ ID NO: 1213848 - RNA, 19 nt, Artificial Sequence
  Description of Artificial Sequence: Synthetic oligonucleotide
uggacugggcccaucagcu

SEQ ID NO: 1213849 - RNA, 19 nt, Artificial Sequence
  Description of Artificial Sequence: Synthetic oligonucleotide
uugcgcauacacaguaugc

SEQ ID NO: 1213850 - RNA, 19 nt, Artificial Sequence
  Description of Artificial Sequence: Synthetic oligonucleotide
uuauucgaauuuaguuuca

SEQ ID NO: 1213851 - RNA, 19 nt, Artificial Sequence
  Description of Artificial Sequence: Synthetic oligonucleotide
ugcgacuacucuuuugugu

SEQ ID NO: 1213852 - RNA, 19 nt, Artificial Sequence
  Description of Artificial Sequence: Synthetic oligonucleotide
cuaguaccguucgacaucg

SEQ ID NO: 1213853 - RNA, 19 nt, Artificial Sequence
  Description of Artificial Sequence: Synthetic oligonucleotide
ucugcuaguaccguucgac

SEQ ID NO: 1213854 - RNA, 19 nt, Artificial Sequence
  Description of Artificial Sequence: Synthetic oligonucleotide
cuaguuauauauaaaguau

SEQ ID NO: 1213855 - RNA, 19 nt, Artificial Sequence
  Description of Artificial Sequence: Synthetic oligonucleotide
aucagaagacuuuggggug

SEQ ID NO: 1213856 - RNA, 19 nt, Artificial Sequence
  Description of Artificial Sequence: Synthetic oligonucleotide
auucugcuaguaccguucg

SEQ ID NO: 1213857 - RNA, 19 nt, Artificial Sequence
  Description of Artificial Sequence: Synthetic oligonucleotide
agcacaauggaaagaggcg

SEQ ID NO: 1213858 - RNA, 19 nt, Artificial Sequence
  Description of Artificial Sequence: Synthetic oligonucleotide
cuugguuuaacauuggcau

SEQ ID NO: 1213859 - RNA, 19 nt, Artificial Sequence
  Description of Artificial Sequence: Synthetic oligonucleotide
uuuaaggagcuguggagau

SEQ ID NO: 1213860 - RNA, 19 nt, Artificial Sequence
  Description of Artificial Sequence: Synthetic oligonucleotide
ugcgcauacacaguaugcc

SEQ ID NO: 1213861 - RNA, 19 nt, Artificial Sequence
  Description of Artificial Sequence: Synthetic oligonucleotide
augaacacguuaguuaaug

SEQ ID NO: 1213862 - RNA, 19 nt, Artificial Sequence
  Description of Artificial Sequence: Synthetic oligonucleotide
cuaaaauaaggacugucaa

SEQ ID NO: 1213863 - RNA, 19 nt, Artificial Sequence
  Description of Artificial Sequence: Synthetic oligonucleotide
uauaauugauggugcgacu

SEQ ID NO: 1213864 - RNA, 19 nt, Artificial Sequence
  Description of Artificial Sequence: Synthetic oligonucleotide
uucuuuacgaaagccuuga

SEQ ID NO: 1213865 - RNA, 19 nt, Artificial Sequence
  Description of Artificial Sequence: Synthetic oligonucleotide
aaauaaggacugucaaauu

SEQ ID NO: 1213866 - RNA, 19 nt, Artificial Sequence
  Description of Artificial Sequence: Synthetic oligonucleotide
guaaucacagguacugaag

SEQ ID NO: 1213867 - RNA, 19 nt, Artificial Sequence
  Description of Artificial Sequence: Synthetic oligonucleotide
aaaauccagucaccuaaaa

SEQ ID NO: 1213868 - RNA, 19 nt, Artificial Sequence
  Description of Artificial Sequence: Synthetic oligonucleotide
ucucuugguuuaacauugg

SEQ ID NO: 1213869 - RNA, 19 nt, Artificial Sequence
  Description of Artificial Sequence: Synthetic oligonucleotide
cagaggguuuuauugcugc

SEQ ID NO: 1213870 - RNA, 19 nt, Artificial Sequence
  Description of Artificial Sequence: Synthetic oligonucleotide
uuaugcacauauuuaccua

SEQ ID NO: 1213871 - RNA, 19 nt, Artificial Sequence
  Description of Artificial Sequence: Synthetic oligonucleotide
auuuaguuucauauuagau

SEQ ID NO: 1213872 - RNA, 19 nt, Artificial Sequence
  Description of Artificial Sequence: Synthetic oligonucleotide
ucacauacccaacuccaaa

SEQ ID NO: 1213873 - RNA, 19 nt, Artificial Sequence
  Description of Artificial Sequence: Synthetic oligonucleotide
ucaucgagauaaucugggc

SEQ ID NO: 1213874 - RNA, 19 nt, Artificial Sequence
  Description of Artificial Sequence: Synthetic oligonucleotide
cagcuauaauugauggugc

SEQ ID NO: 1213875 - RNA, 19 nt, Artificial Sequence
  Description of Artificial Sequence: Synthetic oligonucleotide
guugcgcauacacaguaug

SEQ ID NO: 1213876 - RNA, 19 nt, Artificial Sequence
  Description of Artificial Sequence: Synthetic oligonucleotide
acaguaugccaucaacacu

SEQ ID NO: 1213877 - RNA, 19 nt, Artificial Sequence
  Description of Artificial Sequence: Synthetic oligonucleotide
auacccaacuccaaaagga

SEQ ID NO: 1213878 - RNA, 19 nt, Artificial Sequence
  Description of Artificial Sequence: Synthetic oligonucleotide
aucacaagacauauuauau

SEQ ID NO: 1213879 - RNA, 19 nt, Artificial Sequence
  Description of Artificial Sequence: Synthetic oligonucleotide
aaccgucacauacccaacu

SEQ ID NO: 1213880 - RNA, 19 nt, Artificial Sequence
  Description of Artificial Sequence: Synthetic oligonucleotide
gacugucaaauucccagac

SEQ ID NO: 1213881 - RNA, 19 nt, Artificial Sequence
  Description of Artificial Sequence: Synthetic oligonucleotide
gagagcucagucaucauca

SEQ ID NO: 1213882 - RNA, 19 nt, Artificial Sequence
  Description of Artificial Sequence: Synthetic oligonucleotide
ucccuaacaacagugcaga

SEQ ID NO: 1213883 - RNA, 19 nt, Artificial Sequence
  Description of Artificial Sequence: Synthetic oligonucleotide
aggucuagguuucaaaauu

SEQ ID NO: 1213884 - RNA, 19 nt, Artificial Sequence
  Description of Artificial Sequence: Synthetic oligonucleotide
uugcuguaugacuuauuug

SEQ ID NO: 1213885 - RNA, 19 nt, Artificial Sequence
  Description of Artificial Sequence: Synthetic oligonucleotide
aauugauggugcgacuacu

SEQ ID NO: 1213886 - RNA, 19 nt, Artificial Sequence
  Description of Artificial Sequence: Synthetic oligonucleotide
aguauugggcuuaacaaaa

SEQ ID NO: 1213887 - RNA, 19 nt, Artificial Sequence
  Description of Artificial Sequence: Synthetic oligonucleotide
uaaaauccagucaccuaaa

SEQ ID NO: 1213888 - RNA, 19 nt, Artificial Sequence
  Description of Artificial Sequence: Synthetic oligonucleotide
acaccuuuugugucucagg

SEQ ID NO: 1213889 - RNA, 19 nt, Artificial Sequence
  Description of Artificial Sequence: Synthetic oligonucleotide
caguaagucuucuuuacga

SEQ ID NO: 1213890 - RNA, 19 nt, Artificial Sequence
  Description of Artificial Sequence: Synthetic oligonucleotide
agauuuucucagucuaagu

SEQ ID NO: 1213891 - RNA, 19 nt, Artificial Sequence
  Description of Artificial Sequence: Synthetic oligonucleotide
gcaagcaaugaauauacuc

SEQ ID NO: 1213892 - RNA, 19 nt, Artificial Sequence
  Description of Artificial Sequence: Synthetic oligonucleotide
ucaggaucuauuagccagu

SEQ ID NO: 1213893 - RNA, 19 nt, Artificial Sequence
  Description of Artificial Sequence: Synthetic oligonucleotide
accgucacauacccaacuc

SEQ ID NO: 1213894 - RNA, 19 nt, Artificial Sequence
  Description of Artificial Sequence: Synthetic oligonucleotide
cuuuacgaaagccuugaga

SEQ ID NO: 1213895 - RNA, 19 nt, Artificial Sequence
  Description of Artificial Sequence: Synthetic oligonucleotide
uuuguggugugguuccugu

SEQ ID NO: 1213896 - RNA, 19 nt, Artificial Sequence
  Description of Artificial Sequence: Synthetic oligonucleotide
guguaugccagcaaagaac

SEQ ID NO: 1213897 - RNA, 19 nt, Artificial Sequence
  Description of Artificial Sequence: Synthetic oligonucleotide
ugauuccauaaugacguga

SEQ ID NO: 1213898 - RNA, 19 nt, Artificial Sequence
  Description of Artificial Sequence: Synthetic oligonucleotide
aacgugaggucuagguuuc

SEQ ID NO: 1213899 - RNA, 19 nt, Artificial Sequence
  Description of Artificial Sequence: Synthetic oligonucleotide
cagguaaucacagguacug

SEQ ID NO: 1213900 - RNA, 19 nt, Artificial Sequence
  Description of Artificial Sequence: Synthetic oligonucleotide
auacagcuaauugugaaaa

SEQ ID NO: 1213901 - RNA, 19 nt, Artificial Sequence
  Description of Artificial Sequence: Synthetic oligonucleotide
ucuuuacgaaagccuugag

SEQ ID NO: 1213902 - RNA, 19 nt, Artificial Sequence
  Description of Artificial Sequence: Synthetic oligonucleotide
aacagguaaaaggcaccuc

SEQ ID NO: 1213903 - RNA, 19 nt, Artificial Sequence
  Description of Artificial Sequence: Synthetic oligonucleotide
cuucuuuacgaaagccuug

SEQ ID NO: 1213904 - RNA, 19 nt, Artificial Sequence
  Description of Artificial Sequence: Synthetic oligonucleotide
acugguuuagguucccuaa

SEQ ID NO: 1213905 - RNA, 19 nt, Artificial Sequence
  Description of Artificial Sequence: Synthetic oligonucleotide
cuauuagaguuauacagcu

SEQ ID NO: 1213906 - RNA, 19 nt, Artificial Sequence
  Description of Artificial Sequence: Synthetic oligonucleotide
caucacaagacauauuaua

SEQ ID NO: 1213907 - RNA, 19 nt, Artificial Sequence
  Description of Artificial Sequence: Synthetic oligonucleotide
cugggcaaauauugcacgc

SEQ ID NO: 1213908 - RNA, 19 nt, Artificial Sequence
  Description of Artificial Sequence: Synthetic oligonucleotide
cagaauacccucuuauaga

SEQ ID NO: 1213909 - RNA, 19 nt, Artificial Sequence
  Description of Artificial Sequence: Synthetic oligonucleotide
ugaacgugaggucuagguu

SEQ ID NO: 1213910 - RNA, 19 nt, Artificial Sequence
  Description of Artificial Sequence: Synthetic oligonucleotide
uacccaacuccaaaaggaa

SEQ ID NO: 1213911 - RNA, 19 nt, Artificial Sequence
  Description of Artificial Sequence: Synthetic oligonucleotide
ucccauuguucauuuucag

SEQ ID NO: 1213912 - RNA, 19 nt, Artificial Sequence
  Description of Artificial Sequence: Synthetic oligonucleotide
uuagaguuauacagcuaau

SEQ ID NO: 1213913 - RNA, 19 nt, Artificial Sequence
  Description of Artificial Sequence: Synthetic oligonucleotide
uacagaauacccucuuaua

SEQ ID NO: 1213914 - RNA, 19 nt, Artificial Sequence
  Description of Artificial Sequence: Synthetic oligonucleotide
augccaucaacacucucca

SEQ ID NO: 1213915 - RNA, 19 nt, Artificial Sequence
  Description of Artificial Sequence: Synthetic oligonucleotide
auaguugccagaauccagu

SEQ ID NO: 1213916 - RNA, 19 nt, Artificial Sequence
  Description of Artificial Sequence: Synthetic oligonucleotide
gaagaagacugguuuaggu

SEQ ID NO: 1213917 - RNA, 19 nt, Artificial Sequence
  Description of Artificial Sequence: Synthetic oligonucleotide
gucucaggaucuauuagcc

SEQ ID NO: 1213918 - RNA, 19 nt, Artificial Sequence
  Description of Artificial Sequence: Synthetic oligonucleotide
gcuaaaccgucacauaccc

SEQ ID NO: 1213919 - RNA, 19 nt, Artificial Sequence
  Description of Artificial Sequence: Synthetic oligonucleotide
gugugguuccuguuacugg

SEQ ID NO: 1213920 - RNA, 19 nt, Artificial Sequence
  Description of Artificial Sequence: Synthetic oligonucleotide
agccuauuagaguuauaca

SEQ ID NO: 1213921 - RNA, 19 nt, Artificial Sequence
  Description of Artificial Sequence: Synthetic oligonucleotide
uuuguccuauuauucgaau

SEQ ID NO: 1213922 - RNA, 19 nt, Artificial Sequence
  Description of Artificial Sequence: Synthetic oligonucleotide
uauuagaguuauacagcua

SEQ ID NO: 1213923 - RNA, 19 nt, Artificial Sequence
  Description of Artificial Sequence: Synthetic oligonucleotide
uuaucgaaacauguauaaa

SEQ ID NO: 1213924 - RNA, 19 nt, Artificial Sequence
  Description of Artificial Sequence: Synthetic oligonucleotide
auggcguuugcuguaugac

SEQ ID NO: 1213925 - RNA, 19 nt, Artificial Sequence
  Description of Artificial Sequence: Synthetic oligonucleotide
gaaggacaccuuuuguguc

SEQ ID NO: 1213926 - RNA, 19 nt, Artificial Sequence
  Description of Artificial Sequence: Synthetic oligonucleotide
acugucaaauucccagaca

SEQ ID NO: 1213927 - RNA, 19 nt, Artificial Sequence
  Description of Artificial Sequence: Synthetic oligonucleotide
caccaguagcuguacauac

SEQ ID NO: 1213928 - RNA, 19 nt, Artificial Sequence
  Description of Artificial Sequence: Synthetic oligonucleotide
caucgagauaaucugggca

SEQ ID NO: 1213929 - RNA, 19 nt, Artificial Sequence
  Description of Artificial Sequence: Synthetic oligonucleotide
agucaagaugaacacguua

SEQ ID NO: 1213930 - RNA, 19 nt, Artificial Sequence
  Description of Artificial Sequence: Synthetic oligonucleotide
auauacucaguaagucuuc

SEQ ID NO: 1213931 - RNA, 19 nt, Artificial Sequence
  Description of Artificial Sequence: Synthetic oligonucleotide
ggcgcugagaaugaaaggc

SEQ ID NO: 1213932 - RNA, 19 nt, Artificial Sequence
  Description of Artificial Sequence: Synthetic oligonucleotide
gucuagguuucaaaauuag

SEQ ID NO: 1213933 - RNA, 19 nt, Artificial Sequence
  Description of Artificial Sequence: Synthetic oligonucleotide
ucucaggaucuauuagcca

SEQ ID NO: 1213934 - RNA, 19 nt, Artificial Sequence
  Description of Artificial Sequence: Synthetic oligonucleotide
uacccucuuauagaguucu

SEQ ID NO: 1213935 - RNA, 19 nt, Artificial Sequence
  Description of Artificial Sequence: Synthetic oligonucleotide
aguacuagucuaacauguc

SEQ ID NO: 1213936 - RNA, 19 nt, Artificial Sequence
  Description of Artificial Sequence: Synthetic oligonucleotide
ugcuaguaccguucgacau

SEQ ID NO: 1213937 - RNA, 19 nt, Artificial Sequence
  Description of Artificial Sequence: Synthetic oligonucleotide
acacguuaguuaauggcag

SEQ ID NO: 1213938 - RNA, 19 nt, Artificial Sequence
  Description of Artificial Sequence: Synthetic oligonucleotide
aaaccgucacauacccaac

SEQ ID NO: 1213939 - RNA, 19 nt, Artificial Sequence
  Description of Artificial Sequence: Synthetic oligonucleotide
gguuuuauugcugcaauuc

SEQ ID NO: 1213940 - RNA, 19 nt, Artificial Sequence
  Description of Artificial Sequence: Synthetic oligonucleotide
cuagucuaacaugucuacc

SEQ ID NO: 1213941 - RNA, 19 nt, Artificial Sequence
  Description of Artificial Sequence: Synthetic oligonucleotide
uuacgaaagccuugagauc

SEQ ID NO: 1213942 - RNA, 19 nt, Artificial Sequence
  Description of Artificial Sequence: Synthetic oligonucleotide
uuccugaaauacuggugca

SEQ ID NO: 1213943 - RNA, 19 nt, Artificial Sequence
  Description of Artificial Sequence: Synthetic oligonucleotide
uauauucugcuaguaccgu

SEQ ID NO: 1213944 - RNA, 19 nt, Artificial Sequence
  Description of Artificial Sequence: Synthetic oligonucleotide
auaauugauggugcgacua

SEQ ID NO: 1213945 - RNA, 19 nt, Artificial Sequence
  Description of Artificial Sequence: Synthetic oligonucleotide
uagaguuauacagcuaauu

SEQ ID NO: 1213946 - RNA, 19 nt, Artificial Sequence
  Description of Artificial Sequence: Synthetic oligonucleotide
cacguuaguuaauggcagc

SEQ ID NO: 1213947 - RNA, 19 nt, Artificial Sequence
  Description of Artificial Sequence: Synthetic oligonucleotide
gcuucuugucacuuguugc

SEQ ID NO: 1213948 - RNA, 19 nt, Artificial Sequence
  Description of Artificial Sequence: Synthetic oligonucleotide
agcuguacauacagacacc

SEQ ID NO: 1213949 - RNA, 19 nt, Artificial Sequence
  Description of Artificial Sequence: Synthetic oligonucleotide
guaccguucgacaucgagc

SEQ ID NO: 1213950 - RNA, 19 nt, Artificial Sequence
  Description of Artificial Sequence: Synthetic oligonucleotide
agcagcuauaauugauggu

SEQ ID NO: 1213951 - RNA, 19 nt, Artificial Sequence
  Description of Artificial Sequence: Synthetic oligonucleotide
guaagucuucuuuacgaaa

SEQ ID NO: 1213952 - RNA, 19 nt, Artificial Sequence
  Description of Artificial Sequence: Synthetic oligonucleotide
agugcagauugucauugaa

SEQ ID NO: 1213953 - RNA, 19 nt, Artificial Sequence
  Description of Artificial Sequence: Synthetic oligonucleotide
aucagcuacuucaggacag

SEQ ID NO: 1213954 - RNA, 19 nt, Artificial Sequence
  Description of Artificial Sequence: Synthetic oligonucleotide
gcaaugaauauacucagua

SEQ ID NO: 1213955 - RNA, 19 nt, Artificial Sequence
  Description of Artificial Sequence: Synthetic oligonucleotide
gacaccuuuugugucucag

SEQ ID NO: 1213956 - RNA, 19 nt, Artificial Sequence
  Description of Artificial Sequence: Synthetic oligonucleotide
aacaugucuaccacagcau

SEQ ID NO: 1213957 - RNA, 19 nt, Artificial Sequence
  Description of Artificial Sequence: Synthetic oligonucleotide
gaauccucuauggcguuug

SEQ ID NO: 1213958 - RNA, 19 nt, Artificial Sequence
  Description of Artificial Sequence: Synthetic oligonucleotide
caguuuuaaggagcugugg

SEQ ID NO: 1213959 - RNA, 19 nt, Artificial Sequence
  Description of Artificial Sequence: Synthetic oligonucleotide
acacaguaugccaucaaca

SEQ ID NO: 1213960 - RNA, 19 nt, Artificial Sequence
  Description of Artificial Sequence: Synthetic oligonucleotide
cacuuguugcuaaaccguc

SEQ ID NO: 1213961 - RNA, 19 nt, Artificial Sequence
  Description of Artificial Sequence: Synthetic oligonucleotide
auucgaauuuaguuucaua

SEQ ID NO: 1213962 - RNA, 19 nt, Artificial Sequence
  Description of Artificial Sequence: Synthetic oligonucleotide
gaacgugaggucuagguuu

SEQ ID NO: 1213963 - RNA, 19 nt, Artificial Sequence
  Description of Artificial Sequence: Synthetic oligonucleotide
ucaggacaguacuagucua

SEQ ID NO: 1213964 - RNA, 19 nt, Artificial Sequence
  Description of Artificial Sequence: Synthetic oligonucleotide
caggaguugaaguauuaaa

SEQ ID NO: 1213965 - RNA, 19 nt, Artificial Sequence
  Description of Artificial Sequence: Synthetic oligonucleotide
cugcaauucaaagaaugca

SEQ ID NO: 1213966 - RNA, 19 nt, Artificial Sequence
  Description of Artificial Sequence: Synthetic oligonucleotide
uugguuuaacauuggcauu

SEQ ID NO: 1213967 - RNA, 19 nt, Artificial Sequence
  Description of Artificial Sequence: Synthetic oligonucleotide
cuaauacugaacacaggua

SEQ ID NO: 1213968 - RNA, 19 nt, Artificial Sequence
  Description of Artificial Sequence: Synthetic oligonucleotide
ucgacaucgagcagcuaua

SEQ ID NO: 1213969 - RNA, 19 nt, Artificial Sequence
  Description of Artificial Sequence: Synthetic oligonucleotide
aaagaggcgcugagaauga

SEQ ID NO: 1213970 - RNA, 19 nt, Artificial Sequence
  Description of Artificial Sequence: Synthetic oligonucleotide
acguuaguuaauggcagcu

SEQ ID NO: 1213971 - RNA, 19 nt, Artificial Sequence
  Description of Artificial Sequence: Synthetic oligonucleotide
gacgugaagaaggacaccu

SEQ ID NO: 1213972 - RNA, 19 nt, Artificial Sequence
  Description of Artificial Sequence: Synthetic oligonucleotide
cugguuuagguucccuaac

SEQ ID NO: 1213973 - RNA, 19 nt, Artificial Sequence
  Description of Artificial Sequence: Synthetic oligonucleotide
agggcuacugugguacacg

SEQ ID NO: 1213974 - RNA, 19 nt, Artificial Sequence
  Description of Artificial Sequence: Synthetic oligonucleotide
uuaaggagcuguggagaug

SEQ ID NO: 1213975 - RNA, 19 nt, Artificial Sequence
  Description of Artificial Sequence: Synthetic oligonucleotide
guacacguggcuguugcgc

SEQ ID NO: 1213976 - RNA, 19 nt, Artificial Sequence
  Description of Artificial Sequence: Synthetic oligonucleotide
auauuagaugaaauuuaaa

SEQ ID NO: 1213977 - RNA, 19 nt, Artificial Sequence
  Description of Artificial Sequence: Synthetic oligonucleotide
uauucgaauuuaguuucau

SEQ ID NO: 1213978 - RNA, 19 nt, Artificial Sequence
  Description of Artificial Sequence: Synthetic oligonucleotide
ccaaaaggaauccucuaug

SEQ ID NO: 1213979 - RNA, 19 nt, Artificial Sequence
  Description of Artificial Sequence: Synthetic oligonucleotide
cuacucuuuuguguaugcc

SEQ ID NO: 1213980 - RNA, 19 nt, Artificial Sequence
  Description of Artificial Sequence: Synthetic oligonucleotide
ugggcaaauauugcacgcu

SEQ ID NO: 1213981 - RNA, 19 nt, Artificial Sequence
  Description of Artificial Sequence: Synthetic oligonucleotide
auccagucaccuaaaauaa

SEQ ID NO: 1213982 - RNA, 19 nt, Artificial Sequence
  Description of Artificial Sequence: Synthetic oligonucleotide
uguugcgcauacacaguau

SEQ ID NO: 1213983 - RNA, 19 nt, Artificial Sequence
  Description of Artificial Sequence: Synthetic oligonucleotide
agguucccuaacaacagug

SEQ ID NO: 1213984 - RNA, 19 nt, Artificial Sequence
  Description of Artificial Sequence: Synthetic oligonucleotide
uacuggugcaggagaacaa

SEQ ID NO: 1213985 - RNA, 19 nt, Artificial Sequence
  Description of Artificial Sequence: Synthetic oligonucleotide
gacuuauuugaagaagacu

SEQ ID NO: 1213986 - RNA, 19 nt, Artificial Sequence
  Description of Artificial Sequence: Synthetic oligonucleotide
gcacaauggaaagaggcgc

SEQ ID NO: 1213987 - RNA, 19 nt, Artificial Sequence
  Description of Artificial Sequence: Synthetic oligonucleotide
gaagaaggacaccuuuugu

SEQ ID NO: 1213988 - RNA, 19 nt, Artificial Sequence
  Description of Artificial Sequence: Synthetic oligonucleotide
gcugcaauucaaagaaugc

SEQ ID NO: 1213989 - RNA, 19 nt, Artificial Sequence
  Description of Artificial Sequence: Synthetic oligonucleotide
caaaauuagcuuuccugua

SEQ ID NO: 1213990 - RNA, 19 nt, Artificial Sequence
  Description of Artificial Sequence: Synthetic oligonucleotide
gugcagauugucauugaac

SEQ ID NO: 1213991 - RNA, 19 nt, Artificial Sequence
  Description of Artificial Sequence: Synthetic oligonucleotide
gcaaagaacaagccuauua

SEQ ID NO: 1213992 - RNA, 19 nt, Artificial Sequence
  Description of Artificial Sequence: Synthetic oligonucleotide
augauuccauaaugacgug

SEQ ID NO: 1213993 - RNA, 19 nt, Artificial Sequence
  Description of Artificial Sequence: Synthetic oligonucleotide
uaaugacgugaagaaggac

SEQ ID NO: 1213994 - RNA, 19 nt, Artificial Sequence
  Description of Artificial Sequence: Synthetic oligonucleotide
cuucuugucacuuguugcu

SEQ ID NO: 1213995 - RNA, 19 nt, Artificial Sequence
  Description of Artificial Sequence: Synthetic oligonucleotide
guggugugguuccuguuac

SEQ ID NO: 1213996 - RNA, 19 nt, Artificial Sequence
  Description of Artificial Sequence: Synthetic oligonucleotide
aguugccagaauccaguau

SEQ ID NO: 1213997 - RNA, 19 nt, Artificial Sequence
  Description of Artificial Sequence: Synthetic oligonucleotide
aucccauuguucauuuuca

SEQ ID NO: 1213998 - RNA, 19 nt, Artificial Sequence
  Description of Artificial Sequence: Synthetic oligonucleotide
aguuaauggcagcuuuauu

SEQ ID NO: 1213999 - RNA, 19 nt, Artificial Sequence
  Description of Artificial Sequence: Synthetic oligonucleotide
aguggcagguugcaagcaa

SEQ ID NO: 1214000 - RNA, 19 nt, Artificial Sequence
  Description of Artificial Sequence: Synthetic oligonucleotide
acaauggaaagaggcgcug

SEQ ID NO: 1214001 - RNA, 19 nt, Artificial Sequence
  Description of Artificial Sequence: Synthetic oligonucleotide
caucagcuacuucaggaca

SEQ ID NO: 1214002 - RNA, 19 nt, Artificial Sequence
  Description of Artificial Sequence: Synthetic oligonucleotide
guuaguuaauggcagcuuu

SEQ ID NO: 1214003 - RNA, 19 nt, Artificial Sequence
  Description of Artificial Sequence: Synthetic oligonucleotide
agaugguuccugaaauacu

SEQ ID NO: 1214004 - RNA, 19 nt, Artificial Sequence
  Description of Artificial Sequence: Synthetic oligonucleotide
agucuaaguagagucugau

SEQ ID NO: 1214005 - RNA, 19 nt, Artificial Sequence
  Description of Artificial Sequence: Synthetic oligonucleotide
uggugcgacuacucuuuug

SEQ ID NO: 1214006 - RNA, 19 nt, Artificial Sequence
  Description of Artificial Sequence: Synthetic oligonucleotide
uucugcuaguaccguucga

SEQ ID NO: 1214007 - RNA, 19 nt, Artificial Sequence
  Description of Artificial Sequence: Synthetic oligonucleotide
uuugugucucaggaucuau

SEQ ID NO: 1214008 - RNA, 19 nt, Artificial Sequence
  Description of Artificial Sequence: Synthetic oligonucleotide
cauugaacgugaggucuag

SEQ ID NO: 1214009 - RNA, 19 nt, Artificial Sequence
  Description of Artificial Sequence: Synthetic oligonucleotide
caucaacacucuccagcag

SEQ ID NO: 1214010 - RNA, 19 nt, Artificial Sequence
  Description of Artificial Sequence: Synthetic oligonucleotide
acuuguugcuaaaccguca

SEQ ID NO: 1214011 - RNA, 19 nt, Artificial Sequence
  Description of Artificial Sequence: Synthetic oligonucleotide
gaggucuagguuucaaaau

SEQ ID NO: 1214012 - RNA, 19 nt, Artificial Sequence
  Description of Artificial Sequence: Synthetic oligonucleotide
acagguaaucacagguacu

SEQ ID NO: 1214013 - RNA, 19 nt, Artificial Sequence
  Description of Artificial Sequence: Synthetic oligonucleotide
gaauccaguauugggcuua

SEQ ID NO: 1214014 - RNA, 19 nt, Artificial Sequence
  Description of Artificial Sequence: Synthetic oligonucleotide
ucuauggcguuugcuguau

SEQ ID NO: 1214015 - RNA, 19 nt, Artificial Sequence
  Description of Artificial Sequence: Synthetic oligonucleotide
agcguccaguggcagguug

SEQ ID NO: 1214016 - RNA, 19 nt, Artificial Sequence
  Description of Artificial Sequence: Synthetic oligonucleotide
ugacgugaagaaggacacc

SEQ ID NO: 1214017 - RNA, 19 nt, Artificial Sequence
  Description of Artificial Sequence: Synthetic oligonucleotide
gguucccuaacaacagugc

SEQ ID NO: 1214018 - RNA, 19 nt, Artificial Sequence
  Description of Artificial Sequence: Synthetic oligonucleotide
ggugcgacuacucuuuugu

SEQ ID NO: 1214019 - RNA, 19 nt, Artificial Sequence
  Description of Artificial Sequence: Synthetic oligonucleotide
ucagcuacuucaggacagu

SEQ ID NO: 1214020 - RNA, 19 nt, Artificial Sequence
  Description of Artificial Sequence: Synthetic oligonucleotide
uaguugccagaauccagua

SEQ ID NO: 1214021 - RNA, 19 nt, Artificial Sequence
  Description of Artificial Sequence: Synthetic oligonucleotide
aacaagccuauuagaguua

SEQ ID NO: 1214022 - RNA, 19 nt, Artificial Sequence
  Description of Artificial Sequence: Synthetic oligonucleotide
uuuugugucucaggaucua

SEQ ID NO: 1214023 - RNA, 19 nt, Artificial Sequence
  Description of Artificial Sequence: Synthetic oligonucleotide
acguggcuguugcgcauac

SEQ ID NO: 1214024 - RNA, 19 nt, Artificial Sequence
  Description of Artificial Sequence: Synthetic oligonucleotide
agaaugaaaggcacacaua

SEQ ID NO: 1214025 - RNA, 19 nt, Artificial Sequence
  Description of Artificial Sequence: Synthetic oligonucleotide
uauuuacagcaaucccauu

SEQ ID NO: 1214026 - RNA, 19 nt, Artificial Sequence
  Description of Artificial Sequence: Synthetic oligonucleotide
gguuuagguucccuaacaa

SEQ ID NO: 1214027 - RNA, 19 nt, Artificial Sequence
  Description of Artificial Sequence: Synthetic oligonucleotide
ucgagauaaucugggcaaa

SEQ ID NO: 1214028 - RNA, 19 nt, Artificial Sequence
  Description of Artificial Sequence: Synthetic oligonucleotide
gcaccucuaguacuuuaag

SEQ ID NO: 1214029 - RNA, 19 nt, Artificial Sequence
  Description of Artificial Sequence: Synthetic oligonucleotide
gcuaguaccguucgacauc

SEQ ID NO: 1214030 - RNA, 19 nt, Artificial Sequence
  Description of Artificial Sequence: Synthetic oligonucleotide
gcaaauauugcacgcuucu

SEQ ID NO: 1214031 - RNA, 19 nt, Artificial Sequence
  Description of Artificial Sequence: Synthetic oligonucleotide
aauccaguauugggcuuaa

SEQ ID NO: 1214032 - RNA, 19 nt, Artificial Sequence
  Description of Artificial Sequence: Synthetic oligonucleotide
cugcuaguaccguucgaca

SEQ ID NO: 1214033 - RNA, 19 nt, Artificial Sequence
  Description of Artificial Sequence: Synthetic oligonucleotide
agagcucagucaucaucau

SEQ ID NO: 1214034 - RNA, 19 nt, Artificial Sequence
  Description of Artificial Sequence: Synthetic oligonucleotide
cuaaaccgucacauaccca

SEQ ID NO: 1214035 - RNA, 19 nt, Artificial Sequence
  Description of Artificial Sequence: Synthetic oligonucleotide
gcuauaauugauggugcga

SEQ ID NO: 1214036 - RNA, 19 nt, Artificial Sequence
  Description of Artificial Sequence: Synthetic oligonucleotide
guagagucugaugcuuuuc

SEQ ID NO: 1214037 - RNA, 19 nt, Artificial Sequence
  Description of Artificial Sequence: Synthetic oligonucleotide
caacagugcagauugucau

SEQ ID NO: 1214038 - RNA, 19 nt, Artificial Sequence
  Description of Artificial Sequence: Synthetic oligonucleotide
agguugcaagcaaugaaua

SEQ ID NO: 1214039 - RNA, 19 nt, Artificial Sequence
  Description of Artificial Sequence: Synthetic oligonucleotide
aagucaagaugaacacguu

SEQ ID NO: 1214040 - RNA, 19 nt, Artificial Sequence
  Description of Artificial Sequence: Synthetic oligonucleotide
cagucuaaguagagucuga

SEQ ID NO: 1214041 - RNA, 19 nt, Artificial Sequence
  Description of Artificial Sequence: Synthetic oligonucleotide
ccgucacauacccaacucc

SEQ ID NO: 1214042 - RNA, 19 nt, Artificial Sequence
  Description of Artificial Sequence: Synthetic oligonucleotide
cacaauggaaagaggcgcu

SEQ ID NO: 1214043 - RNA, 19 nt, Artificial Sequence
  Description of Artificial Sequence: Synthetic oligonucleotide
gcgacuacucuuuugugua

SEQ ID NO: 1214044 - RNA, 19 nt, Artificial Sequence
  Description of Artificial Sequence: Synthetic oligonucleotide
caccucuaguacuuuaagu

SEQ ID NO: 1214045 - RNA, 19 nt, Artificial Sequence
  Description of Artificial Sequence: Synthetic oligonucleotide
accguucgacaucgagcag

SEQ ID NO: 1214046 - RNA, 19 nt, Artificial Sequence
  Description of Artificial Sequence: Synthetic oligonucleotide
aguaugccaucaacacucu

SEQ ID NO: 1214047 - RNA, 19 nt, Artificial Sequence
  Description of Artificial Sequence: Synthetic oligonucleotide
guccuauuauucgaauuua

SEQ ID NO: 1214048 - RNA, 19 nt, Artificial Sequence
  Description of Artificial Sequence: Synthetic oligonucleotide
ccguucgacaucgagcagc

SEQ ID NO: 1214049 - RNA, 19 nt, Artificial Sequence
  Description of Artificial Sequence: Synthetic oligonucleotide
ccuauuauucgaauuuagu

SEQ ID NO: 1214050 - RNA, 19 nt, Artificial Sequence
  Description of Artificial Sequence: Synthetic oligonucleotide
gcgcauacacaguaugcca

SEQ ID NO: 1214051 - RNA, 19 nt, Artificial Sequence
  Description of Artificial Sequence: Synthetic oligonucleotide
acccaacuccaaaaggaau

SEQ ID NO: 1214052 - RNA, 19 nt, Artificial Sequence
  Description of Artificial Sequence: Synthetic oligonucleotide
ugugguacacguggcuguu

SEQ ID NO: 1214053 - RNA, 19 nt, Artificial Sequence
  Description of Artificial Sequence: Synthetic oligonucleotide
cuauggcguuugcuguaug

SEQ ID NO: 1214054 - RNA, 19 nt, Artificial Sequence
  Description of Artificial Sequence: Synthetic oligonucleotide
cagguaaaaggcaccucua

SEQ ID NO: 1214055 - RNA, 19 nt, Artificial Sequence
  Description of Artificial Sequence: Synthetic oligonucleotide
ugcacgcuucuugucacuu

SEQ ID NO: 1214056 - RNA, 19 nt, Artificial Sequence
  Description of Artificial Sequence: Synthetic oligonucleotide
agaggcgcugagaaugaaa

SEQ ID NO: 1214057 - RNA, 19 nt, Artificial Sequence
  Description of Artificial Sequence: Synthetic oligonucleotide
ugccaagcagaugguuccu

SEQ ID NO: 1214058 - RNA, 19 nt, Artificial Sequence
  Description of Artificial Sequence: Synthetic oligonucleotide
aagaggcgcugagaaugaa

SEQ ID NO: 1214059 - RNA, 19 nt, Artificial Sequence
  Description of Artificial Sequence: Synthetic oligonucleotide
gucuaccacagcauaaaau

SEQ ID NO: 1214060 - RNA, 19 nt, Artificial Sequence
  Description of Artificial Sequence: Synthetic oligonucleotide
ggucuagguuucaaaauua

SEQ ID NO: 1214061 - RNA, 19 nt, Artificial Sequence
  Description of Artificial Sequence: Synthetic oligonucleotide
cacgcuucuugucacuugu

SEQ ID NO: 1214062 - RNA, 19 nt, Artificial Sequence
  Description of Artificial Sequence: Synthetic oligonucleotide
gaauacccucuuauagagu

SEQ ID NO: 1214063 - RNA, 19 nt, Artificial Sequence
  Description of Artificial Sequence: Synthetic oligonucleotide
gguugcaagcaaugaauau

SEQ ID NO: 1214064 - RNA, 19 nt, Artificial Sequence
  Description of Artificial Sequence: Synthetic oligonucleotide
auccaguauugggcuuaac

SEQ ID NO: 1214065 - RNA, 19 nt, Artificial Sequence
  Description of Artificial Sequence: Synthetic oligonucleotide
aggcaccucuaguacuuua

SEQ ID NO: 1214066 - RNA, 19 nt, Artificial Sequence
  Description of Artificial Sequence: Synthetic oligonucleotide
gucacauacccaacuccaa

SEQ ID NO: 1214067 - RNA, 19 nt, Artificial Sequence
  Description of Artificial Sequence: Synthetic oligonucleotide
cgucacauacccaacucca

SEQ ID NO: 1214068 - RNA, 19 nt, Artificial Sequence
  Description of Artificial Sequence: Synthetic oligonucleotide
gacaucgagcagcuauaau

SEQ ID NO: 1214069 - RNA, 19 nt, Artificial Sequence
  Description of Artificial Sequence: Synthetic oligonucleotide
caccacuauaagaagcauu

SEQ ID NO: 1214070 - RNA, 19 nt, Artificial Sequence
  Description of Artificial Sequence: Synthetic oligonucleotide
cagugcagauugucauuga

SEQ ID NO: 1214071 - RNA, 19 nt, Artificial Sequence
  Description of Artificial Sequence: Synthetic oligonucleotide
gaugaacacguuaguuaau

SEQ ID NO: 1214072 - RNA, 19 nt, Artificial Sequence
  Description of Artificial Sequence: Synthetic oligonucleotide
gcaauucaaagaaugcaau

SEQ ID NO: 1214073 - RNA, 19 nt, Artificial Sequence
  Description of Artificial Sequence: Synthetic oligonucleotide
gcacgcuucuugucacuug

SEQ ID NO: 1214074 - RNA, 19 nt, Artificial Sequence
  Description of Artificial Sequence: Synthetic oligonucleotide
auggugcgacuacucuuuu

SEQ ID NO: 1214075 - RNA, 19 nt, Artificial Sequence
  Description of Artificial Sequence: Synthetic oligonucleotide
gcgcugagaaugaaaggca

SEQ ID NO: 1214076 - RNA, 19 nt, Artificial Sequence
  Description of Artificial Sequence: Synthetic oligonucleotide
gugguacacguggcuguug

SEQ ID NO: 1214077 - RNA, 19 nt, Artificial Sequence
  Description of Artificial Sequence: Synthetic oligonucleotide
acgugaagaaggacaccuu

SEQ ID NO: 1214078 - RNA, 19 nt, Artificial Sequence
  Description of Artificial Sequence: Synthetic oligonucleotide
ggcuacugugguacacgug

SEQ ID NO: 1214079 - RNA, 19 nt, Artificial Sequence
  Description of Artificial Sequence: Synthetic oligonucleotide
ggaaagaggcgcugagaau

SEQ ID NO: 1214080 - RNA, 19 nt, Artificial Sequence
  Description of Artificial Sequence: Synthetic oligonucleotide
caaauauugcacgcuucuu

SEQ ID NO: 1214081 - RNA, 19 nt, Artificial Sequence
  Description of Artificial Sequence: Synthetic oligonucleotide
caacacucuccagcaggca

SEQ ID NO: 1214082 - RNA, 19 nt, Artificial Sequence
  Description of Artificial Sequence: Synthetic oligonucleotide
gcguccaguggcagguugc

SEQ ID NO: 1214083 - RNA, 19 nt, Artificial Sequence
  Description of Artificial Sequence: Synthetic oligonucleotide
guggcagguugcaagcaau

SEQ ID NO: 1214084 - RNA, 19 nt, Artificial Sequence
  Description of Artificial Sequence: Synthetic oligonucleotide
acgugaggucuagguuuca

SEQ ID NO: 1214085 - RNA, 19 nt, Artificial Sequence
  Description of Artificial Sequence: Synthetic oligonucleotide
gggcuacugugguacacgu

SEQ ID NO: 1214086 - RNA, 19 nt, Artificial Sequence
  Description of Artificial Sequence: Synthetic oligonucleotide
ccuaacaacagugcagauu

SEQ ID NO: 1214087 - RNA, 19 nt, Artificial Sequence
  Description of Artificial Sequence: Synthetic oligonucleotide
gcuguugcgcauacacagu

SEQ ID NO: 1214088 - RNA, 19 nt, Artificial Sequence
  Description of Artificial Sequence: Synthetic oligonucleotide
cacguggcuguugcgcaua

SEQ ID NO: 1214089 - RNA, 19 nt, Artificial Sequence
  Description of Artificial Sequence: Synthetic oligonucleotide
cguucgacaucgagcagcu

SEQ ID NO: 1214090 - RNA, 19 nt, Artificial Sequence
  Description of Artificial Sequence: Synthetic oligonucleotide
gguuuguggugugguuccu

SEQ ID NO: 1214091 - RNA, 19 nt, Artificial Sequence
  Description of Artificial Sequence: Synthetic oligonucleotide
cagaagacuuugggguguu

SEQ ID NO: 1214092 - RNA, 19 nt, Artificial Sequence
  Description of Artificial Sequence: Synthetic oligonucleotide
guucgacaucgagcagcua

SEQ ID NO: 1214093 - RNA, 19 nt, Artificial Sequence
  Description of Artificial Sequence: Synthetic oligonucleotide
ggaauccucuauggcguuu

SEQ ID NO: 1214094 - RNA, 19 nt, Artificial Sequence
  Description of Artificial Sequence: Synthetic oligonucleotide
cguuaguuaauggcagcuu

SEQ ID NO: 1214095 - RNA, 19 nt, Artificial Sequence
  Description of Artificial Sequence: Synthetic oligonucleotide
cccuaacaacagugcagau

SEQ ID NO: 1214096 - RNA, 19 nt, Artificial Sequence
  Description of Artificial Sequence: Synthetic oligonucleotide
cguuugcuguaugacuuau

SEQ ID NO: 1214097 - RNA, 19 nt, Artificial Sequence
  Description of Artificial Sequence: Synthetic oligonucleotide
cagcguccaguggcagguu

SEQ ID NO: 1214098 - RNA, 19 nt, Artificial Sequence
  Description of Artificial Sequence: Synthetic oligonucleotide
aaggauaugagacaauggc

SEQ ID NO: 1214099 - RNA, 19 nt, Artificial Sequence
  Description of Artificial Sequence: Synthetic oligonucleotide
gaauaauuaguuuaguucc

SEQ ID NO: 1214100 - RNA, 19 nt, Artificial Sequence
  Description of Artificial Sequence: Synthetic oligonucleotide
uguaaaaugagucaucugu

SEQ ID NO: 1214101 - RNA, 19 nt, Artificial Sequence
  Description of Artificial Sequence: Synthetic oligonucleotide
aguggcuuaaucuugacac

SEQ ID NO: 1214102 - RNA, 19 nt, Artificial Sequence
  Description of Artificial Sequence: Synthetic oligonucleotide
aauacuuaaggauaugaga

SEQ ID NO: 1214103 - RNA, 19 nt, Artificial Sequence
  Description of Artificial Sequence: Synthetic oligonucleotide
auuaguuuaguucccagac

SEQ ID NO: 1214104 - RNA, 19 nt, Artificial Sequence
  Description of Artificial Sequence: Synthetic oligonucleotide
ugaggauucagacacaccc

SEQ ID NO: 1214105 - RNA, 19 nt, Artificial Sequence
  Description of Artificial Sequence: Synthetic oligonucleotide
aaguauaaauacuuaagga

SEQ ID NO: 1214106 - RNA, 19 nt, Artificial Sequence
  Description of Artificial Sequence: Synthetic oligonucleotide
uguucuaccaguccaaucc

SEQ ID NO: 1214107 - RNA, 19 nt, Artificial Sequence
  Description of Artificial Sequence: Synthetic oligonucleotide
ugaauaauuaguuuaguuc

SEQ ID NO: 1214108 - RNA, 19 nt, Artificial Sequence
  Description of Artificial Sequence: Synthetic oligonucleotide
aaacgugggacauccaggc

SEQ ID NO: 1214109 - RNA, 19 nt, Artificial Sequence
  Description of Artificial Sequence: Synthetic oligonucleotide
aaucgggagaucuccaggc

SEQ ID NO: 1214110 - RNA, 19 nt, Artificial Sequence
  Description of Artificial Sequence: Synthetic oligonucleotide
auacuuaaggauaugagac

SEQ ID NO: 1214111 - RNA, 19 nt, Artificial Sequence
  Description of Artificial Sequence: Synthetic oligonucleotide
acuaacaccaaugaugugg

SEQ ID NO: 1214112 - RNA, 19 nt, Artificial Sequence
  Description of Artificial Sequence: Synthetic oligonucleotide
gaggaaguaauauuguugc

SEQ ID NO: 1214113 - RNA, 19 nt, Artificial Sequence
  Description of Artificial Sequence: Synthetic oligonucleotide
aaaguaguccacauguccc

SEQ ID NO: 1214114 - RNA, 19 nt, Artificial Sequence
  Description of Artificial Sequence: Synthetic oligonucleotide
aauaauuaguuuaguuccc

SEQ ID NO: 1214115 - RNA, 19 nt, Artificial Sequence
  Description of Artificial Sequence: Synthetic oligonucleotide
aaagccuuguagcuggcac

SEQ ID NO: 1214116 - RNA, 19 nt, Artificial Sequence
  Description of Artificial Sequence: Synthetic oligonucleotide
acuaaagugcccaugaacg

SEQ ID NO: 1214117 - RNA, 19 nt, Artificial Sequence
  Description of Artificial Sequence: Synthetic oligonucleotide
uguaaaacuuuguaaguug

SEQ ID NO: 1214118 - RNA, 19 nt, Artificial Sequence
  Description of Artificial Sequence: Synthetic oligonucleotide
ugaggaaguaauauuguug

SEQ ID NO: 1214119 - RNA, 19 nt, Artificial Sequence
  Description of Artificial Sequence: Synthetic oligonucleotide
uaguuuaguucccagacug

SEQ ID NO: 1214120 - RNA, 19 nt, Artificial Sequence
  Description of Artificial Sequence: Synthetic oligonucleotide
agaucagguaacuguaacc

SEQ ID NO: 1214121 - RNA, 19 nt, Artificial Sequence
  Description of Artificial Sequence: Synthetic oligonucleotide
uguuuagguauggugaucg

SEQ ID NO: 1214122 - RNA, 19 nt, Artificial Sequence
  Description of Artificial Sequence: Synthetic oligonucleotide
uuagguauggugaucguga

SEQ ID NO: 1214123 - RNA, 19 nt, Artificial Sequence
  Description of Artificial Sequence: Synthetic oligonucleotide
uuguaaguugguaauggag

SEQ ID NO: 1214124 - RNA, 19 nt, Artificial Sequence
  Description of Artificial Sequence: Synthetic oligonucleotide
aacagucacuacuuguggg

SEQ ID NO: 1214125 - RNA, 19 nt, Artificial Sequence
  Description of Artificial Sequence: Synthetic oligonucleotide
ugaccuuccccuuaguagg

SEQ ID NO: 1214126 - RNA, 19 nt, Artificial Sequence
  Description of Artificial Sequence: Synthetic oligonucleotide
agagccguaaacccagucc

SEQ ID NO: 1214127 - RNA, 19 nt, Artificial Sequence
  Description of Artificial Sequence: Synthetic oligonucleotide
aaauacuuaaggauaugag

SEQ ID NO: 1214128 - RNA, 19 nt, Artificial Sequence
  Description of Artificial Sequence: Synthetic oligonucleotide
ugcuguuuagguaugguga

SEQ ID NO: 1214129 - RNA, 19 nt, Artificial Sequence
  Description of Artificial Sequence: Synthetic oligonucleotide
uaauaaacuugucaaucca

SEQ ID NO: 1214130 - RNA, 19 nt, Artificial Sequence
  Description of Artificial Sequence: Synthetic oligonucleotide
acuagguuuaucuggcacg

SEQ ID NO: 1214131 - RNA, 19 nt, Artificial Sequence
  Description of Artificial Sequence: Synthetic oligonucleotide
uugguaauggagaucaagu

SEQ ID NO: 1214132 - RNA, 19 nt, Artificial Sequence
  Description of Artificial Sequence: Synthetic oligonucleotide
aggcuuuguuccuaaagcc

SEQ ID NO: 1214133 - RNA, 19 nt, Artificial Sequence
  Description of Artificial Sequence: Synthetic oligonucleotide
uguagagccguaaacccag

SEQ ID NO: 1214134 - RNA, 19 nt, Artificial Sequence
  Description of Artificial Sequence: Synthetic oligonucleotide
uccauuaaauccuaaguau

SEQ ID NO: 1214135 - RNA, 19 nt, Artificial Sequence
  Description of Artificial Sequence: Synthetic oligonucleotide
uuuaguucccagacugacg

SEQ ID NO: 1214136 - RNA, 19 nt, Artificial Sequence
  Description of Artificial Sequence: Synthetic oligonucleotide
acuacuuguggggaaaacc

SEQ ID NO: 1214137 - RNA, 19 nt, Artificial Sequence
  Description of Artificial Sequence: Synthetic oligonucleotide
uguacagaugcacagcccu

SEQ ID NO: 1214138 - RNA, 19 nt, Artificial Sequence
  Description of Artificial Sequence: Synthetic oligonucleotide
aaugauguggauugaggau

SEQ ID NO: 1214139 - RNA, 19 nt, Artificial Sequence
  Description of Artificial Sequence: Synthetic oligonucleotide
uccgaagggguaaagaaga

SEQ ID NO: 1214140 - RNA, 19 nt, Artificial Sequence
  Description of Artificial Sequence: Synthetic oligonucleotide
uguggggaaaaccaccaag

SEQ ID NO: 1214141 - RNA, 19 nt, Artificial Sequence
  Description of Artificial Sequence: Synthetic oligonucleotide
uuguugcuaagaaagguga

SEQ ID NO: 1214142 - RNA, 19 nt, Artificial Sequence
  Description of Artificial Sequence: Synthetic oligonucleotide
aacucagaguuuuggaugu

SEQ ID NO: 1214143 - RNA, 19 nt, Artificial Sequence
  Description of Artificial Sequence: Synthetic oligonucleotide
aacuuuguaaguugguaau

SEQ ID NO: 1214144 - RNA, 19 nt, Artificial Sequence
  Description of Artificial Sequence: Synthetic oligonucleotide
aaagucccaauaaugguag

SEQ ID NO: 1214145 - RNA, 19 nt, Artificial Sequence
  Description of Artificial Sequence: Synthetic oligonucleotide
aguucuguaaaaugaguca

SEQ ID NO: 1214146 - RNA, 19 nt, Artificial Sequence
  Description of Artificial Sequence: Synthetic oligonucleotide
gucauugaccggcagaggg

SEQ ID NO: 1214147 - RNA, 19 nt, Artificial Sequence
  Description of Artificial Sequence: Synthetic oligonucleotide
ugugauccgucccaacugg

SEQ ID NO: 1214148 - RNA, 19 nt, Artificial Sequence
  Description of Artificial Sequence: Synthetic oligonucleotide
agcucuaauaaacuuguca

SEQ ID NO: 1214149 - RNA, 19 nt, Artificial Sequence
  Description of Artificial Sequence: Synthetic oligonucleotide
acagucacuacuugugggg

SEQ ID NO: 1214150 - RNA, 19 nt, Artificial Sequence
  Description of Artificial Sequence: Synthetic oligonucleotide
aguaauauuguugcuaaga

SEQ ID NO: 1214151 - RNA, 19 nt, Artificial Sequence
  Description of Artificial Sequence: Synthetic oligonucleotide
agcuccaaaaguuugcuga

SEQ ID NO: 1214152 - RNA, 19 nt, Artificial Sequence
  Description of Artificial Sequence: Synthetic oligonucleotide
uguggauugaggauucaga

SEQ ID NO: 1214153 - RNA, 19 nt, Artificial Sequence
  Description of Artificial Sequence: Synthetic oligonucleotide
aaacaggcaugcuugcuug

SEQ ID NO: 1214154 - RNA, 19 nt, Artificial Sequence
  Description of Artificial Sequence: Synthetic oligonucleotide
aaaacgugggacauccagg

SEQ ID NO: 1214155 - RNA, 19 nt, Artificial Sequence
  Description of Artificial Sequence: Synthetic oligonucleotide
aauccuaaguauaaauacu

SEQ ID NO: 1214156 - RNA, 19 nt, Artificial Sequence
  Description of Artificial Sequence: Synthetic oligonucleotide
acaaucuccagccaggaaa

SEQ ID NO: 1214157 - RNA, 19 nt, Artificial Sequence
  Description of Artificial Sequence: Synthetic oligonucleotide
guaucuauguaaaacuuug

SEQ ID NO: 1214158 - RNA, 19 nt, Artificial Sequence
  Description of Artificial Sequence: Synthetic oligonucleotide
ugaauccaugaauaauuag

SEQ ID NO: 1214159 - RNA, 19 nt, Artificial Sequence
  Description of Artificial Sequence: Synthetic oligonucleotide
agaugcacagcccucaugu

SEQ ID NO: 1214160 - RNA, 19 nt, Artificial Sequence
  Description of Artificial Sequence: Synthetic oligonucleotide
aacagggaagcugaaaugu

SEQ ID NO: 1214161 - RNA, 19 nt, Artificial Sequence
  Description of Artificial Sequence: Synthetic oligonucleotide
ucuguaaaaugagucaucu

SEQ ID NO: 1214162 - RNA, 19 nt, Artificial Sequence
  Description of Artificial Sequence: Synthetic oligonucleotide
cuuaguaggaauggagugg

SEQ ID NO: 1214163 - RNA, 19 nt, Artificial Sequence
  Description of Artificial Sequence: Synthetic oligonucleotide
uuuguagaaaugucccacc

SEQ ID NO: 1214164 - RNA, 19 nt, Artificial Sequence
  Description of Artificial Sequence: Synthetic oligonucleotide
uaucucuugccacacugcc

SEQ ID NO: 1214165 - RNA, 19 nt, Artificial Sequence
  Description of Artificial Sequence: Synthetic oligonucleotide
gugaucgugacugaggaag

SEQ ID NO: 1214166 - RNA, 19 nt, Artificial Sequence
  Description of Artificial Sequence: Synthetic oligonucleotide
uuccuaaagcccugaaucc

SEQ ID NO: 1214167 - RNA, 19 nt, Artificial Sequence
  Description of Artificial Sequence: Synthetic oligonucleotide
uuuguaaguugguaaugga

SEQ ID NO: 1214168 - RNA, 19 nt, Artificial Sequence
  Description of Artificial Sequence: Synthetic oligonucleotide
ugaacucagaguuuuggau

SEQ ID NO: 1214169 - RNA, 19 nt, Artificial Sequence
  Description of Artificial Sequence: Synthetic oligonucleotide
accaguccaauccuuggac

SEQ ID NO: 1214170 - RNA, 19 nt, Artificial Sequence
  Description of Artificial Sequence: Synthetic oligonucleotide
gauacccaaauagucagug

SEQ ID NO: 1214171 - RNA, 19 nt, Artificial Sequence
  Description of Artificial Sequence: Synthetic oligonucleotide
aauccaugaauaauuaguu

SEQ ID NO: 1214172 - RNA, 19 nt, Artificial Sequence
  Description of Artificial Sequence: Synthetic oligonucleotide
augaauaauuaguuuaguu

SEQ ID NO: 1214173 - RNA, 19 nt, Artificial Sequence
  Description of Artificial Sequence: Synthetic oligonucleotide
uacuuaaggauaugagaca

SEQ ID NO: 1214174 - RNA, 19 nt, Artificial Sequence
  Description of Artificial Sequence: Synthetic oligonucleotide
aaguaauauuguugcuaag

SEQ ID NO: 1214175 - RNA, 19 nt, Artificial Sequence
  Description of Artificial Sequence: Synthetic oligonucleotide
guaaagaagagaaacugga

SEQ ID NO: 1214176 - RNA, 19 nt, Artificial Sequence
  Description of Artificial Sequence: Synthetic oligonucleotide
aggaucuagaccugugauc

SEQ ID NO: 1214177 - RNA, 19 nt, Artificial Sequence
  Description of Artificial Sequence: Synthetic oligonucleotide
gaaucgggagaucuccagg

SEQ ID NO: 1214178 - RNA, 19 nt, Artificial Sequence
  Description of Artificial Sequence: Synthetic oligonucleotide
cagggaaaggccaucagug

SEQ ID NO: 1214179 - RNA, 19 nt, Artificial Sequence
  Description of Artificial Sequence: Synthetic oligonucleotide
aaaccaccaagaauuugac

SEQ ID NO: 1214180 - RNA, 19 nt, Artificial Sequence
  Description of Artificial Sequence: Synthetic oligonucleotide
ggauaugagacaauggcag

SEQ ID NO: 1214181 - RNA, 19 nt, Artificial Sequence
  Description of Artificial Sequence: Synthetic oligonucleotide
aggauucagacacacccag

SEQ ID NO: 1214182 - RNA, 19 nt, Artificial Sequence
  Description of Artificial Sequence: Synthetic oligonucleotide
uuaggguggccaaugacuc

SEQ ID NO: 1214183 - RNA, 19 nt, Artificial Sequence
  Description of Artificial Sequence: Synthetic oligonucleotide
uugagcuucacuagguuua

SEQ ID NO: 1214184 - RNA, 19 nt, Artificial Sequence
  Description of Artificial Sequence: Synthetic oligonucleotide
uuaaucuugacaccaccuu

SEQ ID NO: 1214185 - RNA, 19 nt, Artificial Sequence
  Description of Artificial Sequence: Synthetic oligonucleotide
uuaguaggaauggagugga

SEQ ID NO: 1214186 - RNA, 19 nt, Artificial Sequence
  Description of Artificial Sequence: Synthetic oligonucleotide
caaauagucagugucugug

SEQ ID NO: 1214187 - RNA, 19 nt, Artificial Sequence
  Description of Artificial Sequence: Synthetic oligonucleotide
uggugaucgugacugagga

SEQ ID NO: 1214188 - RNA, 19 nt, Artificial Sequence
  Description of Artificial Sequence: Synthetic oligonucleotide
auucccugagcuuccaaag

SEQ ID NO: 1214189 - RNA, 19 nt, Artificial Sequence
  Description of Artificial Sequence: Synthetic oligonucleotide
aauggcaguuguuuagaaa

SEQ ID NO: 1214190 - RNA, 19 nt, Artificial Sequence
  Description of Artificial Sequence: Synthetic oligonucleotide
gagauacacucucacuucc

SEQ ID NO: 1214191 - RNA, 19 nt, Artificial Sequence
  Description of Artificial Sequence: Synthetic oligonucleotide
ucaggagauacacucucac

SEQ ID NO: 1214192 - RNA, 19 nt, Artificial Sequence
  Description of Artificial Sequence: Synthetic oligonucleotide
aacuccacgaggcugugau

SEQ ID NO: 1214193 - RNA, 19 nt, Artificial Sequence
  Description of Artificial Sequence: Synthetic oligonucleotide
uggccaaugacuccucgcc

SEQ ID NO: 1214194 - RNA, 19 nt, Artificial Sequence
  Description of Artificial Sequence: Synthetic oligonucleotide
uugcuguuuagguauggug

SEQ ID NO: 1214195 - RNA, 19 nt, Artificial Sequence
  Description of Artificial Sequence: Synthetic oligonucleotide
uaaagcaauccagacaauc

SEQ ID NO: 1214196 - RNA, 19 nt, Artificial Sequence
  Description of Artificial Sequence: Synthetic oligonucleotide
guuuaucuggcacgguggg

SEQ ID NO: 1214197 - RNA, 19 nt, Artificial Sequence
  Description of Artificial Sequence: Synthetic oligonucleotide
uugcuaagaaaggugaccu

SEQ ID NO: 1214198 - RNA, 19 nt, Artificial Sequence
  Description of Artificial Sequence: Synthetic oligonucleotide
gaauccaugaauaauuagu

SEQ ID NO: 1214199 - RNA, 19 nt, Artificial Sequence
  Description of Artificial Sequence: Synthetic oligonucleotide
uuggggaguggcuuaaucu

SEQ ID NO: 1214200 - RNA, 19 nt, Artificial Sequence
  Description of Artificial Sequence: Synthetic oligonucleotide
uuuagguauggugaucgug

SEQ ID NO: 1214201 - RNA, 19 nt, Artificial Sequence
  Description of Artificial Sequence: Synthetic oligonucleotide
agguuuaucuggcacggug

SEQ ID NO: 1214202 - RNA, 19 nt, Artificial Sequence
  Description of Artificial Sequence: Synthetic oligonucleotide
gugaucacagaucagguaa

SEQ ID NO: 1214203 - RNA, 19 nt, Artificial Sequence
  Description of Artificial Sequence: Synthetic oligonucleotide
uccaaacccggcuaggaac

SEQ ID NO: 1214204 - RNA, 19 nt, Artificial Sequence
  Description of Artificial Sequence: Synthetic oligonucleotide
aaucuugacaccaccuugu

SEQ ID NO: 1214205 - RNA, 19 nt, Artificial Sequence
  Description of Artificial Sequence: Synthetic oligonucleotide
cucaugugaucacagauca

SEQ ID NO: 1214206 - RNA, 19 nt, Artificial Sequence
  Description of Artificial Sequence: Synthetic oligonucleotide
cacagcuaggguccgaagg

SEQ ID NO: 1214207 - RNA, 19 nt, Artificial Sequence
  Description of Artificial Sequence: Synthetic oligonucleotide
aucgccagcauccaagcgu

SEQ ID NO: 1214208 - RNA, 19 nt, Artificial Sequence
  Description of Artificial Sequence: Synthetic oligonucleotide
cuagguuuaucuggcacgg

SEQ ID NO: 1214209 - RNA, 19 nt, Artificial Sequence
  Description of Artificial Sequence: Synthetic oligonucleotide
auggguuaaagcaauccag

SEQ ID NO: 1214210 - RNA, 19 nt, Artificial Sequence
  Description of Artificial Sequence: Synthetic oligonucleotide
gguaauggagaucaaguuc

SEQ ID NO: 1214211 - RNA, 19 nt, Artificial Sequence
  Description of Artificial Sequence: Synthetic oligonucleotide
caaugauguggauugagga

SEQ ID NO: 1214212 - RNA, 19 nt, Artificial Sequence
  Description of Artificial Sequence: Synthetic oligonucleotide
guugguaauggagaucaag

SEQ ID NO: 1214213 - RNA, 19 nt, Artificial Sequence
  Description of Artificial Sequence: Synthetic oligonucleotide
gguaacuguaaccugcgug

SEQ ID NO: 1214214 - RNA, 19 nt, Artificial Sequence
  Description of Artificial Sequence: Synthetic oligonucleotide
cuacuuguggggaaaacca

SEQ ID NO: 1214215 - RNA, 19 nt, Artificial Sequence
  Description of Artificial Sequence: Synthetic oligonucleotide
uguugcuaagaaaggugac

SEQ ID NO: 1214216 - RNA, 19 nt, Artificial Sequence
  Description of Artificial Sequence: Synthetic oligonucleotide
aggggcaguacagaaaguc

SEQ ID NO: 1214217 - RNA, 19 nt, Artificial Sequence
  Description of Artificial Sequence: Synthetic oligonucleotide
aagagguaguugccuguag

SEQ ID NO: 1214218 - RNA, 19 nt, Artificial Sequence
  Description of Artificial Sequence: Synthetic oligonucleotide
caacagucacuacuugugg

SEQ ID NO: 1214219 - RNA, 19 nt, Artificial Sequence
  Description of Artificial Sequence: Synthetic oligonucleotide
gauucagacacacccagcu

SEQ ID NO: 1214220 - RNA, 19 nt, Artificial Sequence
  Description of Artificial Sequence: Synthetic oligonucleotide
acgugggacauccaggcug

SEQ ID NO: 1214221 - RNA, 19 nt, Artificial Sequence
  Description of Artificial Sequence: Synthetic oligonucleotide
gucagugcacuuuggcugg

SEQ ID NO: 1214222 - RNA, 19 nt, Artificial Sequence
  Description of Artificial Sequence: Synthetic oligonucleotide
aaugacuccucgcccuuca

SEQ ID NO: 1214223 - RNA, 19 nt, Artificial Sequence
  Description of Artificial Sequence: Synthetic oligonucleotide
agucccaauaaugguaguc

SEQ ID NO: 1214224 - RNA, 19 nt, Artificial Sequence
  Description of Artificial Sequence: Synthetic oligonucleotide
aacaccaaugauguggauu

SEQ ID NO: 1214225 - RNA, 19 nt, Artificial Sequence
  Description of Artificial Sequence: Synthetic oligonucleotide
uguagaaaugucccaccau

SEQ ID NO: 1214226 - RNA, 19 nt, Artificial Sequence
  Description of Artificial Sequence: Synthetic oligonucleotide
ugaucacagaucagguaac

SEQ ID NO: 1214227 - RNA, 19 nt, Artificial Sequence
  Description of Artificial Sequence: Synthetic oligonucleotide
accuuguucuaccagucca

SEQ ID NO: 1214228 - RNA, 19 nt, Artificial Sequence
  Description of Artificial Sequence: Synthetic oligonucleotide
acuuaaggauaugagacaa

SEQ ID NO: 1214229 - RNA, 19 nt, Artificial Sequence
  Description of Artificial Sequence: Synthetic oligonucleotide
acucucacuuccuugggga

SEQ ID NO: 1214230 - RNA, 19 nt, Artificial Sequence
  Description of Artificial Sequence: Synthetic oligonucleotide
uguuccuaaagcccugaau

SEQ ID NO: 1214231 - RNA, 19 nt, Artificial Sequence
  Description of Artificial Sequence: Synthetic oligonucleotide
ugcccaugaacguaucucu

SEQ ID NO: 1214232 - RNA, 19 nt, Artificial Sequence
  Description of Artificial Sequence: Synthetic oligonucleotide
ugauccgucccaacuggcc

SEQ ID NO: 1214233 - RNA, 19 nt, Artificial Sequence
  Description of Artificial Sequence: Synthetic oligonucleotide
uuccccuuaguaggaaugg

SEQ ID NO: 1214234 - RNA, 19 nt, Artificial Sequence
  Description of Artificial Sequence: Synthetic oligonucleotide
gagccguaaacccagucca

SEQ ID NO: 1214235 - RNA, 19 nt, Artificial Sequence
  Description of Artificial Sequence: Synthetic oligonucleotide
acuguaaccugcgugaaaa

SEQ ID NO: 1214236 - RNA, 19 nt, Artificial Sequence
  Description of Artificial Sequence: Synthetic oligonucleotide
ucgcccuucaaguugcugu

SEQ ID NO: 1214237 - RNA, 19 nt, Artificial Sequence
  Description of Artificial Sequence: Synthetic oligonucleotide
cuaccaguccaauccuugg

SEQ ID NO: 1214238 - RNA, 19 nt, Artificial Sequence
  Description of Artificial Sequence: Synthetic oligonucleotide
ucuugaccuccauugacaa

SEQ ID NO: 1214239 - RNA, 19 nt, Artificial Sequence
  Description of Artificial Sequence: Synthetic oligonucleotide
gucccaauaaugguagucc

SEQ ID NO: 1214240 - RNA, 19 nt, Artificial Sequence
  Description of Artificial Sequence: Synthetic oligonucleotide
gaggaaucgggagaucucc

SEQ ID NO: 1214241 - RNA, 19 nt, Artificial Sequence
  Description of Artificial Sequence: Synthetic oligonucleotide
uccugcguaggcuugggcu

SEQ ID NO: 1214242 - RNA, 19 nt, Artificial Sequence
  Description of Artificial Sequence: Synthetic oligonucleotide
cuugcagacucacuggcuc

SEQ ID NO: 1214243 - RNA, 19 nt, Artificial Sequence
  Description of Artificial Sequence: Synthetic oligonucleotide
caguccaauccuuggacag

SEQ ID NO: 1214244 - RNA, 19 nt, Artificial Sequence
  Description of Artificial Sequence: Synthetic oligonucleotide
uuuuccaaacccggcuagg

SEQ ID NO: 1214245 - RNA, 19 nt, Artificial Sequence
  Description of Artificial Sequence: Synthetic oligonucleotide
ugauguggauugaggauuc

SEQ ID NO: 1214246 - RNA, 19 nt, Artificial Sequence
  Description of Artificial Sequence: Synthetic oligonucleotide
auaauuaguuuaguuccca

SEQ ID NO: 1214247 - RNA, 19 nt, Artificial Sequence
  Description of Artificial Sequence: Synthetic oligonucleotide
uagaccugugauccguccc

SEQ ID NO: 1214248 - RNA, 19 nt, Artificial Sequence
  Description of Artificial Sequence: Synthetic oligonucleotide
agagagcucuaauaaacuu

SEQ ID NO: 1214249 - RNA, 19 nt, Artificial Sequence
  Description of Artificial Sequence: Synthetic oligonucleotide
cuaacaccaaugaugugga

SEQ ID NO: 1214250 - RNA, 19 nt, Artificial Sequence
  Description of Artificial Sequence: Synthetic oligonucleotide
gaaagucccaauaauggua

SEQ ID NO: 1214251 - RNA, 19 nt, Artificial Sequence
  Description of Artificial Sequence: Synthetic oligonucleotide
gaucagguaacuguaaccu

SEQ ID NO: 1214252 - RNA, 19 nt, Artificial Sequence
  Description of Artificial Sequence: Synthetic oligonucleotide
caugaacguaucucuugcc

SEQ ID NO: 1214253 - RNA, 19 nt, Artificial Sequence
  Description of Artificial Sequence: Synthetic oligonucleotide
ucccaauaaugguaguccu

SEQ ID NO: 1214254 - RNA, 19 nt, Artificial Sequence
  Description of Artificial Sequence: Synthetic oligonucleotide
uggcaguuguuuagaaaca

SEQ ID NO: 1214255 - RNA, 19 nt, Artificial Sequence
  Description of Artificial Sequence: Synthetic oligonucleotide
cuccacgaggcugugaugc

SEQ ID NO: 1214256 - RNA, 19 nt, Artificial Sequence
  Description of Artificial Sequence: Synthetic oligonucleotide
aucagguaacuguaaccug

SEQ ID NO: 1214257 - RNA, 19 nt, Artificial Sequence
  Description of Artificial Sequence: Synthetic oligonucleotide
cuuccccuuaguaggaaug

SEQ ID NO: 1214258 - RNA, 19 nt, Artificial Sequence
  Description of Artificial Sequence: Synthetic oligonucleotide
gaucuagaccugugauccg

SEQ ID NO: 1214259 - RNA, 19 nt, Artificial Sequence
  Description of Artificial Sequence: Synthetic oligonucleotide
aguucccagacugacguug

SEQ ID NO: 1214260 - RNA, 19 nt, Artificial Sequence
  Description of Artificial Sequence: Synthetic oligonucleotide
aaucacauuggcaucuguu

SEQ ID NO: 1214261 - RNA, 19 nt, Artificial Sequence
  Description of Artificial Sequence: Synthetic oligonucleotide
aacccggcuaggaacuugg

SEQ ID NO: 1214262 - RNA, 19 nt, Artificial Sequence
  Description of Artificial Sequence: Synthetic oligonucleotide
ugggcuaugcacaggcuau

SEQ ID NO: 1214263 - RNA, 19 nt, Artificial Sequence
  Description of Artificial Sequence: Synthetic oligonucleotide
cuguagucaggagauacac

SEQ ID NO: 1214264 - RNA, 19 nt, Artificial Sequence
  Description of Artificial Sequence: Synthetic oligonucleotide
cacuagguuuaucuggcac

SEQ ID NO: 1214265 - RNA, 19 nt, Artificial Sequence
  Description of Artificial Sequence: Synthetic oligonucleotide
agaucaaguucuguaaaau

SEQ ID NO: 1214266 - RNA, 19 nt, Artificial Sequence
  Description of Artificial Sequence: Synthetic oligonucleotide
uuaucuggcacgguggguu

SEQ ID NO: 1214267 - RNA, 19 nt, Artificial Sequence
  Description of Artificial Sequence: Synthetic oligonucleotide
aaagugcccaugaacguau

SEQ ID NO: 1214268 - RNA, 19 nt, Artificial Sequence
  Description of Artificial Sequence: Synthetic oligonucleotide
ugccuguagagccguaaac

SEQ ID NO: 1214269 - RNA, 19 nt, Artificial Sequence
  Description of Artificial Sequence: Synthetic oligonucleotide
gguacauucccugagcuuc

SEQ ID NO: 1214270 - RNA, 19 nt, Artificial Sequence
  Description of Artificial Sequence: Synthetic oligonucleotide
ucgugacugaggaaguaau

SEQ ID NO: 1214271 - RNA, 19 nt, Artificial Sequence
  Description of Artificial Sequence: Synthetic oligonucleotide
augauguggauugaggauu

SEQ ID NO: 1214272 - RNA, 19 nt, Artificial Sequence
  Description of Artificial Sequence: Synthetic oligonucleotide
acaaaguaguccacauguc

SEQ ID NO: 1214273 - RNA, 19 nt, Artificial Sequence
  Description of Artificial Sequence: Synthetic oligonucleotide
auccuaaguauaaauacuu

SEQ ID NO: 1214274 - RNA, 19 nt, Artificial Sequence
  Description of Artificial Sequence: Synthetic oligonucleotide
ugaggaaucgggagaucuc

SEQ ID NO: 1214275 - RNA, 19 nt, Artificial Sequence
  Description of Artificial Sequence: Synthetic oligonucleotide
auccaugaauaauuaguuu

SEQ ID NO: 1214276 - RNA, 19 nt, Artificial Sequence
  Description of Artificial Sequence: Synthetic oligonucleotide
cacaggaauccggauaccc

SEQ ID NO: 1214277 - RNA, 19 nt, Artificial Sequence
  Description of Artificial Sequence: Synthetic oligonucleotide
aggaaguaauauuguugcu

SEQ ID NO: 1214278 - RNA, 19 nt, Artificial Sequence
  Description of Artificial Sequence: Synthetic oligonucleotide
cuagaccugugauccgucc

SEQ ID NO: 1214279 - RNA, 19 nt, Artificial Sequence
  Description of Artificial Sequence: Synthetic oligonucleotide
agaccugugauccguccca

SEQ ID NO: 1214280 - RNA, 19 nt, Artificial Sequence
  Description of Artificial Sequence: Synthetic oligonucleotide
ucugagguuggugccucgg

SEQ ID NO: 1214281 - RNA, 19 nt, Artificial Sequence
  Description of Artificial Sequence: Synthetic oligonucleotide
aacuguaaccugcgugaaa

SEQ ID NO: 1214282 - RNA, 19 nt, Artificial Sequence
  Description of Artificial Sequence: Synthetic oligonucleotide
guaaacccaguccacugca

SEQ ID NO: 1214283 - RNA, 19 nt, Artificial Sequence
  Description of Artificial Sequence: Synthetic oligonucleotide
cacuggcucagguaugcag

SEQ ID NO: 1214284 - RNA, 19 nt, Artificial Sequence
  Description of Artificial Sequence: Synthetic oligonucleotide
cugugauccgucccaacug

SEQ ID NO: 1214285 - RNA, 19 nt, Artificial Sequence
  Description of Artificial Sequence: Synthetic oligonucleotide
ccggcuaggaacuuggaac

SEQ ID NO: 1214286 - RNA, 19 nt, Artificial Sequence
  Description of Artificial Sequence: Synthetic oligonucleotide
auggugaucgugacugagg

SEQ ID NO: 1214287 - RNA, 19 nt, Artificial Sequence
  Description of Artificial Sequence: Synthetic oligonucleotide
cuaggaacuuggaacuuga

SEQ ID NO: 1214288 - RNA, 19 nt, Artificial Sequence
  Description of Artificial Sequence: Synthetic oligonucleotide
guccgaagggguaaagaag

SEQ ID NO: 1214289 - RNA, 19 nt, Artificial Sequence
  Description of Artificial Sequence: Synthetic oligonucleotide
cuaaagcccugaauccaug

SEQ ID NO: 1214290 - RNA, 19 nt, Artificial Sequence
  Description of Artificial Sequence: Synthetic oligonucleotide
ccuuaguaggaauggagug

SEQ ID NO: 1214291 - RNA, 19 nt, Artificial Sequence
  Description of Artificial Sequence: Synthetic oligonucleotide
cuuaaucuugacaccaccu

SEQ ID NO: 1214292 - RNA, 19 nt, Artificial Sequence
  Description of Artificial Sequence: Synthetic oligonucleotide
cagcaaagagguaguugcc

SEQ ID NO: 1214293 - RNA, 19 nt, Artificial Sequence
  Description of Artificial Sequence: Synthetic oligonucleotide
uguugcccgcaagagagcu

SEQ ID NO: 1214294 - RNA, 19 nt, Artificial Sequence
  Description of Artificial Sequence: Synthetic oligonucleotide
gauaugagacaauggcagu

SEQ ID NO: 1214295 - RNA, 19 nt, Artificial Sequence
  Description of Artificial Sequence: Synthetic oligonucleotide
uuguucuaccaguccaauc

SEQ ID NO: 1214296 - RNA, 19 nt, Artificial Sequence
  Description of Artificial Sequence: Synthetic oligonucleotide
gaugcacagcccucaugug

SEQ ID NO: 1214297 - RNA, 19 nt, Artificial Sequence
  Description of Artificial Sequence: Synthetic oligonucleotide
auaugagacaauggcaguu

SEQ ID NO: 1214298 - RNA, 19 nt, Artificial Sequence
  Description of Artificial Sequence: Synthetic oligonucleotide
uugcccgcaagagagcucu

SEQ ID NO: 1214299 - RNA, 19 nt, Artificial Sequence
  Description of Artificial Sequence: Synthetic oligonucleotide
acaauggcaguuguuuaga

SEQ ID NO: 1214300 - RNA, 19 nt, Artificial Sequence
  Description of Artificial Sequence: Synthetic oligonucleotide
gaguggacuaaagugccca

SEQ ID NO: 1214301 - RNA, 19 nt, Artificial Sequence
  Description of Artificial Sequence: Synthetic oligonucleotide
ucuguccccucaacaguca

SEQ ID NO: 1214302 - RNA, 19 nt, Artificial Sequence
  Description of Artificial Sequence: Synthetic oligonucleotide
aacgugggacauccaggcu

SEQ ID NO: 1214303 - RNA, 19 nt, Artificial Sequence
  Description of Artificial Sequence: Synthetic oligonucleotide
ugucauugaccggcagagg

SEQ ID NO: 1214304 - RNA, 19 nt, Artificial Sequence
  Description of Artificial Sequence: Synthetic oligonucleotide
cauuggcaucuguugcccg

SEQ ID NO: 1214305 - RNA, 19 nt, Artificial Sequence
  Description of Artificial Sequence: Synthetic oligonucleotide
acgaggcugugaugcacac

SEQ ID NO: 1214306 - RNA, 19 nt, Artificial Sequence
  Description of Artificial Sequence: Synthetic oligonucleotide
ccuaaguauaaauacuuaa

SEQ ID NO: 1214307 - RNA, 19 nt, Artificial Sequence
  Description of Artificial Sequence: Synthetic oligonucleotide
ugagacaauggcaguuguu

SEQ ID NO: 1214308 - RNA, 19 nt, Artificial Sequence
  Description of Artificial Sequence: Synthetic oligonucleotide
aagucccaauaaugguagu

SEQ ID NO: 1214309 - RNA, 19 nt, Artificial Sequence
  Description of Artificial Sequence: Synthetic oligonucleotide
ccaugaacguaucucuugc

SEQ ID NO: 1214310 - RNA, 19 nt, Artificial Sequence
  Description of Artificial Sequence: Synthetic oligonucleotide
ugucccaccaugccuccaa

SEQ ID NO: 1214311 - RNA, 19 nt, Artificial Sequence
  Description of Artificial Sequence: Synthetic oligonucleotide
ugguccggcaggaucuaga

SEQ ID NO: 1214312 - RNA, 19 nt, Artificial Sequence
  Description of Artificial Sequence: Synthetic oligonucleotide
ggagauacacucucacuuc

SEQ ID NO: 1214313 - RNA, 19 nt, Artificial Sequence
  Description of Artificial Sequence: Synthetic oligonucleotide
uucuaccagcugcccacag

SEQ ID NO: 1214314 - RNA, 19 nt, Artificial Sequence
  Description of Artificial Sequence: Synthetic oligonucleotide
ucacuagguuuaucuggca

SEQ ID NO: 1214315 - RNA, 19 nt, Artificial Sequence
  Description of Artificial Sequence: Synthetic oligonucleotide
agugcccaugaacguaucu

SEQ ID NO: 1214316 - RNA, 19 nt, Artificial Sequence
  Description of Artificial Sequence: Synthetic oligonucleotide
ggaaucgggagaucuccag

SEQ ID NO: 1214317 - RNA, 19 nt, Artificial Sequence
  Description of Artificial Sequence: Synthetic oligonucleotide
cuauuuucagguccugaaa

SEQ ID NO: 1214318 - RNA, 19 nt, Artificial Sequence
  Description of Artificial Sequence: Synthetic oligonucleotide
caucuguugcccgcaagag

SEQ ID NO: 1214319 - RNA, 19 nt, Artificial Sequence
  Description of Artificial Sequence: Synthetic oligonucleotide
ugcuaagaaaggugaccuc

SEQ ID NO: 1214320 - RNA, 19 nt, Artificial Sequence
  Description of Artificial Sequence: Synthetic oligonucleotide
cucucacuuccuuggggag

SEQ ID NO: 1214321 - RNA, 19 nt, Artificial Sequence
  Description of Artificial Sequence: Synthetic oligonucleotide
uccaauccuuggacaggag

SEQ ID NO: 1214322 - RNA, 19 nt, Artificial Sequence
  Description of Artificial Sequence: Synthetic oligonucleotide
guuaggguggccaaugacu

SEQ ID NO: 1214323 - RNA, 19 nt, Artificial Sequence
  Description of Artificial Sequence: Synthetic oligonucleotide
aucuagaccugugauccgu

SEQ ID NO: 1214324 - RNA, 19 nt, Artificial Sequence
  Description of Artificial Sequence: Synthetic oligonucleotide
gaauuugaccuuccccuua

SEQ ID NO: 1214325 - RNA, 19 nt, Artificial Sequence
  Description of Artificial Sequence: Synthetic oligonucleotide
gacuccucgcccuucaagu

SEQ ID NO: 1214326 - RNA, 19 nt, Artificial Sequence
  Description of Artificial Sequence: Synthetic oligonucleotide
aaacccggcuaggaacuug

SEQ ID NO: 1214327 - RNA, 19 nt, Artificial Sequence
  Description of Artificial Sequence: Synthetic oligonucleotide
caauaaugguaguccuguc

SEQ ID NO: 1214328 - RNA, 19 nt, Artificial Sequence
  Description of Artificial Sequence: Synthetic oligonucleotide
cuguagagccguaaaccca

SEQ ID NO: 1214329 - RNA, 19 nt, Artificial Sequence
  Description of Artificial Sequence: Synthetic oligonucleotide
gacuaacaccaaugaugug

SEQ ID NO: 1214330 - RNA, 19 nt, Artificial Sequence
  Description of Artificial Sequence: Synthetic oligonucleotide
ggaaguaauauuguugcua

SEQ ID NO: 1214331 - RNA, 19 nt, Artificial Sequence
  Description of Artificial Sequence: Synthetic oligonucleotide
agacugacguugaacucag

SEQ ID NO: 1214332 - RNA, 19 nt, Artificial Sequence
  Description of Artificial Sequence: Synthetic oligonucleotide
cacaguacggggcccuggc

SEQ ID NO: 1214333 - RNA, 19 nt, Artificial Sequence
  Description of Artificial Sequence: Synthetic oligonucleotide
gcuauuuucagguccugaa

SEQ ID NO: 1214334 - RNA, 19 nt, Artificial Sequence
  Description of Artificial Sequence: Synthetic oligonucleotide
ucucacuuccuuggggagu

SEQ ID NO: 1214335 - RNA, 19 nt, Artificial Sequence
  Description of Artificial Sequence: Synthetic oligonucleotide
gagcaggaauggguuaaag

SEQ ID NO: 1214336 - RNA, 19 nt, Artificial Sequence
  Description of Artificial Sequence: Synthetic oligonucleotide
ucgccagcauccaagcguu

SEQ ID NO: 1214337 - RNA, 19 nt, Artificial Sequence
  Description of Artificial Sequence: Synthetic oligonucleotide
aaaacuccacgaggcugug

SEQ ID NO: 1214338 - RNA, 19 nt, Artificial Sequence
  Description of Artificial Sequence: Synthetic oligonucleotide
gagguacauucccugagcu

SEQ ID NO: 1214339 - RNA, 19 nt, Artificial Sequence
  Description of Artificial Sequence: Synthetic oligonucleotide
accugugauccgucccaac

SEQ ID NO: 1214340 - RNA, 19 nt, Artificial Sequence
  Description of Artificial Sequence: Synthetic oligonucleotide
caaagagggcaucgccagc

SEQ ID NO: 1214341 - RNA, 19 nt, Artificial Sequence
  Description of Artificial Sequence: Synthetic oligonucleotide
gguccgaagggguaaagaa

SEQ ID NO: 1214342 - RNA, 19 nt, Artificial Sequence
  Description of Artificial Sequence: Synthetic oligonucleotide
uucuaccaguccaauccuu

SEQ ID NO: 1214343 - RNA, 19 nt, Artificial Sequence
  Description of Artificial Sequence: Synthetic oligonucleotide
gaccucgaugcugguaucc

SEQ ID NO: 1214344 - RNA, 19 nt, Artificial Sequence
  Description of Artificial Sequence: Synthetic oligonucleotide
acaggaauccggauaccca

SEQ ID NO: 1214345 - RNA, 19 nt, Artificial Sequence
  Description of Artificial Sequence: Synthetic oligonucleotide
uuguuccuaaagcccugaa

SEQ ID NO: 1214346 - RNA, 19 nt, Artificial Sequence
  Description of Artificial Sequence: Synthetic oligonucleotide
caucgccagcauccaagcg

SEQ ID NO: 1214347 - RNA, 19 nt, Artificial Sequence
  Description of Artificial Sequence: Synthetic oligonucleotide
uaggaauggaguggacuaa

SEQ ID NO: 1214348 - RNA, 19 nt, Artificial Sequence
  Description of Artificial Sequence: Synthetic oligonucleotide
agucacuacuuguggggaa

SEQ ID NO: 1214349 - RNA, 19 nt, Artificial Sequence
  Description of Artificial Sequence: Synthetic oligonucleotide
ccucaugugaucacagauc

SEQ ID NO: 1214350 - RNA, 19 nt, Artificial Sequence
  Description of Artificial Sequence: Synthetic oligonucleotide
gaauccggauacccaaaua

SEQ ID NO: 1214351 - RNA, 19 nt, Artificial Sequence
  Description of Artificial Sequence: Synthetic oligonucleotide
gauccgucccaacuggccu

SEQ ID NO: 1214352 - RNA, 19 nt, Artificial Sequence
  Description of Artificial Sequence: Synthetic oligonucleotide
uaguaggaauggaguggac

SEQ ID NO: 1214353 - RNA, 19 nt, Artificial Sequence
  Description of Artificial Sequence: Synthetic oligonucleotide
guuugcugaggaaucggga

SEQ ID NO: 1214354 - RNA, 19 nt, Artificial Sequence
  Description of Artificial Sequence: Synthetic oligonucleotide
aguggacuaaagugcccau

SEQ ID NO: 1214355 - RNA, 19 nt, Artificial Sequence
  Description of Artificial Sequence: Synthetic oligonucleotide
aucgugacugaggaaguaa

SEQ ID NO: 1214356 - RNA, 19 nt, Artificial Sequence
  Description of Artificial Sequence: Synthetic oligonucleotide
cacagggaaaggccaucag

SEQ ID NO: 1214357 - RNA, 19 nt, Artificial Sequence
  Description of Artificial Sequence: Synthetic oligonucleotide
agcccugaauccaugaaua

SEQ ID NO: 1214358 - RNA, 19 nt, Artificial Sequence
  Description of Artificial Sequence: Synthetic oligonucleotide
gugaccucgaugcugguau

SEQ ID NO: 1214359 - RNA, 19 nt, Artificial Sequence
  Description of Artificial Sequence: Synthetic oligonucleotide
cuaaagugcccaugaacgu

SEQ ID NO: 1214360 - RNA, 19 nt, Artificial Sequence
  Description of Artificial Sequence: Synthetic oligonucleotide
ggcuguagucaggagauac

SEQ ID NO: 1214361 - RNA, 19 nt, Artificial Sequence
  Description of Artificial Sequence: Synthetic oligonucleotide
guggacuaaagugcccaug

SEQ ID NO: 1214362 - RNA, 19 nt, Artificial Sequence
  Description of Artificial Sequence: Synthetic oligonucleotide
agguaacuguaaccugcgu

SEQ ID NO: 1214363 - RNA, 19 nt, Artificial Sequence
  Description of Artificial Sequence: Synthetic oligonucleotide
cagcuaggguccgaagggg

SEQ ID NO: 1214364 - RNA, 19 nt, Artificial Sequence
  Description of Artificial Sequence: Synthetic oligonucleotide
gauacacucucacuuccuu

SEQ ID NO: 1214365 - RNA, 19 nt, Artificial Sequence
  Description of Artificial Sequence: Synthetic oligonucleotide
ggaauggaguggacuaaag

SEQ ID NO: 1214366 - RNA, 19 nt, Artificial Sequence
  Description of Artificial Sequence: Synthetic oligonucleotide
agccguaaacccaguccac

SEQ ID NO: 1214367 - RNA, 19 nt, Artificial Sequence
  Description of Artificial Sequence: Synthetic oligonucleotide
ccauuaaauccuaaguaua

SEQ ID NO: 1214368 - RNA, 19 nt, Artificial Sequence
  Description of Artificial Sequence: Synthetic oligonucleotide
aggaauggaguggacuaaa

SEQ ID NO: 1214369 - RNA, 19 nt, Artificial Sequence
  Description of Artificial Sequence: Synthetic oligonucleotide
ccuccauugacaaaguagu

SEQ ID NO: 1214370 - RNA, 19 nt, Artificial Sequence
  Description of Artificial Sequence: Synthetic oligonucleotide
guccaauccuuggacagga

SEQ ID NO: 1214371 - RNA, 19 nt, Artificial Sequence
  Description of Artificial Sequence: Synthetic oligonucleotide
gcaucuguugcccgcaaga

SEQ ID NO: 1214372 - RNA, 19 nt, Artificial Sequence
  Description of Artificial Sequence: Synthetic oligonucleotide
cacaggcuauuuucagguc

SEQ ID NO: 1214373 - RNA, 19 nt, Artificial Sequence
  Description of Artificial Sequence: Synthetic oligonucleotide
aucuugacaccaccuuguu

SEQ ID NO: 1214374 - RNA, 19 nt, Artificial Sequence
  Description of Artificial Sequence: Synthetic oligonucleotide
cccaauaaugguaguccug

SEQ ID NO: 1214375 - RNA, 19 nt, Artificial Sequence
  Description of Artificial Sequence: Synthetic oligonucleotide
acucagaguuuuggauguc

SEQ ID NO: 1214376 - RNA, 19 nt, Artificial Sequence
  Description of Artificial Sequence: Synthetic oligonucleotide
uaucuggcacgguggguua

SEQ ID NO: 1214377 - RNA, 19 nt, Artificial Sequence
  Description of Artificial Sequence: Synthetic oligonucleotide
ccccagacuaacaccaaug

SEQ ID NO: 1214378 - RNA, 19 nt, Artificial Sequence
  Description of Artificial Sequence: Synthetic oligonucleotide
ggcugugaugcacacagua

SEQ ID NO: 1214379 - RNA, 19 nt, Artificial Sequence
  Description of Artificial Sequence: Synthetic oligonucleotide
uuccuuggggaguggcuua

SEQ ID NO: 1214380 - RNA, 19 nt, Artificial Sequence
  Description of Artificial Sequence: Synthetic oligonucleotide
cacgaggcugugaugcaca

SEQ ID NO: 1214381 - RNA, 19 nt, Artificial Sequence
  Description of Artificial Sequence: Synthetic oligonucleotide
gguccggcaggaucuagac

SEQ ID NO: 1214382 - RNA, 19 nt, Artificial Sequence
  Description of Artificial Sequence: Synthetic oligonucleotide
cuguuuagguauggugauc

SEQ ID NO: 1214383 - RNA, 19 nt, Artificial Sequence
  Description of Artificial Sequence: Synthetic oligonucleotide
guccggcaggaucuagacc

SEQ ID NO: 1214384 - RNA, 19 nt, Artificial Sequence
  Description of Artificial Sequence: Synthetic oligonucleotide
acagaucagguaacuguaa

SEQ ID NO: 1214385 - RNA, 19 nt, Artificial Sequence
  Description of Artificial Sequence: Synthetic oligonucleotide
acaguacggggcccuggcu

SEQ ID NO: 1214386 - RNA, 19 nt, Artificial Sequence
  Description of Artificial Sequence: Synthetic oligonucleotide
gaaagccuuguagcuggca

SEQ ID NO: 1214387 - RNA, 19 nt, Artificial Sequence
  Description of Artificial Sequence: Synthetic oligonucleotide
aaacuccacgaggcuguga

SEQ ID NO: 1214388 - RNA, 19 nt, Artificial Sequence
  Description of Artificial Sequence: Synthetic oligonucleotide
ggccaaugacuccucgccc

SEQ ID NO: 1214389 - RNA, 19 nt, Artificial Sequence
  Description of Artificial Sequence: Synthetic oligonucleotide
gagcacugauguacagaug

SEQ ID NO: 1214390 - RNA, 19 nt, Artificial Sequence
  Description of Artificial Sequence: Synthetic oligonucleotide
gcugucauugaccggcaga

SEQ ID NO: 1214391 - RNA, 19 nt, Artificial Sequence
  Description of Artificial Sequence: Synthetic oligonucleotide
cuguccccucaacagucac

SEQ ID NO: 1214392 - RNA, 19 nt, Artificial Sequence
  Description of Artificial Sequence: Synthetic oligonucleotide
uucccagacugacguugaa

SEQ ID NO: 1214393 - RNA, 19 nt, Artificial Sequence
  Description of Artificial Sequence: Synthetic oligonucleotide
guucuaccaguccaauccu

SEQ ID NO: 1214394 - RNA, 19 nt, Artificial Sequence
  Description of Artificial Sequence: Synthetic oligonucleotide
cguaaacccaguccacugc

SEQ ID NO: 1214395 - RNA, 19 nt, Artificial Sequence
  Description of Artificial Sequence: Synthetic oligonucleotide
uaacaccaaugauguggau

SEQ ID NO: 1214396 - RNA, 19 nt, Artificial Sequence
  Description of Artificial Sequence: Synthetic oligonucleotide
uggcacgguggguuagggu

SEQ ID NO: 1214397 - RNA, 19 nt, Artificial Sequence
  Description of Artificial Sequence: Synthetic oligonucleotide
guauggugaucgugacuga

SEQ ID NO: 1214398 - RNA, 19 nt, Artificial Sequence
  Description of Artificial Sequence: Synthetic oligonucleotide
accggcagaggggcaguac

SEQ ID NO: 1214399 - RNA, 19 nt, Artificial Sequence
  Description of Artificial Sequence: Synthetic oligonucleotide
cugaggaaguaauauuguu

SEQ ID NO: 1214400 - RNA, 19 nt, Artificial Sequence
  Description of Artificial Sequence: Synthetic oligonucleotide
cauccaggcuggucuugac

SEQ ID NO: 1214401 - RNA, 19 nt, Artificial Sequence
  Description of Artificial Sequence: Synthetic oligonucleotide
cuggcacgguggguuaggg

SEQ ID NO: 1214402 - RNA, 19 nt, Artificial Sequence
  Description of Artificial Sequence: Synthetic oligonucleotide
acagggaagcugaaaugua

SEQ ID NO: 1214403 - RNA, 19 nt, Artificial Sequence
  Description of Artificial Sequence: Synthetic oligonucleotide
cagggaagcugaaauguau

SEQ ID NO: 1214404 - RNA, 19 nt, Artificial Sequence
  Description of Artificial Sequence: Synthetic oligonucleotide
ugggacauccaggcugguc

SEQ ID NO: 1214405 - RNA, 19 nt, Artificial Sequence
  Description of Artificial Sequence: Synthetic oligonucleotide
ggauucagacacacccagc

SEQ ID NO: 1214406 - RNA, 19 nt, Artificial Sequence
  Description of Artificial Sequence: Synthetic oligonucleotide
agcuaggguccgaaggggu

SEQ ID NO: 1214407 - RNA, 19 nt, Artificial Sequence
  Description of Artificial Sequence: Synthetic oligonucleotide
gcaauccagacaaucucca

SEQ ID NO: 1214408 - RNA, 19 nt, Artificial Sequence
  Description of Artificial Sequence: Synthetic oligonucleotide
gucccaacuggccuuugua

SEQ ID NO: 1214409 - RNA, 19 nt, Artificial Sequence
  Description of Artificial Sequence: Synthetic oligonucleotide
cuuaaggauaugagacaau

SEQ ID NO: 1214410 - RNA, 19 nt, Artificial Sequence
  Description of Artificial Sequence: Synthetic oligonucleotide
gugauccgucccaacuggc

SEQ ID NO: 1214411 - RNA, 19 nt, Artificial Sequence
  Description of Artificial Sequence: Synthetic oligonucleotide
ggcaucuguugcccgcaag

SEQ ID NO: 1214412 - RNA, 19 nt, Artificial Sequence
  Description of Artificial Sequence: Synthetic oligonucleotide
uagguuuaucuggcacggu

SEQ ID NO: 1214413 - RNA, 19 nt, Artificial Sequence
  Description of Artificial Sequence: Synthetic oligonucleotide
auccgucccaacuggccuu

SEQ ID NO: 1214414 - RNA, 19 nt, Artificial Sequence
  Description of Artificial Sequence: Synthetic oligonucleotide
gagcucuaauaaacuuguc

SEQ ID NO: 1214415 - RNA, 19 nt, Artificial Sequence
  Description of Artificial Sequence: Synthetic oligonucleotide
cccagacuaacaccaauga

SEQ ID NO: 1214416 - RNA, 19 nt, Artificial Sequence
  Description of Artificial Sequence: Synthetic oligonucleotide
cagucacuacuugugggga

SEQ ID NO: 1214417 - RNA, 19 nt, Artificial Sequence
  Description of Artificial Sequence: Synthetic oligonucleotide
cuccugcguaggcuugggc

SEQ ID NO: 1214418 - RNA, 19 nt, Artificial Sequence
  Description of Artificial Sequence: Synthetic oligonucleotide
ggaagcugaaauguaucua

SEQ ID NO: 1214419 - RNA, 19 nt, Artificial Sequence
  Description of Artificial Sequence: Synthetic oligonucleotide
aucuggcacgguggguuag

SEQ ID NO: 1214420 - RNA, 19 nt, Artificial Sequence
  Description of Artificial Sequence: Synthetic oligonucleotide
gaucgugacugaggaagua

SEQ ID NO: 1214421 - RNA, 19 nt, Artificial Sequence
  Description of Artificial Sequence: Synthetic oligonucleotide
ggaguggcuuaaucuugac

SEQ ID NO: 1214422 - RNA, 19 nt, Artificial Sequence
  Description of Artificial Sequence: Synthetic oligonucleotide
guugccuguagagccguaa

SEQ ID NO: 1214423 - RNA, 19 nt, Artificial Sequence
  Description of Artificial Sequence: Synthetic oligonucleotide
gaccuuccccuuaguagga

SEQ ID NO: 1214424 - RNA, 19 nt, Artificial Sequence
  Description of Artificial Sequence: Synthetic oligonucleotide
guuuagguauggugaucgu

SEQ ID NO: 1214425 - RNA, 19 nt, Artificial Sequence
  Description of Artificial Sequence: Synthetic oligonucleotide
caggaucuagaccugugau

SEQ ID NO: 1214426 - RNA, 19 nt, Artificial Sequence
  Description of Artificial Sequence: Synthetic oligonucleotide
ggaguggacuaaagugccc

SEQ ID NO: 1214427 - RNA, 19 nt, Artificial Sequence
  Description of Artificial Sequence: Synthetic oligonucleotide
ggcuuaaucuugacaccac

SEQ ID NO: 1214428 - RNA, 19 nt, Artificial Sequence
  Description of Artificial Sequence: Synthetic oligonucleotide
uacggggcccuggcuguag

SEQ ID NO: 1214429 - RNA, 19 nt, Artificial Sequence
  Description of Artificial Sequence: Synthetic oligonucleotide
uggcaucuguugcccgcaa

SEQ ID NO: 1214430 - RNA, 19 nt, Artificial Sequence
  Description of Artificial Sequence: Synthetic oligonucleotide
ccagagcacugauguacag

SEQ ID NO: 1214431 - RNA, 19 nt, Artificial Sequence
  Description of Artificial Sequence: Synthetic oligonucleotide
cuuuggcugggugguagga

SEQ ID NO: 1214432 - RNA, 19 nt, Artificial Sequence
  Description of Artificial Sequence: Synthetic oligonucleotide
cuaggguccgaagggguaa

SEQ ID NO: 1214433 - RNA, 19 nt, Artificial Sequence
  Description of Artificial Sequence: Synthetic oligonucleotide
gcuguuuagguauggugau

SEQ ID NO: 1214434 - RNA, 19 nt, Artificial Sequence
  Description of Artificial Sequence: Synthetic oligonucleotide
gcuguagucaggagauaca

SEQ ID NO: 1214435 - RNA, 19 nt, Artificial Sequence
  Description of Artificial Sequence: Synthetic oligonucleotide
uaguucccagacugacguu

SEQ ID NO: 1214436 - RNA, 19 nt, Artificial Sequence
  Description of Artificial Sequence: Synthetic oligonucleotide
aggguccgaagggguaaag

SEQ ID NO: 1214437 - RNA, 19 nt, Artificial Sequence
  Description of Artificial Sequence: Synthetic oligonucleotide
ggaauggguuaaagcaauc

SEQ ID NO: 1214438 - RNA, 19 nt, Artificial Sequence
  Description of Artificial Sequence: Synthetic oligonucleotide
uaggguccgaagggguaaa

SEQ ID NO: 1214439 - RNA, 19 nt, Artificial Sequence
  Description of Artificial Sequence: Synthetic oligonucleotide
ggcaggaucuagaccugug

SEQ ID NO: 1214440 - RNA, 19 nt, Artificial Sequence
  Description of Artificial Sequence: Synthetic oligonucleotide
gggaguggcuuaaucuuga

SEQ ID NO: 1214441 - RNA, 19 nt, Artificial Sequence
  Description of Artificial Sequence: Synthetic oligonucleotide
ggacuaaagugcccaugaa

SEQ ID NO: 1214442 - RNA, 19 nt, Artificial Sequence
  Description of Artificial Sequence: Synthetic oligonucleotide
caaugacuccucgcccuuc

SEQ ID NO: 1214443 - RNA, 19 nt, Artificial Sequence
  Description of Artificial Sequence: Synthetic oligonucleotide
aggccaucagugggcaggu

SEQ ID NO: 1214444 - RNA, 19 nt, Artificial Sequence
  Description of Artificial Sequence: Synthetic oligonucleotide
gucccaccaugccuccaac

SEQ ID NO: 1214445 - RNA, 19 nt, Artificial Sequence
  Description of Artificial Sequence: Synthetic oligonucleotide
gguggguuaggguggccaa

SEQ ID NO: 1214446 - RNA, 19 nt, Artificial Sequence
  Description of Artificial Sequence: Synthetic oligonucleotide
gccaucagugggcaggugu

SEQ ID NO: 1214447 - RNA, 19 nt, Artificial Sequence
  Description of Artificial Sequence: Synthetic oligonucleotide
cucgcccuucaaguugcug

SEQ ID NO: 1214448 - RNA, 19 nt, Artificial Sequence
  Description of Artificial Sequence: Synthetic oligonucleotide
cccuuaguaggaauggagu

SEQ ID NO: 1214449 - RNA, 19 nt, Artificial Sequence
  Description of Artificial Sequence: Synthetic oligonucleotide
ccaaaaguuugcugaggaa

SEQ ID NO: 1214450 - RNA, 19 nt, Artificial Sequence
  Description of Artificial Sequence: Synthetic oligonucleotide
cagugucuguguggauggc

SEQ ID NO: 1214451 - RNA, 19 nt, Artificial Sequence
  Description of Artificial Sequence: Synthetic oligonucleotide
ugaccggcagaggggcagu

SEQ ID NO: 1214452 - RNA, 19 nt, Artificial Sequence
  Description of Artificial Sequence: Synthetic oligonucleotide
caguacagaaagucccaau

SEQ ID NO: 1214453 - RNA, 19 nt, Artificial Sequence
  Description of Artificial Sequence: Synthetic oligonucleotide
cagacucacuggcucaggu

SEQ ID NO: 1214454 - RNA, 19 nt, Artificial Sequence
  Description of Artificial Sequence: Synthetic oligonucleotide
ugcguaggcuugggcuaug

SEQ ID NO: 1214455 - RNA, 19 nt, Artificial Sequence
  Description of Artificial Sequence: Synthetic oligonucleotide
auugaccggcagaggggca

SEQ ID NO: 1214456 - RNA, 19 nt, Artificial Sequence
  Description of Artificial Sequence: Synthetic oligonucleotide
accaugccuccaacaugag

SEQ ID NO: 1214457 - RNA, 19 nt, Artificial Sequence
  Description of Artificial Sequence: Synthetic oligonucleotide
ggguuaggguggccaauga

SEQ ID NO: 1214458 - RNA, 19 nt, Artificial Sequence
  Description of Artificial Sequence: Synthetic oligonucleotide
ggaauccggauacccaaau

SEQ ID NO: 1214459 - RNA, 19 nt, Artificial Sequence
  Description of Artificial Sequence: Synthetic oligonucleotide
cugguccggcaggaucuag

SEQ ID NO: 1214460 - RNA, 19 nt, Artificial Sequence
  Description of Artificial Sequence: Synthetic oligonucleotide
gaccugugauccgucccaa

SEQ ID NO: 1214461 - RNA, 19 nt, Artificial Sequence
  Description of Artificial Sequence: Synthetic oligonucleotide
acggggcccuggcuguagu

SEQ ID NO: 1214462 - RNA, 19 nt, Artificial Sequence
  Description of Artificial Sequence: Synthetic oligonucleotide
gacguugaacucagaguuu

SEQ ID NO: 1214463 - RNA, 19 nt, Artificial Sequence
  Description of Artificial Sequence: Synthetic oligonucleotide
guugcccgcaagagagcuc

SEQ ID NO: 1214464 - RNA, 19 nt, Artificial Sequence
  Description of Artificial Sequence: Synthetic oligonucleotide
cuugggcuaugcacaggcu

SEQ ID NO: 1214465 - RNA, 19 nt, Artificial Sequence
  Description of Artificial Sequence: Synthetic oligonucleotide
ggguccgaagggguaaaga

SEQ ID NO: 1214466 - RNA, 19 nt, Artificial Sequence
  Description of Artificial Sequence: Synthetic oligonucleotide
ccugugauccgucccaacu

SEQ ID NO: 1214467 - RNA, 19 nt, Artificial Sequence
  Description of Artificial Sequence: Synthetic oligonucleotide
ccaaacccggcuaggaacu

SEQ ID NO: 1214468 - RNA, 19 nt, Artificial Sequence
  Description of Artificial Sequence: Synthetic oligonucleotide
ccgcaagagagcucuaaua

SEQ ID NO: 1214469 - RNA, 19 nt, Artificial Sequence
  Description of Artificial Sequence: Synthetic oligonucleotide
uggcuguagucaggagaua

SEQ ID NO: 1214470 - RNA, 19 nt, Artificial Sequence
  Description of Artificial Sequence: Synthetic oligonucleotide
ccacagcuaggguccgaag

SEQ ID NO: 1214471 - RNA, 19 nt, Artificial Sequence
  Description of Artificial Sequence: Synthetic oligonucleotide
ccuaaagcccugaauccau

SEQ ID NO: 1214472 - RNA, 19 nt, Artificial Sequence
  Description of Artificial Sequence: Synthetic oligonucleotide
gcuaugcacaggcuauuuu

SEQ ID NO: 1214473 - RNA, 19 nt, Artificial Sequence
  Description of Artificial Sequence: Synthetic oligonucleotide
ggauacccaaauagucagu

SEQ ID NO: 1214474 - RNA, 19 nt, Artificial Sequence
  Description of Artificial Sequence: Synthetic oligonucleotide
ugcccgcaagagagcucua

SEQ ID NO: 1214475 - RNA, 19 nt, Artificial Sequence
  Description of Artificial Sequence: Synthetic oligonucleotide
cgugacugaggaaguaaua

SEQ ID NO: 1214476 - RNA, 19 nt, Artificial Sequence
  Description of Artificial Sequence: Synthetic oligonucleotide
ggugaccucgaugcuggua

SEQ ID NO: 1214477 - RNA, 19 nt, Artificial Sequence
  Description of Artificial Sequence: Synthetic oligonucleotide
gcuaggguccgaaggggua

SEQ ID NO: 1214478 - RNA, 19 nt, Artificial Sequence
  Description of Artificial Sequence: Synthetic oligonucleotide
cccggcuaggaacuuggaa

SEQ ID NO: 1214479 - RNA, 19 nt, Artificial Sequence
  Description of Artificial Sequence: Synthetic oligonucleotide
gcacagcccucaugugauc

SEQ ID NO: 1214480 - RNA, 19 nt, Artificial Sequence
  Description of Artificial Sequence: Synthetic oligonucleotide
acccggcuaggaacuugga

SEQ ID NO: 1214481 - RNA, 19 nt, Artificial Sequence
  Description of Artificial Sequence: Synthetic oligonucleotide
guagagccguaaacccagu

SEQ ID NO: 1214482 - RNA, 19 nt, Artificial Sequence
  Description of Artificial Sequence: Synthetic oligonucleotide
aguugccuguagagccgua

SEQ ID NO: 1214483 - RNA, 19 nt, Artificial Sequence
  Description of Artificial Sequence: Synthetic oligonucleotide
guggguuaggguggccaau

SEQ ID NO: 1214484 - RNA, 19 nt, Artificial Sequence
  Description of Artificial Sequence: Synthetic oligonucleotide
cccugaauccaugaauaau

SEQ ID NO: 1214485 - RNA, 19 nt, Artificial Sequence
  Description of Artificial Sequence: Synthetic oligonucleotide
cguaggcuugggcuaugca

SEQ ID NO: 1214486 - RNA, 19 nt, Artificial Sequence
  Description of Artificial Sequence: Synthetic oligonucleotide
gcccgcaagagagcucuaa

SEQ ID NO: 1214487 - RNA, 19 nt, Artificial Sequence
  Description of Artificial Sequence: Synthetic oligonucleotide
ggcuaugcacaggcuauuu

SEQ ID NO: 1214488 - RNA, 19 nt, Artificial Sequence
  Description of Artificial Sequence: Synthetic oligonucleotide
gcucagguaugcagacugu

SEQ ID NO: 1214489 - RNA, 19 nt, Artificial Sequence
  Description of Artificial Sequence: Synthetic oligonucleotide
ccuuccccuuaguaggaau

SEQ ID NO: 1214490 - RNA, 19 nt, Artificial Sequence
  Description of Artificial Sequence: Synthetic oligonucleotide
gggagaucuccaggcucaa

SEQ ID NO: 1214491 - RNA, 19 nt, Artificial Sequence
  Description of Artificial Sequence: Synthetic oligonucleotide
guacggggcccuggcugua

SEQ ID NO: 1214492 - RNA, 19 nt, Artificial Sequence
  Description of Artificial Sequence: Synthetic oligonucleotide
caaacccggcuaggaacuu

SEQ ID NO: 1214493 - RNA, 19 nt, Artificial Sequence
  Description of Artificial Sequence: Synthetic oligonucleotide
ccaaugacuccucgcccuu

SEQ ID NO: 1214494 - RNA, 19 nt, Artificial Sequence
  Description of Artificial Sequence: Synthetic oligonucleotide
gugggacauccaggcuggu

SEQ ID NO: 1214495 - RNA, 19 nt, Artificial Sequence
  Description of Artificial Sequence: Synthetic oligonucleotide
cggcaggaucuagaccugu

SEQ ID NO: 1214496 - RNA, 19 nt, Artificial Sequence
  Description of Artificial Sequence: Synthetic oligonucleotide
aacacaacgagccucauca

SEQ ID NO: 1214497 - RNA, 19 nt, Artificial Sequence
  Description of Artificial Sequence: Synthetic oligonucleotide
uagaaugugaccaugcgca

SEQ ID NO: 1214498 - RNA, 19 nt, Artificial Sequence
  Description of Artificial Sequence: Synthetic oligonucleotide
aguacuuguuuucugguac

SEQ ID NO: 1214499 - RNA, 19 nt, Artificial Sequence
  Description of Artificial Sequence: Synthetic oligonucleotide
aguaguacaggcugucucc

SEQ ID NO: 1214500 - RNA, 19 nt, Artificial Sequence
  Description of Artificial Sequence: Synthetic oligonucleotide
auaacccagcaucacaagc

SEQ ID NO: 1214501 - RNA, 19 nt, Artificial Sequence
  Description of Artificial Sequence: Synthetic oligonucleotide
acuugauaaugacucgucc

SEQ ID NO: 1214502 - RNA, 19 nt, Artificial Sequence
  Description of Artificial Sequence: Synthetic oligonucleotide
ucaucaagaagccucaguc

SEQ ID NO: 1214503 - RNA, 19 nt, Artificial Sequence
  Description of Artificial Sequence: Synthetic oligonucleotide
uuuguaagggaaaauccac

SEQ ID NO: 1214504 - RNA, 19 nt, Artificial Sequence
  Description of Artificial Sequence: Synthetic oligonucleotide
gauaaugacucguccagcc

SEQ ID NO: 1214505 - RNA, 19 nt, Artificial Sequence
  Description of Artificial Sequence: Synthetic oligonucleotide
ugaccaugcgcacaugugg

SEQ ID NO: 1214506 - RNA, 19 nt, Artificial Sequence
  Description of Artificial Sequence: Synthetic oligonucleotide
aaugggccgauccacaugu

SEQ ID NO: 1214507 - RNA, 19 nt, Artificial Sequence
  Description of Artificial Sequence: Synthetic oligonucleotide
cugacacugcauuagaggc

SEQ ID NO: 1214508 - RNA, 19 nt, Artificial Sequence
  Description of Artificial Sequence: Synthetic oligonucleotide
uucugguacaauaucccag

SEQ ID NO: 1214509 - RNA, 19 nt, Artificial Sequence
  Description of Artificial Sequence: Synthetic oligonucleotide
ucugguacaauaucccagc

SEQ ID NO: 1214510 - RNA, 19 nt, Artificial Sequence
  Description of Artificial Sequence: Synthetic oligonucleotide
ucauugauacuucucugca

SEQ ID NO: 1214511 - RNA, 19 nt, Artificial Sequence
  Description of Artificial Sequence: Synthetic oligonucleotide
caccucucgaaucagagcc

SEQ ID NO: 1214512 - RNA, 19 nt, Artificial Sequence
  Description of Artificial Sequence: Synthetic oligonucleotide
uugaaaagggucagggucu

SEQ ID NO: 1214513 - RNA, 19 nt, Artificial Sequence
  Description of Artificial Sequence: Synthetic oligonucleotide
gagauuugcguuucacccg

SEQ ID NO: 1214514 - RNA, 19 nt, Artificial Sequence
  Description of Artificial Sequence: Synthetic oligonucleotide
uugucguagaaugugacca

SEQ ID NO: 1214515 - RNA, 19 nt, Artificial Sequence
  Description of Artificial Sequence: Synthetic oligonucleotide
agucgagaagccaagauag

SEQ ID NO: 1214516 - RNA, 19 nt, Artificial Sequence
  Description of Artificial Sequence: Synthetic oligonucleotide
uugcguuucacccgaaggc

SEQ ID NO: 1214517 - RNA, 19 nt, Artificial Sequence
  Description of Artificial Sequence: Synthetic oligonucleotide
uaacccagcaucacaagcu

SEQ ID NO: 1214518 - RNA, 19 nt, Artificial Sequence
  Description of Artificial Sequence: Synthetic oligonucleotide
agugaugccgcucgucagc

SEQ ID NO: 1214519 - RNA, 19 nt, Artificial Sequence
  Description of Artificial Sequence: Synthetic oligonucleotide
ggaguuucugguuaggaag

SEQ ID NO: 1214520 - RNA, 19 nt, Artificial Sequence
  Description of Artificial Sequence: Synthetic oligonucleotide
ucccgaauagagugcaugg

SEQ ID NO: 1214521 - RNA, 19 nt, Artificial Sequence
  Description of Artificial Sequence: Synthetic oligonucleotide
gacugagugaugccgcucg

SEQ ID NO: 1214522 - RNA, 19 nt, Artificial Sequence
  Description of Artificial Sequence: Synthetic oligonucleotide
auugauaggcccugguuca

SEQ ID NO: 1214523 - RNA, 19 nt, Artificial Sequence
  Description of Artificial Sequence: Synthetic oligonucleotide
uuguaagggaaaauccacu

SEQ ID NO: 1214524 - RNA, 19 nt, Artificial Sequence
  Description of Artificial Sequence: Synthetic oligonucleotide
cacaacguggaaaggagag

SEQ ID NO: 1214525 - RNA, 19 nt, Artificial Sequence
  Description of Artificial Sequence: Synthetic oligonucleotide
guagaaugugaccaugcgc

SEQ ID NO: 1214526 - RNA, 19 nt, Artificial Sequence
  Description of Artificial Sequence: Synthetic oligonucleotide
ugagugaugccgcucguca

SEQ ID NO: 1214527 - RNA, 19 nt, Artificial Sequence
  Description of Artificial Sequence: Synthetic oligonucleotide
caagaauaggcacuaggug

SEQ ID NO: 1214528 - RNA, 19 nt, Artificial Sequence
  Description of Artificial Sequence: Synthetic oligonucleotide
uguccacauaguuugggug

SEQ ID NO: 1214529 - RNA, 19 nt, Artificial Sequence
  Description of Artificial Sequence: Synthetic oligonucleotide
cuaccuaaguccagcaccc

SEQ ID NO: 1214530 - RNA, 19 nt, Artificial Sequence
  Description of Artificial Sequence: Synthetic oligonucleotide
uuugcuguucaccuugauc

SEQ ID NO: 1214531 - RNA, 19 nt, Artificial Sequence
  Description of Artificial Sequence: Synthetic oligonucleotide
cugucucccgaauagagug

SEQ ID NO: 1214532 - RNA, 19 nt, Artificial Sequence
  Description of Artificial Sequence: Synthetic oligonucleotide
aucaugaaggacuugggua

SEQ ID NO: 1214533 - RNA, 19 nt, Artificial Sequence
  Description of Artificial Sequence: Synthetic oligonucleotide
caacguggaaaggagaggg

SEQ ID NO: 1214534 - RNA, 19 nt, Artificial Sequence
  Description of Artificial Sequence: Synthetic oligonucleotide
ucggugguuuucuucaugc

SEQ ID NO: 1214535 - RNA, 19 nt, Artificial Sequence
  Description of Artificial Sequence: Synthetic oligonucleotide
ucuguguugggcccaaagu

SEQ ID NO: 1214536 - RNA, 19 nt, Artificial Sequence
  Description of Artificial Sequence: Synthetic oligonucleotide
uucacgaacuugaggagcu

SEQ ID NO: 1214537 - RNA, 19 nt, Artificial Sequence
  Description of Artificial Sequence: Synthetic oligonucleotide
caucaagaagccucagucc

SEQ ID NO: 1214538 - RNA, 19 nt, Artificial Sequence
  Description of Artificial Sequence: Synthetic oligonucleotide
ugcaucucuguguugggcc

SEQ ID NO: 1214539 - RNA, 19 nt, Artificial Sequence
  Description of Artificial Sequence: Synthetic oligonucleotide
ucgagauuugcguuucacc

SEQ ID NO: 1214540 - RNA, 19 nt, Artificial Sequence
  Description of Artificial Sequence: Synthetic oligonucleotide
ucguagaaugugaccaugc

SEQ ID NO: 1214541 - RNA, 19 nt, Artificial Sequence
  Description of Artificial Sequence: Synthetic oligonucleotide
uguaagggaaaauccacuu

SEQ ID NO: 1214542 - RNA, 19 nt, Artificial Sequence
  Description of Artificial Sequence: Synthetic oligonucleotide
acccuuauggaacaagggu

SEQ ID NO: 1214543 - RNA, 19 nt, Artificial Sequence
  Description of Artificial Sequence: Synthetic oligonucleotide
cuugauaaugacucgucca

SEQ ID NO: 1214544 - RNA, 19 nt, Artificial Sequence
  Description of Artificial Sequence: Synthetic oligonucleotide
caugaggacugagugaugc

SEQ ID NO: 1214545 - RNA, 19 nt, Artificial Sequence
  Description of Artificial Sequence: Synthetic oligonucleotide
auaggucucuacaccaacc

SEQ ID NO: 1214546 - RNA, 19 nt, Artificial Sequence
  Description of Artificial Sequence: Synthetic oligonucleotide
acugcauuagaggcguagc

SEQ ID NO: 1214547 - RNA, 19 nt, Artificial Sequence
  Description of Artificial Sequence: Synthetic oligonucleotide
acuaggugcaucucugugu

SEQ ID NO: 1214548 - RNA, 19 nt, Artificial Sequence
  Description of Artificial Sequence: Synthetic oligonucleotide
auaggcacuaggugcaucu

SEQ ID NO: 1214549 - RNA, 19 nt, Artificial Sequence
  Description of Artificial Sequence: Synthetic oligonucleotide
guccacauaguuugggugc

SEQ ID NO: 1214550 - RNA, 19 nt, Artificial Sequence
  Description of Artificial Sequence: Synthetic oligonucleotide
ucugguuaggaaguacuug

SEQ ID NO: 1214551 - RNA, 19 nt, Artificial Sequence
  Description of Artificial Sequence: Synthetic oligonucleotide
gaaucaaucaaagccugca

SEQ ID NO: 1214552 - RNA, 19 nt, Artificial Sequence
  Description of Artificial Sequence: Synthetic oligonucleotide
ugcauuagaggcguagcgc

SEQ ID NO: 1214553 - RNA, 19 nt, Artificial Sequence
  Description of Artificial Sequence: Synthetic oligonucleotide
gcgacacucagccacaacg

SEQ ID NO: 1214554 - RNA, 19 nt, Artificial Sequence
  Description of Artificial Sequence: Synthetic oligonucleotide
aguuugggugcacagcaug

SEQ ID NO: 1214555 - RNA, 19 nt, Artificial Sequence
  Description of Artificial Sequence: Synthetic oligonucleotide
ucccggucaaaccacgagc

SEQ ID NO: 1214556 - RNA, 19 nt, Artificial Sequence
  Description of Artificial Sequence: Synthetic oligonucleotide
aacgagccucaucaagaag

SEQ ID NO: 1214557 - RNA, 19 nt, Artificial Sequence
  Description of Artificial Sequence: Synthetic oligonucleotide
ccuuauggaacaagggucg

SEQ ID NO: 1214558 - RNA, 19 nt, Artificial Sequence
  Description of Artificial Sequence: Synthetic oligonucleotide
cacaggaaucaaucaaagc

SEQ ID NO: 1214559 - RNA, 19 nt, Artificial Sequence
  Description of Artificial Sequence: Synthetic oligonucleotide
agauuugcguuucacccga

SEQ ID NO: 1214560 - RNA, 19 nt, Artificial Sequence
  Description of Artificial Sequence: Synthetic oligonucleotide
ggcaagaauaggcacuagg

SEQ ID NO: 1214561 - RNA, 19 nt, Artificial Sequence
  Description of Artificial Sequence: Synthetic oligonucleotide
gguugcggcuuacagaggg

SEQ ID NO: 1214562 - RNA, 19 nt, Artificial Sequence
  Description of Artificial Sequence: Synthetic oligonucleotide
acaccaaccuggugguagc

SEQ ID NO: 1214563 - RNA, 19 nt, Artificial Sequence
  Description of Artificial Sequence: Synthetic oligonucleotide
agaggcguagcgcuguuug

SEQ ID NO: 1214564 - RNA, 19 nt, Artificial Sequence
  Description of Artificial Sequence: Synthetic oligonucleotide
cugcauuagaggcguagcg

SEQ ID NO: 1214565 - RNA, 19 nt, Artificial Sequence
  Description of Artificial Sequence: Synthetic oligonucleotide
agccucaucaagaagccuc

SEQ ID NO: 1214566 - RNA, 19 nt, Artificial Sequence
  Description of Artificial Sequence: Synthetic oligonucleotide
gaucccaccaccauagguc

SEQ ID NO: 1214567 - RNA, 19 nt, Artificial Sequence
  Description of Artificial Sequence: Synthetic oligonucleotide
gcuaccuaaguccagcacc

SEQ ID NO: 1214568 - RNA, 19 nt, Artificial Sequence
  Description of Artificial Sequence: Synthetic oligonucleotide
ugggaugcgcagaaugggc

SEQ ID NO: 1214569 - RNA, 19 nt, Artificial Sequence
  Description of Artificial Sequence: Synthetic oligonucleotide
gacucguccagccaagguc

SEQ ID NO: 1214570 - RNA, 19 nt, Artificial Sequence
  Description of Artificial Sequence: Synthetic oligonucleotide
gaacuccaguaguacaggc

SEQ ID NO: 1214571 - RNA, 19 nt, Artificial Sequence
  Description of Artificial Sequence: Synthetic oligonucleotide
ucgagaagccaagauaggu

SEQ ID NO: 1214572 - RNA, 19 nt, Artificial Sequence
  Description of Artificial Sequence: Synthetic oligonucleotide
gagguagggcacuugauaa

SEQ ID NO: 1214573 - RNA, 19 nt, Artificial Sequence
  Description of Artificial Sequence: Synthetic oligonucleotide
gacccuuauggaacaaggg

SEQ ID NO: 1214574 - RNA, 19 nt, Artificial Sequence
  Description of Artificial Sequence: Synthetic oligonucleotide
cugagauucgccguaguac

SEQ ID NO: 1214575 - RNA, 19 nt, Artificial Sequence
  Description of Artificial Sequence: Synthetic oligonucleotide
aauaggcacuaggugcauc

SEQ ID NO: 1214576 - RNA, 19 nt, Artificial Sequence
  Description of Artificial Sequence: Synthetic oligonucleotide
gggacaugaggacugagug

SEQ ID NO: 1214577 - RNA, 19 nt, Artificial Sequence
  Description of Artificial Sequence: Synthetic oligonucleotide
uuguccacauaguuugggu

SEQ ID NO: 1214578 - RNA, 19 nt, Artificial Sequence
  Description of Artificial Sequence: Synthetic oligonucleotide
ugauaaugacucguccagc

SEQ ID NO: 1214579 - RNA, 19 nt, Artificial Sequence
  Description of Artificial Sequence: Synthetic oligonucleotide
guuugggugcacagcaugg

SEQ ID NO: 1214580 - RNA, 19 nt, Artificial Sequence
  Description of Artificial Sequence: Synthetic oligonucleotide
cacaacgagccucaucaag

SEQ ID NO: 1214581 - RNA, 19 nt, Artificial Sequence
  Description of Artificial Sequence: Synthetic oligonucleotide
cgagauuugcguuucaccc

SEQ ID NO: 1214582 - RNA, 19 nt, Artificial Sequence
  Description of Artificial Sequence: Synthetic oligonucleotide
agaauaggcacuaggugca

SEQ ID NO: 1214583 - RNA, 19 nt, Artificial Sequence
  Description of Artificial Sequence: Synthetic oligonucleotide
agauuguccaggcgaggag

SEQ ID NO: 1214584 - RNA, 19 nt, Artificial Sequence
  Description of Artificial Sequence: Synthetic oligonucleotide
acacucagccacaacgugg

SEQ ID NO: 1214585 - RNA, 19 nt, Artificial Sequence
  Description of Artificial Sequence: Synthetic oligonucleotide
auuugcguuucacccgaag

SEQ ID NO: 1214586 - RNA, 19 nt, Artificial Sequence
  Description of Artificial Sequence: Synthetic oligonucleotide
caccucuucauugucguag

SEQ ID NO: 1214587 - RNA, 19 nt, Artificial Sequence
  Description of Artificial Sequence: Synthetic oligonucleotide
ugucucccgaauagagugc

SEQ ID NO: 1214588 - RNA, 19 nt, Artificial Sequence
  Description of Artificial Sequence: Synthetic oligonucleotide
acaacgagccucaucaaga

SEQ ID NO: 1214589 - RNA, 19 nt, Artificial Sequence
  Description of Artificial Sequence: Synthetic oligonucleotide
ucucgaaucagagccucug

SEQ ID NO: 1214590 - RNA, 19 nt, Artificial Sequence
  Description of Artificial Sequence: Synthetic oligonucleotide
acaacguggaaaggagagg

SEQ ID NO: 1214591 - RNA, 19 nt, Artificial Sequence
  Description of Artificial Sequence: Synthetic oligonucleotide
aacucuucauaggcuccac

SEQ ID NO: 1214592 - RNA, 19 nt, Artificial Sequence
  Description of Artificial Sequence: Synthetic oligonucleotide
gaguucacggaagccagcc

SEQ ID NO: 1214593 - RNA, 19 nt, Artificial Sequence
  Description of Artificial Sequence: Synthetic oligonucleotide
aggaguuucugguuaggaa

SEQ ID NO: 1214594 - RNA, 19 nt, Artificial Sequence
  Description of Artificial Sequence: Synthetic oligonucleotide
ucgccguaguaccagcucu

SEQ ID NO: 1214595 - RNA, 19 nt, Artificial Sequence
  Description of Artificial Sequence: Synthetic oligonucleotide
guacagagcagggacauga

SEQ ID NO: 1214596 - RNA, 19 nt, Artificial Sequence
  Description of Artificial Sequence: Synthetic oligonucleotide
agggucggugguuuucuuc

SEQ ID NO: 1214597 - RNA, 19 nt, Artificial Sequence
  Description of Artificial Sequence: Synthetic oligonucleotide
ugaucacaggacccuuaug

SEQ ID NO: 1214598 - RNA, 19 nt, Artificial Sequence
  Description of Artificial Sequence: Synthetic oligonucleotide
gagugcauggccagcuggg

SEQ ID NO: 1214599 - RNA, 19 nt, Artificial Sequence
  Description of Artificial Sequence: Synthetic oligonucleotide
caaucaaagccugcagggc

SEQ ID NO: 1214600 - RNA, 19 nt, Artificial Sequence
  Description of Artificial Sequence: Synthetic oligonucleotide
agcgcuguuugcuguucac

SEQ ID NO: 1214601 - RNA, 19 nt, Artificial Sequence
  Description of Artificial Sequence: Synthetic oligonucleotide
gauucgccguaguaccagc

SEQ ID NO: 1214602 - RNA, 19 nt, Artificial Sequence
  Description of Artificial Sequence: Synthetic oligonucleotide
uccgguucacgaacuugag

SEQ ID NO: 1214603 - RNA, 19 nt, Artificial Sequence
  Description of Artificial Sequence: Synthetic oligonucleotide
cuuauggaacaagggucgg

SEQ ID NO: 1214604 - RNA, 19 nt, Artificial Sequence
  Description of Artificial Sequence: Synthetic oligonucleotide
auagagugcauggccagcu

SEQ ID NO: 1214605 - RNA, 19 nt, Artificial Sequence
  Description of Artificial Sequence: Synthetic oligonucleotide
ggcacuugauaaugacucg

SEQ ID NO: 1214606 - RNA, 19 nt, Artificial Sequence
  Description of Artificial Sequence: Synthetic oligonucleotide
ggacccuuauggaacaagg

SEQ ID NO: 1214607 - RNA, 19 nt, Artificial Sequence
  Description of Artificial Sequence: Synthetic oligonucleotide
gcaucacaagcugaaaucc

SEQ ID NO: 1214608 - RNA, 19 nt, Artificial Sequence
  Description of Artificial Sequence: Synthetic oligonucleotide
cugguacaauaucccagcc

SEQ ID NO: 1214609 - RNA, 19 nt, Artificial Sequence
  Description of Artificial Sequence: Synthetic oligonucleotide
accaaccuggugguagccc

SEQ ID NO: 1214610 - RNA, 19 nt, Artificial Sequence
  Description of Artificial Sequence: Synthetic oligonucleotide
ucuuuccgggcccugccgu

SEQ ID NO: 1214611 - RNA, 19 nt, Artificial Sequence
  Description of Artificial Sequence: Synthetic oligonucleotide
ccgaauagagugcauggcc

SEQ ID NO: 1214612 - RNA, 19 nt, Artificial Sequence
  Description of Artificial Sequence: Synthetic oligonucleotide
uucgucgagauuugcguuu

SEQ ID NO: 1214613 - RNA, 19 nt, Artificial Sequence
  Description of Artificial Sequence: Synthetic oligonucleotide
cccuuauggaacaaggguc

SEQ ID NO: 1214614 - RNA, 19 nt, Artificial Sequence
  Description of Artificial Sequence: Synthetic oligonucleotide
gaggacugagugaugccgc

SEQ ID NO: 1214615 - RNA, 19 nt, Artificial Sequence
  Description of Artificial Sequence: Synthetic oligonucleotide
ugucguagaaugugaccau

SEQ ID NO: 1214616 - RNA, 19 nt, Artificial Sequence
  Description of Artificial Sequence: Synthetic oligonucleotide
uuauggaacaagggucggu

SEQ ID NO: 1214617 - RNA, 19 nt, Artificial Sequence
  Description of Artificial Sequence: Synthetic oligonucleotide
agauucgccguaguaccag

SEQ ID NO: 1214618 - RNA, 19 nt, Artificial Sequence
  Description of Artificial Sequence: Synthetic oligonucleotide
auuagaggcguagcgcugu

SEQ ID NO: 1214619 - RNA, 19 nt, Artificial Sequence
  Description of Artificial Sequence: Synthetic oligonucleotide
guuucacccgaaggcaggg

SEQ ID NO: 1214620 - RNA, 19 nt, Artificial Sequence
  Description of Artificial Sequence: Synthetic oligonucleotide
ucacccgaaggcagggacu

SEQ ID NO: 1214621 - RNA, 19 nt, Artificial Sequence
  Description of Artificial Sequence: Synthetic oligonucleotide
agccacaacguggaaagga

SEQ ID NO: 1214622 - RNA, 19 nt, Artificial Sequence
  Description of Artificial Sequence: Synthetic oligonucleotide
agcauugauaggcccuggu

SEQ ID NO: 1214623 - RNA, 19 nt, Artificial Sequence
  Description of Artificial Sequence: Synthetic oligonucleotide
acaagggucggugguuuuc

SEQ ID NO: 1214624 - RNA, 19 nt, Artificial Sequence
  Description of Artificial Sequence: Synthetic oligonucleotide
gguagggcacuugauaaug

SEQ ID NO: 1214625 - RNA, 19 nt, Artificial Sequence
  Description of Artificial Sequence: Synthetic oligonucleotide
cuccgguucacgaacuuga

SEQ ID NO: 1214626 - RNA, 19 nt, Artificial Sequence
  Description of Artificial Sequence: Synthetic oligonucleotide
uucgccguaguaccagcuc

SEQ ID NO: 1214627 - RNA, 19 nt, Artificial Sequence
  Description of Artificial Sequence: Synthetic oligonucleotide
ugcaggggcaccccaacuu

SEQ ID NO: 1214628 - RNA, 19 nt, Artificial Sequence
  Description of Artificial Sequence: Synthetic oligonucleotide
aggcacuaggugcaucucu

SEQ ID NO: 1214629 - RNA, 19 nt, Artificial Sequence
  Description of Artificial Sequence: Synthetic oligonucleotide
ccgauccacauguacaagc

SEQ ID NO: 1214630 - RNA, 19 nt, Artificial Sequence
  Description of Artificial Sequence: Synthetic oligonucleotide
ggcaccccaacuuggcugg

SEQ ID NO: 1214631 - RNA, 19 nt, Artificial Sequence
  Description of Artificial Sequence: Synthetic oligonucleotide
ugccguucauggccaacug

SEQ ID NO: 1214632 - RNA, 19 nt, Artificial Sequence
  Description of Artificial Sequence: Synthetic oligonucleotide
agggacuguccgugugggc

SEQ ID NO: 1214633 - RNA, 19 nt, Artificial Sequence
  Description of Artificial Sequence: Synthetic oligonucleotide
uugcggcuuacagagggga

SEQ ID NO: 1214634 - RNA, 19 nt, Artificial Sequence
  Description of Artificial Sequence: Synthetic oligonucleotide
gucgagaagccaagauagg

SEQ ID NO: 1214635 - RNA, 19 nt, Artificial Sequence
  Description of Artificial Sequence: Synthetic oligonucleotide
gagucauuccggaccauga

SEQ ID NO: 1214636 - RNA, 19 nt, Artificial Sequence
  Description of Artificial Sequence: Synthetic oligonucleotide
cacugcauuagaggcguag

SEQ ID NO: 1214637 - RNA, 19 nt, Artificial Sequence
  Description of Artificial Sequence: Synthetic oligonucleotide
cucccgaauagagugcaug

SEQ ID NO: 1214638 - RNA, 19 nt, Artificial Sequence
  Description of Artificial Sequence: Synthetic oligonucleotide
cauguggcucccuggccag

SEQ ID NO: 1214639 - RNA, 19 nt, Artificial Sequence
  Description of Artificial Sequence: Synthetic oligonucleotide
gucccggucaaaccacgag

SEQ ID NO: 1214640 - RNA, 19 nt, Artificial Sequence
  Description of Artificial Sequence: Synthetic oligonucleotide
ccaaccuggugguagcccg

SEQ ID NO: 1214641 - RNA, 19 nt, Artificial Sequence
  Description of Artificial Sequence: Synthetic oligonucleotide
ggagaacuccaguaguaca

SEQ ID NO: 1214642 - RNA, 19 nt, Artificial Sequence
  Description of Artificial Sequence: Synthetic oligonucleotide
gaacucuucauaggcucca

SEQ ID NO: 1214643 - RNA, 19 nt, Artificial Sequence
  Description of Artificial Sequence: Synthetic oligonucleotide
gacacugcauuagaggcgu

SEQ ID NO: 1214644 - RNA, 19 nt, Artificial Sequence
  Description of Artificial Sequence: Synthetic oligonucleotide
gucguagaaugugaccaug

SEQ ID NO: 1214645 - RNA, 19 nt, Artificial Sequence
  Description of Artificial Sequence: Synthetic oligonucleotide
aggacccuuauggaacaag

SEQ ID NO: 1214646 - RNA, 19 nt, Artificial Sequence
  Description of Artificial Sequence: Synthetic oligonucleotide
aguucacggaagccagccu

SEQ ID NO: 1214647 - RNA, 19 nt, Artificial Sequence
  Description of Artificial Sequence: Synthetic oligonucleotide
ggguauggcuuccucgaag

SEQ ID NO: 1214648 - RNA, 19 nt, Artificial Sequence
  Description of Artificial Sequence: Synthetic oligonucleotide
uccaguaguacaggcuguc

SEQ ID NO: 1214649 - RNA, 19 nt, Artificial Sequence
  Description of Artificial Sequence: Synthetic oligonucleotide
cucuuuccgggcccugccg

SEQ ID NO: 1214650 - RNA, 19 nt, Artificial Sequence
  Description of Artificial Sequence: Synthetic oligonucleotide
aggacugagugaugccgcu

SEQ ID NO: 1214651 - RNA, 19 nt, Artificial Sequence
  Description of Artificial Sequence: Synthetic oligonucleotide
uaccuaaguccagcacccg

SEQ ID NO: 1214652 - RNA, 19 nt, Artificial Sequence
  Description of Artificial Sequence: Synthetic oligonucleotide
gucggugguuuucuucaug

SEQ ID NO: 1214653 - RNA, 19 nt, Artificial Sequence
  Description of Artificial Sequence: Synthetic oligonucleotide
agcccgccuggcuucgucg

SEQ ID NO: 1214654 - RNA, 19 nt, Artificial Sequence
  Description of Artificial Sequence: Synthetic oligonucleotide
agguagggcacuugauaau

SEQ ID NO: 1214655 - RNA, 19 nt, Artificial Sequence
  Description of Artificial Sequence: Synthetic oligonucleotide
agcccuugaaaagggucag

SEQ ID NO: 1214656 - RNA, 19 nt, Artificial Sequence
  Description of Artificial Sequence: Synthetic oligonucleotide
uaguuugggugcacagcau

SEQ ID NO: 1214657 - RNA, 19 nt, Artificial Sequence
  Description of Artificial Sequence: Synthetic oligonucleotide
ggugaacacaacgagccuc

SEQ ID NO: 1214658 - RNA, 19 nt, Artificial Sequence
  Description of Artificial Sequence: Synthetic oligonucleotide
gaagccaagauagguccaa

SEQ ID NO: 1214659 - RNA, 19 nt, Artificial Sequence
  Description of Artificial Sequence: Synthetic oligonucleotide
ggcuucgucgagauuugcg

SEQ ID NO: 1214660 - RNA, 19 nt, Artificial Sequence
  Description of Artificial Sequence: Synthetic oligonucleotide
aacaagggucggugguuuu

SEQ ID NO: 1214661 - RNA, 19 nt, Artificial Sequence
  Description of Artificial Sequence: Synthetic oligonucleotide
cagucgagaagccaagaua

SEQ ID NO: 1214662 - RNA, 19 nt, Artificial Sequence
  Description of Artificial Sequence: Synthetic oligonucleotide
guugcggcuuacagagggg

SEQ ID NO: 1214663 - RNA, 19 nt, Artificial Sequence
  Description of Artificial Sequence: Synthetic oligonucleotide
cuggcuucgucgagauuug

SEQ ID NO: 1214664 - RNA, 19 nt, Artificial Sequence
  Description of Artificial Sequence: Synthetic oligonucleotide
acuccgguucacgaacuug

SEQ ID NO: 1214665 - RNA, 19 nt, Artificial Sequence
  Description of Artificial Sequence: Synthetic oligonucleotide
ccaagugugggaugcgcag

SEQ ID NO: 1214666 - RNA, 19 nt, Artificial Sequence
  Description of Artificial Sequence: Synthetic oligonucleotide
gucgagauuugcguuucac

SEQ ID NO: 1214667 - RNA, 19 nt, Artificial Sequence
  Description of Artificial Sequence: Synthetic oligonucleotide
cagggacuguccguguggg

SEQ ID NO: 1214668 - RNA, 19 nt, Artificial Sequence
  Description of Artificial Sequence: Synthetic oligonucleotide
gcagggacuguccgugugg

SEQ ID NO: 1214669 - RNA, 19 nt, Artificial Sequence
  Description of Artificial Sequence: Synthetic oligonucleotide
ggugcaucucuguguuggg

SEQ ID NO: 1214670 - RNA, 19 nt, Artificial Sequence
  Description of Artificial Sequence: Synthetic oligonucleotide
uggguauggcuuccucgaa

SEQ ID NO: 1214671 - RNA, 19 nt, Artificial Sequence
  Description of Artificial Sequence: Synthetic oligonucleotide
gggacuccgguucacgaac

SEQ ID NO: 1214672 - RNA, 19 nt, Artificial Sequence
  Description of Artificial Sequence: Synthetic oligonucleotide
ggcugucucccgaauagag

SEQ ID NO: 1214673 - RNA, 19 nt, Artificial Sequence
  Description of Artificial Sequence: Synthetic oligonucleotide
gcgagguugcggcuuacag

SEQ ID NO: 1214674 - RNA, 19 nt, Artificial Sequence
  Description of Artificial Sequence: Synthetic oligonucleotide
ggacaugaggacugaguga

SEQ ID NO: 1214675 - RNA, 19 nt, Artificial Sequence
  Description of Artificial Sequence: Synthetic oligonucleotide
aggcguagcgcuguuugcu

SEQ ID NO: 1214676 - RNA, 19 nt, Artificial Sequence
  Description of Artificial Sequence: Synthetic oligonucleotide
acaggcugucucccgaaua

SEQ ID NO: 1214677 - RNA, 19 nt, Artificial Sequence
  Description of Artificial Sequence: Synthetic oligonucleotide
ugcgacacucagccacaac

SEQ ID NO: 1214678 - RNA, 19 nt, Artificial Sequence
  Description of Artificial Sequence: Synthetic oligonucleotide
gguccaaugguggugccac

SEQ ID NO: 1214679 - RNA, 19 nt, Artificial Sequence
  Description of Artificial Sequence: Synthetic oligonucleotide
uacaggcugucucccgaau

SEQ ID NO: 1214680 - RNA, 19 nt, Artificial Sequence
  Description of Artificial Sequence: Synthetic oligonucleotide
cagauuguccaggcgagga

SEQ ID NO: 1214681 - RNA, 19 nt, Artificial Sequence
  Description of Artificial Sequence: Synthetic oligonucleotide
caacgagccucaucaagaa

SEQ ID NO: 1214682 - RNA, 19 nt, Artificial Sequence
  Description of Artificial Sequence: Synthetic oligonucleotide
gggcaccccaacuuggcug

SEQ ID NO: 1214683 - RNA, 19 nt, Artificial Sequence
  Description of Artificial Sequence: Synthetic oligonucleotide
caugcuuguccacauaguu

SEQ ID NO: 1214684 - RNA, 19 nt, Artificial Sequence
  Description of Artificial Sequence: Synthetic oligonucleotide
ucgucgagauuugcguuuc

SEQ ID NO: 1214685 - RNA, 19 nt, Artificial Sequence
  Description of Artificial Sequence: Synthetic oligonucleotide
gcgaggagcaaagaugaac

SEQ ID NO: 1214686 - RNA, 19 nt, Artificial Sequence
  Description of Artificial Sequence: Synthetic oligonucleotide
ucguccagccaaggucagg

SEQ ID NO: 1214687 - RNA, 19 nt, Artificial Sequence
  Description of Artificial Sequence: Synthetic oligonucleotide
cucgaaucagagccucuga

SEQ ID NO: 1214688 - RNA, 19 nt, Artificial Sequence
  Description of Artificial Sequence: Synthetic oligonucleotide
guagggcacuugauaauga

SEQ ID NO: 1214689 - RNA, 19 nt, Artificial Sequence
  Description of Artificial Sequence: Synthetic oligonucleotide
cugcaagcugggugucugc

SEQ ID NO: 1214690 - RNA, 19 nt, Artificial Sequence
  Description of Artificial Sequence: Synthetic oligonucleotide
gagauucgccguaguacca

SEQ ID NO: 1214691 - RNA, 19 nt, Artificial Sequence
  Description of Artificial Sequence: Synthetic oligonucleotide
gcauuagaggcguagcgcu

SEQ ID NO: 1214692 - RNA, 19 nt, Artificial Sequence
  Description of Artificial Sequence: Synthetic oligonucleotide
gccucugacacugcauuag

SEQ ID NO: 1214693 - RNA, 19 nt, Artificial Sequence
  Description of Artificial Sequence: Synthetic oligonucleotide
uuucacccgaaggcaggga

SEQ ID NO: 1214694 - RNA, 19 nt, Artificial Sequence
  Description of Artificial Sequence: Synthetic oligonucleotide
ggucuggagaacuccagua

SEQ ID NO: 1214695 - RNA, 19 nt, Artificial Sequence
  Description of Artificial Sequence: Synthetic oligonucleotide
uggcaagaauaggcacuag

SEQ ID NO: 1214696 - RNA, 19 nt, Artificial Sequence
  Description of Artificial Sequence: Synthetic oligonucleotide
gucucccgaauagagugca

SEQ ID NO: 1214697 - RNA, 19 nt, Artificial Sequence
  Description of Artificial Sequence: Synthetic oligonucleotide
ggacuguccgugugggccc

SEQ ID NO: 1214698 - RNA, 19 nt, Artificial Sequence
  Description of Artificial Sequence: Synthetic oligonucleotide
gcaaugauggaggaggagu

SEQ ID NO: 1214699 - RNA, 19 nt, Artificial Sequence
  Description of Artificial Sequence: Synthetic oligonucleotide
cuguguugggcccaaaguu

SEQ ID NO: 1214700 - RNA, 19 nt, Artificial Sequence
  Description of Artificial Sequence: Synthetic oligonucleotide
gcuucgucgagauuugcgu

SEQ ID NO: 1214701 - RNA, 19 nt, Artificial Sequence
  Description of Artificial Sequence: Synthetic oligonucleotide
uuagaggcguagcgcuguu

SEQ ID NO: 1214702 - RNA, 19 nt, Artificial Sequence
  Description of Artificial Sequence: Synthetic oligonucleotide
aagggucggugguuuucuu

SEQ ID NO: 1214703 - RNA, 19 nt, Artificial Sequence
  Description of Artificial Sequence: Synthetic oligonucleotide
ccgguucacgaacuugagg

SEQ ID NO: 1214704 - RNA, 19 nt, Artificial Sequence
  Description of Artificial Sequence: Synthetic oligonucleotide
acacaacgagccucaucaa

SEQ ID NO: 1214705 - RNA, 19 nt, Artificial Sequence
  Description of Artificial Sequence: Synthetic oligonucleotide
ucucccgaauagagugcau

SEQ ID NO: 1214706 - RNA, 19 nt, Artificial Sequence
  Description of Artificial Sequence: Synthetic oligonucleotide
ggcguagcgcuguuugcug

SEQ ID NO: 1214707 - RNA, 19 nt, Artificial Sequence
  Description of Artificial Sequence: Synthetic oligonucleotide
ggggcuaccuaaguccagc

SEQ ID NO: 1214708 - RNA, 19 nt, Artificial Sequence
  Description of Artificial Sequence: Synthetic oligonucleotide
cucaucaagaagccucagu

SEQ ID NO: 1214709 - RNA, 19 nt, Artificial Sequence
  Description of Artificial Sequence: Synthetic oligonucleotide
auucgccguaguaccagcu

SEQ ID NO: 1214710 - RNA, 19 nt, Artificial Sequence
  Description of Artificial Sequence: Synthetic oligonucleotide
ggcuaccuaaguccagcac

SEQ ID NO: 1214711 - RNA, 19 nt, Artificial Sequence
  Description of Artificial Sequence: Synthetic oligonucleotide
gguguggcugagauucgcc

SEQ ID NO: 1214712 - RNA, 19 nt, Artificial Sequence
  Description of Artificial Sequence: Synthetic oligonucleotide
ggccgauccacauguacaa

SEQ ID NO: 1214713 - RNA, 19 nt, Artificial Sequence
  Description of Artificial Sequence: Synthetic oligonucleotide
ugucugcacugaucaugaa

SEQ ID NO: 1214714 - RNA, 19 nt, Artificial Sequence
  Description of Artificial Sequence: Synthetic oligonucleotide
cggucaaaccacgagcucc

SEQ ID NO: 1214715 - RNA, 19 nt, Artificial Sequence
  Description of Artificial Sequence: Synthetic oligonucleotide
cuaggugcaucucuguguu

SEQ ID NO: 1214716 - RNA, 19 nt, Artificial Sequence
  Description of Artificial Sequence: Synthetic oligonucleotide
ugcgagguugcggcuuaca

SEQ ID NO: 1214717 - RNA, 19 nt, Artificial Sequence
  Description of Artificial Sequence: Synthetic oligonucleotide
agucaggugcugaggugug

SEQ ID NO: 1214718 - RNA, 19 nt, Artificial Sequence
  Description of Artificial Sequence: Synthetic oligonucleotide
cugagugaugccgcucguc

SEQ ID NO: 1214719 - RNA, 19 nt, Artificial Sequence
  Description of Artificial Sequence: Synthetic oligonucleotide
uggcuucgucgagauuugc

SEQ ID NO: 1214720 - RNA, 19 nt, Artificial Sequence
  Description of Artificial Sequence: Synthetic oligonucleotide
gguuaggaaguacuuguuu

SEQ ID NO: 1214721 - RNA, 19 nt, Artificial Sequence
  Description of Artificial Sequence: Synthetic oligonucleotide
caagugugggaugcgcaga

SEQ ID NO: 1214722 - RNA, 19 nt, Artificial Sequence
  Description of Artificial Sequence: Synthetic oligonucleotide
agguccaaugguggugcca

SEQ ID NO: 1214723 - RNA, 19 nt, Artificial Sequence
  Description of Artificial Sequence: Synthetic oligonucleotide
caccaccauaggucucuac

SEQ ID NO: 1214724 - RNA, 19 nt, Artificial Sequence
  Description of Artificial Sequence: Synthetic oligonucleotide
cccgaauagagugcauggc

SEQ ID NO: 1214725 - RNA, 19 nt, Artificial Sequence
  Description of Artificial Sequence: Synthetic oligonucleotide
caccaaccuggugguagcc

SEQ ID NO: 1214726 - RNA, 19 nt, Artificial Sequence
  Description of Artificial Sequence: Synthetic oligonucleotide
gucacagggugaacacaac

SEQ ID NO: 1214727 - RNA, 19 nt, Artificial Sequence
  Description of Artificial Sequence: Synthetic oligonucleotide
guacaggcugucucccgaa

SEQ ID NO: 1214728 - RNA, 19 nt, Artificial Sequence
  Description of Artificial Sequence: Synthetic oligonucleotide
uaggcacuaggugcaucuc

SEQ ID NO: 1214729 - RNA, 19 nt, Artificial Sequence
  Description of Artificial Sequence: Synthetic oligonucleotide
ccgaaggcagggacugucc

SEQ ID NO: 1214730 - RNA, 19 nt, Artificial Sequence
  Description of Artificial Sequence: Synthetic oligonucleotide
cgaggagcaaagaugaacu

SEQ ID NO: 1214731 - RNA, 19 nt, Artificial Sequence
  Description of Artificial Sequence: Synthetic oligonucleotide
gcugagauucgccguagua

SEQ ID NO: 1214732 - RNA, 19 nt, Artificial Sequence
  Description of Artificial Sequence: Synthetic oligonucleotide
ggcagucaggugcugaggu

SEQ ID NO: 1214733 - RNA, 19 nt, Artificial Sequence
  Description of Artificial Sequence: Synthetic oligonucleotide
gagagggacuccgguucac

SEQ ID NO: 1214734 - RNA, 19 nt, Artificial Sequence
  Description of Artificial Sequence: Synthetic oligonucleotide
aggcugucucccgaauaga

SEQ ID NO: 1214735 - RNA, 19 nt, Artificial Sequence
  Description of Artificial Sequence: Synthetic oligonucleotide
caccccaacuuggcuggcc

SEQ ID NO: 1214736 - RNA, 19 nt, Artificial Sequence
  Description of Artificial Sequence: Synthetic oligonucleotide
caagaagccucaguccacu

SEQ ID NO: 1214737 - RNA, 19 nt, Artificial Sequence
  Description of Artificial Sequence: Synthetic oligonucleotide
uuguccaggcgaggagcaa

SEQ ID NO: 1214738 - RNA, 19 nt, Artificial Sequence
  Description of Artificial Sequence: Synthetic oligonucleotide
cuucgucgagauuugcguu

SEQ ID NO: 1214739 - RNA, 19 nt, Artificial Sequence
  Description of Artificial Sequence: Synthetic oligonucleotide
ccgugugggccccaaugag

SEQ ID NO: 1214740 - RNA, 19 nt, Artificial Sequence
  Description of Artificial Sequence: Synthetic oligonucleotide
gcgcuguuugcuguucacc

SEQ ID NO: 1214741 - RNA, 19 nt, Artificial Sequence
  Description of Artificial Sequence: Synthetic oligonucleotide
gggcuaccuaaguccagca

SEQ ID NO: 1214742 - RNA, 19 nt, Artificial Sequence
  Description of Artificial Sequence: Synthetic oligonucleotide
ggaggcggcugcgacacuc

SEQ ID NO: 1214743 - RNA, 19 nt, Artificial Sequence
  Description of Artificial Sequence: Synthetic oligonucleotide
gcgcacauguggcucccug

SEQ ID NO: 1214744 - RNA, 19 nt, Artificial Sequence
  Description of Artificial Sequence: Synthetic oligonucleotide
gguagcccgccuggcuucg

SEQ ID NO: 1214745 - RNA, 19 nt, Artificial Sequence
  Description of Artificial Sequence: Synthetic oligonucleotide
gccgauccacauguacaag

SEQ ID NO: 1214746 - RNA, 19 nt, Artificial Sequence
  Description of Artificial Sequence: Synthetic oligonucleotide
ugugcuccuugagcacuuu

SEQ ID NO: 1214747 - RNA, 19 nt, Artificial Sequence
  Description of Artificial Sequence: Synthetic oligonucleotide
cgagguugcggcuuacaga

SEQ ID NO: 1214748 - RNA, 19 nt, Artificial Sequence
  Description of Artificial Sequence: Synthetic oligonucleotide
uagaggcguagcgcuguuu

SEQ ID NO: 1214749 - RNA, 19 nt, Artificial Sequence
  Description of Artificial Sequence: Synthetic oligonucleotide
gauuugcguuucacccgaa

SEQ ID NO: 1214750 - RNA, 19 nt, Artificial Sequence
  Description of Artificial Sequence: Synthetic oligonucleotide
ccucucgaaucagagccuc

SEQ ID NO: 1214751 - RNA, 19 nt, Artificial Sequence
  Description of Artificial Sequence: Synthetic oligonucleotide
gccaagugugggaugcgca

SEQ ID NO: 1214752 - RNA, 19 nt, Artificial Sequence
  Description of Artificial Sequence: Synthetic oligonucleotide
caagggucggugguuuucu

SEQ ID NO: 1214753 - RNA, 19 nt, Artificial Sequence
  Description of Artificial Sequence: Synthetic oligonucleotide
gcauugauaggcccugguu

SEQ ID NO: 1214754 - RNA, 19 nt, Artificial Sequence
  Description of Artificial Sequence: Synthetic oligonucleotide
gaauaggcacuaggugcau

SEQ ID NO: 1214755 - RNA, 19 nt, Artificial Sequence
  Description of Artificial Sequence: Synthetic oligonucleotide
cucucgaaucagagccucu

SEQ ID NO: 1214756 - RNA, 19 nt, Artificial Sequence
  Description of Artificial Sequence: Synthetic oligonucleotide
cuccagccgaccugaggua

SEQ ID NO: 1214757 - RNA, 19 nt, Artificial Sequence
  Description of Artificial Sequence: Synthetic oligonucleotide
gggcccugccguucauggc

SEQ ID NO: 1214758 - RNA, 19 nt, Artificial Sequence
  Description of Artificial Sequence: Synthetic oligonucleotide
ccucaguccacugcgaggu

SEQ ID NO: 1214759 - RNA, 19 nt, Artificial Sequence
  Description of Artificial Sequence: Synthetic oligonucleotide
gacuccgguucacgaacuu

SEQ ID NO: 1214760 - RNA, 19 nt, Artificial Sequence
  Description of Artificial Sequence: Synthetic oligonucleotide
ggacugagugaugccgcuc

SEQ ID NO: 1214761 - RNA, 19 nt, Artificial Sequence
  Description of Artificial Sequence: Synthetic oligonucleotide
ugccgcucgucagcagcau

SEQ ID NO: 1214762 - RNA, 19 nt, Artificial Sequence
  Description of Artificial Sequence: Synthetic oligonucleotide
ucccucgcuguggccugga

SEQ ID NO: 1214763 - RNA, 19 nt, Artificial Sequence
  Description of Artificial Sequence: Synthetic oligonucleotide
ggcuuccucgaaggcaguc

SEQ ID NO: 1214764 - RNA, 19 nt, Artificial Sequence
  Description of Artificial Sequence: Synthetic oligonucleotide
ccggucaaaccacgagcuc

SEQ ID NO: 1214765 - RNA, 19 nt, Artificial Sequence
  Description of Artificial Sequence: Synthetic oligonucleotide
ggauggccaagugugggau

SEQ ID NO: 1214766 - RNA, 19 nt, Artificial Sequence
  Description of Artificial Sequence: Synthetic oligonucleotide
uccgggcccugccguucau

SEQ ID NO: 1214767 - RNA, 19 nt, Artificial Sequence
  Description of Artificial Sequence: Synthetic oligonucleotide
ccccaacuuggcuggccac

SEQ ID NO: 1214768 - RNA, 19 nt, Artificial Sequence
  Description of Artificial Sequence: Synthetic oligonucleotide
gcacuaggugcaucucugu

SEQ ID NO: 1214769 - RNA, 19 nt, Artificial Sequence
  Description of Artificial Sequence: Synthetic oligonucleotide
ggucccggucaaaccacga

SEQ ID NO: 1214770 - RNA, 19 nt, Artificial Sequence
  Description of Artificial Sequence: Synthetic oligonucleotide
aggaggcggcugcgacacu

SEQ ID NO: 1214771 - RNA, 19 nt, Artificial Sequence
  Description of Artificial Sequence: Synthetic oligonucleotide
ccagucgagaagccaagau

SEQ ID NO: 1214772 - RNA, 19 nt, Artificial Sequence
  Description of Artificial Sequence: Synthetic oligonucleotide
gcccgccuggcuucgucga

SEQ ID NO: 1214773 - RNA, 19 nt, Artificial Sequence
  Description of Artificial Sequence: Synthetic oligonucleotide
cugaccccaccucuucauu

SEQ ID NO: 1214774 - RNA, 19 nt, Artificial Sequence
  Description of Artificial Sequence: Synthetic oligonucleotide
cuuuccgggcccugccguu

SEQ ID NO: 1214775 - RNA, 19 nt, Artificial Sequence
  Description of Artificial Sequence: Synthetic oligonucleotide
cccgccuggcuucgucgag

SEQ ID NO: 1214776 - RNA, 19 nt, Artificial Sequence
  Description of Artificial Sequence: Synthetic oligonucleotide
cugcgacacucagccacaa

SEQ ID NO: 1214777 - RNA, 19 nt, Artificial Sequence
  Description of Artificial Sequence: Synthetic oligonucleotide
cuacaccaaccugguggua

SEQ ID NO: 1214778 - RNA, 19 nt, Artificial Sequence
  Description of Artificial Sequence: Synthetic oligonucleotide
ggucggugguuuucuucau

SEQ ID NO: 1214779 - RNA, 19 nt, Artificial Sequence
  Description of Artificial Sequence: Synthetic oligonucleotide
ggacuccgguucacgaacu

SEQ ID NO: 1214780 - RNA, 19 nt, Artificial Sequence
  Description of Artificial Sequence: Synthetic oligonucleotide
ccggaccaugagguccugc

SEQ ID NO: 1214781 - RNA, 19 nt, Artificial Sequence
  Description of Artificial Sequence: Synthetic oligonucleotide
cccagucgagaagccaaga

SEQ ID NO: 1214782 - RNA, 19 nt, Artificial Sequence
  Description of Artificial Sequence: Synthetic oligonucleotide
augggccgauccacaugua

SEQ ID NO: 1214783 - RNA, 19 nt, Artificial Sequence
  Description of Artificial Sequence: Synthetic oligonucleotide
acacugcauuagaggcgua

SEQ ID NO: 1214784 - RNA, 19 nt, Artificial Sequence
  Description of Artificial Sequence: Synthetic oligonucleotide
ccaacuuggcuggccaccu

SEQ ID NO: 1214785 - RNA, 19 nt, Artificial Sequence
  Description of Artificial Sequence: Synthetic oligonucleotide
ccaguaguacaggcugucu

SEQ ID NO: 1214786 - RNA, 19 nt, Artificial Sequence
  Description of Artificial Sequence: Synthetic oligonucleotide
gcaccccaacuuggcuggc

SEQ ID NO: 1214787 - RNA, 19 nt, Artificial Sequence
  Description of Artificial Sequence: Synthetic oligonucleotide
cagcacccgaagccccagu

SEQ ID NO: 1214788 - RNA, 19 nt, Artificial Sequence
  Description of Artificial Sequence: Synthetic oligonucleotide
ccgccuggcuucgucgaga

SEQ ID NO: 1214789 - RNA, 19 nt, Artificial Sequence
  Description of Artificial Sequence: Synthetic oligonucleotide
cgucgagauuugcguuuca

SEQ ID NO: 1214790 - RNA, 19 nt, Artificial Sequence
  Description of Artificial Sequence: Synthetic oligonucleotide
ccgggcccugccguucaug

SEQ ID NO: 1214791 - RNA, 19 nt, Artificial Sequence
  Description of Artificial Sequence: Synthetic oligonucleotide
guagcccgccuggcuucgu

SEQ ID NO: 1214792 - RNA, 19 nt, Artificial Sequence
  Description of Artificial Sequence: Synthetic oligonucleotide
cgaccugagguagggcacu

SEQ ID NO: 1214793 - RNA, 19 nt, Artificial Sequence
  Description of Artificial Sequence: Synthetic oligonucleotide
cccugccguucauggccaa

SEQ ID NO: 1214794 - RNA, 19 nt, Artificial Sequence
  Description of Artificial Sequence: Synthetic oligonucleotide
ccaccaccauaggucucua

SEQ ID NO: 1214795 - RNA, 19 nt, Artificial Sequence
  Description of Artificial Sequence: Synthetic oligonucleotide
uucauuguaguacacagag

SEQ ID NO: 1214796 - RNA, 19 nt, Artificial Sequence
  Description of Artificial Sequence: Synthetic oligonucleotide
aaaaggaccugaucgaacg

SEQ ID NO: 1214797 - RNA, 19 nt, Artificial Sequence
  Description of Artificial Sequence: Synthetic oligonucleotide
agagauucgguccagcugc

SEQ ID NO: 1214798 - RNA, 19 nt, Artificial Sequence
  Description of Artificial Sequence: Synthetic oligonucleotide
acuguaauaaauuugugcu

SEQ ID NO: 1214799 - RNA, 19 nt, Artificial Sequence
  Description of Artificial Sequence: Synthetic oligonucleotide
uguaauaaauuugugcugg

SEQ ID NO: 1214800 - RNA, 19 nt, Artificial Sequence
  Description of Artificial Sequence: Synthetic oligonucleotide
gaacuaaguagccugaggg

SEQ ID NO: 1214801 - RNA, 19 nt, Artificial Sequence
  Description of Artificial Sequence: Synthetic oligonucleotide
ugaagaucuggccaaaagg

SEQ ID NO: 1214802 - RNA, 19 nt, Artificial Sequence
  Description of Artificial Sequence: Synthetic oligonucleotide
aaaacaaaguugucugguc

SEQ ID NO: 1214803 - RNA, 19 nt, Artificial Sequence
  Description of Artificial Sequence: Synthetic oligonucleotide
uacuguaauaaauuugugc

SEQ ID NO: 1214804 - RNA, 19 nt, Artificial Sequence
  Description of Artificial Sequence: Synthetic oligonucleotide
agauccaccaauauggccc

SEQ ID NO: 1214805 - RNA, 19 nt, Artificial Sequence
  Description of Artificial Sequence: Synthetic oligonucleotide
auuugugcuggcuucaagg

SEQ ID NO: 1214806 - RNA, 19 nt, Artificial Sequence
  Description of Artificial Sequence: Synthetic oligonucleotide
ugaccgaaaacaaaguugu

SEQ ID NO: 1214807 - RNA, 19 nt, Artificial Sequence
  Description of Artificial Sequence: Synthetic oligonucleotide
ugugcuggcuucaagguag

SEQ ID NO: 1214808 - RNA, 19 nt, Artificial Sequence
  Description of Artificial Sequence: Synthetic oligonucleotide
agaggcagcagaaagaaac

SEQ ID NO: 1214809 - RNA, 19 nt, Artificial Sequence
  Description of Artificial Sequence: Synthetic oligonucleotide
gaacuuagcaccgaucugg

SEQ ID NO: 1214810 - RNA, 19 nt, Artificial Sequence
  Description of Artificial Sequence: Synthetic oligonucleotide
agaaccgguaccuccaccc

SEQ ID NO: 1214811 - RNA, 19 nt, Artificial Sequence
  Description of Artificial Sequence: Synthetic oligonucleotide
aguucaggcacagugaggg

SEQ ID NO: 1214812 - RNA, 19 nt, Artificial Sequence
  Description of Artificial Sequence: Synthetic oligonucleotide
auauucuuggcaucgaaga

SEQ ID NO: 1214813 - RNA, 19 nt, Artificial Sequence
  Description of Artificial Sequence: Synthetic oligonucleotide
agcagaaagaaacuggaga

SEQ ID NO: 1214814 - RNA, 19 nt, Artificial Sequence
  Description of Artificial Sequence: Synthetic oligonucleotide
uguagaguggcacacgccu

SEQ ID NO: 1214815 - RNA, 19 nt, Artificial Sequence
  Description of Artificial Sequence: Synthetic oligonucleotide
uuguaguacacagagauuc

SEQ ID NO: 1214816 - RNA, 19 nt, Artificial Sequence
  Description of Artificial Sequence: Synthetic oligonucleotide
aguacacagagauucgguc

SEQ ID NO: 1214817 - RNA, 19 nt, Artificial Sequence
  Description of Artificial Sequence: Synthetic oligonucleotide
aacaaaguugucuggucug

SEQ ID NO: 1214818 - RNA, 19 nt, Artificial Sequence
  Description of Artificial Sequence: Synthetic oligonucleotide
uguaguacacagagauucg

SEQ ID NO: 1214819 - RNA, 19 nt, Artificial Sequence
  Description of Artificial Sequence: Synthetic oligonucleotide
cuuagcaccgaucugguug

SEQ ID NO: 1214820 - RNA, 19 nt, Artificial Sequence
  Description of Artificial Sequence: Synthetic oligonucleotide
gaucgaacggaguccaugg

SEQ ID NO: 1214821 - RNA, 19 nt, Artificial Sequence
  Description of Artificial Sequence: Synthetic oligonucleotide
uucuagauccaccaauaug

SEQ ID NO: 1214822 - RNA, 19 nt, Artificial Sequence
  Description of Artificial Sequence: Synthetic oligonucleotide
ugaguucaggcacagugag

SEQ ID NO: 1214823 - RNA, 19 nt, Artificial Sequence
  Description of Artificial Sequence: Synthetic oligonucleotide
ucaagguagguaccgagca

SEQ ID NO: 1214824 - RNA, 19 nt, Artificial Sequence
  Description of Artificial Sequence: Synthetic oligonucleotide
agggagacgacgcaggguc

SEQ ID NO: 1214825 - RNA, 19 nt, Artificial Sequence
  Description of Artificial Sequence: Synthetic oligonucleotide
ggccaaaaggaccugaucg

SEQ ID NO: 1214826 - RNA, 19 nt, Artificial Sequence
  Description of Artificial Sequence: Synthetic oligonucleotide
cugaccgaaaacaaaguug

SEQ ID NO: 1214827 - RNA, 19 nt, Artificial Sequence
  Description of Artificial Sequence: Synthetic oligonucleotide
uggaacguggcuccggagg

SEQ ID NO: 1214828 - RNA, 19 nt, Artificial Sequence
  Description of Artificial Sequence: Synthetic oligonucleotide
cuggcuucaagguagguac

SEQ ID NO: 1214829 - RNA, 19 nt, Artificial Sequence
  Description of Artificial Sequence: Synthetic oligonucleotide
agcugagggaacuaaguag

SEQ ID NO: 1214830 - RNA, 19 nt, Artificial Sequence
  Description of Artificial Sequence: Synthetic oligonucleotide
gagggaacuaaguagccug

SEQ ID NO: 1214831 - RNA, 19 nt, Artificial Sequence
  Description of Artificial Sequence: Synthetic oligonucleotide
aaaacgggcagcugaagaa

SEQ ID NO: 1214832 - RNA, 19 nt, Artificial Sequence
  Description of Artificial Sequence: Synthetic oligonucleotide
uagguaccgagcaagaaaa

SEQ ID NO: 1214833 - RNA, 19 nt, Artificial Sequence
  Description of Artificial Sequence: Synthetic oligonucleotide
aaaggaccugaucgaacgg

SEQ ID NO: 1214834 - RNA, 19 nt, Artificial Sequence
  Description of Artificial Sequence: Synthetic oligonucleotide
aacuaaguagccugaggga

SEQ ID NO: 1214835 - RNA, 19 nt, Artificial Sequence
  Description of Artificial Sequence: Synthetic oligonucleotide
agggauggaacguggcucc

SEQ ID NO: 1214836 - RNA, 19 nt, Artificial Sequence
  Description of Artificial Sequence: Synthetic oligonucleotide
aagaucuggccaaaaggac

SEQ ID NO: 1214837 - RNA, 19 nt, Artificial Sequence
  Description of Artificial Sequence: Synthetic oligonucleotide
acuaaguagccugagggag

SEQ ID NO: 1214838 - RNA, 19 nt, Artificial Sequence
  Description of Artificial Sequence: Synthetic oligonucleotide
uguugccugccccagacug

SEQ ID NO: 1214839 - RNA, 19 nt, Artificial Sequence
  Description of Artificial Sequence: Synthetic oligonucleotide
aagguagguaccgagcaag

SEQ ID NO: 1214840 - RNA, 19 nt, Artificial Sequence
  Description of Artificial Sequence: Synthetic oligonucleotide
gaagaucuggccaaaagga

SEQ ID NO: 1214841 - RNA, 19 nt, Artificial Sequence
  Description of Artificial Sequence: Synthetic oligonucleotide
uguucaucgcugaucaccu

SEQ ID NO: 1214842 - RNA, 19 nt, Artificial Sequence
  Description of Artificial Sequence: Synthetic oligonucleotide
gauucgguccagcugcagg

SEQ ID NO: 1214843 - RNA, 19 nt, Artificial Sequence
  Description of Artificial Sequence: Synthetic oligonucleotide
uguggcuucauuguaguac

SEQ ID NO: 1214844 - RNA, 19 nt, Artificial Sequence
  Description of Artificial Sequence: Synthetic oligonucleotide
aauuugugcuggcuucaag

SEQ ID NO: 1214845 - RNA, 19 nt, Artificial Sequence
  Description of Artificial Sequence: Synthetic oligonucleotide
uucaagguagguaccgagc

SEQ ID NO: 1214846 - RNA, 19 nt, Artificial Sequence
  Description of Artificial Sequence: Synthetic oligonucleotide
gagcaagaaaagauaauug

SEQ ID NO: 1214847 - RNA, 19 nt, Artificial Sequence
  Description of Artificial Sequence: Synthetic oligonucleotide
guacacagagauucggucc

SEQ ID NO: 1214848 - RNA, 19 nt, Artificial Sequence
  Description of Artificial Sequence: Synthetic oligonucleotide
cuuuuggcuggucucaggc

SEQ ID NO: 1214849 - RNA, 19 nt, Artificial Sequence
  Description of Artificial Sequence: Synthetic oligonucleotide
agacugaccgaaaacaaag

SEQ ID NO: 1214850 - RNA, 19 nt, Artificial Sequence
  Description of Artificial Sequence: Synthetic oligonucleotide
ucuggcuuaggccucuucu

SEQ ID NO: 1214851 - RNA, 19 nt, Artificial Sequence
  Description of Artificial Sequence: Synthetic oligonucleotide
uuagcaccgaucugguugc

SEQ ID NO: 1214852 - RNA, 19 nt, Artificial Sequence
  Description of Artificial Sequence: Synthetic oligonucleotide
cuguaauaaauuugugcug

SEQ ID NO: 1214853 - RNA, 19 nt, Artificial Sequence
  Description of Artificial Sequence: Synthetic oligonucleotide
aaaacaggacagaggcagc

SEQ ID NO: 1214854 - RNA, 19 nt, Artificial Sequence
  Description of Artificial Sequence: Synthetic oligonucleotide
aggcugaagggauggaacg

SEQ ID NO: 1214855 - RNA, 19 nt, Artificial Sequence
  Description of Artificial Sequence: Synthetic oligonucleotide
gauccaccaauauggcccg

SEQ ID NO: 1214856 - RNA, 19 nt, Artificial Sequence
  Description of Artificial Sequence: Synthetic oligonucleotide
uuugugcuggcuucaaggu

SEQ ID NO: 1214857 - RNA, 19 nt, Artificial Sequence
  Description of Artificial Sequence: Synthetic oligonucleotide
accgaaaacaaaguugucu

SEQ ID NO: 1214858 - RNA, 19 nt, Artificial Sequence
  Description of Artificial Sequence: Synthetic oligonucleotide
aaagcugagggaacuaagu

SEQ ID NO: 1214859 - RNA, 19 nt, Artificial Sequence
  Description of Artificial Sequence: Synthetic oligonucleotide
ugagggagacgacgcaggg

SEQ ID NO: 1214860 - RNA, 19 nt, Artificial Sequence
  Description of Artificial Sequence: Synthetic oligonucleotide
uagauccaccaauauggcc

SEQ ID NO: 1214861 - RNA, 19 nt, Artificial Sequence
  Description of Artificial Sequence: Synthetic oligonucleotide
uaauaaauuugugcuggcu

SEQ ID NO: 1214862 - RNA, 19 nt, Artificial Sequence
  Description of Artificial Sequence: Synthetic oligonucleotide
cauuguaguacacagagau

SEQ ID NO: 1214863 - RNA, 19 nt, Artificial Sequence
  Description of Artificial Sequence: Synthetic oligonucleotide
gucgcugucuccaugguag

SEQ ID NO: 1214864 - RNA, 19 nt, Artificial Sequence
  Description of Artificial Sequence: Synthetic oligonucleotide
cuagauccaccaauauggc

SEQ ID NO: 1214865 - RNA, 19 nt, Artificial Sequence
  Description of Artificial Sequence: Synthetic oligonucleotide
gcuggucucaggcugaagg

SEQ ID NO: 1214866 - RNA, 19 nt, Artificial Sequence
  Description of Artificial Sequence: Synthetic oligonucleotide
uucaggcacagugagggcc

SEQ ID NO: 1214867 - RNA, 19 nt, Artificial Sequence
  Description of Artificial Sequence: Synthetic oligonucleotide
ugaagggauggaacguggc

SEQ ID NO: 1214868 - RNA, 19 nt, Artificial Sequence
  Description of Artificial Sequence: Synthetic oligonucleotide
auggcuacgguuuacugua

SEQ ID NO: 1214869 - RNA, 19 nt, Artificial Sequence
  Description of Artificial Sequence: Synthetic oligonucleotide
guaguacacagagauucgg

SEQ ID NO: 1214870 - RNA, 19 nt, Artificial Sequence
  Description of Artificial Sequence: Synthetic oligonucleotide
guaauaaauuugugcuggc

SEQ ID NO: 1214871 - RNA, 19 nt, Artificial Sequence
  Description of Artificial Sequence: Synthetic oligonucleotide
aagcugagggaacuaagua

SEQ ID NO: 1214872 - RNA, 19 nt, Artificial Sequence
  Description of Artificial Sequence: Synthetic oligonucleotide
ucauuguaguacacagaga

SEQ ID NO: 1214873 - RNA, 19 nt, Artificial Sequence
  Description of Artificial Sequence: Synthetic oligonucleotide
gaaagcugagggaacuaag

SEQ ID NO: 1214874 - RNA, 19 nt, Artificial Sequence
  Description of Artificial Sequence: Synthetic oligonucleotide
caccaauauggcccgaggg

SEQ ID NO: 1214875 - RNA, 19 nt, Artificial Sequence
  Description of Artificial Sequence: Synthetic oligonucleotide
cugaagggauggaacgugg

SEQ ID NO: 1214876 - RNA, 19 nt, Artificial Sequence
  Description of Artificial Sequence: Synthetic oligonucleotide
cacagugagggcccgauac

SEQ ID NO: 1214877 - RNA, 19 nt, Artificial Sequence
  Description of Artificial Sequence: Synthetic oligonucleotide
ucgaagaccugcuggguga

SEQ ID NO: 1214878 - RNA, 19 nt, Artificial Sequence
  Description of Artificial Sequence: Synthetic oligonucleotide
uacgguuuacuguaauaaa

SEQ ID NO: 1214879 - RNA, 19 nt, Artificial Sequence
  Description of Artificial Sequence: Synthetic oligonucleotide
uuucuuuuggcuggucuca

SEQ ID NO: 1214880 - RNA, 19 nt, Artificial Sequence
  Description of Artificial Sequence: Synthetic oligonucleotide
guguucaucgcugaucacc

SEQ ID NO: 1214881 - RNA, 19 nt, Artificial Sequence
  Description of Artificial Sequence: Synthetic oligonucleotide
uuaggccucuucuucugcc

SEQ ID NO: 1214882 - RNA, 19 nt, Artificial Sequence
  Description of Artificial Sequence: Synthetic oligonucleotide
augugcacgauuucccuca

SEQ ID NO: 1214883 - RNA, 19 nt, Artificial Sequence
  Description of Artificial Sequence: Synthetic oligonucleotide
uaccagaaccgguaccucc

SEQ ID NO: 1214884 - RNA, 19 nt, Artificial Sequence
  Description of Artificial Sequence: Synthetic oligonucleotide
ucuuuuggcuggucucagg

SEQ ID NO: 1214885 - RNA, 19 nt, Artificial Sequence
  Description of Artificial Sequence: Synthetic oligonucleotide
ggcaucgaagaccugcugg

SEQ ID NO: 1214886 - RNA, 19 nt, Artificial Sequence
  Description of Artificial Sequence: Synthetic oligonucleotide
accugaucgaacggagucc

SEQ ID NO: 1214887 - RNA, 19 nt, Artificial Sequence
  Description of Artificial Sequence: Synthetic oligonucleotide
aaacaggacagaggcagca

SEQ ID NO: 1214888 - RNA, 19 nt, Artificial Sequence
  Description of Artificial Sequence: Synthetic oligonucleotide
gaccugaucgaacggaguc

SEQ ID NO: 1214889 - RNA, 19 nt, Artificial Sequence
  Description of Artificial Sequence: Synthetic oligonucleotide
auucgguccagcugcaggu

SEQ ID NO: 1214890 - RNA, 19 nt, Artificial Sequence
  Description of Artificial Sequence: Synthetic oligonucleotide
caaaaggaccugaucgaac

SEQ ID NO: 1214891 - RNA, 19 nt, Artificial Sequence
  Description of Artificial Sequence: Synthetic oligonucleotide
ggaacuaaguagccugagg

SEQ ID NO: 1214892 - RNA, 19 nt, Artificial Sequence
  Description of Artificial Sequence: Synthetic oligonucleotide
gacacuuugggugagggua

SEQ ID NO: 1214893 - RNA, 19 nt, Artificial Sequence
  Description of Artificial Sequence: Synthetic oligonucleotide
agaacuuagcaccgaucug

SEQ ID NO: 1214894 - RNA, 19 nt, Artificial Sequence
  Description of Artificial Sequence: Synthetic oligonucleotide
aucgaagaccugcugggug

SEQ ID NO: 1214895 - RNA, 19 nt, Artificial Sequence
  Description of Artificial Sequence: Synthetic oligonucleotide
ucgaacggaguccaugguc

SEQ ID NO: 1214896 - RNA, 19 nt, Artificial Sequence
  Description of Artificial Sequence: Synthetic oligonucleotide
aguagccugagggagacga

SEQ ID NO: 1214897 - RNA, 19 nt, Artificial Sequence
  Description of Artificial Sequence: Synthetic oligonucleotide
uaccgagcaagaaaagaua

SEQ ID NO: 1214898 - RNA, 19 nt, Artificial Sequence
  Description of Artificial Sequence: Synthetic oligonucleotide
ccgaaaacaaaguugucug

SEQ ID NO: 1214899 - RNA, 19 nt, Artificial Sequence
  Description of Artificial Sequence: Synthetic oligonucleotide
uagccugagggagacgacg

SEQ ID NO: 1214900 - RNA, 19 nt, Artificial Sequence
  Description of Artificial Sequence: Synthetic oligonucleotide
ugaucgaacggaguccaug

SEQ ID NO: 1214901 - RNA, 19 nt, Artificial Sequence
  Description of Artificial Sequence: Synthetic oligonucleotide
cugucuccaugguaggugc

SEQ ID NO: 1214902 - RNA, 19 nt, Artificial Sequence
  Description of Artificial Sequence: Synthetic oligonucleotide
ucauggcuacgguuuacug

SEQ ID NO: 1214903 - RNA, 19 nt, Artificial Sequence
  Description of Artificial Sequence: Synthetic oligonucleotide
gcagaaagaaacuggagaa

SEQ ID NO: 1214904 - RNA, 19 nt, Artificial Sequence
  Description of Artificial Sequence: Synthetic oligonucleotide
guagguaccgagcaagaaa

SEQ ID NO: 1214905 - RNA, 19 nt, Artificial Sequence
  Description of Artificial Sequence: Synthetic oligonucleotide
aaggaccugaucgaacgga

SEQ ID NO: 1214906 - RNA, 19 nt, Artificial Sequence
  Description of Artificial Sequence: Synthetic oligonucleotide
cuccccgaaauccucuucc

SEQ ID NO: 1214907 - RNA, 19 nt, Artificial Sequence
  Description of Artificial Sequence: Synthetic oligonucleotide
ggacagaggcagcagaaag

SEQ ID NO: 1214908 - RNA, 19 nt, Artificial Sequence
  Description of Artificial Sequence: Synthetic oligonucleotide
gaaaacaaaguugucuggu

SEQ ID NO: 1214909 - RNA, 19 nt, Artificial Sequence
  Description of Artificial Sequence: Synthetic oligonucleotide
cugagggaacuaaguagcc

SEQ ID NO: 1214910 - RNA, 19 nt, Artificial Sequence
  Description of Artificial Sequence: Synthetic oligonucleotide
caggcugaagggauggaac

SEQ ID NO: 1214911 - RNA, 19 nt, Artificial Sequence
  Description of Artificial Sequence: Synthetic oligonucleotide
gcaucgaagaccugcuggg

SEQ ID NO: 1214912 - RNA, 19 nt, Artificial Sequence
  Description of Artificial Sequence: Synthetic oligonucleotide
guuguugccugccccagac

SEQ ID NO: 1214913 - RNA, 19 nt, Artificial Sequence
  Description of Artificial Sequence: Synthetic oligonucleotide
aacgggcagcugaagaaag

SEQ ID NO: 1214914 - RNA, 19 nt, Artificial Sequence
  Description of Artificial Sequence: Synthetic oligonucleotide
aauauggcccgagggacau

SEQ ID NO: 1214915 - RNA, 19 nt, Artificial Sequence
  Description of Artificial Sequence: Synthetic oligonucleotide
ucccucauggcuacgguuu

SEQ ID NO: 1214916 - RNA, 19 nt, Artificial Sequence
  Description of Artificial Sequence: Synthetic oligonucleotide
uuuuggcuggucucaggcu

SEQ ID NO: 1214917 - RNA, 19 nt, Artificial Sequence
  Description of Artificial Sequence: Synthetic oligonucleotide
gcugagggaacuaaguagc

SEQ ID NO: 1214918 - RNA, 19 nt, Artificial Sequence
  Description of Artificial Sequence: Synthetic oligonucleotide
gguguagaguggcacacgc

SEQ ID NO: 1214919 - RNA, 19 nt, Artificial Sequence
  Description of Artificial Sequence: Synthetic oligonucleotide
uauggcccgagggacauac

SEQ ID NO: 1214920 - RNA, 19 nt, Artificial Sequence
  Description of Artificial Sequence: Synthetic oligonucleotide
guaggugccgguggggucg

SEQ ID NO: 1214921 - RNA, 19 nt, Artificial Sequence
  Description of Artificial Sequence: Synthetic oligonucleotide
ugagggaacuaaguagccu

SEQ ID NO: 1214922 - RNA, 19 nt, Artificial Sequence
  Description of Artificial Sequence: Synthetic oligonucleotide
acgguuuacuguaauaaau

SEQ ID NO: 1214923 - RNA, 19 nt, Artificial Sequence
  Description of Artificial Sequence: Synthetic oligonucleotide
uggcuuaggccucuucuuc

SEQ ID NO: 1214924 - RNA, 19 nt, Artificial Sequence
  Description of Artificial Sequence: Synthetic oligonucleotide
aacggaguccauggucccg

SEQ ID NO: 1214925 - RNA, 19 nt, Artificial Sequence
  Description of Artificial Sequence: Synthetic oligonucleotide
ucuccaugguaggugccgg

SEQ ID NO: 1214926 - RNA, 19 nt, Artificial Sequence
  Description of Artificial Sequence: Synthetic oligonucleotide
aaacgggcagcugaagaaa

SEQ ID NO: 1214927 - RNA, 19 nt, Artificial Sequence
  Description of Artificial Sequence: Synthetic oligonucleotide
gauggaacguggcuccgga

SEQ ID NO: 1214928 - RNA, 19 nt, Artificial Sequence
  Description of Artificial Sequence: Synthetic oligonucleotide
cuacgguuuacuguaauaa

SEQ ID NO: 1214929 - RNA, 19 nt, Artificial Sequence
  Description of Artificial Sequence: Synthetic oligonucleotide
cagaacuuagcaccgaucu

SEQ ID NO: 1214930 - RNA, 19 nt, Artificial Sequence
  Description of Artificial Sequence: Synthetic oligonucleotide
cuucauuguaguacacaga

SEQ ID NO: 1214931 - RNA, 19 nt, Artificial Sequence
  Description of Artificial Sequence: Synthetic oligonucleotide
cagacacuuugggugaggg

SEQ ID NO: 1214932 - RNA, 19 nt, Artificial Sequence
  Description of Artificial Sequence: Synthetic oligonucleotide
ugccacauuggccggccug

SEQ ID NO: 1214933 - RNA, 19 nt, Artificial Sequence
  Description of Artificial Sequence: Synthetic oligonucleotide
uccggaggcugcagcagag

SEQ ID NO: 1214934 - RNA, 19 nt, Artificial Sequence
  Description of Artificial Sequence: Synthetic oligonucleotide
agaccugcugggugaguuc

SEQ ID NO: 1214935 - RNA, 19 nt, Artificial Sequence
  Description of Artificial Sequence: Synthetic oligonucleotide
gaacggaguccaugguccc

SEQ ID NO: 1214936 - RNA, 19 nt, Artificial Sequence
  Description of Artificial Sequence: Synthetic oligonucleotide
ucagacacuuugggugagg

SEQ ID NO: 1214937 - RNA, 19 nt, Artificial Sequence
  Description of Artificial Sequence: Synthetic oligonucleotide
uccaccaauauggcccgag

SEQ ID NO: 1214938 - RNA, 19 nt, Artificial Sequence
  Description of Artificial Sequence: Synthetic oligonucleotide
uucuuuuggcuggucucag

SEQ ID NO: 1214939 - RNA, 19 nt, Artificial Sequence
  Description of Artificial Sequence: Synthetic oligonucleotide
uggcuucaagguagguacc

SEQ ID NO: 1214940 - RNA, 19 nt, Artificial Sequence
  Description of Artificial Sequence: Synthetic oligonucleotide
gucuccaugguaggugccg

SEQ ID NO: 1214941 - RNA, 19 nt, Artificial Sequence
  Description of Artificial Sequence: Synthetic oligonucleotide
uagaguggcacacgccuuu

SEQ ID NO: 1214942 - RNA, 19 nt, Artificial Sequence
  Description of Artificial Sequence: Synthetic oligonucleotide
aacuuagcaccgaucuggu

SEQ ID NO: 1214943 - RNA, 19 nt, Artificial Sequence
  Description of Artificial Sequence: Synthetic oligonucleotide
accgagcaagaaaagauaa

SEQ ID NO: 1214944 - RNA, 19 nt, Artificial Sequence
  Description of Artificial Sequence: Synthetic oligonucleotide
aagaccugcugggugaguu

SEQ ID NO: 1214945 - RNA, 19 nt, Artificial Sequence
  Description of Artificial Sequence: Synthetic oligonucleotide
acaaaguugucuggucuga

SEQ ID NO: 1214946 - RNA, 19 nt, Artificial Sequence
  Description of Artificial Sequence: Synthetic oligonucleotide
uggucucaggcugaaggga

SEQ ID NO: 1214947 - RNA, 19 nt, Artificial Sequence
  Description of Artificial Sequence: Synthetic oligonucleotide
uggccaaaaggaccugauc

SEQ ID NO: 1214948 - RNA, 19 nt, Artificial Sequence
  Description of Artificial Sequence: Synthetic oligonucleotide
acagugagggcccgauacu

SEQ ID NO: 1214949 - RNA, 19 nt, Artificial Sequence
  Description of Artificial Sequence: Synthetic oligonucleotide
aacguggcuccggaggcug

SEQ ID NO: 1214950 - RNA, 19 nt, Artificial Sequence
  Description of Artificial Sequence: Synthetic oligonucleotide
aaauuugugcuggcuucaa

SEQ ID NO: 1214951 - RNA, 19 nt, Artificial Sequence
  Description of Artificial Sequence: Synthetic oligonucleotide
gccaccuguggcuucauug

SEQ ID NO: 1214952 - RNA, 19 nt, Artificial Sequence
  Description of Artificial Sequence: Synthetic oligonucleotide
cucucucuggcuuaggccu

SEQ ID NO: 1214953 - RNA, 19 nt, Artificial Sequence
  Description of Artificial Sequence: Synthetic oligonucleotide
acgacgcagggucucucuc

SEQ ID NO: 1214954 - RNA, 19 nt, Artificial Sequence
  Description of Artificial Sequence: Synthetic oligonucleotide
agaggggcaaagccaggca

SEQ ID NO: 1214955 - RNA, 19 nt, Artificial Sequence
  Description of Artificial Sequence: Synthetic oligonucleotide
cacgauuucccucauggcu

SEQ ID NO: 1214956 - RNA, 19 nt, Artificial Sequence
  Description of Artificial Sequence: Synthetic oligonucleotide
cgaacggaguccauggucc

SEQ ID NO: 1214957 - RNA, 19 nt, Artificial Sequence
  Description of Artificial Sequence: Synthetic oligonucleotide
cagggucucucucucuggc

SEQ ID NO: 1214958 - RNA, 19 nt, Artificial Sequence
  Description of Artificial Sequence: Synthetic oligonucleotide
ggaacguggcuccggaggc

SEQ ID NO: 1214959 - RNA, 19 nt, Artificial Sequence
  Description of Artificial Sequence: Synthetic oligonucleotide
gaagggauggaacguggcu

SEQ ID NO: 1214960 - RNA, 19 nt, Artificial Sequence
  Description of Artificial Sequence: Synthetic oligonucleotide
acgggcagcugaagaaagc

SEQ ID NO: 1214961 - RNA, 19 nt, Artificial Sequence
  Description of Artificial Sequence: Synthetic oligonucleotide
ugguugccacauuggccgg

SEQ ID NO: 1214962 - RNA, 19 nt, Artificial Sequence
  Description of Artificial Sequence: Synthetic oligonucleotide
gacagacaggguggcauug

SEQ ID NO: 1214963 - RNA, 19 nt, Artificial Sequence
  Description of Artificial Sequence: Synthetic oligonucleotide
uggcccgagggacauacuu

SEQ ID NO: 1214964 - RNA, 19 nt, Artificial Sequence
  Description of Artificial Sequence: Synthetic oligonucleotide
aggaccugaucgaacggag

SEQ ID NO: 1214965 - RNA, 19 nt, Artificial Sequence
  Description of Artificial Sequence: Synthetic oligonucleotide
auaccagaaccgguaccuc

SEQ ID NO: 1214966 - RNA, 19 nt, Artificial Sequence
  Description of Artificial Sequence: Synthetic oligonucleotide
ggcuucaagguagguaccg

SEQ ID NO: 1214967 - RNA, 19 nt, Artificial Sequence
  Description of Artificial Sequence: Synthetic oligonucleotide
aagaaagcugagggaacua

SEQ ID NO: 1214968 - RNA, 19 nt, Artificial Sequence
  Description of Artificial Sequence: Synthetic oligonucleotide
cagacugaccgaaaacaaa

SEQ ID NO: 1214969 - RNA, 19 nt, Artificial Sequence
  Description of Artificial Sequence: Synthetic oligonucleotide
gacgcagggucucucucuc

SEQ ID NO: 1214970 - RNA, 19 nt, Artificial Sequence
  Description of Artificial Sequence: Synthetic oligonucleotide
acgauuucccucauggcua

SEQ ID NO: 1214971 - RNA, 19 nt, Artificial Sequence
  Description of Artificial Sequence: Synthetic oligonucleotide
uccccgaaauccucuuccu

SEQ ID NO: 1214972 - RNA, 19 nt, Artificial Sequence
  Description of Artificial Sequence: Synthetic oligonucleotide
aucgaacggaguccauggu

SEQ ID NO: 1214973 - RNA, 19 nt, Artificial Sequence
  Description of Artificial Sequence: Synthetic oligonucleotide
acuugccaccuguggcuuc

SEQ ID NO: 1214974 - RNA, 19 nt, Artificial Sequence
  Description of Artificial Sequence: Synthetic oligonucleotide
auggaacguggcuccggag

SEQ ID NO: 1214975 - RNA, 19 nt, Artificial Sequence
  Description of Artificial Sequence: Synthetic oligonucleotide
gguaccgagcaagaaaaga

SEQ ID NO: 1214976 - RNA, 19 nt, Artificial Sequence
  Description of Artificial Sequence: Synthetic oligonucleotide
cauggcuacgguuuacugu

SEQ ID NO: 1214977 - RNA, 19 nt, Artificial Sequence
  Description of Artificial Sequence: Synthetic oligonucleotide
caauauggcccgagggaca

SEQ ID NO: 1214978 - RNA, 19 nt, Artificial Sequence
  Description of Artificial Sequence: Synthetic oligonucleotide
ucucucuggcuuaggccuc

SEQ ID NO: 1214979 - RNA, 19 nt, Artificial Sequence
  Description of Artificial Sequence: Synthetic oligonucleotide
guaccgagcaagaaaagau

SEQ ID NO: 1214980 - RNA, 19 nt, Artificial Sequence
  Description of Artificial Sequence: Synthetic oligonucleotide
gccaaaaggaccugaucga

SEQ ID NO: 1214981 - RNA, 19 nt, Artificial Sequence
  Description of Artificial Sequence: Synthetic oligonucleotide
cagugagggcccgauacug

SEQ ID NO: 1214982 - RNA, 19 nt, Artificial Sequence
  Description of Artificial Sequence: Synthetic oligonucleotide
gguuuacuguaauaaauuu

SEQ ID NO: 1214983 - RNA, 19 nt, Artificial Sequence
  Description of Artificial Sequence: Synthetic oligonucleotide
gcccgagggacauacuugc

SEQ ID NO: 1214984 - RNA, 19 nt, Artificial Sequence
  Description of Artificial Sequence: Synthetic oligonucleotide
uggcuucauuguaguacac

SEQ ID NO: 1214985 - RNA, 19 nt, Artificial Sequence
  Description of Artificial Sequence: Synthetic oligonucleotide
cauaccagaaccgguaccu

SEQ ID NO: 1214986 - RNA, 19 nt, Artificial Sequence
  Description of Artificial Sequence: Synthetic oligonucleotide
gaaccgguaccuccaccca

SEQ ID NO: 1214987 - RNA, 19 nt, Artificial Sequence
  Description of Artificial Sequence: Synthetic oligonucleotide
aguuguugccugccccaga

SEQ ID NO: 1214988 - RNA, 19 nt, Artificial Sequence
  Description of Artificial Sequence: Synthetic oligonucleotide
accagaaccgguaccucca

SEQ ID NO: 1214989 - RNA, 19 nt, Artificial Sequence
  Description of Artificial Sequence: Synthetic oligonucleotide
cagaaccgguaccuccacc

SEQ ID NO: 1214990 - RNA, 19 nt, Artificial Sequence
  Description of Artificial Sequence: Synthetic oligonucleotide
cccacggcuggugagaggg

SEQ ID NO: 1214991 - RNA, 19 nt, Artificial Sequence
  Description of Artificial Sequence: Synthetic oligonucleotide
guucaggcacagugagggc

SEQ ID NO: 1214992 - RNA, 19 nt, Artificial Sequence
  Description of Artificial Sequence: Synthetic oligonucleotide
gauuucccucauggcuacg

SEQ ID NO: 1214993 - RNA, 19 nt, Artificial Sequence
  Description of Artificial Sequence: Synthetic oligonucleotide
uuguugccugccccagacu

SEQ ID NO: 1214994 - RNA, 19 nt, Artificial Sequence
  Description of Artificial Sequence: Synthetic oligonucleotide
auuguaguacacagagauu

SEQ ID NO: 1214995 - RNA, 19 nt, Artificial Sequence
  Description of Artificial Sequence: Synthetic oligonucleotide
aaguagccugagggagacg

SEQ ID NO: 1214996 - RNA, 19 nt, Artificial Sequence
  Description of Artificial Sequence: Synthetic oligonucleotide
agggucucucucucuggcu

SEQ ID NO: 1214997 - RNA, 19 nt, Artificial Sequence
  Description of Artificial Sequence: Synthetic oligonucleotide
auggucccggguucuagau

SEQ ID NO: 1214998 - RNA, 19 nt, Artificial Sequence
  Description of Artificial Sequence: Synthetic oligonucleotide
cacggcuggugagaggggc

SEQ ID NO: 1214999 - RNA, 19 nt, Artificial Sequence
  Description of Artificial Sequence: Synthetic oligonucleotide
augguaggugccggugggg

SEQ ID NO: 1215000 - RNA, 19 nt, Artificial Sequence
  Description of Artificial Sequence: Synthetic oligonucleotide
guugccacauuggccggcc

SEQ ID NO: 1215001 - RNA, 19 nt, Artificial Sequence
  Description of Artificial Sequence: Synthetic oligonucleotide
uggucccggguucuagauc

SEQ ID NO: 1215002 - RNA, 19 nt, Artificial Sequence
  Description of Artificial Sequence: Synthetic oligonucleotide
gcugaagggauggaacgug

SEQ ID NO: 1215003 - RNA, 19 nt, Artificial Sequence
  Description of Artificial Sequence: Synthetic oligonucleotide
agggcccgauacugcuggc

SEQ ID NO: 1215004 - RNA, 19 nt, Artificial Sequence
  Description of Artificial Sequence: Synthetic oligonucleotide
agggaacuaaguagccuga

SEQ ID NO: 1215005 - RNA, 19 nt, Artificial Sequence
  Description of Artificial Sequence: Synthetic oligonucleotide
cacagagauucgguccagc

SEQ ID NO: 1215006 - RNA, 19 nt, Artificial Sequence
  Description of Artificial Sequence: Synthetic oligonucleotide
ccaugguaggugccggugg

SEQ ID NO: 1215007 - RNA, 19 nt, Artificial Sequence
  Description of Artificial Sequence: Synthetic oligonucleotide
gcaccgaucugguugccac

SEQ ID NO: 1215008 - RNA, 19 nt, Artificial Sequence
  Description of Artificial Sequence: Synthetic oligonucleotide
cgaucugguugccacauug

SEQ ID NO: 1215009 - RNA, 19 nt, Artificial Sequence
  Description of Artificial Sequence: Synthetic oligonucleotide
gcagggucucucucucugg

SEQ ID NO: 1215010 - RNA, 19 nt, Artificial Sequence
  Description of Artificial Sequence: Synthetic oligonucleotide
cauggucccggguucuaga

SEQ ID NO: 1215011 - RNA, 19 nt, Artificial Sequence
  Description of Artificial Sequence: Synthetic oligonucleotide
acagacaggguggcauugu

SEQ ID NO: 1215012 - RNA, 19 nt, Artificial Sequence
  Description of Artificial Sequence: Synthetic oligonucleotide
ucccacggcuggugagagg

SEQ ID NO: 1215013 - RNA, 19 nt, Artificial Sequence
  Description of Artificial Sequence: Synthetic oligonucleotide
agguaccgagcaagaaaag

SEQ ID NO: 1215014 - RNA, 19 nt, Artificial Sequence
  Description of Artificial Sequence: Synthetic oligonucleotide
gacugaccgaaaacaaagu

SEQ ID NO: 1215015 - RNA, 19 nt, Artificial Sequence
  Description of Artificial Sequence: Synthetic oligonucleotide
gaccgaaaacaaaguuguc

SEQ ID NO: 1215016 - RNA, 19 nt, Artificial Sequence
  Description of Artificial Sequence: Synthetic oligonucleotide
gucagacacuuugggugag

SEQ ID NO: 1215017 - RNA, 19 nt, Artificial Sequence
  Description of Artificial Sequence: Synthetic oligonucleotide
gaggggcaaagccaggcau

SEQ ID NO: 1215018 - RNA, 19 nt, Artificial Sequence
  Description of Artificial Sequence: Synthetic oligonucleotide
ggacauacuugccaccugu

SEQ ID NO: 1215019 - RNA, 19 nt, Artificial Sequence
  Description of Artificial Sequence: Synthetic oligonucleotide
gggaacuaaguagccugag

SEQ ID NO: 1215020 - RNA, 19 nt, Artificial Sequence
  Description of Artificial Sequence: Synthetic oligonucleotide
guucuagauccaccaauau

SEQ ID NO: 1215021 - RNA, 19 nt, Artificial Sequence
  Description of Artificial Sequence: Synthetic oligonucleotide
uggcucccacggcugguga

SEQ ID NO: 1215022 - RNA, 19 nt, Artificial Sequence
  Description of Artificial Sequence: Synthetic oligonucleotide
agauucgguccagcugcag

SEQ ID NO: 1215023 - RNA, 19 nt, Artificial Sequence
  Description of Artificial Sequence: Synthetic oligonucleotide
ccaccaauauggcccgagg

SEQ ID NO: 1215024 - RNA, 19 nt, Artificial Sequence
  Description of Artificial Sequence: Synthetic oligonucleotide
agacgacgcagggucucuc

SEQ ID NO: 1215025 - RNA, 19 nt, Artificial Sequence
  Description of Artificial Sequence: Synthetic oligonucleotide
acuuagcaccgaucugguu

SEQ ID NO: 1215026 - RNA, 19 nt, Artificial Sequence
  Description of Artificial Sequence: Synthetic oligonucleotide
ccagaacuuagcaccgauc

SEQ ID NO: 1215027 - RNA, 19 nt, Artificial Sequence
  Description of Artificial Sequence: Synthetic oligonucleotide
ggauggaacguggcuccgg

SEQ ID NO: 1215028 - RNA, 19 nt, Artificial Sequence
  Description of Artificial Sequence: Synthetic oligonucleotide
agguagguaccgagcaaga

SEQ ID NO: 1215029 - RNA, 19 nt, Artificial Sequence
  Description of Artificial Sequence: Synthetic oligonucleotide
cauuggccggccuggaugu

SEQ ID NO: 1215030 - RNA, 19 nt, Artificial Sequence
  Description of Artificial Sequence: Synthetic oligonucleotide
gcuacgguuuacuguaaua

SEQ ID NO: 1215031 - RNA, 19 nt, Artificial Sequence
  Description of Artificial Sequence: Synthetic oligonucleotide
gccgguggggucgaugccg

SEQ ID NO: 1215032 - RNA, 19 nt, Artificial Sequence
  Description of Artificial Sequence: Synthetic oligonucleotide
gugcuggcuucaagguagg

SEQ ID NO: 1215033 - RNA, 19 nt, Artificial Sequence
  Description of Artificial Sequence: Synthetic oligonucleotide
ugcaggucgcugucuccau

SEQ ID NO: 1215034 - RNA, 19 nt, Artificial Sequence
  Description of Artificial Sequence: Synthetic oligonucleotide
guucaucgcugaucaccuc

SEQ ID NO: 1215035 - RNA, 19 nt, Artificial Sequence
  Description of Artificial Sequence: Synthetic oligonucleotide
uacuugccaccuguggcuu

SEQ ID NO: 1215036 - RNA, 19 nt, Artificial Sequence
  Description of Artificial Sequence: Synthetic oligonucleotide
ugccccagacugaccgaaa

SEQ ID NO: 1215037 - RNA, 19 nt, Artificial Sequence
  Description of Artificial Sequence: Synthetic oligonucleotide
ggguguagaguggcacacg

SEQ ID NO: 1215038 - RNA, 19 nt, Artificial Sequence
  Description of Artificial Sequence: Synthetic oligonucleotide
uccuccccgaaauccucuu

SEQ ID NO: 1215039 - RNA, 19 nt, Artificial Sequence
  Description of Artificial Sequence: Synthetic oligonucleotide
cucccacggcuggugagag

SEQ ID NO: 1215040 - RNA, 19 nt, Artificial Sequence
  Description of Artificial Sequence: Synthetic oligonucleotide
ggcccgauacugcuggcuc

SEQ ID NO: 1215041 - RNA, 19 nt, Artificial Sequence
  Description of Artificial Sequence: Synthetic oligonucleotide
uugccacauuggccggccu

SEQ ID NO: 1215042 - RNA, 19 nt, Artificial Sequence
  Description of Artificial Sequence: Synthetic oligonucleotide
agcaccgaucugguugcca

SEQ ID NO: 1215043 - RNA, 19 nt, Artificial Sequence
  Description of Artificial Sequence: Synthetic oligonucleotide
ucccggguucuagauccac

SEQ ID NO: 1215044 - RNA, 19 nt, Artificial Sequence
  Description of Artificial Sequence: Synthetic oligonucleotide
cccauaccagaaccgguac

SEQ ID NO: 1215045 - RNA, 19 nt, Artificial Sequence
  Description of Artificial Sequence: Synthetic oligonucleotide
gacgacgcagggucucucu

SEQ ID NO: 1215046 - RNA, 19 nt, Artificial Sequence
  Description of Artificial Sequence: Synthetic oligonucleotide
cugcaggucgcugucucca

SEQ ID NO: 1215047 - RNA, 19 nt, Artificial Sequence
  Description of Artificial Sequence: Synthetic oligonucleotide
gagauucgguccagcugca

SEQ ID NO: 1215048 - RNA, 19 nt, Artificial Sequence
  Description of Artificial Sequence: Synthetic oligonucleotide
ggcccgagggacauacuug

SEQ ID NO: 1215049 - RNA, 19 nt, Artificial Sequence
  Description of Artificial Sequence: Synthetic oligonucleotide
guugccugccccagacuga

SEQ ID NO: 1215050 - RNA, 19 nt, Artificial Sequence
  Description of Artificial Sequence: Synthetic oligonucleotide
gcccgauacugcuggcucc

SEQ ID NO: 1215051 - RNA, 19 nt, Artificial Sequence
  Description of Artificial Sequence: Synthetic oligonucleotide
uggggucgaugccguguuc

SEQ ID NO: 1215052 - RNA, 19 nt, Artificial Sequence
  Description of Artificial Sequence: Synthetic oligonucleotide
caaaguugucuggucugaa

SEQ ID NO: 1215053 - RNA, 19 nt, Artificial Sequence
  Description of Artificial Sequence: Synthetic oligonucleotide
cccgaaauccucuuccucu

SEQ ID NO: 1215054 - RNA, 19 nt, Artificial Sequence
  Description of Artificial Sequence: Synthetic oligonucleotide
acgcagggucucucucucu

SEQ ID NO: 1215055 - RNA, 19 nt, Artificial Sequence
  Description of Artificial Sequence: Synthetic oligonucleotide
cuggcucccacggcuggug

SEQ ID NO: 1215056 - RNA, 19 nt, Artificial Sequence
  Description of Artificial Sequence: Synthetic oligonucleotide
gguaggugccggugggguc

SEQ ID NO: 1215057 - RNA, 19 nt, Artificial Sequence
  Description of Artificial Sequence: Synthetic oligonucleotide
aucuggccaaaaggaccug

SEQ ID NO: 1215058 - RNA, 19 nt, Artificial Sequence
  Description of Artificial Sequence: Synthetic oligonucleotide
ggcucccacggcuggugag

SEQ ID NO: 1215059 - RNA, 19 nt, Artificial Sequence
  Description of Artificial Sequence: Synthetic oligonucleotide
gguagguaccgagcaagaa

SEQ ID NO: 1215060 - RNA, 19 nt, Artificial Sequence
  Description of Artificial Sequence: Synthetic oligonucleotide
cagaggcagcagaaagaaa

SEQ ID NO: 1215061 - RNA, 19 nt, Artificial Sequence
  Description of Artificial Sequence: Synthetic oligonucleotide
ggcuuaggccucuucuucu

SEQ ID NO: 1215062 - RNA, 19 nt, Artificial Sequence
  Description of Artificial Sequence: Synthetic oligonucleotide
ggggucgaugccguguuca

SEQ ID NO: 1215063 - RNA, 19 nt, Artificial Sequence
  Description of Artificial Sequence: Synthetic oligonucleotide
ccccagacugaccgaaaac

SEQ ID NO: 1215064 - RNA, 19 nt, Artificial Sequence
  Description of Artificial Sequence: Synthetic oligonucleotide
gcuggcuucaagguaggua

SEQ ID NO: 1215065 - RNA, 19 nt, Artificial Sequence
  Description of Artificial Sequence: Synthetic oligonucleotide
ccugaucgaacggagucca

SEQ ID NO: 1215066 - RNA, 19 nt, Artificial Sequence
  Description of Artificial Sequence: Synthetic oligonucleotide
cucauggcuacgguuuacu

SEQ ID NO: 1215067 - RNA, 19 nt, Artificial Sequence
  Description of Artificial Sequence: Synthetic oligonucleotide
cccgauacugcuggcuccc

SEQ ID NO: 1215068 - RNA, 19 nt, Artificial Sequence
  Description of Artificial Sequence: Synthetic oligonucleotide
gggauggaacguggcuccg

SEQ ID NO: 1215069 - RNA, 19 nt, Artificial Sequence
  Description of Artificial Sequence: Synthetic oligonucleotide
cuggccaaaaggaccugau

SEQ ID NO: 1215070 - RNA, 19 nt, Artificial Sequence
  Description of Artificial Sequence: Synthetic oligonucleotide
gguugccacauuggccggc

SEQ ID NO: 1215071 - RNA, 19 nt, Artificial Sequence
  Description of Artificial Sequence: Synthetic oligonucleotide
cuggcuuaggccucuucuu

SEQ ID NO: 1215072 - RNA, 19 nt, Artificial Sequence
  Description of Artificial Sequence: Synthetic oligonucleotide
cccgagggacauacuugcc

SEQ ID NO: 1215073 - RNA, 19 nt, Artificial Sequence
  Description of Artificial Sequence: Synthetic oligonucleotide
accugcugggugaguucag

SEQ ID NO: 1215074 - RNA, 19 nt, Artificial Sequence
  Description of Artificial Sequence: Synthetic oligonucleotide
ggagacgacgcagggucuc

SEQ ID NO: 1215075 - RNA, 19 nt, Artificial Sequence
  Description of Artificial Sequence: Synthetic oligonucleotide
uagcaccgaucugguugcc

SEQ ID NO: 1215076 - RNA, 19 nt, Artificial Sequence
  Description of Artificial Sequence: Synthetic oligonucleotide
gagggagacgacgcagggu

SEQ ID NO: 1215077 - RNA, 19 nt, Artificial Sequence
  Description of Artificial Sequence: Synthetic oligonucleotide
ccaaaaggaccugaucgaa

SEQ ID NO: 1215078 - RNA, 19 nt, Artificial Sequence
  Description of Artificial Sequence: Synthetic oligonucleotide
auuggccggccuggaugug

SEQ ID NO: 1215079 - RNA, 19 nt, Artificial Sequence
  Description of Artificial Sequence: Synthetic oligonucleotide
ccccgaaauccucuuccuc

SEQ ID NO: 1215080 - RNA, 19 nt, Artificial Sequence
  Description of Artificial Sequence: Synthetic oligonucleotide
ccagaaccgguaccuccac

SEQ ID NO: 1215081 - RNA, 19 nt, Artificial Sequence
  Description of Artificial Sequence: Synthetic oligonucleotide
cgagcaagaaaagauaauu

SEQ ID NO: 1215082 - RNA, 19 nt, Artificial Sequence
  Description of Artificial Sequence: Synthetic oligonucleotide
cuccuccccgaaauccucu

SEQ ID NO: 1215083 - RNA, 19 nt, Artificial Sequence
  Description of Artificial Sequence: Synthetic oligonucleotide
gagacgacgcagggucucu

SEQ ID NO: 1215084 - RNA, 19 nt, Artificial Sequence
  Description of Artificial Sequence: Synthetic oligonucleotide
cugccccagacugaccgaa

SEQ ID NO: 1215085 - RNA, 19 nt, Artificial Sequence
  Description of Artificial Sequence: Synthetic oligonucleotide
gaacguggcuccggaggcu

SEQ ID NO: 1215086 - RNA, 19 nt, Artificial Sequence
  Description of Artificial Sequence: Synthetic oligonucleotide
ccauggucccggguucuag

SEQ ID NO: 1215087 - RNA, 19 nt, Artificial Sequence
  Description of Artificial Sequence: Synthetic oligonucleotide
caucgaagaccugcugggu

SEQ ID NO: 1215088 - RNA, 19 nt, Artificial Sequence
  Description of Artificial Sequence: Synthetic oligonucleotide
cgguuuacuguaauaaauu

SEQ ID NO: 1215089 - RNA, 19 nt, Artificial Sequence
  Description of Artificial Sequence: Synthetic oligonucleotide
ggucucaggcugaagggau

SEQ ID NO: 1215090 - RNA, 19 nt, Artificial Sequence
  Description of Artificial Sequence: Synthetic oligonucleotide
ggcugaagggauggaacgu

SEQ ID NO: 1215091 - RNA, 19 nt, Artificial Sequence
  Description of Artificial Sequence: Synthetic oligonucleotide
ccacggcuggugagagggg

SEQ ID NO: 1215092 - RNA, 19 nt, Artificial Sequence
  Description of Artificial Sequence: Synthetic oligonucleotide
guagaguggcacacgccuu

SEQ ID NO: 1215093 - RNA, 19 nt, Artificial Sequence
  Description of Artificial Sequence: Synthetic oligonucleotide
gguggggucgaugccgugu

SEQ ID NO: 1215094 - RNA, 19 nt, Artificial Sequence
  Description of Artificial Sequence: Synthetic oligonucleotide
ccucauggcuacgguuuac

SEQ ID NO: 1215095 - RNA, 19 nt, Artificial Sequence
  Description of Artificial Sequence: Synthetic oligonucleotide
gcucccacggcuggugaga

SEQ ID NO: 1215096 - RNA, 19 nt, Artificial Sequence
  Description of Artificial Sequence: Synthetic oligonucleotide
ccuccccgaaauccucuuc

SEQ ID NO: 1215097 - RNA, 19 nt, Artificial Sequence
  Description of Artificial Sequence: Synthetic oligonucleotide
auccaccaauauggcccga

SEQ ID NO: 1215098 - RNA, 19 nt, Artificial Sequence
  Description of Artificial Sequence: Synthetic oligonucleotide
gaagaccugcugggugagu

SEQ ID NO: 1215099 - RNA, 19 nt, Artificial Sequence
  Description of Artificial Sequence: Synthetic oligonucleotide
aggcacagugagggcccga

SEQ ID NO: 1215100 - RNA, 19 nt, Artificial Sequence
  Description of Artificial Sequence: Synthetic oligonucleotide
cgaagaccugcugggugag

SEQ ID NO: 1215101 - RNA, 19 nt, Artificial Sequence
  Description of Artificial Sequence: Synthetic oligonucleotide
ggcuggucucaggcugaag

SEQ ID NO: 1215102 - RNA, 19 nt, Artificial Sequence
  Description of Artificial Sequence: Synthetic oligonucleotide
ccgagcaagaaaagauaau

SEQ ID NO: 1215103 - RNA, 19 nt, Artificial Sequence
  Description of Artificial Sequence: Synthetic oligonucleotide
auggcccgagggacauacu

SEQ ID NO: 1215104 - RNA, 19 nt, Artificial Sequence
  Description of Artificial Sequence: Synthetic oligonucleotide
ggaccugaucgaacggagu

SEQ ID NO: 1215105 - RNA, 19 nt, Artificial Sequence
  Description of Artificial Sequence: Synthetic oligonucleotide
auauggcccgagggacaua

SEQ ID NO: 1215106 - RNA, 19 nt, Artificial Sequence
  Description of Artificial Sequence: Synthetic oligonucleotide
uugccaccuguggcuucau

SEQ ID NO: 1215107 - RNA, 19 nt, Artificial Sequence
  Description of Artificial Sequence: Synthetic oligonucleotide
guccauggucccggguucu

SEQ ID NO: 1215108 - RNA, 19 nt, Artificial Sequence
  Description of Artificial Sequence: Synthetic oligonucleotide
cacauuggccggccuggau

SEQ ID NO: 1215109 - RNA, 19 nt, Artificial Sequence
  Description of Artificial Sequence: Synthetic oligonucleotide
gucccggguucuagaucca

SEQ ID NO: 1215110 - RNA, 19 nt, Artificial Sequence
  Description of Artificial Sequence: Synthetic oligonucleotide
cugaucgaacggaguccau

SEQ ID NO: 1215111 - RNA, 19 nt, Artificial Sequence
  Description of Artificial Sequence: Synthetic oligonucleotide
cucucuggcuuaggccucu

SEQ ID NO: 1215112 - RNA, 19 nt, Artificial Sequence
  Description of Artificial Sequence: Synthetic oligonucleotide
ccugccccagacugaccga

SEQ ID NO: 1215113 - RNA, 19 nt, Artificial Sequence
  Description of Artificial Sequence: Synthetic oligonucleotide
ccgaaauccucuuccucuu

SEQ ID NO: 1215114 - RNA, 19 nt, Artificial Sequence
  Description of Artificial Sequence: Synthetic oligonucleotide
cccagaacuuagcaccgau

SEQ ID NO: 1215115 - RNA, 19 nt, Artificial Sequence
  Description of Artificial Sequence: Synthetic oligonucleotide
gcacagugagggcccgaua

SEQ ID NO: 1215116 - RNA, 19 nt, Artificial Sequence
  Description of Artificial Sequence: Synthetic oligonucleotide
ggcacagugagggcccgau

SEQ ID NO: 1215117 - RNA, 19 nt, Artificial Sequence
  Description of Artificial Sequence: Synthetic oligonucleotide
cccucauggcuacgguuua

SEQ ID NO: 1215118 - RNA, 19 nt, Artificial Sequence
  Description of Artificial Sequence: Synthetic oligonucleotide
cgggcagcugaagaaagcu

SEQ ID NO: 1215119 - RNA, 19 nt, Artificial Sequence
  Description of Artificial Sequence: Synthetic oligonucleotide
gggcccgauacugcuggcu

SEQ ID NO: 1215120 - RNA, 19 nt, Artificial Sequence
  Description of Artificial Sequence: Synthetic oligonucleotide
gggagacgacgcagggucu

SEQ ID NO: 1215121 - RNA, 19 nt, Artificial Sequence
  Description of Artificial Sequence: Synthetic oligonucleotide
cgacgcagggucucucucu

SEQ ID NO: 1215122 - RNA, 19 nt, Artificial Sequence
  Description of Artificial Sequence: Synthetic oligonucleotide
ccgguggggucgaugccgu

SEQ ID NO: 1215123 - RNA, 19 nt, Artificial Sequence
  Description of Artificial Sequence: Synthetic oligonucleotide
ccgauacugcuggcuccca

SEQ ID NO: 1215124 - RNA, 19 nt, Artificial Sequence
  Description of Artificial Sequence: Synthetic oligonucleotide
aggugccgguggggucgau

SEQ ID NO: 1215125 - RNA, 19 nt, Artificial Sequence
  Description of Artificial Sequence: Synthetic oligonucleotide
cgcugucuccaugguaggu

SEQ ID NO: 1215126 - RNA, 19 nt, Artificial Sequence
  Description of Artificial Sequence: Synthetic oligonucleotide
ccgaucugguugccacauu

SEQ ID NO: 1215127 - RNA, 19 nt, Artificial Sequence
  Description of Artificial Sequence: Synthetic oligonucleotide
cggccuggaugugcacgau

SEQ ID NO: 1215128 - RNA, 19 nt, Artificial Sequence
  Description of Artificial Sequence: Synthetic oligonucleotide
aauuuaucuaucccaaugc

SEQ ID NO: 1215129 - RNA, 19 nt, Artificial Sequence
  Description of Artificial Sequence: Synthetic oligonucleotide
uauuauauuaaauugcacc

SEQ ID NO: 1215130 - RNA, 19 nt, Artificial Sequence
  Description of Artificial Sequence: Synthetic oligonucleotide
aauuauucuuucuuauggc

SEQ ID NO: 1215131 - RNA, 19 nt, Artificial Sequence
  Description of Artificial Sequence: Synthetic oligonucleotide
aagguuagcaacaagagac

SEQ ID NO: 1215132 - RNA, 19 nt, Artificial Sequence
  Description of Artificial Sequence: Synthetic oligonucleotide
uuaaugagaaucaugguug

SEQ ID NO: 1215133 - RNA, 19 nt, Artificial Sequence
  Description of Artificial Sequence: Synthetic oligonucleotide
aaguucaaagugaagaucc

SEQ ID NO: 1215134 - RNA, 19 nt, Artificial Sequence
  Description of Artificial Sequence: Synthetic oligonucleotide
ugaauuuacaaacaaugga

SEQ ID NO: 1215135 - RNA, 19 nt, Artificial Sequence
  Description of Artificial Sequence: Synthetic oligonucleotide
auuauauuaaauugcaccu

SEQ ID NO: 1215136 - RNA, 19 nt, Artificial Sequence
  Description of Artificial Sequence: Synthetic oligonucleotide
aucauauauauauauauga

SEQ ID NO: 1215137 - RNA, 19 nt, Artificial Sequence
  Description of Artificial Sequence: Synthetic oligonucleotide
uuaucauauauauauauau

SEQ ID NO: 1215138 - RNA, 19 nt, Artificial Sequence
  Description of Artificial Sequence: Synthetic oligonucleotide
uccaucauaugucugaaag

SEQ ID NO: 1215139 - RNA, 19 nt, Artificial Sequence
  Description of Artificial Sequence: Synthetic oligonucleotide
ucuacuacagcagagaugu

SEQ ID NO: 1215140 - RNA, 19 nt, Artificial Sequence
  Description of Artificial Sequence: Synthetic oligonucleotide
aagaccacgguccucggcc

SEQ ID NO: 1215141 - RNA, 19 nt, Artificial Sequence
  Description of Artificial Sequence: Synthetic oligonucleotide
agaacuggcuaauaaacgg

SEQ ID NO: 1215142 - RNA, 19 nt, Artificial Sequence
  Description of Artificial Sequence: Synthetic oligonucleotide
aaugcauccaaagaagguc

SEQ ID NO: 1215143 - RNA, 19 nt, Artificial Sequence
  Description of Artificial Sequence: Synthetic oligonucleotide
aaaccaauuaauuuacuaa

SEQ ID NO: 1215144 - RNA, 19 nt, Artificial Sequence
  Description of Artificial Sequence: Synthetic oligonucleotide
uaauaaacggugcagacaa

SEQ ID NO: 1215145 - RNA, 19 nt, Artificial Sequence
  Description of Artificial Sequence: Synthetic oligonucleotide
caaugaagagcuuaugugg

SEQ ID NO: 1215146 - RNA, 19 nt, Artificial Sequence
  Description of Artificial Sequence: Synthetic oligonucleotide
ugugcauauacauaccucc

SEQ ID NO: 1215147 - RNA, 19 nt, Artificial Sequence
  Description of Artificial Sequence: Synthetic oligonucleotide
ugucuuuagucucaaagcc

SEQ ID NO: 1215148 - RNA, 19 nt, Artificial Sequence
  Description of Artificial Sequence: Synthetic oligonucleotide
acauuuaagaggcacuaac

SEQ ID NO: 1215149 - RNA, 19 nt, Artificial Sequence
  Description of Artificial Sequence: Synthetic oligonucleotide
uaucauauauauauauaug

SEQ ID NO: 1215150 - RNA, 19 nt, Artificial Sequence
  Description of Artificial Sequence: Synthetic oligonucleotide
ucauauauauauauaugac

SEQ ID NO: 1215151 - RNA, 19 nt, Artificial Sequence
  Description of Artificial Sequence: Synthetic oligonucleotide
acaaauuauggaaauaaac

SEQ ID NO: 1215152 - RNA, 19 nt, Artificial Sequence
  Description of Artificial Sequence: Synthetic oligonucleotide
uuggcuaucucuuuaaugu

SEQ ID NO: 1215153 - RNA, 19 nt, Artificial Sequence
  Description of Artificial Sequence: Synthetic oligonucleotide
auauauauauaugacaugu

SEQ ID NO: 1215154 - RNA, 19 nt, Artificial Sequence
  Description of Artificial Sequence: Synthetic oligonucleotide
ucagcgaauacuuaucaag

SEQ ID NO: 1215155 - RNA, 19 nt, Artificial Sequence
  Description of Artificial Sequence: Synthetic oligonucleotide
ugaauuuucuuacaaguuc

SEQ ID NO: 1215156 - RNA, 19 nt, Artificial Sequence
  Description of Artificial Sequence: Synthetic oligonucleotide
uaugucugaaagcacaaug

SEQ ID NO: 1215157 - RNA, 19 nt, Artificial Sequence
  Description of Artificial Sequence: Synthetic oligonucleotide
uuaauugaauucuggguag

SEQ ID NO: 1215158 - RNA, 19 nt, Artificial Sequence
  Description of Artificial Sequence: Synthetic oligonucleotide
aaccaauuaauuuacuaaa

SEQ ID NO: 1215159 - RNA, 19 nt, Artificial Sequence
  Description of Artificial Sequence: Synthetic oligonucleotide
aaugacacuugcugcauag

SEQ ID NO: 1215160 - RNA, 19 nt, Artificial Sequence
  Description of Artificial Sequence: Synthetic oligonucleotide
aaaauagcaguacaauuau

SEQ ID NO: 1215161 - RNA, 19 nt, Artificial Sequence
  Description of Artificial Sequence: Synthetic oligonucleotide
uauucuuucuuauggcagg

SEQ ID NO: 1215162 - RNA, 19 nt, Artificial Sequence
  Description of Artificial Sequence: Synthetic oligonucleotide
aaacggugcagacaaguuc

SEQ ID NO: 1215163 - RNA, 19 nt, Artificial Sequence
  Description of Artificial Sequence: Synthetic oligonucleotide
aauuuggugugauaaacau

SEQ ID NO: 1215164 - RNA, 19 nt, Artificial Sequence
  Description of Artificial Sequence: Synthetic oligonucleotide
uuaucuaucccaaugcauc

SEQ ID NO: 1215165 - RNA, 19 nt, Artificial Sequence
  Description of Artificial Sequence: Synthetic oligonucleotide
aaaaccaauuaauuuacua

SEQ ID NO: 1215166 - RNA, 19 nt, Artificial Sequence
  Description of Artificial Sequence: Synthetic oligonucleotide
gaggaugucaacauaaggc

SEQ ID NO: 1215167 - RNA, 19 nt, Artificial Sequence
  Description of Artificial Sequence: Synthetic oligonucleotide
auacuuaucaaggaaaucu

SEQ ID NO: 1215168 - RNA, 19 nt, Artificial Sequence
  Description of Artificial Sequence: Synthetic oligonucleotide
gacuaaagguucuaggagc

SEQ ID NO: 1215169 - RNA, 19 nt, Artificial Sequence
  Description of Artificial Sequence: Synthetic oligonucleotide
acaaugaagagcuuaugug

SEQ ID NO: 1215170 - RNA, 19 nt, Artificial Sequence
  Description of Artificial Sequence: Synthetic oligonucleotide
guaaugggcauccacgugg

SEQ ID NO: 1215171 - RNA, 19 nt, Artificial Sequence
  Description of Artificial Sequence: Synthetic oligonucleotide
auauauauauauaugacau

SEQ ID NO: 1215172 - RNA, 19 nt, Artificial Sequence
  Description of Artificial Sequence: Synthetic oligonucleotide
aaagccuugcucucgagca

SEQ ID NO: 1215173 - RNA, 19 nt, Artificial Sequence
  Description of Artificial Sequence: Synthetic oligonucleotide
aacacuuaggacgagguca

SEQ ID NO: 1215174 - RNA, 19 nt, Artificial Sequence
  Description of Artificial Sequence: Synthetic oligonucleotide
cuuguuauagaccaguuga

SEQ ID NO: 1215175 - RNA, 19 nt, Artificial Sequence
  Description of Artificial Sequence: Synthetic oligonucleotide
cauauauauauauaugaca

SEQ ID NO: 1215176 - RNA, 19 nt, Artificial Sequence
  Description of Artificial Sequence: Synthetic oligonucleotide
uuacucuucagaaucuccc

SEQ ID NO: 1215177 - RNA, 19 nt, Artificial Sequence
  Description of Artificial Sequence: Synthetic oligonucleotide
aaaucaagaugcuuuuccu

SEQ ID NO: 1215178 - RNA, 19 nt, Artificial Sequence
  Description of Artificial Sequence: Synthetic oligonucleotide
uauauauauauaugacaug

SEQ ID NO: 1215179 - RNA, 19 nt, Artificial Sequence
  Description of Artificial Sequence: Synthetic oligonucleotide
uuucaauacugacucuggg

SEQ ID NO: 1215180 - RNA, 19 nt, Artificial Sequence
  Description of Artificial Sequence: Synthetic oligonucleotide
cuuaucaaggaaaucuuug

SEQ ID NO: 1215181 - RNA, 19 nt, Artificial Sequence
  Description of Artificial Sequence: Synthetic oligonucleotide
accuuaucuaguuauccgg

SEQ ID NO: 1215182 - RNA, 19 nt, Artificial Sequence
  Description of Artificial Sequence: Synthetic oligonucleotide
cuuugcaagagccugugcc

SEQ ID NO: 1215183 - RNA, 19 nt, Artificial Sequence
  Description of Artificial Sequence: Synthetic oligonucleotide
aauaauuuggugugauaaa

SEQ ID NO: 1215184 - RNA, 19 nt, Artificial Sequence
  Description of Artificial Sequence: Synthetic oligonucleotide
aaagguacagccaguucgc

SEQ ID NO: 1215185 - RNA, 19 nt, Artificial Sequence
  Description of Artificial Sequence: Synthetic oligonucleotide
aagaacuggcuaauaaacg

SEQ ID NO: 1215186 - RNA, 19 nt, Artificial Sequence
  Description of Artificial Sequence: Synthetic oligonucleotide
agcaacuuucaauacugac

SEQ ID NO: 1215187 - RNA, 19 nt, Artificial Sequence
  Description of Artificial Sequence: Synthetic oligonucleotide
uaauuuggugugauaaaca

SEQ ID NO: 1215188 - RNA, 19 nt, Artificial Sequence
  Description of Artificial Sequence: Synthetic oligonucleotide
augaauuuacaaacaaugg

SEQ ID NO: 1215189 - RNA, 19 nt, Artificial Sequence
  Description of Artificial Sequence: Synthetic oligonucleotide
uuauguggaauaauuuggu

SEQ ID NO: 1215190 - RNA, 19 nt, Artificial Sequence
  Description of Artificial Sequence: Synthetic oligonucleotide
cuuugaauuuucuuacaag

SEQ ID NO: 1215191 - RNA, 19 nt, Artificial Sequence
  Description of Artificial Sequence: Synthetic oligonucleotide
uuugucuacuacagcagag

SEQ ID NO: 1215192 - RNA, 19 nt, Artificial Sequence
  Description of Artificial Sequence: Synthetic oligonucleotide
auccaaagaaggucgcugc

SEQ ID NO: 1215193 - RNA, 19 nt, Artificial Sequence
  Description of Artificial Sequence: Synthetic oligonucleotide
uuauagaccaguugagaga

SEQ ID NO: 1215194 - RNA, 19 nt, Artificial Sequence
  Description of Artificial Sequence: Synthetic oligonucleotide
uaaugagaaucaugguugg

SEQ ID NO: 1215195 - RNA, 19 nt, Artificial Sequence
  Description of Artificial Sequence: Synthetic oligonucleotide
agacuaaagguucuaggag

SEQ ID NO: 1215196 - RNA, 19 nt, Artificial Sequence
  Description of Artificial Sequence: Synthetic oligonucleotide
uaccuuaucuaguuauccg

SEQ ID NO: 1215197 - RNA, 19 nt, Artificial Sequence
  Description of Artificial Sequence: Synthetic oligonucleotide
acuaaauacagaugaauuu

SEQ ID NO: 1215198 - RNA, 19 nt, Artificial Sequence
  Description of Artificial Sequence: Synthetic oligonucleotide
auaguaaugggcauccacg

SEQ ID NO: 1215199 - RNA, 19 nt, Artificial Sequence
  Description of Artificial Sequence: Synthetic oligonucleotide
uuuggcuaucucuuuaaug

SEQ ID NO: 1215200 - RNA, 19 nt, Artificial Sequence
  Description of Artificial Sequence: Synthetic oligonucleotide
uuucagcgaauacuuauca

SEQ ID NO: 1215201 - RNA, 19 nt, Artificial Sequence
  Description of Artificial Sequence: Synthetic oligonucleotide
uauguaguauacucuggcc

SEQ ID NO: 1215202 - RNA, 19 nt, Artificial Sequence
  Description of Artificial Sequence: Synthetic oligonucleotide
gaauaauuuggugugauaa

SEQ ID NO: 1215203 - RNA, 19 nt, Artificial Sequence
  Description of Artificial Sequence: Synthetic oligonucleotide
uuguuauagaccaguugag

SEQ ID NO: 1215204 - RNA, 19 nt, Artificial Sequence
  Description of Artificial Sequence: Synthetic oligonucleotide
cuauguaguauacucuggc

SEQ ID NO: 1215205 - RNA, 19 nt, Artificial Sequence
  Description of Artificial Sequence: Synthetic oligonucleotide
ucgaguucaccuuugcaag

SEQ ID NO: 1215206 - RNA, 19 nt, Artificial Sequence
  Description of Artificial Sequence: Synthetic oligonucleotide
cagcgaauacuuaucaagg

SEQ ID NO: 1215207 - RNA, 19 nt, Artificial Sequence
  Description of Artificial Sequence: Synthetic oligonucleotide
gauuccuugaagaacuggc

SEQ ID NO: 1215208 - RNA, 19 nt, Artificial Sequence
  Description of Artificial Sequence: Synthetic oligonucleotide
uuagcaacaagagaccugu

SEQ ID NO: 1215209 - RNA, 19 nt, Artificial Sequence
  Description of Artificial Sequence: Synthetic oligonucleotide
uucgaguucaccuuugcaa

SEQ ID NO: 1215210 - RNA, 19 nt, Artificial Sequence
  Description of Artificial Sequence: Synthetic oligonucleotide
ugauccaagacagcaaaag

SEQ ID NO: 1215211 - RNA, 19 nt, Artificial Sequence
  Description of Artificial Sequence: Synthetic oligonucleotide
uuugacauuuaagaggcac

SEQ ID NO: 1215212 - RNA, 19 nt, Artificial Sequence
  Description of Artificial Sequence: Synthetic oligonucleotide
auuaaauugcaccuguauu

SEQ ID NO: 1215213 - RNA, 19 nt, Artificial Sequence
  Description of Artificial Sequence: Synthetic oligonucleotide
ucuuauggcaggaacacuu

SEQ ID NO: 1215214 - RNA, 19 nt, Artificial Sequence
  Description of Artificial Sequence: Synthetic oligonucleotide
uuauauuaaauugcaccug

SEQ ID NO: 1215215 - RNA, 19 nt, Artificial Sequence
  Description of Artificial Sequence: Synthetic oligonucleotide
aagaggauuccccauucca

SEQ ID NO: 1215216 - RNA, 19 nt, Artificial Sequence
  Description of Artificial Sequence: Synthetic oligonucleotide
uuccccauuccaaacaaca

SEQ ID NO: 1215217 - RNA, 19 nt, Artificial Sequence
  Description of Artificial Sequence: Synthetic oligonucleotide
aaugagaaucaugguuggc

SEQ ID NO: 1215218 - RNA, 19 nt, Artificial Sequence
  Description of Artificial Sequence: Synthetic oligonucleotide
cuuucaauacugacucugg

SEQ ID NO: 1215219 - RNA, 19 nt, Artificial Sequence
  Description of Artificial Sequence: Synthetic oligonucleotide
uugaagaacuggcuaauaa

SEQ ID NO: 1215220 - RNA, 19 nt, Artificial Sequence
  Description of Artificial Sequence: Synthetic oligonucleotide
ugcucucgagcaaaagugg

SEQ ID NO: 1215221 - RNA, 19 nt, Artificial Sequence
  Description of Artificial Sequence: Synthetic oligonucleotide
gauccuguuguucucagca

SEQ ID NO: 1215222 - RNA, 19 nt, Artificial Sequence
  Description of Artificial Sequence: Synthetic oligonucleotide
uauguggaauaauuuggug

SEQ ID NO: 1215223 - RNA, 19 nt, Artificial Sequence
  Description of Artificial Sequence: Synthetic oligonucleotide
uuuguaacaguuggcagca

SEQ ID NO: 1215224 - RNA, 19 nt, Artificial Sequence
  Description of Artificial Sequence: Synthetic oligonucleotide
cuuuaaugucuuuagucuc

SEQ ID NO: 1215225 - RNA, 19 nt, Artificial Sequence
  Description of Artificial Sequence: Synthetic oligonucleotide
cuuuuguaacaguuggcag

SEQ ID NO: 1215226 - RNA, 19 nt, Artificial Sequence
  Description of Artificial Sequence: Synthetic oligonucleotide
ggugcagacaaguucaaag

SEQ ID NO: 1215227 - RNA, 19 nt, Artificial Sequence
  Description of Artificial Sequence: Synthetic oligonucleotide
augcaugcagcgcagguuc

SEQ ID NO: 1215228 - RNA, 19 nt, Artificial Sequence
  Description of Artificial Sequence: Synthetic oligonucleotide
gaccaguugagagagaaac

SEQ ID NO: 1215229 - RNA, 19 nt, Artificial Sequence
  Description of Artificial Sequence: Synthetic oligonucleotide
gguucuaggagcaauacug

SEQ ID NO: 1215230 - RNA, 19 nt, Artificial Sequence
  Description of Artificial Sequence: Synthetic oligonucleotide
uuauccgguuaucauauau

SEQ ID NO: 1215231 - RNA, 19 nt, Artificial Sequence
  Description of Artificial Sequence: Synthetic oligonucleotide
agcaacaagagaccuguug

SEQ ID NO: 1215232 - RNA, 19 nt, Artificial Sequence
  Description of Artificial Sequence: Synthetic oligonucleotide
ucuaguuauccgguuauca

SEQ ID NO: 1215233 - RNA, 19 nt, Artificial Sequence
  Description of Artificial Sequence: Synthetic oligonucleotide
ugacaugugugcauauaca

SEQ ID NO: 1215234 - RNA, 19 nt, Artificial Sequence
  Description of Artificial Sequence: Synthetic oligonucleotide
aaacccuccaacaaaugca

SEQ ID NO: 1215235 - RNA, 19 nt, Artificial Sequence
  Description of Artificial Sequence: Synthetic oligonucleotide
cuuaggacgaggucacugc

SEQ ID NO: 1215236 - RNA, 19 nt, Artificial Sequence
  Description of Artificial Sequence: Synthetic oligonucleotide
uaaugggcauccacguggg

SEQ ID NO: 1215237 - RNA, 19 nt, Artificial Sequence
  Description of Artificial Sequence: Synthetic oligonucleotide
cauaccuccaaauuaaaua

SEQ ID NO: 1215238 - RNA, 19 nt, Artificial Sequence
  Description of Artificial Sequence: Synthetic oligonucleotide
aacaagagaccuguuguca

SEQ ID NO: 1215239 - RNA, 19 nt, Artificial Sequence
  Description of Artificial Sequence: Synthetic oligonucleotide
uuuagucucaaagccuugc

SEQ ID NO: 1215240 - RNA, 19 nt, Artificial Sequence
  Description of Artificial Sequence: Synthetic oligonucleotide
uguuauagaccaguugaga

SEQ ID NO: 1215241 - RNA, 19 nt, Artificial Sequence
  Description of Artificial Sequence: Synthetic oligonucleotide
uaucuaguuauccgguuau

SEQ ID NO: 1215242 - RNA, 19 nt, Artificial Sequence
  Description of Artificial Sequence: Synthetic oligonucleotide
uccccaaauuuaucuaucc

SEQ ID NO: 1215243 - RNA, 19 nt, Artificial Sequence
  Description of Artificial Sequence: Synthetic oligonucleotide
ugagaaucaugguuggcaa

SEQ ID NO: 1215244 - RNA, 19 nt, Artificial Sequence
  Description of Artificial Sequence: Synthetic oligonucleotide
agcaagguuagcaacaaga

SEQ ID NO: 1215245 - RNA, 19 nt, Artificial Sequence
  Description of Artificial Sequence: Synthetic oligonucleotide
uacucuucagaaucucccc

SEQ ID NO: 1215246 - RNA, 19 nt, Artificial Sequence
  Description of Artificial Sequence: Synthetic oligonucleotide
gugaagaccacgguccucg

SEQ ID NO: 1215247 - RNA, 19 nt, Artificial Sequence
  Description of Artificial Sequence: Synthetic oligonucleotide
uuucuguaccuuaucuagu

SEQ ID NO: 1215248 - RNA, 19 nt, Artificial Sequence
  Description of Artificial Sequence: Synthetic oligonucleotide
ugcauauacauaccuccaa

SEQ ID NO: 1215249 - RNA, 19 nt, Artificial Sequence
  Description of Artificial Sequence: Synthetic oligonucleotide
auccgguuaucauauauau

SEQ ID NO: 1215250 - RNA, 19 nt, Artificial Sequence
  Description of Artificial Sequence: Synthetic oligonucleotide
auaaggcaugacuuccauc

SEQ ID NO: 1215251 - RNA, 19 nt, Artificial Sequence
  Description of Artificial Sequence: Synthetic oligonucleotide
uagcgagcaacuuucaaua

SEQ ID NO: 1215252 - RNA, 19 nt, Artificial Sequence
  Description of Artificial Sequence: Synthetic oligonucleotide
uugcaccuguauuuaaagc

SEQ ID NO: 1215253 - RNA, 19 nt, Artificial Sequence
  Description of Artificial Sequence: Synthetic oligonucleotide
uguaccuuaucuaguuauc

SEQ ID NO: 1215254 - RNA, 19 nt, Artificial Sequence
  Description of Artificial Sequence: Synthetic oligonucleotide
ugucuacuacagcagagau

SEQ ID NO: 1215255 - RNA, 19 nt, Artificial Sequence
  Description of Artificial Sequence: Synthetic oligonucleotide
agcgaauacuuaucaagga

SEQ ID NO: 1215256 - RNA, 19 nt, Artificial Sequence
  Description of Artificial Sequence: Synthetic oligonucleotide
auaaacggugcagacaagu

SEQ ID NO: 1215257 - RNA, 19 nt, Artificial Sequence
  Description of Artificial Sequence: Synthetic oligonucleotide
uaguuauccgguuaucaua

SEQ ID NO: 1215258 - RNA, 19 nt, Artificial Sequence
  Description of Artificial Sequence: Synthetic oligonucleotide
cuuuaauugaauucugggu

SEQ ID NO: 1215259 - RNA, 19 nt, Artificial Sequence
  Description of Artificial Sequence: Synthetic oligonucleotide
uauccgguuaucauauaua

SEQ ID NO: 1215260 - RNA, 19 nt, Artificial Sequence
  Description of Artificial Sequence: Synthetic oligonucleotide
ggugugauaaacauuucug

SEQ ID NO: 1215261 - RNA, 19 nt, Artificial Sequence
  Description of Artificial Sequence: Synthetic oligonucleotide
aucaguggaagucuggcuu

SEQ ID NO: 1215262 - RNA, 19 nt, Artificial Sequence
  Description of Artificial Sequence: Synthetic oligonucleotide
agcgagcaacuuucaauac

SEQ ID NO: 1215263 - RNA, 19 nt, Artificial Sequence
  Description of Artificial Sequence: Synthetic oligonucleotide
cuguugucaccagugaugc

SEQ ID NO: 1215264 - RNA, 19 nt, Artificial Sequence
  Description of Artificial Sequence: Synthetic oligonucleotide
guaccuuaucuaguuaucc

SEQ ID NO: 1215265 - RNA, 19 nt, Artificial Sequence
  Description of Artificial Sequence: Synthetic oligonucleotide
uuaggacgaggucacugca

SEQ ID NO: 1215266 - RNA, 19 nt, Artificial Sequence
  Description of Artificial Sequence: Synthetic oligonucleotide
ucuaucccaaugcauccaa

SEQ ID NO: 1215267 - RNA, 19 nt, Artificial Sequence
  Description of Artificial Sequence: Synthetic oligonucleotide
aaauugcaccuguauuuaa

SEQ ID NO: 1215268 - RNA, 19 nt, Artificial Sequence
  Description of Artificial Sequence: Synthetic oligonucleotide
cauucugcucauaguaaug

SEQ ID NO: 1215269 - RNA, 19 nt, Artificial Sequence
  Description of Artificial Sequence: Synthetic oligonucleotide
accaguugagagagaaacc

SEQ ID NO: 1215270 - RNA, 19 nt, Artificial Sequence
  Description of Artificial Sequence: Synthetic oligonucleotide
ggcuauguaguauacucug

SEQ ID NO: 1215271 - RNA, 19 nt, Artificial Sequence
  Description of Artificial Sequence: Synthetic oligonucleotide
auaguggccggcucggaug

SEQ ID NO: 1215272 - RNA, 19 nt, Artificial Sequence
  Description of Artificial Sequence: Synthetic oligonucleotide
auacauaccuccaaauuaa

SEQ ID NO: 1215273 - RNA, 19 nt, Artificial Sequence
  Description of Artificial Sequence: Synthetic oligonucleotide
aguaaugggcauccacgug

SEQ ID NO: 1215274 - RNA, 19 nt, Artificial Sequence
  Description of Artificial Sequence: Synthetic oligonucleotide
caaagacuaaagguucuag

SEQ ID NO: 1215275 - RNA, 19 nt, Artificial Sequence
  Description of Artificial Sequence: Synthetic oligonucleotide
aucauaugucugaaagcac

SEQ ID NO: 1215276 - RNA, 19 nt, Artificial Sequence
  Description of Artificial Sequence: Synthetic oligonucleotide
aauugcaccuguauuuaaa

SEQ ID NO: 1215277 - RNA, 19 nt, Artificial Sequence
  Description of Artificial Sequence: Synthetic oligonucleotide
guucgccuaauaaugacac

SEQ ID NO: 1215278 - RNA, 19 nt, Artificial Sequence
  Description of Artificial Sequence: Synthetic oligonucleotide
ucgccuaauaaugacacuu

SEQ ID NO: 1215279 - RNA, 19 nt, Artificial Sequence
  Description of Artificial Sequence: Synthetic oligonucleotide
gaauucuggguagagccac

SEQ ID NO: 1215280 - RNA, 19 nt, Artificial Sequence
  Description of Artificial Sequence: Synthetic oligonucleotide
ucucccuugugugaagacc

SEQ ID NO: 1215281 - RNA, 19 nt, Artificial Sequence
  Description of Artificial Sequence: Synthetic oligonucleotide
guucaccuuugcaagagcc

SEQ ID NO: 1215282 - RNA, 19 nt, Artificial Sequence
  Description of Artificial Sequence: Synthetic oligonucleotide
cuugcugcauaguggccgg

SEQ ID NO: 1215283 - RNA, 19 nt, Artificial Sequence
  Description of Artificial Sequence: Synthetic oligonucleotide
aagaaggucgcugcuuugu

SEQ ID NO: 1215284 - RNA, 19 nt, Artificial Sequence
  Description of Artificial Sequence: Synthetic oligonucleotide
agcaguacaauuauucuuu

SEQ ID NO: 1215285 - RNA, 19 nt, Artificial Sequence
  Description of Artificial Sequence: Synthetic oligonucleotide
agcuccauuggugucaaug

SEQ ID NO: 1215286 - RNA, 19 nt, Artificial Sequence
  Description of Artificial Sequence: Synthetic oligonucleotide
ugucgucucucccuugugu

SEQ ID NO: 1215287 - RNA, 19 nt, Artificial Sequence
  Description of Artificial Sequence: Synthetic oligonucleotide
caaagccuugcucucgagc

SEQ ID NO: 1215288 - RNA, 19 nt, Artificial Sequence
  Description of Artificial Sequence: Synthetic oligonucleotide
ugaugcaugcagcgcaggu

SEQ ID NO: 1215289 - RNA, 19 nt, Artificial Sequence
  Description of Artificial Sequence: Synthetic oligonucleotide
gaguucaccuuugcaagag

SEQ ID NO: 1215290 - RNA, 19 nt, Artificial Sequence
  Description of Artificial Sequence: Synthetic oligonucleotide
aguuauccgguuaucauau

SEQ ID NO: 1215291 - RNA, 19 nt, Artificial Sequence
  Description of Artificial Sequence: Synthetic oligonucleotide
acagaugaauuuacaaaca

SEQ ID NO: 1215292 - RNA, 19 nt, Artificial Sequence
  Description of Artificial Sequence: Synthetic oligonucleotide
acacuuaggacgaggucac

SEQ ID NO: 1215293 - RNA, 19 nt, Artificial Sequence
  Description of Artificial Sequence: Synthetic oligonucleotide
uaaacggugcagacaaguu

SEQ ID NO: 1215294 - RNA, 19 nt, Artificial Sequence
  Description of Artificial Sequence: Synthetic oligonucleotide
acuaaagguucuaggagca

SEQ ID NO: 1215295 - RNA, 19 nt, Artificial Sequence
  Description of Artificial Sequence: Synthetic oligonucleotide
uccaaagaaggucgcugcu

SEQ ID NO: 1215296 - RNA, 19 nt, Artificial Sequence
  Description of Artificial Sequence: Synthetic oligonucleotide
gucauuugguuucagcgaa

SEQ ID NO: 1215297 - RNA, 19 nt, Artificial Sequence
  Description of Artificial Sequence: Synthetic oligonucleotide
guuaucauauauauauaua

SEQ ID NO: 1215298 - RNA, 19 nt, Artificial Sequence
  Description of Artificial Sequence: Synthetic oligonucleotide
aggaacacuuaggacgagg

SEQ ID NO: 1215299 - RNA, 19 nt, Artificial Sequence
  Description of Artificial Sequence: Synthetic oligonucleotide
uucagcgaauacuuaucaa

SEQ ID NO: 1215300 - RNA, 19 nt, Artificial Sequence
  Description of Artificial Sequence: Synthetic oligonucleotide
agccaguucgccuaauaau

SEQ ID NO: 1215301 - RNA, 19 nt, Artificial Sequence
  Description of Artificial Sequence: Synthetic oligonucleotide
ggaucauccacugagccac

SEQ ID NO: 1215302 - RNA, 19 nt, Artificial Sequence
  Description of Artificial Sequence: Synthetic oligonucleotide
uaauugaauucuggguaga

SEQ ID NO: 1215303 - RNA, 19 nt, Artificial Sequence
  Description of Artificial Sequence: Synthetic oligonucleotide
cauccaaagaaggucgcug

SEQ ID NO: 1215304 - RNA, 19 nt, Artificial Sequence
  Description of Artificial Sequence: Synthetic oligonucleotide
caacaagagaccuguuguc

SEQ ID NO: 1215305 - RNA, 19 nt, Artificial Sequence
  Description of Artificial Sequence: Synthetic oligonucleotide
aagagcuuauguggaauaa

SEQ ID NO: 1215306 - RNA, 19 nt, Artificial Sequence
  Description of Artificial Sequence: Synthetic oligonucleotide
aagccggcuauguaguaua

SEQ ID NO: 1215307 - RNA, 19 nt, Artificial Sequence
  Description of Artificial Sequence: Synthetic oligonucleotide
aaagcucaagaaugauguu

SEQ ID NO: 1215308 - RNA, 19 nt, Artificial Sequence
  Description of Artificial Sequence: Synthetic oligonucleotide
acuuaggacgaggucacug

SEQ ID NO: 1215309 - RNA, 19 nt, Artificial Sequence
  Description of Artificial Sequence: Synthetic oligonucleotide
gcuaauaaacggugcagac

SEQ ID NO: 1215310 - RNA, 19 nt, Artificial Sequence
  Description of Artificial Sequence: Synthetic oligonucleotide
gauuccccauuccaaacaa

SEQ ID NO: 1215311 - RNA, 19 nt, Artificial Sequence
  Description of Artificial Sequence: Synthetic oligonucleotide
ugcauaguggccggcucgg

SEQ ID NO: 1215312 - RNA, 19 nt, Artificial Sequence
  Description of Artificial Sequence: Synthetic oligonucleotide
uaguggccggcucggaugc

SEQ ID NO: 1215313 - RNA, 19 nt, Artificial Sequence
  Description of Artificial Sequence: Synthetic oligonucleotide
caagguuagcaacaagaga

SEQ ID NO: 1215314 - RNA, 19 nt, Artificial Sequence
  Description of Artificial Sequence: Synthetic oligonucleotide
uuuugacauuuaagaggca

SEQ ID NO: 1215315 - RNA, 19 nt, Artificial Sequence
  Description of Artificial Sequence: Synthetic oligonucleotide
gguuaucauauauauauau

SEQ ID NO: 1215316 - RNA, 19 nt, Artificial Sequence
  Description of Artificial Sequence: Synthetic oligonucleotide
cuaauaaacggugcagaca

SEQ ID NO: 1215317 - RNA, 19 nt, Artificial Sequence
  Description of Artificial Sequence: Synthetic oligonucleotide
agugucgucucucccuugu

SEQ ID NO: 1215318 - RNA, 19 nt, Artificial Sequence
  Description of Artificial Sequence: Synthetic oligonucleotide
accaauuaauuuacuaaau

SEQ ID NO: 1215319 - RNA, 19 nt, Artificial Sequence
  Description of Artificial Sequence: Synthetic oligonucleotide
cugcauaguggccggcucg

SEQ ID NO: 1215320 - RNA, 19 nt, Artificial Sequence
  Description of Artificial Sequence: Synthetic oligonucleotide
aauaaacggugcagacaag

SEQ ID NO: 1215321 - RNA, 19 nt, Artificial Sequence
  Description of Artificial Sequence: Synthetic oligonucleotide
caguucgccuaauaaugac

SEQ ID NO: 1215322 - RNA, 19 nt, Artificial Sequence
  Description of Artificial Sequence: Synthetic oligonucleotide
agacagcaaaagccaugac

SEQ ID NO: 1215323 - RNA, 19 nt, Artificial Sequence
  Description of Artificial Sequence: Synthetic oligonucleotide
gcaagguuagcaacaagag

SEQ ID NO: 1215324 - RNA, 19 nt, Artificial Sequence
  Description of Artificial Sequence: Synthetic oligonucleotide
gucgucucucccuugugug

SEQ ID NO: 1215325 - RNA, 19 nt, Artificial Sequence
  Description of Artificial Sequence: Synthetic oligonucleotide
cccaaauuuaucuauccca

SEQ ID NO: 1215326 - RNA, 19 nt, Artificial Sequence
  Description of Artificial Sequence: Synthetic oligonucleotide
aaagccggcuauguaguau

SEQ ID NO: 1215327 - RNA, 19 nt, Artificial Sequence
  Description of Artificial Sequence: Synthetic oligonucleotide
gaacacuuaggacgagguc

SEQ ID NO: 1215328 - RNA, 19 nt, Artificial Sequence
  Description of Artificial Sequence: Synthetic oligonucleotide
uccgguuaucauauauaua

SEQ ID NO: 1215329 - RNA, 19 nt, Artificial Sequence
  Description of Artificial Sequence: Synthetic oligonucleotide
cuuuagucucaaagccuug

SEQ ID NO: 1215330 - RNA, 19 nt, Artificial Sequence
  Description of Artificial Sequence: Synthetic oligonucleotide
ccaucauaugucugaaagc

SEQ ID NO: 1215331 - RNA, 19 nt, Artificial Sequence
  Description of Artificial Sequence: Synthetic oligonucleotide
aguucgccuaauaaugaca

SEQ ID NO: 1215332 - RNA, 19 nt, Artificial Sequence
  Description of Artificial Sequence: Synthetic oligonucleotide
uggcuaucucuuuaauguc

SEQ ID NO: 1215333 - RNA, 19 nt, Artificial Sequence
  Description of Artificial Sequence: Synthetic oligonucleotide
guuucagcgaauacuuauc

SEQ ID NO: 1215334 - RNA, 19 nt, Artificial Sequence
  Description of Artificial Sequence: Synthetic oligonucleotide
ucaaagacuaaagguucua

SEQ ID NO: 1215335 - RNA, 19 nt, Artificial Sequence
  Description of Artificial Sequence: Synthetic oligonucleotide
cauaugucugaaagcacaa

SEQ ID NO: 1215336 - RNA, 19 nt, Artificial Sequence
  Description of Artificial Sequence: Synthetic oligonucleotide
gccuaauaaugacacuugc

SEQ ID NO: 1215337 - RNA, 19 nt, Artificial Sequence
  Description of Artificial Sequence: Synthetic oligonucleotide
gccaguucgccuaauaaug

SEQ ID NO: 1215338 - RNA, 19 nt, Artificial Sequence
  Description of Artificial Sequence: Synthetic oligonucleotide
cuccccaaauuuaucuauc

SEQ ID NO: 1215339 - RNA, 19 nt, Artificial Sequence
  Description of Artificial Sequence: Synthetic oligonucleotide
ccaacaaaugcaucuccag

SEQ ID NO: 1215340 - RNA, 19 nt, Artificial Sequence
  Description of Artificial Sequence: Synthetic oligonucleotide
aaaagccggcuauguagua

SEQ ID NO: 1215341 - RNA, 19 nt, Artificial Sequence
  Description of Artificial Sequence: Synthetic oligonucleotide
ugaagaccacgguccucgg

SEQ ID NO: 1215342 - RNA, 19 nt, Artificial Sequence
  Description of Artificial Sequence: Synthetic oligonucleotide
acuacagcagagaugucaa

SEQ ID NO: 1215343 - RNA, 19 nt, Artificial Sequence
  Description of Artificial Sequence: Synthetic oligonucleotide
gaagaccacgguccucggc

SEQ ID NO: 1215344 - RNA, 19 nt, Artificial Sequence
  Description of Artificial Sequence: Synthetic oligonucleotide
agccacuacagugucgucu

SEQ ID NO: 1215345 - RNA, 19 nt, Artificial Sequence
  Description of Artificial Sequence: Synthetic oligonucleotide
aaauagcaguacaauuauu

SEQ ID NO: 1215346 - RNA, 19 nt, Artificial Sequence
  Description of Artificial Sequence: Synthetic oligonucleotide
ccgguuaucauauauauau

SEQ ID NO: 1215347 - RNA, 19 nt, Artificial Sequence
  Description of Artificial Sequence: Synthetic oligonucleotide
uaugacaugugugcauaua

SEQ ID NO: 1215348 - RNA, 19 nt, Artificial Sequence
  Description of Artificial Sequence: Synthetic oligonucleotide
cagugaugcaugcagcgca

SEQ ID NO: 1215349 - RNA, 19 nt, Artificial Sequence
  Description of Artificial Sequence: Synthetic oligonucleotide
uucgccuaauaaugacacu

SEQ ID NO: 1215350 - RNA, 19 nt, Artificial Sequence
  Description of Artificial Sequence: Synthetic oligonucleotide
ccggcuauguaguauacuc

SEQ ID NO: 1215351 - RNA, 19 nt, Artificial Sequence
  Description of Artificial Sequence: Synthetic oligonucleotide
gucuacuacagcagagaug

SEQ ID NO: 1215352 - RNA, 19 nt, Artificial Sequence
  Description of Artificial Sequence: Synthetic oligonucleotide
aucuaguuauccgguuauc

SEQ ID NO: 1215353 - RNA, 19 nt, Artificial Sequence
  Description of Artificial Sequence: Synthetic oligonucleotide
gguagagccaccagcauga

SEQ ID NO: 1215354 - RNA, 19 nt, Artificial Sequence
  Description of Artificial Sequence: Synthetic oligonucleotide
cuacagugucgucucuccc

SEQ ID NO: 1215355 - RNA, 19 nt, Artificial Sequence
  Description of Artificial Sequence: Synthetic oligonucleotide
cuacagcagagaugucaag

SEQ ID NO: 1215356 - RNA, 19 nt, Artificial Sequence
  Description of Artificial Sequence: Synthetic oligonucleotide
gugcagacaaguucaaagu

SEQ ID NO: 1215357 - RNA, 19 nt, Artificial Sequence
  Description of Artificial Sequence: Synthetic oligonucleotide
auuccccauuccaaacaac

SEQ ID NO: 1215358 - RNA, 19 nt, Artificial Sequence
  Description of Artificial Sequence: Synthetic oligonucleotide
cucucgagcaaaaguggca

SEQ ID NO: 1215359 - RNA, 19 nt, Artificial Sequence
  Description of Artificial Sequence: Synthetic oligonucleotide
agugaugcaugcagcgcag

SEQ ID NO: 1215360 - RNA, 19 nt, Artificial Sequence
  Description of Artificial Sequence: Synthetic oligonucleotide
agagcuuauguggaauaau

SEQ ID NO: 1215361 - RNA, 19 nt, Artificial Sequence
  Description of Artificial Sequence: Synthetic oligonucleotide
uucuuauggcaggaacacu

SEQ ID NO: 1215362 - RNA, 19 nt, Artificial Sequence
  Description of Artificial Sequence: Synthetic oligonucleotide
cacucagcgcuuguggcgc

SEQ ID NO: 1215363 - RNA, 19 nt, Artificial Sequence
  Description of Artificial Sequence: Synthetic oligonucleotide
gcaacaagagaccuguugu

SEQ ID NO: 1215364 - RNA, 19 nt, Artificial Sequence
  Description of Artificial Sequence: Synthetic oligonucleotide
agaugucaagaagaggauu

SEQ ID NO: 1215365 - RNA, 19 nt, Artificial Sequence
  Description of Artificial Sequence: Synthetic oligonucleotide
aagccuugcucucgagcaa

SEQ ID NO: 1215366 - RNA, 19 nt, Artificial Sequence
  Description of Artificial Sequence: Synthetic oligonucleotide
agaggauuccccauuccaa

SEQ ID NO: 1215367 - RNA, 19 nt, Artificial Sequence
  Description of Artificial Sequence: Synthetic oligonucleotide
gcgaauacuuaucaaggaa

SEQ ID NO: 1215368 - RNA, 19 nt, Artificial Sequence
  Description of Artificial Sequence: Synthetic oligonucleotide
agcaauacugagcccucua

SEQ ID NO: 1215369 - RNA, 19 nt, Artificial Sequence
  Description of Artificial Sequence: Synthetic oligonucleotide
ugguuucagcgaauacuua

SEQ ID NO: 1215370 - RNA, 19 nt, Artificial Sequence
  Description of Artificial Sequence: Synthetic oligonucleotide
uguugucaccagugaugca

SEQ ID NO: 1215371 - RNA, 19 nt, Artificial Sequence
  Description of Artificial Sequence: Synthetic oligonucleotide
cuaguuauccgguuaucau

SEQ ID NO: 1215372 - RNA, 19 nt, Artificial Sequence
  Description of Artificial Sequence: Synthetic oligonucleotide
gugugcauauacauaccuc

SEQ ID NO: 1215373 - RNA, 19 nt, Artificial Sequence
  Description of Artificial Sequence: Synthetic oligonucleotide
caagaaugauguuagcauu

SEQ ID NO: 1215374 - RNA, 19 nt, Artificial Sequence
  Description of Artificial Sequence: Synthetic oligonucleotide
auuuggugugauaaacauu

SEQ ID NO: 1215375 - RNA, 19 nt, Artificial Sequence
  Description of Artificial Sequence: Synthetic oligonucleotide
cuguaccuuaucuaguuau

SEQ ID NO: 1215376 - RNA, 19 nt, Artificial Sequence
  Description of Artificial Sequence: Synthetic oligonucleotide
agaaacccuccaacaaaug

SEQ ID NO: 1215377 - RNA, 19 nt, Artificial Sequence
  Description of Artificial Sequence: Synthetic oligonucleotide
gaggcuuguuauagaccag

SEQ ID NO: 1215378 - RNA, 19 nt, Artificial Sequence
  Description of Artificial Sequence: Synthetic oligonucleotide
guagccacuacagugucgu

SEQ ID NO: 1215379 - RNA, 19 nt, Artificial Sequence
  Description of Artificial Sequence: Synthetic oligonucleotide
ucccuugugugaagaccac

SEQ ID NO: 1215380 - RNA, 19 nt, Artificial Sequence
  Description of Artificial Sequence: Synthetic oligonucleotide
auaugucugaaagcacaau

SEQ ID NO: 1215381 - RNA, 19 nt, Artificial Sequence
  Description of Artificial Sequence: Synthetic oligonucleotide
ggcucggaugcauucaguc

SEQ ID NO: 1215382 - RNA, 19 nt, Artificial Sequence
  Description of Artificial Sequence: Synthetic oligonucleotide
ggcuaauaaacggugcaga

SEQ ID NO: 1215383 - RNA, 19 nt, Artificial Sequence
  Description of Artificial Sequence: Synthetic oligonucleotide
gguuucagcgaauacuuau

SEQ ID NO: 1215384 - RNA, 19 nt, Artificial Sequence
  Description of Artificial Sequence: Synthetic oligonucleotide
gaaggucgcugcuuugugu

SEQ ID NO: 1215385 - RNA, 19 nt, Artificial Sequence
  Description of Artificial Sequence: Synthetic oligonucleotide
agcuugaguuuucuuucuu

SEQ ID NO: 1215386 - RNA, 19 nt, Artificial Sequence
  Description of Artificial Sequence: Synthetic oligonucleotide
cucucccuugugugaagac

SEQ ID NO: 1215387 - RNA, 19 nt, Artificial Sequence
  Description of Artificial Sequence: Synthetic oligonucleotide
gagcuuauguggaauaauu

SEQ ID NO: 1215388 - RNA, 19 nt, Artificial Sequence
  Description of Artificial Sequence: Synthetic oligonucleotide
ccagauuucaaagacuaaa

SEQ ID NO: 1215389 - RNA, 19 nt, Artificial Sequence
  Description of Artificial Sequence: Synthetic oligonucleotide
ugcugcauaguggccggcu

SEQ ID NO: 1215390 - RNA, 19 nt, Artificial Sequence
  Description of Artificial Sequence: Synthetic oligonucleotide
gccacuacagugucgucuc

SEQ ID NO: 1215391 - RNA, 19 nt, Artificial Sequence
  Description of Artificial Sequence: Synthetic oligonucleotide
gaaaugcuauauuccuuuu

SEQ ID NO: 1215392 - RNA, 19 nt, Artificial Sequence
  Description of Artificial Sequence: Synthetic oligonucleotide
aguggaagucuggcuucuc

SEQ ID NO: 1215393 - RNA, 19 nt, Artificial Sequence
  Description of Artificial Sequence: Synthetic oligonucleotide
gagcaacuuucaauacuga

SEQ ID NO: 1215394 - RNA, 19 nt, Artificial Sequence
  Description of Artificial Sequence: Synthetic oligonucleotide
agaccacgguccucggccu

SEQ ID NO: 1215395 - RNA, 19 nt, Artificial Sequence
  Description of Artificial Sequence: Synthetic oligonucleotide
ugucaacauaaggcaugac

SEQ ID NO: 1215396 - RNA, 19 nt, Artificial Sequence
  Description of Artificial Sequence: Synthetic oligonucleotide
cacuacagugucgucucuc

SEQ ID NO: 1215397 - RNA, 19 nt, Artificial Sequence
  Description of Artificial Sequence: Synthetic oligonucleotide
gugaugcaugcagcgcagg

SEQ ID NO: 1215398 - RNA, 19 nt, Artificial Sequence
  Description of Artificial Sequence: Synthetic oligonucleotide
gcaguacaauuauucuuuc

SEQ ID NO: 1215399 - RNA, 19 nt, Artificial Sequence
  Description of Artificial Sequence: Synthetic oligonucleotide
ggaauaauuuggugugaua

SEQ ID NO: 1215400 - RNA, 19 nt, Artificial Sequence
  Description of Artificial Sequence: Synthetic oligonucleotide
gagccacuuuaauugaauu

SEQ ID NO: 1215401 - RNA, 19 nt, Artificial Sequence
  Description of Artificial Sequence: Synthetic oligonucleotide
agccggcuauguaguauac

SEQ ID NO: 1215402 - RNA, 19 nt, Artificial Sequence
  Description of Artificial Sequence: Synthetic oligonucleotide
cagccaguucgccuaauaa

SEQ ID NO: 1215403 - RNA, 19 nt, Artificial Sequence
  Description of Artificial Sequence: Synthetic oligonucleotide
gcucucgagcaaaaguggc

SEQ ID NO: 1215404 - RNA, 19 nt, Artificial Sequence
  Description of Artificial Sequence: Synthetic oligonucleotide
augacacuugcugcauagu

SEQ ID NO: 1215405 - RNA, 19 nt, Artificial Sequence
  Description of Artificial Sequence: Synthetic oligonucleotide
caguacaauuauucuuucu

SEQ ID NO: 1215406 - RNA, 19 nt, Artificial Sequence
  Description of Artificial Sequence: Synthetic oligonucleotide
gcaauacugagcccucuaa

SEQ ID NO: 1215407 - RNA, 19 nt, Artificial Sequence
  Description of Artificial Sequence: Synthetic oligonucleotide
gugucgucucucccuugug

SEQ ID NO: 1215408 - RNA, 19 nt, Artificial Sequence
  Description of Artificial Sequence: Synthetic oligonucleotide
cuaucccaaugcauccaaa

SEQ ID NO: 1215409 - RNA, 19 nt, Artificial Sequence
  Description of Artificial Sequence: Synthetic oligonucleotide
ccaguucgccuaauaauga

SEQ ID NO: 1215410 - RNA, 19 nt, Artificial Sequence
  Description of Artificial Sequence: Synthetic oligonucleotide
cuugugugaagaccacggu

SEQ ID NO: 1215411 - RNA, 19 nt, Artificial Sequence
  Description of Artificial Sequence: Synthetic oligonucleotide
cgccuaauaaugacacuug

SEQ ID NO: 1215412 - RNA, 19 nt, Artificial Sequence
  Description of Artificial Sequence: Synthetic oligonucleotide
caucaguggaagucuggcu

SEQ ID NO: 1215413 - RNA, 19 nt, Artificial Sequence
  Description of Artificial Sequence: Synthetic oligonucleotide
ucggccucuucgaguucac

SEQ ID NO: 1215414 - RNA, 19 nt, Artificial Sequence
  Description of Artificial Sequence: Synthetic oligonucleotide
ggcuaucucuuuaaugucu

SEQ ID NO: 1215415 - RNA, 19 nt, Artificial Sequence
  Description of Artificial Sequence: Synthetic oligonucleotide
gaugcaugcagcgcagguu

SEQ ID NO: 1215416 - RNA, 19 nt, Artificial Sequence
  Description of Artificial Sequence: Synthetic oligonucleotide
cucggccucuucgaguuca

SEQ ID NO: 1215417 - RNA, 19 nt, Artificial Sequence
  Description of Artificial Sequence: Synthetic oligonucleotide
gcgagcaacuuucaauacu

SEQ ID NO: 1215418 - RNA, 19 nt, Artificial Sequence
  Description of Artificial Sequence: Synthetic oligonucleotide
guuauccgguuaucauaua

SEQ ID NO: 1215419 - RNA, 19 nt, Artificial Sequence
  Description of Artificial Sequence: Synthetic oligonucleotide
cuacuacagcagagauguc

SEQ ID NO: 1215420 - RNA, 19 nt, Artificial Sequence
  Description of Artificial Sequence: Synthetic oligonucleotide
cuuuggcuccucagcagcu

SEQ ID NO: 1215421 - RNA, 19 nt, Artificial Sequence
  Description of Artificial Sequence: Synthetic oligonucleotide
cagugucgucucucccuug

SEQ ID NO: 1215422 - RNA, 19 nt, Artificial Sequence
  Description of Artificial Sequence: Synthetic oligonucleotide
ccuuaucuaguuauccggu

SEQ ID NO: 1215423 - RNA, 19 nt, Artificial Sequence
  Description of Artificial Sequence: Synthetic oligonucleotide
agaccaguugagagagaaa

SEQ ID NO: 1215424 - RNA, 19 nt, Artificial Sequence
  Description of Artificial Sequence: Synthetic oligonucleotide
cagcgcuuguggcgcuucc

SEQ ID NO: 1215425 - RNA, 19 nt, Artificial Sequence
  Description of Artificial Sequence: Synthetic oligonucleotide
uugcugcauaguggccggc

SEQ ID NO: 1215426 - RNA, 19 nt, Artificial Sequence
  Description of Artificial Sequence: Synthetic oligonucleotide
gaccacgguccucggccuc

SEQ ID NO: 1215427 - RNA, 19 nt, Artificial Sequence
  Description of Artificial Sequence: Synthetic oligonucleotide
guacagccaguucgccuaa

SEQ ID NO: 1215428 - RNA, 19 nt, Artificial Sequence
  Description of Artificial Sequence: Synthetic oligonucleotide
guuccaguuggcugcucau

SEQ ID NO: 1215429 - RNA, 19 nt, Artificial Sequence
  Description of Artificial Sequence: Synthetic oligonucleotide
gcauucagucagaggcuug

SEQ ID NO: 1215430 - RNA, 19 nt, Artificial Sequence
  Description of Artificial Sequence: Synthetic oligonucleotide
uggccggcucggaugcauu

SEQ ID NO: 1215431 - RNA, 19 nt, Artificial Sequence
  Description of Artificial Sequence: Synthetic oligonucleotide
cauaguggccggcucggau

SEQ ID NO: 1215432 - RNA, 19 nt, Artificial Sequence
  Description of Artificial Sequence: Synthetic oligonucleotide
cuaccagcacccaguuauu

SEQ ID NO: 1215433 - RNA, 19 nt, Artificial Sequence
  Description of Artificial Sequence: Synthetic oligonucleotide
cacgguccucggccucuuc

SEQ ID NO: 1215434 - RNA, 19 nt, Artificial Sequence
  Description of Artificial Sequence: Synthetic oligonucleotide
agccugcaccucccagcuu

SEQ ID NO: 1215435 - RNA, 19 nt, Artificial Sequence
  Description of Artificial Sequence: Synthetic oligonucleotide
caguggaagucuggcuucu

SEQ ID NO: 1215436 - RNA, 19 nt, Artificial Sequence
  Description of Artificial Sequence: Synthetic oligonucleotide
aguggccggcucggaugca

SEQ ID NO: 1215437 - RNA, 19 nt, Artificial Sequence
  Description of Artificial Sequence: Synthetic oligonucleotide
cuuguggcgcuuccaccuu

SEQ ID NO: 1215438 - RNA, 19 nt, Artificial Sequence
  Description of Artificial Sequence: Synthetic oligonucleotide
ggcuuguuauagaccaguu

SEQ ID NO: 1215439 - RNA, 19 nt, Artificial Sequence
  Description of Artificial Sequence: Synthetic oligonucleotide
cggcuauguaguauacucu

SEQ ID NO: 1215440 - RNA, 19 nt, Artificial Sequence
  Description of Artificial Sequence: Synthetic oligonucleotide
ccugcaccucccagcuuga

SEQ ID NO: 1215441 - RNA, 19 nt, Artificial Sequence
  Description of Artificial Sequence: Synthetic oligonucleotide
gccggcuauguaguauacu

SEQ ID NO: 1215442 - RNA, 19 nt, Artificial Sequence
  Description of Artificial Sequence: Synthetic oligonucleotide
gcauaguggccggcucgga

SEQ ID NO: 1215443 - RNA, 19 nt, Artificial Sequence
  Description of Artificial Sequence: Synthetic oligonucleotide
guggccggcucggaugcau

SEQ ID NO: 1215444 - RNA, 19 nt, Artificial Sequence
  Description of Artificial Sequence: Synthetic oligonucleotide
cacuuaggacgaggucacu

SEQ ID NO: 1215445 - RNA, 19 nt, Artificial Sequence
  Description of Artificial Sequence: Synthetic oligonucleotide
gcgcagguuccaguuggcu

SEQ ID NO: 1215446 - RNA, 19 nt, Artificial Sequence
  Description of Artificial Sequence: Synthetic oligonucleotide
ccacuacagugucgucucu

SEQ ID NO: 1215447 - RNA, 19 nt, Artificial Sequence
  Description of Artificial Sequence: Synthetic oligonucleotide
aaguauaccaguuacaugg

SEQ ID NO: 1215448 - RNA, 19 nt, Artificial Sequence
  Description of Artificial Sequence: Synthetic oligonucleotide
uuaagaauauauaaggccg

SEQ ID NO: 1215449 - RNA, 19 nt, Artificial Sequence
  Description of Artificial Sequence: Synthetic oligonucleotide
auaaaguugaccuaaacuc

SEQ ID NO: 1215450 - RNA, 19 nt, Artificial Sequence
  Description of Artificial Sequence: Synthetic oligonucleotide
aagauaguuaaauaggcgg

SEQ ID NO: 1215451 - RNA, 19 nt, Artificial Sequence
  Description of Artificial Sequence: Synthetic oligonucleotide
uuagauaaagcacagaucu

SEQ ID NO: 1215452 - RNA, 19 nt, Artificial Sequence
  Description of Artificial Sequence: Synthetic oligonucleotide
auaaauaacagauucgauc

SEQ ID NO: 1215453 - RNA, 19 nt, Artificial Sequence
  Description of Artificial Sequence: Synthetic oligonucleotide
uuuaagaauauauaaggcc

SEQ ID NO: 1215454 - RNA, 19 nt, Artificial Sequence
  Description of Artificial Sequence: Synthetic oligonucleotide
uucaauuugacucagauuu

SEQ ID NO: 1215455 - RNA, 19 nt, Artificial Sequence
  Description of Artificial Sequence: Synthetic oligonucleotide
aaaugcauagaaaugaaac

SEQ ID NO: 1215456 - RNA, 19 nt, Artificial Sequence
  Description of Artificial Sequence: Synthetic oligonucleotide
gauauaagggaauagacac

SEQ ID NO: 1215457 - RNA, 19 nt, Artificial Sequence
  Description of Artificial Sequence: Synthetic oligonucleotide
uuacuauuagcacucaugg

SEQ ID NO: 1215458 - RNA, 19 nt, Artificial Sequence
  Description of Artificial Sequence: Synthetic oligonucleotide
uuuagcaucacuucuauca

SEQ ID NO: 1215459 - RNA, 19 nt, Artificial Sequence
  Description of Artificial Sequence: Synthetic oligonucleotide
uugaagauaguuaaauagg

SEQ ID NO: 1215460 - RNA, 19 nt, Artificial Sequence
  Description of Artificial Sequence: Synthetic oligonucleotide
uuaaccaauaaauuccugg

SEQ ID NO: 1215461 - RNA, 19 nt, Artificial Sequence
  Description of Artificial Sequence: Synthetic oligonucleotide
aaaauuguacucuucaaga

SEQ ID NO: 1215462 - RNA, 19 nt, Artificial Sequence
  Description of Artificial Sequence: Synthetic oligonucleotide
aaugagaccauuuccaucu

SEQ ID NO: 1215463 - RNA, 19 nt, Artificial Sequence
  Description of Artificial Sequence: Synthetic oligonucleotide
accaauaaauuccuggucc

SEQ ID NO: 1215464 - RNA, 19 nt, Artificial Sequence
  Description of Artificial Sequence: Synthetic oligonucleotide
uaguuaauaaauaacagau

SEQ ID NO: 1215465 - RNA, 19 nt, Artificial Sequence
  Description of Artificial Sequence: Synthetic oligonucleotide
ugaauaaucacuuugucau

SEQ ID NO: 1215466 - RNA, 19 nt, Artificial Sequence
  Description of Artificial Sequence: Synthetic oligonucleotide
cuuuucuuagccuacagcc

SEQ ID NO: 1215467 - RNA, 19 nt, Artificial Sequence
  Description of Artificial Sequence: Synthetic oligonucleotide
uuauuaauggucuuuguga

SEQ ID NO: 1215468 - RNA, 19 nt, Artificial Sequence
  Description of Artificial Sequence: Synthetic oligonucleotide
auugauguuauccaggugu

SEQ ID NO: 1215469 - RNA, 19 nt, Artificial Sequence
  Description of Artificial Sequence: Synthetic oligonucleotide
aaugauugauguuauccag

SEQ ID NO: 1215470 - RNA, 19 nt, Artificial Sequence
  Description of Artificial Sequence: Synthetic oligonucleotide
uucucuauuuuguaguucg

SEQ ID NO: 1215471 - RNA, 19 nt, Artificial Sequence
  Description of Artificial Sequence: Synthetic oligonucleotide
uucgguaaaacacaugagc

SEQ ID NO: 1215472 - RNA, 19 nt, Artificial Sequence
  Description of Artificial Sequence: Synthetic oligonucleotide
uguuagauaaagcacagau

SEQ ID NO: 1215473 - RNA, 19 nt, Artificial Sequence
  Description of Artificial Sequence: Synthetic oligonucleotide
uauuaaguauaccaguuac

SEQ ID NO: 1215474 - RNA, 19 nt, Artificial Sequence
  Description of Artificial Sequence: Synthetic oligonucleotide
aagauauaagggaauagac

SEQ ID NO: 1215475 - RNA, 19 nt, Artificial Sequence
  Description of Artificial Sequence: Synthetic oligonucleotide
cauaauugcaaguauguac

SEQ ID NO: 1215476 - RNA, 19 nt, Artificial Sequence
  Description of Artificial Sequence: Synthetic oligonucleotide
cuuuaagaauauauaaggc

SEQ ID NO: 1215477 - RNA, 19 nt, Artificial Sequence
  Description of Artificial Sequence: Synthetic oligonucleotide
ucaaugauugauguuaucc

SEQ ID NO: 1215478 - RNA, 19 nt, Artificial Sequence
  Description of Artificial Sequence: Synthetic oligonucleotide
aacagauucgaucuaaaau

SEQ ID NO: 1215479 - RNA, 19 nt, Artificial Sequence
  Description of Artificial Sequence: Synthetic oligonucleotide
aguucgguaaaacacauga

SEQ ID NO: 1215480 - RNA, 19 nt, Artificial Sequence
  Description of Artificial Sequence: Synthetic oligonucleotide
agugacaauuucuuuacuc

SEQ ID NO: 1215481 - RNA, 19 nt, Artificial Sequence
  Description of Artificial Sequence: Synthetic oligonucleotide
aauucauauaaaauaccuc

SEQ ID NO: 1215482 - RNA, 19 nt, Artificial Sequence
  Description of Artificial Sequence: Synthetic oligonucleotide
aucuaagucaauuacuuca

SEQ ID NO: 1215483 - RNA, 19 nt, Artificial Sequence
  Description of Artificial Sequence: Synthetic oligonucleotide
uucauuguugauaugaaua

SEQ ID NO: 1215484 - RNA, 19 nt, Artificial Sequence
  Description of Artificial Sequence: Synthetic oligonucleotide
uaucugaguacccaaagcu

SEQ ID NO: 1215485 - RNA, 19 nt, Artificial Sequence
  Description of Artificial Sequence: Synthetic oligonucleotide
uuguaguucgguaaaacac

SEQ ID NO: 1215486 - RNA, 19 nt, Artificial Sequence
  Description of Artificial Sequence: Synthetic oligonucleotide
uuagccuacagccaguugu

SEQ ID NO: 1215487 - RNA, 19 nt, Artificial Sequence
  Description of Artificial Sequence: Synthetic oligonucleotide
uaaaguugaccuaaacuca

SEQ ID NO: 1215488 - RNA, 19 nt, Artificial Sequence
  Description of Artificial Sequence: Synthetic oligonucleotide
uuugauugugcacacugcc

SEQ ID NO: 1215489 - RNA, 19 nt, Artificial Sequence
  Description of Artificial Sequence: Synthetic oligonucleotide
gaucuaaaauacuucuuag

SEQ ID NO: 1215490 - RNA, 19 nt, Artificial Sequence
  Description of Artificial Sequence: Synthetic oligonucleotide
auaucugaguacccaaagc

SEQ ID NO: 1215491 - RNA, 19 nt, Artificial Sequence
  Description of Artificial Sequence: Synthetic oligonucleotide
caauuauauuuucauaacc

SEQ ID NO: 1215492 - RNA, 19 nt, Artificial Sequence
  Description of Artificial Sequence: Synthetic oligonucleotide
aagucaauuacuucaaaua

SEQ ID NO: 1215493 - RNA, 19 nt, Artificial Sequence
  Description of Artificial Sequence: Synthetic oligonucleotide
auuugacucagauuuaaug

SEQ ID NO: 1215494 - RNA, 19 nt, Artificial Sequence
  Description of Artificial Sequence: Synthetic oligonucleotide
gaaauaauuccccuguuuc

SEQ ID NO: 1215495 - RNA, 19 nt, Artificial Sequence
  Description of Artificial Sequence: Synthetic oligonucleotide
aaccaauaaauuccugguc

SEQ ID NO: 1215496 - RNA, 19 nt, Artificial Sequence
  Description of Artificial Sequence: Synthetic oligonucleotide
cucguaagaaauaauuccc

SEQ ID NO: 1215497 - RNA, 19 nt, Artificial Sequence
  Description of Artificial Sequence: Synthetic oligonucleotide
uguaguucgguaaaacaca

SEQ ID NO: 1215498 - RNA, 19 nt, Artificial Sequence
  Description of Artificial Sequence: Synthetic oligonucleotide
uguugacaaaccauuguag

SEQ ID NO: 1215499 - RNA, 19 nt, Artificial Sequence
  Description of Artificial Sequence: Synthetic oligonucleotide
aauuacuuauuaauggucu

SEQ ID NO: 1215500 - RNA, 19 nt, Artificial Sequence
  Description of Artificial Sequence: Synthetic oligonucleotide
acagauucgaucuaaaaua

SEQ ID NO: 1215501 - RNA, 19 nt, Artificial Sequence
  Description of Artificial Sequence: Synthetic oligonucleotide
uuucuuagccuacagccag

SEQ ID NO: 1215502 - RNA, 19 nt, Artificial Sequence
  Description of Artificial Sequence: Synthetic oligonucleotide
ugucauaauugcaaguaug

SEQ ID NO: 1215503 - RNA, 19 nt, Artificial Sequence
  Description of Artificial Sequence: Synthetic oligonucleotide
aguuacauggaacagcacu

SEQ ID NO: 1215504 - RNA, 19 nt, Artificial Sequence
  Description of Artificial Sequence: Synthetic oligonucleotide
ugacaauuucuuuacucgg

SEQ ID NO: 1215505 - RNA, 19 nt, Artificial Sequence
  Description of Artificial Sequence: Synthetic oligonucleotide
ucugaguacccaaagcugc

SEQ ID NO: 1215506 - RNA, 19 nt, Artificial Sequence
  Description of Artificial Sequence: Synthetic oligonucleotide
aaauaauuccccuguuuca

SEQ ID NO: 1215507 - RNA, 19 nt, Artificial Sequence
  Description of Artificial Sequence: Synthetic oligonucleotide
acuauuagcacucauggua

SEQ ID NO: 1215508 - RNA, 19 nt, Artificial Sequence
  Description of Artificial Sequence: Synthetic oligonucleotide
aauaaauuccugguccuag

SEQ ID NO: 1215509 - RNA, 19 nt, Artificial Sequence
  Description of Artificial Sequence: Synthetic oligonucleotide
acuuaguuaauaaauaaca

SEQ ID NO: 1215510 - RNA, 19 nt, Artificial Sequence
  Description of Artificial Sequence: Synthetic oligonucleotide
auaaaucccuguuuguuag

SEQ ID NO: 1215511 - RNA, 19 nt, Artificial Sequence
  Description of Artificial Sequence: Synthetic oligonucleotide
ucgguaaaacacaugagcu

SEQ ID NO: 1215512 - RNA, 19 nt, Artificial Sequence
  Description of Artificial Sequence: Synthetic oligonucleotide
uaagauauaagggaauaga

SEQ ID NO: 1215513 - RNA, 19 nt, Artificial Sequence
  Description of Artificial Sequence: Synthetic oligonucleotide
ugauugugcacacugccag

SEQ ID NO: 1215514 - RNA, 19 nt, Artificial Sequence
  Description of Artificial Sequence: Synthetic oligonucleotide
uauaaaauaccuccugcuc

SEQ ID NO: 1215515 - RNA, 19 nt, Artificial Sequence
  Description of Artificial Sequence: Synthetic oligonucleotide
uucuuaguuugauaguucc

SEQ ID NO: 1215516 - RNA, 19 nt, Artificial Sequence
  Description of Artificial Sequence: Synthetic oligonucleotide
gaagauaguuaaauaggcg

SEQ ID NO: 1215517 - RNA, 19 nt, Artificial Sequence
  Description of Artificial Sequence: Synthetic oligonucleotide
acaauuucuuuacucgggg

SEQ ID NO: 1215518 - RNA, 19 nt, Artificial Sequence
  Description of Artificial Sequence: Synthetic oligonucleotide
ucuguuacugguuuuauuu

SEQ ID NO: 1215519 - RNA, 19 nt, Artificial Sequence
  Description of Artificial Sequence: Synthetic oligonucleotide
uucgaucuaaaauacuucu

SEQ ID NO: 1215520 - RNA, 19 nt, Artificial Sequence
  Description of Artificial Sequence: Synthetic oligonucleotide
agauaguuaaauaggcggc

SEQ ID NO: 1215521 - RNA, 19 nt, Artificial Sequence
  Description of Artificial Sequence: Synthetic oligonucleotide
uugauaugaauaaucacuu

SEQ ID NO: 1215522 - RNA, 19 nt, Artificial Sequence
  Description of Artificial Sequence: Synthetic oligonucleotide
uauaaggccguaucaacug

SEQ ID NO: 1215523 - RNA, 19 nt, Artificial Sequence
  Description of Artificial Sequence: Synthetic oligonucleotide
agucaauuacuucaaauau

SEQ ID NO: 1215524 - RNA, 19 nt, Artificial Sequence
  Description of Artificial Sequence: Synthetic oligonucleotide
uugaccuaaacucacucgu

SEQ ID NO: 1215525 - RNA, 19 nt, Artificial Sequence
  Description of Artificial Sequence: Synthetic oligonucleotide
gauaucugaguacccaaag

SEQ ID NO: 1215526 - RNA, 19 nt, Artificial Sequence
  Description of Artificial Sequence: Synthetic oligonucleotide
ucguaagaaauaauucccc

SEQ ID NO: 1215527 - RNA, 19 nt, Artificial Sequence
  Description of Artificial Sequence: Synthetic oligonucleotide
ugaaguagguucuuccuug

SEQ ID NO: 1215528 - RNA, 19 nt, Artificial Sequence
  Description of Artificial Sequence: Synthetic oligonucleotide
gacuaaugagaccauuucc

SEQ ID NO: 1215529 - RNA, 19 nt, Artificial Sequence
  Description of Artificial Sequence: Synthetic oligonucleotide
ugagguauaugcaucuugu

SEQ ID NO: 1215530 - RNA, 19 nt, Artificial Sequence
  Description of Artificial Sequence: Synthetic oligonucleotide
agaauuauuuaagauauaa

SEQ ID NO: 1215531 - RNA, 19 nt, Artificial Sequence
  Description of Artificial Sequence: Synthetic oligonucleotide
uuaaguauaccaguuacau

SEQ ID NO: 1215532 - RNA, 19 nt, Artificial Sequence
  Description of Artificial Sequence: Synthetic oligonucleotide
uaaccaauaaauuccuggu

SEQ ID NO: 1215533 - RNA, 19 nt, Artificial Sequence
  Description of Artificial Sequence: Synthetic oligonucleotide
uauauaaggccguaucaac

SEQ ID NO: 1215534 - RNA, 19 nt, Artificial Sequence
  Description of Artificial Sequence: Synthetic oligonucleotide
uuaagauauaagggaauag

SEQ ID NO: 1215535 - RNA, 19 nt, Artificial Sequence
  Description of Artificial Sequence: Synthetic oligonucleotide
aaucacuuugucauccgac

SEQ ID NO: 1215536 - RNA, 19 nt, Artificial Sequence
  Description of Artificial Sequence: Synthetic oligonucleotide
gauaaaguugaccuaaacu

SEQ ID NO: 1215537 - RNA, 19 nt, Artificial Sequence
  Description of Artificial Sequence: Synthetic oligonucleotide
auaauugcaaguauguaca

SEQ ID NO: 1215538 - RNA, 19 nt, Artificial Sequence
  Description of Artificial Sequence: Synthetic oligonucleotide
aagauguugaguccucugu

SEQ ID NO: 1215539 - RNA, 19 nt, Artificial Sequence
  Description of Artificial Sequence: Synthetic oligonucleotide
auaauauauccauucuugu

SEQ ID NO: 1215540 - RNA, 19 nt, Artificial Sequence
  Description of Artificial Sequence: Synthetic oligonucleotide
auaccaguuacauggaaca

SEQ ID NO: 1215541 - RNA, 19 nt, Artificial Sequence
  Description of Artificial Sequence: Synthetic oligonucleotide
uaagaauauauaaggccgu

SEQ ID NO: 1215542 - RNA, 19 nt, Artificial Sequence
  Description of Artificial Sequence: Synthetic oligonucleotide
aauugugaaggaaacagau

SEQ ID NO: 1215543 - RNA, 19 nt, Artificial Sequence
  Description of Artificial Sequence: Synthetic oligonucleotide
guaucaacugauaaccagg

SEQ ID NO: 1215544 - RNA, 19 nt, Artificial Sequence
  Description of Artificial Sequence: Synthetic oligonucleotide
uuaaauaggcggcucuaca

SEQ ID NO: 1215545 - RNA, 19 nt, Artificial Sequence
  Description of Artificial Sequence: Synthetic oligonucleotide
cacuuaguuaauaaauaac

SEQ ID NO: 1215546 - RNA, 19 nt, Artificial Sequence
  Description of Artificial Sequence: Synthetic oligonucleotide
aauuaaccaauaaauuccu

SEQ ID NO: 1215547 - RNA, 19 nt, Artificial Sequence
  Description of Artificial Sequence: Synthetic oligonucleotide
accauuguagaucuuggug

SEQ ID NO: 1215548 - RNA, 19 nt, Artificial Sequence
  Description of Artificial Sequence: Synthetic oligonucleotide
uguugauaugaauaaucac

SEQ ID NO: 1215549 - RNA, 19 nt, Artificial Sequence
  Description of Artificial Sequence: Synthetic oligonucleotide
uaauugugaaggaaacaga

SEQ ID NO: 1215550 - RNA, 19 nt, Artificial Sequence
  Description of Artificial Sequence: Synthetic oligonucleotide
acagacuugcaaauggccc

SEQ ID NO: 1215551 - RNA, 19 nt, Artificial Sequence
  Description of Artificial Sequence: Synthetic oligonucleotide
uugguuacuauuagcacuc

SEQ ID NO: 1215552 - RNA, 19 nt, Artificial Sequence
  Description of Artificial Sequence: Synthetic oligonucleotide
uuugugauggauucuuccu

SEQ ID NO: 1215553 - RNA, 19 nt, Artificial Sequence
  Description of Artificial Sequence: Synthetic oligonucleotide
uuuugauugugcacacugc

SEQ ID NO: 1215554 - RNA, 19 nt, Artificial Sequence
  Description of Artificial Sequence: Synthetic oligonucleotide
uacauguugacaaaccauu

SEQ ID NO: 1215555 - RNA, 19 nt, Artificial Sequence
  Description of Artificial Sequence: Synthetic oligonucleotide
uuuucuuagccuacagcca

SEQ ID NO: 1215556 - RNA, 19 nt, Artificial Sequence
  Description of Artificial Sequence: Synthetic oligonucleotide
gacaauuucuuuacucggg

SEQ ID NO: 1215557 - RNA, 19 nt, Artificial Sequence
  Description of Artificial Sequence: Synthetic oligonucleotide
ucuaagucaauuacuucaa

SEQ ID NO: 1215558 - RNA, 19 nt, Artificial Sequence
  Description of Artificial Sequence: Synthetic oligonucleotide
ucacucguaagaaauaauu

SEQ ID NO: 1215559 - RNA, 19 nt, Artificial Sequence
  Description of Artificial Sequence: Synthetic oligonucleotide
uugagguauaugcaucuug

SEQ ID NO: 1215560 - RNA, 19 nt, Artificial Sequence
  Description of Artificial Sequence: Synthetic oligonucleotide
uuccaucuaagucaauuac

SEQ ID NO: 1215561 - RNA, 19 nt, Artificial Sequence
  Description of Artificial Sequence: Synthetic oligonucleotide
aaaccauuguagaucuugg

SEQ ID NO: 1215562 - RNA, 19 nt, Artificial Sequence
  Description of Artificial Sequence: Synthetic oligonucleotide
caauuacuuauuaaugguc

SEQ ID NO: 1215563 - RNA, 19 nt, Artificial Sequence
  Description of Artificial Sequence: Synthetic oligonucleotide
uuagcacucaugguaauug

SEQ ID NO: 1215564 - RNA, 19 nt, Artificial Sequence
  Description of Artificial Sequence: Synthetic oligonucleotide
aauaacagauucgaucuaa

SEQ ID NO: 1215565 - RNA, 19 nt, Artificial Sequence
  Description of Artificial Sequence: Synthetic oligonucleotide
uccaucagaugcaagucca

SEQ ID NO: 1215566 - RNA, 19 nt, Artificial Sequence
  Description of Artificial Sequence: Synthetic oligonucleotide
aauaauuccccuguuucau

SEQ ID NO: 1215567 - RNA, 19 nt, Artificial Sequence
  Description of Artificial Sequence: Synthetic oligonucleotide
gaugacuaaugacuucacc

SEQ ID NO: 1215568 - RNA, 19 nt, Artificial Sequence
  Description of Artificial Sequence: Synthetic oligonucleotide
gauguugaguccucuguug

SEQ ID NO: 1215569 - RNA, 19 nt, Artificial Sequence
  Description of Artificial Sequence: Synthetic oligonucleotide
guuacuauuagcacucaug

SEQ ID NO: 1215570 - RNA, 19 nt, Artificial Sequence
  Description of Artificial Sequence: Synthetic oligonucleotide
guugauaugaauaaucacu

SEQ ID NO: 1215571 - RNA, 19 nt, Artificial Sequence
  Description of Artificial Sequence: Synthetic oligonucleotide
uugugauggauucuuccug

SEQ ID NO: 1215572 - RNA, 19 nt, Artificial Sequence
  Description of Artificial Sequence: Synthetic oligonucleotide
cauuguagaucuuggugcc

SEQ ID NO: 1215573 - RNA, 19 nt, Artificial Sequence
  Description of Artificial Sequence: Synthetic oligonucleotide
ucauucaggggcauuacau

SEQ ID NO: 1215574 - RNA, 19 nt, Artificial Sequence
  Description of Artificial Sequence: Synthetic oligonucleotide
ucggggacuucccaaaugc

SEQ ID NO: 1215575 - RNA, 19 nt, Artificial Sequence
  Description of Artificial Sequence: Synthetic oligonucleotide
uugaugauaaaugggcaug

SEQ ID NO: 1215576 - RNA, 19 nt, Artificial Sequence
  Description of Artificial Sequence: Synthetic oligonucleotide
uuuaagauauaagggaaua

SEQ ID NO: 1215577 - RNA, 19 nt, Artificial Sequence
  Description of Artificial Sequence: Synthetic oligonucleotide
auauauccauucuuguugu

SEQ ID NO: 1215578 - RNA, 19 nt, Artificial Sequence
  Description of Artificial Sequence: Synthetic oligonucleotide
ugucauccgacuuauuuuc

SEQ ID NO: 1215579 - RNA, 19 nt, Artificial Sequence
  Description of Artificial Sequence: Synthetic oligonucleotide
acuaaugagaccauuucca

SEQ ID NO: 1215580 - RNA, 19 nt, Artificial Sequence
  Description of Artificial Sequence: Synthetic oligonucleotide
uccgacuuauuuucaauga

SEQ ID NO: 1215581 - RNA, 19 nt, Artificial Sequence
  Description of Artificial Sequence: Synthetic oligonucleotide
aaauaggcggcucuacaau

SEQ ID NO: 1215582 - RNA, 19 nt, Artificial Sequence
  Description of Artificial Sequence: Synthetic oligonucleotide
agaugcaaguccauaaauc

SEQ ID NO: 1215583 - RNA, 19 nt, Artificial Sequence
  Description of Artificial Sequence: Synthetic oligonucleotide
auauccauucuuguuguuc

SEQ ID NO: 1215584 - RNA, 19 nt, Artificial Sequence
  Description of Artificial Sequence: Synthetic oligonucleotide
ugacucagauuuaauggcu

SEQ ID NO: 1215585 - RNA, 19 nt, Artificial Sequence
  Description of Artificial Sequence: Synthetic oligonucleotide
cagauucgaucuaaaauac

SEQ ID NO: 1215586 - RNA, 19 nt, Artificial Sequence
  Description of Artificial Sequence: Synthetic oligonucleotide
uuccaagcugcuuuugaag

SEQ ID NO: 1215587 - RNA, 19 nt, Artificial Sequence
  Description of Artificial Sequence: Synthetic oligonucleotide
uucuaucaaggacagacuu

SEQ ID NO: 1215588 - RNA, 19 nt, Artificial Sequence
  Description of Artificial Sequence: Synthetic oligonucleotide
uaaauaggcggcucuacaa

SEQ ID NO: 1215589 - RNA, 19 nt, Artificial Sequence
  Description of Artificial Sequence: Synthetic oligonucleotide
ugacuaaugacuucaccau

SEQ ID NO: 1215590 - RNA, 19 nt, Artificial Sequence
  Description of Artificial Sequence: Synthetic oligonucleotide
ugcagagucaagagggucu

SEQ ID NO: 1215591 - RNA, 19 nt, Artificial Sequence
  Description of Artificial Sequence: Synthetic oligonucleotide
acacuucucuauuuuguag

SEQ ID NO: 1215592 - RNA, 19 nt, Artificial Sequence
  Description of Artificial Sequence: Synthetic oligonucleotide
aaacucacucguaagaaau

SEQ ID NO: 1215593 - RNA, 19 nt, Artificial Sequence
  Description of Artificial Sequence: Synthetic oligonucleotide
auaccuccugcucaguuag

SEQ ID NO: 1215594 - RNA, 19 nt, Artificial Sequence
  Description of Artificial Sequence: Synthetic oligonucleotide
uacauggaacagcacuuag

SEQ ID NO: 1215595 - RNA, 19 nt, Artificial Sequence
  Description of Artificial Sequence: Synthetic oligonucleotide
guugacaaaccauuguaga

SEQ ID NO: 1215596 - RNA, 19 nt, Artificial Sequence
  Description of Artificial Sequence: Synthetic oligonucleotide
augauaaaugggcaugccu

SEQ ID NO: 1215597 - RNA, 19 nt, Artificial Sequence
  Description of Artificial Sequence: Synthetic oligonucleotide
uggcuugauuguuagauaa

SEQ ID NO: 1215598 - RNA, 19 nt, Artificial Sequence
  Description of Artificial Sequence: Synthetic oligonucleotide
ucucuauuuuguaguucgg

SEQ ID NO: 1215599 - RNA, 19 nt, Artificial Sequence
  Description of Artificial Sequence: Synthetic oligonucleotide
ucuuaguuugauaguucca

SEQ ID NO: 1215600 - RNA, 19 nt, Artificial Sequence
  Description of Artificial Sequence: Synthetic oligonucleotide
ccaaguagaauuauuuaag

SEQ ID NO: 1215601 - RNA, 19 nt, Artificial Sequence
  Description of Artificial Sequence: Synthetic oligonucleotide
auccgacuuauuuucaaug

SEQ ID NO: 1215602 - RNA, 19 nt, Artificial Sequence
  Description of Artificial Sequence: Synthetic oligonucleotide
ugaugauaaaugggcaugc

SEQ ID NO: 1215603 - RNA, 19 nt, Artificial Sequence
  Description of Artificial Sequence: Synthetic oligonucleotide
ggcucuacaauucauauaa

SEQ ID NO: 1215604 - RNA, 19 nt, Artificial Sequence
  Description of Artificial Sequence: Synthetic oligonucleotide
aggggcauuacauguugac

SEQ ID NO: 1215605 - RNA, 19 nt, Artificial Sequence
  Description of Artificial Sequence: Synthetic oligonucleotide
gaagagcuagguaaaguug

SEQ ID NO: 1215606 - RNA, 19 nt, Artificial Sequence
  Description of Artificial Sequence: Synthetic oligonucleotide
uuagcaucacuucuaucaa

SEQ ID NO: 1215607 - RNA, 19 nt, Artificial Sequence
  Description of Artificial Sequence: Synthetic oligonucleotide
aguuguggaaggaauuaac

SEQ ID NO: 1215608 - RNA, 19 nt, Artificial Sequence
  Description of Artificial Sequence: Synthetic oligonucleotide
augcaaguccauaaauccc

SEQ ID NO: 1215609 - RNA, 19 nt, Artificial Sequence
  Description of Artificial Sequence: Synthetic oligonucleotide
caaaccauuguagaucuug

SEQ ID NO: 1215610 - RNA, 19 nt, Artificial Sequence
  Description of Artificial Sequence: Synthetic oligonucleotide
ucaggggcauuacauguug

SEQ ID NO: 1215611 - RNA, 19 nt, Artificial Sequence
  Description of Artificial Sequence: Synthetic oligonucleotide
uaugcaucuuguacugaug

SEQ ID NO: 1215612 - RNA, 19 nt, Artificial Sequence
  Description of Artificial Sequence: Synthetic oligonucleotide
aguacccaaagcugcauca

SEQ ID NO: 1215613 - RNA, 19 nt, Artificial Sequence
  Description of Artificial Sequence: Synthetic oligonucleotide
uuuccaucuaagucaauua

SEQ ID NO: 1215614 - RNA, 19 nt, Artificial Sequence
  Description of Artificial Sequence: Synthetic oligonucleotide
aauuccccuguuucaucuc

SEQ ID NO: 1215615 - RNA, 19 nt, Artificial Sequence
  Description of Artificial Sequence: Synthetic oligonucleotide
uaguuaaauaggcggcucu

SEQ ID NO: 1215616 - RNA, 19 nt, Artificial Sequence
  Description of Artificial Sequence: Synthetic oligonucleotide
augauugauguuauccagg

SEQ ID NO: 1215617 - RNA, 19 nt, Artificial Sequence
  Description of Artificial Sequence: Synthetic oligonucleotide
aguuugaggaguccaauua

SEQ ID NO: 1215618 - RNA, 19 nt, Artificial Sequence
  Description of Artificial Sequence: Synthetic oligonucleotide
aauaccuccugcucaguua

SEQ ID NO: 1215619 - RNA, 19 nt, Artificial Sequence
  Description of Artificial Sequence: Synthetic oligonucleotide
caccaguccauccaaacac

SEQ ID NO: 1215620 - RNA, 19 nt, Artificial Sequence
  Description of Artificial Sequence: Synthetic oligonucleotide
uguuagcucauucuucuuu

SEQ ID NO: 1215621 - RNA, 19 nt, Artificial Sequence
  Description of Artificial Sequence: Synthetic oligonucleotide
agaaaugaaacagauuauu

SEQ ID NO: 1215622 - RNA, 19 nt, Artificial Sequence
  Description of Artificial Sequence: Synthetic oligonucleotide
uaaacucacucguaagaaa

SEQ ID NO: 1215623 - RNA, 19 nt, Artificial Sequence
  Description of Artificial Sequence: Synthetic oligonucleotide
ucaccaguccauccaaaca

SEQ ID NO: 1215624 - RNA, 19 nt, Artificial Sequence
  Description of Artificial Sequence: Synthetic oligonucleotide
aauaggcggcucuacaauu

SEQ ID NO: 1215625 - RNA, 19 nt, Artificial Sequence
  Description of Artificial Sequence: Synthetic oligonucleotide
caaugauugauguuaucca

SEQ ID NO: 1215626 - RNA, 19 nt, Artificial Sequence
  Description of Artificial Sequence: Synthetic oligonucleotide
uuuacucggggacuuccca

SEQ ID NO: 1215627 - RNA, 19 nt, Artificial Sequence
  Description of Artificial Sequence: Synthetic oligonucleotide
uguuuugaacuuugaagua

SEQ ID NO: 1215628 - RNA, 19 nt, Artificial Sequence
  Description of Artificial Sequence: Synthetic oligonucleotide
uucucgaucauuggcuucc

SEQ ID NO: 1215629 - RNA, 19 nt, Artificial Sequence
  Description of Artificial Sequence: Synthetic oligonucleotide
agaaauaauuccccuguuu

SEQ ID NO: 1215630 - RNA, 19 nt, Artificial Sequence
  Description of Artificial Sequence: Synthetic oligonucleotide
auaguuaaauaggcggcuc

SEQ ID NO: 1215631 - RNA, 19 nt, Artificial Sequence
  Description of Artificial Sequence: Synthetic oligonucleotide
acuaaugacuucaccaucu

SEQ ID NO: 1215632 - RNA, 19 nt, Artificial Sequence
  Description of Artificial Sequence: Synthetic oligonucleotide
ugauaucugaguacccaaa

SEQ ID NO: 1215633 - RNA, 19 nt, Artificial Sequence
  Description of Artificial Sequence: Synthetic oligonucleotide
aucaacugauaaccagggg

SEQ ID NO: 1215634 - RNA, 19 nt, Artificial Sequence
  Description of Artificial Sequence: Synthetic oligonucleotide
auguugacaaaccauugua

SEQ ID NO: 1215635 - RNA, 19 nt, Artificial Sequence
  Description of Artificial Sequence: Synthetic oligonucleotide
gguaaaguugauccuuuag

SEQ ID NO: 1215636 - RNA, 19 nt, Artificial Sequence
  Description of Artificial Sequence: Synthetic oligonucleotide
uaacagauucgaucuaaaa

SEQ ID NO: 1215637 - RNA, 19 nt, Artificial Sequence
  Description of Artificial Sequence: Synthetic oligonucleotide
uugauaucugaguacccaa

SEQ ID NO: 1215638 - RNA, 19 nt, Artificial Sequence
  Description of Artificial Sequence: Synthetic oligonucleotide
uguuaacuuugagucuugg

SEQ ID NO: 1215639 - RNA, 19 nt, Artificial Sequence
  Description of Artificial Sequence: Synthetic oligonucleotide
accuaaacucacucguaag

SEQ ID NO: 1215640 - RNA, 19 nt, Artificial Sequence
  Description of Artificial Sequence: Synthetic oligonucleotide
uucauucaggggcauuaca

SEQ ID NO: 1215641 - RNA, 19 nt, Artificial Sequence
  Description of Artificial Sequence: Synthetic oligonucleotide
uguuauccaggugucauaa

SEQ ID NO: 1215642 - RNA, 19 nt, Artificial Sequence
  Description of Artificial Sequence: Synthetic oligonucleotide
ucgaucauuggcuuccauc

SEQ ID NO: 1215643 - RNA, 19 nt, Artificial Sequence
  Description of Artificial Sequence: Synthetic oligonucleotide
cacuauuuguauuuuaaua

SEQ ID NO: 1215644 - RNA, 19 nt, Artificial Sequence
  Description of Artificial Sequence: Synthetic oligonucleotide
gacaaaccauuguagaucu

SEQ ID NO: 1215645 - RNA, 19 nt, Artificial Sequence
  Description of Artificial Sequence: Synthetic oligonucleotide
cauucaggggcauuacaug

SEQ ID NO: 1215646 - RNA, 19 nt, Artificial Sequence
  Description of Artificial Sequence: Synthetic oligonucleotide
auaaauuccugguccuagu

SEQ ID NO: 1215647 - RNA, 19 nt, Artificial Sequence
  Description of Artificial Sequence: Synthetic oligonucleotide
aaauaccuccugcucaguu

SEQ ID NO: 1215648 - RNA, 19 nt, Artificial Sequence
  Description of Artificial Sequence: Synthetic oligonucleotide
agaccauuuccaucuaagu

SEQ ID NO: 1215649 - RNA, 19 nt, Artificial Sequence
  Description of Artificial Sequence: Synthetic oligonucleotide
cauugauaucugaguaccc

SEQ ID NO: 1215650 - RNA, 19 nt, Artificial Sequence
  Description of Artificial Sequence: Synthetic oligonucleotide
aagaaauaauuccccuguu

SEQ ID NO: 1215651 - RNA, 19 nt, Artificial Sequence
  Description of Artificial Sequence: Synthetic oligonucleotide
auugugcacacugccaguc

SEQ ID NO: 1215652 - RNA, 19 nt, Artificial Sequence
  Description of Artificial Sequence: Synthetic oligonucleotide
uugucauccgacuuauuuu

SEQ ID NO: 1215653 - RNA, 19 nt, Artificial Sequence
  Description of Artificial Sequence: Synthetic oligonucleotide
acuuauuaauggucuuugu

SEQ ID NO: 1215654 - RNA, 19 nt, Artificial Sequence
  Description of Artificial Sequence: Synthetic oligonucleotide
aucacuuccaggauugcug

SEQ ID NO: 1215655 - RNA, 19 nt, Artificial Sequence
  Description of Artificial Sequence: Synthetic oligonucleotide
auauaaggccguaucaacu

SEQ ID NO: 1215656 - RNA, 19 nt, Artificial Sequence
  Description of Artificial Sequence: Synthetic oligonucleotide
caggugucauaauugcaag

SEQ ID NO: 1215657 - RNA, 19 nt, Artificial Sequence
  Description of Artificial Sequence: Synthetic oligonucleotide
acuucuuaguuugauaguu

SEQ ID NO: 1215658 - RNA, 19 nt, Artificial Sequence
  Description of Artificial Sequence: Synthetic oligonucleotide
cuucuuaguuugauaguuc

SEQ ID NO: 1215659 - RNA, 19 nt, Artificial Sequence
  Description of Artificial Sequence: Synthetic oligonucleotide
aauauauaacauggacaaa

SEQ ID NO: 1215660 - RNA, 19 nt, Artificial Sequence
  Description of Artificial Sequence: Synthetic oligonucleotide
auuuccaucuaagucaauu

SEQ ID NO: 1215661 - RNA, 19 nt, Artificial Sequence
  Description of Artificial Sequence: Synthetic oligonucleotide
ugaggaguccaauuacuua

SEQ ID NO: 1215662 - RNA, 19 nt, Artificial Sequence
  Description of Artificial Sequence: Synthetic oligonucleotide
agacacaauaauauaucca

SEQ ID NO: 1215663 - RNA, 19 nt, Artificial Sequence
  Description of Artificial Sequence: Synthetic oligonucleotide
auaaccauccaugacuuua

SEQ ID NO: 1215664 - RNA, 19 nt, Artificial Sequence
  Description of Artificial Sequence: Synthetic oligonucleotide
acuuaguucauuguugaua

SEQ ID NO: 1215665 - RNA, 19 nt, Artificial Sequence
  Description of Artificial Sequence: Synthetic oligonucleotide
gaugauaaaugggcaugcc

SEQ ID NO: 1215666 - RNA, 19 nt, Artificial Sequence
  Description of Artificial Sequence: Synthetic oligonucleotide
cuugguuacuauuagcacu

SEQ ID NO: 1215667 - RNA, 19 nt, Artificial Sequence
  Description of Artificial Sequence: Synthetic oligonucleotide
gccguaucaacugauaacc

SEQ ID NO: 1215668 - RNA, 19 nt, Artificial Sequence
  Description of Artificial Sequence: Synthetic oligonucleotide
uugaggaguccaauuacuu

SEQ ID NO: 1215669 - RNA, 19 nt, Artificial Sequence
  Description of Artificial Sequence: Synthetic oligonucleotide
auuguacucuucaagacua

SEQ ID NO: 1215670 - RNA, 19 nt, Artificial Sequence
  Description of Artificial Sequence: Synthetic oligonucleotide
ucaauuugacucagauuua

SEQ ID NO: 1215671 - RNA, 19 nt, Artificial Sequence
  Description of Artificial Sequence: Synthetic oligonucleotide
uagccuacagccaguugug

SEQ ID NO: 1215672 - RNA, 19 nt, Artificial Sequence
  Description of Artificial Sequence: Synthetic oligonucleotide
ucuuuacucggggacuucc

SEQ ID NO: 1215673 - RNA, 19 nt, Artificial Sequence
  Description of Artificial Sequence: Synthetic oligonucleotide
gcuugauuguuagauaaag

SEQ ID NO: 1215674 - RNA, 19 nt, Artificial Sequence
  Description of Artificial Sequence: Synthetic oligonucleotide
uguucauucaggggcauua

SEQ ID NO: 1215675 - RNA, 19 nt, Artificial Sequence
  Description of Artificial Sequence: Synthetic oligonucleotide
cuuaguuugauaguuccaa

SEQ ID NO: 1215676 - RNA, 19 nt, Artificial Sequence
  Description of Artificial Sequence: Synthetic oligonucleotide
ucgaucuaaaauacuucuu

SEQ ID NO: 1215677 - RNA, 19 nt, Artificial Sequence
  Description of Artificial Sequence: Synthetic oligonucleotide
cuguuacugguuuuauuuc

SEQ ID NO: 1215678 - RNA, 19 nt, Artificial Sequence
  Description of Artificial Sequence: Synthetic oligonucleotide
guacugaugacuaaugacu

SEQ ID NO: 1215679 - RNA, 19 nt, Artificial Sequence
  Description of Artificial Sequence: Synthetic oligonucleotide
ugaugacuaaugacuucac

SEQ ID NO: 1215680 - RNA, 19 nt, Artificial Sequence
  Description of Artificial Sequence: Synthetic oligonucleotide
auugugaaggaaacagaug

SEQ ID NO: 1215681 - RNA, 19 nt, Artificial Sequence
  Description of Artificial Sequence: Synthetic oligonucleotide
ugauaugaauaaucacuuu

SEQ ID NO: 1215682 - RNA, 19 nt, Artificial Sequence
  Description of Artificial Sequence: Synthetic oligonucleotide
gauucgaucuaaaauacuu

SEQ ID NO: 1215683 - RNA, 19 nt, Artificial Sequence
  Description of Artificial Sequence: Synthetic oligonucleotide
uccuaguucaccaguccau

SEQ ID NO: 1215684 - RNA, 19 nt, Artificial Sequence
  Description of Artificial Sequence: Synthetic oligonucleotide
auaaggccguaucaacuga

SEQ ID NO: 1215685 - RNA, 19 nt, Artificial Sequence
  Description of Artificial Sequence: Synthetic oligonucleotide
uaaaucccuguuuguuagc

SEQ ID NO: 1215686 - RNA, 19 nt, Artificial Sequence
  Description of Artificial Sequence: Synthetic oligonucleotide
cuuuacucggggacuuccc

SEQ ID NO: 1215687 - RNA, 19 nt, Artificial Sequence
  Description of Artificial Sequence: Synthetic oligonucleotide
uaauugcaaguauguacaa

SEQ ID NO: 1215688 - RNA, 19 nt, Artificial Sequence
  Description of Artificial Sequence: Synthetic oligonucleotide
uucaaauaucucugauaaa

SEQ ID NO: 1215689 - RNA, 19 nt, Artificial Sequence
  Description of Artificial Sequence: Synthetic oligonucleotide
caagagggucuccuucucg

SEQ ID NO: 1215690 - RNA, 19 nt, Artificial Sequence
  Description of Artificial Sequence: Synthetic oligonucleotide
agacagcccaagcauccuc

SEQ ID NO: 1215691 - RNA, 19 nt, Artificial Sequence
  Description of Artificial Sequence: Synthetic oligonucleotide
ucauaauugcaaguaugua

SEQ ID NO: 1215692 - RNA, 19 nt, Artificial Sequence
  Description of Artificial Sequence: Synthetic oligonucleotide
gaccuaaacucacucguaa

SEQ ID NO: 1215693 - RNA, 19 nt, Artificial Sequence
  Description of Artificial Sequence: Synthetic oligonucleotide
uaguucgguaaaacacaug

SEQ ID NO: 1215694 - RNA, 19 nt, Artificial Sequence
  Description of Artificial Sequence: Synthetic oligonucleotide
ugauaguuccaaguagaau

SEQ ID NO: 1215695 - RNA, 19 nt, Artificial Sequence
  Description of Artificial Sequence: Synthetic oligonucleotide
gaguccaauuacuuauuaa

SEQ ID NO: 1215696 - RNA, 19 nt, Artificial Sequence
  Description of Artificial Sequence: Synthetic oligonucleotide
auaggcggcucuacaauuc

SEQ ID NO: 1215697 - RNA, 19 nt, Artificial Sequence
  Description of Artificial Sequence: Synthetic oligonucleotide
aggugucauaauugcaagu

SEQ ID NO: 1215698 - RNA, 19 nt, Artificial Sequence
  Description of Artificial Sequence: Synthetic oligonucleotide
uaggcggcucuacaauuca

SEQ ID NO: 1215699 - RNA, 19 nt, Artificial Sequence
  Description of Artificial Sequence: Synthetic oligonucleotide
auauaagggaauagacaca

SEQ ID NO: 1215700 - RNA, 19 nt, Artificial Sequence
  Description of Artificial Sequence: Synthetic oligonucleotide
uaaggccguaucaacugau

SEQ ID NO: 1215701 - RNA, 19 nt, Artificial Sequence
  Description of Artificial Sequence: Synthetic oligonucleotide
gggcauuacauguugacaa

SEQ ID NO: 1215702 - RNA, 19 nt, Artificial Sequence
  Description of Artificial Sequence: Synthetic oligonucleotide
guucgguaaaacacaugag

SEQ ID NO: 1215703 - RNA, 19 nt, Artificial Sequence
  Description of Artificial Sequence: Synthetic oligonucleotide
ucaagacuaaugagaccau

SEQ ID NO: 1215704 - RNA, 19 nt, Artificial Sequence
  Description of Artificial Sequence: Synthetic oligonucleotide
ugaccuaaacucacucgua

SEQ ID NO: 1215705 - RNA, 19 nt, Artificial Sequence
  Description of Artificial Sequence: Synthetic oligonucleotide
gauaguuaaauaggcggcu

SEQ ID NO: 1215706 - RNA, 19 nt, Artificial Sequence
  Description of Artificial Sequence: Synthetic oligonucleotide
guuaaauaggcggcucuac

SEQ ID NO: 1215707 - RNA, 19 nt, Artificial Sequence
  Description of Artificial Sequence: Synthetic oligonucleotide
uagcacucaugguaauugu

SEQ ID NO: 1215708 - RNA, 19 nt, Artificial Sequence
  Description of Artificial Sequence: Synthetic oligonucleotide
ggaauagacacaauaauau

SEQ ID NO: 1215709 - RNA, 19 nt, Artificial Sequence
  Description of Artificial Sequence: Synthetic oligonucleotide
acucacucguaagaaauaa

SEQ ID NO: 1215710 - RNA, 19 nt, Artificial Sequence
  Description of Artificial Sequence: Synthetic oligonucleotide
acuugcaaauggcccucuc

SEQ ID NO: 1215711 - RNA, 19 nt, Artificial Sequence
  Description of Artificial Sequence: Synthetic oligonucleotide
uauaugcaucuuguacuga

SEQ ID NO: 1215712 - RNA, 19 nt, Artificial Sequence
  Description of Artificial Sequence: Synthetic oligonucleotide
caaauaucucugauaaagu

SEQ ID NO: 1215713 - RNA, 19 nt, Artificial Sequence
  Description of Artificial Sequence: Synthetic oligonucleotide
cuaaacucacucguaagaa

SEQ ID NO: 1215714 - RNA, 19 nt, Artificial Sequence
  Description of Artificial Sequence: Synthetic oligonucleotide
cuuccaucagaugcaaguc

SEQ ID NO: 1215715 - RNA, 19 nt, Artificial Sequence
  Description of Artificial Sequence: Synthetic oligonucleotide
gcacuuaguuaauaaauaa

SEQ ID NO: 1215716 - RNA, 19 nt, Artificial Sequence
  Description of Artificial Sequence: Synthetic oligonucleotide
uuguuagauaaagcacaga

SEQ ID NO: 1215717 - RNA, 19 nt, Artificial Sequence
  Description of Artificial Sequence: Synthetic oligonucleotide
uuacucggggacuucccaa

SEQ ID NO: 1215718 - RNA, 19 nt, Artificial Sequence
  Description of Artificial Sequence: Synthetic oligonucleotide
cuugcaaauggcccucuca

SEQ ID NO: 1215719 - RNA, 19 nt, Artificial Sequence
  Description of Artificial Sequence: Synthetic oligonucleotide
aggccguaucaacugauaa

SEQ ID NO: 1215720 - RNA, 19 nt, Artificial Sequence
  Description of Artificial Sequence: Synthetic oligonucleotide
cguaucaacugauaaccag

SEQ ID NO: 1215721 - RNA, 19 nt, Artificial Sequence
  Description of Artificial Sequence: Synthetic oligonucleotide
ugauguuauccagguguca

SEQ ID NO: 1215722 - RNA, 19 nt, Artificial Sequence
  Description of Artificial Sequence: Synthetic oligonucleotide
uguacucuucaagacuaau

SEQ ID NO: 1215723 - RNA, 19 nt, Artificial Sequence
  Description of Artificial Sequence: Synthetic oligonucleotide
gaguacccaaagcugcauc

SEQ ID NO: 1215724 - RNA, 19 nt, Artificial Sequence
  Description of Artificial Sequence: Synthetic oligonucleotide
cuuuagcaucacuucuauc

SEQ ID NO: 1215725 - RNA, 19 nt, Artificial Sequence
  Description of Artificial Sequence: Synthetic oligonucleotide
cuacugcaaagauguugag

SEQ ID NO: 1215726 - RNA, 19 nt, Artificial Sequence
  Description of Artificial Sequence: Synthetic oligonucleotide
gauguuauccaggugucau

SEQ ID NO: 1215727 - RNA, 19 nt, Artificial Sequence
  Description of Artificial Sequence: Synthetic oligonucleotide
agauucgaucuaaaauacu

SEQ ID NO: 1215728 - RNA, 19 nt, Artificial Sequence
  Description of Artificial Sequence: Synthetic oligonucleotide
uguugaguccucuguuguu

SEQ ID NO: 1215729 - RNA, 19 nt, Artificial Sequence
  Description of Artificial Sequence: Synthetic oligonucleotide
cagcacuuaguuaauaaau

SEQ ID NO: 1215730 - RNA, 19 nt, Artificial Sequence
  Description of Artificial Sequence: Synthetic oligonucleotide
ggccguaucaacugauaac

SEQ ID NO: 1215731 - RNA, 19 nt, Artificial Sequence
  Description of Artificial Sequence: Synthetic oligonucleotide
auggcuugauuguuagaua

SEQ ID NO: 1215732 - RNA, 19 nt, Artificial Sequence
  Description of Artificial Sequence: Synthetic oligonucleotide
gggaauagacacaauaaua

SEQ ID NO: 1215733 - RNA, 19 nt, Artificial Sequence
  Description of Artificial Sequence: Synthetic oligonucleotide
guuaacuuugagucuuggu

SEQ ID NO: 1215734 - RNA, 19 nt, Artificial Sequence
  Description of Artificial Sequence: Synthetic oligonucleotide
cuguuguugacacaguuuu

SEQ ID NO: 1215735 - RNA, 19 nt, Artificial Sequence
  Description of Artificial Sequence: Synthetic oligonucleotide
caauuugacucagauuuaa

SEQ ID NO: 1215736 - RNA, 19 nt, Artificial Sequence
  Description of Artificial Sequence: Synthetic oligonucleotide
uccccuguuucaucucugu

SEQ ID NO: 1215737 - RNA, 19 nt, Artificial Sequence
  Description of Artificial Sequence: Synthetic oligonucleotide
aacucacucguaagaaaua

SEQ ID NO: 1215738 - RNA, 19 nt, Artificial Sequence
  Description of Artificial Sequence: Synthetic oligonucleotide
aguuaaauaggcggcucua

SEQ ID NO: 1215739 - RNA, 19 nt, Artificial Sequence
  Description of Artificial Sequence: Synthetic oligonucleotide
aguauaccaguuacaugga

SEQ ID NO: 1215740 - RNA, 19 nt, Artificial Sequence
  Description of Artificial Sequence: Synthetic oligonucleotide
cacucaugguaauugugaa

SEQ ID NO: 1215741 - RNA, 19 nt, Artificial Sequence
  Description of Artificial Sequence: Synthetic oligonucleotide
ggaaggaauuaaccaauaa

SEQ ID NO: 1215742 - RNA, 19 nt, Artificial Sequence
  Description of Artificial Sequence: Synthetic oligonucleotide
guauaccaguuacauggaa

SEQ ID NO: 1215743 - RNA, 19 nt, Artificial Sequence
  Description of Artificial Sequence: Synthetic oligonucleotide
auguuauccaggugucaua

SEQ ID NO: 1215744 - RNA, 19 nt, Artificial Sequence
  Description of Artificial Sequence: Synthetic oligonucleotide
gaguccucuguuguugaca

SEQ ID NO: 1215745 - RNA, 19 nt, Artificial Sequence
  Description of Artificial Sequence: Synthetic oligonucleotide
uccuuuagguuuggcucug

SEQ ID NO: 1215746 - RNA, 19 nt, Artificial Sequence
  Description of Artificial Sequence: Synthetic oligonucleotide
cuuagccuacagccaguug

SEQ ID NO: 1215747 - RNA, 19 nt, Artificial Sequence
  Description of Artificial Sequence: Synthetic oligonucleotide
cucggggacuucccaaaug

SEQ ID NO: 1215748 - RNA, 19 nt, Artificial Sequence
  Description of Artificial Sequence: Synthetic oligonucleotide
cagauguuuugaacuuuga

SEQ ID NO: 1215749 - RNA, 19 nt, Artificial Sequence
  Description of Artificial Sequence: Synthetic oligonucleotide
ugccuccauauggacagcu

SEQ ID NO: 1215750 - RNA, 19 nt, Artificial Sequence
  Description of Artificial Sequence: Synthetic oligonucleotide
uaguuccaaguagaauuau

SEQ ID NO: 1215751 - RNA, 19 nt, Artificial Sequence
  Description of Artificial Sequence: Synthetic oligonucleotide
ucuuagccuacagccaguu

SEQ ID NO: 1215752 - RNA, 19 nt, Artificial Sequence
  Description of Artificial Sequence: Synthetic oligonucleotide
gcaaauggcccucucaagu

SEQ ID NO: 1215753 - RNA, 19 nt, Artificial Sequence
  Description of Artificial Sequence: Synthetic oligonucleotide
uuguuagcucauucuucuu

SEQ ID NO: 1215754 - RNA, 19 nt, Artificial Sequence
  Description of Artificial Sequence: Synthetic oligonucleotide
ccaauuacuuauuaauggu

SEQ ID NO: 1215755 - RNA, 19 nt, Artificial Sequence
  Description of Artificial Sequence: Synthetic oligonucleotide
guccuuuagguuuggcucu

SEQ ID NO: 1215756 - RNA, 19 nt, Artificial Sequence
  Description of Artificial Sequence: Synthetic oligonucleotide
agccuacagccaguugugg

SEQ ID NO: 1215757 - RNA, 19 nt, Artificial Sequence
  Description of Artificial Sequence: Synthetic oligonucleotide
guucauucaggggcauuac

SEQ ID NO: 1215758 - RNA, 19 nt, Artificial Sequence
  Description of Artificial Sequence: Synthetic oligonucleotide
cuucuaucaaggacagacu

SEQ ID NO: 1215759 - RNA, 19 nt, Artificial Sequence
  Description of Artificial Sequence: Synthetic oligonucleotide
guacccaaagcugcaucac

SEQ ID NO: 1215760 - RNA, 19 nt, Artificial Sequence
  Description of Artificial Sequence: Synthetic oligonucleotide
cgguaaaacacaugagcug

SEQ ID NO: 1215761 - RNA, 19 nt, Artificial Sequence
  Description of Artificial Sequence: Synthetic oligonucleotide
gauugugcacacugccagu

SEQ ID NO: 1215762 - RNA, 19 nt, Artificial Sequence
  Description of Artificial Sequence: Synthetic oligonucleotide
agagggucuccuucucgau

SEQ ID NO: 1215763 - RNA, 19 nt, Artificial Sequence
  Description of Artificial Sequence: Synthetic oligonucleotide
ucucaccacuuguucucaa

SEQ ID NO: 1215764 - RNA, 19 nt, Artificial Sequence
  Description of Artificial Sequence: Synthetic oligonucleotide
guuggcaguuugaggaguc

SEQ ID NO: 1215765 - RNA, 19 nt, Artificial Sequence
  Description of Artificial Sequence: Synthetic oligonucleotide
cugcagagucaagaggguc

SEQ ID NO: 1215766 - RNA, 19 nt, Artificial Sequence
  Description of Artificial Sequence: Synthetic oligonucleotide
gugucauaauugcaaguau

SEQ ID NO: 1215767 - RNA, 19 nt, Artificial Sequence
  Description of Artificial Sequence: Synthetic oligonucleotide
caucacacuucucaccacu

SEQ ID NO: 1215768 - RNA, 19 nt, Artificial Sequence
  Description of Artificial Sequence: Synthetic oligonucleotide
aaggccguaucaacugaua

SEQ ID NO: 1215769 - RNA, 19 nt, Artificial Sequence
  Description of Artificial Sequence: Synthetic oligonucleotide
ggcauuacauguugacaaa

SEQ ID NO: 1215770 - RNA, 19 nt, Artificial Sequence
  Description of Artificial Sequence: Synthetic oligonucleotide
guggaaggaauuaaccaau

SEQ ID NO: 1215771 - RNA, 19 nt, Artificial Sequence
  Description of Artificial Sequence: Synthetic oligonucleotide
cuagguaaaguugauccuu

SEQ ID NO: 1215772 - RNA, 19 nt, Artificial Sequence
  Description of Artificial Sequence: Synthetic oligonucleotide
cucuauuuuguaguucggu

SEQ ID NO: 1215773 - RNA, 19 nt, Artificial Sequence
  Description of Artificial Sequence: Synthetic oligonucleotide
uggcccucucaaguugccc

SEQ ID NO: 1215774 - RNA, 19 nt, Artificial Sequence
  Description of Artificial Sequence: Synthetic oligonucleotide
uucuuuacucggggacuuc

SEQ ID NO: 1215775 - RNA, 19 nt, Artificial Sequence
  Description of Artificial Sequence: Synthetic oligonucleotide
guaguucgguaaaacacau

SEQ ID NO: 1215776 - RNA, 19 nt, Artificial Sequence
  Description of Artificial Sequence: Synthetic oligonucleotide
ggggcauuacauguugaca

SEQ ID NO: 1215777 - RNA, 19 nt, Artificial Sequence
  Description of Artificial Sequence: Synthetic oligonucleotide
gcuagguaaaguugauccu

SEQ ID NO: 1215778 - RNA, 19 nt, Artificial Sequence
  Description of Artificial Sequence: Synthetic oligonucleotide
uaccuccugcucaguuagu

SEQ ID NO: 1215779 - RNA, 19 nt, Artificial Sequence
  Description of Artificial Sequence: Synthetic oligonucleotide
caaauggcccucucaaguu

SEQ ID NO: 1215780 - RNA, 19 nt, Artificial Sequence
  Description of Artificial Sequence: Synthetic oligonucleotide
caauaaauuccugguccua

SEQ ID NO: 1215781 - RNA, 19 nt, Artificial Sequence
  Description of Artificial Sequence: Synthetic oligonucleotide
cagagucaagagggucucc

SEQ ID NO: 1215782 - RNA, 19 nt, Artificial Sequence
  Description of Artificial Sequence: Synthetic oligonucleotide
gcaaguccauaaaucccug

SEQ ID NO: 1215783 - RNA, 19 nt, Artificial Sequence
  Description of Artificial Sequence: Synthetic oligonucleotide
caggggcauuacauguuga

SEQ ID NO: 1215784 - RNA, 19 nt, Artificial Sequence
  Description of Artificial Sequence: Synthetic oligonucleotide
aucacacuucucaccacuu

SEQ ID NO: 1215785 - RNA, 19 nt, Artificial Sequence
  Description of Artificial Sequence: Synthetic oligonucleotide
caucagaugcaaguccaua

SEQ ID NO: 1215786 - RNA, 19 nt, Artificial Sequence
  Description of Artificial Sequence: Synthetic oligonucleotide
cucacucguaagaaauaau

SEQ ID NO: 1215787 - RNA, 19 nt, Artificial Sequence
  Description of Artificial Sequence: Synthetic oligonucleotide
cucaaguugcccacugcau

SEQ ID NO: 1215788 - RNA, 19 nt, Artificial Sequence
  Description of Artificial Sequence: Synthetic oligonucleotide
uuguucauucaggggcauu

SEQ ID NO: 1215789 - RNA, 19 nt, Artificial Sequence
  Description of Artificial Sequence: Synthetic oligonucleotide
caaguccauaaaucccugu

SEQ ID NO: 1215790 - RNA, 19 nt, Artificial Sequence
  Description of Artificial Sequence: Synthetic oligonucleotide
gcacagaucuuugagguau

SEQ ID NO: 1215791 - RNA, 19 nt, Artificial Sequence
  Description of Artificial Sequence: Synthetic oligonucleotide
ccaauaaauuccugguccu

SEQ ID NO: 1215792 - RNA, 19 nt, Artificial Sequence
  Description of Artificial Sequence: Synthetic oligonucleotide
gcaugccuccauauggaca

SEQ ID NO: 1215793 - RNA, 19 nt, Artificial Sequence
  Description of Artificial Sequence: Synthetic oligonucleotide
cugguccuaguucaccagu

SEQ ID NO: 1215794 - RNA, 19 nt, Artificial Sequence
  Description of Artificial Sequence: Synthetic oligonucleotide
guuauccaggugucauaau

SEQ ID NO: 1215795 - RNA, 19 nt, Artificial Sequence
  Description of Artificial Sequence: Synthetic oligonucleotide
ccguaucaacugauaacca

SEQ ID NO: 1215796 - RNA, 19 nt, Artificial Sequence
  Description of Artificial Sequence: Synthetic oligonucleotide
gguuacuauuagcacucau

SEQ ID NO: 1215797 - RNA, 19 nt, Artificial Sequence
  Description of Artificial Sequence: Synthetic oligonucleotide
ggcaguuugaggaguccaa

SEQ ID NO: 1215798 - RNA, 19 nt, Artificial Sequence
  Description of Artificial Sequence: Synthetic oligonucleotide
ggcuugauuguuagauaaa

SEQ ID NO: 1215799 - RNA, 19 nt, Artificial Sequence
  Description of Artificial Sequence: Synthetic oligonucleotide
gcggcucuacaauucauau

SEQ ID NO: 1215800 - RNA, 19 nt, Artificial Sequence
  Description of Artificial Sequence: Synthetic oligonucleotide
guagaucuuggugccacuu

SEQ ID NO: 1215801 - RNA, 19 nt, Artificial Sequence
  Description of Artificial Sequence: Synthetic oligonucleotide
cugcaucacuuccaggauu

SEQ ID NO: 1215802 - RNA, 19 nt, Artificial Sequence
  Description of Artificial Sequence: Synthetic oligonucleotide
ggcggcucuacaauucaua

SEQ ID NO: 1215803 - RNA, 19 nt, Artificial Sequence
  Description of Artificial Sequence: Synthetic oligonucleotide
acaaaccauuguagaucuu

SEQ ID NO: 1215804 - RNA, 19 nt, Artificial Sequence
  Description of Artificial Sequence: Synthetic oligonucleotide
gacuugcaaauggcccucu

SEQ ID NO: 1215805 - RNA, 19 nt, Artificial Sequence
  Description of Artificial Sequence: Synthetic oligonucleotide
aggcggcucuacaauucau

SEQ ID NO: 1215806 - RNA, 19 nt, Artificial Sequence
  Description of Artificial Sequence: Synthetic oligonucleotide
cgacuuauuuucaaugauu

SEQ ID NO: 1215807 - RNA, 19 nt, Artificial Sequence
  Description of Artificial Sequence: Synthetic oligonucleotide
gccaguccuuuagguuugg

SEQ ID NO: 1215808 - RNA, 19 nt, Artificial Sequence
  Description of Artificial Sequence: Synthetic oligonucleotide
ggcaugccucugucagcug

SEQ ID NO: 1215809 - RNA, 19 nt, Artificial Sequence
  Description of Artificial Sequence: Synthetic oligonucleotide
ccgacuuauuuucaaugau

SEQ ID NO: 1215810 - RNA, 19 nt, Artificial Sequence
  Description of Artificial Sequence: Synthetic oligonucleotide
guuguucauucaggggcau

SEQ ID NO: 1215811 - RNA, 19 nt, Artificial Sequence
  Description of Artificial Sequence: Synthetic oligonucleotide
cccaagcauccucaucaca

SEQ ID NO: 1215812 - RNA, 19 nt, Artificial Sequence
  Description of Artificial Sequence: Synthetic oligonucleotide
ggaacagcacuuaguuaau

SEQ ID NO: 1215813 - RNA, 19 nt, Artificial Sequence
  Description of Artificial Sequence: Synthetic oligonucleotide
ccuccauauggacagcuuu

SEQ ID NO: 1215814 - RNA, 19 nt, Artificial Sequence
  Description of Artificial Sequence: Synthetic oligonucleotide
gcaguuugaggaguccaau

SEQ ID NO: 1215815 - RNA, 19 nt, Artificial Sequence
  Description of Artificial Sequence: Synthetic oligonucleotide
ggggaacauuuuccuucaa

SEQ ID NO: 1215816 - RNA, 19 nt, Artificial Sequence
  Description of Artificial Sequence: Synthetic oligonucleotide
ccauauggacagcuuuaau

SEQ ID NO: 1215817 - RNA, 19 nt, Artificial Sequence
  Description of Artificial Sequence: Synthetic oligonucleotide
ccacugcaugccuccauau

SEQ ID NO: 1215818 - RNA, 19 nt, Artificial Sequence
  Description of Artificial Sequence: Synthetic oligonucleotide
gggucuccuucucgaucau

SEQ ID NO: 1215819 - RNA, 19 nt, Artificial Sequence
  Description of Artificial Sequence: Synthetic oligonucleotide
uucuagacaaauaaguggg

SEQ ID NO: 1215820 - RNA, 19 nt, Artificial Sequence
  Description of Artificial Sequence: Synthetic oligonucleotide
aaugcaaggcaguugaagg

SEQ ID NO: 1215821 - RNA, 19 nt, Artificial Sequence
  Description of Artificial Sequence: Synthetic oligonucleotide
uaauaugaaacccuuuggg

SEQ ID NO: 1215822 - RNA, 19 nt, Artificial Sequence
  Description of Artificial Sequence: Synthetic oligonucleotide
aauaaugcaaggcaguuga

SEQ ID NO: 1215823 - RNA, 19 nt, Artificial Sequence
  Description of Artificial Sequence: Synthetic oligonucleotide
aguacagucgcuuauaugu

SEQ ID NO: 1215824 - RNA, 19 nt, Artificial Sequence
  Description of Artificial Sequence: Synthetic oligonucleotide
uauaacuucaagucagugg

SEQ ID NO: 1215825 - RNA, 19 nt, Artificial Sequence
  Description of Artificial Sequence: Synthetic oligonucleotide
aaauucacaaguauccagc

SEQ ID NO: 1215826 - RNA, 19 nt, Artificial Sequence
  Description of Artificial Sequence: Synthetic oligonucleotide
agaacaugagcgcugaggc

SEQ ID NO: 1215827 - RNA, 19 nt, Artificial Sequence
  Description of Artificial Sequence: Synthetic oligonucleotide
uuagcauaugcaaugacug

SEQ ID NO: 1215828 - RNA, 19 nt, Artificial Sequence
  Description of Artificial Sequence: Synthetic oligonucleotide
agauuaagcgaacagcuac

SEQ ID NO: 1215829 - RNA, 19 nt, Artificial Sequence
  Description of Artificial Sequence: Synthetic oligonucleotide
acgauauuaagacaugaac

SEQ ID NO: 1215830 - RNA, 19 nt, Artificial Sequence
  Description of Artificial Sequence: Synthetic oligonucleotide
uaagaugacagauuaaagu

SEQ ID NO: 1215831 - RNA, 19 nt, Artificial Sequence
  Description of Artificial Sequence: Synthetic oligonucleotide
aaagcugagguacuguguc

SEQ ID NO: 1215832 - RNA, 19 nt, Artificial Sequence
  Description of Artificial Sequence: Synthetic oligonucleotide
auaacuucaagucaguggu

SEQ ID NO: 1215833 - RNA, 19 nt, Artificial Sequence
  Description of Artificial Sequence: Synthetic oligonucleotide
uuuaucaaaauccuccgcu

SEQ ID NO: 1215834 - RNA, 19 nt, Artificial Sequence
  Description of Artificial Sequence: Synthetic oligonucleotide
aaaguauaacuucaaguca

SEQ ID NO: 1215835 - RNA, 19 nt, Artificial Sequence
  Description of Artificial Sequence: Synthetic oligonucleotide
cuuaaaagcuucuaagagc

SEQ ID NO: 1215836 - RNA, 19 nt, Artificial Sequence
  Description of Artificial Sequence: Synthetic oligonucleotide
auacccauuaauaugaaac

SEQ ID NO: 1215837 - RNA, 19 nt, Artificial Sequence
  Description of Artificial Sequence: Synthetic oligonucleotide
uguaugacauagaacauga

SEQ ID NO: 1215838 - RNA, 19 nt, Artificial Sequence
  Description of Artificial Sequence: Synthetic oligonucleotide
agcaccauaaagcagcuuc

SEQ ID NO: 1215839 - RNA, 19 nt, Artificial Sequence
  Description of Artificial Sequence: Synthetic oligonucleotide
agcuacaucaaaugaaggg

SEQ ID NO: 1215840 - RNA, 19 nt, Artificial Sequence
  Description of Artificial Sequence: Synthetic oligonucleotide
aagacaugaacccaugggu

SEQ ID NO: 1215841 - RNA, 19 nt, Artificial Sequence
  Description of Artificial Sequence: Synthetic oligonucleotide
uucaguaggaacaaucugu

SEQ ID NO: 1215842 - RNA, 19 nt, Artificial Sequence
  Description of Artificial Sequence: Synthetic oligonucleotide
ugggagacaagcuacaagc

SEQ ID NO: 1215843 - RNA, 19 nt, Artificial Sequence
  Description of Artificial Sequence: Synthetic oligonucleotide
uuaagaugacagauuaaag

SEQ ID NO: 1215844 - RNA, 19 nt, Artificial Sequence
  Description of Artificial Sequence: Synthetic oligonucleotide
cuuuguauagcugaacugg

SEQ ID NO: 1215845 - RNA, 19 nt, Artificial Sequence
  Description of Artificial Sequence: Synthetic oligonucleotide
uaagccauaaugacuagca

SEQ ID NO: 1215846 - RNA, 19 nt, Artificial Sequence
  Description of Artificial Sequence: Synthetic oligonucleotide
aaguauaacuucaagucag

SEQ ID NO: 1215847 - RNA, 19 nt, Artificial Sequence
  Description of Artificial Sequence: Synthetic oligonucleotide
aguguuacuauagucuacc

SEQ ID NO: 1215848 - RNA, 19 nt, Artificial Sequence
  Description of Artificial Sequence: Synthetic oligonucleotide
uuuaagaugacagauuaaa

SEQ ID NO: 1215849 - RNA, 19 nt, Artificial Sequence
  Description of Artificial Sequence: Synthetic oligonucleotide
ucagcuaaggaaucagacg

SEQ ID NO: 1215850 - RNA, 19 nt, Artificial Sequence
  Description of Artificial Sequence: Synthetic oligonucleotide
aguaggaacaaucuguccu

SEQ ID NO: 1215851 - RNA, 19 nt, Artificial Sequence
  Description of Artificial Sequence: Synthetic oligonucleotide
uuucaaaaggucuucugug

SEQ ID NO: 1215852 - RNA, 19 nt, Artificial Sequence
  Description of Artificial Sequence: Synthetic oligonucleotide
uguagauuaagcgaacagc

SEQ ID NO: 1215853 - RNA, 19 nt, Artificial Sequence
  Description of Artificial Sequence: Synthetic oligonucleotide
uucauuucauuucuguaca

SEQ ID NO: 1215854 - RNA, 19 nt, Artificial Sequence
  Description of Artificial Sequence: Synthetic oligonucleotide
aacaguaucuucugggagu

SEQ ID NO: 1215855 - RNA, 19 nt, Artificial Sequence
  Description of Artificial Sequence: Synthetic oligonucleotide
ucagccacaugaaauaucu

SEQ ID NO: 1215856 - RNA, 19 nt, Artificial Sequence
  Description of Artificial Sequence: Synthetic oligonucleotide
ugccuuuuagauaaccucc

SEQ ID NO: 1215857 - RNA, 19 nt, Artificial Sequence
  Description of Artificial Sequence: Synthetic oligonucleotide
cacaugaaauaucugacgc

SEQ ID NO: 1215858 - RNA, 19 nt, Artificial Sequence
  Description of Artificial Sequence: Synthetic oligonucleotide
uauaaguguuacuauaguc

SEQ ID NO: 1215859 - RNA, 19 nt, Artificial Sequence
  Description of Artificial Sequence: Synthetic oligonucleotide
guaaucuuguaugacauag

SEQ ID NO: 1215860 - RNA, 19 nt, Artificial Sequence
  Description of Artificial Sequence: Synthetic oligonucleotide
gaagcuacaucaaaugaag

SEQ ID NO: 1215861 - RNA, 19 nt, Artificial Sequence
  Description of Artificial Sequence: Synthetic oligonucleotide
agcauaugcaaugacugcc

SEQ ID NO: 1215862 - RNA, 19 nt, Artificial Sequence
  Description of Artificial Sequence: Synthetic oligonucleotide
uucuuuguauagcugaacu

SEQ ID NO: 1215863 - RNA, 19 nt, Artificial Sequence
  Description of Artificial Sequence: Synthetic oligonucleotide
cauucuagacaaauaagug

SEQ ID NO: 1215864 - RNA, 19 nt, Artificial Sequence
  Description of Artificial Sequence: Synthetic oligonucleotide
gaauugcaaguucaguagg

SEQ ID NO: 1215865 - RNA, 19 nt, Artificial Sequence
  Description of Artificial Sequence: Synthetic oligonucleotide
gacacugccuuuuagauaa

SEQ ID NO: 1215866 - RNA, 19 nt, Artificial Sequence
  Description of Artificial Sequence: Synthetic oligonucleotide
uuguagauuaagcgaacag

SEQ ID NO: 1215867 - RNA, 19 nt, Artificial Sequence
  Description of Artificial Sequence: Synthetic oligonucleotide
uucacaauauacagacucc

SEQ ID NO: 1215868 - RNA, 19 nt, Artificial Sequence
  Description of Artificial Sequence: Synthetic oligonucleotide
ugaaauaucugacgccacc

SEQ ID NO: 1215869 - RNA, 19 nt, Artificial Sequence
  Description of Artificial Sequence: Synthetic oligonucleotide
uaccauuacaugguaaggg

SEQ ID NO: 1215870 - RNA, 19 nt, Artificial Sequence
  Description of Artificial Sequence: Synthetic oligonucleotide
uacccauuaauaugaaacc

SEQ ID NO: 1215871 - RNA, 19 nt, Artificial Sequence
  Description of Artificial Sequence: Synthetic oligonucleotide
cuaaccaaagcugagguac

SEQ ID NO: 1215872 - RNA, 19 nt, Artificial Sequence
  Description of Artificial Sequence: Synthetic oligonucleotide
auaugcaaugacugccucc

SEQ ID NO: 1215873 - RNA, 19 nt, Artificial Sequence
  Description of Artificial Sequence: Synthetic oligonucleotide
uccuuaaaagcuucuaaga

SEQ ID NO: 1215874 - RNA, 19 nt, Artificial Sequence
  Description of Artificial Sequence: Synthetic oligonucleotide
aaguucaguaggaacaauc

SEQ ID NO: 1215875 - RNA, 19 nt, Artificial Sequence
  Description of Artificial Sequence: Synthetic oligonucleotide
auaaguguuacuauagucu

SEQ ID NO: 1215876 - RNA, 19 nt, Artificial Sequence
  Description of Artificial Sequence: Synthetic oligonucleotide
uagacuaagccauaaugac

SEQ ID NO: 1215877 - RNA, 19 nt, Artificial Sequence
  Description of Artificial Sequence: Synthetic oligonucleotide
gagauguaagcuuaaagaa

SEQ ID NO: 1215878 - RNA, 19 nt, Artificial Sequence
  Description of Artificial Sequence: Synthetic oligonucleotide
uauuaagacaugaacccau

SEQ ID NO: 1215879 - RNA, 19 nt, Artificial Sequence
  Description of Artificial Sequence: Synthetic oligonucleotide
cuaugcauuguucauacuc

SEQ ID NO: 1215880 - RNA, 19 nt, Artificial Sequence
  Description of Artificial Sequence: Synthetic oligonucleotide
uuaaacuguaagcccagga

SEQ ID NO: 1215881 - RNA, 19 nt, Artificial Sequence
  Description of Artificial Sequence: Synthetic oligonucleotide
acccauuaauaugaaaccc

SEQ ID NO: 1215882 - RNA, 19 nt, Artificial Sequence
  Description of Artificial Sequence: Synthetic oligonucleotide
cauuacaugguaagggaag

SEQ ID NO: 1215883 - RNA, 19 nt, Artificial Sequence
  Description of Artificial Sequence: Synthetic oligonucleotide
ugggagaacauucaagaaa

SEQ ID NO: 1215884 - RNA, 19 nt, Artificial Sequence
  Description of Artificial Sequence: Synthetic oligonucleotide
uuauaaguguuacuauagu

SEQ ID NO: 1215885 - RNA, 19 nt, Artificial Sequence
  Description of Artificial Sequence: Synthetic oligonucleotide
uugggaucauuuuaucuag

SEQ ID NO: 1215886 - RNA, 19 nt, Artificial Sequence
  Description of Artificial Sequence: Synthetic oligonucleotide
ucuuauaaguguuacuaua

SEQ ID NO: 1215887 - RNA, 19 nt, Artificial Sequence
  Description of Artificial Sequence: Synthetic oligonucleotide
aguaucuucugggaguggc

SEQ ID NO: 1215888 - RNA, 19 nt, Artificial Sequence
  Description of Artificial Sequence: Synthetic oligonucleotide
agcauuuaaaguacagucg

SEQ ID NO: 1215889 - RNA, 19 nt, Artificial Sequence
  Description of Artificial Sequence: Synthetic oligonucleotide
ucuaccauuucuuuguaua

SEQ ID NO: 1215890 - RNA, 19 nt, Artificial Sequence
  Description of Artificial Sequence: Synthetic oligonucleotide
ucuuuguauagcugaacug

SEQ ID NO: 1215891 - RNA, 19 nt, Artificial Sequence
  Description of Artificial Sequence: Synthetic oligonucleotide
uuaacagccagguuccaga

SEQ ID NO: 1215892 - RNA, 19 nt, Artificial Sequence
  Description of Artificial Sequence: Synthetic oligonucleotide
ggauggauauucuucauag

SEQ ID NO: 1215893 - RNA, 19 nt, Artificial Sequence
  Description of Artificial Sequence: Synthetic oligonucleotide
aaguggauacagcucuggg

SEQ ID NO: 1215894 - RNA, 19 nt, Artificial Sequence
  Description of Artificial Sequence: Synthetic oligonucleotide
uagaacaugagcgcugagg

SEQ ID NO: 1215895 - RNA, 19 nt, Artificial Sequence
  Description of Artificial Sequence: Synthetic oligonucleotide
uagucuaccauuucuuugu

SEQ ID NO: 1215896 - RNA, 19 nt, Artificial Sequence
  Description of Artificial Sequence: Synthetic oligonucleotide
ugcuguaacagucuccaac

SEQ ID NO: 1215897 - RNA, 19 nt, Artificial Sequence
  Description of Artificial Sequence: Synthetic oligonucleotide
agcucuguuucuccgaagg

SEQ ID NO: 1215898 - RNA, 19 nt, Artificial Sequence
  Description of Artificial Sequence: Synthetic oligonucleotide
uggaagcuacaucaaauga

SEQ ID NO: 1215899 - RNA, 19 nt, Artificial Sequence
  Description of Artificial Sequence: Synthetic oligonucleotide
gacaugaacccauggguag

SEQ ID NO: 1215900 - RNA, 19 nt, Artificial Sequence
  Description of Artificial Sequence: Synthetic oligonucleotide
caugguaagggaagcaagc

SEQ ID NO: 1215901 - RNA, 19 nt, Artificial Sequence
  Description of Artificial Sequence: Synthetic oligonucleotide
cuuucugacaaaguucagg

SEQ ID NO: 1215902 - RNA, 19 nt, Artificial Sequence
  Description of Artificial Sequence: Synthetic oligonucleotide
uuaucuaggacugagcauu

SEQ ID NO: 1215903 - RNA, 19 nt, Artificial Sequence
  Description of Artificial Sequence: Synthetic oligonucleotide
aagcaauccaggcugaguu

SEQ ID NO: 1215904 - RNA, 19 nt, Artificial Sequence
  Description of Artificial Sequence: Synthetic oligonucleotide
ucugacgccaccuuuugcu

SEQ ID NO: 1215905 - RNA, 19 nt, Artificial Sequence
  Description of Artificial Sequence: Synthetic oligonucleotide
uuaaaguacagucgcuuau

SEQ ID NO: 1215906 - RNA, 19 nt, Artificial Sequence
  Description of Artificial Sequence: Synthetic oligonucleotide
uuuguauagcugaacuggu

SEQ ID NO: 1215907 - RNA, 19 nt, Artificial Sequence
  Description of Artificial Sequence: Synthetic oligonucleotide
uucuuuuaagaugacagau

SEQ ID NO: 1215908 - RNA, 19 nt, Artificial Sequence
  Description of Artificial Sequence: Synthetic oligonucleotide
gaaucagacgauauuaaga

SEQ ID NO: 1215909 - RNA, 19 nt, Artificial Sequence
  Description of Artificial Sequence: Synthetic oligonucleotide
acauaugagagacuguaau

SEQ ID NO: 1215910 - RNA, 19 nt, Artificial Sequence
  Description of Artificial Sequence: Synthetic oligonucleotide
aaauaaugcaaggcaguug

SEQ ID NO: 1215911 - RNA, 19 nt, Artificial Sequence
  Description of Artificial Sequence: Synthetic oligonucleotide
uaaguguuacuauagucua

SEQ ID NO: 1215912 - RNA, 19 nt, Artificial Sequence
  Description of Artificial Sequence: Synthetic oligonucleotide
acagucuuauaaguguuac

SEQ ID NO: 1215913 - RNA, 19 nt, Artificial Sequence
  Description of Artificial Sequence: Synthetic oligonucleotide
cgauauuaagacaugaacc

SEQ ID NO: 1215914 - RNA, 19 nt, Artificial Sequence
  Description of Artificial Sequence: Synthetic oligonucleotide
uguaacagucuccaacggu

SEQ ID NO: 1215915 - RNA, 19 nt, Artificial Sequence
  Description of Artificial Sequence: Synthetic oligonucleotide
aacagucuccaacggugcg

SEQ ID NO: 1215916 - RNA, 19 nt, Artificial Sequence
  Description of Artificial Sequence: Synthetic oligonucleotide
cauuugggagacaagcuac

SEQ ID NO: 1215917 - RNA, 19 nt, Artificial Sequence
  Description of Artificial Sequence: Synthetic oligonucleotide
gacagauuaaaguuguugu

SEQ ID NO: 1215918 - RNA, 19 nt, Artificial Sequence
  Description of Artificial Sequence: Synthetic oligonucleotide
gcauuuaaaguacagucgc

SEQ ID NO: 1215919 - RNA, 19 nt, Artificial Sequence
  Description of Artificial Sequence: Synthetic oligonucleotide
ucaguaggaacaaucuguc

SEQ ID NO: 1215920 - RNA, 19 nt, Artificial Sequence
  Description of Artificial Sequence: Synthetic oligonucleotide
ggaagcaagcaccauaaag

SEQ ID NO: 1215921 - RNA, 19 nt, Artificial Sequence
  Description of Artificial Sequence: Synthetic oligonucleotide
uaaugcaaggcaguugaag

SEQ ID NO: 1215922 - RNA, 19 nt, Artificial Sequence
  Description of Artificial Sequence: Synthetic oligonucleotide
uccugauuagcauaugcaa

SEQ ID NO: 1215923 - RNA, 19 nt, Artificial Sequence
  Description of Artificial Sequence: Synthetic oligonucleotide
agaagucuaaccaaagcug

SEQ ID NO: 1215924 - RNA, 19 nt, Artificial Sequence
  Description of Artificial Sequence: Synthetic oligonucleotide
uguuacuauagucuaccau

SEQ ID NO: 1215925 - RNA, 19 nt, Artificial Sequence
  Description of Artificial Sequence: Synthetic oligonucleotide
ucacugagcaaguggauac

SEQ ID NO: 1215926 - RNA, 19 nt, Artificial Sequence
  Description of Artificial Sequence: Synthetic oligonucleotide
aaaguacagucgcuuauau

SEQ ID NO: 1215927 - RNA, 19 nt, Artificial Sequence
  Description of Artificial Sequence: Synthetic oligonucleotide
agucuuauaaguguuacua

SEQ ID NO: 1215928 - RNA, 19 nt, Artificial Sequence
  Description of Artificial Sequence: Synthetic oligonucleotide
auuagcauaugcaaugacu

SEQ ID NO: 1215929 - RNA, 19 nt, Artificial Sequence
  Description of Artificial Sequence: Synthetic oligonucleotide
ucugaauggcucuucauuu

SEQ ID NO: 1215930 - RNA, 19 nt, Artificial Sequence
  Description of Artificial Sequence: Synthetic oligonucleotide
acaugaggcaguugcuucg

SEQ ID NO: 1215931 - RNA, 19 nt, Artificial Sequence
  Description of Artificial Sequence: Synthetic oligonucleotide
uuuaaaguacagucgcuua

SEQ ID NO: 1215932 - RNA, 19 nt, Artificial Sequence
  Description of Artificial Sequence: Synthetic oligonucleotide
ucuaggacugagcauuuaa

SEQ ID NO: 1215933 - RNA, 19 nt, Artificial Sequence
  Description of Artificial Sequence: Synthetic oligonucleotide
guaacagucuccaacggug

SEQ ID NO: 1215934 - RNA, 19 nt, Artificial Sequence
  Description of Artificial Sequence: Synthetic oligonucleotide
cauuuuaucuaggacugag

SEQ ID NO: 1215935 - RNA, 19 nt, Artificial Sequence
  Description of Artificial Sequence: Synthetic oligonucleotide
guuccugauuagcauaugc

SEQ ID NO: 1215936 - RNA, 19 nt, Artificial Sequence
  Description of Artificial Sequence: Synthetic oligonucleotide
aaggcuggugaaaauucac

SEQ ID NO: 1215937 - RNA, 19 nt, Artificial Sequence
  Description of Artificial Sequence: Synthetic oligonucleotide
uacaucaaaugaagggcca

SEQ ID NO: 1215938 - RNA, 19 nt, Artificial Sequence
  Description of Artificial Sequence: Synthetic oligonucleotide
cuaaggcuggugaaaauuc

SEQ ID NO: 1215939 - RNA, 19 nt, Artificial Sequence
  Description of Artificial Sequence: Synthetic oligonucleotide
auggaauaauggaagcuac

SEQ ID NO: 1215940 - RNA, 19 nt, Artificial Sequence
  Description of Artificial Sequence: Synthetic oligonucleotide
ugagagacuguaauuucaa

SEQ ID NO: 1215941 - RNA, 19 nt, Artificial Sequence
  Description of Artificial Sequence: Synthetic oligonucleotide
guagacuaagccauaauga

SEQ ID NO: 1215942 - RNA, 19 nt, Artificial Sequence
  Description of Artificial Sequence: Synthetic oligonucleotide
gauuaagcgaacagcuacc

SEQ ID NO: 1215943 - RNA, 19 nt, Artificial Sequence
  Description of Artificial Sequence: Synthetic oligonucleotide
uaaggcuggugaaaauuca

SEQ ID NO: 1215944 - RNA, 19 nt, Artificial Sequence
  Description of Artificial Sequence: Synthetic oligonucleotide
cuuaaagaagaguuccuga

SEQ ID NO: 1215945 - RNA, 19 nt, Artificial Sequence
  Description of Artificial Sequence: Synthetic oligonucleotide
acagacuccauccggccuc

SEQ ID NO: 1215946 - RNA, 19 nt, Artificial Sequence
  Description of Artificial Sequence: Synthetic oligonucleotide
agucuaaccaaagcugagg

SEQ ID NO: 1215947 - RNA, 19 nt, Artificial Sequence
  Description of Artificial Sequence: Synthetic oligonucleotide
cagcuaaggaaucagacga

SEQ ID NO: 1215948 - RNA, 19 nt, Artificial Sequence
  Description of Artificial Sequence: Synthetic oligonucleotide
uggaauaauggaagcuaca

SEQ ID NO: 1215949 - RNA, 19 nt, Artificial Sequence
  Description of Artificial Sequence: Synthetic oligonucleotide
gcuaccauuacaugguaag

SEQ ID NO: 1215950 - RNA, 19 nt, Artificial Sequence
  Description of Artificial Sequence: Synthetic oligonucleotide
auaugagagacuguaauuu

SEQ ID NO: 1215951 - RNA, 19 nt, Artificial Sequence
  Description of Artificial Sequence: Synthetic oligonucleotide
gucuaugcauuguucauac

SEQ ID NO: 1215952 - RNA, 19 nt, Artificial Sequence
  Description of Artificial Sequence: Synthetic oligonucleotide
acugaagcuacaagcaauc

SEQ ID NO: 1215953 - RNA, 19 nt, Artificial Sequence
  Description of Artificial Sequence: Synthetic oligonucleotide
ugggaucauuuuaucuagg

SEQ ID NO: 1215954 - RNA, 19 nt, Artificial Sequence
  Description of Artificial Sequence: Synthetic oligonucleotide
uaaaguuguuguuucucuc

SEQ ID NO: 1215955 - RNA, 19 nt, Artificial Sequence
  Description of Artificial Sequence: Synthetic oligonucleotide
ucuagacaaauaagugggu

SEQ ID NO: 1215956 - RNA, 19 nt, Artificial Sequence
  Description of Artificial Sequence: Synthetic oligonucleotide
ucuccaacggugcgcacag

SEQ ID NO: 1215957 - RNA, 19 nt, Artificial Sequence
  Description of Artificial Sequence: Synthetic oligonucleotide
aauugcaaguucaguagga

SEQ ID NO: 1215958 - RNA, 19 nt, Artificial Sequence
  Description of Artificial Sequence: Synthetic oligonucleotide
uaaggaaucagacgauauu

SEQ ID NO: 1215959 - RNA, 19 nt, Artificial Sequence
  Description of Artificial Sequence: Synthetic oligonucleotide
ccuuaaaagcuucuaagag

SEQ ID NO: 1215960 - RNA, 19 nt, Artificial Sequence
  Description of Artificial Sequence: Synthetic oligonucleotide
gacuaagccauaaugacua

SEQ ID NO: 1215961 - RNA, 19 nt, Artificial Sequence
  Description of Artificial Sequence: Synthetic oligonucleotide
guuacuauagucuaccauu

SEQ ID NO: 1215962 - RNA, 19 nt, Artificial Sequence
  Description of Artificial Sequence: Synthetic oligonucleotide
cuaagagcucuguuucucc

SEQ ID NO: 1215963 - RNA, 19 nt, Artificial Sequence
  Description of Artificial Sequence: Synthetic oligonucleotide
uuuaaggccacugcugccu

SEQ ID NO: 1215964 - RNA, 19 nt, Artificial Sequence
  Description of Artificial Sequence: Synthetic oligonucleotide
uagcauaugcaaugacugc

SEQ ID NO: 1215965 - RNA, 19 nt, Artificial Sequence
  Description of Artificial Sequence: Synthetic oligonucleotide
gaaggcuccagcugacugc

SEQ ID NO: 1215966 - RNA, 19 nt, Artificial Sequence
  Description of Artificial Sequence: Synthetic oligonucleotide
agcuucaauacccauuaau

SEQ ID NO: 1215967 - RNA, 19 nt, Artificial Sequence
  Description of Artificial Sequence: Synthetic oligonucleotide
aaaugaagggccacauaug

SEQ ID NO: 1215968 - RNA, 19 nt, Artificial Sequence
  Description of Artificial Sequence: Synthetic oligonucleotide
gacuagcaggcauuuauca

SEQ ID NO: 1215969 - RNA, 19 nt, Artificial Sequence
  Description of Artificial Sequence: Synthetic oligonucleotide
augguauggugucaggaca

SEQ ID NO: 1215970 - RNA, 19 nt, Artificial Sequence
  Description of Artificial Sequence: Synthetic oligonucleotide
agauguacugagauguaag

SEQ ID NO: 1215971 - RNA, 19 nt, Artificial Sequence
  Description of Artificial Sequence: Synthetic oligonucleotide
gcuacaucaaaugaagggc

SEQ ID NO: 1215972 - RNA, 19 nt, Artificial Sequence
  Description of Artificial Sequence: Synthetic oligonucleotide
caugaaauaucugacgcca

SEQ ID NO: 1215973 - RNA, 19 nt, Artificial Sequence
  Description of Artificial Sequence: Synthetic oligonucleotide
guucaguaggaacaaucug

SEQ ID NO: 1215974 - RNA, 19 nt, Artificial Sequence
  Description of Artificial Sequence: Synthetic oligonucleotide
acuccauccggccucaggu

SEQ ID NO: 1215975 - RNA, 19 nt, Artificial Sequence
  Description of Artificial Sequence: Synthetic oligonucleotide
cugccuuuuagauaaccuc

SEQ ID NO: 1215976 - RNA, 19 nt, Artificial Sequence
  Description of Artificial Sequence: Synthetic oligonucleotide
gaagggccacauaugagag

SEQ ID NO: 1215977 - RNA, 19 nt, Artificial Sequence
  Description of Artificial Sequence: Synthetic oligonucleotide
uccaacggugcgcacagcu

SEQ ID NO: 1215978 - RNA, 19 nt, Artificial Sequence
  Description of Artificial Sequence: Synthetic oligonucleotide
ugacugcuauccagcaggg

SEQ ID NO: 1215979 - RNA, 19 nt, Artificial Sequence
  Description of Artificial Sequence: Synthetic oligonucleotide
agggauucugcuccuaaca

SEQ ID NO: 1215980 - RNA, 19 nt, Artificial Sequence
  Description of Artificial Sequence: Synthetic oligonucleotide
ugguauggugucaggacac

SEQ ID NO: 1215981 - RNA, 19 nt, Artificial Sequence
  Description of Artificial Sequence: Synthetic oligonucleotide
aguucaguaggaacaaucu

SEQ ID NO: 1215982 - RNA, 19 nt, Artificial Sequence
  Description of Artificial Sequence: Synthetic oligonucleotide
gcaagcaccauaaagcagc

SEQ ID NO: 1215983 - RNA, 19 nt, Artificial Sequence
  Description of Artificial Sequence: Synthetic oligonucleotide
augagccucacugagcaag

SEQ ID NO: 1215984 - RNA, 19 nt, Artificial Sequence
  Description of Artificial Sequence: Synthetic oligonucleotide
acauuugggagacaagcua

SEQ ID NO: 1215985 - RNA, 19 nt, Artificial Sequence
  Description of Artificial Sequence: Synthetic oligonucleotide
acagucgcuuauauguuac

SEQ ID NO: 1215986 - RNA, 19 nt, Artificial Sequence
  Description of Artificial Sequence: Synthetic oligonucleotide
acaucaaaugaagggccac

SEQ ID NO: 1215987 - RNA, 19 nt, Artificial Sequence
  Description of Artificial Sequence: Synthetic oligonucleotide
cuaccauuacaugguaagg

SEQ ID NO: 1215988 - RNA, 19 nt, Artificial Sequence
  Description of Artificial Sequence: Synthetic oligonucleotide
uaucugacgccaccuuuug

SEQ ID NO: 1215989 - RNA, 19 nt, Artificial Sequence
  Description of Artificial Sequence: Synthetic oligonucleotide
ugaacccauggguagacua

SEQ ID NO: 1215990 - RNA, 19 nt, Artificial Sequence
  Description of Artificial Sequence: Synthetic oligonucleotide
gacugagcauuuaaaguac

SEQ ID NO: 1215991 - RNA, 19 nt, Artificial Sequence
  Description of Artificial Sequence: Synthetic oligonucleotide
aagucuaaccaaagcugag

SEQ ID NO: 1215992 - RNA, 19 nt, Artificial Sequence
  Description of Artificial Sequence: Synthetic oligonucleotide
guagauuaagcgaacagcu

SEQ ID NO: 1215993 - RNA, 19 nt, Artificial Sequence
  Description of Artificial Sequence: Synthetic oligonucleotide
uucugacaaaguucaggca

SEQ ID NO: 1215994 - RNA, 19 nt, Artificial Sequence
  Description of Artificial Sequence: Synthetic oligonucleotide
aucugacgccaccuuuugc

SEQ ID NO: 1215995 - RNA, 19 nt, Artificial Sequence
  Description of Artificial Sequence: Synthetic oligonucleotide
cuucuuuuaagaugacaga

SEQ ID NO: 1215996 - RNA, 19 nt, Artificial Sequence
  Description of Artificial Sequence: Synthetic oligonucleotide
uagauuaagcgaacagcua

SEQ ID NO: 1215997 - RNA, 19 nt, Artificial Sequence
  Description of Artificial Sequence: Synthetic oligonucleotide
aacccauggguagacuaag

SEQ ID NO: 1215998 - RNA, 19 nt, Artificial Sequence
  Description of Artificial Sequence: Synthetic oligonucleotide
ugacuagcaggcauuuauc

SEQ ID NO: 1215999 - RNA, 19 nt, Artificial Sequence
  Description of Artificial Sequence: Synthetic oligonucleotide
uccuucaagugaauugcaa

SEQ ID NO: 1216000 - RNA, 19 nt, Artificial Sequence
  Description of Artificial Sequence: Synthetic oligonucleotide
gaacaugagcgcugaggcc

SEQ ID NO: 1216001 - RNA, 19 nt, Artificial Sequence
  Description of Artificial Sequence: Synthetic oligonucleotide
aguugcuucggcucagcca

SEQ ID NO: 1216002 - RNA, 19 nt, Artificial Sequence
  Description of Artificial Sequence: Synthetic oligonucleotide
aaugacugccuccgggcau

SEQ ID NO: 1216003 - RNA, 19 nt, Artificial Sequence
  Description of Artificial Sequence: Synthetic oligonucleotide
ucuaagagcucuguuucuc

SEQ ID NO: 1216004 - RNA, 19 nt, Artificial Sequence
  Description of Artificial Sequence: Synthetic oligonucleotide
gauggauauucuucauaga

SEQ ID NO: 1216005 - RNA, 19 nt, Artificial Sequence
  Description of Artificial Sequence: Synthetic oligonucleotide
acuagcaggcauuuaucaa

SEQ ID NO: 1216006 - RNA, 19 nt, Artificial Sequence
  Description of Artificial Sequence: Synthetic oligonucleotide
cuaagccauaaugacuagc

SEQ ID NO: 1216007 - RNA, 19 nt, Artificial Sequence
  Description of Artificial Sequence: Synthetic oligonucleotide
uggcaucuuuucuggacag

SEQ ID NO: 1216008 - RNA, 19 nt, Artificial Sequence
  Description of Artificial Sequence: Synthetic oligonucleotide
auuaacagccagguuccag

SEQ ID NO: 1216009 - RNA, 19 nt, Artificial Sequence
  Description of Artificial Sequence: Synthetic oligonucleotide
ugcuaauucuucacuuaau

SEQ ID NO: 1216010 - RNA, 19 nt, Artificial Sequence
  Description of Artificial Sequence: Synthetic oligonucleotide
accacacuugacuuucuga

SEQ ID NO: 1216011 - RNA, 19 nt, Artificial Sequence
  Description of Artificial Sequence: Synthetic oligonucleotide
ccuucaagugaauugcaag

SEQ ID NO: 1216012 - RNA, 19 nt, Artificial Sequence
  Description of Artificial Sequence: Synthetic oligonucleotide
ggaucauuuuaucuaggac

SEQ ID NO: 1216013 - RNA, 19 nt, Artificial Sequence
  Description of Artificial Sequence: Synthetic oligonucleotide
agacgauauuaagacauga

SEQ ID NO: 1216014 - RNA, 19 nt, Artificial Sequence
  Description of Artificial Sequence: Synthetic oligonucleotide
cuguaacagucuccaacgg

SEQ ID NO: 1216015 - RNA, 19 nt, Artificial Sequence
  Description of Artificial Sequence: Synthetic oligonucleotide
ggacugagcauuuaaagua

SEQ ID NO: 1216016 - RNA, 19 nt, Artificial Sequence
  Description of Artificial Sequence: Synthetic oligonucleotide
agugaauugcaaguucagu

SEQ ID NO: 1216017 - RNA, 19 nt, Artificial Sequence
  Description of Artificial Sequence: Synthetic oligonucleotide
ccacaugaaauaucugacg

SEQ ID NO: 1216018 - RNA, 19 nt, Artificial Sequence
  Description of Artificial Sequence: Synthetic oligonucleotide
ugaggcaguugcuucggcu

SEQ ID NO: 1216019 - RNA, 19 nt, Artificial Sequence
  Description of Artificial Sequence: Synthetic oligonucleotide
cugagcaaguggauacagc

SEQ ID NO: 1216020 - RNA, 19 nt, Artificial Sequence
  Description of Artificial Sequence: Synthetic oligonucleotide
uccauccggccucagguac

SEQ ID NO: 1216021 - RNA, 19 nt, Artificial Sequence
  Description of Artificial Sequence: Synthetic oligonucleotide
ggagacaagcuacaagcug

SEQ ID NO: 1216022 - RNA, 19 nt, Artificial Sequence
  Description of Artificial Sequence: Synthetic oligonucleotide
uucuaagagcucuguuucu

SEQ ID NO: 1216023 - RNA, 19 nt, Artificial Sequence
  Description of Artificial Sequence: Synthetic oligonucleotide
ucagugguuucuuccggcu

SEQ ID NO: 1216024 - RNA, 19 nt, Artificial Sequence
  Description of Artificial Sequence: Synthetic oligonucleotide
uaaaguacagucgcuuaua

SEQ ID NO: 1216025 - RNA, 19 nt, Artificial Sequence
  Description of Artificial Sequence: Synthetic oligonucleotide
acaugguaagggaagcaag

SEQ ID NO: 1216026 - RNA, 19 nt, Artificial Sequence
  Description of Artificial Sequence: Synthetic oligonucleotide
aagcugagguacugugucu

SEQ ID NO: 1216027 - RNA, 19 nt, Artificial Sequence
  Description of Artificial Sequence: Synthetic oligonucleotide
agacuaagccauaaugacu

SEQ ID NO: 1216028 - RNA, 19 nt, Artificial Sequence
  Description of Artificial Sequence: Synthetic oligonucleotide
auuaagcgaacagcuacca

SEQ ID NO: 1216029 - RNA, 19 nt, Artificial Sequence
  Description of Artificial Sequence: Synthetic oligonucleotide
aaacccuuugggaucauuu

SEQ ID NO: 1216030 - RNA, 19 nt, Artificial Sequence
  Description of Artificial Sequence: Synthetic oligonucleotide
acuaagccauaaugacuag

SEQ ID NO: 1216031 - RNA, 19 nt, Artificial Sequence
  Description of Artificial Sequence: Synthetic oligonucleotide
augucaagaucucccauuu

SEQ ID NO: 1216032 - RNA, 19 nt, Artificial Sequence
  Description of Artificial Sequence: Synthetic oligonucleotide
acaguaucuucugggagug

SEQ ID NO: 1216033 - RNA, 19 nt, Artificial Sequence
  Description of Artificial Sequence: Synthetic oligonucleotide
auuaagacaugaacccaug

SEQ ID NO: 1216034 - RNA, 19 nt, Artificial Sequence
  Description of Artificial Sequence: Synthetic oligonucleotide
uguaaucuuguaugacaua

SEQ ID NO: 1216035 - RNA, 19 nt, Artificial Sequence
  Description of Artificial Sequence: Synthetic oligonucleotide
acugagcaaguggauacag

SEQ ID NO: 1216036 - RNA, 19 nt, Artificial Sequence
  Description of Artificial Sequence: Synthetic oligonucleotide
caguaggaacaaucugucc

SEQ ID NO: 1216037 - RNA, 19 nt, Artificial Sequence
  Description of Artificial Sequence: Synthetic oligonucleotide
cugaauggcucuucauuuc

SEQ ID NO: 1216038 - RNA, 19 nt, Artificial Sequence
  Description of Artificial Sequence: Synthetic oligonucleotide
ucuaaccaaagcugaggua

SEQ ID NO: 1216039 - RNA, 19 nt, Artificial Sequence
  Description of Artificial Sequence: Synthetic oligonucleotide
ugcugcuaauucuucacuu

SEQ ID NO: 1216040 - RNA, 19 nt, Artificial Sequence
  Description of Artificial Sequence: Synthetic oligonucleotide
uacaagcaauccaggcuga

SEQ ID NO: 1216041 - RNA, 19 nt, Artificial Sequence
  Description of Artificial Sequence: Synthetic oligonucleotide
uacagucgcuuauauguua

SEQ ID NO: 1216042 - RNA, 19 nt, Artificial Sequence
  Description of Artificial Sequence: Synthetic oligonucleotide
augaaauaucugacgccac

SEQ ID NO: 1216043 - RNA, 19 nt, Artificial Sequence
  Description of Artificial Sequence: Synthetic oligonucleotide
acuggugcaaugguuauuu

SEQ ID NO: 1216044 - RNA, 19 nt, Artificial Sequence
  Description of Artificial Sequence: Synthetic oligonucleotide
uguccuuuccacuguugaa

SEQ ID NO: 1216045 - RNA, 19 nt, Artificial Sequence
  Description of Artificial Sequence: Synthetic oligonucleotide
uucuucauagaaggacuac

SEQ ID NO: 1216046 - RNA, 19 nt, Artificial Sequence
  Description of Artificial Sequence: Synthetic oligonucleotide
ugacgccaccuuuugcugc

SEQ ID NO: 1216047 - RNA, 19 nt, Artificial Sequence
  Description of Artificial Sequence: Synthetic oligonucleotide
caaguggauacagcucugg

SEQ ID NO: 1216048 - RNA, 19 nt, Artificial Sequence
  Description of Artificial Sequence: Synthetic oligonucleotide
gucagugguuucuuccggc

SEQ ID NO: 1216049 - RNA, 19 nt, Artificial Sequence
  Description of Artificial Sequence: Synthetic oligonucleotide
uucauccuuuccacacagc

SEQ ID NO: 1216050 - RNA, 19 nt, Artificial Sequence
  Description of Artificial Sequence: Synthetic oligonucleotide
gacgauauuaagacaugaa

SEQ ID NO: 1216051 - RNA, 19 nt, Artificial Sequence
  Description of Artificial Sequence: Synthetic oligonucleotide
cuuauauguuacaaaguau

SEQ ID NO: 1216052 - RNA, 19 nt, Artificial Sequence
  Description of Artificial Sequence: Synthetic oligonucleotide
augaggcaguugcuucggc

SEQ ID NO: 1216053 - RNA, 19 nt, Artificial Sequence
  Description of Artificial Sequence: Synthetic oligonucleotide
uacagcucuggguuuucac

SEQ ID NO: 1216054 - RNA, 19 nt, Artificial Sequence
  Description of Artificial Sequence: Synthetic oligonucleotide
ugagccucacugagcaagu

SEQ ID NO: 1216055 - RNA, 19 nt, Artificial Sequence
  Description of Artificial Sequence: Synthetic oligonucleotide
cauacaccagcuucaucuc

SEQ ID NO: 1216056 - RNA, 19 nt, Artificial Sequence
  Description of Artificial Sequence: Synthetic oligonucleotide
accauaaagcagcuucaau

SEQ ID NO: 1216057 - RNA, 19 nt, Artificial Sequence
  Description of Artificial Sequence: Synthetic oligonucleotide
ggaguggcuccagaaaugg

SEQ ID NO: 1216058 - RNA, 19 nt, Artificial Sequence
  Description of Artificial Sequence: Synthetic oligonucleotide
gucgcuuauauguuacaaa

SEQ ID NO: 1216059 - RNA, 19 nt, Artificial Sequence
  Description of Artificial Sequence: Synthetic oligonucleotide
uagcugaacuggugcaaug

SEQ ID NO: 1216060 - RNA, 19 nt, Artificial Sequence
  Description of Artificial Sequence: Synthetic oligonucleotide
caacggugcgcacagcuuc

SEQ ID NO: 1216061 - RNA, 19 nt, Artificial Sequence
  Description of Artificial Sequence: Synthetic oligonucleotide
auucugccugcuguaacag

SEQ ID NO: 1216062 - RNA, 19 nt, Artificial Sequence
  Description of Artificial Sequence: Synthetic oligonucleotide
agcgaacagcuaccauuac

SEQ ID NO: 1216063 - RNA, 19 nt, Artificial Sequence
  Description of Artificial Sequence: Synthetic oligonucleotide
agucgcuuauauguuacaa

SEQ ID NO: 1216064 - RNA, 19 nt, Artificial Sequence
  Description of Artificial Sequence: Synthetic oligonucleotide
cauaugcaaugacugccuc

SEQ ID NO: 1216065 - RNA, 19 nt, Artificial Sequence
  Description of Artificial Sequence: Synthetic oligonucleotide
auguuacaaaguauaacuu

SEQ ID NO: 1216066 - RNA, 19 nt, Artificial Sequence
  Description of Artificial Sequence: Synthetic oligonucleotide
gucuaaccaaagcugaggu

SEQ ID NO: 1216067 - RNA, 19 nt, Artificial Sequence
  Description of Artificial Sequence: Synthetic oligonucleotide
uacugagauguaagcuuaa

SEQ ID NO: 1216068 - RNA, 19 nt, Artificial Sequence
  Description of Artificial Sequence: Synthetic oligonucleotide
ucuaugcauuguucauacu

SEQ ID NO: 1216069 - RNA, 19 nt, Artificial Sequence
  Description of Artificial Sequence: Synthetic oligonucleotide
gggaucauuuuaucuagga

SEQ ID NO: 1216070 - RNA, 19 nt, Artificial Sequence
  Description of Artificial Sequence: Synthetic oligonucleotide
aauccuccgcuguucucaa

SEQ ID NO: 1216071 - RNA, 19 nt, Artificial Sequence
  Description of Artificial Sequence: Synthetic oligonucleotide
agcaagcaccauaaagcag

SEQ ID NO: 1216072 - RNA, 19 nt, Artificial Sequence
  Description of Artificial Sequence: Synthetic oligonucleotide
auagaacaugagcgcugag

SEQ ID NO: 1216073 - RNA, 19 nt, Artificial Sequence
  Description of Artificial Sequence: Synthetic oligonucleotide
gagagacuguaauuucaaa

SEQ ID NO: 1216074 - RNA, 19 nt, Artificial Sequence
  Description of Artificial Sequence: Synthetic oligonucleotide
agguacaggagggauucug

SEQ ID NO: 1216075 - RNA, 19 nt, Artificial Sequence
  Description of Artificial Sequence: Synthetic oligonucleotide
ucucaaugguaugguguca

SEQ ID NO: 1216076 - RNA, 19 nt, Artificial Sequence
  Description of Artificial Sequence: Synthetic oligonucleotide
gagcgcugaggccagcaac

SEQ ID NO: 1216077 - RNA, 19 nt, Artificial Sequence
  Description of Artificial Sequence: Synthetic oligonucleotide
gggauucugcuccuaacac

SEQ ID NO: 1216078 - RNA, 19 nt, Artificial Sequence
  Description of Artificial Sequence: Synthetic oligonucleotide
aauuaacagccagguucca

SEQ ID NO: 1216079 - RNA, 19 nt, Artificial Sequence
  Description of Artificial Sequence: Synthetic oligonucleotide
guaugacauagaacaugag

SEQ ID NO: 1216080 - RNA, 19 nt, Artificial Sequence
  Description of Artificial Sequence: Synthetic oligonucleotide
auaauggaagcuacaucaa

SEQ ID NO: 1216081 - RNA, 19 nt, Artificial Sequence
  Description of Artificial Sequence: Synthetic oligonucleotide
acuguugaauuaacagcca

SEQ ID NO: 1216082 - RNA, 19 nt, Artificial Sequence
  Description of Artificial Sequence: Synthetic oligonucleotide
uaaugacuagcaggcauuu

SEQ ID NO: 1216083 - RNA, 19 nt, Artificial Sequence
  Description of Artificial Sequence: Synthetic oligonucleotide
caugaacccauggguagac

SEQ ID NO: 1216084 - RNA, 19 nt, Artificial Sequence
  Description of Artificial Sequence: Synthetic oligonucleotide
agcgugucuaugcauuguu

SEQ ID NO: 1216085 - RNA, 19 nt, Artificial Sequence
  Description of Artificial Sequence: Synthetic oligonucleotide
auuugggagacaagcuaca

SEQ ID NO: 1216086 - RNA, 19 nt, Artificial Sequence
  Description of Artificial Sequence: Synthetic oligonucleotide
agacaugaacccaugggua

SEQ ID NO: 1216087 - RNA, 19 nt, Artificial Sequence
  Description of Artificial Sequence: Synthetic oligonucleotide
ggugaaaauucacaaguau

SEQ ID NO: 1216088 - RNA, 19 nt, Artificial Sequence
  Description of Artificial Sequence: Synthetic oligonucleotide
caaugguauggugucagga

SEQ ID NO: 1216089 - RNA, 19 nt, Artificial Sequence
  Description of Artificial Sequence: Synthetic oligonucleotide
gccacaugaaauaucugac

SEQ ID NO: 1216090 - RNA, 19 nt, Artificial Sequence
  Description of Artificial Sequence: Synthetic oligonucleotide
uggguagacuaagccauaa

SEQ ID NO: 1216091 - RNA, 19 nt, Artificial Sequence
  Description of Artificial Sequence: Synthetic oligonucleotide
acugagcauuuaaaguaca

SEQ ID NO: 1216092 - RNA, 19 nt, Artificial Sequence
  Description of Artificial Sequence: Synthetic oligonucleotide
uccuuuccacacagccacc

SEQ ID NO: 1216093 - RNA, 19 nt, Artificial Sequence
  Description of Artificial Sequence: Synthetic oligonucleotide
ccuuaaacuguaagcccag

SEQ ID NO: 1216094 - RNA, 19 nt, Artificial Sequence
  Description of Artificial Sequence: Synthetic oligonucleotide
auuucacaauauacagacu

SEQ ID NO: 1216095 - RNA, 19 nt, Artificial Sequence
  Description of Artificial Sequence: Synthetic oligonucleotide
ugucaagaucucccauuuu

SEQ ID NO: 1216096 - RNA, 19 nt, Artificial Sequence
  Description of Artificial Sequence: Synthetic oligonucleotide
auagcugaacuggugcaau

SEQ ID NO: 1216097 - RNA, 19 nt, Artificial Sequence
  Description of Artificial Sequence: Synthetic oligonucleotide
guguuacuauagucuacca

SEQ ID NO: 1216098 - RNA, 19 nt, Artificial Sequence
  Description of Artificial Sequence: Synthetic oligonucleotide
gagcaaguggauacagcuc

SEQ ID NO: 1216099 - RNA, 19 nt, Artificial Sequence
  Description of Artificial Sequence: Synthetic oligonucleotide
aggcaguugcuucggcuca

SEQ ID NO: 1216100 - RNA, 19 nt, Artificial Sequence
  Description of Artificial Sequence: Synthetic oligonucleotide
cuaaggaaucagacgauau

SEQ ID NO: 1216101 - RNA, 19 nt, Artificial Sequence
  Description of Artificial Sequence: Synthetic oligonucleotide
cauaugagagacuguaauu

SEQ ID NO: 1216102 - RNA, 19 nt, Artificial Sequence
  Description of Artificial Sequence: Synthetic oligonucleotide
auaucugacgccaccuuuu

SEQ ID NO: 1216103 - RNA, 19 nt, Artificial Sequence
  Description of Artificial Sequence: Synthetic oligonucleotide
guacugagauguaagcuua

SEQ ID NO: 1216104 - RNA, 19 nt, Artificial Sequence
  Description of Artificial Sequence: Synthetic oligonucleotide
caguugcuucggcucagcc

SEQ ID NO: 1216105 - RNA, 19 nt, Artificial Sequence
  Description of Artificial Sequence: Synthetic oligonucleotide
cuccgaaggcuccagcuga

SEQ ID NO: 1216106 - RNA, 19 nt, Artificial Sequence
  Description of Artificial Sequence: Synthetic oligonucleotide
cagugguuucuuccggcug

SEQ ID NO: 1216107 - RNA, 19 nt, Artificial Sequence
  Description of Artificial Sequence: Synthetic oligonucleotide
gaacccauggguagacuaa

SEQ ID NO: 1216108 - RNA, 19 nt, Artificial Sequence
  Description of Artificial Sequence: Synthetic oligonucleotide
gucuuauaaguguuacuau

SEQ ID NO: 1216109 - RNA, 19 nt, Artificial Sequence
  Description of Artificial Sequence: Synthetic oligonucleotide
uggauacagcucuggguuu

SEQ ID NO: 1216110 - RNA, 19 nt, Artificial Sequence
  Description of Artificial Sequence: Synthetic oligonucleotide
ugucaggacacugccuuuu

SEQ ID NO: 1216111 - RNA, 19 nt, Artificial Sequence
  Description of Artificial Sequence: Synthetic oligonucleotide
gacugaagcuacaagcaau

SEQ ID NO: 1216112 - RNA, 19 nt, Artificial Sequence
  Description of Artificial Sequence: Synthetic oligonucleotide
ugccuccgggcaucucucg

SEQ ID NO: 1216113 - RNA, 19 nt, Artificial Sequence
  Description of Artificial Sequence: Synthetic oligonucleotide
gucacuaaggcuggugaaa

SEQ ID NO: 1216114 - RNA, 19 nt, Artificial Sequence
  Description of Artificial Sequence: Synthetic oligonucleotide
acagccaccuuaaacugua

SEQ ID NO: 1216115 - RNA, 19 nt, Artificial Sequence
  Description of Artificial Sequence: Synthetic oligonucleotide
acuguaagcccaggacuga

SEQ ID NO: 1216116 - RNA, 19 nt, Artificial Sequence
  Description of Artificial Sequence: Synthetic oligonucleotide
ggcauuuaucaaaauccuc

SEQ ID NO: 1216117 - RNA, 19 nt, Artificial Sequence
  Description of Artificial Sequence: Synthetic oligonucleotide
guaggaacaaucuguccuu

SEQ ID NO: 1216118 - RNA, 19 nt, Artificial Sequence
  Description of Artificial Sequence: Synthetic oligonucleotide
ccauggguagacuaagcca

SEQ ID NO: 1216119 - RNA, 19 nt, Artificial Sequence
  Description of Artificial Sequence: Synthetic oligonucleotide
cuacaagcugagcuuccca

SEQ ID NO: 1216120 - RNA, 19 nt, Artificial Sequence
  Description of Artificial Sequence: Synthetic oligonucleotide
cagccacaugaaauaucug

SEQ ID NO: 1216121 - RNA, 19 nt, Artificial Sequence
  Description of Artificial Sequence: Synthetic oligonucleotide
agucuccaacggugcgcac

SEQ ID NO: 1216122 - RNA, 19 nt, Artificial Sequence
  Description of Artificial Sequence: Synthetic oligonucleotide
caugucaagaucucccauu

SEQ ID NO: 1216123 - RNA, 19 nt, Artificial Sequence
  Description of Artificial Sequence: Synthetic oligonucleotide
uaggaacaaucuguccuuu

SEQ ID NO: 1216124 - RNA, 19 nt, Artificial Sequence
  Description of Artificial Sequence: Synthetic oligonucleotide
gaacuggugcaaugguuau

SEQ ID NO: 1216125 - RNA, 19 nt, Artificial Sequence
  Description of Artificial Sequence: Synthetic oligonucleotide
cccauuaauaugaaacccu

SEQ ID NO: 1216126 - RNA, 19 nt, Artificial Sequence
  Description of Artificial Sequence: Synthetic oligonucleotide
cuggugcaaugguuauuuc

SEQ ID NO: 1216127 - RNA, 19 nt, Artificial Sequence
  Description of Artificial Sequence: Synthetic oligonucleotide
gucuccaacggugcgcaca

SEQ ID NO: 1216128 - RNA, 19 nt, Artificial Sequence
  Description of Artificial Sequence: Synthetic oligonucleotide
cucacugagcaaguggaua

SEQ ID NO: 1216129 - RNA, 19 nt, Artificial Sequence
  Description of Artificial Sequence: Synthetic oligonucleotide
agcuaaggaaucagacgau

SEQ ID NO: 1216130 - RNA, 19 nt, Artificial Sequence
  Description of Artificial Sequence: Synthetic oligonucleotide
gacgccaccuuuugcugcu

SEQ ID NO: 1216131 - RNA, 19 nt, Artificial Sequence
  Description of Artificial Sequence: Synthetic oligonucleotide
auacagcucuggguuuuca

SEQ ID NO: 1216132 - RNA, 19 nt, Artificial Sequence
  Description of Artificial Sequence: Synthetic oligonucleotide
caguaucuucugggagugg

SEQ ID NO: 1216133 - RNA, 19 nt, Artificial Sequence
  Description of Artificial Sequence: Synthetic oligonucleotide
caucucucgagcagcgugu

SEQ ID NO: 1216134 - RNA, 19 nt, Artificial Sequence
  Description of Artificial Sequence: Synthetic oligonucleotide
gaugagccucacugagcaa

SEQ ID NO: 1216135 - RNA, 19 nt, Artificial Sequence
  Description of Artificial Sequence: Synthetic oligonucleotide
gagccucacugagcaagug

SEQ ID NO: 1216136 - RNA, 19 nt, Artificial Sequence
  Description of Artificial Sequence: Synthetic oligonucleotide
cucucgagcagcgugucua

SEQ ID NO: 1216137 - RNA, 19 nt, Artificial Sequence
  Description of Artificial Sequence: Synthetic oligonucleotide
cagucgcuuauauguuaca

SEQ ID NO: 1216138 - RNA, 19 nt, Artificial Sequence
  Description of Artificial Sequence: Synthetic oligonucleotide
gggaguggcuccagaaaug

SEQ ID NO: 1216139 - RNA, 19 nt, Artificial Sequence
  Description of Artificial Sequence: Synthetic oligonucleotide
augagcgcugaggccagca

SEQ ID NO: 1216140 - RNA, 19 nt, Artificial Sequence
  Description of Artificial Sequence: Synthetic oligonucleotide
auaaugcaaggcaguugaa

SEQ ID NO: 1216141 - RNA, 19 nt, Artificial Sequence
  Description of Artificial Sequence: Synthetic oligonucleotide
uugcuucggcucagccaca

SEQ ID NO: 1216142 - RNA, 19 nt, Artificial Sequence
  Description of Artificial Sequence: Synthetic oligonucleotide
ggacagaagccucuugggu

SEQ ID NO: 1216143 - RNA, 19 nt, Artificial Sequence
  Description of Artificial Sequence: Synthetic oligonucleotide
cagucuccaacggugcgca

SEQ ID NO: 1216144 - RNA, 19 nt, Artificial Sequence
  Description of Artificial Sequence: Synthetic oligonucleotide
augaacccauggguagacu

SEQ ID NO: 1216145 - RNA, 19 nt, Artificial Sequence
  Description of Artificial Sequence: Synthetic oligonucleotide
gcaaugguuauuucacaau

SEQ ID NO: 1216146 - RNA, 19 nt, Artificial Sequence
  Description of Artificial Sequence: Synthetic oligonucleotide
gcucucaguagcagaugag

SEQ ID NO: 1216147 - RNA, 19 nt, Artificial Sequence
  Description of Artificial Sequence: Synthetic oligonucleotide
ggacacugccuuuuagaua

SEQ ID NO: 1216148 - RNA, 19 nt, Artificial Sequence
  Description of Artificial Sequence: Synthetic oligonucleotide
caagcaccauaaagcagcu

SEQ ID NO: 1216149 - RNA, 19 nt, Artificial Sequence
  Description of Artificial Sequence: Synthetic oligonucleotide
ccugauuagcauaugcaau

SEQ ID NO: 1216150 - RNA, 19 nt, Artificial Sequence
  Description of Artificial Sequence: Synthetic oligonucleotide
agccauacaccagcuucau

SEQ ID NO: 1216151 - RNA, 19 nt, Artificial Sequence
  Description of Artificial Sequence: Synthetic oligonucleotide
gguccagucccacagcaau

SEQ ID NO: 1216152 - RNA, 19 nt, Artificial Sequence
  Description of Artificial Sequence: Synthetic oligonucleotide
gcuaaggaaucagacgaua

SEQ ID NO: 1216153 - RNA, 19 nt, Artificial Sequence
  Description of Artificial Sequence: Synthetic oligonucleotide
caccauaaagcagcuucaa

SEQ ID NO: 1216154 - RNA, 19 nt, Artificial Sequence
  Description of Artificial Sequence: Synthetic oligonucleotide
ccuccgggcaucucucgag

SEQ ID NO: 1216155 - RNA, 19 nt, Artificial Sequence
  Description of Artificial Sequence: Synthetic oligonucleotide
guagcagaugagccucacu

SEQ ID NO: 1216156 - RNA, 19 nt, Artificial Sequence
  Description of Artificial Sequence: Synthetic oligonucleotide
gaaggacuacagaggacau

SEQ ID NO: 1216157 - RNA, 19 nt, Artificial Sequence
  Description of Artificial Sequence: Synthetic oligonucleotide
gucuaccauuucuuuguau

SEQ ID NO: 1216158 - RNA, 19 nt, Artificial Sequence
  Description of Artificial Sequence: Synthetic oligonucleotide
ccauuaauaugaaacccuu

SEQ ID NO: 1216159 - RNA, 19 nt, Artificial Sequence
  Description of Artificial Sequence: Synthetic oligonucleotide
agaagccucuugggugacu

SEQ ID NO: 1216160 - RNA, 19 nt, Artificial Sequence
  Description of Artificial Sequence: Synthetic oligonucleotide
cucgagcagcgugucuaug

SEQ ID NO: 1216161 - RNA, 19 nt, Artificial Sequence
  Description of Artificial Sequence: Synthetic oligonucleotide
aucuaggacugagcauuua

SEQ ID NO: 1216162 - RNA, 19 nt, Artificial Sequence
  Description of Artificial Sequence: Synthetic oligonucleotide
ccgggcaucucucgagcag

SEQ ID NO: 1216163 - RNA, 19 nt, Artificial Sequence
  Description of Artificial Sequence: Synthetic oligonucleotide
gagcagcgugucuaugcau

SEQ ID NO: 1216164 - RNA, 19 nt, Artificial Sequence
  Description of Artificial Sequence: Synthetic oligonucleotide
auggguagacuaagccaua

SEQ ID NO: 1216165 - RNA, 19 nt, Artificial Sequence
  Description of Artificial Sequence: Synthetic oligonucleotide
ugacugccuccgggcaucu

SEQ ID NO: 1216166 - RNA, 19 nt, Artificial Sequence
  Description of Artificial Sequence: Synthetic oligonucleotide
gcgugucuaugcauuguuc

SEQ ID NO: 1216167 - RNA, 19 nt, Artificial Sequence
  Description of Artificial Sequence: Synthetic oligonucleotide
guacagucgcuuauauguu

SEQ ID NO: 1216168 - RNA, 19 nt, Artificial Sequence
  Description of Artificial Sequence: Synthetic oligonucleotide
ccuccagauguacugagau

SEQ ID NO: 1216169 - RNA, 19 nt, Artificial Sequence
  Description of Artificial Sequence: Synthetic oligonucleotide
gccauacaccagcuucauc

SEQ ID NO: 1216170 - RNA, 19 nt, Artificial Sequence
  Description of Artificial Sequence: Synthetic oligonucleotide
gggagacaagcuacaagcu

SEQ ID NO: 1216171 - RNA, 19 nt, Artificial Sequence
  Description of Artificial Sequence: Synthetic oligonucleotide
cccuuugggaucauuuuau

SEQ ID NO: 1216172 - RNA, 19 nt, Artificial Sequence
  Description of Artificial Sequence: Synthetic oligonucleotide
gcuucggcucagccacaug

SEQ ID NO: 1216173 - RNA, 19 nt, Artificial Sequence
  Description of Artificial Sequence: Synthetic oligonucleotide
cagacuccauccggccuca

SEQ ID NO: 1216174 - RNA, 19 nt, Artificial Sequence
  Description of Artificial Sequence: Synthetic oligonucleotide
ggguagacuaagccauaau

SEQ ID NO: 1216175 - RNA, 19 nt, Artificial Sequence
  Description of Artificial Sequence: Synthetic oligonucleotide
ccauaaugacuagcaggca

SEQ ID NO: 1216176 - RNA, 19 nt, Artificial Sequence
  Description of Artificial Sequence: Synthetic oligonucleotide
caccaucuucugggagaac

SEQ ID NO: 1216177 - RNA, 19 nt, Artificial Sequence
  Description of Artificial Sequence: Synthetic oligonucleotide
cagccaccuuaaacuguaa

SEQ ID NO: 1216178 - RNA, 19 nt, Artificial Sequence
  Description of Artificial Sequence: Synthetic oligonucleotide
aggagggauucugcuccua

SEQ ID NO: 1216179 - RNA, 19 nt, Artificial Sequence
  Description of Artificial Sequence: Synthetic oligonucleotide
gguauggugucaggacacu

SEQ ID NO: 1216180 - RNA, 19 nt, Artificial Sequence
  Description of Artificial Sequence: Synthetic oligonucleotide
ccagauguacugagaugua

SEQ ID NO: 1216181 - RNA, 19 nt, Artificial Sequence
  Description of Artificial Sequence: Synthetic oligonucleotide
gccuccgggcaucucucga

SEQ ID NO: 1216182 - RNA, 19 nt, Artificial Sequence
  Description of Artificial Sequence: Synthetic oligonucleotide
ccauccggccucagguaca

SEQ ID NO: 1216183 - RNA, 19 nt, Artificial Sequence
  Description of Artificial Sequence: Synthetic oligonucleotide
cagcgugucuaugcauugu

SEQ ID NO: 1216184 - RNA, 19 nt, Artificial Sequence
  Description of Artificial Sequence: Synthetic oligonucleotide
gccaccuuuugcugcuaau

SEQ ID NO: 1216185 - RNA, 19 nt, Artificial Sequence
  Description of Artificial Sequence: Synthetic oligonucleotide
cagguacaggagggauucu

SEQ ID NO: 1216186 - RNA, 19 nt, Artificial Sequence
  Description of Artificial Sequence: Synthetic oligonucleotide
ccaacggugcgcacagcuu

SEQ ID NO: 1216187 - RNA, 19 nt, Artificial Sequence
  Description of Artificial Sequence: Synthetic oligonucleotide
gcuauccagcagggcagcu

SEQ ID NO: 1216188 - RNA, 19 nt, Artificial Sequence
  Description of Artificial Sequence: Synthetic oligonucleotide
ggcaucucucgagcagcgu

SEQ ID NO: 1216189 - RNA, 19 nt, Artificial Sequence
  Description of Artificial Sequence: Synthetic oligonucleotide
gggccacauaugagagacu

SEQ ID NO: 1216190 - RNA, 19 nt, Artificial Sequence
  Description of Artificial Sequence: Synthetic oligonucleotide
ccaccacacuugacuuucu

SEQ ID NO: 1216191 - RNA, 19 nt, Artificial Sequence
  Description of Artificial Sequence: Synthetic oligonucleotide
uuacuuaugaaauaaaggc

SEQ ID NO: 1216192 - RNA, 19 nt, Artificial Sequence
  Description of Artificial Sequence: Synthetic oligonucleotide
uaaagaauaaguuacaagu

SEQ ID NO: 1216193 - RNA, 19 nt, Artificial Sequence
  Description of Artificial Sequence: Synthetic oligonucleotide
aaaaugaauccauuguauc

SEQ ID NO: 1216194 - RNA, 19 nt, Artificial Sequence
  Description of Artificial Sequence: Synthetic oligonucleotide
uaaaauauggaacacugcu

SEQ ID NO: 1216195 - RNA, 19 nt, Artificial Sequence
  Description of Artificial Sequence: Synthetic oligonucleotide
uauccugaagcuaauaaag

SEQ ID NO: 1216196 - RNA, 19 nt, Artificial Sequence
  Description of Artificial Sequence: Synthetic oligonucleotide
uugaaugaauuacacaucc

SEQ ID NO: 1216197 - RNA, 19 nt, Artificial Sequence
  Description of Artificial Sequence: Synthetic oligonucleotide
augaauuacacauccacag

SEQ ID NO: 1216198 - RNA, 19 nt, Artificial Sequence
  Description of Artificial Sequence: Synthetic oligonucleotide
uguuuguuaagcaauucgc

SEQ ID NO: 1216199 - RNA, 19 nt, Artificial Sequence
  Description of Artificial Sequence: Synthetic oligonucleotide
aaauauggaacacugcuau

SEQ ID NO: 1216200 - RNA, 19 nt, Artificial Sequence
  Description of Artificial Sequence: Synthetic oligonucleotide
ucgaguaauguucauugcg

SEQ ID NO: 1216201 - RNA, 19 nt, Artificial Sequence
  Description of Artificial Sequence: Synthetic oligonucleotide
gagacguuuagguagaaug

SEQ ID NO: 1216202 - RNA, 19 nt, Artificial Sequence
  Description of Artificial Sequence: Synthetic oligonucleotide
auacuuuaaaauauggaac

SEQ ID NO: 1216203 - RNA, 19 nt, Artificial Sequence
  Description of Artificial Sequence: Synthetic oligonucleotide
cauggcauaaaaugaaucc

SEQ ID NO: 1216204 - RNA, 19 nt, Artificial Sequence
  Description of Artificial Sequence: Synthetic oligonucleotide
uuguuaaauaggcugagga

SEQ ID NO: 1216205 - RNA, 19 nt, Artificial Sequence
  Description of Artificial Sequence: Synthetic oligonucleotide
acuugagacguuuagguag

SEQ ID NO: 1216206 - RNA, 19 nt, Artificial Sequence
  Description of Artificial Sequence: Synthetic oligonucleotide
cauuucaguauacagggcg

SEQ ID NO: 1216207 - RNA, 19 nt, Artificial Sequence
  Description of Artificial Sequence: Synthetic oligonucleotide
aagcuaauaaagcagucca

SEQ ID NO: 1216208 - RNA, 19 nt, Artificial Sequence
  Description of Artificial Sequence: Synthetic oligonucleotide
aauacucuguguuauuuga

SEQ ID NO: 1216209 - RNA, 19 nt, Artificial Sequence
  Description of Artificial Sequence: Synthetic oligonucleotide
uuuagguagaaugaguuug

SEQ ID NO: 1216210 - RNA, 19 nt, Artificial Sequence
  Description of Artificial Sequence: Synthetic oligonucleotide
uuaaugagauucacaaugc

SEQ ID NO: 1216211 - RNA, 19 nt, Artificial Sequence
  Description of Artificial Sequence: Synthetic oligonucleotide
uguuaagcaauucgcacag

SEQ ID NO: 1216212 - RNA, 19 nt, Artificial Sequence
  Description of Artificial Sequence: Synthetic oligonucleotide
aaaacugguacuugacuug

SEQ ID NO: 1216213 - RNA, 19 nt, Artificial Sequence
  Description of Artificial Sequence: Synthetic oligonucleotide
uccgaaugaagaaagcugc

SEQ ID NO: 1216214 - RNA, 19 nt, Artificial Sequence
  Description of Artificial Sequence: Synthetic oligonucleotide
uucgugaacaggaaaagga

SEQ ID NO: 1216215 - RNA, 19 nt, Artificial Sequence
  Description of Artificial Sequence: Synthetic oligonucleotide
ucauuuaaagaauaaguua

SEQ ID NO: 1216216 - RNA, 19 nt, Artificial Sequence
  Description of Artificial Sequence: Synthetic oligonucleotide
aauaagauguaaaauacua

SEQ ID NO: 1216217 - RNA, 19 nt, Artificial Sequence
  Description of Artificial Sequence: Synthetic oligonucleotide
aauuacacauccacagccc

SEQ ID NO: 1216218 - RNA, 19 nt, Artificial Sequence
  Description of Artificial Sequence: Synthetic oligonucleotide
uacagugugacacaccugu

SEQ ID NO: 1216219 - RNA, 19 nt, Artificial Sequence
  Description of Artificial Sequence: Synthetic oligonucleotide
aaacagcgaccacagacac

SEQ ID NO: 1216220 - RNA, 19 nt, Artificial Sequence
  Description of Artificial Sequence: Synthetic oligonucleotide
uaaccacucacucaguuga

SEQ ID NO: 1216221 - RNA, 19 nt, Artificial Sequence
  Description of Artificial Sequence: Synthetic oligonucleotide
gaagguuaugcucaaagca

SEQ ID NO: 1216222 - RNA, 19 nt, Artificial Sequence
  Description of Artificial Sequence: Synthetic oligonucleotide
uuuguuaagcaauucgcac

SEQ ID NO: 1216223 - RNA, 19 nt, Artificial Sequence
  Description of Artificial Sequence: Synthetic oligonucleotide
aacuauuugcauucugucu

SEQ ID NO: 1216224 - RNA, 19 nt, Artificial Sequence
  Description of Artificial Sequence: Synthetic oligonucleotide
aaagcuuucgaguaauguu

SEQ ID NO: 1216225 - RNA, 19 nt, Artificial Sequence
  Description of Artificial Sequence: Synthetic oligonucleotide
cuaagguagaagacaacgg

SEQ ID NO: 1216226 - RNA, 19 nt, Artificial Sequence
  Description of Artificial Sequence: Synthetic oligonucleotide
aagguuaugcucaaagcag

SEQ ID NO: 1216227 - RNA, 19 nt, Artificial Sequence
  Description of Artificial Sequence: Synthetic oligonucleotide
ugguacuugacuugagacg

SEQ ID NO: 1216228 - RNA, 19 nt, Artificial Sequence
  Description of Artificial Sequence: Synthetic oligonucleotide
aauucgcacaguucgccuc

SEQ ID NO: 1216229 - RNA, 19 nt, Artificial Sequence
  Description of Artificial Sequence: Synthetic oligonucleotide
gugacagaacaguugaagg

SEQ ID NO: 1216230 - RNA, 19 nt, Artificial Sequence
  Description of Artificial Sequence: Synthetic oligonucleotide
ugugcuacguuucauuuaa

SEQ ID NO: 1216231 - RNA, 19 nt, Artificial Sequence
  Description of Artificial Sequence: Synthetic oligonucleotide
uguauccugaagcuaauaa

SEQ ID NO: 1216232 - RNA, 19 nt, Artificial Sequence
  Description of Artificial Sequence: Synthetic oligonucleotide
uuguuaagcaauucgcaca

SEQ ID NO: 1216233 - RNA, 19 nt, Artificial Sequence
  Description of Artificial Sequence: Synthetic oligonucleotide
ugacuugagacguuuaggu

SEQ ID NO: 1216234 - RNA, 19 nt, Artificial Sequence
  Description of Artificial Sequence: Synthetic oligonucleotide
uuagguagaaugaguuugc

SEQ ID NO: 1216235 - RNA, 19 nt, Artificial Sequence
  Description of Artificial Sequence: Synthetic oligonucleotide
uccugaagcuaauaaagca

SEQ ID NO: 1216236 - RNA, 19 nt, Artificial Sequence
  Description of Artificial Sequence: Synthetic oligonucleotide
uuauuugacaaaucuucac

SEQ ID NO: 1216237 - RNA, 19 nt, Artificial Sequence
  Description of Artificial Sequence: Synthetic oligonucleotide
uuauucucaagcccguucu

SEQ ID NO: 1216238 - RNA, 19 nt, Artificial Sequence
  Description of Artificial Sequence: Synthetic oligonucleotide
ugaagguccgacuccaaag

SEQ ID NO: 1216239 - RNA, 19 nt, Artificial Sequence
  Description of Artificial Sequence: Synthetic oligonucleotide
ugaagguuaugcucaaagc

SEQ ID NO: 1216240 - RNA, 19 nt, Artificial Sequence
  Description of Artificial Sequence: Synthetic oligonucleotide
agcgcugcgcaccagacac

SEQ ID NO: 1216241 - RNA, 19 nt, Artificial Sequence
  Description of Artificial Sequence: Synthetic oligonucleotide
guucauugcgucuuccacg

SEQ ID NO: 1216242 - RNA, 19 nt, Artificial Sequence
  Description of Artificial Sequence: Synthetic oligonucleotide
cauaagaaggucauuuguc

SEQ ID NO: 1216243 - RNA, 19 nt, Artificial Sequence
  Description of Artificial Sequence: Synthetic oligonucleotide
ucugagaccaucacaacua

SEQ ID NO: 1216244 - RNA, 19 nt, Artificial Sequence
  Description of Artificial Sequence: Synthetic oligonucleotide
ucagccuuauucucaagcc

SEQ ID NO: 1216245 - RNA, 19 nt, Artificial Sequence
  Description of Artificial Sequence: Synthetic oligonucleotide
gaagcuaauaaagcagucc

SEQ ID NO: 1216246 - RNA, 19 nt, Artificial Sequence
  Description of Artificial Sequence: Synthetic oligonucleotide
gaccaucacaacuauuugc

SEQ ID NO: 1216247 - RNA, 19 nt, Artificial Sequence
  Description of Artificial Sequence: Synthetic oligonucleotide
cuaauaaagcaguccagug

SEQ ID NO: 1216248 - RNA, 19 nt, Artificial Sequence
  Description of Artificial Sequence: Synthetic oligonucleotide
uguuaaauaggcugaggaa

SEQ ID NO: 1216249 - RNA, 19 nt, Artificial Sequence
  Description of Artificial Sequence: Synthetic oligonucleotide
ucuccaaauauuccaagau

SEQ ID NO: 1216250 - RNA, 19 nt, Artificial Sequence
  Description of Artificial Sequence: Synthetic oligonucleotide
aaauucgugaacaggaaaa

SEQ ID NO: 1216251 - RNA, 19 nt, Artificial Sequence
  Description of Artificial Sequence: Synthetic oligonucleotide
aaagcugcuaagguagaag

SEQ ID NO: 1216252 - RNA, 19 nt, Artificial Sequence
  Description of Artificial Sequence: Synthetic oligonucleotide
uaugcaucauuacaguuuu

SEQ ID NO: 1216253 - RNA, 19 nt, Artificial Sequence
  Description of Artificial Sequence: Synthetic oligonucleotide
acuauuguuuguuaagcaa

SEQ ID NO: 1216254 - RNA, 19 nt, Artificial Sequence
  Description of Artificial Sequence: Synthetic oligonucleotide
aacuuuaagcuccuguguu

SEQ ID NO: 1216255 - RNA, 19 nt, Artificial Sequence
  Description of Artificial Sequence: Synthetic oligonucleotide
acagacaccgugucgcuac

SEQ ID NO: 1216256 - RNA, 19 nt, Artificial Sequence
  Description of Artificial Sequence: Synthetic oligonucleotide
gacguuucggcuaauguug

SEQ ID NO: 1216257 - RNA, 19 nt, Artificial Sequence
  Description of Artificial Sequence: Synthetic oligonucleotide
ucacuauuguuuguuaagc

SEQ ID NO: 1216258 - RNA, 19 nt, Artificial Sequence
  Description of Artificial Sequence: Synthetic oligonucleotide
uuacaaguugccaaauaau

SEQ ID NO: 1216259 - RNA, 19 nt, Artificial Sequence
  Description of Artificial Sequence: Synthetic oligonucleotide
auuucaguauacagggcgc

SEQ ID NO: 1216260 - RNA, 19 nt, Artificial Sequence
  Description of Artificial Sequence: Synthetic oligonucleotide
uaaugagauucacaaugca

SEQ ID NO: 1216261 - RNA, 19 nt, Artificial Sequence
  Description of Artificial Sequence: Synthetic oligonucleotide
cacgucaaugcacaggugc

SEQ ID NO: 1216262 - RNA, 19 nt, Artificial Sequence
  Description of Artificial Sequence: Synthetic oligonucleotide
aacaguugaagguccgacu

SEQ ID NO: 1216263 - RNA, 19 nt, Artificial Sequence
  Description of Artificial Sequence: Synthetic oligonucleotide
ugaguuugcguuucuuuug

SEQ ID NO: 1216264 - RNA, 19 nt, Artificial Sequence
  Description of Artificial Sequence: Synthetic oligonucleotide
aguaauguucauugcgucu

SEQ ID NO: 1216265 - RNA, 19 nt, Artificial Sequence
  Description of Artificial Sequence: Synthetic oligonucleotide
aaugagauucacaaugcaa

SEQ ID NO: 1216266 - RNA, 19 nt, Artificial Sequence
  Description of Artificial Sequence: Synthetic oligonucleotide
cacucccugaacuuuaagc

SEQ ID NO: 1216267 - RNA, 19 nt, Artificial Sequence
  Description of Artificial Sequence: Synthetic oligonucleotide
guuacaaguugccaaauaa

SEQ ID NO: 1216268 - RNA, 19 nt, Artificial Sequence
  Description of Artificial Sequence: Synthetic oligonucleotide
gaagguccgacuccaaagc

SEQ ID NO: 1216269 - RNA, 19 nt, Artificial Sequence
  Description of Artificial Sequence: Synthetic oligonucleotide
uugcuccgaaugaagaaag

SEQ ID NO: 1216270 - RNA, 19 nt, Artificial Sequence
  Description of Artificial Sequence: Synthetic oligonucleotide
auucgcacaguucgccucc

SEQ ID NO: 1216271 - RNA, 19 nt, Artificial Sequence
  Description of Artificial Sequence: Synthetic oligonucleotide
aaagaauaaguuacaaguu

SEQ ID NO: 1216272 - RNA, 19 nt, Artificial Sequence
  Description of Artificial Sequence: Synthetic oligonucleotide
auauggaacacugcuaugu

SEQ ID NO: 1216273 - RNA, 19 nt, Artificial Sequence
  Description of Artificial Sequence: Synthetic oligonucleotide
caaaccuccgcccugcagc

SEQ ID NO: 1216274 - RNA, 19 nt, Artificial Sequence
  Description of Artificial Sequence: Synthetic oligonucleotide
cuccgaaugaagaaagcug

SEQ ID NO: 1216275 - RNA, 19 nt, Artificial Sequence
  Description of Artificial Sequence: Synthetic oligonucleotide
uucauugcgucuuccacgu

SEQ ID NO: 1216276 - RNA, 19 nt, Artificial Sequence
  Description of Artificial Sequence: Synthetic oligonucleotide
auccugaagcuaauaaagc

SEQ ID NO: 1216277 - RNA, 19 nt, Artificial Sequence
  Description of Artificial Sequence: Synthetic oligonucleotide
ugaaugaauuacacaucca

SEQ ID NO: 1216278 - RNA, 19 nt, Artificial Sequence
  Description of Artificial Sequence: Synthetic oligonucleotide
ucugaggaauucccgacgu

SEQ ID NO: 1216279 - RNA, 19 nt, Artificial Sequence
  Description of Artificial Sequence: Synthetic oligonucleotide
ugaaagggagcucgccccg

SEQ ID NO: 1216280 - RNA, 19 nt, Artificial Sequence
  Description of Artificial Sequence: Synthetic oligonucleotide
uaagcaauucgcacaguuc

SEQ ID NO: 1216281 - RNA, 19 nt, Artificial Sequence
  Description of Artificial Sequence: Synthetic oligonucleotide
gaguuugcguuucuuuugc

SEQ ID NO: 1216282 - RNA, 19 nt, Artificial Sequence
  Description of Artificial Sequence: Synthetic oligonucleotide
agugugacacaccugugcu

SEQ ID NO: 1216283 - RNA, 19 nt, Artificial Sequence
  Description of Artificial Sequence: Synthetic oligonucleotide
aguucgggcucucugagga

SEQ ID NO: 1216284 - RNA, 19 nt, Artificial Sequence
  Description of Artificial Sequence: Synthetic oligonucleotide
uuuugcuccgaaugaagaa

SEQ ID NO: 1216285 - RNA, 19 nt, Artificial Sequence
  Description of Artificial Sequence: Synthetic oligonucleotide
auucgugaacaggaaaagg

SEQ ID NO: 1216286 - RNA, 19 nt, Artificial Sequence
  Description of Artificial Sequence: Synthetic oligonucleotide
cugaaagggagcucgcccc

SEQ ID NO: 1216287 - RNA, 19 nt, Artificial Sequence
  Description of Artificial Sequence: Synthetic oligonucleotide
uuguaugcaucauuacagu

SEQ ID NO: 1216288 - RNA, 19 nt, Artificial Sequence
  Description of Artificial Sequence: Synthetic oligonucleotide
cuuucaucucuccccaacc

SEQ ID NO: 1216289 - RNA, 19 nt, Artificial Sequence
  Description of Artificial Sequence: Synthetic oligonucleotide
agccuuauucucaagcccg

SEQ ID NO: 1216290 - RNA, 19 nt, Artificial Sequence
  Description of Artificial Sequence: Synthetic oligonucleotide
cauuguauccugaagcuaa

SEQ ID NO: 1216291 - RNA, 19 nt, Artificial Sequence
  Description of Artificial Sequence: Synthetic oligonucleotide
ugaagcuaauaaagcaguc

SEQ ID NO: 1216292 - RNA, 19 nt, Artificial Sequence
  Description of Artificial Sequence: Synthetic oligonucleotide
acaacuauuugcauucugu

SEQ ID NO: 1216293 - RNA, 19 nt, Artificial Sequence
  Description of Artificial Sequence: Synthetic oligonucleotide
guagcagcgacaguggccc

SEQ ID NO: 1216294 - RNA, 19 nt, Artificial Sequence
  Description of Artificial Sequence: Synthetic oligonucleotide
aggaauucccgacguuucg

SEQ ID NO: 1216295 - RNA, 19 nt, Artificial Sequence
  Description of Artificial Sequence: Synthetic oligonucleotide
cagacacccggucagcucg

SEQ ID NO: 1216296 - RNA, 19 nt, Artificial Sequence
  Description of Artificial Sequence: Synthetic oligonucleotide
caacuauuugcauucuguc

SEQ ID NO: 1216297 - RNA, 19 nt, Artificial Sequence
  Description of Artificial Sequence: Synthetic oligonucleotide
uugcguuucuuuugcuccg

SEQ ID NO: 1216298 - RNA, 19 nt, Artificial Sequence
  Description of Artificial Sequence: Synthetic oligonucleotide
gaauucccgacguuucggc

SEQ ID NO: 1216299 - RNA, 19 nt, Artificial Sequence
  Description of Artificial Sequence: Synthetic oligonucleotide
gaagacuguaugugugccc

SEQ ID NO: 1216300 - RNA, 19 nt, Artificial Sequence
  Description of Artificial Sequence: Synthetic oligonucleotide
uuugcuccgaaugaagaaa

SEQ ID NO: 1216301 - RNA, 19 nt, Artificial Sequence
  Description of Artificial Sequence: Synthetic oligonucleotide
cucacuuguuacuuuaaca

SEQ ID NO: 1216302 - RNA, 19 nt, Artificial Sequence
  Description of Artificial Sequence: Synthetic oligonucleotide
uucgaguaauguucauugc

SEQ ID NO: 1216303 - RNA, 19 nt, Artificial Sequence
  Description of Artificial Sequence: Synthetic oligonucleotide
gacaccgugucgcuacagg

SEQ ID NO: 1216304 - RNA, 19 nt, Artificial Sequence
  Description of Artificial Sequence: Synthetic oligonucleotide
accaucacaacuauuugca

SEQ ID NO: 1216305 - RNA, 19 nt, Artificial Sequence
  Description of Artificial Sequence: Synthetic oligonucleotide
guuucggcuaauguugucc

SEQ ID NO: 1216306 - RNA, 19 nt, Artificial Sequence
  Description of Artificial Sequence: Synthetic oligonucleotide
uuacacauccacagcccug

SEQ ID NO: 1216307 - RNA, 19 nt, Artificial Sequence
  Description of Artificial Sequence: Synthetic oligonucleotide
aauucccgacguuucggcu

SEQ ID NO: 1216308 - RNA, 19 nt, Artificial Sequence
  Description of Artificial Sequence: Synthetic oligonucleotide
gaguaauguucauugcguc

SEQ ID NO: 1216309 - RNA, 19 nt, Artificial Sequence
  Description of Artificial Sequence: Synthetic oligonucleotide
cuuuaacacacauacuuua

SEQ ID NO: 1216310 - RNA, 19 nt, Artificial Sequence
  Description of Artificial Sequence: Synthetic oligonucleotide
uccgacuccaaagcuuucg

SEQ ID NO: 1216311 - RNA, 19 nt, Artificial Sequence
  Description of Artificial Sequence: Synthetic oligonucleotide
agaccaucacaacuauuug

SEQ ID NO: 1216312 - RNA, 19 nt, Artificial Sequence
  Description of Artificial Sequence: Synthetic oligonucleotide
uaugugugccccugaaggu

SEQ ID NO: 1216313 - RNA, 19 nt, Artificial Sequence
  Description of Artificial Sequence: Synthetic oligonucleotide
aagguccgacuccaaagcu

SEQ ID NO: 1216314 - RNA, 19 nt, Artificial Sequence
  Description of Artificial Sequence: Synthetic oligonucleotide
ggucauuugucagaucugg

SEQ ID NO: 1216315 - RNA, 19 nt, Artificial Sequence
  Description of Artificial Sequence: Synthetic oligonucleotide
acucuguguuauuugacaa

SEQ ID NO: 1216316 - RNA, 19 nt, Artificial Sequence
  Description of Artificial Sequence: Synthetic oligonucleotide
guauccugaagcuaauaaa

SEQ ID NO: 1216317 - RNA, 19 nt, Artificial Sequence
  Description of Artificial Sequence: Synthetic oligonucleotide
ucuugaauguuggcaaaac

SEQ ID NO: 1216318 - RNA, 19 nt, Artificial Sequence
  Description of Artificial Sequence: Synthetic oligonucleotide
ucaguauacagggcgcuca

SEQ ID NO: 1216319 - RNA, 19 nt, Artificial Sequence
  Description of Artificial Sequence: Synthetic oligonucleotide
uccauggcauaaaaugaau

SEQ ID NO: 1216320 - RNA, 19 nt, Artificial Sequence
  Description of Artificial Sequence: Synthetic oligonucleotide
ccaaggucuuguuaaauag

SEQ ID NO: 1216321 - RNA, 19 nt, Artificial Sequence
  Description of Artificial Sequence: Synthetic oligonucleotide
auggaacacugcuaugucu

SEQ ID NO: 1216322 - RNA, 19 nt, Artificial Sequence
  Description of Artificial Sequence: Synthetic oligonucleotide
cuauuggcgaaguccauca

SEQ ID NO: 1216323 - RNA, 19 nt, Artificial Sequence
  Description of Artificial Sequence: Synthetic oligonucleotide
acucugagaccaucacaac

SEQ ID NO: 1216324 - RNA, 19 nt, Artificial Sequence
  Description of Artificial Sequence: Synthetic oligonucleotide
uuugucagaucuggguuca

SEQ ID NO: 1216325 - RNA, 19 nt, Artificial Sequence
  Description of Artificial Sequence: Synthetic oligonucleotide
cuuuugcuccgaaugaaga

SEQ ID NO: 1216326 - RNA, 19 nt, Artificial Sequence
  Description of Artificial Sequence: Synthetic oligonucleotide
auacagggcgcucagguuu

SEQ ID NO: 1216327 - RNA, 19 nt, Artificial Sequence
  Description of Artificial Sequence: Synthetic oligonucleotide
agcaccagaucgcucacca

SEQ ID NO: 1216328 - RNA, 19 nt, Artificial Sequence
  Description of Artificial Sequence: Synthetic oligonucleotide
aacagcgaccacagacacc

SEQ ID NO: 1216329 - RNA, 19 nt, Artificial Sequence
  Description of Artificial Sequence: Synthetic oligonucleotide
cucggcgcugcuauuggcg

SEQ ID NO: 1216330 - RNA, 19 nt, Artificial Sequence
  Description of Artificial Sequence: Synthetic oligonucleotide
agguagaaugaguuugcgu

SEQ ID NO: 1216331 - RNA, 19 nt, Artificial Sequence
  Description of Artificial Sequence: Synthetic oligonucleotide
auuugaagacugccauuug

SEQ ID NO: 1216332 - RNA, 19 nt, Artificial Sequence
  Description of Artificial Sequence: Synthetic oligonucleotide
auacucuguguuauuugac

SEQ ID NO: 1216333 - RNA, 19 nt, Artificial Sequence
  Description of Artificial Sequence: Synthetic oligonucleotide
cagccuuauucucaagccc

SEQ ID NO: 1216334 - RNA, 19 nt, Artificial Sequence
  Description of Artificial Sequence: Synthetic oligonucleotide
gaauccauuguauccugaa

SEQ ID NO: 1216335 - RNA, 19 nt, Artificial Sequence
  Description of Artificial Sequence: Synthetic oligonucleotide
aaaccuccgcccugcagca

SEQ ID NO: 1216336 - RNA, 19 nt, Artificial Sequence
  Description of Artificial Sequence: Synthetic oligonucleotide
ggugggagaagacuguaug

SEQ ID NO: 1216337 - RNA, 19 nt, Artificial Sequence
  Description of Artificial Sequence: Synthetic oligonucleotide
uauuggcgaaguccaucag

SEQ ID NO: 1216338 - RNA, 19 nt, Artificial Sequence
  Description of Artificial Sequence: Synthetic oligonucleotide
acaggugcguucccggcuc

SEQ ID NO: 1216339 - RNA, 19 nt, Artificial Sequence
  Description of Artificial Sequence: Synthetic oligonucleotide
gcuacguuucauuuaaaga

SEQ ID NO: 1216340 - RNA, 19 nt, Artificial Sequence
  Description of Artificial Sequence: Synthetic oligonucleotide
uugaagguccgacuccaaa

SEQ ID NO: 1216341 - RNA, 19 nt, Artificial Sequence
  Description of Artificial Sequence: Synthetic oligonucleotide
agcaauucgcacaguucgc

SEQ ID NO: 1216342 - RNA, 19 nt, Artificial Sequence
  Description of Artificial Sequence: Synthetic oligonucleotide
aaaccacaauuuaaauaca

SEQ ID NO: 1216343 - RNA, 19 nt, Artificial Sequence
  Description of Artificial Sequence: Synthetic oligonucleotide
ccauuuugcagguuucagg

SEQ ID NO: 1216344 - RNA, 19 nt, Artificial Sequence
  Description of Artificial Sequence: Synthetic oligonucleotide
cagaacaguugaagguccg

SEQ ID NO: 1216345 - RNA, 19 nt, Artificial Sequence
  Description of Artificial Sequence: Synthetic oligonucleotide
cugcgcaccagacacccgg

SEQ ID NO: 1216346 - RNA, 19 nt, Artificial Sequence
  Description of Artificial Sequence: Synthetic oligonucleotide
accgugucgcuacagguga

SEQ ID NO: 1216347 - RNA, 19 nt, Artificial Sequence
  Description of Artificial Sequence: Synthetic oligonucleotide
gaacaguugaagguccgac

SEQ ID NO: 1216348 - RNA, 19 nt, Artificial Sequence
  Description of Artificial Sequence: Synthetic oligonucleotide
caggugacagaacaguuga

SEQ ID NO: 1216349 - RNA, 19 nt, Artificial Sequence
  Description of Artificial Sequence: Synthetic oligonucleotide
guuaugcucaaagcaggcc

SEQ ID NO: 1216350 - RNA, 19 nt, Artificial Sequence
  Description of Artificial Sequence: Synthetic oligonucleotide
cuguuggaaaagcggguag

SEQ ID NO: 1216351 - RNA, 19 nt, Artificial Sequence
  Description of Artificial Sequence: Synthetic oligonucleotide
uuucaguauacagggcgcu

SEQ ID NO: 1216352 - RNA, 19 nt, Artificial Sequence
  Description of Artificial Sequence: Synthetic oligonucleotide
uggcaucccauaagaaggu

SEQ ID NO: 1216353 - RNA, 19 nt, Artificial Sequence
  Description of Artificial Sequence: Synthetic oligonucleotide
cacuauuguuuguuaagca

SEQ ID NO: 1216354 - RNA, 19 nt, Artificial Sequence
  Description of Artificial Sequence: Synthetic oligonucleotide
ccacucacucaguugaugg

SEQ ID NO: 1216355 - RNA, 19 nt, Artificial Sequence
  Description of Artificial Sequence: Synthetic oligonucleotide
cuuguuacuuuaacacaca

SEQ ID NO: 1216356 - RNA, 19 nt, Artificial Sequence
  Description of Artificial Sequence: Synthetic oligonucleotide
acgucaaugcacaggugcg

SEQ ID NO: 1216357 - RNA, 19 nt, Artificial Sequence
  Description of Artificial Sequence: Synthetic oligonucleotide
agcugcuaagguagaagac

SEQ ID NO: 1216358 - RNA, 19 nt, Artificial Sequence
  Description of Artificial Sequence: Synthetic oligonucleotide
gaacuuuaagcuccugugu

SEQ ID NO: 1216359 - RNA, 19 nt, Artificial Sequence
  Description of Artificial Sequence: Synthetic oligonucleotide
cauugcgucuuccacguca

SEQ ID NO: 1216360 - RNA, 19 nt, Artificial Sequence
  Description of Artificial Sequence: Synthetic oligonucleotide
uagaaugaguuugcguuuc

SEQ ID NO: 1216361 - RNA, 19 nt, Artificial Sequence
  Description of Artificial Sequence: Synthetic oligonucleotide
uucuuuugcuccgaaugaa

SEQ ID NO: 1216362 - RNA, 19 nt, Artificial Sequence
  Description of Artificial Sequence: Synthetic oligonucleotide
acuauuuauaaaagucaaa

SEQ ID NO: 1216363 - RNA, 19 nt, Artificial Sequence
  Description of Artificial Sequence: Synthetic oligonucleotide
cuugagacguuuagguaga

SEQ ID NO: 1216364 - RNA, 19 nt, Artificial Sequence
  Description of Artificial Sequence: Synthetic oligonucleotide
agcuaauaaagcaguccag

SEQ ID NO: 1216365 - RNA, 19 nt, Artificial Sequence
  Description of Artificial Sequence: Synthetic oligonucleotide
acaccgugucgcuacaggu

SEQ ID NO: 1216366 - RNA, 19 nt, Artificial Sequence
  Description of Artificial Sequence: Synthetic oligonucleotide
ggaaauuugaagacugcca

SEQ ID NO: 1216367 - RNA, 19 nt, Artificial Sequence
  Description of Artificial Sequence: Synthetic oligonucleotide
gagaccaucacaacuauuu

SEQ ID NO: 1216368 - RNA, 19 nt, Artificial Sequence
  Description of Artificial Sequence: Synthetic oligonucleotide
aguugaagguccgacucca

SEQ ID NO: 1216369 - RNA, 19 nt, Artificial Sequence
  Description of Artificial Sequence: Synthetic oligonucleotide
auucacaaugcaaauccau

SEQ ID NO: 1216370 - RNA, 19 nt, Artificial Sequence
  Description of Artificial Sequence: Synthetic oligonucleotide
agggagcucgccccgggcg

SEQ ID NO: 1216371 - RNA, 19 nt, Artificial Sequence
  Description of Artificial Sequence: Synthetic oligonucleotide
ucuugcuggcgaccuguug

SEQ ID NO: 1216372 - RNA, 19 nt, Artificial Sequence
  Description of Artificial Sequence: Synthetic oligonucleotide
cacccggucagcucggcgc

SEQ ID NO: 1216373 - RNA, 19 nt, Artificial Sequence
  Description of Artificial Sequence: Synthetic oligonucleotide
uucuugaauguuggcaaaa

SEQ ID NO: 1216374 - RNA, 19 nt, Artificial Sequence
  Description of Artificial Sequence: Synthetic oligonucleotide
uccaaagcuuucgaguaau

SEQ ID NO: 1216375 - RNA, 19 nt, Artificial Sequence
  Description of Artificial Sequence: Synthetic oligonucleotide
ugugugccccugaagguua

SEQ ID NO: 1216376 - RNA, 19 nt, Artificial Sequence
  Description of Artificial Sequence: Synthetic oligonucleotide
cugcuaagguagaagacaa

SEQ ID NO: 1216377 - RNA, 19 nt, Artificial Sequence
  Description of Artificial Sequence: Synthetic oligonucleotide
uuaagcuccuguguuccuc

SEQ ID NO: 1216378 - RNA, 19 nt, Artificial Sequence
  Description of Artificial Sequence: Synthetic oligonucleotide
augaacacagaaacagcga

SEQ ID NO: 1216379 - RNA, 19 nt, Artificial Sequence
  Description of Artificial Sequence: Synthetic oligonucleotide
gcugaaagggagcucgccc

SEQ ID NO: 1216380 - RNA, 19 nt, Artificial Sequence
  Description of Artificial Sequence: Synthetic oligonucleotide
ucaaugcacaggugcguuc

SEQ ID NO: 1216381 - RNA, 19 nt, Artificial Sequence
  Description of Artificial Sequence: Synthetic oligonucleotide
aagcccgggugccgacugc

SEQ ID NO: 1216382 - RNA, 19 nt, Artificial Sequence
  Description of Artificial Sequence: Synthetic oligonucleotide
aguauacagggcgcucagg

SEQ ID NO: 1216383 - RNA, 19 nt, Artificial Sequence
  Description of Artificial Sequence: Synthetic oligonucleotide
gagacuucuggcacaguuc

SEQ ID NO: 1216384 - RNA, 19 nt, Artificial Sequence
  Description of Artificial Sequence: Synthetic oligonucleotide
agcccuggcaucccauaag

SEQ ID NO: 1216385 - RNA, 19 nt, Artificial Sequence
  Description of Artificial Sequence: Synthetic oligonucleotide
gacuugagacguuuaggua

SEQ ID NO: 1216386 - RNA, 19 nt, Artificial Sequence
  Description of Artificial Sequence: Synthetic oligonucleotide
uauacagggcgcucagguu

SEQ ID NO: 1216387 - RNA, 19 nt, Artificial Sequence
  Description of Artificial Sequence: Synthetic oligonucleotide
caccgugucgcuacaggug

SEQ ID NO: 1216388 - RNA, 19 nt, Artificial Sequence
  Description of Artificial Sequence: Synthetic oligonucleotide
ugucgcuacaggugacaga

SEQ ID NO: 1216389 - RNA, 19 nt, Artificial Sequence
  Description of Artificial Sequence: Synthetic oligonucleotide
guccgcaaagcccgggugc

SEQ ID NO: 1216390 - RNA, 19 nt, Artificial Sequence
  Description of Artificial Sequence: Synthetic oligonucleotide
auucccgacguuucggcua

SEQ ID NO: 1216391 - RNA, 19 nt, Artificial Sequence
  Description of Artificial Sequence: Synthetic oligonucleotide
ccgacugcugcugaaaggg

SEQ ID NO: 1216392 - RNA, 19 nt, Artificial Sequence
  Description of Artificial Sequence: Synthetic oligonucleotide
agccauucccaggcgggcc

SEQ ID NO: 1216393 - RNA, 19 nt, Artificial Sequence
  Description of Artificial Sequence: Synthetic oligonucleotide
uugcuggcgaccuguugga

SEQ ID NO: 1216394 - RNA, 19 nt, Artificial Sequence
  Description of Artificial Sequence: Synthetic oligonucleotide
caguauacagggcgcucag

SEQ ID NO: 1216395 - RNA, 19 nt, Artificial Sequence
  Description of Artificial Sequence: Synthetic oligonucleotide
ugcugaaagggagcucgcc

SEQ ID NO: 1216396 - RNA, 19 nt, Artificial Sequence
  Description of Artificial Sequence: Synthetic oligonucleotide
ucggcgcugcuauuggcga

SEQ ID NO: 1216397 - RNA, 19 nt, Artificial Sequence
  Description of Artificial Sequence: Synthetic oligonucleotide
uucccgacguuucggcuaa

SEQ ID NO: 1216398 - RNA, 19 nt, Artificial Sequence
  Description of Artificial Sequence: Synthetic oligonucleotide
uccccauuuugcagguuuc

SEQ ID NO: 1216399 - RNA, 19 nt, Artificial Sequence
  Description of Artificial Sequence: Synthetic oligonucleotide
acguuuagguagaaugagu

SEQ ID NO: 1216400 - RNA, 19 nt, Artificial Sequence
  Description of Artificial Sequence: Synthetic oligonucleotide
gguacuugacuugagacgu

SEQ ID NO: 1216401 - RNA, 19 nt, Artificial Sequence
  Description of Artificial Sequence: Synthetic oligonucleotide
aacugguacuugacuugag

SEQ ID NO: 1216402 - RNA, 19 nt, Artificial Sequence
  Description of Artificial Sequence: Synthetic oligonucleotide
gugcguucccggcucagcc

SEQ ID NO: 1216403 - RNA, 19 nt, Artificial Sequence
  Description of Artificial Sequence: Synthetic oligonucleotide
gccaaauaauuuaaugaga

SEQ ID NO: 1216404 - RNA, 19 nt, Artificial Sequence
  Description of Artificial Sequence: Synthetic oligonucleotide
agcuuucgaguaauguuca

SEQ ID NO: 1216405 - RNA, 19 nt, Artificial Sequence
  Description of Artificial Sequence: Synthetic oligonucleotide
accugugcuacguuucauu

SEQ ID NO: 1216406 - RNA, 19 nt, Artificial Sequence
  Description of Artificial Sequence: Synthetic oligonucleotide
ugucagaucuggguucauc

SEQ ID NO: 1216407 - RNA, 19 nt, Artificial Sequence
  Description of Artificial Sequence: Synthetic oligonucleotide
uucaguauacagggcgcuc

SEQ ID NO: 1216408 - RNA, 19 nt, Artificial Sequence
  Description of Artificial Sequence: Synthetic oligonucleotide
cacaguucgggcucucuga

SEQ ID NO: 1216409 - RNA, 19 nt, Artificial Sequence
  Description of Artificial Sequence: Synthetic oligonucleotide
uacuugacuugagacguuu

SEQ ID NO: 1216410 - RNA, 19 nt, Artificial Sequence
  Description of Artificial Sequence: Synthetic oligonucleotide
gguuaugcucaaagcaggc

SEQ ID NO: 1216411 - RNA, 19 nt, Artificial Sequence
  Description of Artificial Sequence: Synthetic oligonucleotide
guagaagacaacgggcaaa

SEQ ID NO: 1216412 - RNA, 19 nt, Artificial Sequence
  Description of Artificial Sequence: Synthetic oligonucleotide
caguucgggcucucugagg

SEQ ID NO: 1216413 - RNA, 19 nt, Artificial Sequence
  Description of Artificial Sequence: Synthetic oligonucleotide
agaacaguugaagguccga

SEQ ID NO: 1216414 - RNA, 19 nt, Artificial Sequence
  Description of Artificial Sequence: Synthetic oligonucleotide
cgaccuguuggaaaagcgg

SEQ ID NO: 1216415 - RNA, 19 nt, Artificial Sequence
  Description of Artificial Sequence: Synthetic oligonucleotide
gugaacaggaaaaggaaau

SEQ ID NO: 1216416 - RNA, 19 nt, Artificial Sequence
  Description of Artificial Sequence: Synthetic oligonucleotide
augcacaggugcguucccg

SEQ ID NO: 1216417 - RNA, 19 nt, Artificial Sequence
  Description of Artificial Sequence: Synthetic oligonucleotide
cccauaagaaggucauuug

SEQ ID NO: 1216418 - RNA, 19 nt, Artificial Sequence
  Description of Artificial Sequence: Synthetic oligonucleotide
cuggcgaccuguuggaaaa

SEQ ID NO: 1216419 - RNA, 19 nt, Artificial Sequence
  Description of Artificial Sequence: Synthetic oligonucleotide
acaguucgccuccugccau

SEQ ID NO: 1216420 - RNA, 19 nt, Artificial Sequence
  Description of Artificial Sequence: Synthetic oligonucleotide
accacucacucaguugaug

SEQ ID NO: 1216421 - RNA, 19 nt, Artificial Sequence
  Description of Artificial Sequence: Synthetic oligonucleotide
guaugcaucauuacaguuu

SEQ ID NO: 1216422 - RNA, 19 nt, Artificial Sequence
  Description of Artificial Sequence: Synthetic oligonucleotide
gcaauucgcacaguucgcc

SEQ ID NO: 1216423 - RNA, 19 nt, Artificial Sequence
  Description of Artificial Sequence: Synthetic oligonucleotide
agcggguagcaggucuggc

SEQ ID NO: 1216424 - RNA, 19 nt, Artificial Sequence
  Description of Artificial Sequence: Synthetic oligonucleotide
gugucgcuacaggugacag

SEQ ID NO: 1216425 - RNA, 19 nt, Artificial Sequence
  Description of Artificial Sequence: Synthetic oligonucleotide
uucgggcucucugaggaau

SEQ ID NO: 1216426 - RNA, 19 nt, Artificial Sequence
  Description of Artificial Sequence: Synthetic oligonucleotide
gaaagcugcuaagguagaa

SEQ ID NO: 1216427 - RNA, 19 nt, Artificial Sequence
  Description of Artificial Sequence: Synthetic oligonucleotide
accagaucgcucaccaggu

SEQ ID NO: 1216428 - RNA, 19 nt, Artificial Sequence
  Description of Artificial Sequence: Synthetic oligonucleotide
agcaacgcccgcagccacc

SEQ ID NO: 1216429 - RNA, 19 nt, Artificial Sequence
  Description of Artificial Sequence: Synthetic oligonucleotide
ugcuauuggcgaaguccau

SEQ ID NO: 1216430 - RNA, 19 nt, Artificial Sequence
  Description of Artificial Sequence: Synthetic oligonucleotide
uacagggcgcucagguuuu

SEQ ID NO: 1216431 - RNA, 19 nt, Artificial Sequence
  Description of Artificial Sequence: Synthetic oligonucleotide
guuuagguagaaugaguuu

SEQ ID NO: 1216432 - RNA, 19 nt, Artificial Sequence
  Description of Artificial Sequence: Synthetic oligonucleotide
guaauguucauugcgucuu

SEQ ID NO: 1216433 - RNA, 19 nt, Artificial Sequence
  Description of Artificial Sequence: Synthetic oligonucleotide
cugcugaaagggagcucgc

SEQ ID NO: 1216434 - RNA, 19 nt, Artificial Sequence
  Description of Artificial Sequence: Synthetic oligonucleotide
gccgacugcugcugaaagg

SEQ ID NO: 1216435 - RNA, 19 nt, Artificial Sequence
  Description of Artificial Sequence: Synthetic oligonucleotide
gcuaauaaagcaguccagu

SEQ ID NO: 1216436 - RNA, 19 nt, Artificial Sequence
  Description of Artificial Sequence: Synthetic oligonucleotide
uuguauccugaagcuaaua

SEQ ID NO: 1216437 - RNA, 19 nt, Artificial Sequence
  Description of Artificial Sequence: Synthetic oligonucleotide
ugcguuucuuuugcuccga

SEQ ID NO: 1216438 - RNA, 19 nt, Artificial Sequence
  Description of Artificial Sequence: Synthetic oligonucleotide
agguccgcaaagcccgggu

SEQ ID NO: 1216439 - RNA, 19 nt, Artificial Sequence
  Description of Artificial Sequence: Synthetic oligonucleotide
agacuguaugugugccccu

SEQ ID NO: 1216440 - RNA, 19 nt, Artificial Sequence
  Description of Artificial Sequence: Synthetic oligonucleotide
cacaguucgccuccugcca

SEQ ID NO: 1216441 - RNA, 19 nt, Artificial Sequence
  Description of Artificial Sequence: Synthetic oligonucleotide
gguagaagacaacgggcaa

SEQ ID NO: 1216442 - RNA, 19 nt, Artificial Sequence
  Description of Artificial Sequence: Synthetic oligonucleotide
auuguauccugaagcuaau

SEQ ID NO: 1216443 - RNA, 19 nt, Artificial Sequence
  Description of Artificial Sequence: Synthetic oligonucleotide
gaacacugcuaugucuaaa

SEQ ID NO: 1216444 - RNA, 19 nt, Artificial Sequence
  Description of Artificial Sequence: Synthetic oligonucleotide
ccucacuuguuacuuuaac

SEQ ID NO: 1216445 - RNA, 19 nt, Artificial Sequence
  Description of Artificial Sequence: Synthetic oligonucleotide
accgggucccgagccauuc

SEQ ID NO: 1216446 - RNA, 19 nt, Artificial Sequence
  Description of Artificial Sequence: Synthetic oligonucleotide
caccgcgacggccacccgc

SEQ ID NO: 1216447 - RNA, 19 nt, Artificial Sequence
  Description of Artificial Sequence: Synthetic oligonucleotide
gagccauucccaggcgggc

SEQ ID NO: 1216448 - RNA, 19 nt, Artificial Sequence
  Description of Artificial Sequence: Synthetic oligonucleotide
gaaaagcggguagcagguc

SEQ ID NO: 1216449 - RNA, 19 nt, Artificial Sequence
  Description of Artificial Sequence: Synthetic oligonucleotide
ucgcuacaggugacagaac

SEQ ID NO: 1216450 - RNA, 19 nt, Artificial Sequence
  Description of Artificial Sequence: Synthetic oligonucleotide
ucgccccgggcguaccucc

SEQ ID NO: 1216451 - RNA, 19 nt, Artificial Sequence
  Description of Artificial Sequence: Synthetic oligonucleotide
caguucgccuccugccaug

SEQ ID NO: 1216452 - RNA, 19 nt, Artificial Sequence
  Description of Artificial Sequence: Synthetic oligonucleotide
acguuucggcuaauguugu

SEQ ID NO: 1216453 - RNA, 19 nt, Artificial Sequence
  Description of Artificial Sequence: Synthetic oligonucleotide
cugugcuacguuucauuua

SEQ ID NO: 1216454 - RNA, 19 nt, Artificial Sequence
  Description of Artificial Sequence: Synthetic oligonucleotide
ucgcacaguucgccuccug

SEQ ID NO: 1216455 - RNA, 19 nt, Artificial Sequence
  Description of Artificial Sequence: Synthetic oligonucleotide
gcuauuggcgaaguccauc

SEQ ID NO: 1216456 - RNA, 19 nt, Artificial Sequence
  Description of Artificial Sequence: Synthetic oligonucleotide
cuccaaagcuuucgaguaa

SEQ ID NO: 1216457 - RNA, 19 nt, Artificial Sequence
  Description of Artificial Sequence: Synthetic oligonucleotide
gguccgcaaagcccgggug

SEQ ID NO: 1216458 - RNA, 19 nt, Artificial Sequence
  Description of Artificial Sequence: Synthetic oligonucleotide
uggcgaccuguuggaaaag

SEQ ID NO: 1216459 - RNA, 19 nt, Artificial Sequence
  Description of Artificial Sequence: Synthetic oligonucleotide
aguucgccuccugccaugu

SEQ ID NO: 1216460 - RNA, 19 nt, Artificial Sequence
  Description of Artificial Sequence: Synthetic oligonucleotide
aaccacucacucaguugau

SEQ ID NO: 1216461 - RNA, 19 nt, Artificial Sequence
  Description of Artificial Sequence: Synthetic oligonucleotide
ucauugcgucuuccacguc

SEQ ID NO: 1216462 - RNA, 19 nt, Artificial Sequence
  Description of Artificial Sequence: Synthetic oligonucleotide
caauucgcacaguucgccu

SEQ ID NO: 1216463 - RNA, 19 nt, Artificial Sequence
  Description of Artificial Sequence: Synthetic oligonucleotide
gagcgcugcgcaccagaca

SEQ ID NO: 1216464 - RNA, 19 nt, Artificial Sequence
  Description of Artificial Sequence: Synthetic oligonucleotide
ggagacuucuggcacaguu

SEQ ID NO: 1216465 - RNA, 19 nt, Artificial Sequence
  Description of Artificial Sequence: Synthetic oligonucleotide
gucagcucggcgcugcuau

SEQ ID NO: 1216466 - RNA, 19 nt, Artificial Sequence
  Description of Artificial Sequence: Synthetic oligonucleotide
gcaacgcccgcagccaccg

SEQ ID NO: 1216467 - RNA, 19 nt, Artificial Sequence
  Description of Artificial Sequence: Synthetic oligonucleotide
ggcgcugcuauuggcgaag

SEQ ID NO: 1216468 - RNA, 19 nt, Artificial Sequence
  Description of Artificial Sequence: Synthetic oligonucleotide
gugugacacaccugugcua

SEQ ID NO: 1216469 - RNA, 19 nt, Artificial Sequence
  Description of Artificial Sequence: Synthetic oligonucleotide
cuuucgaguaauguucauu

SEQ ID NO: 1216470 - RNA, 19 nt, Artificial Sequence
  Description of Artificial Sequence: Synthetic oligonucleotide
auaaagcaguccagugauu

SEQ ID NO: 1216471 - RNA, 19 nt, Artificial Sequence
  Description of Artificial Sequence: Synthetic oligonucleotide
agguuucagguggaauuuu

SEQ ID NO: 1216472 - RNA, 19 nt, Artificial Sequence
  Description of Artificial Sequence: Synthetic oligonucleotide
ccgagccauucccaggcgg

SEQ ID NO: 1216473 - RNA, 19 nt, Artificial Sequence
  Description of Artificial Sequence: Synthetic oligonucleotide
cagguggaauuuucuugaa

SEQ ID NO: 1216474 - RNA, 19 nt, Artificial Sequence
  Description of Artificial Sequence: Synthetic oligonucleotide
gcuccgaaugaagaaagcu

SEQ ID NO: 1216475 - RNA, 19 nt, Artificial Sequence
  Description of Artificial Sequence: Synthetic oligonucleotide
uucgcacaguucgccuccu

SEQ ID NO: 1216476 - RNA, 19 nt, Artificial Sequence
  Description of Artificial Sequence: Synthetic oligonucleotide
gcuggcgaccuguuggaaa

SEQ ID NO: 1216477 - RNA, 19 nt, Artificial Sequence
  Description of Artificial Sequence: Synthetic oligonucleotide
cgaguaauguucauugcgu

SEQ ID NO: 1216478 - RNA, 19 nt, Artificial Sequence
  Description of Artificial Sequence: Synthetic oligonucleotide
acgggccgagcgcugcgca

SEQ ID NO: 1216479 - RNA, 19 nt, Artificial Sequence
  Description of Artificial Sequence: Synthetic oligonucleotide
ccacccgcugcgcugcucc

SEQ ID NO: 1216480 - RNA, 19 nt, Artificial Sequence
  Description of Artificial Sequence: Synthetic oligonucleotide
gggcguaccuccaccgcag

SEQ ID NO: 1216481 - RNA, 19 nt, Artificial Sequence
  Description of Artificial Sequence: Synthetic oligonucleotide
cccgggcguaccuccaccg

SEQ ID NO: 1216482 - RNA, 19 nt, Artificial Sequence
  Description of Artificial Sequence: Synthetic oligonucleotide
gggcucucugaggaauucc

SEQ ID NO: 1216483 - RNA, 19 nt, Artificial Sequence
  Description of Artificial Sequence: Synthetic oligonucleotide
agcucgccccgggcguacc

SEQ ID NO: 1216484 - RNA, 19 nt, Artificial Sequence
  Description of Artificial Sequence: Synthetic oligonucleotide
cugagaccaucacaacuau

SEQ ID NO: 1216485 - RNA, 19 nt, Artificial Sequence
  Description of Artificial Sequence: Synthetic oligonucleotide
cguuuagguagaaugaguu

SEQ ID NO: 1216486 - RNA, 19 nt, Artificial Sequence
  Description of Artificial Sequence: Synthetic oligonucleotide
cagauccggcagguccggg

SEQ ID NO: 1216487 - RNA, 19 nt, Artificial Sequence
  Description of Artificial Sequence: Synthetic oligonucleotide
ugcuggcgaccuguuggaa

SEQ ID NO: 1216488 - RNA, 19 nt, Artificial Sequence
  Description of Artificial Sequence: Synthetic oligonucleotide
gcuaaccacucacucaguu

SEQ ID NO: 1216489 - RNA, 19 nt, Artificial Sequence
  Description of Artificial Sequence: Synthetic oligonucleotide
gcucggcgcugcuauuggc

SEQ ID NO: 1216490 - RNA, 19 nt, Artificial Sequence
  Description of Artificial Sequence: Synthetic oligonucleotide
cagcccuggcaucccauaa

SEQ ID NO: 1216491 - RNA, 19 nt, Artificial Sequence
  Description of Artificial Sequence: Synthetic oligonucleotide
guugaagguccgacuccaa

SEQ ID NO: 1216492 - RNA, 19 nt, Artificial Sequence
  Description of Artificial Sequence: Synthetic oligonucleotide
gucaaugcacaggugcguu

SEQ ID NO: 1216493 - RNA, 19 nt, Artificial Sequence
  Description of Artificial Sequence: Synthetic oligonucleotide
uugucagaucuggguucau

SEQ ID NO: 1216494 - RNA, 19 nt, Artificial Sequence
  Description of Artificial Sequence: Synthetic oligonucleotide
ggagguccgcaaagcccgg

SEQ ID NO: 1216495 - RNA, 19 nt, Artificial Sequence
  Description of Artificial Sequence: Synthetic oligonucleotide
ccacucccugaacuuuaag

SEQ ID NO: 1216496 - RNA, 19 nt, Artificial Sequence
  Description of Artificial Sequence: Synthetic oligonucleotide
ggcguaccuccaccgcagc

SEQ ID NO: 1216497 - RNA, 19 nt, Artificial Sequence
  Description of Artificial Sequence: Synthetic oligonucleotide
guuaagcaauucgcacagu

SEQ ID NO: 1216498 - RNA, 19 nt, Artificial Sequence
  Description of Artificial Sequence: Synthetic oligonucleotide
cagacaccgugucgcuaca

SEQ ID NO: 1216499 - RNA, 19 nt, Artificial Sequence
  Description of Artificial Sequence: Synthetic oligonucleotide
cagguuucagguggaauuu

SEQ ID NO: 1216500 - RNA, 19 nt, Artificial Sequence
  Description of Artificial Sequence: Synthetic oligonucleotide
gcagcaacgcccgcagcca

SEQ ID NO: 1216501 - RNA, 19 nt, Artificial Sequence
  Description of Artificial Sequence: Synthetic oligonucleotide
ccgacuccaaagcuuucga

SEQ ID NO: 1216502 - RNA, 19 nt, Artificial Sequence
  Description of Artificial Sequence: Synthetic oligonucleotide
cgggucccgagccauuccc

SEQ ID NO: 1216503 - RNA, 19 nt, Artificial Sequence
  Description of Artificial Sequence: Synthetic oligonucleotide
uucccggcucagccuuauu

SEQ ID NO: 1216504 - RNA, 19 nt, Artificial Sequence
  Description of Artificial Sequence: Synthetic oligonucleotide
gugccgacugcugcugaaa

SEQ ID NO: 1216505 - RNA, 19 nt, Artificial Sequence
  Description of Artificial Sequence: Synthetic oligonucleotide
ccuguuggaaaagcgggua

SEQ ID NO: 1216506 - RNA, 19 nt, Artificial Sequence
  Description of Artificial Sequence: Synthetic oligonucleotide
gcaaagcccgggugccgac

SEQ ID NO: 1216507 - RNA, 19 nt, Artificial Sequence
  Description of Artificial Sequence: Synthetic oligonucleotide
ccagauccggcagguccgg

SEQ ID NO: 1216508 - RNA, 19 nt, Artificial Sequence
  Description of Artificial Sequence: Synthetic oligonucleotide
ccccaaaccuccgcccugc

SEQ ID NO: 1216509 - RNA, 19 nt, Artificial Sequence
  Description of Artificial Sequence: Synthetic oligonucleotide
gguccgacuccaaagcuuu

SEQ ID NO: 1216510 - RNA, 19 nt, Artificial Sequence
  Description of Artificial Sequence: Synthetic oligonucleotide
gcguaccuccaccgcagca

SEQ ID NO: 1216511 - RNA, 19 nt, Artificial Sequence
  Description of Artificial Sequence: Synthetic oligonucleotide
gcuccgacaggagguccgc

SEQ ID NO: 1216512 - RNA, 19 nt, Artificial Sequence
  Description of Artificial Sequence: Synthetic oligonucleotide
cccgagccauucccaggcg

SEQ ID NO: 1216513 - RNA, 19 nt, Artificial Sequence
  Description of Artificial Sequence: Synthetic oligonucleotide
cucgccccgggcguaccuc

SEQ ID NO: 1216514 - RNA, 19 nt, Artificial Sequence
  Description of Artificial Sequence: Synthetic oligonucleotide
cgagcgcugcgcaccagac

SEQ ID NO: 1216515 - RNA, 19 nt, Artificial Sequence
  Description of Artificial Sequence: Synthetic oligonucleotide
gagcucgccccgggcguac

SEQ ID NO: 1216516 - RNA, 19 nt, Artificial Sequence
  Description of Artificial Sequence: Synthetic oligonucleotide
cguuucggcuaauguuguc

SEQ ID NO: 1216517 - RNA, 19 nt, Artificial Sequence
  Description of Artificial Sequence: Synthetic oligonucleotide
ccgggcguaccuccaccgc

SEQ ID NO: 1216518 - RNA, 19 nt, Artificial Sequence
  Description of Artificial Sequence: Synthetic oligonucleotide
gugcuacguuucauuuaaa

SEQ ID NO: 1216519 - RNA, 19 nt, Artificial Sequence
  Description of Artificial Sequence: Synthetic oligonucleotide
gcugcgcaccagacacccg

SEQ ID NO: 1216520 - RNA, 19 nt, Artificial Sequence
  Description of Artificial Sequence: Synthetic oligonucleotide
ccauuguauccugaagcua

SEQ ID NO: 1216521 - RNA, 19 nt, Artificial Sequence
  Description of Artificial Sequence: Synthetic oligonucleotide
ccgacguuucggcuaaugu

SEQ ID NO: 1216522 - RNA, 19 nt, Artificial Sequence
  Description of Artificial Sequence: Synthetic oligonucleotide
cccgacguuucggcuaaug

SEQ ID NO: 1216523 - RNA, 19 nt, Artificial Sequence
  Description of Artificial Sequence: Synthetic oligonucleotide
caggugcguucccggcuca

SEQ ID NO: 1216524 - RNA, 19 nt, Artificial Sequence
  Description of Artificial Sequence: Synthetic oligonucleotide
ccgugucgcuacaggugac

SEQ ID NO: 1216525 - RNA, 19 nt, Artificial Sequence
  Description of Artificial Sequence: Synthetic oligonucleotide
ccgggucccgagccauucc

SEQ ID NO: 1216526 - RNA, 19 nt, Artificial Sequence
  Description of Artificial Sequence: Synthetic oligonucleotide
cgacguuucggcuaauguu

SEQ ID NO: 1216527 - RNA, 19 nt, Artificial Sequence
  Description of Artificial Sequence: Synthetic oligonucleotide
ccccauuuugcagguuuca

SEQ ID NO: 1216528 - RNA, 19 nt, Artificial Sequence
  Description of Artificial Sequence: Synthetic oligonucleotide
gggucccgagccauuccca

SEQ ID NO: 1216529 - RNA, 19 nt, Artificial Sequence
  Description of Artificial Sequence: Synthetic oligonucleotide
cuccgacaggagguccgca

SEQ ID NO: 1216530 - RNA, 19 nt, Artificial Sequence
  Description of Artificial Sequence: Synthetic oligonucleotide
ccgacaggagguccgcaaa

SEQ ID NO: 1216531 - RNA, 19 nt, Artificial Sequence
  Description of Artificial Sequence: Synthetic oligonucleotide
cggcuaauguuguccaucu

SEQ ID NO: 1216532 - RNA, 19 nt, Artificial Sequence
  Description of Artificial Sequence: Synthetic oligonucleotide
cccuggcaucccauaagaa

SEQ ID NO: 1216533 - RNA, 19 nt, Artificial Sequence
  Description of Artificial Sequence: Synthetic oligonucleotide
cgcgacggccacccgcugc

SEQ ID NO: 1216534 - RNA, 19 nt, Artificial Sequence
  Description of Artificial Sequence: Synthetic oligonucleotide
gccuuauucucaagcccgu

SEQ ID NO: 1216535 - RNA, 19 nt, Artificial Sequence
  Description of Artificial Sequence: Synthetic oligonucleotide
ccgcaaagcccgggugccg

SEQ ID NO: 1216536 - RNA, 19 nt, Artificial Sequence
  Description of Artificial Sequence: Synthetic oligonucleotide
cacccgcugcgcugcucca

SEQ ID NO: 1216537 - RNA, 19 nt, Artificial Sequence
  Description of Artificial Sequence: Synthetic oligonucleotide
caaagcccgggugccgacu

SEQ ID NO: 1216538 - RNA, 19 nt, Artificial Sequence
  Description of Artificial Sequence: Synthetic oligonucleotide
gucugccaucaggagacuu

SEQ ID NO: 1216539 - RNA, 19 nt, Artificial Sequence
  Description of Artificial Sequence: Synthetic oligonucleotide
ccgagcgcugcgcaccaga

SEQ ID NO: 1216540 - RNA, 19 nt, Artificial Sequence
  Description of Artificial Sequence: Synthetic oligonucleotide
cccaaccucuccaaauauu

SEQ ID NO: 1216541 - RNA, 19 nt, Artificial Sequence
  Description of Artificial Sequence: Synthetic oligonucleotide
cgggcguaccuccaccgca

SEQ ID NO: 1216542 - RNA, 19 nt, Artificial Sequence
  Description of Artificial Sequence: Synthetic oligonucleotide
cgugucgcuacaggugaca

SEQ ID NO: 1216543 - RNA, 19 nt, Artificial Sequence
  Description of Artificial Sequence: Synthetic oligonucleotide
guucccggcucagccuuau

SEQ ID NO: 1216544 - RNA, 19 nt, Artificial Sequence
  Description of Artificial Sequence: Synthetic oligonucleotide
gcguucccggcucagccuu

SEQ ID NO: 1216545 - RNA, 19 nt, Artificial Sequence
  Description of Artificial Sequence: Synthetic oligonucleotide
cgggcucucugaggaauuc

SEQ ID NO: 1216546 - RNA, 19 nt, Artificial Sequence
  Description of Artificial Sequence: Synthetic oligonucleotide
ucccgacguuucggcuaau

SEQ ID NO: 1216547 - RNA, 19 nt, Artificial Sequence
  Description of Artificial Sequence: Synthetic oligonucleotide
ggcuaaccacucacucagu

SEQ ID NO: 1216548 - RNA, 19 nt, Artificial Sequence
  Description of Artificial Sequence: Synthetic oligonucleotide
cccaaaccuccgcccugca

SEQ ID NO: 1216549 - RNA, 19 nt, Artificial Sequence
  Description of Artificial Sequence: Synthetic oligonucleotide
ggagcucgccccgggcgua

SEQ ID NO: 1216550 - RNA, 19 nt, Artificial Sequence
  Description of Artificial Sequence: Synthetic oligonucleotide
cgucaaugcacaggugcgu

SEQ ID NO: 1216551 - RNA, 19 nt, Artificial Sequence
  Description of Artificial Sequence: Synthetic oligonucleotide
cagcgaccacagacaccgu

SEQ ID NO: 1216552 - RNA, 19 nt, Artificial Sequence
  Description of Artificial Sequence: Synthetic oligonucleotide
gcucgccccgggcguaccu

SEQ ID NO: 1216553 - RNA, 19 nt, Artificial Sequence
  Description of Artificial Sequence: Synthetic oligonucleotide
gcaccgggucccgagccau

SEQ ID NO: 1216554 - RNA, 19 nt, Artificial Sequence
  Description of Artificial Sequence: Synthetic oligonucleotide
gcgcugcuauuggcgaagu

SEQ ID NO: 1216555 - RNA, 19 nt, Artificial Sequence
  Description of Artificial Sequence: Synthetic oligonucleotide
caccgggucccgagccauu

SEQ ID NO: 1216556 - RNA, 19 nt, Artificial Sequence
  Description of Artificial Sequence: Synthetic oligonucleotide
ucguccaucauaaacaagg

SEQ ID NO: 1216557 - RNA, 19 nt, Artificial Sequence
  Description of Artificial Sequence: Synthetic oligonucleotide
ucaaacaacaggcaggucc

SEQ ID NO: 1216558 - RNA, 19 nt, Artificial Sequence
  Description of Artificial Sequence: Synthetic oligonucleotide
uccaucauaaacaaggucu

SEQ ID NO: 1216559 - RNA, 19 nt, Artificial Sequence
  Description of Artificial Sequence: Synthetic oligonucleotide
ugagauguaggaucgagcg

SEQ ID NO: 1216560 - RNA, 19 nt, Artificial Sequence
  Description of Artificial Sequence: Synthetic oligonucleotide
auugccaaagacuugagug

SEQ ID NO: 1216561 - RNA, 19 nt, Artificial Sequence
  Description of Artificial Sequence: Synthetic oligonucleotide
ugguacacgguucagagag

SEQ ID NO: 1216562 - RNA, 19 nt, Artificial Sequence
  Description of Artificial Sequence: Synthetic oligonucleotide
gauaugauuagacuuuggc

SEQ ID NO: 1216563 - RNA, 19 nt, Artificial Sequence
  Description of Artificial Sequence: Synthetic oligonucleotide
uuuugaaugucaaaucgca

SEQ ID NO: 1216564 - RNA, 19 nt, Artificial Sequence
  Description of Artificial Sequence: Synthetic oligonucleotide
uaugauuagacuuuggcuu

SEQ ID NO: 1216565 - RNA, 19 nt, Artificial Sequence
  Description of Artificial Sequence: Synthetic oligonucleotide
uucaguaagauucugccuc

SEQ ID NO: 1216566 - RNA, 19 nt, Artificial Sequence
  Description of Artificial Sequence: Synthetic oligonucleotide
aacacagugauugugucag

SEQ ID NO: 1216567 - RNA, 19 nt, Artificial Sequence
  Description of Artificial Sequence: Synthetic oligonucleotide
uggaaagggaacagcaugg

SEQ ID NO: 1216568 - RNA, 19 nt, Artificial Sequence
  Description of Artificial Sequence: Synthetic oligonucleotide
aguauagucugcaauggcc

SEQ ID NO: 1216569 - RNA, 19 nt, Artificial Sequence
  Description of Artificial Sequence: Synthetic oligonucleotide
gaugucgccugcuaggugg

SEQ ID NO: 1216570 - RNA, 19 nt, Artificial Sequence
  Description of Artificial Sequence: Synthetic oligonucleotide
ucgaucaugaacucaaaca

SEQ ID NO: 1216571 - RNA, 19 nt, Artificial Sequence
  Description of Artificial Sequence: Synthetic oligonucleotide
uaugguacacgguucagag

SEQ ID NO: 1216572 - RNA, 19 nt, Artificial Sequence
  Description of Artificial Sequence: Synthetic oligonucleotide
aacgacggaaccugugacc

SEQ ID NO: 1216573 - RNA, 19 nt, Artificial Sequence
  Description of Artificial Sequence: Synthetic oligonucleotide
cuugagugcacugaggucg

SEQ ID NO: 1216574 - RNA, 19 nt, Artificial Sequence
  Description of Artificial Sequence: Synthetic oligonucleotide
uguaucccgggcauaaagg

SEQ ID NO: 1216575 - RNA, 19 nt, Artificial Sequence
  Description of Artificial Sequence: Synthetic oligonucleotide
auaugauuagacuuuggcu

SEQ ID NO: 1216576 - RNA, 19 nt, Artificial Sequence
  Description of Artificial Sequence: Synthetic oligonucleotide
uuccacaagaugcaaacca

SEQ ID NO: 1216577 - RNA, 19 nt, Artificial Sequence
  Description of Artificial Sequence: Synthetic oligonucleotide
acaagaugcaaaccauggc

SEQ ID NO: 1216578 - RNA, 19 nt, Artificial Sequence
  Description of Artificial Sequence: Synthetic oligonucleotide
aaagacuuucucuccagcu

SEQ ID NO: 1216579 - RNA, 19 nt, Artificial Sequence
  Description of Artificial Sequence: Synthetic oligonucleotide
gaagggaugacgcccaucc

SEQ ID NO: 1216580 - RNA, 19 nt, Artificial Sequence
  Description of Artificial Sequence: Synthetic oligonucleotide
aaacgacggaaccugugac

SEQ ID NO: 1216581 - RNA, 19 nt, Artificial Sequence
  Description of Artificial Sequence: Synthetic oligonucleotide
uguaaaacgacggaaccug

SEQ ID NO: 1216582 - RNA, 19 nt, Artificial Sequence
  Description of Artificial Sequence: Synthetic oligonucleotide
uuaaccauguaucccgggc

SEQ ID NO: 1216583 - RNA, 19 nt, Artificial Sequence
  Description of Artificial Sequence: Synthetic oligonucleotide
aguuccauagcugucaaag

SEQ ID NO: 1216584 - RNA, 19 nt, Artificial Sequence
  Description of Artificial Sequence: Synthetic oligonucleotide
aaaacgacggaaccuguga

SEQ ID NO: 1216585 - RNA, 19 nt, Artificial Sequence
  Description of Artificial Sequence: Synthetic oligonucleotide
ugcaauaugguacacgguu

SEQ ID NO: 1216586 - RNA, 19 nt, Artificial Sequence
  Description of Artificial Sequence: Synthetic oligonucleotide
ucgagcguagaugagacag

SEQ ID NO: 1216587 - RNA, 19 nt, Artificial Sequence
  Description of Artificial Sequence: Synthetic oligonucleotide
ugguauuucguugugcgag

SEQ ID NO: 1216588 - RNA, 19 nt, Artificial Sequence
  Description of Artificial Sequence: Synthetic oligonucleotide
ugaacucaaacaacaggca

SEQ ID NO: 1216589 - RNA, 19 nt, Artificial Sequence
  Description of Artificial Sequence: Synthetic oligonucleotide
auaacugcuucuuuguuau

SEQ ID NO: 1216590 - RNA, 19 nt, Artificial Sequence
  Description of Artificial Sequence: Synthetic oligonucleotide
caaaucgcagcucaccccg

SEQ ID NO: 1216591 - RNA, 19 nt, Artificial Sequence
  Description of Artificial Sequence: Synthetic oligonucleotide
uaggaucgagcguagauga

SEQ ID NO: 1216592 - RNA, 19 nt, Artificial Sequence
  Description of Artificial Sequence: Synthetic oligonucleotide
uucccuuucauuucucggc

SEQ ID NO: 1216593 - RNA, 19 nt, Artificial Sequence
  Description of Artificial Sequence: Synthetic oligonucleotide
acaugugccuucuccacac

SEQ ID NO: 1216594 - RNA, 19 nt, Artificial Sequence
  Description of Artificial Sequence: Synthetic oligonucleotide
uuugagauguaggaucgag

SEQ ID NO: 1216595 - RNA, 19 nt, Artificial Sequence
  Description of Artificial Sequence: Synthetic oligonucleotide
uuccgggacagucaccugg

SEQ ID NO: 1216596 - RNA, 19 nt, Artificial Sequence
  Description of Artificial Sequence: Synthetic oligonucleotide
gguaccagccuuuugaaug

SEQ ID NO: 1216597 - RNA, 19 nt, Artificial Sequence
  Description of Artificial Sequence: Synthetic oligonucleotide
uugagauguaggaucgagc

SEQ ID NO: 1216598 - RNA, 19 nt, Artificial Sequence
  Description of Artificial Sequence: Synthetic oligonucleotide
aacugcaauaugguacacg

SEQ ID NO: 1216599 - RNA, 19 nt, Artificial Sequence
  Description of Artificial Sequence: Synthetic oligonucleotide
gaugacgcccauccgaagc

SEQ ID NO: 1216600 - RNA, 19 nt, Artificial Sequence
  Description of Artificial Sequence: Synthetic oligonucleotide
cauagacugccuugggucg

SEQ ID NO: 1216601 - RNA, 19 nt, Artificial Sequence
  Description of Artificial Sequence: Synthetic oligonucleotide
augacgcccauccgaagcc

SEQ ID NO: 1216602 - RNA, 19 nt, Artificial Sequence
  Description of Artificial Sequence: Synthetic oligonucleotide
ugggucguccaucauaaac

SEQ ID NO: 1216603 - RNA, 19 nt, Artificial Sequence
  Description of Artificial Sequence: Synthetic oligonucleotide
aucaugaacucaaacaaca

SEQ ID NO: 1216604 - RNA, 19 nt, Artificial Sequence
  Description of Artificial Sequence: Synthetic oligonucleotide
gagacagaccagcucagag

SEQ ID NO: 1216605 - RNA, 19 nt, Artificial Sequence
  Description of Artificial Sequence: Synthetic oligonucleotide
uuuaaccauguaucccggg

SEQ ID NO: 1216606 - RNA, 19 nt, Artificial Sequence
  Description of Artificial Sequence: Synthetic oligonucleotide
ucuuuguaaaacgacggaa

SEQ ID NO: 1216607 - RNA, 19 nt, Artificial Sequence
  Description of Artificial Sequence: Synthetic oligonucleotide
cuugggucgugcauggugc

SEQ ID NO: 1216608 - RNA, 19 nt, Artificial Sequence
  Description of Artificial Sequence: Synthetic oligonucleotide
uaaaacgacggaaccugug

SEQ ID NO: 1216609 - RNA, 19 nt, Artificial Sequence
  Description of Artificial Sequence: Synthetic oligonucleotide
agaugagacagaccagcuc

SEQ ID NO: 1216610 - RNA, 19 nt, Artificial Sequence
  Description of Artificial Sequence: Synthetic oligonucleotide
agacaugugccuucuccac

SEQ ID NO: 1216611 - RNA, 19 nt, Artificial Sequence
  Description of Artificial Sequence: Synthetic oligonucleotide
uguaggaucgagcguagau

SEQ ID NO: 1216612 - RNA, 19 nt, Artificial Sequence
  Description of Artificial Sequence: Synthetic oligonucleotide
uuucguugugcgaggcugg

SEQ ID NO: 1216613 - RNA, 19 nt, Artificial Sequence
  Description of Artificial Sequence: Synthetic oligonucleotide
ugaaguuucagaguuccau

SEQ ID NO: 1216614 - RNA, 19 nt, Artificial Sequence
  Description of Artificial Sequence: Synthetic oligonucleotide
cuccuuuaaccauguaucc

SEQ ID NO: 1216615 - RNA, 19 nt, Artificial Sequence
  Description of Artificial Sequence: Synthetic oligonucleotide
aggucgaacucauaggcgu

SEQ ID NO: 1216616 - RNA, 19 nt, Artificial Sequence
  Description of Artificial Sequence: Synthetic oligonucleotide
ucauuuccgggacagucac

SEQ ID NO: 1216617 - RNA, 19 nt, Artificial Sequence
  Description of Artificial Sequence: Synthetic oligonucleotide
acucauuuccgggacaguc

SEQ ID NO: 1216618 - RNA, 19 nt, Artificial Sequence
  Description of Artificial Sequence: Synthetic oligonucleotide
ugugacucauuuccgggac

SEQ ID NO: 1216619 - RNA, 19 nt, Artificial Sequence
  Description of Artificial Sequence: Synthetic oligonucleotide
ucccuuucauuucucggcc

SEQ ID NO: 1216620 - RNA, 19 nt, Artificial Sequence
  Description of Artificial Sequence: Synthetic oligonucleotide
uggugcgcacagaagaggc

SEQ ID NO: 1216621 - RNA, 19 nt, Artificial Sequence
  Description of Artificial Sequence: Synthetic oligonucleotide
auuucguugugcgaggcug

SEQ ID NO: 1216622 - RNA, 19 nt, Artificial Sequence
  Description of Artificial Sequence: Synthetic oligonucleotide
ucgguggcaguauagucug

SEQ ID NO: 1216623 - RNA, 19 nt, Artificial Sequence
  Description of Artificial Sequence: Synthetic oligonucleotide
uccuuuaaccauguauccc

SEQ ID NO: 1216624 - RNA, 19 nt, Artificial Sequence
  Description of Artificial Sequence: Synthetic oligonucleotide
ugucaaaucgcagcucacc

SEQ ID NO: 1216625 - RNA, 19 nt, Artificial Sequence
  Description of Artificial Sequence: Synthetic oligonucleotide
aggucggagaucuguacag

SEQ ID NO: 1216626 - RNA, 19 nt, Artificial Sequence
  Description of Artificial Sequence: Synthetic oligonucleotide
agcugggucucaucggugg

SEQ ID NO: 1216627 - RNA, 19 nt, Artificial Sequence
  Description of Artificial Sequence: Synthetic oligonucleotide
ugugguagucuuucucagc

SEQ ID NO: 1216628 - RNA, 19 nt, Artificial Sequence
  Description of Artificial Sequence: Synthetic oligonucleotide
gacggaaccugugaccacg

SEQ ID NO: 1216629 - RNA, 19 nt, Artificial Sequence
  Description of Artificial Sequence: Synthetic oligonucleotide
auugugucagcaaagccgu

SEQ ID NO: 1216630 - RNA, 19 nt, Artificial Sequence
  Description of Artificial Sequence: Synthetic oligonucleotide
uguccuccgggucauacuc

SEQ ID NO: 1216631 - RNA, 19 nt, Artificial Sequence
  Description of Artificial Sequence: Synthetic oligonucleotide
gauguacccacagcagccg

SEQ ID NO: 1216632 - RNA, 19 nt, Artificial Sequence
  Description of Artificial Sequence: Synthetic oligonucleotide
auuuccgggacagucaccu

SEQ ID NO: 1216633 - RNA, 19 nt, Artificial Sequence
  Description of Artificial Sequence: Synthetic oligonucleotide
ucccaagcagugcuuaacu

SEQ ID NO: 1216634 - RNA, 19 nt, Artificial Sequence
  Description of Artificial Sequence: Synthetic oligonucleotide
cuucugcuggaacacagug

SEQ ID NO: 1216635 - RNA, 19 nt, Artificial Sequence
  Description of Artificial Sequence: Synthetic oligonucleotide
acuagcuuccacagcauag

SEQ ID NO: 1216636 - RNA, 19 nt, Artificial Sequence
  Description of Artificial Sequence: Synthetic oligonucleotide
guggacugggacugggucg

SEQ ID NO: 1216637 - RNA, 19 nt, Artificial Sequence
  Description of Artificial Sequence: Synthetic oligonucleotide
aagggaugacgcccauccg

SEQ ID NO: 1216638 - RNA, 19 nt, Artificial Sequence
  Description of Artificial Sequence: Synthetic oligonucleotide
cauggugcgcacagaagag

SEQ ID NO: 1216639 - RNA, 19 nt, Artificial Sequence
  Description of Artificial Sequence: Synthetic oligonucleotide
uauagucugcaauggccac

SEQ ID NO: 1216640 - RNA, 19 nt, Artificial Sequence
  Description of Artificial Sequence: Synthetic oligonucleotide
gaccacgucuccugugugg

SEQ ID NO: 1216641 - RNA, 19 nt, Artificial Sequence
  Description of Artificial Sequence: Synthetic oligonucleotide
agauguaggaucgagcgua

SEQ ID NO: 1216642 - RNA, 19 nt, Artificial Sequence
  Description of Artificial Sequence: Synthetic oligonucleotide
ugugaggggccgaugucgc

SEQ ID NO: 1216643 - RNA, 19 nt, Artificial Sequence
  Description of Artificial Sequence: Synthetic oligonucleotide
uuggcagggauguacccac

SEQ ID NO: 1216644 - RNA, 19 nt, Artificial Sequence
  Description of Artificial Sequence: Synthetic oligonucleotide
agggaugacgcccauccga

SEQ ID NO: 1216645 - RNA, 19 nt, Artificial Sequence
  Description of Artificial Sequence: Synthetic oligonucleotide
gaggucgaacucauaggcg

SEQ ID NO: 1216646 - RNA, 19 nt, Artificial Sequence
  Description of Artificial Sequence: Synthetic oligonucleotide
ucgccugcuagguggaaag

SEQ ID NO: 1216647 - RNA, 19 nt, Artificial Sequence
  Description of Artificial Sequence: Synthetic oligonucleotide
guaggaucgagcguagaug

SEQ ID NO: 1216648 - RNA, 19 nt, Artificial Sequence
  Description of Artificial Sequence: Synthetic oligonucleotide
ucggagaucuguacaguuc

SEQ ID NO: 1216649 - RNA, 19 nt, Artificial Sequence
  Description of Artificial Sequence: Synthetic oligonucleotide
ggugaaguuucagaguucc

SEQ ID NO: 1216650 - RNA, 19 nt, Artificial Sequence
  Description of Artificial Sequence: Synthetic oligonucleotide
gaucgagcguagaugagac

SEQ ID NO: 1216651 - RNA, 19 nt, Artificial Sequence
  Description of Artificial Sequence: Synthetic oligonucleotide
caguauagucugcaauggc

SEQ ID NO: 1216652 - RNA, 19 nt, Artificial Sequence
  Description of Artificial Sequence: Synthetic oligonucleotide
gguauuucguugugcgagg

SEQ ID NO: 1216653 - RNA, 19 nt, Artificial Sequence
  Description of Artificial Sequence: Synthetic oligonucleotide
uggcaguauagucugcaau

SEQ ID NO: 1216654 - RNA, 19 nt, Artificial Sequence
  Description of Artificial Sequence: Synthetic oligonucleotide
uauuucguugugcgaggcu

SEQ ID NO: 1216655 - RNA, 19 nt, Artificial Sequence
  Description of Artificial Sequence: Synthetic oligonucleotide
cuugcugugguagucuuuc

SEQ ID NO: 1216656 - RNA, 19 nt, Artificial Sequence
  Description of Artificial Sequence: Synthetic oligonucleotide
cucaucgguggcaguauag

SEQ ID NO: 1216657 - RNA, 19 nt, Artificial Sequence
  Description of Artificial Sequence: Synthetic oligonucleotide
gucagcaaagccguucugc

SEQ ID NO: 1216658 - RNA, 19 nt, Artificial Sequence
  Description of Artificial Sequence: Synthetic oligonucleotide
ugugcgaggcuggucagcc

SEQ ID NO: 1216659 - RNA, 19 nt, Artificial Sequence
  Description of Artificial Sequence: Synthetic oligonucleotide
caucucacuagcuuccaca

SEQ ID NO: 1216660 - RNA, 19 nt, Artificial Sequence
  Description of Artificial Sequence: Synthetic oligonucleotide
uccauaguucaguaagauu

SEQ ID NO: 1216661 - RNA, 19 nt, Artificial Sequence
  Description of Artificial Sequence: Synthetic oligonucleotide
gacucgaucaugaacucaa

SEQ ID NO: 1216662 - RNA, 19 nt, Artificial Sequence
  Description of Artificial Sequence: Synthetic oligonucleotide
guaucccgggcauaaagga

SEQ ID NO: 1216663 - RNA, 19 nt, Artificial Sequence
  Description of Artificial Sequence: Synthetic oligonucleotide
ugccuugggucgugcaugg

SEQ ID NO: 1216664 - RNA, 19 nt, Artificial Sequence
  Description of Artificial Sequence: Synthetic oligonucleotide
cagggcaccaaguguagug

SEQ ID NO: 1216665 - RNA, 19 nt, Artificial Sequence
  Description of Artificial Sequence: Synthetic oligonucleotide
cauaacugcuucuuuguua

SEQ ID NO: 1216666 - RNA, 19 nt, Artificial Sequence
  Description of Artificial Sequence: Synthetic oligonucleotide
uucuccgccgaacgccagg

SEQ ID NO: 1216667 - RNA, 19 nt, Artificial Sequence
  Description of Artificial Sequence: Synthetic oligonucleotide
aucgguggcaguauagucu

SEQ ID NO: 1216668 - RNA, 19 nt, Artificial Sequence
  Description of Artificial Sequence: Synthetic oligonucleotide
uaucccgggcauaaaggau

SEQ ID NO: 1216669 - RNA, 19 nt, Artificial Sequence
  Description of Artificial Sequence: Synthetic oligonucleotide
cauccacucggacaccagc

SEQ ID NO: 1216670 - RNA, 19 nt, Artificial Sequence
  Description of Artificial Sequence: Synthetic oligonucleotide
gcauagacugccuuggguc

SEQ ID NO: 1216671 - RNA, 19 nt, Artificial Sequence
  Description of Artificial Sequence: Synthetic oligonucleotide
uggccacgaacuccucugg

SEQ ID NO: 1216672 - RNA, 19 nt, Artificial Sequence
  Description of Artificial Sequence: Synthetic oligonucleotide
auguacccacagcagccgg

SEQ ID NO: 1216673 - RNA, 19 nt, Artificial Sequence
  Description of Artificial Sequence: Synthetic oligonucleotide
ugcgaggcuggucagccaa

SEQ ID NO: 1216674 - RNA, 19 nt, Artificial Sequence
  Description of Artificial Sequence: Synthetic oligonucleotide
gagcguagaugagacagac

SEQ ID NO: 1216675 - RNA, 19 nt, Artificial Sequence
  Description of Artificial Sequence: Synthetic oligonucleotide
gcaguauagucugcaaugg

SEQ ID NO: 1216676 - RNA, 19 nt, Artificial Sequence
  Description of Artificial Sequence: Synthetic oligonucleotide
aaaucgcagcucaccccgc

SEQ ID NO: 1216677 - RNA, 19 nt, Artificial Sequence
  Description of Artificial Sequence: Synthetic oligonucleotide
auaugguacacgguucaga

SEQ ID NO: 1216678 - RNA, 19 nt, Artificial Sequence
  Description of Artificial Sequence: Synthetic oligonucleotide
ugguuggccagaugacacc

SEQ ID NO: 1216679 - RNA, 19 nt, Artificial Sequence
  Description of Artificial Sequence: Synthetic oligonucleotide
uugggucgugcauggugcg

SEQ ID NO: 1216680 - RNA, 19 nt, Artificial Sequence
  Description of Artificial Sequence: Synthetic oligonucleotide
gacaugugccuucuccaca

SEQ ID NO: 1216681 - RNA, 19 nt, Artificial Sequence
  Description of Artificial Sequence: Synthetic oligonucleotide
caagauaugauuagacuuu

SEQ ID NO: 1216682 - RNA, 19 nt, Artificial Sequence
  Description of Artificial Sequence: Synthetic oligonucleotide
cuugccagguguccuccgg

SEQ ID NO: 1216683 - RNA, 19 nt, Artificial Sequence
  Description of Artificial Sequence: Synthetic oligonucleotide
cuuucauuucucggccgcg

SEQ ID NO: 1216684 - RNA, 19 nt, Artificial Sequence
  Description of Artificial Sequence: Synthetic oligonucleotide
gauguaggaucgagcguag

SEQ ID NO: 1216685 - RNA, 19 nt, Artificial Sequence
  Description of Artificial Sequence: Synthetic oligonucleotide
ggcauaaaggauggacucg

SEQ ID NO: 1216686 - RNA, 19 nt, Artificial Sequence
  Description of Artificial Sequence: Synthetic oligonucleotide
cuuccacaagaugcaaacc

SEQ ID NO: 1216687 - RNA, 19 nt, Artificial Sequence
  Description of Artificial Sequence: Synthetic oligonucleotide
caggcuggcgacaccgagg

SEQ ID NO: 1216688 - RNA, 19 nt, Artificial Sequence
  Description of Artificial Sequence: Synthetic oligonucleotide
accggauuucuuuguaaaa

SEQ ID NO: 1216689 - RNA, 19 nt, Artificial Sequence
  Description of Artificial Sequence: Synthetic oligonucleotide
agcguagaugagacagacc

SEQ ID NO: 1216690 - RNA, 19 nt, Artificial Sequence
  Description of Artificial Sequence: Synthetic oligonucleotide
aagccguucugcaggacca

SEQ ID NO: 1216691 - RNA, 19 nt, Artificial Sequence
  Description of Artificial Sequence: Synthetic oligonucleotide
ugcgcacagaagaggcuga

SEQ ID NO: 1216692 - RNA, 19 nt, Artificial Sequence
  Description of Artificial Sequence: Synthetic oligonucleotide
ugucuccauaguucaguaa

SEQ ID NO: 1216693 - RNA, 19 nt, Artificial Sequence
  Description of Artificial Sequence: Synthetic oligonucleotide
ucgcagcucaccccgcaug

SEQ ID NO: 1216694 - RNA, 19 nt, Artificial Sequence
  Description of Artificial Sequence: Synthetic oligonucleotide
uacacgguucagagagaca

SEQ ID NO: 1216695 - RNA, 19 nt, Artificial Sequence
  Description of Artificial Sequence: Synthetic oligonucleotide
ucggccgcguuucuccgcc

SEQ ID NO: 1216696 - RNA, 19 nt, Artificial Sequence
  Description of Artificial Sequence: Synthetic oligonucleotide
acugggucguccaucauaa

SEQ ID NO: 1216697 - RNA, 19 nt, Artificial Sequence
  Description of Artificial Sequence: Synthetic oligonucleotide
ucauuucucggccgcguuu

SEQ ID NO: 1216698 - RNA, 19 nt, Artificial Sequence
  Description of Artificial Sequence: Synthetic oligonucleotide
ugggucucaucgguggcag

SEQ ID NO: 1216699 - RNA, 19 nt, Artificial Sequence
  Description of Artificial Sequence: Synthetic oligonucleotide
gacaggugcuuauggaugu

SEQ ID NO: 1216700 - RNA, 19 nt, Artificial Sequence
  Description of Artificial Sequence: Synthetic oligonucleotide
aguaagauucugccucaua

SEQ ID NO: 1216701 - RNA, 19 nt, Artificial Sequence
  Description of Artificial Sequence: Synthetic oligonucleotide
caugacucccaagcagugc

SEQ ID NO: 1216702 - RNA, 19 nt, Artificial Sequence
  Description of Artificial Sequence: Synthetic oligonucleotide
uccuccgggucauacuccu

SEQ ID NO: 1216703 - RNA, 19 nt, Artificial Sequence
  Description of Artificial Sequence: Synthetic oligonucleotide
ugaccacgucuccugugug

SEQ ID NO: 1216704 - RNA, 19 nt, Artificial Sequence
  Description of Artificial Sequence: Synthetic oligonucleotide
acugggacugggucgucca

SEQ ID NO: 1216705 - RNA, 19 nt, Artificial Sequence
  Description of Artificial Sequence: Synthetic oligonucleotide
cugugguuggccagaugac

SEQ ID NO: 1216706 - RNA, 19 nt, Artificial Sequence
  Description of Artificial Sequence: Synthetic oligonucleotide
acaccggauuucuuuguaa

SEQ ID NO: 1216707 - RNA, 19 nt, Artificial Sequence
  Description of Artificial Sequence: Synthetic oligonucleotide
accuucugcuggaacacag

SEQ ID NO: 1216708 - RNA, 19 nt, Artificial Sequence
  Description of Artificial Sequence: Synthetic oligonucleotide
ucuguacaguucucauguc

SEQ ID NO: 1216709 - RNA, 19 nt, Artificial Sequence
  Description of Artificial Sequence: Synthetic oligonucleotide
augguacacgguucagaga

SEQ ID NO: 1216710 - RNA, 19 nt, Artificial Sequence
  Description of Artificial Sequence: Synthetic oligonucleotide
guauuucguugugcgaggc

SEQ ID NO: 1216711 - RNA, 19 nt, Artificial Sequence
  Description of Artificial Sequence: Synthetic oligonucleotide
ucauaggcguugucccaga

SEQ ID NO: 1216712 - RNA, 19 nt, Artificial Sequence
  Description of Artificial Sequence: Synthetic oligonucleotide
gccgaugucgccugcuagg

SEQ ID NO: 1216713 - RNA, 19 nt, Artificial Sequence
  Description of Artificial Sequence: Synthetic oligonucleotide
gggucguccaucauaaaca

SEQ ID NO: 1216714 - RNA, 19 nt, Artificial Sequence
  Description of Artificial Sequence: Synthetic oligonucleotide
uucauuucucggccgcguu

SEQ ID NO: 1216715 - RNA, 19 nt, Artificial Sequence
  Description of Artificial Sequence: Synthetic oligonucleotide
guugugcgaggcuggucag

SEQ ID NO: 1216716 - RNA, 19 nt, Artificial Sequence
  Description of Artificial Sequence: Synthetic oligonucleotide
acgucuccuguguggacug

SEQ ID NO: 1216717 - RNA, 19 nt, Artificial Sequence
  Description of Artificial Sequence: Synthetic oligonucleotide
ugagacagaccagcucaga

SEQ ID NO: 1216718 - RNA, 19 nt, Artificial Sequence
  Description of Artificial Sequence: Synthetic oligonucleotide
ggcgacaccgaggaggaag

SEQ ID NO: 1216719 - RNA, 19 nt, Artificial Sequence
  Description of Artificial Sequence: Synthetic oligonucleotide
ccagauuggaaagacuuuc

SEQ ID NO: 1216720 - RNA, 19 nt, Artificial Sequence
  Description of Artificial Sequence: Synthetic oligonucleotide
cauuuccgggacagucacc

SEQ ID NO: 1216721 - RNA, 19 nt, Artificial Sequence
  Description of Artificial Sequence: Synthetic oligonucleotide
ucucaucgguggcaguaua

SEQ ID NO: 1216722 - RNA, 19 nt, Artificial Sequence
  Description of Artificial Sequence: Synthetic oligonucleotide
ggacaggugcuuauggaug

SEQ ID NO: 1216723 - RNA, 19 nt, Artificial Sequence
  Description of Artificial Sequence: Synthetic oligonucleotide
ccggauuucuuuguaaaac

SEQ ID NO: 1216724 - RNA, 19 nt, Artificial Sequence
  Description of Artificial Sequence: Synthetic oligonucleotide
gacaccgaggaggaaggga

SEQ ID NO: 1216725 - RNA, 19 nt, Artificial Sequence
  Description of Artificial Sequence: Synthetic oligonucleotide
gcuuauggaugucacagcu

SEQ ID NO: 1216726 - RNA, 19 nt, Artificial Sequence
  Description of Artificial Sequence: Synthetic oligonucleotide
gucgaacucauaggcguug

SEQ ID NO: 1216727 - RNA, 19 nt, Artificial Sequence
  Description of Artificial Sequence: Synthetic oligonucleotide
caccggauuucuuuguaaa

SEQ ID NO: 1216728 - RNA, 19 nt, Artificial Sequence
  Description of Artificial Sequence: Synthetic oligonucleotide
gggcaccaaguguagugcg

SEQ ID NO: 1216729 - RNA, 19 nt, Artificial Sequence
  Description of Artificial Sequence: Synthetic oligonucleotide
uccgggucauacuccucca

SEQ ID NO: 1216730 - RNA, 19 nt, Artificial Sequence
  Description of Artificial Sequence: Synthetic oligonucleotide
ccauccuccuuuaaccaug

SEQ ID NO: 1216731 - RNA, 19 nt, Artificial Sequence
  Description of Artificial Sequence: Synthetic oligonucleotide
ccuuucauuucucggccgc

SEQ ID NO: 1216732 - RNA, 19 nt, Artificial Sequence
  Description of Artificial Sequence: Synthetic oligonucleotide
ucgaacucauaggcguugu

SEQ ID NO: 1216733 - RNA, 19 nt, Artificial Sequence
  Description of Artificial Sequence: Synthetic oligonucleotide
ugaagccaugcaggguacc

SEQ ID NO: 1216734 - RNA, 19 nt, Artificial Sequence
  Description of Artificial Sequence: Synthetic oligonucleotide
cagugcuuaacugucaccu

SEQ ID NO: 1216735 - RNA, 19 nt, Artificial Sequence
  Description of Artificial Sequence: Synthetic oligonucleotide
guagugcggcugugguugg

SEQ ID NO: 1216736 - RNA, 19 nt, Artificial Sequence
  Description of Artificial Sequence: Synthetic oligonucleotide
ggucauacuccuccaccug

SEQ ID NO: 1216737 - RNA, 19 nt, Artificial Sequence
  Description of Artificial Sequence: Synthetic oligonucleotide
caggugaaguuucagaguu

SEQ ID NO: 1216738 - RNA, 19 nt, Artificial Sequence
  Description of Artificial Sequence: Synthetic oligonucleotide
guaccagccuuuugaaugu

SEQ ID NO: 1216739 - RNA, 19 nt, Artificial Sequence
  Description of Artificial Sequence: Synthetic oligonucleotide
accagucagccgugguuug

SEQ ID NO: 1216740 - RNA, 19 nt, Artificial Sequence
  Description of Artificial Sequence: Synthetic oligonucleotide
caggucggagaucuguaca

SEQ ID NO: 1216741 - RNA, 19 nt, Artificial Sequence
  Description of Artificial Sequence: Synthetic oligonucleotide
gccugcuagguggaaaggg

SEQ ID NO: 1216742 - RNA, 19 nt, Artificial Sequence
  Description of Artificial Sequence: Synthetic oligonucleotide
ggcagggauguacccacag

SEQ ID NO: 1216743 - RNA, 19 nt, Artificial Sequence
  Description of Artificial Sequence: Synthetic oligonucleotide
gcauaaaggauggacucga

SEQ ID NO: 1216744 - RNA, 19 nt, Artificial Sequence
  Description of Artificial Sequence: Synthetic oligonucleotide
cucccaagcagugcuuaac

SEQ ID NO: 1216745 - RNA, 19 nt, Artificial Sequence
  Description of Artificial Sequence: Synthetic oligonucleotide
aucgagcguagaugagaca

SEQ ID NO: 1216746 - RNA, 19 nt, Artificial Sequence
  Description of Artificial Sequence: Synthetic oligonucleotide
cugcuagguggaaagggaa

SEQ ID NO: 1216747 - RNA, 19 nt, Artificial Sequence
  Description of Artificial Sequence: Synthetic oligonucleotide
cccauccgaagccucagcc

SEQ ID NO: 1216748 - RNA, 19 nt, Artificial Sequence
  Description of Artificial Sequence: Synthetic oligonucleotide
auagacugccuugggucgu

SEQ ID NO: 1216749 - RNA, 19 nt, Artificial Sequence
  Description of Artificial Sequence: Synthetic oligonucleotide
ggcaccaaguguagugcgg

SEQ ID NO: 1216750 - RNA, 19 nt, Artificial Sequence
  Description of Artificial Sequence: Synthetic oligonucleotide
gauuagacuuuggcuucga

SEQ ID NO: 1216751 - RNA, 19 nt, Artificial Sequence
  Description of Artificial Sequence: Synthetic oligonucleotide
ggaaccugugaccacgucu

SEQ ID NO: 1216752 - RNA, 19 nt, Artificial Sequence
  Description of Artificial Sequence: Synthetic oligonucleotide
ccugugaccacgucuccug

SEQ ID NO: 1216753 - RNA, 19 nt, Artificial Sequence
  Description of Artificial Sequence: Synthetic oligonucleotide
ggaucgagcguagaugaga

SEQ ID NO: 1216754 - RNA, 19 nt, Artificial Sequence
  Description of Artificial Sequence: Synthetic oligonucleotide
gcuagguggaaagggaaca

SEQ ID NO: 1216755 - RNA, 19 nt, Artificial Sequence
  Description of Artificial Sequence: Synthetic oligonucleotide
cagauuggaaagacuuucu

SEQ ID NO: 1216756 - RNA, 19 nt, Artificial Sequence
  Description of Artificial Sequence: Synthetic oligonucleotide
ccgcauggucuccaggucg

SEQ ID NO: 1216757 - RNA, 19 nt, Artificial Sequence
  Description of Artificial Sequence: Synthetic oligonucleotide
cagggacuccuuguucugc

SEQ ID NO: 1216758 - RNA, 19 nt, Artificial Sequence
  Description of Artificial Sequence: Synthetic oligonucleotide
cagcucaccccgcaugguc

SEQ ID NO: 1216759 - RNA, 19 nt, Artificial Sequence
  Description of Artificial Sequence: Synthetic oligonucleotide
gcagugcuuaacugucacc

SEQ ID NO: 1216760 - RNA, 19 nt, Artificial Sequence
  Description of Artificial Sequence: Synthetic oligonucleotide
accaccagucagccguggu

SEQ ID NO: 1216761 - RNA, 19 nt, Artificial Sequence
  Description of Artificial Sequence: Synthetic oligonucleotide
acucccaagcagugcuuaa

SEQ ID NO: 1216762 - RNA, 19 nt, Artificial Sequence
  Description of Artificial Sequence: Synthetic oligonucleotide
ccuugggucgugcauggug

SEQ ID NO: 1216763 - RNA, 19 nt, Artificial Sequence
  Description of Artificial Sequence: Synthetic oligonucleotide
agccgugguuugucucagg

SEQ ID NO: 1216764 - RNA, 19 nt, Artificial Sequence
  Description of Artificial Sequence: Synthetic oligonucleotide
caccgaggaggaagggaug

SEQ ID NO: 1216765 - RNA, 19 nt, Artificial Sequence
  Description of Artificial Sequence: Synthetic oligonucleotide
uucguugugcgaggcuggu

SEQ ID NO: 1216766 - RNA, 19 nt, Artificial Sequence
  Description of Artificial Sequence: Synthetic oligonucleotide
cacguccaggaugaccuug

SEQ ID NO: 1216767 - RNA, 19 nt, Artificial Sequence
  Description of Artificial Sequence: Synthetic oligonucleotide
ugggacugggucguccauc

SEQ ID NO: 1216768 - RNA, 19 nt, Artificial Sequence
  Description of Artificial Sequence: Synthetic oligonucleotide
gugaccacgucuccugugu

SEQ ID NO: 1216769 - RNA, 19 nt, Artificial Sequence
  Description of Artificial Sequence: Synthetic oligonucleotide
ugacucccaagcagugcuu

SEQ ID NO: 1216770 - RNA, 19 nt, Artificial Sequence
  Description of Artificial Sequence: Synthetic oligonucleotide
gcgacaccgaggaggaagg

SEQ ID NO: 1216771 - RNA, 19 nt, Artificial Sequence
  Description of Artificial Sequence: Synthetic oligonucleotide
gcaccaaguguagugcggc

SEQ ID NO: 1216772 - RNA, 19 nt, Artificial Sequence
  Description of Artificial Sequence: Synthetic oligonucleotide
gguggcaguauagucugca

SEQ ID NO: 1216773 - RNA, 19 nt, Artificial Sequence
  Description of Artificial Sequence: Synthetic oligonucleotide
ugggucgugcauggugcgc

SEQ ID NO: 1216774 - RNA, 19 nt, Artificial Sequence
  Description of Artificial Sequence: Synthetic oligonucleotide
aggaucgagcguagaugag

SEQ ID NO: 1216775 - RNA, 19 nt, Artificial Sequence
  Description of Artificial Sequence: Synthetic oligonucleotide
gugcacacugaaccaagcu

SEQ ID NO: 1216776 - RNA, 19 nt, Artificial Sequence
  Description of Artificial Sequence: Synthetic oligonucleotide
cacgcucaccccaccacca

SEQ ID NO: 1216777 - RNA, 19 nt, Artificial Sequence
  Description of Artificial Sequence: Synthetic oligonucleotide
cccuuucauuucucggccg

SEQ ID NO: 1216778 - RNA, 19 nt, Artificial Sequence
  Description of Artificial Sequence: Synthetic oligonucleotide
guggcaguauagucugcaa

SEQ ID NO: 1216779 - RNA, 19 nt, Artificial Sequence
  Description of Artificial Sequence: Synthetic oligonucleotide
gugugcugugccaucucac

SEQ ID NO: 1216780 - RNA, 19 nt, Artificial Sequence
  Description of Artificial Sequence: Synthetic oligonucleotide
gguuggccagaugacacca

SEQ ID NO: 1216781 - RNA, 19 nt, Artificial Sequence
  Description of Artificial Sequence: Synthetic oligonucleotide
ccgggcauaaaggauggac

SEQ ID NO: 1216782 - RNA, 19 nt, Artificial Sequence
  Description of Artificial Sequence: Synthetic oligonucleotide
ugacgcccauccgaagccu

SEQ ID NO: 1216783 - RNA, 19 nt, Artificial Sequence
  Description of Artificial Sequence: Synthetic oligonucleotide
ccaagcugugaagccaugc

SEQ ID NO: 1216784 - RNA, 19 nt, Artificial Sequence
  Description of Artificial Sequence: Synthetic oligonucleotide
guacccacagcagccggca

SEQ ID NO: 1216785 - RNA, 19 nt, Artificial Sequence
  Description of Artificial Sequence: Synthetic oligonucleotide
ggccgaugucgccugcuag

SEQ ID NO: 1216786 - RNA, 19 nt, Artificial Sequence
  Description of Artificial Sequence: Synthetic oligonucleotide
aucgcagcucaccccgcau

SEQ ID NO: 1216787 - RNA, 19 nt, Artificial Sequence
  Description of Artificial Sequence: Synthetic oligonucleotide
gccgugguuugucucagga

SEQ ID NO: 1216788 - RNA, 19 nt, Artificial Sequence
  Description of Artificial Sequence: Synthetic oligonucleotide
cguuucuccgccgaacgcc

SEQ ID NO: 1216789 - RNA, 19 nt, Artificial Sequence
  Description of Artificial Sequence: Synthetic oligonucleotide
cucggccgcguuucuccgc

SEQ ID NO: 1216790 - RNA, 19 nt, Artificial Sequence
  Description of Artificial Sequence: Synthetic oligonucleotide
ccgccgaacgccaggcugg

SEQ ID NO: 1216791 - RNA, 19 nt, Artificial Sequence
  Description of Artificial Sequence: Synthetic oligonucleotide
gacucccaagcagugcuua

SEQ ID NO: 1216792 - RNA, 19 nt, Artificial Sequence
  Description of Artificial Sequence: Synthetic oligonucleotide
cguugugcgaggcugguca

SEQ ID NO: 1216793 - RNA, 19 nt, Artificial Sequence
  Description of Artificial Sequence: Synthetic oligonucleotide
cgcguuucuccgccgaacg

SEQ ID NO: 1216794 - RNA, 19 nt, Artificial Sequence
  Description of Artificial Sequence: Synthetic oligonucleotide
ggcacgcucaccccaccac

SEQ ID NO: 1216795 - RNA, 19 nt, Artificial Sequence
  Description of Artificial Sequence: Synthetic oligonucleotide
gugaaguuucagaguucca

SEQ ID NO: 1216796 - RNA, 19 nt, Artificial Sequence
  Description of Artificial Sequence: Synthetic oligonucleotide
guaaaacgacggaaccugu

SEQ ID NO: 1216797 - RNA, 19 nt, Artificial Sequence
  Description of Artificial Sequence: Synthetic oligonucleotide
auguaggaucgagcguaga

SEQ ID NO: 1216798 - RNA, 19 nt, Artificial Sequence
  Description of Artificial Sequence: Synthetic oligonucleotide
cuucccgaggugguuggca

SEQ ID NO: 1216799 - RNA, 19 nt, Artificial Sequence
  Description of Artificial Sequence: Synthetic oligonucleotide
gguguccuccgggucauac

SEQ ID NO: 1216800 - RNA, 19 nt, Artificial Sequence
  Description of Artificial Sequence: Synthetic oligonucleotide
uaccagccuuuugaauguc

SEQ ID NO: 1216801 - RNA, 19 nt, Artificial Sequence
  Description of Artificial Sequence: Synthetic oligonucleotide
cacuagcuuccacagcaua

SEQ ID NO: 1216802 - RNA, 19 nt, Artificial Sequence
  Description of Artificial Sequence: Synthetic oligonucleotide
ugcaggguaccagccuuuu

SEQ ID NO: 1216803 - RNA, 19 nt, Artificial Sequence
  Description of Artificial Sequence: Synthetic oligonucleotide
gcguuucuccgccgaacgc

SEQ ID NO: 1216804 - RNA, 19 nt, Artificial Sequence
  Description of Artificial Sequence: Synthetic oligonucleotide
cagccggcacgcucacccc

SEQ ID NO: 1216805 - RNA, 19 nt, Artificial Sequence
  Description of Artificial Sequence: Synthetic oligonucleotide
cuccauaguucaguaagau

SEQ ID NO: 1216806 - RNA, 19 nt, Artificial Sequence
  Description of Artificial Sequence: Synthetic oligonucleotide
gacgcccauccgaagccuc

SEQ ID NO: 1216807 - RNA, 19 nt, Artificial Sequence
  Description of Artificial Sequence: Synthetic oligonucleotide
acucgaucaugaacucaaa

SEQ ID NO: 1216808 - RNA, 19 nt, Artificial Sequence
  Description of Artificial Sequence: Synthetic oligonucleotide
uagugcggcugugguuggc

SEQ ID NO: 1216809 - RNA, 19 nt, Artificial Sequence
  Description of Artificial Sequence: Synthetic oligonucleotide
ucguugugcgaggcugguc

SEQ ID NO: 1216810 - RNA, 19 nt, Artificial Sequence
  Description of Artificial Sequence: Synthetic oligonucleotide
ggacucgaucaugaacuca

SEQ ID NO: 1216811 - RNA, 19 nt, Artificial Sequence
  Description of Artificial Sequence: Synthetic oligonucleotide
cucaccccgcauggucucc

SEQ ID NO: 1216812 - RNA, 19 nt, Artificial Sequence
  Description of Artificial Sequence: Synthetic oligonucleotide
cauaaaggauggacucgau

SEQ ID NO: 1216813 - RNA, 19 nt, Artificial Sequence
  Description of Artificial Sequence: Synthetic oligonucleotide
cauaggcguugucccagaa

SEQ ID NO: 1216814 - RNA, 19 nt, Artificial Sequence
  Description of Artificial Sequence: Synthetic oligonucleotide
ggucucaucgguggcagua

SEQ ID NO: 1216815 - RNA, 19 nt, Artificial Sequence
  Description of Artificial Sequence: Synthetic oligonucleotide
gggaugacgcccauccgaa

SEQ ID NO: 1216816 - RNA, 19 nt, Artificial Sequence
  Description of Artificial Sequence: Synthetic oligonucleotide
acggaaccugugaccacgu

SEQ ID NO: 1216817 - RNA, 19 nt, Artificial Sequence
  Description of Artificial Sequence: Synthetic oligonucleotide
ccaucucacuagcuuccac

SEQ ID NO: 1216818 - RNA, 19 nt, Artificial Sequence
  Description of Artificial Sequence: Synthetic oligonucleotide
gugcagcgggccugugcug

SEQ ID NO: 1216819 - RNA, 19 nt, Artificial Sequence
  Description of Artificial Sequence: Synthetic oligonucleotide
gucgccugcuagguggaaa

SEQ ID NO: 1216820 - RNA, 19 nt, Artificial Sequence
  Description of Artificial Sequence: Synthetic oligonucleotide
augucgccugcuaggugga

SEQ ID NO: 1216821 - RNA, 19 nt, Artificial Sequence
  Description of Artificial Sequence: Synthetic oligonucleotide
acgcccauccgaagccuca

SEQ ID NO: 1216822 - RNA, 19 nt, Artificial Sequence
  Description of Artificial Sequence: Synthetic oligonucleotide
accauguaucccgggcaua

SEQ ID NO: 1216823 - RNA, 19 nt, Artificial Sequence
  Description of Artificial Sequence: Synthetic oligonucleotide
ccauccacucggacaccag

SEQ ID NO: 1216824 - RNA, 19 nt, Artificial Sequence
  Description of Artificial Sequence: Synthetic oligonucleotide
guguccuccgggucauacu

SEQ ID NO: 1216825 - RNA, 19 nt, Artificial Sequence
  Description of Artificial Sequence: Synthetic oligonucleotide
gccaaagacuugagugcac

SEQ ID NO: 1216826 - RNA, 19 nt, Artificial Sequence
  Description of Artificial Sequence: Synthetic oligonucleotide
gcaggaugacauuguggua

SEQ ID NO: 1216827 - RNA, 19 nt, Artificial Sequence
  Description of Artificial Sequence: Synthetic oligonucleotide
gcccacguccaggaugacc

SEQ ID NO: 1216828 - RNA, 19 nt, Artificial Sequence
  Description of Artificial Sequence: Synthetic oligonucleotide
cauguaucccgggcauaaa

SEQ ID NO: 1216829 - RNA, 19 nt, Artificial Sequence
  Description of Artificial Sequence: Synthetic oligonucleotide
ccauguaucccgggcauaa

SEQ ID NO: 1216830 - RNA, 19 nt, Artificial Sequence
  Description of Artificial Sequence: Synthetic oligonucleotide
ugucgccugcuagguggaa

SEQ ID NO: 1216831 - RNA, 19 nt, Artificial Sequence
  Description of Artificial Sequence: Synthetic oligonucleotide
gcccauccgaagccucagc

SEQ ID NO: 1216832 - RNA, 19 nt, Artificial Sequence
  Description of Artificial Sequence: Synthetic oligonucleotide
ggaagggaugacgcccauc

SEQ ID NO: 1216833 - RNA, 19 nt, Artificial Sequence
  Description of Artificial Sequence: Synthetic oligonucleotide
gugcgaggcuggucagcca

SEQ ID NO: 1216834 - RNA, 19 nt, Artificial Sequence
  Description of Artificial Sequence: Synthetic oligonucleotide
ggcugugguuggccagaug

SEQ ID NO: 1216835 - RNA, 19 nt, Artificial Sequence
  Description of Artificial Sequence: Synthetic oligonucleotide
cagcgggccugugcugagc

SEQ ID NO: 1216836 - RNA, 19 nt, Artificial Sequence
  Description of Artificial Sequence: Synthetic oligonucleotide
gcagcgggccugugcugag

SEQ ID NO: 1216837 - RNA, 19 nt, Artificial Sequence
  Description of Artificial Sequence: Synthetic oligonucleotide
caccagucagccgugguuu

SEQ ID NO: 1216838 - RNA, 19 nt, Artificial Sequence
  Description of Artificial Sequence: Synthetic oligonucleotide
cugugaccacgucuccugu

SEQ ID NO: 1216839 - RNA, 19 nt, Artificial Sequence
  Description of Artificial Sequence: Synthetic oligonucleotide
ccaaagacuugagugcacu

SEQ ID NO: 1216840 - RNA, 19 nt, Artificial Sequence
  Description of Artificial Sequence: Synthetic oligonucleotide
gccugugugcugugccauc

SEQ ID NO: 1216841 - RNA, 19 nt, Artificial Sequence
  Description of Artificial Sequence: Synthetic oligonucleotide
cugggucguccaucauaaa

SEQ ID NO: 1216842 - RNA, 19 nt, Artificial Sequence
  Description of Artificial Sequence: Synthetic oligonucleotide
cgagcguagaugagacaga

SEQ ID NO: 1216843 - RNA, 19 nt, Artificial Sequence
  Description of Artificial Sequence: Synthetic oligonucleotide
ggccgcguuucuccgccga

SEQ ID NO: 1216844 - RNA, 19 nt, Artificial Sequence
  Description of Artificial Sequence: Synthetic oligonucleotide
ggcuggcgacaccgaggag

SEQ ID NO: 1216845 - RNA, 19 nt, Artificial Sequence
  Description of Artificial Sequence: Synthetic oligonucleotide
ccuccagauuggaaagacu

SEQ ID NO: 1216846 - RNA, 19 nt, Artificial Sequence
  Description of Artificial Sequence: Synthetic oligonucleotide
cgaugucgccugcuaggug

SEQ ID NO: 1216847 - RNA, 19 nt, Artificial Sequence
  Description of Artificial Sequence: Synthetic oligonucleotide
ggugcgcacagaagaggcu

SEQ ID NO: 1216848 - RNA, 19 nt, Artificial Sequence
  Description of Artificial Sequence: Synthetic oligonucleotide
ccuucugcuggaacacagu

SEQ ID NO: 1216849 - RNA, 19 nt, Artificial Sequence
  Description of Artificial Sequence: Synthetic oligonucleotide
ccgcguuucuccgccgaac

SEQ ID NO: 1216850 - RNA, 19 nt, Artificial Sequence
  Description of Artificial Sequence: Synthetic oligonucleotide
gcuucccgaggugguuggc

SEQ ID NO: 1216851 - RNA, 19 nt, Artificial Sequence
  Description of Artificial Sequence: Synthetic oligonucleotide
uggcgacaccgaggaggaa

SEQ ID NO: 1216852 - RNA, 19 nt, Artificial Sequence
  Description of Artificial Sequence: Synthetic oligonucleotide
gccgaacgccaggcuggcg

SEQ ID NO: 1216853 - RNA, 19 nt, Artificial Sequence
  Description of Artificial Sequence: Synthetic oligonucleotide
caguaagauucugccucau

SEQ ID NO: 1216854 - RNA, 19 nt, Artificial Sequence
  Description of Artificial Sequence: Synthetic oligonucleotide
cgccugcuagguggaaagg

SEQ ID NO: 1216855 - RNA, 19 nt, Artificial Sequence
  Description of Artificial Sequence: Synthetic oligonucleotide
gcgaggcuggucagccaac

SEQ ID NO: 1216856 - RNA, 19 nt, Artificial Sequence
  Description of Artificial Sequence: Synthetic oligonucleotide
ccggcacgcucaccccacc

SEQ ID NO: 1216857 - RNA, 19 nt, Artificial Sequence
  Description of Artificial Sequence: Synthetic oligonucleotide
ccacaccggauuucuuugu

SEQ ID NO: 1216858 - RNA, 19 nt, Artificial Sequence
  Description of Artificial Sequence: Synthetic oligonucleotide
gccgcguuucuccgccgaa

SEQ ID NO: 1216859 - RNA, 19 nt, Artificial Sequence
  Description of Artificial Sequence: Synthetic oligonucleotide
cugggacugggucguccau

SEQ ID NO: 1216860 - RNA, 19 nt, Artificial Sequence
  Description of Artificial Sequence: Synthetic oligonucleotide
cgcccauccgaagccucag

SEQ ID NO: 1216861 - RNA, 19 nt, Artificial Sequence
  Description of Artificial Sequence: Synthetic oligonucleotide
cggaaccugugaccacguc

SEQ ID NO: 1216862 - RNA, 19 nt, Artificial Sequence
  Description of Artificial Sequence: Synthetic oligonucleotide
ccgaugucgccugcuaggu

SEQ ID NO: 1216863 - RNA, 19 nt, Artificial Sequence
  Description of Artificial Sequence: Synthetic oligonucleotide
gggucucaucgguggcagu

SEQ ID NO: 1216864 - RNA, 19 nt, Artificial Sequence
  Description of Artificial Sequence: Synthetic oligonucleotide
cgccgaacgccaggcuggc

SEQ ID NO: 1216865 - RNA, 19 nt, Artificial Sequence
  Description of Artificial Sequence: Synthetic oligonucleotide
ccuugcugugguagucuuu

SEQ ID NO: 1216866 - RNA, 19 nt, Artificial Sequence
  Description of Artificial Sequence: Synthetic oligonucleotide
cggccgcguuucuccgccg

SEQ ID NO: 1216867 - RNA, 19 nt, Artificial Sequence
  Description of Artificial Sequence: Synthetic oligonucleotide
cggcacgcucaccccacca

SEQ ID NO: 1216868 - RNA, 19 nt, Artificial Sequence
  Description of Artificial Sequence: Synthetic oligonucleotide
gcgcacagaagaggcugau

SEQ ID NO: 1216869 - RNA, 19 nt, Artificial Sequence
  Description of Artificial Sequence: Synthetic oligonucleotide
gccuugggucgugcauggu

SEQ ID NO: 1216870 - RNA, 19 nt, Artificial Sequence
  Description of Artificial Sequence: Synthetic oligonucleotide
uuaauaaggagagagaagg

SEQ ID NO: 1216871 - RNA, 19 nt, Artificial Sequence
  Description of Artificial Sequence: Synthetic oligonucleotide
aaaauggagauauauaacu

SEQ ID NO: 1216872 - RNA, 19 nt, Artificial Sequence
  Description of Artificial Sequence: Synthetic oligonucleotide
aaaagugacaucuagguaa

SEQ ID NO: 1216873 - RNA, 19 nt, Artificial Sequence
  Description of Artificial Sequence: Synthetic oligonucleotide
agauauauaacuugguggg

SEQ ID NO: 1216874 - RNA, 19 nt, Artificial Sequence
  Description of Artificial Sequence: Synthetic oligonucleotide
uauacaaccagacugaauc

SEQ ID NO: 1216875 - RNA, 19 nt, Artificial Sequence
  Description of Artificial Sequence: Synthetic oligonucleotide
aacaguuccaaacacaugu

SEQ ID NO: 1216876 - RNA, 19 nt, Artificial Sequence
  Description of Artificial Sequence: Synthetic oligonucleotide
aaugcgucuagacaagacg

SEQ ID NO: 1216877 - RNA, 19 nt, Artificial Sequence
  Description of Artificial Sequence: Synthetic oligonucleotide
uuacaaaacacuuguacag

SEQ ID NO: 1216878 - RNA, 19 nt, Artificial Sequence
  Description of Artificial Sequence: Synthetic oligonucleotide
aagaggauuccacugugcc

SEQ ID NO: 1216879 - RNA, 19 nt, Artificial Sequence
  Description of Artificial Sequence: Synthetic oligonucleotide
aauggagauauauaacuug

SEQ ID NO: 1216880 - RNA, 19 nt, Artificial Sequence
  Description of Artificial Sequence: Synthetic oligonucleotide
ugaacuaugcaccuacccg

SEQ ID NO: 1216881 - RNA, 19 nt, Artificial Sequence
  Description of Artificial Sequence: Synthetic oligonucleotide
caagcuacggcuuugacag

SEQ ID NO: 1216882 - RNA, 19 nt, Artificial Sequence
  Description of Artificial Sequence: Synthetic oligonucleotide
uuaaaagcaagcuacggcu

SEQ ID NO: 1216883 - RNA, 19 nt, Artificial Sequence
  Description of Artificial Sequence: Synthetic oligonucleotide
gauucuaccuaguagauuc

SEQ ID NO: 1216884 - RNA, 19 nt, Artificial Sequence
  Description of Artificial Sequence: Synthetic oligonucleotide
ucuaacauagaaaaguuuu

SEQ ID NO: 1216885 - RNA, 19 nt, Artificial Sequence
  Description of Artificial Sequence: Synthetic oligonucleotide
accugucagaaauaaaacc

SEQ ID NO: 1216886 - RNA, 19 nt, Artificial Sequence
  Description of Artificial Sequence: Synthetic oligonucleotide
uuuaccaaugaccuuuucc

SEQ ID NO: 1216887 - RNA, 19 nt, Artificial Sequence
  Description of Artificial Sequence: Synthetic oligonucleotide
aaugaugaacuuuggacca

SEQ ID NO: 1216888 - RNA, 19 nt, Artificial Sequence
  Description of Artificial Sequence: Synthetic oligonucleotide
agguaucacaucuagaaag

SEQ ID NO: 1216889 - RNA, 19 nt, Artificial Sequence
  Description of Artificial Sequence: Synthetic oligonucleotide
aacugcuuauuucuggagg

SEQ ID NO: 1216890 - RNA, 19 nt, Artificial Sequence
  Description of Artificial Sequence: Synthetic oligonucleotide
uguaggugcagaaugaacu

SEQ ID NO: 1216891 - RNA, 19 nt, Artificial Sequence
  Description of Artificial Sequence: Synthetic oligonucleotide
aagacgagguaucacaucu

SEQ ID NO: 1216892 - RNA, 19 nt, Artificial Sequence
  Description of Artificial Sequence: Synthetic oligonucleotide
auaaaaucagugcuauggg

SEQ ID NO: 1216893 - RNA, 19 nt, Artificial Sequence
  Description of Artificial Sequence: Synthetic oligonucleotide
accuaguagauucucuugc

SEQ ID NO: 1216894 - RNA, 19 nt, Artificial Sequence
  Description of Artificial Sequence: Synthetic oligonucleotide
auagguaacugcuuauuuc

SEQ ID NO: 1216895 - RNA, 19 nt, Artificial Sequence
  Description of Artificial Sequence: Synthetic oligonucleotide
aaggaaauguguaacacug

SEQ ID NO: 1216896 - RNA, 19 nt, Artificial Sequence
  Description of Artificial Sequence: Synthetic oligonucleotide
agugcuaugggagugguac

SEQ ID NO: 1216897 - RNA, 19 nt, Artificial Sequence
  Description of Artificial Sequence: Synthetic oligonucleotide
ugcaaaugcgucuagacaa

SEQ ID NO: 1216898 - RNA, 19 nt, Artificial Sequence
  Description of Artificial Sequence: Synthetic oligonucleotide
aaauccuugugccagccug

SEQ ID NO: 1216899 - RNA, 19 nt, Artificial Sequence
  Description of Artificial Sequence: Synthetic oligonucleotide
uuccacauagauuccauag

SEQ ID NO: 1216900 - RNA, 19 nt, Artificial Sequence
  Description of Artificial Sequence: Synthetic oligonucleotide
augaacuaugcaccuaccc

SEQ ID NO: 1216901 - RNA, 19 nt, Artificial Sequence
  Description of Artificial Sequence: Synthetic oligonucleotide
aaacacuuguacagaaacc

SEQ ID NO: 1216902 - RNA, 19 nt, Artificial Sequence
  Description of Artificial Sequence: Synthetic oligonucleotide
auagauuuggcaguuagug

SEQ ID NO: 1216903 - RNA, 19 nt, Artificial Sequence
  Description of Artificial Sequence: Synthetic oligonucleotide
aaaccugucagaaauaaaa

SEQ ID NO: 1216904 - RNA, 19 nt, Artificial Sequence
  Description of Artificial Sequence: Synthetic oligonucleotide
caauucaacaguuccaaac

SEQ ID NO: 1216905 - RNA, 19 nt, Artificial Sequence
  Description of Artificial Sequence: Synthetic oligonucleotide
aaauaaguuuccaucaccu

SEQ ID NO: 1216906 - RNA, 19 nt, Artificial Sequence
  Description of Artificial Sequence: Synthetic oligonucleotide
aggcaagaaaucuaaauga

SEQ ID NO: 1216907 - RNA, 19 nt, Artificial Sequence
  Description of Artificial Sequence: Synthetic oligonucleotide
ugaaacacagccucacucc

SEQ ID NO: 1216908 - RNA, 19 nt, Artificial Sequence
  Description of Artificial Sequence: Synthetic oligonucleotide
ucccuuaauaaggagagag

SEQ ID NO: 1216909 - RNA, 19 nt, Artificial Sequence
  Description of Artificial Sequence: Synthetic oligonucleotide
acuuaguuagacguugggc

SEQ ID NO: 1216910 - RNA, 19 nt, Artificial Sequence
  Description of Artificial Sequence: Synthetic oligonucleotide
gguaccgucaacaagaagc

SEQ ID NO: 1216911 - RNA, 19 nt, Artificial Sequence
  Description of Artificial Sequence: Synthetic oligonucleotide
guguuguugagccuggagg

SEQ ID NO: 1216912 - RNA, 19 nt, Artificial Sequence
  Description of Artificial Sequence: Synthetic oligonucleotide
uagguaacugcuuauuucu

SEQ ID NO: 1216913 - RNA, 19 nt, Artificial Sequence
  Description of Artificial Sequence: Synthetic oligonucleotide
accgucaacaagaagcucc

SEQ ID NO: 1216914 - RNA, 19 nt, Artificial Sequence
  Description of Artificial Sequence: Synthetic oligonucleotide
gaaugaacuaugcaccuac

SEQ ID NO: 1216915 - RNA, 19 nt, Artificial Sequence
  Description of Artificial Sequence: Synthetic oligonucleotide
ucugguuaugcaaaugcgu

SEQ ID NO: 1216916 - RNA, 19 nt, Artificial Sequence
  Description of Artificial Sequence: Synthetic oligonucleotide
ggaagcaucuggcagaagg

SEQ ID NO: 1216917 - RNA, 19 nt, Artificial Sequence
  Description of Artificial Sequence: Synthetic oligonucleotide
accagacugaaucgcagcc

SEQ ID NO: 1216918 - RNA, 19 nt, Artificial Sequence
  Description of Artificial Sequence: Synthetic oligonucleotide
ucccucuuuaccaaugacc

SEQ ID NO: 1216919 - RNA, 19 nt, Artificial Sequence
  Description of Artificial Sequence: Synthetic oligonucleotide
ggagcauuguccuucaggg

SEQ ID NO: 1216920 - RNA, 19 nt, Artificial Sequence
  Description of Artificial Sequence: Synthetic oligonucleotide
auuuaaaagcaagcuacgg

SEQ ID NO: 1216921 - RNA, 19 nt, Artificial Sequence
  Description of Artificial Sequence: Synthetic oligonucleotide
aauaaggagagagaaggaa

SEQ ID NO: 1216922 - RNA, 19 nt, Artificial Sequence
  Description of Artificial Sequence: Synthetic oligonucleotide
agaaaucuaaaugacaaaa

SEQ ID NO: 1216923 - RNA, 19 nt, Artificial Sequence
  Description of Artificial Sequence: Synthetic oligonucleotide
caaauaaguuuccaucacc

SEQ ID NO: 1216924 - RNA, 19 nt, Artificial Sequence
  Description of Artificial Sequence: Synthetic oligonucleotide
uaugcaaaugcgucuagac

SEQ ID NO: 1216925 - RNA, 19 nt, Artificial Sequence
  Description of Artificial Sequence: Synthetic oligonucleotide
auauauaacuuggugggag

SEQ ID NO: 1216926 - RNA, 19 nt, Artificial Sequence
  Description of Artificial Sequence: Synthetic oligonucleotide
agugguacagcacugcaca

SEQ ID NO: 1216927 - RNA, 19 nt, Artificial Sequence
  Description of Artificial Sequence: Synthetic oligonucleotide
uagaaagaggggaaugaug

SEQ ID NO: 1216928 - RNA, 19 nt, Artificial Sequence
  Description of Artificial Sequence: Synthetic oligonucleotide
aauugugcaguuuccacuu

SEQ ID NO: 1216929 - RNA, 19 nt, Artificial Sequence
  Description of Artificial Sequence: Synthetic oligonucleotide
cuggcaauucaacaguucc

SEQ ID NO: 1216930 - RNA, 19 nt, Artificial Sequence
  Description of Artificial Sequence: Synthetic oligonucleotide
augaacuuuggaccaaguc

SEQ ID NO: 1216931 - RNA, 19 nt, Artificial Sequence
  Description of Artificial Sequence: Synthetic oligonucleotide
agcaacaaagcccagcggu

SEQ ID NO: 1216932 - RNA, 19 nt, Artificial Sequence
  Description of Artificial Sequence: Synthetic oligonucleotide
auggagauauauaacuugg

SEQ ID NO: 1216933 - RNA, 19 nt, Artificial Sequence
  Description of Artificial Sequence: Synthetic oligonucleotide
ugagacaaaugucaagcaa

SEQ ID NO: 1216934 - RNA, 19 nt, Artificial Sequence
  Description of Artificial Sequence: Synthetic oligonucleotide
gcucuauacaaccagacug

SEQ ID NO: 1216935 - RNA, 19 nt, Artificial Sequence
  Description of Artificial Sequence: Synthetic oligonucleotide
cuacuuccaaauaaguuuc

SEQ ID NO: 1216936 - RNA, 19 nt, Artificial Sequence
  Description of Artificial Sequence: Synthetic oligonucleotide
auaaguuuccaucaccuua

SEQ ID NO: 1216937 - RNA, 19 nt, Artificial Sequence
  Description of Artificial Sequence: Synthetic oligonucleotide
aggaucuuuacaaugaaga

SEQ ID NO: 1216938 - RNA, 19 nt, Artificial Sequence
  Description of Artificial Sequence: Synthetic oligonucleotide
gacaagacgagguaucaca

SEQ ID NO: 1216939 - RNA, 19 nt, Artificial Sequence
  Description of Artificial Sequence: Synthetic oligonucleotide
aaugaacuaugcaccuacc

SEQ ID NO: 1216940 - RNA, 19 nt, Artificial Sequence
  Description of Artificial Sequence: Synthetic oligonucleotide
guuuccacuuaguuagacg

SEQ ID NO: 1216941 - RNA, 19 nt, Artificial Sequence
  Description of Artificial Sequence: Synthetic oligonucleotide
auguacuacuuucccuucc

SEQ ID NO: 1216942 - RNA, 19 nt, Artificial Sequence
  Description of Artificial Sequence: Synthetic oligonucleotide
gacgagguaucacaucuag

SEQ ID NO: 1216943 - RNA, 19 nt, Artificial Sequence
  Description of Artificial Sequence: Synthetic oligonucleotide
gaacuaugcaccuacccga

SEQ ID NO: 1216944 - RNA, 19 nt, Artificial Sequence
  Description of Artificial Sequence: Synthetic oligonucleotide
aaaugcgucuagacaagac

SEQ ID NO: 1216945 - RNA, 19 nt, Artificial Sequence
  Description of Artificial Sequence: Synthetic oligonucleotide
acggcuuugacagggauuc

SEQ ID NO: 1216946 - RNA, 19 nt, Artificial Sequence
  Description of Artificial Sequence: Synthetic oligonucleotide
ugaccuuuuccucagcaaa

SEQ ID NO: 1216947 - RNA, 19 nt, Artificial Sequence
  Description of Artificial Sequence: Synthetic oligonucleotide
aaagugacaucuagguaag

SEQ ID NO: 1216948 - RNA, 19 nt, Artificial Sequence
  Description of Artificial Sequence: Synthetic oligonucleotide
aaccuggcaauucaacagu

SEQ ID NO: 1216949 - RNA, 19 nt, Artificial Sequence
  Description of Artificial Sequence: Synthetic oligonucleotide
ggagauauauaacuuggug

SEQ ID NO: 1216950 - RNA, 19 nt, Artificial Sequence
  Description of Artificial Sequence: Synthetic oligonucleotide
gaaccaggacagcacacgg

SEQ ID NO: 1216951 - RNA, 19 nt, Artificial Sequence
  Description of Artificial Sequence: Synthetic oligonucleotide
ugcaccuacccgaaaauaa

SEQ ID NO: 1216952 - RNA, 19 nt, Artificial Sequence
  Description of Artificial Sequence: Synthetic oligonucleotide
uguguuguugagccuggag

SEQ ID NO: 1216953 - RNA, 19 nt, Artificial Sequence
  Description of Artificial Sequence: Synthetic oligonucleotide
ucuaccuaguagauucucu

SEQ ID NO: 1216954 - RNA, 19 nt, Artificial Sequence
  Description of Artificial Sequence: Synthetic oligonucleotide
uauauaacuuggugggagu

SEQ ID NO: 1216955 - RNA, 19 nt, Artificial Sequence
  Description of Artificial Sequence: Synthetic oligonucleotide
auaaauccuugugccagcc

SEQ ID NO: 1216956 - RNA, 19 nt, Artificial Sequence
  Description of Artificial Sequence: Synthetic oligonucleotide
uguacuacuuucccuuccu

SEQ ID NO: 1216957 - RNA, 19 nt, Artificial Sequence
  Description of Artificial Sequence: Synthetic oligonucleotide
acagaaaauggagauauau

SEQ ID NO: 1216958 - RNA, 19 nt, Artificial Sequence
  Description of Artificial Sequence: Synthetic oligonucleotide
gaagcucccuucuuuggag

SEQ ID NO: 1216959 - RNA, 19 nt, Artificial Sequence
  Description of Artificial Sequence: Synthetic oligonucleotide
cugguuaugcaaaugcguc

SEQ ID NO: 1216960 - RNA, 19 nt, Artificial Sequence
  Description of Artificial Sequence: Synthetic oligonucleotide
aauaaguuuccaucaccuu

SEQ ID NO: 1216961 - RNA, 19 nt, Artificial Sequence
  Description of Artificial Sequence: Synthetic oligonucleotide
cuuaguuagacguugggcu

SEQ ID NO: 1216962 - RNA, 19 nt, Artificial Sequence
  Description of Artificial Sequence: Synthetic oligonucleotide
aaacacauguacacaauau

SEQ ID NO: 1216963 - RNA, 19 nt, Artificial Sequence
  Description of Artificial Sequence: Synthetic oligonucleotide
uuagcaggcaagaaaucua

SEQ ID NO: 1216964 - RNA, 19 nt, Artificial Sequence
  Description of Artificial Sequence: Synthetic oligonucleotide
caagaaggaaauguguaac

SEQ ID NO: 1216965 - RNA, 19 nt, Artificial Sequence
  Description of Artificial Sequence: Synthetic oligonucleotide
ccuacccgaaaauaaaucc

SEQ ID NO: 1216966 - RNA, 19 nt, Artificial Sequence
  Description of Artificial Sequence: Synthetic oligonucleotide
uuuuccaaccauguacuac

SEQ ID NO: 1216967 - RNA, 19 nt, Artificial Sequence
  Description of Artificial Sequence: Synthetic oligonucleotide
gacugaaucgcagccaccc

SEQ ID NO: 1216968 - RNA, 19 nt, Artificial Sequence
  Description of Artificial Sequence: Synthetic oligonucleotide
uucuaacauagaaaaguuu

SEQ ID NO: 1216969 - RNA, 19 nt, Artificial Sequence
  Description of Artificial Sequence: Synthetic oligonucleotide
agggcuggcacccacugag

SEQ ID NO: 1216970 - RNA, 19 nt, Artificial Sequence
  Description of Artificial Sequence: Synthetic oligonucleotide
uggagauauauaacuuggu

SEQ ID NO: 1216971 - RNA, 19 nt, Artificial Sequence
  Description of Artificial Sequence: Synthetic oligonucleotide
aaauggagauauauaacuu

SEQ ID NO: 1216972 - RNA, 19 nt, Artificial Sequence
  Description of Artificial Sequence: Synthetic oligonucleotide
caggguaccgucaacaaga

SEQ ID NO: 1216973 - RNA, 19 nt, Artificial Sequence
  Description of Artificial Sequence: Synthetic oligonucleotide
uggcaauucaacaguucca

SEQ ID NO: 1216974 - RNA, 19 nt, Artificial Sequence
  Description of Artificial Sequence: Synthetic oligonucleotide
agcgguacagaaaauggag

SEQ ID NO: 1216975 - RNA, 19 nt, Artificial Sequence
  Description of Artificial Sequence: Synthetic oligonucleotide
agaaaccuggcaauucaac

SEQ ID NO: 1216976 - RNA, 19 nt, Artificial Sequence
  Description of Artificial Sequence: Synthetic oligonucleotide
acaagaggauuccacugug

SEQ ID NO: 1216977 - RNA, 19 nt, Artificial Sequence
  Description of Artificial Sequence: Synthetic oligonucleotide
ugcgucuagacaagacgag

SEQ ID NO: 1216978 - RNA, 19 nt, Artificial Sequence
  Description of Artificial Sequence: Synthetic oligonucleotide
uaccuaguagauucucuug

SEQ ID NO: 1216979 - RNA, 19 nt, Artificial Sequence
  Description of Artificial Sequence: Synthetic oligonucleotide
uagccuugugcucuagagc

SEQ ID NO: 1216980 - RNA, 19 nt, Artificial Sequence
  Description of Artificial Sequence: Synthetic oligonucleotide
ugguuaugcaaaugcgucu

SEQ ID NO: 1216981 - RNA, 19 nt, Artificial Sequence
  Description of Artificial Sequence: Synthetic oligonucleotide
caccuuaaugcacaggauc

SEQ ID NO: 1216982 - RNA, 19 nt, Artificial Sequence
  Description of Artificial Sequence: Synthetic oligonucleotide
uugacagggauucuaccua

SEQ ID NO: 1216983 - RNA, 19 nt, Artificial Sequence
  Description of Artificial Sequence: Synthetic oligonucleotide
uacaaccagacugaaucgc

SEQ ID NO: 1216984 - RNA, 19 nt, Artificial Sequence
  Description of Artificial Sequence: Synthetic oligonucleotide
cuuuugucagcucaagaga

SEQ ID NO: 1216985 - RNA, 19 nt, Artificial Sequence
  Description of Artificial Sequence: Synthetic oligonucleotide
cuuugacagggauucuacc

SEQ ID NO: 1216986 - RNA, 19 nt, Artificial Sequence
  Description of Artificial Sequence: Synthetic oligonucleotide
gccacuuuuagccuugugc

SEQ ID NO: 1216987 - RNA, 19 nt, Artificial Sequence
  Description of Artificial Sequence: Synthetic oligonucleotide
uagauucucuugcugacuu

SEQ ID NO: 1216988 - RNA, 19 nt, Artificial Sequence
  Description of Artificial Sequence: Synthetic oligonucleotide
uacccgaaaauaaauccuu

SEQ ID NO: 1216989 - RNA, 19 nt, Artificial Sequence
  Description of Artificial Sequence: Synthetic oligonucleotide
uagauuccauagauuuggc

SEQ ID NO: 1216990 - RNA, 19 nt, Artificial Sequence
  Description of Artificial Sequence: Synthetic oligonucleotide
caggaucuuuacaaugaag

SEQ ID NO: 1216991 - RNA, 19 nt, Artificial Sequence
  Description of Artificial Sequence: Synthetic oligonucleotide
uuagacguugggcuguuuu

SEQ ID NO: 1216992 - RNA, 19 nt, Artificial Sequence
  Description of Artificial Sequence: Synthetic oligonucleotide
cucuagagcauaaaagaaa

SEQ ID NO: 1216993 - RNA, 19 nt, Artificial Sequence
  Description of Artificial Sequence: Synthetic oligonucleotide
uacuuccaaauaaguuucc

SEQ ID NO: 1216994 - RNA, 19 nt, Artificial Sequence
  Description of Artificial Sequence: Synthetic oligonucleotide
uccaaugagaauucuccuu

SEQ ID NO: 1216995 - RNA, 19 nt, Artificial Sequence
  Description of Artificial Sequence: Synthetic oligonucleotide
aaagcccagcgguacagaa

SEQ ID NO: 1216996 - RNA, 19 nt, Artificial Sequence
  Description of Artificial Sequence: Synthetic oligonucleotide
agcucuauacaaccagacu

SEQ ID NO: 1216997 - RNA, 19 nt, Artificial Sequence
  Description of Artificial Sequence: Synthetic oligonucleotide
caagacauugccaacagau

SEQ ID NO: 1216998 - RNA, 19 nt, Artificial Sequence
  Description of Artificial Sequence: Synthetic oligonucleotide
uaugcaccuacccgaaaau

SEQ ID NO: 1216999 - RNA, 19 nt, Artificial Sequence
  Description of Artificial Sequence: Synthetic oligonucleotide
uuccaucaccuuaaugcac

SEQ ID NO: 1217000 - RNA, 19 nt, Artificial Sequence
  Description of Artificial Sequence: Synthetic oligonucleotide
aaacacagccucacuccac

SEQ ID NO: 1217001 - RNA, 19 nt, Artificial Sequence
  Description of Artificial Sequence: Synthetic oligonucleotide
ugaugaacuuuggaccaag

SEQ ID NO: 1217002 - RNA, 19 nt, Artificial Sequence
  Description of Artificial Sequence: Synthetic oligonucleotide
uuuagccuugugcucuaga

SEQ ID NO: 1217003 - RNA, 19 nt, Artificial Sequence
  Description of Artificial Sequence: Synthetic oligonucleotide
ugugcaguuuccacuuagu

SEQ ID NO: 1217004 - RNA, 19 nt, Artificial Sequence
  Description of Artificial Sequence: Synthetic oligonucleotide
agaagcucccuucuuugga

SEQ ID NO: 1217005 - RNA, 19 nt, Artificial Sequence
  Description of Artificial Sequence: Synthetic oligonucleotide
cacuuaguuagacguuggg

SEQ ID NO: 1217006 - RNA, 19 nt, Artificial Sequence
  Description of Artificial Sequence: Synthetic oligonucleotide
uaugggagugguacagcac

SEQ ID NO: 1217007 - RNA, 19 nt, Artificial Sequence
  Description of Artificial Sequence: Synthetic oligonucleotide
guaacacugaauagguaac

SEQ ID NO: 1217008 - RNA, 19 nt, Artificial Sequence
  Description of Artificial Sequence: Synthetic oligonucleotide
agugacaucuagguaagaa

SEQ ID NO: 1217009 - RNA, 19 nt, Artificial Sequence
  Description of Artificial Sequence: Synthetic oligonucleotide
accuacccgaaaauaaauc

SEQ ID NO: 1217010 - RNA, 19 nt, Artificial Sequence
  Description of Artificial Sequence: Synthetic oligonucleotide
agcccagcgguacagaaaa

SEQ ID NO: 1217011 - RNA, 19 nt, Artificial Sequence
  Description of Artificial Sequence: Synthetic oligonucleotide
auguaggugcagaaugaac

SEQ ID NO: 1217012 - RNA, 19 nt, Artificial Sequence
  Description of Artificial Sequence: Synthetic oligonucleotide
gaagacagaauugugcagu

SEQ ID NO: 1217013 - RNA, 19 nt, Artificial Sequence
  Description of Artificial Sequence: Synthetic oligonucleotide
cuugugccagccugcaccc

SEQ ID NO: 1217014 - RNA, 19 nt, Artificial Sequence
  Description of Artificial Sequence: Synthetic oligonucleotide
cauguggagugugaaacac

SEQ ID NO: 1217015 - RNA, 19 nt, Artificial Sequence
  Description of Artificial Sequence: Synthetic oligonucleotide
cacaucuagaaagagggga

SEQ ID NO: 1217016 - RNA, 19 nt, Artificial Sequence
  Description of Artificial Sequence: Synthetic oligonucleotide
agaaccagcuugggugucc

SEQ ID NO: 1217017 - RNA, 19 nt, Artificial Sequence
  Description of Artificial Sequence: Synthetic oligonucleotide
uagacaagacgagguauca

SEQ ID NO: 1217018 - RNA, 19 nt, Artificial Sequence
  Description of Artificial Sequence: Synthetic oligonucleotide
gauauauaacuugguggga

SEQ ID NO: 1217019 - RNA, 19 nt, Artificial Sequence
  Description of Artificial Sequence: Synthetic oligonucleotide
uauguaggugcagaaugaa

SEQ ID NO: 1217020 - RNA, 19 nt, Artificial Sequence
  Description of Artificial Sequence: Synthetic oligonucleotide
agacaagacgagguaucac

SEQ ID NO: 1217021 - RNA, 19 nt, Artificial Sequence
  Description of Artificial Sequence: Synthetic oligonucleotide
aauucuccuucagagccau

SEQ ID NO: 1217022 - RNA, 19 nt, Artificial Sequence
  Description of Artificial Sequence: Synthetic oligonucleotide
agcucccuucuuuggaguc

SEQ ID NO: 1217023 - RNA, 19 nt, Artificial Sequence
  Description of Artificial Sequence: Synthetic oligonucleotide
uagacguugggcuguuuuc

SEQ ID NO: 1217024 - RNA, 19 nt, Artificial Sequence
  Description of Artificial Sequence: Synthetic oligonucleotide
uggcuaggacuccaugucu

SEQ ID NO: 1217025 - RNA, 19 nt, Artificial Sequence
  Description of Artificial Sequence: Synthetic oligonucleotide
ccgaaaauaaauccuugug

SEQ ID NO: 1217026 - RNA, 19 nt, Artificial Sequence
  Description of Artificial Sequence: Synthetic oligonucleotide
augcgucuagacaagacga

SEQ ID NO: 1217027 - RNA, 19 nt, Artificial Sequence
  Description of Artificial Sequence: Synthetic oligonucleotide
gaacuuuggaccaagucau

SEQ ID NO: 1217028 - RNA, 19 nt, Artificial Sequence
  Description of Artificial Sequence: Synthetic oligonucleotide
aucagugcuaugggagugg

SEQ ID NO: 1217029 - RNA, 19 nt, Artificial Sequence
  Description of Artificial Sequence: Synthetic oligonucleotide
ugggagugguacagcacug

SEQ ID NO: 1217030 - RNA, 19 nt, Artificial Sequence
  Description of Artificial Sequence: Synthetic oligonucleotide
gugaugggagaagacuggg

SEQ ID NO: 1217031 - RNA, 19 nt, Artificial Sequence
  Description of Artificial Sequence: Synthetic oligonucleotide
ucaccuuaaugcacaggau

SEQ ID NO: 1217032 - RNA, 19 nt, Artificial Sequence
  Description of Artificial Sequence: Synthetic oligonucleotide
cugaauagguaacugcuua

SEQ ID NO: 1217033 - RNA, 19 nt, Artificial Sequence
  Description of Artificial Sequence: Synthetic oligonucleotide
gguuccaaagaucucagcu

SEQ ID NO: 1217034 - RNA, 19 nt, Artificial Sequence
  Description of Artificial Sequence: Synthetic oligonucleotide
ccuugugccagccugcacc

SEQ ID NO: 1217035 - RNA, 19 nt, Artificial Sequence
  Description of Artificial Sequence: Synthetic oligonucleotide
ccauagauuuggcaguuag

SEQ ID NO: 1217036 - RNA, 19 nt, Artificial Sequence
  Description of Artificial Sequence: Synthetic oligonucleotide
agcaagaaggaaaugugua

SEQ ID NO: 1217037 - RNA, 19 nt, Artificial Sequence
  Description of Artificial Sequence: Synthetic oligonucleotide
agugaagggaagccccaga

SEQ ID NO: 1217038 - RNA, 19 nt, Artificial Sequence
  Description of Artificial Sequence: Synthetic oligonucleotide
cauguacuacuuucccuuc

SEQ ID NO: 1217039 - RNA, 19 nt, Artificial Sequence
  Description of Artificial Sequence: Synthetic oligonucleotide
acaucuagaaagaggggaa

SEQ ID NO: 1217040 - RNA, 19 nt, Artificial Sequence
  Description of Artificial Sequence: Synthetic oligonucleotide
gcuuuaucuggccauaaaa

SEQ ID NO: 1217041 - RNA, 19 nt, Artificial Sequence
  Description of Artificial Sequence: Synthetic oligonucleotide
ggaaccaggacagcacacg

SEQ ID NO: 1217042 - RNA, 19 nt, Artificial Sequence
  Description of Artificial Sequence: Synthetic oligonucleotide
cuaugcaccuacccgaaaa

SEQ ID NO: 1217043 - RNA, 19 nt, Artificial Sequence
  Description of Artificial Sequence: Synthetic oligonucleotide
agacuacuuccaaauaagu

SEQ ID NO: 1217044 - RNA, 19 nt, Artificial Sequence
  Description of Artificial Sequence: Synthetic oligonucleotide
cacuuuuagccuugugcuc

SEQ ID NO: 1217045 - RNA, 19 nt, Artificial Sequence
  Description of Artificial Sequence: Synthetic oligonucleotide
gacuggguuccuccaauga

SEQ ID NO: 1217046 - RNA, 19 nt, Artificial Sequence
  Description of Artificial Sequence: Synthetic oligonucleotide
augaccuuuuccucagcaa

SEQ ID NO: 1217047 - RNA, 19 nt, Artificial Sequence
  Description of Artificial Sequence: Synthetic oligonucleotide
aagcuacggcuuugacagg

SEQ ID NO: 1217048 - RNA, 19 nt, Artificial Sequence
  Description of Artificial Sequence: Synthetic oligonucleotide
caagacgagguaucacauc

SEQ ID NO: 1217049 - RNA, 19 nt, Artificial Sequence
  Description of Artificial Sequence: Synthetic oligonucleotide
aaaaccccucaucucccuu

SEQ ID NO: 1217050 - RNA, 19 nt, Artificial Sequence
  Description of Artificial Sequence: Synthetic oligonucleotide
cacuccacaggguaccguc

SEQ ID NO: 1217051 - RNA, 19 nt, Artificial Sequence
  Description of Artificial Sequence: Synthetic oligonucleotide
ucagcucaagagacuacuu

SEQ ID NO: 1217052 - RNA, 19 nt, Artificial Sequence
  Description of Artificial Sequence: Synthetic oligonucleotide
uaguuagacguugggcugu

SEQ ID NO: 1217053 - RNA, 19 nt, Artificial Sequence
  Description of Artificial Sequence: Synthetic oligonucleotide
cuacccgaaaauaaauccu

SEQ ID NO: 1217054 - RNA, 19 nt, Artificial Sequence
  Description of Artificial Sequence: Synthetic oligonucleotide
ggugcagaaugaacuaugc

SEQ ID NO: 1217055 - RNA, 19 nt, Artificial Sequence
  Description of Artificial Sequence: Synthetic oligonucleotide
guaggugcagaaugaacua

SEQ ID NO: 1217056 - RNA, 19 nt, Artificial Sequence
  Description of Artificial Sequence: Synthetic oligonucleotide
cuccaggcaggugucaagc

SEQ ID NO: 1217057 - RNA, 19 nt, Artificial Sequence
  Description of Artificial Sequence: Synthetic oligonucleotide
uacggcuuugacagggauu

SEQ ID NO: 1217058 - RNA, 19 nt, Artificial Sequence
  Description of Artificial Sequence: Synthetic oligonucleotide
cuuagcaggcaagaaaucu

SEQ ID NO: 1217059 - RNA, 19 nt, Artificial Sequence
  Description of Artificial Sequence: Synthetic oligonucleotide
aaguuuccaucaccuuaau

SEQ ID NO: 1217060 - RNA, 19 nt, Artificial Sequence
  Description of Artificial Sequence: Synthetic oligonucleotide
uucuaccuaguagauucuc

SEQ ID NO: 1217061 - RNA, 19 nt, Artificial Sequence
  Description of Artificial Sequence: Synthetic oligonucleotide
gugcccuuuugucagcuca

SEQ ID NO: 1217062 - RNA, 19 nt, Artificial Sequence
  Description of Artificial Sequence: Synthetic oligonucleotide
agcuuuaucuggccauaaa

SEQ ID NO: 1217063 - RNA, 19 nt, Artificial Sequence
  Description of Artificial Sequence: Synthetic oligonucleotide
caagcauaucaauuucuua

SEQ ID NO: 1217064 - RNA, 19 nt, Artificial Sequence
  Description of Artificial Sequence: Synthetic oligonucleotide
gugcagaaugaacuaugca

SEQ ID NO: 1217065 - RNA, 19 nt, Artificial Sequence
  Description of Artificial Sequence: Synthetic oligonucleotide
aacuaugcaccuacccgaa

SEQ ID NO: 1217066 - RNA, 19 nt, Artificial Sequence
  Description of Artificial Sequence: Synthetic oligonucleotide
cuaggacuccaugucugag

SEQ ID NO: 1217067 - RNA, 19 nt, Artificial Sequence
  Description of Artificial Sequence: Synthetic oligonucleotide
acugaaucgcagccacccu

SEQ ID NO: 1217068 - RNA, 19 nt, Artificial Sequence
  Description of Artificial Sequence: Synthetic oligonucleotide
agacugaaucgcagccacc

SEQ ID NO: 1217069 - RNA, 19 nt, Artificial Sequence
  Description of Artificial Sequence: Synthetic oligonucleotide
ugcccuuuugucagcucaa

SEQ ID NO: 1217070 - RNA, 19 nt, Artificial Sequence
  Description of Artificial Sequence: Synthetic oligonucleotide
acccgaaaauaaauccuug

SEQ ID NO: 1217071 - RNA, 19 nt, Artificial Sequence
  Description of Artificial Sequence: Synthetic oligonucleotide
cagcgguacagaaaaugga

SEQ ID NO: 1217072 - RNA, 19 nt, Artificial Sequence
  Description of Artificial Sequence: Synthetic oligonucleotide
uuuuagccuugugcucuag

SEQ ID NO: 1217073 - RNA, 19 nt, Artificial Sequence
  Description of Artificial Sequence: Synthetic oligonucleotide
ccuuaauaaggagagagaa

SEQ ID NO: 1217074 - RNA, 19 nt, Artificial Sequence
  Description of Artificial Sequence: Synthetic oligonucleotide
cucccucuuuaccaaugac

SEQ ID NO: 1217075 - RNA, 19 nt, Artificial Sequence
  Description of Artificial Sequence: Synthetic oligonucleotide
ucagugcuaugggaguggu

SEQ ID NO: 1217076 - RNA, 19 nt, Artificial Sequence
  Description of Artificial Sequence: Synthetic oligonucleotide
uuccauagauuuggcaguu

SEQ ID NO: 1217077 - RNA, 19 nt, Artificial Sequence
  Description of Artificial Sequence: Synthetic oligonucleotide
gcgucuagacaagacgagg

SEQ ID NO: 1217078 - RNA, 19 nt, Artificial Sequence
  Description of Artificial Sequence: Synthetic oligonucleotide
aggaaauguguaacacuga

SEQ ID NO: 1217079 - RNA, 19 nt, Artificial Sequence
  Description of Artificial Sequence: Synthetic oligonucleotide
agguaacugcuuauuucug

SEQ ID NO: 1217080 - RNA, 19 nt, Artificial Sequence
  Description of Artificial Sequence: Synthetic oligonucleotide
gcugacuucuugaauucug

SEQ ID NO: 1217081 - RNA, 19 nt, Artificial Sequence
  Description of Artificial Sequence: Synthetic oligonucleotide
ccacuuaguuagacguugg

SEQ ID NO: 1217082 - RNA, 19 nt, Artificial Sequence
  Description of Artificial Sequence: Synthetic oligonucleotide
aggagaguauguaggugca

SEQ ID NO: 1217083 - RNA, 19 nt, Artificial Sequence
  Description of Artificial Sequence: Synthetic oligonucleotide
cagaaugaacuaugcaccu

SEQ ID NO: 1217084 - RNA, 19 nt, Artificial Sequence
  Description of Artificial Sequence: Synthetic oligonucleotide
cauagauuuggcaguuagu

SEQ ID NO: 1217085 - RNA, 19 nt, Artificial Sequence
  Description of Artificial Sequence: Synthetic oligonucleotide
agaaugaacuaugcaccua

SEQ ID NO: 1217086 - RNA, 19 nt, Artificial Sequence
  Description of Artificial Sequence: Synthetic oligonucleotide
ccgucaacaagaagcuccc

SEQ ID NO: 1217087 - RNA, 19 nt, Artificial Sequence
  Description of Artificial Sequence: Synthetic oligonucleotide
gcaaaugcgucuagacaag

SEQ ID NO: 1217088 - RNA, 19 nt, Artificial Sequence
  Description of Artificial Sequence: Synthetic oligonucleotide
cucacuccacaggguaccg

SEQ ID NO: 1217089 - RNA, 19 nt, Artificial Sequence
  Description of Artificial Sequence: Synthetic oligonucleotide
ggaggagaguauguaggug

SEQ ID NO: 1217090 - RNA, 19 nt, Artificial Sequence
  Description of Artificial Sequence: Synthetic oligonucleotide
gauuuggcaguuaguggcu

SEQ ID NO: 1217091 - RNA, 19 nt, Artificial Sequence
  Description of Artificial Sequence: Synthetic oligonucleotide
gcuuugacagggauucuac

SEQ ID NO: 1217092 - RNA, 19 nt, Artificial Sequence
  Description of Artificial Sequence: Synthetic oligonucleotide
aagugacaucuagguaaga

SEQ ID NO: 1217093 - RNA, 19 nt, Artificial Sequence
  Description of Artificial Sequence: Synthetic oligonucleotide
guaccgucaacaagaagcu

SEQ ID NO: 1217094 - RNA, 19 nt, Artificial Sequence
  Description of Artificial Sequence: Synthetic oligonucleotide
ccaagucauagcuuuaucu

SEQ ID NO: 1217095 - RNA, 19 nt, Artificial Sequence
  Description of Artificial Sequence: Synthetic oligonucleotide
acuaugcaccuacccgaaa

SEQ ID NO: 1217096 - RNA, 19 nt, Artificial Sequence
  Description of Artificial Sequence: Synthetic oligonucleotide
cuaccuaguagauucucuu

SEQ ID NO: 1217097 - RNA, 19 nt, Artificial Sequence
  Description of Artificial Sequence: Synthetic oligonucleotide
cuguggcuaggacuccaug

SEQ ID NO: 1217098 - RNA, 19 nt, Artificial Sequence
  Description of Artificial Sequence: Synthetic oligonucleotide
cuugugcucuagagcauaa

SEQ ID NO: 1217099 - RNA, 19 nt, Artificial Sequence
  Description of Artificial Sequence: Synthetic oligonucleotide
cagaaauaaaaccccucau

SEQ ID NO: 1217100 - RNA, 19 nt, Artificial Sequence
  Description of Artificial Sequence: Synthetic oligonucleotide
acguugggcuguuuuccaa

SEQ ID NO: 1217101 - RNA, 19 nt, Artificial Sequence
  Description of Artificial Sequence: Synthetic oligonucleotide
gcucuagagcauaaaagaa

SEQ ID NO: 1217102 - RNA, 19 nt, Artificial Sequence
  Description of Artificial Sequence: Synthetic oligonucleotide
ggcuaggacuccaugucug

SEQ ID NO: 1217103 - RNA, 19 nt, Artificial Sequence
  Description of Artificial Sequence: Synthetic oligonucleotide
gucaagcaagcauaucaau

SEQ ID NO: 1217104 - RNA, 19 nt, Artificial Sequence
  Description of Artificial Sequence: Synthetic oligonucleotide
gucagcucaagagacuacu

SEQ ID NO: 1217105 - RNA, 19 nt, Artificial Sequence
  Description of Artificial Sequence: Synthetic oligonucleotide
guuuuccaaccauguacua

SEQ ID NO: 1217106 - RNA, 19 nt, Artificial Sequence
  Description of Artificial Sequence: Synthetic oligonucleotide
agcaccauguggaguguga

SEQ ID NO: 1217107 - RNA, 19 nt, Artificial Sequence
  Description of Artificial Sequence: Synthetic oligonucleotide
gguuaugcaaaugcgucua

SEQ ID NO: 1217108 - RNA, 19 nt, Artificial Sequence
  Description of Artificial Sequence: Synthetic oligonucleotide
gcaggcaagaaaucuaaau

SEQ ID NO: 1217109 - RNA, 19 nt, Artificial Sequence
  Description of Artificial Sequence: Synthetic oligonucleotide
cccucuuuaccaaugaccu

SEQ ID NO: 1217110 - RNA, 19 nt, Artificial Sequence
  Description of Artificial Sequence: Synthetic oligonucleotide
aagcccagcgguacagaaa

SEQ ID NO: 1217111 - RNA, 19 nt, Artificial Sequence
  Description of Artificial Sequence: Synthetic oligonucleotide
uugugcucuagagcauaaa

SEQ ID NO: 1217112 - RNA, 19 nt, Artificial Sequence
  Description of Artificial Sequence: Synthetic oligonucleotide
cuccaaugagaauucuccu

SEQ ID NO: 1217113 - RNA, 19 nt, Artificial Sequence
  Description of Artificial Sequence: Synthetic oligonucleotide
gggcuuagcaggcaagaaa

SEQ ID NO: 1217114 - RNA, 19 nt, Artificial Sequence
  Description of Artificial Sequence: Synthetic oligonucleotide
ggcuacagaaggaagucaa

SEQ ID NO: 1217115 - RNA, 19 nt, Artificial Sequence
  Description of Artificial Sequence: Synthetic oligonucleotide
caaaugcgucuagacaaga

SEQ ID NO: 1217116 - RNA, 19 nt, Artificial Sequence
  Description of Artificial Sequence: Synthetic oligonucleotide
ugugcccuuuugucagcuc

SEQ ID NO: 1217117 - RNA, 19 nt, Artificial Sequence
  Description of Artificial Sequence: Synthetic oligonucleotide
cacaggguaccgucaacaa

SEQ ID NO: 1217118 - RNA, 19 nt, Artificial Sequence
  Description of Artificial Sequence: Synthetic oligonucleotide
acgagguaucacaucuaga

SEQ ID NO: 1217119 - RNA, 19 nt, Artificial Sequence
  Description of Artificial Sequence: Synthetic oligonucleotide
ccauaaaaucagugcuaug

SEQ ID NO: 1217120 - RNA, 19 nt, Artificial Sequence
  Description of Artificial Sequence: Synthetic oligonucleotide
aucccuuaauaaggagaga

SEQ ID NO: 1217121 - RNA, 19 nt, Artificial Sequence
  Description of Artificial Sequence: Synthetic oligonucleotide
gaaucgcagccacccucca

SEQ ID NO: 1217122 - RNA, 19 nt, Artificial Sequence
  Description of Artificial Sequence: Synthetic oligonucleotide
uaccgucaacaagaagcuc

SEQ ID NO: 1217123 - RNA, 19 nt, Artificial Sequence
  Description of Artificial Sequence: Synthetic oligonucleotide
cccuuaauaaggagagaga

SEQ ID NO: 1217124 - RNA, 19 nt, Artificial Sequence
  Description of Artificial Sequence: Synthetic oligonucleotide
ggcaguuaguggcuacaga

SEQ ID NO: 1217125 - RNA, 19 nt, Artificial Sequence
  Description of Artificial Sequence: Synthetic oligonucleotide
cacauagauuccauagauu

SEQ ID NO: 1217126 - RNA, 19 nt, Artificial Sequence
  Description of Artificial Sequence: Synthetic oligonucleotide
gaccaagucauagcuuuau

SEQ ID NO: 1217127 - RNA, 19 nt, Artificial Sequence
  Description of Artificial Sequence: Synthetic oligonucleotide
gcuaggacuccaugucuga

SEQ ID NO: 1217128 - RNA, 19 nt, Artificial Sequence
  Description of Artificial Sequence: Synthetic oligonucleotide
guagauucucuugcugacu

SEQ ID NO: 1217129 - RNA, 19 nt, Artificial Sequence
  Description of Artificial Sequence: Synthetic oligonucleotide
cuagaaagaggggaaugau

SEQ ID NO: 1217130 - RNA, 19 nt, Artificial Sequence
  Description of Artificial Sequence: Synthetic oligonucleotide
gcgguacagaaaauggaga

SEQ ID NO: 1217131 - RNA, 19 nt, Artificial Sequence
  Description of Artificial Sequence: Synthetic oligonucleotide
ccaucaccuuaaugcacag

SEQ ID NO: 1217132 - RNA, 19 nt, Artificial Sequence
  Description of Artificial Sequence: Synthetic oligonucleotide
ucccuucuuuggagucaca

SEQ ID NO: 1217133 - RNA, 19 nt, Artificial Sequence
  Description of Artificial Sequence: Synthetic oligonucleotide
cacccacugagcaccaugu

SEQ ID NO: 1217134 - RNA, 19 nt, Artificial Sequence
  Description of Artificial Sequence: Synthetic oligonucleotide
ggguaccgucaacaagaag

SEQ ID NO: 1217135 - RNA, 19 nt, Artificial Sequence
  Description of Artificial Sequence: Synthetic oligonucleotide
gcuaugggagugguacagc

SEQ ID NO: 1217136 - RNA, 19 nt, Artificial Sequence
  Description of Artificial Sequence: Synthetic oligonucleotide
cuuuuagccuugugcucua

SEQ ID NO: 1217137 - RNA, 19 nt, Artificial Sequence
  Description of Artificial Sequence: Synthetic oligonucleotide
gugcaguuuccacuuaguu

SEQ ID NO: 1217138 - RNA, 19 nt, Artificial Sequence
  Description of Artificial Sequence: Synthetic oligonucleotide
gcaauucaacaguuccaaa

SEQ ID NO: 1217139 - RNA, 19 nt, Artificial Sequence
  Description of Artificial Sequence: Synthetic oligonucleotide
agcaggcaagaaaucuaaa

SEQ ID NO: 1217140 - RNA, 19 nt, Artificial Sequence
  Description of Artificial Sequence: Synthetic oligonucleotide
ccuagcuguggcuaggacu

SEQ ID NO: 1217141 - RNA, 19 nt, Artificial Sequence
  Description of Artificial Sequence: Synthetic oligonucleotide
ggccauaaaaucagugcua

SEQ ID NO: 1217142 - RNA, 19 nt, Artificial Sequence
  Description of Artificial Sequence: Synthetic oligonucleotide
caguuuccacuuaguuaga

SEQ ID NO: 1217143 - RNA, 19 nt, Artificial Sequence
  Description of Artificial Sequence: Synthetic oligonucleotide
cuccacaggguaccgucaa

SEQ ID NO: 1217144 - RNA, 19 nt, Artificial Sequence
  Description of Artificial Sequence: Synthetic oligonucleotide
ggucagcucuauacaacca

SEQ ID NO: 1217145 - RNA, 19 nt, Artificial Sequence
  Description of Artificial Sequence: Synthetic oligonucleotide
ccauguacuacuuucccuu

SEQ ID NO: 1217146 - RNA, 19 nt, Artificial Sequence
  Description of Artificial Sequence: Synthetic oligonucleotide
aggguaccgucaacaagaa

SEQ ID NO: 1217147 - RNA, 19 nt, Artificial Sequence
  Description of Artificial Sequence: Synthetic oligonucleotide
cccgaaaauaaauccuugu

SEQ ID NO: 1217148 - RNA, 19 nt, Artificial Sequence
  Description of Artificial Sequence: Synthetic oligonucleotide
gcuuagcaggcaagaaauc

SEQ ID NO: 1217149 - RNA, 19 nt, Artificial Sequence
  Description of Artificial Sequence: Synthetic oligonucleotide
agacgagguaucacaucua

SEQ ID NO: 1217150 - RNA, 19 nt, Artificial Sequence
  Description of Artificial Sequence: Synthetic oligonucleotide
caucuagaaagaggggaau

SEQ ID NO: 1217151 - RNA, 19 nt, Artificial Sequence
  Description of Artificial Sequence: Synthetic oligonucleotide
aggaagcaucuggcagaag

SEQ ID NO: 1217152 - RNA, 19 nt, Artificial Sequence
  Description of Artificial Sequence: Synthetic oligonucleotide
gcccuuuugucagcucaag

SEQ ID NO: 1217153 - RNA, 19 nt, Artificial Sequence
  Description of Artificial Sequence: Synthetic oligonucleotide
gacagggauucuaccuagu

SEQ ID NO: 1217154 - RNA, 19 nt, Artificial Sequence
  Description of Artificial Sequence: Synthetic oligonucleotide
gcaacaaagcccagcggua

SEQ ID NO: 1217155 - RNA, 19 nt, Artificial Sequence
  Description of Artificial Sequence: Synthetic oligonucleotide
cagaaccagcuuggguguc

SEQ ID NO: 1217156 - RNA, 19 nt, Artificial Sequence
  Description of Artificial Sequence: Synthetic oligonucleotide
gcaagcauaucaauuucuu

SEQ ID NO: 1217157 - RNA, 19 nt, Artificial Sequence
  Description of Artificial Sequence: Synthetic oligonucleotide
uugugccagccugcacccu

SEQ ID NO: 1217158 - RNA, 19 nt, Artificial Sequence
  Description of Artificial Sequence: Synthetic oligonucleotide
cgucuagacaagacgaggu

SEQ ID NO: 1217159 - RNA, 19 nt, Artificial Sequence
  Description of Artificial Sequence: Synthetic oligonucleotide
cuacggcuuugacagggau

SEQ ID NO: 1217160 - RNA, 19 nt, Artificial Sequence
  Description of Artificial Sequence: Synthetic oligonucleotide
uaccaccugcuguguuguu

SEQ ID NO: 1217161 - RNA, 19 nt, Artificial Sequence
  Description of Artificial Sequence: Synthetic oligonucleotide
gucaagcuacugggagaga

SEQ ID NO: 1217162 - RNA, 19 nt, Artificial Sequence
  Description of Artificial Sequence: Synthetic oligonucleotide
ccacagacagugaguucca

SEQ ID NO: 1217163 - RNA, 19 nt, Artificial Sequence
  Description of Artificial Sequence: Synthetic oligonucleotide
gaagccccagaggcauuua

SEQ ID NO: 1217164 - RNA, 19 nt, Artificial Sequence
  Description of Artificial Sequence: Synthetic oligonucleotide
gcaccauguggagugugaa

SEQ ID NO: 1217165 - RNA, 19 nt, Artificial Sequence
  Description of Artificial Sequence: Synthetic oligonucleotide
gggauucuaccuaguagau

SEQ ID NO: 1217166 - RNA, 19 nt, Artificial Sequence
  Description of Artificial Sequence: Synthetic oligonucleotide
cagugcuaugggaguggua

SEQ ID NO: 1217167 - RNA, 19 nt, Artificial Sequence
  Description of Artificial Sequence: Synthetic oligonucleotide
ggauucuaccuaguagauu

SEQ ID NO: 1217168 - RNA, 19 nt, Artificial Sequence
  Description of Artificial Sequence: Synthetic oligonucleotide
gcuacggcuuugacaggga

SEQ ID NO: 1217169 - RNA, 19 nt, Artificial Sequence
  Description of Artificial Sequence: Synthetic oligonucleotide
gggcuggcacccacugagc

SEQ ID NO: 1217170 - RNA, 19 nt, Artificial Sequence
  Description of Artificial Sequence: Synthetic oligonucleotide
ggaccaagucauagcuuua

SEQ ID NO: 1217171 - RNA, 19 nt, Artificial Sequence
  Description of Artificial Sequence: Synthetic oligonucleotide
ccuugugcucuagagcaua

SEQ ID NO: 1217172 - RNA, 19 nt, Artificial Sequence
  Description of Artificial Sequence: Synthetic oligonucleotide
gccacccuccaggcaggug

SEQ ID NO: 1217173 - RNA, 19 nt, Artificial Sequence
  Description of Artificial Sequence: Synthetic oligonucleotide
guuagacguugggcuguuu

SEQ ID NO: 1217174 - RNA, 19 nt, Artificial Sequence
  Description of Artificial Sequence: Synthetic oligonucleotide
gcccagcgguacagaaaau

SEQ ID NO: 1217175 - RNA, 19 nt, Artificial Sequence
  Description of Artificial Sequence: Synthetic oligonucleotide
aauauucauacuuugcgcc

SEQ ID NO: 1217176 - RNA, 19 nt, Artificial Sequence
  Description of Artificial Sequence: Synthetic oligonucleotide
aauguaacauacuuaaugg

SEQ ID NO: 1217177 - RNA, 19 nt, Artificial Sequence
  Description of Artificial Sequence: Synthetic oligonucleotide
aaacaaacccuuuuguucc

SEQ ID NO: 1217178 - RNA, 19 nt, Artificial Sequence
  Description of Artificial Sequence: Synthetic oligonucleotide
aaauauucauacuuugcgc

SEQ ID NO: 1217179 - RNA, 19 nt, Artificial Sequence
  Description of Artificial Sequence: Synthetic oligonucleotide
acauuuaagauucaaaauc

SEQ ID NO: 1217180 - RNA, 19 nt, Artificial Sequence
  Description of Artificial Sequence: Synthetic oligonucleotide
acugcuaacagccagcacc

SEQ ID NO: 1217181 - RNA, 19 nt, Artificial Sequence
  Description of Artificial Sequence: Synthetic oligonucleotide
uguagguuaacauucaugc

SEQ ID NO: 1217182 - RNA, 19 nt, Artificial Sequence
  Description of Artificial Sequence: Synthetic oligonucleotide
uuuuaaaccacaauguaac

SEQ ID NO: 1217183 - RNA, 19 nt, Artificial Sequence
  Description of Artificial Sequence: Synthetic oligonucleotide
uuuaagguugcucagaaac

SEQ ID NO: 1217184 - RNA, 19 nt, Artificial Sequence
  Description of Artificial Sequence: Synthetic oligonucleotide
uuguuaguaauuuuaaacc

SEQ ID NO: 1217185 - RNA, 19 nt, Artificial Sequence
  Description of Artificial Sequence: Synthetic oligonucleotide
uguaauagaaaccagcaaa

SEQ ID NO: 1217186 - RNA, 19 nt, Artificial Sequence
  Description of Artificial Sequence: Synthetic oligonucleotide
ugcuagacaaucuuuaggg

SEQ ID NO: 1217187 - RNA, 19 nt, Artificial Sequence
  Description of Artificial Sequence: Synthetic oligonucleotide
aaauuagcuuaucagugac

SEQ ID NO: 1217188 - RNA, 19 nt, Artificial Sequence
  Description of Artificial Sequence: Synthetic oligonucleotide
aauauuaggcauugucuac

SEQ ID NO: 1217189 - RNA, 19 nt, Artificial Sequence
  Description of Artificial Sequence: Synthetic oligonucleotide
aauagaaaccagcaaagga

SEQ ID NO: 1217190 - RNA, 19 nt, Artificial Sequence
  Description of Artificial Sequence: Synthetic oligonucleotide
uuuaagauucaaaaucaag

SEQ ID NO: 1217191 - RNA, 19 nt, Artificial Sequence
  Description of Artificial Sequence: Synthetic oligonucleotide
uguaacauacuuaauggca

SEQ ID NO: 1217192 - RNA, 19 nt, Artificial Sequence
  Description of Artificial Sequence: Synthetic oligonucleotide
gagaauauaaauucccugc

SEQ ID NO: 1217193 - RNA, 19 nt, Artificial Sequence
  Description of Artificial Sequence: Synthetic oligonucleotide
aaucuuuagggaugggugg

SEQ ID NO: 1217194 - RNA, 19 nt, Artificial Sequence
  Description of Artificial Sequence: Synthetic oligonucleotide
uauacacacacacacacac

SEQ ID NO: 1217195 - RNA, 19 nt, Artificial Sequence
  Description of Artificial Sequence: Synthetic oligonucleotide
ucaauguuagauacaagug

SEQ ID NO: 1217196 - RNA, 19 nt, Artificial Sequence
  Description of Artificial Sequence: Synthetic oligonucleotide
uauuuagacauugauagcu

SEQ ID NO: 1217197 - RNA, 19 nt, Artificial Sequence
  Description of Artificial Sequence: Synthetic oligonucleotide
aaaauuagcuuaucaguga

SEQ ID NO: 1217198 - RNA, 19 nt, Artificial Sequence
  Description of Artificial Sequence: Synthetic oligonucleotide
aggucuuccauaaagaaac

SEQ ID NO: 1217199 - RNA, 19 nt, Artificial Sequence
  Description of Artificial Sequence: Synthetic oligonucleotide
uuucauugguggcagaugc

SEQ ID NO: 1217200 - RNA, 19 nt, Artificial Sequence
  Description of Artificial Sequence: Synthetic oligonucleotide
auauucauacuuugcgccc

SEQ ID NO: 1217201 - RNA, 19 nt, Artificial Sequence
  Description of Artificial Sequence: Synthetic oligonucleotide
uuaucagugacuauuuuau

SEQ ID NO: 1217202 - RNA, 19 nt, Artificial Sequence
  Description of Artificial Sequence: Synthetic oligonucleotide
uuagauacaagugucaguc

SEQ ID NO: 1217203 - RNA, 19 nt, Artificial Sequence
  Description of Artificial Sequence: Synthetic oligonucleotide
aaugcuagacaaucuuuag

SEQ ID NO: 1217204 - RNA, 19 nt, Artificial Sequence
  Description of Artificial Sequence: Synthetic oligonucleotide
auguaaaccaccaacacag

SEQ ID NO: 1217205 - RNA, 19 nt, Artificial Sequence
  Description of Artificial Sequence: Synthetic oligonucleotide
cacauauacacacacacac

SEQ ID NO: 1217206 - RNA, 19 nt, Artificial Sequence
  Description of Artificial Sequence: Synthetic oligonucleotide
agauguaauagaaaccagc

SEQ ID NO: 1217207 - RNA, 19 nt, Artificial Sequence
  Description of Artificial Sequence: Synthetic oligonucleotide
aggaacaugggucagguug

SEQ ID NO: 1217208 - RNA, 19 nt, Artificial Sequence
  Description of Artificial Sequence: Synthetic oligonucleotide
uucugaacuccgaugauag

SEQ ID NO: 1217209 - RNA, 19 nt, Artificial Sequence
  Description of Artificial Sequence: Synthetic oligonucleotide
ugcuuaaauaccuuuauua

SEQ ID NO: 1217210 - RNA, 19 nt, Artificial Sequence
  Description of Artificial Sequence: Synthetic oligonucleotide
ugaugcagaaguuagcugu

SEQ ID NO: 1217211 - RNA, 19 nt, Artificial Sequence
  Description of Artificial Sequence: Synthetic oligonucleotide
auuucaacacugcuaacag

SEQ ID NO: 1217212 - RNA, 19 nt, Artificial Sequence
  Description of Artificial Sequence: Synthetic oligonucleotide
aagauauugcacacgguac

SEQ ID NO: 1217213 - RNA, 19 nt, Artificial Sequence
  Description of Artificial Sequence: Synthetic oligonucleotide
gaaagugcauuuaagguug

SEQ ID NO: 1217214 - RNA, 19 nt, Artificial Sequence
  Description of Artificial Sequence: Synthetic oligonucleotide
cauauacacacacacacac

SEQ ID NO: 1217215 - RNA, 19 nt, Artificial Sequence
  Description of Artificial Sequence: Synthetic oligonucleotide
ugcuccuacacauauacac

SEQ ID NO: 1217216 - RNA, 19 nt, Artificial Sequence
  Description of Artificial Sequence: Synthetic oligonucleotide
cuaccaaacaagcaacugg

SEQ ID NO: 1217217 - RNA, 19 nt, Artificial Sequence
  Description of Artificial Sequence: Synthetic oligonucleotide
uuuucucugcuuaaauacc

SEQ ID NO: 1217218 - RNA, 19 nt, Artificial Sequence
  Description of Artificial Sequence: Synthetic oligonucleotide
uacacacacacacacacac

SEQ ID NO: 1217219 - RNA, 19 nt, Artificial Sequence
  Description of Artificial Sequence: Synthetic oligonucleotide
aggcauguaaaccaccaac

SEQ ID NO: 1217220 - RNA, 19 nt, Artificial Sequence
  Description of Artificial Sequence: Synthetic oligonucleotide
uaauauuaggcauugucua

SEQ ID NO: 1217221 - RNA, 19 nt, Artificial Sequence
  Description of Artificial Sequence: Synthetic oligonucleotide
aaguuagcugugcaggaag

SEQ ID NO: 1217222 - RNA, 19 nt, Artificial Sequence
  Description of Artificial Sequence: Synthetic oligonucleotide
agacaagucccagaggucc

SEQ ID NO: 1217223 - RNA, 19 nt, Artificial Sequence
  Description of Artificial Sequence: Synthetic oligonucleotide
ugauagcucuguaaaauac

SEQ ID NO: 1217224 - RNA, 19 nt, Artificial Sequence
  Description of Artificial Sequence: Synthetic oligonucleotide
cuuccacucggcuagaggc

SEQ ID NO: 1217225 - RNA, 19 nt, Artificial Sequence
  Description of Artificial Sequence: Synthetic oligonucleotide
aauuauuuagacauugaua

SEQ ID NO: 1217226 - RNA, 19 nt, Artificial Sequence
  Description of Artificial Sequence: Synthetic oligonucleotide
uacuuaauggcauuucuuc

SEQ ID NO: 1217227 - RNA, 19 nt, Artificial Sequence
  Description of Artificial Sequence: Synthetic oligonucleotide
uaauagaaaccagcaaagg

SEQ ID NO: 1217228 - RNA, 19 nt, Artificial Sequence
  Description of Artificial Sequence: Synthetic oligonucleotide
cuggaaucaaaucugauga

SEQ ID NO: 1217229 - RNA, 19 nt, Artificial Sequence
  Description of Artificial Sequence: Synthetic oligonucleotide
gauaccauucugaacuccg

SEQ ID NO: 1217230 - RNA, 19 nt, Artificial Sequence
  Description of Artificial Sequence: Synthetic oligonucleotide
aacccuuuuguuccucugg

SEQ ID NO: 1217231 - RNA, 19 nt, Artificial Sequence
  Description of Artificial Sequence: Synthetic oligonucleotide
guaauagaaaccagcaaag

SEQ ID NO: 1217232 - RNA, 19 nt, Artificial Sequence
  Description of Artificial Sequence: Synthetic oligonucleotide
ucuuugauugugugguccg

SEQ ID NO: 1217233 - RNA, 19 nt, Artificial Sequence
  Description of Artificial Sequence: Synthetic oligonucleotide
ugucagucaaagauauugc

SEQ ID NO: 1217234 - RNA, 19 nt, Artificial Sequence
  Description of Artificial Sequence: Synthetic oligonucleotide
uccgaugauaguaguagcc

SEQ ID NO: 1217235 - RNA, 19 nt, Artificial Sequence
  Description of Artificial Sequence: Synthetic oligonucleotide
uuaagguugcucagaaaca

SEQ ID NO: 1217236 - RNA, 19 nt, Artificial Sequence
  Description of Artificial Sequence: Synthetic oligonucleotide
auggagacaagucccagag

SEQ ID NO: 1217237 - RNA, 19 nt, Artificial Sequence
  Description of Artificial Sequence: Synthetic oligonucleotide
uuggggaagagcuacagau

SEQ ID NO: 1217238 - RNA, 19 nt, Artificial Sequence
  Description of Artificial Sequence: Synthetic oligonucleotide
ugggcuaccaaacaagcaa

SEQ ID NO: 1217239 - RNA, 19 nt, Artificial Sequence
  Description of Artificial Sequence: Synthetic oligonucleotide
cuuucccagaacuuguuag

SEQ ID NO: 1217240 - RNA, 19 nt, Artificial Sequence
  Description of Artificial Sequence: Synthetic oligonucleotide
augcuagacaaucuuuagg

SEQ ID NO: 1217241 - RNA, 19 nt, Artificial Sequence
  Description of Artificial Sequence: Synthetic oligonucleotide
aaaucugaugaagcccacc

SEQ ID NO: 1217242 - RNA, 19 nt, Artificial Sequence
  Description of Artificial Sequence: Synthetic oligonucleotide
uuagacauugauagcucug

SEQ ID NO: 1217243 - RNA, 19 nt, Artificial Sequence
  Description of Artificial Sequence: Synthetic oligonucleotide
cacacacacacacacacgc

SEQ ID NO: 1217244 - RNA, 19 nt, Artificial Sequence
  Description of Artificial Sequence: Synthetic oligonucleotide
agacauugagaaacaaacc

SEQ ID NO: 1217245 - RNA, 19 nt, Artificial Sequence
  Description of Artificial Sequence: Synthetic oligonucleotide
gugucagucaaagauauug

SEQ ID NO: 1217246 - RNA, 19 nt, Artificial Sequence
  Description of Artificial Sequence: Synthetic oligonucleotide
uuugcgcccauucaaauuu

SEQ ID NO: 1217247 - RNA, 19 nt, Artificial Sequence
  Description of Artificial Sequence: Synthetic oligonucleotide
gauuucaacacugcuaaca

SEQ ID NO: 1217248 - RNA, 19 nt, Artificial Sequence
  Description of Artificial Sequence: Synthetic oligonucleotide
uaagaggugccuugggucc

SEQ ID NO: 1217249 - RNA, 19 nt, Artificial Sequence
  Description of Artificial Sequence: Synthetic oligonucleotide
uuuagacauugauagcucu

SEQ ID NO: 1217250 - RNA, 19 nt, Artificial Sequence
  Description of Artificial Sequence: Synthetic oligonucleotide
caccucauuucauuggugg

SEQ ID NO: 1217251 - RNA, 19 nt, Artificial Sequence
  Description of Artificial Sequence: Synthetic oligonucleotide
agcagauguaauagaaacc

SEQ ID NO: 1217252 - RNA, 19 nt, Artificial Sequence
  Description of Artificial Sequence: Synthetic oligonucleotide
cugaaagcagauguaauag

SEQ ID NO: 1217253 - RNA, 19 nt, Artificial Sequence
  Description of Artificial Sequence: Synthetic oligonucleotide
  modified_base (11)..(11): a, c, u, g, unknown or other
uaguagcccunuauggagg

SEQ ID NO: 1217254 - RNA, 19 nt, Artificial Sequence
  Description of Artificial Sequence: Synthetic oligonucleotide
gacagaaaaggcuaagaaa

SEQ ID NO: 1217255 - RNA, 19 nt, Artificial Sequence
  Description of Artificial Sequence: Synthetic oligonucleotide
aaggccccacaaaacaucc

SEQ ID NO: 1217256 - RNA, 19 nt, Artificial Sequence
  Description of Artificial Sequence: Synthetic oligonucleotide
auauaaauucccugcuucu

SEQ ID NO: 1217257 - RNA, 19 nt, Artificial Sequence
  Description of Artificial Sequence: Synthetic oligonucleotide
auucccugcuucugaaagc

SEQ ID NO: 1217258 - RNA, 19 nt, Artificial Sequence
  Description of Artificial Sequence: Synthetic oligonucleotide
acuuacuucucaauguuag

SEQ ID NO: 1217259 - RNA, 19 nt, Artificial Sequence
  Description of Artificial Sequence: Synthetic oligonucleotide
uucucaauguuagauacaa

SEQ ID NO: 1217260 - RNA, 19 nt, Artificial Sequence
  Description of Artificial Sequence: Synthetic oligonucleotide
caaaggagcaccaugaugu

SEQ ID NO: 1217261 - RNA, 19 nt, Artificial Sequence
  Description of Artificial Sequence: Synthetic oligonucleotide
uuucuuucccagaacuugu

SEQ ID NO: 1217262 - RNA, 19 nt, Artificial Sequence
  Description of Artificial Sequence: Synthetic oligonucleotide
caggcuacagcacuggagc

SEQ ID NO: 1217263 - RNA, 19 nt, Artificial Sequence
  Description of Artificial Sequence: Synthetic oligonucleotide
acuuaauggcauuucuucu

SEQ ID NO: 1217264 - RNA, 19 nt, Artificial Sequence
  Description of Artificial Sequence: Synthetic oligonucleotide
cacacguacguguauacac

SEQ ID NO: 1217265 - RNA, 19 nt, Artificial Sequence
  Description of Artificial Sequence: Synthetic oligonucleotide
ugcauuuaagguugcucag

SEQ ID NO: 1217266 - RNA, 19 nt, Artificial Sequence
  Description of Artificial Sequence: Synthetic oligonucleotide
cuugggcuaccaaacaagc

SEQ ID NO: 1217267 - RNA, 19 nt, Artificial Sequence
  Description of Artificial Sequence: Synthetic oligonucleotide
uauaaauucccugcuucug

SEQ ID NO: 1217268 - RNA, 19 nt, Artificial Sequence
  Description of Artificial Sequence: Synthetic oligonucleotide
cacacacacacacacacac

SEQ ID NO: 1217269 - RNA, 19 nt, Artificial Sequence
  Description of Artificial Sequence: Synthetic oligonucleotide
acuccgaugauaguaguag

SEQ ID NO: 1217270 - RNA, 19 nt, Artificial Sequence
  Description of Artificial Sequence: Synthetic oligonucleotide
agauacaagugucagucaa

SEQ ID NO: 1217271 - RNA, 19 nt, Artificial Sequence
  Description of Artificial Sequence: Synthetic oligonucleotide
auugauagcucuguaaaau

SEQ ID NO: 1217272 - RNA, 19 nt, Artificial Sequence
  Description of Artificial Sequence: Synthetic oligonucleotide
uuggacugcagcugaaaug

SEQ ID NO: 1217273 - RNA, 19 nt, Artificial Sequence
  Description of Artificial Sequence: Synthetic oligonucleotide
uuuagggauggguggguag

SEQ ID NO: 1217274 - RNA, 19 nt, Artificial Sequence
  Description of Artificial Sequence: Synthetic oligonucleotide
cagccaauuccucacacag

SEQ ID NO: 1217275 - RNA, 19 nt, Artificial Sequence
  Description of Artificial Sequence: Synthetic oligonucleotide
aaugccgcagggaggaagg

SEQ ID NO: 1217276 - RNA, 19 nt, Artificial Sequence
  Description of Artificial Sequence: Synthetic oligonucleotide
uuaauggcauuucuucuua

SEQ ID NO: 1217277 - RNA, 19 nt, Artificial Sequence
  Description of Artificial Sequence: Synthetic oligonucleotide
ucauacuuugcgcccauuc

SEQ ID NO: 1217278 - RNA, 19 nt, Artificial Sequence
  Description of Artificial Sequence: Synthetic oligonucleotide
aacucauagaugggugcac

SEQ ID NO: 1217279 - RNA, 19 nt, Artificial Sequence
  Description of Artificial Sequence: Synthetic oligonucleotide
uuucaacacugcuaacagc

SEQ ID NO: 1217280 - RNA, 19 nt, Artificial Sequence
  Description of Artificial Sequence: Synthetic oligonucleotide
  modified_base (16)..(16): a, c, u, g, unknown or other
gauaguaguagcccunuau

SEQ ID NO: 1217281 - RNA, 19 nt, Artificial Sequence
  Description of Artificial Sequence: Synthetic oligonucleotide
ucuuuguugccaaguucag

SEQ ID NO: 1217282 - RNA, 19 nt, Artificial Sequence
  Description of Artificial Sequence: Synthetic oligonucleotide
cagugacuauuuuaugagg

SEQ ID NO: 1217283 - RNA, 19 nt, Artificial Sequence
  Description of Artificial Sequence: Synthetic oligonucleotide
cugauuucaacacugcuaa

SEQ ID NO: 1217284 - RNA, 19 nt, Artificial Sequence
  Description of Artificial Sequence: Synthetic oligonucleotide
auuuagacauugauagcuc

SEQ ID NO: 1217285 - RNA, 19 nt, Artificial Sequence
  Description of Artificial Sequence: Synthetic oligonucleotide
uuuggacugcagcugaaau

SEQ ID NO: 1217286 - RNA, 19 nt, Artificial Sequence
  Description of Artificial Sequence: Synthetic oligonucleotide
ugcucugaaccucugucac

SEQ ID NO: 1217287 - RNA, 19 nt, Artificial Sequence
  Description of Artificial Sequence: Synthetic oligonucleotide
uucaaacccuuuccacagg

SEQ ID NO: 1217288 - RNA, 19 nt, Artificial Sequence
  Description of Artificial Sequence: Synthetic oligonucleotide
auuagcuuaucagugacua

SEQ ID NO: 1217289 - RNA, 19 nt, Artificial Sequence
  Description of Artificial Sequence: Synthetic oligonucleotide
ugugguccggacaggacug

SEQ ID NO: 1217290 - RNA, 19 nt, Artificial Sequence
  Description of Artificial Sequence: Synthetic oligonucleotide
ucucaauguuagauacaag

SEQ ID NO: 1217291 - RNA, 19 nt, Artificial Sequence
  Description of Artificial Sequence: Synthetic oligonucleotide
guaagaggugccuuggguc

SEQ ID NO: 1217292 - RNA, 19 nt, Artificial Sequence
  Description of Artificial Sequence: Synthetic oligonucleotide
aagugucagucaaagauau

SEQ ID NO: 1217293 - RNA, 19 nt, Artificial Sequence
  Description of Artificial Sequence: Synthetic oligonucleotide
cugcuaacagccagcaccc

SEQ ID NO: 1217294 - RNA, 19 nt, Artificial Sequence
  Description of Artificial Sequence: Synthetic oligonucleotide
uugauagcucuguaaaaua

SEQ ID NO: 1217295 - RNA, 19 nt, Artificial Sequence
  Description of Artificial Sequence: Synthetic oligonucleotide
aacuuguuaguaauuuuaa

SEQ ID NO: 1217296 - RNA, 19 nt, Artificial Sequence
  Description of Artificial Sequence: Synthetic oligonucleotide
gacaggacugcuccuacac

SEQ ID NO: 1217297 - RNA, 19 nt, Artificial Sequence
  Description of Artificial Sequence: Synthetic oligonucleotide
aaagugcauuuaagguugc

SEQ ID NO: 1217298 - RNA, 19 nt, Artificial Sequence
  Description of Artificial Sequence: Synthetic oligonucleotide
uccaaacuggaaucaaauc

SEQ ID NO: 1217299 - RNA, 19 nt, Artificial Sequence
  Description of Artificial Sequence: Synthetic oligonucleotide
accagccagaccucuaguc

SEQ ID NO: 1217300 - RNA, 19 nt, Artificial Sequence
  Description of Artificial Sequence: Synthetic oligonucleotide
cauugguggcagaugcugg

SEQ ID NO: 1217301 - RNA, 19 nt, Artificial Sequence
  Description of Artificial Sequence: Synthetic oligonucleotide
ggaaucaaaucugaugaag

SEQ ID NO: 1217302 - RNA, 19 nt, Artificial Sequence
  Description of Artificial Sequence: Synthetic oligonucleotide
agaaguuagcugugcagga

SEQ ID NO: 1217303 - RNA, 19 nt, Artificial Sequence
  Description of Artificial Sequence: Synthetic oligonucleotide
uguaaaccaccaacacagc

SEQ ID NO: 1217304 - RNA, 19 nt, Artificial Sequence
  Description of Artificial Sequence: Synthetic oligonucleotide
uagacauugauagcucugu

SEQ ID NO: 1217305 - RNA, 19 nt, Artificial Sequence
  Description of Artificial Sequence: Synthetic oligonucleotide
auauuaggcauugucuacu

SEQ ID NO: 1217306 - RNA, 19 nt, Artificial Sequence
  Description of Artificial Sequence: Synthetic oligonucleotide
cauguaaaccaccaacaca

SEQ ID NO: 1217307 - RNA, 19 nt, Artificial Sequence
  Description of Artificial Sequence: Synthetic oligonucleotide
uguuggagaacaguaggaa

SEQ ID NO: 1217308 - RNA, 19 nt, Artificial Sequence
  Description of Artificial Sequence: Synthetic oligonucleotide
acaaucuuuagggaugggu

SEQ ID NO: 1217309 - RNA, 19 nt, Artificial Sequence
  Description of Artificial Sequence: Synthetic oligonucleotide
gaacuuguuaguaauuuua

SEQ ID NO: 1217310 - RNA, 19 nt, Artificial Sequence
  Description of Artificial Sequence: Synthetic oligonucleotide
aaggaggguaagaggugcc

SEQ ID NO: 1217311 - RNA, 19 nt, Artificial Sequence
  Description of Artificial Sequence: Synthetic oligonucleotide
  modified_base (13)..(13): a, c, u, g, unknown or other
aguaguagcccunuaugga

SEQ ID NO: 1217312 - RNA, 19 nt, Artificial Sequence
  Description of Artificial Sequence: Synthetic oligonucleotide
aaacuggaaucaaaucuga

SEQ ID NO: 1217313 - RNA, 19 nt, Artificial Sequence
  Description of Artificial Sequence: Synthetic oligonucleotide
cacacacacacacacgcac

SEQ ID NO: 1217314 - RNA, 19 nt, Artificial Sequence
  Description of Artificial Sequence: Synthetic oligonucleotide
uauucauacuuugcgccca

SEQ ID NO: 1217315 - RNA, 19 nt, Artificial Sequence
  Description of Artificial Sequence: Synthetic oligonucleotide
aggcuacagcacuggagcc

SEQ ID NO: 1217316 - RNA, 19 nt, Artificial Sequence
  Description of Artificial Sequence: Synthetic oligonucleotide
ugugcagucugcacuuacu

SEQ ID NO: 1217317 - RNA, 19 nt, Artificial Sequence
  Description of Artificial Sequence: Synthetic oligonucleotide
uugggcuaccaaacaagca

SEQ ID NO: 1217318 - RNA, 19 nt, Artificial Sequence
  Description of Artificial Sequence: Synthetic oligonucleotide
uggagacaagucccagagg

SEQ ID NO: 1217319 - RNA, 19 nt, Artificial Sequence
  Description of Artificial Sequence: Synthetic oligonucleotide
caauguuagauacaagugu

SEQ ID NO: 1217320 - RNA, 19 nt, Artificial Sequence
  Description of Artificial Sequence: Synthetic oligonucleotide
uggaggguaagaccagcca

SEQ ID NO: 1217321 - RNA, 19 nt, Artificial Sequence
  Description of Artificial Sequence: Synthetic oligonucleotide
agaacuuguuaguaauuuu

SEQ ID NO: 1217322 - RNA, 19 nt, Artificial Sequence
  Description of Artificial Sequence: Synthetic oligonucleotide
uagcuuaucagugacuauu

SEQ ID NO: 1217323 - RNA, 19 nt, Artificial Sequence
  Description of Artificial Sequence: Synthetic oligonucleotide
aacaaacccuuuuguuccu

SEQ ID NO: 1217324 - RNA, 19 nt, Artificial Sequence
  Description of Artificial Sequence: Synthetic oligonucleotide
cagguacauaauuuucuug

SEQ ID NO: 1217325 - RNA, 19 nt, Artificial Sequence
  Description of Artificial Sequence: Synthetic oligonucleotide
ucaccggaacucauagaug

SEQ ID NO: 1217326 - RNA, 19 nt, Artificial Sequence
  Description of Artificial Sequence: Synthetic oligonucleotide
  modified_base (2)..(2): a, c, u, g, unknown or other
unuauggaggcugcugacu

SEQ ID NO: 1217327 - RNA, 19 nt, Artificial Sequence
  Description of Artificial Sequence: Synthetic oligonucleotide
guggguagaaggguaaagc

SEQ ID NO: 1217328 - RNA, 19 nt, Artificial Sequence
  Description of Artificial Sequence: Synthetic oligonucleotide
cugucaccggaacucauag

SEQ ID NO: 1217329 - RNA, 19 nt, Artificial Sequence
  Description of Artificial Sequence: Synthetic oligonucleotide
ucggcuagaggcaggcuga

SEQ ID NO: 1217330 - RNA, 19 nt, Artificial Sequence
  Description of Artificial Sequence: Synthetic oligonucleotide
uacuuugcgcccauucaaa

SEQ ID NO: 1217331 - RNA, 19 nt, Artificial Sequence
  Description of Artificial Sequence: Synthetic oligonucleotide
aauccauucaaggccuuaa

SEQ ID NO: 1217332 - RNA, 19 nt, Artificial Sequence
  Description of Artificial Sequence: Synthetic oligonucleotide
acaaguuacugggcucugc

SEQ ID NO: 1217333 - RNA, 19 nt, Artificial Sequence
  Description of Artificial Sequence: Synthetic oligonucleotide
  modified_base (3)..(3): a, c, u, g, unknown or other
cunuauggaggcugcugac

SEQ ID NO: 1217334 - RNA, 19 nt, Artificial Sequence
  Description of Artificial Sequence: Synthetic oligonucleotide
uccuugggcuaccaaacaa

SEQ ID NO: 1217335 - RNA, 19 nt, Artificial Sequence
  Description of Artificial Sequence: Synthetic oligonucleotide
ugaaccucugucaccggaa

SEQ ID NO: 1217336 - RNA, 19 nt, Artificial Sequence
  Description of Artificial Sequence: Synthetic oligonucleotide
aaaaggccccacaaaacau

SEQ ID NO: 1217337 - RNA, 19 nt, Artificial Sequence
  Description of Artificial Sequence: Synthetic oligonucleotide
cacacacacacacgcacgc

SEQ ID NO: 1217338 - RNA, 19 nt, Artificial Sequence
  Description of Artificial Sequence: Synthetic oligonucleotide
gauauugcacacgguacca

SEQ ID NO: 1217339 - RNA, 19 nt, Artificial Sequence
  Description of Artificial Sequence: Synthetic oligonucleotide
uuugauugugugguccgga

SEQ ID NO: 1217340 - RNA, 19 nt, Artificial Sequence
  Description of Artificial Sequence: Synthetic oligonucleotide
gauggagacaagucccaga

SEQ ID NO: 1217341 - RNA, 19 nt, Artificial Sequence
  Description of Artificial Sequence: Synthetic oligonucleotide
uugauugugugguccggac

SEQ ID NO: 1217342 - RNA, 19 nt, Artificial Sequence
  Description of Artificial Sequence: Synthetic oligonucleotide
guaccagaggcauguaaac

SEQ ID NO: 1217343 - RNA, 19 nt, Artificial Sequence
  Description of Artificial Sequence: Synthetic oligonucleotide
uagauacaagugucaguca

SEQ ID NO: 1217344 - RNA, 19 nt, Artificial Sequence
  Description of Artificial Sequence: Synthetic oligonucleotide
ugcagcugaaaugcuagac

SEQ ID NO: 1217345 - RNA, 19 nt, Artificial Sequence
  Description of Artificial Sequence: Synthetic oligonucleotide
uggaaucaaaucugaugaa

SEQ ID NO: 1217346 - RNA, 19 nt, Artificial Sequence
  Description of Artificial Sequence: Synthetic oligonucleotide
gaugcagaaguuagcugug

SEQ ID NO: 1217347 - RNA, 19 nt, Artificial Sequence
  Description of Artificial Sequence: Synthetic oligonucleotide
aguuagcugugcaggaagg

SEQ ID NO: 1217348 - RNA, 19 nt, Artificial Sequence
  Description of Artificial Sequence: Synthetic oligonucleotide
uuagggauggguggguaga

SEQ ID NO: 1217349 - RNA, 19 nt, Artificial Sequence
  Description of Artificial Sequence: Synthetic oligonucleotide
ucugcacuuacuucucaau

SEQ ID NO: 1217350 - RNA, 19 nt, Artificial Sequence
  Description of Artificial Sequence: Synthetic oligonucleotide
cucggcuagaggcaggcug

SEQ ID NO: 1217351 - RNA, 19 nt, Artificial Sequence
  Description of Artificial Sequence: Synthetic oligonucleotide
cauugucuacuuacuuuug

SEQ ID NO: 1217352 - RNA, 19 nt, Artificial Sequence
  Description of Artificial Sequence: Synthetic oligonucleotide
uucauugguggcagaugcu

SEQ ID NO: 1217353 - RNA, 19 nt, Artificial Sequence
  Description of Artificial Sequence: Synthetic oligonucleotide
  modified_base (7)..(7): a, c, u, g, unknown or other
agcccunuauggaggcugc

SEQ ID NO: 1217354 - RNA, 19 nt, Artificial Sequence
  Description of Artificial Sequence: Synthetic oligonucleotide
  modified_base (8)..(8): a, c, u, g, unknown or other
uagcccunuauggaggcug

SEQ ID NO: 1217355 - RNA, 19 nt, Artificial Sequence
  Description of Artificial Sequence: Synthetic oligonucleotide
ugcagucugcacuuacuuc

SEQ ID NO: 1217356 - RNA, 19 nt, Artificial Sequence
  Description of Artificial Sequence: Synthetic oligonucleotide
uuccacucggcuagaggca

SEQ ID NO: 1217357 - RNA, 19 nt, Artificial Sequence
  Description of Artificial Sequence: Synthetic oligonucleotide
gaagucugcucaugaagaa

SEQ ID NO: 1217358 - RNA, 19 nt, Artificial Sequence
  Description of Artificial Sequence: Synthetic oligonucleotide
cagcugaaaugcuagacaa

SEQ ID NO: 1217359 - RNA, 19 nt, Artificial Sequence
  Description of Artificial Sequence: Synthetic oligonucleotide
gcugaaaugcuagacaauc

SEQ ID NO: 1217360 - RNA, 19 nt, Artificial Sequence
  Description of Artificial Sequence: Synthetic oligonucleotide
ucaguuuuauuuggccgcu

SEQ ID NO: 1217361 - RNA, 19 nt, Artificial Sequence
  Description of Artificial Sequence: Synthetic oligonucleotide
ucugucaccggaacucaua

SEQ ID NO: 1217362 - RNA, 19 nt, Artificial Sequence
  Description of Artificial Sequence: Synthetic oligonucleotide
guccggacaggacugcucc

SEQ ID NO: 1217363 - RNA, 19 nt, Artificial Sequence
  Description of Artificial Sequence: Synthetic oligonucleotide
uucugugaugcagaaguua

SEQ ID NO: 1217364 - RNA, 19 nt, Artificial Sequence
  Description of Artificial Sequence: Synthetic oligonucleotide
acacacacacacacgcacg

SEQ ID NO: 1217365 - RNA, 19 nt, Artificial Sequence
  Description of Artificial Sequence: Synthetic oligonucleotide
cuuugauugugugguccgg

SEQ ID NO: 1217366 - RNA, 19 nt, Artificial Sequence
  Description of Artificial Sequence: Synthetic oligonucleotide
augaagaaacaggaacaca

SEQ ID NO: 1217367 - RNA, 19 nt, Artificial Sequence
  Description of Artificial Sequence: Synthetic oligonucleotide
acauauacacacacacaca

SEQ ID NO: 1217368 - RNA, 19 nt, Artificial Sequence
  Description of Artificial Sequence: Synthetic oligonucleotide
ccauucaaggccuuaaaga

SEQ ID NO: 1217369 - RNA, 19 nt, Artificial Sequence
  Description of Artificial Sequence: Synthetic oligonucleotide
uauuuggccgcugcucuga

SEQ ID NO: 1217370 - RNA, 19 nt, Artificial Sequence
  Description of Artificial Sequence: Synthetic oligonucleotide
gucaccggaacucauagau

SEQ ID NO: 1217371 - RNA, 19 nt, Artificial Sequence
  Description of Artificial Sequence: Synthetic oligonucleotide
gauagcucuguaaaauacu

SEQ ID NO: 1217372 - RNA, 19 nt, Artificial Sequence
  Description of Artificial Sequence: Synthetic oligonucleotide
uuagcuuaucagugacuau

SEQ ID NO: 1217373 - RNA, 19 nt, Artificial Sequence
  Description of Artificial Sequence: Synthetic oligonucleotide
cuuacuucucaauguuaga

SEQ ID NO: 1217374 - RNA, 19 nt, Artificial Sequence
  Description of Artificial Sequence: Synthetic oligonucleotide
auauugcacacgguaccag

SEQ ID NO: 1217375 - RNA, 19 nt, Artificial Sequence
  Description of Artificial Sequence: Synthetic oligonucleotide
  modified_base (19)..(19): a, c, u, g, unknown or other
gaugauaguaguagcccun

SEQ ID NO: 1217376 - RNA, 19 nt, Artificial Sequence
  Description of Artificial Sequence: Synthetic oligonucleotide
ugauuucaacacugcuaac

SEQ ID NO: 1217377 - RNA, 19 nt, Artificial Sequence
  Description of Artificial Sequence: Synthetic oligonucleotide
cauacuuaauggcauuucu

SEQ ID NO: 1217378 - RNA, 19 nt, Artificial Sequence
  Description of Artificial Sequence: Synthetic oligonucleotide
gcauguaaaccaccaacac

SEQ ID NO: 1217379 - RNA, 19 nt, Artificial Sequence
  Description of Artificial Sequence: Synthetic oligonucleotide
ucugaaccucugucaccgg

SEQ ID NO: 1217380 - RNA, 19 nt, Artificial Sequence
  Description of Artificial Sequence: Synthetic oligonucleotide
cauugauagcucuguaaaa

SEQ ID NO: 1217381 - RNA, 19 nt, Artificial Sequence
  Description of Artificial Sequence: Synthetic oligonucleotide
auguuagauacaaguguca

SEQ ID NO: 1217382 - RNA, 19 nt, Artificial Sequence
  Description of Artificial Sequence: Synthetic oligonucleotide
gaauauaaauucccugcuu

SEQ ID NO: 1217383 - RNA, 19 nt, Artificial Sequence
  Description of Artificial Sequence: Synthetic oligonucleotide
guuagauacaagugucagu

SEQ ID NO: 1217384 - RNA, 19 nt, Artificial Sequence
  Description of Artificial Sequence: Synthetic oligonucleotide
auauacacacacacacaca

SEQ ID NO: 1217385 - RNA, 19 nt, Artificial Sequence
  Description of Artificial Sequence: Synthetic oligonucleotide
ucugaacuccgaugauagu

SEQ ID NO: 1217386 - RNA, 19 nt, Artificial Sequence
  Description of Artificial Sequence: Synthetic oligonucleotide
uuuuggacugcagcugaaa

SEQ ID NO: 1217387 - RNA, 19 nt, Artificial Sequence
  Description of Artificial Sequence: Synthetic oligonucleotide
uucugaguggaggguaaga

SEQ ID NO: 1217388 - RNA, 19 nt, Artificial Sequence
  Description of Artificial Sequence: Synthetic oligonucleotide
uugagggacugauaccauu

SEQ ID NO: 1217389 - RNA, 19 nt, Artificial Sequence
  Description of Artificial Sequence: Synthetic oligonucleotide
cugauaccauucugaacuc

SEQ ID NO: 1217390 - RNA, 19 nt, Artificial Sequence
  Description of Artificial Sequence: Synthetic oligonucleotide
ccuugggcuaccaaacaag

SEQ ID NO: 1217391 - RNA, 19 nt, Artificial Sequence
  Description of Artificial Sequence: Synthetic oligonucleotide
acacacacacacacacacg

SEQ ID NO: 1217392 - RNA, 19 nt, Artificial Sequence
  Description of Artificial Sequence: Synthetic oligonucleotide
caaaucugaugaagcccac

SEQ ID NO: 1217393 - RNA, 19 nt, Artificial Sequence
  Description of Artificial Sequence: Synthetic oligonucleotide
cugaacuccgaugauagua

SEQ ID NO: 1217394 - RNA, 19 nt, Artificial Sequence
  Description of Artificial Sequence: Synthetic oligonucleotide
auucugaacuccgaugaua

SEQ ID NO: 1217395 - RNA, 19 nt, Artificial Sequence
  Description of Artificial Sequence: Synthetic oligonucleotide
ggauggguggguagaaggg

SEQ ID NO: 1217396 - RNA, 19 nt, Artificial Sequence
  Description of Artificial Sequence: Synthetic oligonucleotide
ugucaccggaacucauaga

SEQ ID NO: 1217397 - RNA, 19 nt, Artificial Sequence
  Description of Artificial Sequence: Synthetic oligonucleotide
uggguggguagaaggguaa

SEQ ID NO: 1217398 - RNA, 19 nt, Artificial Sequence
  Description of Artificial Sequence: Synthetic oligonucleotide
ggaaagugcauuuaagguu

SEQ ID NO: 1217399 - RNA, 19 nt, Artificial Sequence
  Description of Artificial Sequence: Synthetic oligonucleotide
agauggagacaagucccag

SEQ ID NO: 1217400 - RNA, 19 nt, Artificial Sequence
  Description of Artificial Sequence: Synthetic oligonucleotide
acucauagaugggugcacu

SEQ ID NO: 1217401 - RNA, 19 nt, Artificial Sequence
  Description of Artificial Sequence: Synthetic oligonucleotide
ggcauguaaaccaccaaca

SEQ ID NO: 1217402 - RNA, 19 nt, Artificial Sequence
  Description of Artificial Sequence: Synthetic oligonucleotide
  modified_base (17)..(17): a, c, u, g, unknown or other
ugauaguaguagcccunua

SEQ ID NO: 1217403 - RNA, 19 nt, Artificial Sequence
  Description of Artificial Sequence: Synthetic oligonucleotide
ugucuuugauugugugguc

SEQ ID NO: 1217404 - RNA, 19 nt, Artificial Sequence
  Description of Artificial Sequence: Synthetic oligonucleotide
aaauccauucaaggccuua

SEQ ID NO: 1217405 - RNA, 19 nt, Artificial Sequence
  Description of Artificial Sequence: Synthetic oligonucleotide
acacguacguguauacaca

SEQ ID NO: 1217406 - RNA, 19 nt, Artificial Sequence
  Description of Artificial Sequence: Synthetic oligonucleotide
aggacagauggcauuucug

SEQ ID NO: 1217407 - RNA, 19 nt, Artificial Sequence
  Description of Artificial Sequence: Synthetic oligonucleotide
auccauucaaggccuuaaa

SEQ ID NO: 1217408 - RNA, 19 nt, Artificial Sequence
  Description of Artificial Sequence: Synthetic oligonucleotide
gcuuccuacuuaauauuag

SEQ ID NO: 1217409 - RNA, 19 nt, Artificial Sequence
  Description of Artificial Sequence: Synthetic oligonucleotide
  modified_base (18)..(18): a, c, u, g, unknown or other
augauaguaguagcccunu

SEQ ID NO: 1217410 - RNA, 19 nt, Artificial Sequence
  Description of Artificial Sequence: Synthetic oligonucleotide
cuaacagccagcacccugu

SEQ ID NO: 1217411 - RNA, 19 nt, Artificial Sequence
  Description of Artificial Sequence: Synthetic oligonucleotide
uuguugccaaguucaguuu

SEQ ID NO: 1217412 - RNA, 19 nt, Artificial Sequence
  Description of Artificial Sequence: Synthetic oligonucleotide
agucugcacuuacuucuca

SEQ ID NO: 1217413 - RNA, 19 nt, Artificial Sequence
  Description of Artificial Sequence: Synthetic oligonucleotide
auagaugggugcacugugu

SEQ ID NO: 1217414 - RNA, 19 nt, Artificial Sequence
  Description of Artificial Sequence: Synthetic oligonucleotide
cacaaugccgcagggagga

SEQ ID NO: 1217415 - RNA, 19 nt, Artificial Sequence
  Description of Artificial Sequence: Synthetic oligonucleotide
gaaguuagcugugcaggaa

SEQ ID NO: 1217416 - RNA, 19 nt, Artificial Sequence
  Description of Artificial Sequence: Synthetic oligonucleotide
gcuaacagccagcacccug

SEQ ID NO: 1217417 - RNA, 19 nt, Artificial Sequence
  Description of Artificial Sequence: Synthetic oligonucleotide
caaacccuuuccacagguc

SEQ ID NO: 1217418 - RNA, 19 nt, Artificial Sequence
  Description of Artificial Sequence: Synthetic oligonucleotide
agacauugauagcucugua

SEQ ID NO: 1217419 - RNA, 19 nt, Artificial Sequence
  Description of Artificial Sequence: Synthetic oligonucleotide
  modified_base (4)..(4): a, c, u, g, unknown or other
ccunuauggaggcugcuga

SEQ ID NO: 1217420 - RNA, 19 nt, Artificial Sequence
  Description of Artificial Sequence: Synthetic oligonucleotide
aacuccgaugauaguagua

SEQ ID NO: 1217421 - RNA, 19 nt, Artificial Sequence
  Description of Artificial Sequence: Synthetic oligonucleotide
guagguuaacauucaugcu

SEQ ID NO: 1217422 - RNA, 19 nt, Artificial Sequence
  Description of Artificial Sequence: Synthetic oligonucleotide
gggacugauaccauucuga

SEQ ID NO: 1217423 - RNA, 19 nt, Artificial Sequence
  Description of Artificial Sequence: Synthetic oligonucleotide
cugcucugaaccucuguca

SEQ ID NO: 1217424 - RNA, 19 nt, Artificial Sequence
  Description of Artificial Sequence: Synthetic oligonucleotide
caaugccgcagggaggaag

SEQ ID NO: 1217425 - RNA, 19 nt, Artificial Sequence
  Description of Artificial Sequence: Synthetic oligonucleotide
gaacaugggucagguugag

SEQ ID NO: 1217426 - RNA, 19 nt, Artificial Sequence
  Description of Artificial Sequence: Synthetic oligonucleotide
ccgaugauaguaguagccc

SEQ ID NO: 1217427 - RNA, 19 nt, Artificial Sequence
  Description of Artificial Sequence: Synthetic oligonucleotide
gaaaugcuagacaaucuuu

SEQ ID NO: 1217428 - RNA, 19 nt, Artificial Sequence
  Description of Artificial Sequence: Synthetic oligonucleotide
aggagcaccaugaugucuu

SEQ ID NO: 1217429 - RNA, 19 nt, Artificial Sequence
  Description of Artificial Sequence: Synthetic oligonucleotide
gcuagacaaucuuuaggga

SEQ ID NO: 1217430 - RNA, 19 nt, Artificial Sequence
  Description of Artificial Sequence: Synthetic oligonucleotide
cuacuuaauauuaggcauu

SEQ ID NO: 1217431 - RNA, 19 nt, Artificial Sequence
  Description of Artificial Sequence: Synthetic oligonucleotide
auucauacuuugcgcccau

SEQ ID NO: 1217432 - RNA, 19 nt, Artificial Sequence
  Description of Artificial Sequence: Synthetic oligonucleotide
gguggguagaaggguaaag

SEQ ID NO: 1217433 - RNA, 19 nt, Artificial Sequence
  Description of Artificial Sequence: Synthetic oligonucleotide
aggccuuaaagagaauaua

SEQ ID NO: 1217434 - RNA, 19 nt, Artificial Sequence
  Description of Artificial Sequence: Synthetic oligonucleotide
ccuacuuaauauuaggcau

SEQ ID NO: 1217435 - RNA, 19 nt, Artificial Sequence
  Description of Artificial Sequence: Synthetic oligonucleotide
gguaccagaggcauguaaa

SEQ ID NO: 1217436 - RNA, 19 nt, Artificial Sequence
  Description of Artificial Sequence: Synthetic oligonucleotide
gaguggaggguaagaccag

SEQ ID NO: 1217437 - RNA, 19 nt, Artificial Sequence
  Description of Artificial Sequence: Synthetic oligonucleotide
auacacacacacacacaca

SEQ ID NO: 1217438 - RNA, 19 nt, Artificial Sequence
  Description of Artificial Sequence: Synthetic oligonucleotide
acaauguaacauacuuaau

SEQ ID NO: 1217439 - RNA, 19 nt, Artificial Sequence
  Description of Artificial Sequence: Synthetic oligonucleotide
gcccauucaaauuuaauuu

SEQ ID NO: 1217440 - RNA, 19 nt, Artificial Sequence
  Description of Artificial Sequence: Synthetic oligonucleotide
accggaacucauagauggg

SEQ ID NO: 1217441 - RNA, 19 nt, Artificial Sequence
  Description of Artificial Sequence: Synthetic oligonucleotide
uggguccuguagguuaaca

SEQ ID NO: 1217442 - RNA, 19 nt, Artificial Sequence
  Description of Artificial Sequence: Synthetic oligonucleotide
guuagcugugcaggaagga

SEQ ID NO: 1217443 - RNA, 19 nt, Artificial Sequence
  Description of Artificial Sequence: Synthetic oligonucleotide
auaccauucugaacuccga

SEQ ID NO: 1217444 - RNA, 19 nt, Artificial Sequence
  Description of Artificial Sequence: Synthetic oligonucleotide
agcuuaucagugacuauuu

SEQ ID NO: 1217445 - RNA, 19 nt, Artificial Sequence
  Description of Artificial Sequence: Synthetic oligonucleotide
cugaaccucugucaccgga

SEQ ID NO: 1217446 - RNA, 19 nt, Artificial Sequence
  Description of Artificial Sequence: Synthetic oligonucleotide
cuuggguccuguagguuaa

SEQ ID NO: 1217447 - RNA, 19 nt, Artificial Sequence
  Description of Artificial Sequence: Synthetic oligonucleotide
gugugguccggacaggacu

SEQ ID NO: 1217448 - RNA, 19 nt, Artificial Sequence
  Description of Artificial Sequence: Synthetic oligonucleotide
cacucggcuagaggcaggc

SEQ ID NO: 1217449 - RNA, 19 nt, Artificial Sequence
  Description of Artificial Sequence: Synthetic oligonucleotide
cacuuacuucucaauguua

SEQ ID NO: 1217450 - RNA, 19 nt, Artificial Sequence
  Description of Artificial Sequence: Synthetic oligonucleotide
aggaaggaaagugcauuua

SEQ ID NO: 1217451 - RNA, 19 nt, Artificial Sequence
  Description of Artificial Sequence: Synthetic oligonucleotide
gaaggguaaagcagggcau

SEQ ID NO: 1217452 - RNA, 19 nt, Artificial Sequence
  Description of Artificial Sequence: Synthetic oligonucleotide
agcaacuggggaaggagua

SEQ ID NO: 1217453 - RNA, 19 nt, Artificial Sequence
  Description of Artificial Sequence: Synthetic oligonucleotide
gcaggcuacagcacuggag

SEQ ID NO: 1217454 - RNA, 19 nt, Artificial Sequence
  Description of Artificial Sequence: Synthetic oligonucleotide
uugcgcccauucaaauuua

SEQ ID NO: 1217455 - RNA, 19 nt, Artificial Sequence
  Description of Artificial Sequence: Synthetic oligonucleotide
gagggacugauaccauucu

SEQ ID NO: 1217456 - RNA, 19 nt, Artificial Sequence
  Description of Artificial Sequence: Synthetic oligonucleotide
gaacuccgaugauaguagu

SEQ ID NO: 1217457 - RNA, 19 nt, Artificial Sequence
  Description of Artificial Sequence: Synthetic oligonucleotide
gguaagaggugccuugggu

SEQ ID NO: 1217458 - RNA, 19 nt, Artificial Sequence
  Description of Artificial Sequence: Synthetic oligonucleotide
agaccucuagucccugcuu

SEQ ID NO: 1217459 - RNA, 19 nt, Artificial Sequence
  Description of Artificial Sequence: Synthetic oligonucleotide
gacugcagcugaaaugcua

SEQ ID NO: 1217460 - RNA, 19 nt, Artificial Sequence
  Description of Artificial Sequence: Synthetic oligonucleotide
gcauugucuacuuacuuuu

SEQ ID NO: 1217461 - RNA, 19 nt, Artificial Sequence
  Description of Artificial Sequence: Synthetic oligonucleotide
acacacacacacacacaca

SEQ ID NO: 1217462 - RNA, 19 nt, Artificial Sequence
  Description of Artificial Sequence: Synthetic oligonucleotide
caggacugcuccuacacau

SEQ ID NO: 1217463 - RNA, 19 nt, Artificial Sequence
  Description of Artificial Sequence: Synthetic oligonucleotide
acacacacacacacacgca

SEQ ID NO: 1217464 - RNA, 19 nt, Artificial Sequence
  Description of Artificial Sequence: Synthetic oligonucleotide
gggcuaccaaacaagcaac

SEQ ID NO: 1217465 - RNA, 19 nt, Artificial Sequence
  Description of Artificial Sequence: Synthetic oligonucleotide
gaacacaccucuccugguu

SEQ ID NO: 1217466 - RNA, 19 nt, Artificial Sequence
  Description of Artificial Sequence: Synthetic oligonucleotide
ggcagguacauaauuuucu

SEQ ID NO: 1217467 - RNA, 19 nt, Artificial Sequence
  Description of Artificial Sequence: Synthetic oligonucleotide
acacacacacacgcacgca

SEQ ID NO: 1217468 - RNA, 19 nt, Artificial Sequence
  Description of Artificial Sequence: Synthetic oligonucleotide
ggcauugucuacuuacuuu

SEQ ID NO: 1217469 - RNA, 19 nt, Artificial Sequence
  Description of Artificial Sequence: Synthetic oligonucleotide
cagaacuuguuaguaauuu

SEQ ID NO: 1217470 - RNA, 19 nt, Artificial Sequence
  Description of Artificial Sequence: Synthetic oligonucleotide
cggaacucauagaugggug

SEQ ID NO: 1217471 - RNA, 19 nt, Artificial Sequence
  Description of Artificial Sequence: Synthetic oligonucleotide
cacugcuaacagccagcac

SEQ ID NO: 1217472 - RNA, 19 nt, Artificial Sequence
  Description of Artificial Sequence: Synthetic oligonucleotide
cacgguaccagaggcaugu

SEQ ID NO: 1217473 - RNA, 19 nt, Artificial Sequence
  Description of Artificial Sequence: Synthetic oligonucleotide
cacaaguuacugggcucug

SEQ ID NO: 1217474 - RNA, 19 nt, Artificial Sequence
  Description of Artificial Sequence: Synthetic oligonucleotide
cugcuccuacacauauaca

SEQ ID NO: 1217475 - RNA, 19 nt, Artificial Sequence
  Description of Artificial Sequence: Synthetic oligonucleotide
ccacaauguaacauacuua

SEQ ID NO: 1217476 - RNA, 19 nt, Artificial Sequence
  Description of Artificial Sequence: Synthetic oligonucleotide
gucagguugagggacugau

SEQ ID NO: 1217477 - RNA, 19 nt, Artificial Sequence
  Description of Artificial Sequence: Synthetic oligonucleotide
  modified_base (5)..(5): a, c, u, g, unknown or other
cccunuauggaggcugcug

SEQ ID NO: 1217478 - RNA, 19 nt, Artificial Sequence
  Description of Artificial Sequence: Synthetic oligonucleotide
ugcuaacagccagcacccu

SEQ ID NO: 1217479 - RNA, 19 nt, Artificial Sequence
  Description of Artificial Sequence: Synthetic oligonucleotide
cucuggagucugauuucaa

SEQ ID NO: 1217480 - RNA, 19 nt, Artificial Sequence
  Description of Artificial Sequence: Synthetic oligonucleotide
uucauacuuugcgcccauu

SEQ ID NO: 1217481 - RNA, 19 nt, Artificial Sequence
  Description of Artificial Sequence: Synthetic oligonucleotide
cacaccucuccugguucug

SEQ ID NO: 1217482 - RNA, 19 nt, Artificial Sequence
  Description of Artificial Sequence: Synthetic oligonucleotide
cuuuagggaugggugggua

SEQ ID NO: 1217483 - RNA, 19 nt, Artificial Sequence
  Description of Artificial Sequence: Synthetic oligonucleotide
caccaaggcugaggugacc

SEQ ID NO: 1217484 - RNA, 19 nt, Artificial Sequence
  Description of Artificial Sequence: Synthetic oligonucleotide
uuggguccuguagguuaac

SEQ ID NO: 1217485 - RNA, 19 nt, Artificial Sequence
  Description of Artificial Sequence: Synthetic oligonucleotide
agugucagucaaagauauu

SEQ ID NO: 1217486 - RNA, 19 nt, Artificial Sequence
  Description of Artificial Sequence: Synthetic oligonucleotide
cccauucaaauuuaauuuu

SEQ ID NO: 1217487 - RNA, 19 nt, Artificial Sequence
  Description of Artificial Sequence: Synthetic oligonucleotide
acacgguaccagaggcaug

SEQ ID NO: 1217488 - RNA, 19 nt, Artificial Sequence
  Description of Artificial Sequence: Synthetic oligonucleotide
cacacgguaccagaggcau

SEQ ID NO: 1217489 - RNA, 19 nt, Artificial Sequence
  Description of Artificial Sequence: Synthetic oligonucleotide
gacugcuccuacacauaua

SEQ ID NO: 1217490 - RNA, 19 nt, Artificial Sequence
  Description of Artificial Sequence: Synthetic oligonucleotide
cagagcucuggggcacaag

SEQ ID NO: 1217491 - RNA, 19 nt, Artificial Sequence
  Description of Artificial Sequence: Synthetic oligonucleotide
ggguccuguagguuaacau

SEQ ID NO: 1217492 - RNA, 19 nt, Artificial Sequence
  Description of Artificial Sequence: Synthetic oligonucleotide
gcacaaguuacugggcucu

SEQ ID NO: 1217493 - RNA, 19 nt, Artificial Sequence
  Description of Artificial Sequence: Synthetic oligonucleotide
acgcacacacguacgugua

SEQ ID NO: 1217494 - RNA, 19 nt, Artificial Sequence
  Description of Artificial Sequence: Synthetic oligonucleotide
acucggcuagaggcaggcu

SEQ ID NO: 1217495 - RNA, 19 nt, Artificial Sequence
  Description of Artificial Sequence: Synthetic oligonucleotide
ggcuaccaaacaagcaacu

SEQ ID NO: 1217496 - RNA, 19 nt, Artificial Sequence
  Description of Artificial Sequence: Synthetic oligonucleotide
cgaugauaguaguagcccu

SEQ ID NO: 1217497 - RNA, 19 nt, Artificial Sequence
  Description of Artificial Sequence: Synthetic oligonucleotide
ccucuggagucugauuuca

SEQ ID NO: 1217498 - RNA, 19 nt, Artificial Sequence
  Description of Artificial Sequence: Synthetic oligonucleotide
guugagggacugauaccau

SEQ ID NO: 1217499 - RNA, 19 nt, Artificial Sequence
  Description of Artificial Sequence: Synthetic oligonucleotide
  modified_base (9)..(9): a, c, u, g, unknown or other
guagcccunuauggaggcu

SEQ ID NO: 1217500 - RNA, 19 nt, Artificial Sequence
  Description of Artificial Sequence: Synthetic oligonucleotide
ggcuacagcacuggagccu

SEQ ID NO: 1217501 - RNA, 19 nt, Artificial Sequence
  Description of Artificial Sequence: Synthetic oligonucleotide
gcacacgguaccagaggca

SEQ ID NO: 1217502 - RNA, 19 nt, Artificial Sequence
  Description of Artificial Sequence: Synthetic oligonucleotide
gaccuuccacucggcuaga

SEQ ID NO: 1217503 - RNA, 19 nt, Artificial Sequence
  Description of Artificial Sequence: Synthetic oligonucleotide
cugguucuggcagguacau

SEQ ID NO: 1217504 - RNA, 19 nt, Artificial Sequence
  Description of Artificial Sequence: Synthetic oligonucleotide
ggucagguugagggacuga

SEQ ID NO: 1217505 - RNA, 19 nt, Artificial Sequence
  Description of Artificial Sequence: Synthetic oligonucleotide
ccggaacucauagaugggu

SEQ ID NO: 1217506 - RNA, 19 nt, Artificial Sequence
  Description of Artificial Sequence: Synthetic oligonucleotide
acgguaccagaggcaugua

SEQ ID NO: 1217507 - RNA, 19 nt, Artificial Sequence
  Description of Artificial Sequence: Synthetic oligonucleotide
gcgcccauucaaauuuaau

SEQ ID NO: 1217508 - RNA, 19 nt, Artificial Sequence
  Description of Artificial Sequence: Synthetic oligonucleotide
ccggacaggacugcuccua

SEQ ID NO: 1217509 - RNA, 19 nt, Artificial Sequence
  Description of Artificial Sequence: Synthetic oligonucleotide
  modified_base (6)..(6): a, c, u, g, unknown or other
gcccunuauggaggcugcu

SEQ ID NO: 1217510 - RNA, 19 nt, Artificial Sequence
  Description of Artificial Sequence: Synthetic oligonucleotide
ggggaccacugagcaccaa

SEQ ID NO: 1217511 - RNA, 19 nt, Artificial Sequence
  Description of Artificial Sequence: Synthetic oligonucleotide
ucuuauaggacucuggagc

SEQ ID NO: 1217512 - RNA, 19 nt, Artificial Sequence
  Description of Artificial Sequence: Synthetic oligonucleotide
ugagaaacaucauaaauca

SEQ ID NO: 1217513 - RNA, 19 nt, Artificial Sequence
  Description of Artificial Sequence: Synthetic oligonucleotide
auagaagagcgauuaaccc

SEQ ID NO: 1217514 - RNA, 19 nt, Artificial Sequence
  Description of Artificial Sequence: Synthetic oligonucleotide
uuaaugucaaauccgacac

SEQ ID NO: 1217515 - RNA, 19 nt, Artificial Sequence
  Description of Artificial Sequence: Synthetic oligonucleotide
auacccuucucucagagac

SEQ ID NO: 1217516 - RNA, 19 nt, Artificial Sequence
  Description of Artificial Sequence: Synthetic oligonucleotide
uugacuauaaucuugucuc

SEQ ID NO: 1217517 - RNA, 19 nt, Artificial Sequence
  Description of Artificial Sequence: Synthetic oligonucleotide
agaacauaacuacagguuc

SEQ ID NO: 1217518 - RNA, 19 nt, Artificial Sequence
  Description of Artificial Sequence: Synthetic oligonucleotide
uuaauaacagcaauugguc

SEQ ID NO: 1217519 - RNA, 19 nt, Artificial Sequence
  Description of Artificial Sequence: Synthetic oligonucleotide
cauagaagagcgauuaacc

SEQ ID NO: 1217520 - RNA, 19 nt, Artificial Sequence
  Description of Artificial Sequence: Synthetic oligonucleotide
aaaucuaaauuacggcgag

SEQ ID NO: 1217521 - RNA, 19 nt, Artificial Sequence
  Description of Artificial Sequence: Synthetic oligonucleotide
guagcugcgacucauggcg

SEQ ID NO: 1217522 - RNA, 19 nt, Artificial Sequence
  Description of Artificial Sequence: Synthetic oligonucleotide
aauagaccgaugaacaauc

SEQ ID NO: 1217523 - RNA, 19 nt, Artificial Sequence
  Description of Artificial Sequence: Synthetic oligonucleotide
auaguucccagcugcagcc

SEQ ID NO: 1217524 - RNA, 19 nt, Artificial Sequence
  Description of Artificial Sequence: Synthetic oligonucleotide
aaaauacuccuucaaccug

SEQ ID NO: 1217525 - RNA, 19 nt, Artificial Sequence
  Description of Artificial Sequence: Synthetic oligonucleotide
uacggcgagauuuugcucg

SEQ ID NO: 1217526 - RNA, 19 nt, Artificial Sequence
  Description of Artificial Sequence: Synthetic oligonucleotide
auugacuauaaucuugucu

SEQ ID NO: 1217527 - RNA, 19 nt, Artificial Sequence
  Description of Artificial Sequence: Synthetic oligonucleotide
uuagcaaaagccugacggg

SEQ ID NO: 1217528 - RNA, 19 nt, Artificial Sequence
  Description of Artificial Sequence: Synthetic oligonucleotide
uguggucaaacauagccug

SEQ ID NO: 1217529 - RNA, 19 nt, Artificial Sequence
  Description of Artificial Sequence: Synthetic oligonucleotide
ugucaaauccgacaccacc

SEQ ID NO: 1217530 - RNA, 19 nt, Artificial Sequence
  Description of Artificial Sequence: Synthetic oligonucleotide
cucggaaagacaaaccgcc

SEQ ID NO: 1217531 - RNA, 19 nt, Artificial Sequence
  Description of Artificial Sequence: Synthetic oligonucleotide
aauugguucuuagcaagcg

SEQ ID NO: 1217532 - RNA, 19 nt, Artificial Sequence
  Description of Artificial Sequence: Synthetic oligonucleotide
aauuggucucaguuuaaug

SEQ ID NO: 1217533 - RNA, 19 nt, Artificial Sequence
  Description of Artificial Sequence: Synthetic oligonucleotide
ugagcugguaaucaacagc

SEQ ID NO: 1217534 - RNA, 19 nt, Artificial Sequence
  Description of Artificial Sequence: Synthetic oligonucleotide
aauuacggcgagauuuugc

SEQ ID NO: 1217535 - RNA, 19 nt, Artificial Sequence
  Description of Artificial Sequence: Synthetic oligonucleotide
guuaaugucaaauccgaca

SEQ ID NO: 1217536 - RNA, 19 nt, Artificial Sequence
  Description of Artificial Sequence: Synthetic oligonucleotide
uagaagagcgauuaaccca

SEQ ID NO: 1217537 - RNA, 19 nt, Artificial Sequence
  Description of Artificial Sequence: Synthetic oligonucleotide
uuagcaagcggacaccaca

SEQ ID NO: 1217538 - RNA, 19 nt, Artificial Sequence
  Description of Artificial Sequence: Synthetic oligonucleotide
cuauggcaaauccauagcc

SEQ ID NO: 1217539 - RNA, 19 nt, Artificial Sequence
  Description of Artificial Sequence: Synthetic oligonucleotide
ucggucauugacuauaauc

SEQ ID NO: 1217540 - RNA, 19 nt, Artificial Sequence
  Description of Artificial Sequence: Synthetic oligonucleotide
aagcccaauagaccgauga

SEQ ID NO: 1217541 - RNA, 19 nt, Artificial Sequence
  Description of Artificial Sequence: Synthetic oligonucleotide
ugacggguuaagaagguca

SEQ ID NO: 1217542 - RNA, 19 nt, Artificial Sequence
  Description of Artificial Sequence: Synthetic oligonucleotide
auugguucuuagcaagcgg

SEQ ID NO: 1217543 - RNA, 19 nt, Artificial Sequence
  Description of Artificial Sequence: Synthetic oligonucleotide
uugguucuuagcaagcgga

SEQ ID NO: 1217544 - RNA, 19 nt, Artificial Sequence
  Description of Artificial Sequence: Synthetic oligonucleotide
auuacggcgagauuuugcu

SEQ ID NO: 1217545 - RNA, 19 nt, Artificial Sequence
  Description of Artificial Sequence: Synthetic oligonucleotide
agaccgaugaacaaucccg

SEQ ID NO: 1217546 - RNA, 19 nt, Artificial Sequence
  Description of Artificial Sequence: Synthetic oligonucleotide
agcacaagccaacugucgg

SEQ ID NO: 1217547 - RNA, 19 nt, Artificial Sequence
  Description of Artificial Sequence: Synthetic oligonucleotide
aauccgacaccaccugggg

SEQ ID NO: 1217548 - RNA, 19 nt, Artificial Sequence
  Description of Artificial Sequence: Synthetic oligonucleotide
uguucccuauggcaaaucc

SEQ ID NO: 1217549 - RNA, 19 nt, Artificial Sequence
  Description of Artificial Sequence: Synthetic oligonucleotide
gucggucacauucuuauag

SEQ ID NO: 1217550 - RNA, 19 nt, Artificial Sequence
  Description of Artificial Sequence: Synthetic oligonucleotide
aacacggauugcaauuccc

SEQ ID NO: 1217551 - RNA, 19 nt, Artificial Sequence
  Description of Artificial Sequence: Synthetic oligonucleotide
uuggaucccaccccaacag

SEQ ID NO: 1217552 - RNA, 19 nt, Artificial Sequence
  Description of Artificial Sequence: Synthetic oligonucleotide
auagugguugccugcuccc

SEQ ID NO: 1217553 - RNA, 19 nt, Artificial Sequence
  Description of Artificial Sequence: Synthetic oligonucleotide
cagagcaucauucacauaa

SEQ ID NO: 1217554 - RNA, 19 nt, Artificial Sequence
  Description of Artificial Sequence: Synthetic oligonucleotide
ucauagaagagcgauuaac

SEQ ID NO: 1217555 - RNA, 19 nt, Artificial Sequence
  Description of Artificial Sequence: Synthetic oligonucleotide
aaauccgacaccaccuggg

SEQ ID NO: 1217556 - RNA, 19 nt, Artificial Sequence
  Description of Artificial Sequence: Synthetic oligonucleotide
gucagaacauaacuacagg

SEQ ID NO: 1217557 - RNA, 19 nt, Artificial Sequence
  Description of Artificial Sequence: Synthetic oligonucleotide
acuauaaucuugucucucu

SEQ ID NO: 1217558 - RNA, 19 nt, Artificial Sequence
  Description of Artificial Sequence: Synthetic oligonucleotide
ucggucacauucuuauagg

SEQ ID NO: 1217559 - RNA, 19 nt, Artificial Sequence
  Description of Artificial Sequence: Synthetic oligonucleotide
aaugaguggguggugagga

SEQ ID NO: 1217560 - RNA, 19 nt, Artificial Sequence
  Description of Artificial Sequence: Synthetic oligonucleotide
uuuggcgauauugugagaa

SEQ ID NO: 1217561 - RNA, 19 nt, Artificial Sequence
  Description of Artificial Sequence: Synthetic oligonucleotide
uuuugcucgggacaacgca

SEQ ID NO: 1217562 - RNA, 19 nt, Artificial Sequence
  Description of Artificial Sequence: Synthetic oligonucleotide
cacaacgucggucacauuc

SEQ ID NO: 1217563 - RNA, 19 nt, Artificial Sequence
  Description of Artificial Sequence: Synthetic oligonucleotide
agaagagcgauuaacccag

SEQ ID NO: 1217564 - RNA, 19 nt, Artificial Sequence
  Description of Artificial Sequence: Synthetic oligonucleotide
acagcaauuggucucaguu

SEQ ID NO: 1217565 - RNA, 19 nt, Artificial Sequence
  Description of Artificial Sequence: Synthetic oligonucleotide
uucccuauggcaaauccau

SEQ ID NO: 1217566 - RNA, 19 nt, Artificial Sequence
  Description of Artificial Sequence: Synthetic oligonucleotide
aaucacaugcagguccagg

SEQ ID NO: 1217567 - RNA, 19 nt, Artificial Sequence
  Description of Artificial Sequence: Synthetic oligonucleotide
aucguuguagcugcgacuc

SEQ ID NO: 1217568 - RNA, 19 nt, Artificial Sequence
  Description of Artificial Sequence: Synthetic oligonucleotide
aaagacaaaccgccgcgcu

SEQ ID NO: 1217569 - RNA, 19 nt, Artificial Sequence
  Description of Artificial Sequence: Synthetic oligonucleotide
cuacagguucccauggugc

SEQ ID NO: 1217570 - RNA, 19 nt, Artificial Sequence
  Description of Artificial Sequence: Synthetic oligonucleotide
ucaaauccgacaccaccug

SEQ ID NO: 1217571 - RNA, 19 nt, Artificial Sequence
  Description of Artificial Sequence: Synthetic oligonucleotide
ucggaaagacaaaccgccg

SEQ ID NO: 1217572 - RNA, 19 nt, Artificial Sequence
  Description of Artificial Sequence: Synthetic oligonucleotide
acaacgcacgacccgcucc

SEQ ID NO: 1217573 - RNA, 19 nt, Artificial Sequence
  Description of Artificial Sequence: Synthetic oligonucleotide
uccuucaaccugcauguug

SEQ ID NO: 1217574 - RNA, 19 nt, Artificial Sequence
  Description of Artificial Sequence: Synthetic oligonucleotide
agagcgauuaacccaggca

SEQ ID NO: 1217575 - RNA, 19 nt, Artificial Sequence
  Description of Artificial Sequence: Synthetic oligonucleotide
accaauaagcacugguugu

SEQ ID NO: 1217576 - RNA, 19 nt, Artificial Sequence
  Description of Artificial Sequence: Synthetic oligonucleotide
aauccauagcccgagugga

SEQ ID NO: 1217577 - RNA, 19 nt, Artificial Sequence
  Description of Artificial Sequence: Synthetic oligonucleotide
acuacagguucccauggug

SEQ ID NO: 1217578 - RNA, 19 nt, Artificial Sequence
  Description of Artificial Sequence: Synthetic oligonucleotide
uuugcucgggacaacgcac

SEQ ID NO: 1217579 - RNA, 19 nt, Artificial Sequence
  Description of Artificial Sequence: Synthetic oligonucleotide
auggucgaugcccauuuuc

SEQ ID NO: 1217580 - RNA, 19 nt, Artificial Sequence
  Description of Artificial Sequence: Synthetic oligonucleotide
cauagugguugccugcucc

SEQ ID NO: 1217581 - RNA, 19 nt, Artificial Sequence
  Description of Artificial Sequence: Synthetic oligonucleotide
uaaauuacggcgagauuuu

SEQ ID NO: 1217582 - RNA, 19 nt, Artificial Sequence
  Description of Artificial Sequence: Synthetic oligonucleotide
uggucgaugcccauuuucu

SEQ ID NO: 1217583 - RNA, 19 nt, Artificial Sequence
  Description of Artificial Sequence: Synthetic oligonucleotide
agccugacggguuaagaag

SEQ ID NO: 1217584 - RNA, 19 nt, Artificial Sequence
  Description of Artificial Sequence: Synthetic oligonucleotide
ggaaagacaaaccgccgcg

SEQ ID NO: 1217585 - RNA, 19 nt, Artificial Sequence
  Description of Artificial Sequence: Synthetic oligonucleotide
aagacaaaccgccgcgcug

SEQ ID NO: 1217586 - RNA, 19 nt, Artificial Sequence
  Description of Artificial Sequence: Synthetic oligonucleotide
caccaauaagcacugguug

SEQ ID NO: 1217587 - RNA, 19 nt, Artificial Sequence
  Description of Artificial Sequence: Synthetic oligonucleotide
uagcaagcggacaccacag

SEQ ID NO: 1217588 - RNA, 19 nt, Artificial Sequence
  Description of Artificial Sequence: Synthetic oligonucleotide
aagccugacggguuaagaa

SEQ ID NO: 1217589 - RNA, 19 nt, Artificial Sequence
  Description of Artificial Sequence: Synthetic oligonucleotide
cuaccagugcaucuguggc

SEQ ID NO: 1217590 - RNA, 19 nt, Artificial Sequence
  Description of Artificial Sequence: Synthetic oligonucleotide
ugaggcaacacggauugca

SEQ ID NO: 1217591 - RNA, 19 nt, Artificial Sequence
  Description of Artificial Sequence: Synthetic oligonucleotide
cucgggacaacgcacgacc

SEQ ID NO: 1217592 - RNA, 19 nt, Artificial Sequence
  Description of Artificial Sequence: Synthetic oligonucleotide
auuaacccaggcauaguuc

SEQ ID NO: 1217593 - RNA, 19 nt, Artificial Sequence
  Description of Artificial Sequence: Synthetic oligonucleotide
uugcucgggacaacgcacg

SEQ ID NO: 1217594 - RNA, 19 nt, Artificial Sequence
  Description of Artificial Sequence: Synthetic oligonucleotide
aucuaaauuacggcgagau

SEQ ID NO: 1217595 - RNA, 19 nt, Artificial Sequence
  Description of Artificial Sequence: Synthetic oligonucleotide
aguuaaugucaaauccgac

SEQ ID NO: 1217596 - RNA, 19 nt, Artificial Sequence
  Description of Artificial Sequence: Synthetic oligonucleotide
aagcggacaccacaguuaa

SEQ ID NO: 1217597 - RNA, 19 nt, Artificial Sequence
  Description of Artificial Sequence: Synthetic oligonucleotide
gaugaacaaucccgggcag

SEQ ID NO: 1217598 - RNA, 19 nt, Artificial Sequence
  Description of Artificial Sequence: Synthetic oligonucleotide
uuauggucgaugcccauuu

SEQ ID NO: 1217599 - RNA, 19 nt, Artificial Sequence
  Description of Artificial Sequence: Synthetic oligonucleotide
ccuucaaauagucuugccc

SEQ ID NO: 1217600 - RNA, 19 nt, Artificial Sequence
  Description of Artificial Sequence: Synthetic oligonucleotide
cuaaauugguucuuagcaa

SEQ ID NO: 1217601 - RNA, 19 nt, Artificial Sequence
  Description of Artificial Sequence: Synthetic oligonucleotide
gaccgaugaacaaucccgg

SEQ ID NO: 1217602 - RNA, 19 nt, Artificial Sequence
  Description of Artificial Sequence: Synthetic oligonucleotide
gguuaagaaggucauagaa

SEQ ID NO: 1217603 - RNA, 19 nt, Artificial Sequence
  Description of Artificial Sequence: Synthetic oligonucleotide
uggcucuacccuuuaauaa

SEQ ID NO: 1217604 - RNA, 19 nt, Artificial Sequence
  Description of Artificial Sequence: Synthetic oligonucleotide
caguuaaugucaaauccga

SEQ ID NO: 1217605 - RNA, 19 nt, Artificial Sequence
  Description of Artificial Sequence: Synthetic oligonucleotide
auaacagcaauuggucuca

SEQ ID NO: 1217606 - RNA, 19 nt, Artificial Sequence
  Description of Artificial Sequence: Synthetic oligonucleotide
uccgucaugccuuguucag

SEQ ID NO: 1217607 - RNA, 19 nt, Artificial Sequence
  Description of Artificial Sequence: Synthetic oligonucleotide
auagaccgaugaacaaucc

SEQ ID NO: 1217608 - RNA, 19 nt, Artificial Sequence
  Description of Artificial Sequence: Synthetic oligonucleotide
uguccagugagcugguaau

SEQ ID NO: 1217609 - RNA, 19 nt, Artificial Sequence
  Description of Artificial Sequence: Synthetic oligonucleotide
aacuacagguucccauggu

SEQ ID NO: 1217610 - RNA, 19 nt, Artificial Sequence
  Description of Artificial Sequence: Synthetic oligonucleotide
ugccccuuauggucgaugc

SEQ ID NO: 1217611 - RNA, 19 nt, Artificial Sequence
  Description of Artificial Sequence: Synthetic oligonucleotide
ggauaccacugcuucaggg

SEQ ID NO: 1217612 - RNA, 19 nt, Artificial Sequence
  Description of Artificial Sequence: Synthetic oligonucleotide
caaauccgacaccaccugg

SEQ ID NO: 1217613 - RNA, 19 nt, Artificial Sequence
  Description of Artificial Sequence: Synthetic oligonucleotide
aaauuacggcgagauuuug

SEQ ID NO: 1217614 - RNA, 19 nt, Artificial Sequence
  Description of Artificial Sequence: Synthetic oligonucleotide
ucuuagcaagcggacacca

SEQ ID NO: 1217615 - RNA, 19 nt, Artificial Sequence
  Description of Artificial Sequence: Synthetic oligonucleotide
ugguucuuagcaagcggac

SEQ ID NO: 1217616 - RNA, 19 nt, Artificial Sequence
  Description of Artificial Sequence: Synthetic oligonucleotide
uucacaacgucggucacau

SEQ ID NO: 1217617 - RNA, 19 nt, Artificial Sequence
  Description of Artificial Sequence: Synthetic oligonucleotide
uccagugagcugguaauca

SEQ ID NO: 1217618 - RNA, 19 nt, Artificial Sequence
  Description of Artificial Sequence: Synthetic oligonucleotide
ucuaaauuacggcgagauu

SEQ ID NO: 1217619 - RNA, 19 nt, Artificial Sequence
  Description of Artificial Sequence: Synthetic oligonucleotide
gagcacaagccaacugucg

SEQ ID NO: 1217620 - RNA, 19 nt, Artificial Sequence
  Description of Artificial Sequence: Synthetic oligonucleotide
uagcaaaagccugacgggu

SEQ ID NO: 1217621 - RNA, 19 nt, Artificial Sequence
  Description of Artificial Sequence: Synthetic oligonucleotide
gagcgauuaacccaggcau

SEQ ID NO: 1217622 - RNA, 19 nt, Artificial Sequence
  Description of Artificial Sequence: Synthetic oligonucleotide
aaucuaaauuacggcgaga

SEQ ID NO: 1217623 - RNA, 19 nt, Artificial Sequence
  Description of Artificial Sequence: Synthetic oligonucleotide
gguaaucaacagcaaugag

SEQ ID NO: 1217624 - RNA, 19 nt, Artificial Sequence
  Description of Artificial Sequence: Synthetic oligonucleotide
cacuuuggcgauauuguga

SEQ ID NO: 1217625 - RNA, 19 nt, Artificial Sequence
  Description of Artificial Sequence: Synthetic oligonucleotide
uggcgauauugugagaaac

SEQ ID NO: 1217626 - RNA, 19 nt, Artificial Sequence
  Description of Artificial Sequence: Synthetic oligonucleotide
ggcucuacccuuuaauaac

SEQ ID NO: 1217627 - RNA, 19 nt, Artificial Sequence
  Description of Artificial Sequence: Synthetic oligonucleotide
ucuccgucaugccuuguuc

SEQ ID NO: 1217628 - RNA, 19 nt, Artificial Sequence
  Description of Artificial Sequence: Synthetic oligonucleotide
uugggcacgaagcccuucu

SEQ ID NO: 1217629 - RNA, 19 nt, Artificial Sequence
  Description of Artificial Sequence: Synthetic oligonucleotide
uucugcauagugguugccu

SEQ ID NO: 1217630 - RNA, 19 nt, Artificial Sequence
  Description of Artificial Sequence: Synthetic oligonucleotide
uggcaaauccauagcccga

SEQ ID NO: 1217631 - RNA, 19 nt, Artificial Sequence
  Description of Artificial Sequence: Synthetic oligonucleotide
ucaucuaaauugguucuua

SEQ ID NO: 1217632 - RNA, 19 nt, Artificial Sequence
  Description of Artificial Sequence: Synthetic oligonucleotide
ccaacugucggucauugac

SEQ ID NO: 1217633 - RNA, 19 nt, Artificial Sequence
  Description of Artificial Sequence: Synthetic oligonucleotide
uccauagcccgaguggaca

SEQ ID NO: 1217634 - RNA, 19 nt, Artificial Sequence
  Description of Artificial Sequence: Synthetic oligonucleotide
cccuauggcaaauccauag

SEQ ID NO: 1217635 - RNA, 19 nt, Artificial Sequence
  Description of Artificial Sequence: Synthetic oligonucleotide
gcagguguucacaacgucg

SEQ ID NO: 1217636 - RNA, 19 nt, Artificial Sequence
  Description of Artificial Sequence: Synthetic oligonucleotide
cucucagagaccaguccac

SEQ ID NO: 1217637 - RNA, 19 nt, Artificial Sequence
  Description of Artificial Sequence: Synthetic oligonucleotide
cauaaaucacaugcagguc

SEQ ID NO: 1217638 - RNA, 19 nt, Artificial Sequence
  Description of Artificial Sequence: Synthetic oligonucleotide
auguggucaaacauagccu

SEQ ID NO: 1217639 - RNA, 19 nt, Artificial Sequence
  Description of Artificial Sequence: Synthetic oligonucleotide
caacacggauugcaauucc

SEQ ID NO: 1217640 - RNA, 19 nt, Artificial Sequence
  Description of Artificial Sequence: Synthetic oligonucleotide
ugucggucauugacuauaa

SEQ ID NO: 1217641 - RNA, 19 nt, Artificial Sequence
  Description of Artificial Sequence: Synthetic oligonucleotide
ucgggacaacgcacgaccc

SEQ ID NO: 1217642 - RNA, 19 nt, Artificial Sequence
  Description of Artificial Sequence: Synthetic oligonucleotide
accuuuggaucccacccca

SEQ ID NO: 1217643 - RNA, 19 nt, Artificial Sequence
  Description of Artificial Sequence: Synthetic oligonucleotide
cuucaaccugcauguuggg

SEQ ID NO: 1217644 - RNA, 19 nt, Artificial Sequence
  Description of Artificial Sequence: Synthetic oligonucleotide
uacccuucucucagagacc

SEQ ID NO: 1217645 - RNA, 19 nt, Artificial Sequence
  Description of Artificial Sequence: Synthetic oligonucleotide
ggagggaaagcgcgggugg

SEQ ID NO: 1217646 - RNA, 19 nt, Artificial Sequence
  Description of Artificial Sequence: Synthetic oligonucleotide
gcauucauugggaugacac

SEQ ID NO: 1217647 - RNA, 19 nt, Artificial Sequence
  Description of Artificial Sequence: Synthetic oligonucleotide
cauuccuuaauuccucaaa

SEQ ID NO: 1217648 - RNA, 19 nt, Artificial Sequence
  Description of Artificial Sequence: Synthetic oligonucleotide
auaaccagcuugggugagg

SEQ ID NO: 1217649 - RNA, 19 nt, Artificial Sequence
  Description of Artificial Sequence: Synthetic oligonucleotide
ucauugggaugacaccuuu

SEQ ID NO: 1217650 - RNA, 19 nt, Artificial Sequence
  Description of Artificial Sequence: Synthetic oligonucleotide
agcguucucuccuugccau

SEQ ID NO: 1217651 - RNA, 19 nt, Artificial Sequence
  Description of Artificial Sequence: Synthetic oligonucleotide
agacaaaccgccgcgcugu

SEQ ID NO: 1217652 - RNA, 19 nt, Artificial Sequence
  Description of Artificial Sequence: Synthetic oligonucleotide
agcaaugagugggugguga

SEQ ID NO: 1217653 - RNA, 19 nt, Artificial Sequence
  Description of Artificial Sequence: Synthetic oligonucleotide
cuuagcaagcggacaccac

SEQ ID NO: 1217654 - RNA, 19 nt, Artificial Sequence
  Description of Artificial Sequence: Synthetic oligonucleotide
cugugcaccagcagcguuc

SEQ ID NO: 1217655 - RNA, 19 nt, Artificial Sequence
  Description of Artificial Sequence: Synthetic oligonucleotide
gaguggacaucaggaagcc

SEQ ID NO: 1217656 - RNA, 19 nt, Artificial Sequence
  Description of Artificial Sequence: Synthetic oligonucleotide
acggauugcaauucccaua

SEQ ID NO: 1217657 - RNA, 19 nt, Artificial Sequence
  Description of Artificial Sequence: Synthetic oligonucleotide
acggcgagauuuugcucgg

SEQ ID NO: 1217658 - RNA, 19 nt, Artificial Sequence
  Description of Artificial Sequence: Synthetic oligonucleotide
ucaaauagucuugccccuc

SEQ ID NO: 1217659 - RNA, 19 nt, Artificial Sequence
  Description of Artificial Sequence: Synthetic oligonucleotide
ucucaguuuaauggccuuc

SEQ ID NO: 1217660 - RNA, 19 nt, Artificial Sequence
  Description of Artificial Sequence: Synthetic oligonucleotide
uggggauaccacugcuuca

SEQ ID NO: 1217661 - RNA, 19 nt, Artificial Sequence
  Description of Artificial Sequence: Synthetic oligonucleotide
acaucgcucucaucuaaau

SEQ ID NO: 1217662 - RNA, 19 nt, Artificial Sequence
  Description of Artificial Sequence: Synthetic oligonucleotide
cccaauagaccgaugaaca

SEQ ID NO: 1217663 - RNA, 19 nt, Artificial Sequence
  Description of Artificial Sequence: Synthetic oligonucleotide
aaaccgccgcgcuguccac

SEQ ID NO: 1217664 - RNA, 19 nt, Artificial Sequence
  Description of Artificial Sequence: Synthetic oligonucleotide
uagcuaccagugcaucugu

SEQ ID NO: 1217665 - RNA, 19 nt, Artificial Sequence
  Description of Artificial Sequence: Synthetic oligonucleotide
ccuauggcaaauccauagc

SEQ ID NO: 1217666 - RNA, 19 nt, Artificial Sequence
  Description of Artificial Sequence: Synthetic oligonucleotide
ucgucagggguuguguuaa

SEQ ID NO: 1217667 - RNA, 19 nt, Artificial Sequence
  Description of Artificial Sequence: Synthetic oligonucleotide
cgcucggaaagacaaaccg

SEQ ID NO: 1217668 - RNA, 19 nt, Artificial Sequence
  Description of Artificial Sequence: Synthetic oligonucleotide
gagaccuuauuggggucag

SEQ ID NO: 1217669 - RNA, 19 nt, Artificial Sequence
  Description of Artificial Sequence: Synthetic oligonucleotide
uuacggcgagauuuugcuc

SEQ ID NO: 1217670 - RNA, 19 nt, Artificial Sequence
  Description of Artificial Sequence: Synthetic oligonucleotide
acaacgucggucacauucu

SEQ ID NO: 1217671 - RNA, 19 nt, Artificial Sequence
  Description of Artificial Sequence: Synthetic oligonucleotide
cauaacuacagguucccau

SEQ ID NO: 1217672 - RNA, 19 nt, Artificial Sequence
  Description of Artificial Sequence: Synthetic oligonucleotide
ggggauaccacugcuucag

SEQ ID NO: 1217673 - RNA, 19 nt, Artificial Sequence
  Description of Artificial Sequence: Synthetic oligonucleotide
cauagccugggcaaguugu

SEQ ID NO: 1217674 - RNA, 19 nt, Artificial Sequence
  Description of Artificial Sequence: Synthetic oligonucleotide
acaagccaacugucgguca

SEQ ID NO: 1217675 - RNA, 19 nt, Artificial Sequence
  Description of Artificial Sequence: Synthetic oligonucleotide
caaaccgccgcgcugucca

SEQ ID NO: 1217676 - RNA, 19 nt, Artificial Sequence
  Description of Artificial Sequence: Synthetic oligonucleotide
gguggaucccuuccugugc

SEQ ID NO: 1217677 - RNA, 19 nt, Artificial Sequence
  Description of Artificial Sequence: Synthetic oligonucleotide
ccugggugagaccuuauug

SEQ ID NO: 1217678 - RNA, 19 nt, Artificial Sequence
  Description of Artificial Sequence: Synthetic oligonucleotide
acacggauugcaauuccca

SEQ ID NO: 1217679 - RNA, 19 nt, Artificial Sequence
  Description of Artificial Sequence: Synthetic oligonucleotide
agcccaauagaccgaugaa

SEQ ID NO: 1217680 - RNA, 19 nt, Artificial Sequence
  Description of Artificial Sequence: Synthetic oligonucleotide
gcgauuaacccaggcauag

SEQ ID NO: 1217681 - RNA, 19 nt, Artificial Sequence
  Description of Artificial Sequence: Synthetic oligonucleotide
gcauacccuucucucagag

SEQ ID NO: 1217682 - RNA, 19 nt, Artificial Sequence
  Description of Artificial Sequence: Synthetic oligonucleotide
acgacccgcuccaugacag

SEQ ID NO: 1217683 - RNA, 19 nt, Artificial Sequence
  Description of Artificial Sequence: Synthetic oligonucleotide
ggucauagaagagcgauua

SEQ ID NO: 1217684 - RNA, 19 nt, Artificial Sequence
  Description of Artificial Sequence: Synthetic oligonucleotide
gucaaauccgacaccaccu

SEQ ID NO: 1217685 - RNA, 19 nt, Artificial Sequence
  Description of Artificial Sequence: Synthetic oligonucleotide
cacaagccaacugucgguc

SEQ ID NO: 1217686 - RNA, 19 nt, Artificial Sequence
  Description of Artificial Sequence: Synthetic oligonucleotide
aggagggaaagcgcgggug

SEQ ID NO: 1217687 - RNA, 19 nt, Artificial Sequence
  Description of Artificial Sequence: Synthetic oligonucleotide
caagcggacaccacaguua

SEQ ID NO: 1217688 - RNA, 19 nt, Artificial Sequence
  Description of Artificial Sequence: Synthetic oligonucleotide
gcuacuugguggcccaagc

SEQ ID NO: 1217689 - RNA, 19 nt, Artificial Sequence
  Description of Artificial Sequence: Synthetic oligonucleotide
ugcgacucauggcggcggc

SEQ ID NO: 1217690 - RNA, 19 nt, Artificial Sequence
  Description of Artificial Sequence: Synthetic oligonucleotide
guucccuauggcaaaucca

SEQ ID NO: 1217691 - RNA, 19 nt, Artificial Sequence
  Description of Artificial Sequence: Synthetic oligonucleotide
cggguuaagaaggucauag

SEQ ID NO: 1217692 - RNA, 19 nt, Artificial Sequence
  Description of Artificial Sequence: Synthetic oligonucleotide
ugcucgggacaacgcacga

SEQ ID NO: 1217693 - RNA, 19 nt, Artificial Sequence
  Description of Artificial Sequence: Synthetic oligonucleotide
gacgcgauccgagcacaag

SEQ ID NO: 1217694 - RNA, 19 nt, Artificial Sequence
  Description of Artificial Sequence: Synthetic oligonucleotide
cuggggacgcgauccgagc

SEQ ID NO: 1217695 - RNA, 19 nt, Artificial Sequence
  Description of Artificial Sequence: Synthetic oligonucleotide
aaccugcauguugggcacg

SEQ ID NO: 1217696 - RNA, 19 nt, Artificial Sequence
  Description of Artificial Sequence: Synthetic oligonucleotide
uuauuggggucagcuugca

SEQ ID NO: 1217697 - RNA, 19 nt, Artificial Sequence
  Description of Artificial Sequence: Synthetic oligonucleotide
ccgaguggacaucaggaag

SEQ ID NO: 1217698 - RNA, 19 nt, Artificial Sequence
  Description of Artificial Sequence: Synthetic oligonucleotide
gcaaugaguggguggugag

SEQ ID NO: 1217699 - RNA, 19 nt, Artificial Sequence
  Description of Artificial Sequence: Synthetic oligonucleotide
accuuauuggggucagcuu

SEQ ID NO: 1217700 - RNA, 19 nt, Artificial Sequence
  Description of Artificial Sequence: Synthetic oligonucleotide
ucccuauggcaaauccaua

SEQ ID NO: 1217701 - RNA, 19 nt, Artificial Sequence
  Description of Artificial Sequence: Synthetic oligonucleotide
agaccuuauuggggucagc

SEQ ID NO: 1217702 - RNA, 19 nt, Artificial Sequence
  Description of Artificial Sequence: Synthetic oligonucleotide
cuccgucaugccuuguuca

SEQ ID NO: 1217703 - RNA, 19 nt, Artificial Sequence
  Description of Artificial Sequence: Synthetic oligonucleotide
gcucggaaagacaaaccgc

SEQ ID NO: 1217704 - RNA, 19 nt, Artificial Sequence
  Description of Artificial Sequence: Synthetic oligonucleotide
ucguuguagcugcgacuca

SEQ ID NO: 1217705 - RNA, 19 nt, Artificial Sequence
  Description of Artificial Sequence: Synthetic oligonucleotide
guuguagcugcgacucaug

SEQ ID NO: 1217706 - RNA, 19 nt, Artificial Sequence
  Description of Artificial Sequence: Synthetic oligonucleotide
ccccuuauggucgaugccc

SEQ ID NO: 1217707 - RNA, 19 nt, Artificial Sequence
  Description of Artificial Sequence: Synthetic oligonucleotide
agcaagcggacaccacagu

SEQ ID NO: 1217708 - RNA, 19 nt, Artificial Sequence
  Description of Artificial Sequence: Synthetic oligonucleotide
agcgcggguggaucccuuc

SEQ ID NO: 1217709 - RNA, 19 nt, Artificial Sequence
  Description of Artificial Sequence: Synthetic oligonucleotide
aaagcgcggguggaucccu

SEQ ID NO: 1217710 - RNA, 19 nt, Artificial Sequence
  Description of Artificial Sequence: Synthetic oligonucleotide
gacaacgcacgacccgcuc

SEQ ID NO: 1217711 - RNA, 19 nt, Artificial Sequence
  Description of Artificial Sequence: Synthetic oligonucleotide
ggcgauauugugagaaaca

SEQ ID NO: 1217712 - RNA, 19 nt, Artificial Sequence
  Description of Artificial Sequence: Synthetic oligonucleotide
gcagcguucucuccuugcc

SEQ ID NO: 1217713 - RNA, 19 nt, Artificial Sequence
  Description of Artificial Sequence: Synthetic oligonucleotide
gaagcccuucuugauucuc

SEQ ID NO: 1217714 - RNA, 19 nt, Artificial Sequence
  Description of Artificial Sequence: Synthetic oligonucleotide
gccaguuugucuaagacau

SEQ ID NO: 1217715 - RNA, 19 nt, Artificial Sequence
  Description of Artificial Sequence: Synthetic oligonucleotide
gcgagauuuugcucgggac

SEQ ID NO: 1217716 - RNA, 19 nt, Artificial Sequence
  Description of Artificial Sequence: Synthetic oligonucleotide
gucauagaagagcgauuaa

SEQ ID NO: 1217717 - RNA, 19 nt, Artificial Sequence
  Description of Artificial Sequence: Synthetic oligonucleotide
gaagcaggcgggagcuccc

SEQ ID NO: 1217718 - RNA, 19 nt, Artificial Sequence
  Description of Artificial Sequence: Synthetic oligonucleotide
cauacccuucucucagaga

SEQ ID NO: 1217719 - RNA, 19 nt, Artificial Sequence
  Description of Artificial Sequence: Synthetic oligonucleotide
gggacaacgcacgacccgc

SEQ ID NO: 1217720 - RNA, 19 nt, Artificial Sequence
  Description of Artificial Sequence: Synthetic oligonucleotide
ccacuuuggcgauauugug

SEQ ID NO: 1217721 - RNA, 19 nt, Artificial Sequence
  Description of Artificial Sequence: Synthetic oligonucleotide
ggguuaagaaggucauaga

SEQ ID NO: 1217722 - RNA, 19 nt, Artificial Sequence
  Description of Artificial Sequence: Synthetic oligonucleotide
aggucuccgucaugccuug

SEQ ID NO: 1217723 - RNA, 19 nt, Artificial Sequence
  Description of Artificial Sequence: Synthetic oligonucleotide
acugucggucauugacuau

SEQ ID NO: 1217724 - RNA, 19 nt, Artificial Sequence
  Description of Artificial Sequence: Synthetic oligonucleotide
ccaauaagcacugguuguc

SEQ ID NO: 1217725 - RNA, 19 nt, Artificial Sequence
  Description of Artificial Sequence: Synthetic oligonucleotide
caauagaccgaugaacaau

SEQ ID NO: 1217726 - RNA, 19 nt, Artificial Sequence
  Description of Artificial Sequence: Synthetic oligonucleotide
cugucggucauugacuaua

SEQ ID NO: 1217727 - RNA, 19 nt, Artificial Sequence
  Description of Artificial Sequence: Synthetic oligonucleotide
guucacaacgucggucaca

SEQ ID NO: 1217728 - RNA, 19 nt, Artificial Sequence
  Description of Artificial Sequence: Synthetic oligonucleotide
gguucuuagcaagcggaca

SEQ ID NO: 1217729 - RNA, 19 nt, Artificial Sequence
  Description of Artificial Sequence: Synthetic oligonucleotide
aacgucggucacauucuua

SEQ ID NO: 1217730 - RNA, 19 nt, Artificial Sequence
  Description of Artificial Sequence: Synthetic oligonucleotide
guggcuacuugguggccca

SEQ ID NO: 1217731 - RNA, 19 nt, Artificial Sequence
  Description of Artificial Sequence: Synthetic oligonucleotide
caacgcacgacccgcucca

SEQ ID NO: 1217732 - RNA, 19 nt, Artificial Sequence
  Description of Artificial Sequence: Synthetic oligonucleotide
cugacggguuaagaagguc

SEQ ID NO: 1217733 - RNA, 19 nt, Artificial Sequence
  Description of Artificial Sequence: Synthetic oligonucleotide
aggucgucagggguugugu

SEQ ID NO: 1217734 - RNA, 19 nt, Artificial Sequence
  Description of Artificial Sequence: Synthetic oligonucleotide
gaagcccaauagaccgaug

SEQ ID NO: 1217735 - RNA, 19 nt, Artificial Sequence
  Description of Artificial Sequence: Synthetic oligonucleotide
caaauagucuugccccucu

SEQ ID NO: 1217736 - RNA, 19 nt, Artificial Sequence
  Description of Artificial Sequence: Synthetic oligonucleotide
ccauggugccaccaauaag

SEQ ID NO: 1217737 - RNA, 19 nt, Artificial Sequence
  Description of Artificial Sequence: Synthetic oligonucleotide
gucgucagggguuguguua

SEQ ID NO: 1217738 - RNA, 19 nt, Artificial Sequence
  Description of Artificial Sequence: Synthetic oligonucleotide
gcaacacggauugcaauuc

SEQ ID NO: 1217739 - RNA, 19 nt, Artificial Sequence
  Description of Artificial Sequence: Synthetic oligonucleotide
ggcgagauuuugcucggga

SEQ ID NO: 1217740 - RNA, 19 nt, Artificial Sequence
  Description of Artificial Sequence: Synthetic oligonucleotide
cacaucgcucucaucuaaa

SEQ ID NO: 1217741 - RNA, 19 nt, Artificial Sequence
  Description of Artificial Sequence: Synthetic oligonucleotide
cgcgauccgagcacaagcc

SEQ ID NO: 1217742 - RNA, 19 nt, Artificial Sequence
  Description of Artificial Sequence: Synthetic oligonucleotide
agcgauuaacccaggcaua

SEQ ID NO: 1217743 - RNA, 19 nt, Artificial Sequence
  Description of Artificial Sequence: Synthetic oligonucleotide
acgcacgacccgcuccaug

SEQ ID NO: 1217744 - RNA, 19 nt, Artificial Sequence
  Description of Artificial Sequence: Synthetic oligonucleotide
ggaucccaccccaacagga

SEQ ID NO: 1217745 - RNA, 19 nt, Artificial Sequence
  Description of Artificial Sequence: Synthetic oligonucleotide
auccgagcacaagccaacu

SEQ ID NO: 1217746 - RNA, 19 nt, Artificial Sequence
  Description of Artificial Sequence: Synthetic oligonucleotide
ggaucccuuccugugcacc

SEQ ID NO: 1217747 - RNA, 19 nt, Artificial Sequence
  Description of Artificial Sequence: Synthetic oligonucleotide
caucguuguagcugcgacu

SEQ ID NO: 1217748 - RNA, 19 nt, Artificial Sequence
  Description of Artificial Sequence: Synthetic oligonucleotide
guggaucaucacacacacc

SEQ ID NO: 1217749 - RNA, 19 nt, Artificial Sequence
  Description of Artificial Sequence: Synthetic oligonucleotide
gacggguuaagaaggucau

SEQ ID NO: 1217750 - RNA, 19 nt, Artificial Sequence
  Description of Artificial Sequence: Synthetic oligonucleotide
cccggcuccgcucggaaag

SEQ ID NO: 1217751 - RNA, 19 nt, Artificial Sequence
  Description of Artificial Sequence: Synthetic oligonucleotide
cgagauuuugcucgggaca

SEQ ID NO: 1217752 - RNA, 19 nt, Artificial Sequence
  Description of Artificial Sequence: Synthetic oligonucleotide
cagcguucucuccuugcca

SEQ ID NO: 1217753 - RNA, 19 nt, Artificial Sequence
  Description of Artificial Sequence: Synthetic oligonucleotide
gccaccaauaagcacuggu

SEQ ID NO: 1217754 - RNA, 19 nt, Artificial Sequence
  Description of Artificial Sequence: Synthetic oligonucleotide
aggucauagaagagcgauu

SEQ ID NO: 1217755 - RNA, 19 nt, Artificial Sequence
  Description of Artificial Sequence: Synthetic oligonucleotide
ggcagguguucacaacguc

SEQ ID NO: 1217756 - RNA, 19 nt, Artificial Sequence
  Description of Artificial Sequence: Synthetic oligonucleotide
ggcaacacggauugcaauu

SEQ ID NO: 1217757 - RNA, 19 nt, Artificial Sequence
  Description of Artificial Sequence: Synthetic oligonucleotide
gcaaaagccugacggguua

SEQ ID NO: 1217758 - RNA, 19 nt, Artificial Sequence
  Description of Artificial Sequence: Synthetic oligonucleotide
gacaaaccgccgcgcuguc

SEQ ID NO: 1217759 - RNA, 19 nt, Artificial Sequence
  Description of Artificial Sequence: Synthetic oligonucleotide
ccaauagaccgaugaacaa

SEQ ID NO: 1217760 - RNA, 19 nt, Artificial Sequence
  Description of Artificial Sequence: Synthetic oligonucleotide
cacgacccgcuccaugaca

SEQ ID NO: 1217761 - RNA, 19 nt, Artificial Sequence
  Description of Artificial Sequence: Synthetic oligonucleotide
ugccccucuggggacgcga

SEQ ID NO: 1217762 - RNA, 19 nt, Artificial Sequence
  Description of Artificial Sequence: Synthetic oligonucleotide
cccgcuccaugacagguug

SEQ ID NO: 1217763 - RNA, 19 nt, Artificial Sequence
  Description of Artificial Sequence: Synthetic oligonucleotide
gcccgaguggacaucagga

SEQ ID NO: 1217764 - RNA, 19 nt, Artificial Sequence
  Description of Artificial Sequence: Synthetic oligonucleotide
caggucgucagggguugug

SEQ ID NO: 1217765 - RNA, 19 nt, Artificial Sequence
  Description of Artificial Sequence: Synthetic oligonucleotide
gguccccaacugaggaagg

SEQ ID NO: 1217766 - RNA, 19 nt, Artificial Sequence
  Description of Artificial Sequence: Synthetic oligonucleotide
gcuccgcucggaaagacaa

SEQ ID NO: 1217767 - RNA, 19 nt, Artificial Sequence
  Description of Artificial Sequence: Synthetic oligonucleotide
cugccccuuauggucgaug

SEQ ID NO: 1217768 - RNA, 19 nt, Artificial Sequence
  Description of Artificial Sequence: Synthetic oligonucleotide
ucccggcuccgcucggaaa

SEQ ID NO: 1217769 - RNA, 19 nt, Artificial Sequence
  Description of Artificial Sequence: Synthetic oligonucleotide
gcggguggaucccuuccug

SEQ ID NO: 1217770 - RNA, 19 nt, Artificial Sequence
  Description of Artificial Sequence: Synthetic oligonucleotide
gccccuuauggucgaugcc

SEQ ID NO: 1217771 - RNA, 19 nt, Artificial Sequence
  Description of Artificial Sequence: Synthetic oligonucleotide
ccauuuucuuagcagcaua

SEQ ID NO: 1217772 - RNA, 19 nt, Artificial Sequence
  Description of Artificial Sequence: Synthetic oligonucleotide
ggcauacccuucucucaga

SEQ ID NO: 1217773 - RNA, 19 nt, Artificial Sequence
  Description of Artificial Sequence: Synthetic oligonucleotide
caaaagccugacggguuaa

SEQ ID NO: 1217774 - RNA, 19 nt, Artificial Sequence
  Description of Artificial Sequence: Synthetic oligonucleotide
gggaaagcgcggguggauc

SEQ ID NO: 1217775 - RNA, 19 nt, Artificial Sequence
  Description of Artificial Sequence: Synthetic oligonucleotide
ccgagcacaagccaacugu

SEQ ID NO: 1217776 - RNA, 19 nt, Artificial Sequence
  Description of Artificial Sequence: Synthetic oligonucleotide
cacauucuuauaggacucu

SEQ ID NO: 1217777 - RNA, 19 nt, Artificial Sequence
  Description of Artificial Sequence: Synthetic oligonucleotide
acggguuaagaaggucaua

SEQ ID NO: 1217778 - RNA, 19 nt, Artificial Sequence
  Description of Artificial Sequence: Synthetic oligonucleotide
caccucgacaggcauuccu

SEQ ID NO: 1217779 - RNA, 19 nt, Artificial Sequence
  Description of Artificial Sequence: Synthetic oligonucleotide
ggauugcaauucccauauc

SEQ ID NO: 1217780 - RNA, 19 nt, Artificial Sequence
  Description of Artificial Sequence: Synthetic oligonucleotide
cgggacaacgcacgacccg

SEQ ID NO: 1217781 - RNA, 19 nt, Artificial Sequence
  Description of Artificial Sequence: Synthetic oligonucleotide
cccuuauggucgaugccca

SEQ ID NO: 1217782 - RNA, 19 nt, Artificial Sequence
  Description of Artificial Sequence: Synthetic oligonucleotide
cggucacauucuuauagga

SEQ ID NO: 1217783 - RNA, 19 nt, Artificial Sequence
  Description of Artificial Sequence: Synthetic oligonucleotide
aacgcacgacccgcuccau

SEQ ID NO: 1217784 - RNA, 19 nt, Artificial Sequence
  Description of Artificial Sequence: Synthetic oligonucleotide
cuuauggucgaugcccauu

SEQ ID NO: 1217785 - RNA, 19 nt, Artificial Sequence
  Description of Artificial Sequence: Synthetic oligonucleotide
caucuaccacgugcugcuc

SEQ ID NO: 1217786 - RNA, 19 nt, Artificial Sequence
  Description of Artificial Sequence: Synthetic oligonucleotide
gcaagcggacaccacaguu

SEQ ID NO: 1217787 - RNA, 19 nt, Artificial Sequence
  Description of Artificial Sequence: Synthetic oligonucleotide
gcgcggguggaucccuucc

SEQ ID NO: 1217788 - RNA, 19 nt, Artificial Sequence
  Description of Artificial Sequence: Synthetic oligonucleotide
cgcacgacccgcuccauga

SEQ ID NO: 1217789 - RNA, 19 nt, Artificial Sequence
  Description of Artificial Sequence: Synthetic oligonucleotide
ccaccaauaagcacugguu

SEQ ID NO: 1217790 - RNA, 19 nt, Artificial Sequence
  Description of Artificial Sequence: Synthetic oligonucleotide
gcucaucguuguagcugcg

SEQ ID NO: 1217791 - RNA, 19 nt, Artificial Sequence
  Description of Artificial Sequence: Synthetic oligonucleotide
cccgaguggacaucaggaa

SEQ ID NO: 1217792 - RNA, 19 nt, Artificial Sequence
  Description of Artificial Sequence: Synthetic oligonucleotide
ucacaacgucggucacauu

SEQ ID NO: 1217793 - RNA, 19 nt, Artificial Sequence
  Description of Artificial Sequence: Synthetic oligonucleotide
gcaauuggucucaguuuaa

SEQ ID NO: 1217794 - RNA, 19 nt, Artificial Sequence
  Description of Artificial Sequence: Synthetic oligonucleotide
gcacgacccgcuccaugac

SEQ ID NO: 1217795 - RNA, 19 nt, Artificial Sequence
  Description of Artificial Sequence: Synthetic oligonucleotide
ggaagcccaauagaccgau

SEQ ID NO: 1217796 - RNA, 19 nt, Artificial Sequence
  Description of Artificial Sequence: Synthetic oligonucleotide
ggucgaugcccauuuucuu

SEQ ID NO: 1217797 - RNA, 19 nt, Artificial Sequence
  Description of Artificial Sequence: Synthetic oligonucleotide
gggacgcgauccgagcaca

SEQ ID NO: 1217798 - RNA, 19 nt, Artificial Sequence
  Description of Artificial Sequence: Synthetic oligonucleotide
gucggucauugacuauaau

SEQ ID NO: 1217799 - RNA, 19 nt, Artificial Sequence
  Description of Artificial Sequence: Synthetic oligonucleotide
gcaaauccauagcccgagu

SEQ ID NO: 1217800 - RNA, 19 nt, Artificial Sequence
  Description of Artificial Sequence: Synthetic oligonucleotide
caacaggaauguggucaaa

SEQ ID NO: 1217801 - RNA, 19 nt, Artificial Sequence
  Description of Artificial Sequence: Synthetic oligonucleotide
ggcuccgcucggaaagaca

SEQ ID NO: 1217802 - RNA, 19 nt, Artificial Sequence
  Description of Artificial Sequence: Synthetic oligonucleotide
agcggacaccacaguuaau

SEQ ID NO: 1217803 - RNA, 19 nt, Artificial Sequence
  Description of Artificial Sequence: Synthetic oligonucleotide
ccugacggguuaagaaggu

SEQ ID NO: 1217804 - RNA, 19 nt, Artificial Sequence
  Description of Artificial Sequence: Synthetic oligonucleotide
ggucgucagggguuguguu

SEQ ID NO: 1217805 - RNA, 19 nt, Artificial Sequence
  Description of Artificial Sequence: Synthetic oligonucleotide
caacgucggucacauucuu

SEQ ID NO: 1217806 - RNA, 19 nt, Artificial Sequence
  Description of Artificial Sequence: Synthetic oligonucleotide
cgccgcgcuguccacucgc

SEQ ID NO: 1217807 - RNA, 19 nt, Artificial Sequence
  Description of Artificial Sequence: Synthetic oligonucleotide
ccaccccaacaggaaugug

SEQ ID NO: 1217808 - RNA, 19 nt, Artificial Sequence
  Description of Artificial Sequence: Synthetic oligonucleotide
ggacaacgcacgacccgcu

SEQ ID NO: 1217809 - RNA, 19 nt, Artificial Sequence
  Description of Artificial Sequence: Synthetic oligonucleotide
ggacgcgauccgagcacaa

SEQ ID NO: 1217810 - RNA, 19 nt, Artificial Sequence
  Description of Artificial Sequence: Synthetic oligonucleotide
ccaacugaggaaggccccu

SEQ ID NO: 1217811 - RNA, 19 nt, Artificial Sequence
  Description of Artificial Sequence: Synthetic oligonucleotide
cgacaccaccuggggauac

SEQ ID NO: 1217812 - RNA, 19 nt, Artificial Sequence
  Description of Artificial Sequence: Synthetic oligonucleotide
cggcgagauuuugcucggg

SEQ ID NO: 1217813 - RNA, 19 nt, Artificial Sequence
  Description of Artificial Sequence: Synthetic oligonucleotide
cgcucucaucuaaauuggu

SEQ ID NO: 1217814 - RNA, 19 nt, Artificial Sequence
  Description of Artificial Sequence: Synthetic oligonucleotide
cguuguagcugcgacucau

SEQ ID NO: 1217815 - RNA, 19 nt, Artificial Sequence
  Description of Artificial Sequence: Synthetic oligonucleotide
ccuuauggucgaugcccau

SEQ ID NO: 1217816 - RNA, 19 nt, Artificial Sequence
  Description of Artificial Sequence: Synthetic oligonucleotide
ccgucaugccuuguucagu

SEQ ID NO: 1217817 - RNA, 19 nt, Artificial Sequence
  Description of Artificial Sequence: Synthetic oligonucleotide
cggcuccgcucggaaagac

SEQ ID NO: 1217818 - RNA, 19 nt, Artificial Sequence
  Description of Artificial Sequence: Synthetic oligonucleotide
ccggcuccgcucggaaaga

SEQ ID NO: 1217819 - RNA, 19 nt, Artificial Sequence
  Description of Artificial Sequence: Synthetic oligonucleotide
cgauuaacccaggcauagu

SEQ ID NO: 1217820 - RNA, 19 nt, Artificial Sequence
  Description of Artificial Sequence: Synthetic oligonucleotide
cgucagggguuguguuaaa

SEQ ID NO: 1217821 - RNA, 19 nt, Artificial Sequence
  Description of Artificial Sequence: Synthetic oligonucleotide
ccgacaccaccuggggaua

SEQ ID NO: 1217822 - RNA, 19 nt, Artificial Sequence
  Description of Artificial Sequence: Synthetic oligonucleotide
ccgcuccaugacagguugu

SEQ ID NO: 1217823 - RNA, 19 nt, Artificial Sequence
  Description of Artificial Sequence: Synthetic oligonucleotide
ccaggucgucagggguugu

SEQ ID NO: 1217824 - RNA, 19 nt, Artificial Sequence
  Description of Artificial Sequence: Synthetic oligonucleotide
aaauaucuuuggcagaggc

SEQ ID NO: 1217825 - RNA, 19 nt, Artificial Sequence
  Description of Artificial Sequence: Synthetic oligonucleotide
acuuaaauagccuuggguc

SEQ ID NO: 1217826 - RNA, 19 nt, Artificial Sequence
  Description of Artificial Sequence: Synthetic oligonucleotide
aaaacaacuaacccacaac

SEQ ID NO: 1217827 - RNA, 19 nt, Artificial Sequence
  Description of Artificial Sequence: Synthetic oligonucleotide
aacauagcaaauuucgaag

SEQ ID NO: 1217828 - RNA, 19 nt, Artificial Sequence
  Description of Artificial Sequence: Synthetic oligonucleotide
aaaauauuaccaacagucc

SEQ ID NO: 1217829 - RNA, 19 nt, Artificial Sequence
  Description of Artificial Sequence: Synthetic oligonucleotide
aaucucuagauacaaagca

SEQ ID NO: 1217830 - RNA, 19 nt, Artificial Sequence
  Description of Artificial Sequence: Synthetic oligonucleotide
cauucuaacucauucaucc

SEQ ID NO: 1217831 - RNA, 19 nt, Artificial Sequence
  Description of Artificial Sequence: Synthetic oligonucleotide
auagucaauagcuccaccc

SEQ ID NO: 1217832 - RNA, 19 nt, Artificial Sequence
  Description of Artificial Sequence: Synthetic oligonucleotide
aaacaacuaacccacaaca

SEQ ID NO: 1217833 - RNA, 19 nt, Artificial Sequence
  Description of Artificial Sequence: Synthetic oligonucleotide
gaaaagguagaugagagcc

SEQ ID NO: 1217834 - RNA, 19 nt, Artificial Sequence
  Description of Artificial Sequence: Synthetic oligonucleotide
ugaccuuaaaauauuacca

SEQ ID NO: 1217835 - RNA, 19 nt, Artificial Sequence
  Description of Artificial Sequence: Synthetic oligonucleotide
aagaugaucucagagcccc

SEQ ID NO: 1217836 - RNA, 19 nt, Artificial Sequence
  Description of Artificial Sequence: Synthetic oligonucleotide
caaucuucuaaauuaaggc

SEQ ID NO: 1217837 - RNA, 19 nt, Artificial Sequence
  Description of Artificial Sequence: Synthetic oligonucleotide
ucuaaauuaaggcacccug

SEQ ID NO: 1217838 - RNA, 19 nt, Artificial Sequence
  Description of Artificial Sequence: Synthetic oligonucleotide
acaacuaacccacaacaac

SEQ ID NO: 1217839 - RNA, 19 nt, Artificial Sequence
  Description of Artificial Sequence: Synthetic oligonucleotide
uuuggggugaggcagaucu

SEQ ID NO: 1217840 - RNA, 19 nt, Artificial Sequence
  Description of Artificial Sequence: Synthetic oligonucleotide
ugagcuacaguacagcccc

SEQ ID NO: 1217841 - RNA, 19 nt, Artificial Sequence
  Description of Artificial Sequence: Synthetic oligonucleotide
aauaugagaagaagccugc

SEQ ID NO: 1217842 - RNA, 19 nt, Artificial Sequence
  Description of Artificial Sequence: Synthetic oligonucleotide
ucauuuauuacagugcccc

SEQ ID NO: 1217843 - RNA, 19 nt, Artificial Sequence
  Description of Artificial Sequence: Synthetic oligonucleotide
auugagcuacaguacagcc

SEQ ID NO: 1217844 - RNA, 19 nt, Artificial Sequence
  Description of Artificial Sequence: Synthetic oligonucleotide
aaacauagcaaauuucgaa

SEQ ID NO: 1217845 - RNA, 19 nt, Artificial Sequence
  Description of Artificial Sequence: Synthetic oligonucleotide
ugcucuaauacauaugcug

SEQ ID NO: 1217846 - RNA, 19 nt, Artificial Sequence
  Description of Artificial Sequence: Synthetic oligonucleotide
auuaccaacaguccccgac

SEQ ID NO: 1217847 - RNA, 19 nt, Artificial Sequence
  Description of Artificial Sequence: Synthetic oligonucleotide
aguagaauugccaauauga

SEQ ID NO: 1217848 - RNA, 19 nt, Artificial Sequence
  Description of Artificial Sequence: Synthetic oligonucleotide
aauaaauaucuuuggcaga

SEQ ID NO: 1217849 - RNA, 19 nt, Artificial Sequence
  Description of Artificial Sequence: Synthetic oligonucleotide
uuagucuaaagcacgaaaa

SEQ ID NO: 1217850 - RNA, 19 nt, Artificial Sequence
  Description of Artificial Sequence: Synthetic oligonucleotide
aagcuauguacaaugcugc

SEQ ID NO: 1217851 - RNA, 19 nt, Artificial Sequence
  Description of Artificial Sequence: Synthetic oligonucleotide
aguccaaccauacaguuga

SEQ ID NO: 1217852 - RNA, 19 nt, Artificial Sequence
  Description of Artificial Sequence: Synthetic oligonucleotide
agaguaugagaggagauac

SEQ ID NO: 1217853 - RNA, 19 nt, Artificial Sequence
  Description of Artificial Sequence: Synthetic oligonucleotide
ugugaacagaacugcaggg

SEQ ID NO: 1217854 - RNA, 19 nt, Artificial Sequence
  Description of Artificial Sequence: Synthetic oligonucleotide
aagauugagcuacaguaca

SEQ ID NO: 1217855 - RNA, 19 nt, Artificial Sequence
  Description of Artificial Sequence: Synthetic oligonucleotide
uagucuaaagcacgaaaag

SEQ ID NO: 1217856 - RNA, 19 nt, Artificial Sequence
  Description of Artificial Sequence: Synthetic oligonucleotide
cuaaagcacgaaaagguag

SEQ ID NO: 1217857 - RNA, 19 nt, Artificial Sequence
  Description of Artificial Sequence: Synthetic oligonucleotide
caauaugagaagaagccug

SEQ ID NO: 1217858 - RNA, 19 nt, Artificial Sequence
  Description of Artificial Sequence: Synthetic oligonucleotide
uggaacuggacucaugaug

SEQ ID NO: 1217859 - RNA, 19 nt, Artificial Sequence
  Description of Artificial Sequence: Synthetic oligonucleotide
uggaauuggaaaccauagg

SEQ ID NO: 1217860 - RNA, 19 nt, Artificial Sequence
  Description of Artificial Sequence: Synthetic oligonucleotide
agacaaauaagguuucucu

SEQ ID NO: 1217861 - RNA, 19 nt, Artificial Sequence
  Description of Artificial Sequence: Synthetic oligonucleotide
agaauugccaauaugagaa

SEQ ID NO: 1217862 - RNA, 19 nt, Artificial Sequence
  Description of Artificial Sequence: Synthetic oligonucleotide
cagauuagucuaaagcacg

SEQ ID NO: 1217863 - RNA, 19 nt, Artificial Sequence
  Description of Artificial Sequence: Synthetic oligonucleotide
uaaagcacgaaaagguaga

SEQ ID NO: 1217864 - RNA, 19 nt, Artificial Sequence
  Description of Artificial Sequence: Synthetic oligonucleotide
gacaaguggaauuggaaac

SEQ ID NO: 1217865 - RNA, 19 nt, Artificial Sequence
  Description of Artificial Sequence: Synthetic oligonucleotide
gacaggugacuuuugagcc

SEQ ID NO: 1217866 - RNA, 19 nt, Artificial Sequence
  Description of Artificial Sequence: Synthetic oligonucleotide
uuucgaagugagcagaccu

SEQ ID NO: 1217867 - RNA, 19 nt, Artificial Sequence
  Description of Artificial Sequence: Synthetic oligonucleotide
uaaacauagcaaauuucga

SEQ ID NO: 1217868 - RNA, 19 nt, Artificial Sequence
  Description of Artificial Sequence: Synthetic oligonucleotide
uauguggcacaucaaagac

SEQ ID NO: 1217869 - RNA, 19 nt, Artificial Sequence
  Description of Artificial Sequence: Synthetic oligonucleotide
auucuaacucauucauccc

SEQ ID NO: 1217870 - RNA, 19 nt, Artificial Sequence
  Description of Artificial Sequence: Synthetic oligonucleotide
uucauucuaacucauucau

SEQ ID NO: 1217871 - RNA, 19 nt, Artificial Sequence
  Description of Artificial Sequence: Synthetic oligonucleotide
agaucugccauuccucugg

SEQ ID NO: 1217872 - RNA, 19 nt, Artificial Sequence
  Description of Artificial Sequence: Synthetic oligonucleotide
guacugaagacauucuugc

SEQ ID NO: 1217873 - RNA, 19 nt, Artificial Sequence
  Description of Artificial Sequence: Synthetic oligonucleotide
auaucuuuggcagaggcug

SEQ ID NO: 1217874 - RNA, 19 nt, Artificial Sequence
  Description of Artificial Sequence: Synthetic oligonucleotide
agucuaaagcacgaaaagg

SEQ ID NO: 1217875 - RNA, 19 nt, Artificial Sequence
  Description of Artificial Sequence: Synthetic oligonucleotide
acagauuagucuaaagcac

SEQ ID NO: 1217876 - RNA, 19 nt, Artificial Sequence
  Description of Artificial Sequence: Synthetic oligonucleotide
ugaccagaauaccugaugu

SEQ ID NO: 1217877 - RNA, 19 nt, Artificial Sequence
  Description of Artificial Sequence: Synthetic oligonucleotide
uagaauugccaauaugaga

SEQ ID NO: 1217878 - RNA, 19 nt, Artificial Sequence
  Description of Artificial Sequence: Synthetic oligonucleotide
cacagauuagucuaaagca

SEQ ID NO: 1217879 - RNA, 19 nt, Artificial Sequence
  Description of Artificial Sequence: Synthetic oligonucleotide
ugacuuuugagccauugau

SEQ ID NO: 1217880 - RNA, 19 nt, Artificial Sequence
  Description of Artificial Sequence: Synthetic oligonucleotide
ugguaaauuuuaauauaug

SEQ ID NO: 1217881 - RNA, 19 nt, Artificial Sequence
  Description of Artificial Sequence: Synthetic oligonucleotide
agaaauccuggacugacug

SEQ ID NO: 1217882 - RNA, 19 nt, Artificial Sequence
  Description of Artificial Sequence: Synthetic oligonucleotide
cuugcagaaguucucaaac

SEQ ID NO: 1217883 - RNA, 19 nt, Artificial Sequence
  Description of Artificial Sequence: Synthetic oligonucleotide
ucuaacucauucaucccca

SEQ ID NO: 1217884 - RNA, 19 nt, Artificial Sequence
  Description of Artificial Sequence: Synthetic oligonucleotide
accucaagcccaaugaagc

SEQ ID NO: 1217885 - RNA, 19 nt, Artificial Sequence
  Description of Artificial Sequence: Synthetic oligonucleotide
uuugagaguaugagaggag

SEQ ID NO: 1217886 - RNA, 19 nt, Artificial Sequence
  Description of Artificial Sequence: Synthetic oligonucleotide
uacuuugauccaaaacugc

SEQ ID NO: 1217887 - RNA, 19 nt, Artificial Sequence
  Description of Artificial Sequence: Synthetic oligonucleotide
ugcagucugaguagaauug

SEQ ID NO: 1217888 - RNA, 19 nt, Artificial Sequence
  Description of Artificial Sequence: Synthetic oligonucleotide
caaucucuagauacaaagc

SEQ ID NO: 1217889 - RNA, 19 nt, Artificial Sequence
  Description of Artificial Sequence: Synthetic oligonucleotide
caaauuucgaagugagcag

SEQ ID NO: 1217890 - RNA, 19 nt, Artificial Sequence
  Description of Artificial Sequence: Synthetic oligonucleotide
agguauauaagagaaggca

SEQ ID NO: 1217891 - RNA, 19 nt, Artificial Sequence
  Description of Artificial Sequence: Synthetic oligonucleotide
gcagguauauaagagaagg

SEQ ID NO: 1217892 - RNA, 19 nt, Artificial Sequence
  Description of Artificial Sequence: Synthetic oligonucleotide
ugaucucagagccccauug

SEQ ID NO: 1217893 - RNA, 19 nt, Artificial Sequence
  Description of Artificial Sequence: Synthetic oligonucleotide
aauuucgaagugagcagac

SEQ ID NO: 1217894 - RNA, 19 nt, Artificial Sequence
  Description of Artificial Sequence: Synthetic oligonucleotide
aacugcagggguucggaag

SEQ ID NO: 1217895 - RNA, 19 nt, Artificial Sequence
  Description of Artificial Sequence: Synthetic oligonucleotide
aggucaguucauuuauuac

SEQ ID NO: 1217896 - RNA, 19 nt, Artificial Sequence
  Description of Artificial Sequence: Synthetic oligonucleotide
aaauuucgaagugagcaga

SEQ ID NO: 1217897 - RNA, 19 nt, Artificial Sequence
  Description of Artificial Sequence: Synthetic oligonucleotide
uaugcugcaccauagucaa

SEQ ID NO: 1217898 - RNA, 19 nt, Artificial Sequence
  Description of Artificial Sequence: Synthetic oligonucleotide
uugagcuacaguacagccc

SEQ ID NO: 1217899 - RNA, 19 nt, Artificial Sequence
  Description of Artificial Sequence: Synthetic oligonucleotide
ggaauuggaaaccauagga

SEQ ID NO: 1217900 - RNA, 19 nt, Artificial Sequence
  Description of Artificial Sequence: Synthetic oligonucleotide
agccauugaucuuccaugg

SEQ ID NO: 1217901 - RNA, 19 nt, Artificial Sequence
  Description of Artificial Sequence: Synthetic oligonucleotide
acauagcaaauuucgaagu

SEQ ID NO: 1217902 - RNA, 19 nt, Artificial Sequence
  Description of Artificial Sequence: Synthetic oligonucleotide
ugccauuaagauguuauug

SEQ ID NO: 1217903 - RNA, 19 nt, Artificial Sequence
  Description of Artificial Sequence: Synthetic oligonucleotide
uguugcuguaauaaauauc

SEQ ID NO: 1217904 - RNA, 19 nt, Artificial Sequence
  Description of Artificial Sequence: Synthetic oligonucleotide
cuaauacauaugcugcacc

SEQ ID NO: 1217905 - RNA, 19 nt, Artificial Sequence
  Description of Artificial Sequence: Synthetic oligonucleotide
aaaggcacuauguggcaca

SEQ ID NO: 1217906 - RNA, 19 nt, Artificial Sequence
  Description of Artificial Sequence: Synthetic oligonucleotide
gagccauugaucuuccaug

SEQ ID NO: 1217907 - RNA, 19 nt, Artificial Sequence
  Description of Artificial Sequence: Synthetic oligonucleotide
auauaugaccuuaaaauau

SEQ ID NO: 1217908 - RNA, 19 nt, Artificial Sequence
  Description of Artificial Sequence: Synthetic oligonucleotide
cagaaucugauuuucuuuc

SEQ ID NO: 1217909 - RNA, 19 nt, Artificial Sequence
  Description of Artificial Sequence: Synthetic oligonucleotide
uuuauuacagugccccguc

SEQ ID NO: 1217910 - RNA, 19 nt, Artificial Sequence
  Description of Artificial Sequence: Synthetic oligonucleotide
caccauagucaauagcucc

SEQ ID NO: 1217911 - RNA, 19 nt, Artificial Sequence
  Description of Artificial Sequence: Synthetic oligonucleotide
uagucaauagcuccaccca

SEQ ID NO: 1217912 - RNA, 19 nt, Artificial Sequence
  Description of Artificial Sequence: Synthetic oligonucleotide
caagauugagcuacaguac

SEQ ID NO: 1217913 - RNA, 19 nt, Artificial Sequence
  Description of Artificial Sequence: Synthetic oligonucleotide
agacaaguggaauuggaaa

SEQ ID NO: 1217914 - RNA, 19 nt, Artificial Sequence
  Description of Artificial Sequence: Synthetic oligonucleotide
aacuaacccacaacaacag

SEQ ID NO: 1217915 - RNA, 19 nt, Artificial Sequence
  Description of Artificial Sequence: Synthetic oligonucleotide
cagcaguccaaccauacag

SEQ ID NO: 1217916 - RNA, 19 nt, Artificial Sequence
  Description of Artificial Sequence: Synthetic oligonucleotide
aagggcagguauauaagag

SEQ ID NO: 1217917 - RNA, 19 nt, Artificial Sequence
  Description of Artificial Sequence: Synthetic oligonucleotide
aguugaacagcugggcuac

SEQ ID NO: 1217918 - RNA, 19 nt, Artificial Sequence
  Description of Artificial Sequence: Synthetic oligonucleotide
agagcgaccuguuugaauu

SEQ ID NO: 1217919 - RNA, 19 nt, Artificial Sequence
  Description of Artificial Sequence: Synthetic oligonucleotide
agucaauagcuccacccag

SEQ ID NO: 1217920 - RNA, 19 nt, Artificial Sequence
  Description of Artificial Sequence: Synthetic oligonucleotide
acgaaaagguagaugagag

SEQ ID NO: 1217921 - RNA, 19 nt, Artificial Sequence
  Description of Artificial Sequence: Synthetic oligonucleotide
caacuaacccacaacaaca

SEQ ID NO: 1217922 - RNA, 19 nt, Artificial Sequence
  Description of Artificial Sequence: Synthetic oligonucleotide
ucuaauacauaugcugcac

SEQ ID NO: 1217923 - RNA, 19 nt, Artificial Sequence
  Description of Artificial Sequence: Synthetic oligonucleotide
ccugcucuaauacauaugc

SEQ ID NO: 1217924 - RNA, 19 nt, Artificial Sequence
  Description of Artificial Sequence: Synthetic oligonucleotide
aagugauccagagcgaccu

SEQ ID NO: 1217925 - RNA, 19 nt, Artificial Sequence
  Description of Artificial Sequence: Synthetic oligonucleotide
ggauucaaaucacagugcc

SEQ ID NO: 1217926 - RNA, 19 nt, Artificial Sequence
  Description of Artificial Sequence: Synthetic oligonucleotide
acaaaccuccuccauguug

SEQ ID NO: 1217927 - RNA, 19 nt, Artificial Sequence
  Description of Artificial Sequence: Synthetic oligonucleotide
cauagcaaauuucgaagug

SEQ ID NO: 1217928 - RNA, 19 nt, Artificial Sequence
  Description of Artificial Sequence: Synthetic oligonucleotide
uucgaagugagcagaccug

SEQ ID NO: 1217929 - RNA, 19 nt, Artificial Sequence
  Description of Artificial Sequence: Synthetic oligonucleotide
aggagugcuauuaacagca

SEQ ID NO: 1217930 - RNA, 19 nt, Artificial Sequence
  Description of Artificial Sequence: Synthetic oligonucleotide
aggauucaaaucacagugc

SEQ ID NO: 1217931 - RNA, 19 nt, Artificial Sequence
  Description of Artificial Sequence: Synthetic oligonucleotide
uagcagaaauccuggacug

SEQ ID NO: 1217932 - RNA, 19 nt, Artificial Sequence
  Description of Artificial Sequence: Synthetic oligonucleotide
uccucagcauucauggcug

SEQ ID NO: 1217933 - RNA, 19 nt, Artificial Sequence
  Description of Artificial Sequence: Synthetic oligonucleotide
ucgaagugagcagaccugg

SEQ ID NO: 1217934 - RNA, 19 nt, Artificial Sequence
  Description of Artificial Sequence: Synthetic oligonucleotide
auucaaaucacagugccua

SEQ ID NO: 1217935 - RNA, 19 nt, Artificial Sequence
  Description of Artificial Sequence: Synthetic oligonucleotide
ugggucuauaacagcaaca

SEQ ID NO: 1217936 - RNA, 19 nt, Artificial Sequence
  Description of Artificial Sequence: Synthetic oligonucleotide
acgauacugaccagaauac

SEQ ID NO: 1217937 - RNA, 19 nt, Artificial Sequence
  Description of Artificial Sequence: Synthetic oligonucleotide
uccaagauugagcuacagu

SEQ ID NO: 1217938 - RNA, 19 nt, Artificial Sequence
  Description of Artificial Sequence: Synthetic oligonucleotide
ugagccauugaucuuccau

SEQ ID NO: 1217939 - RNA, 19 nt, Artificial Sequence
  Description of Artificial Sequence: Synthetic oligonucleotide
auauuaccaacaguccccg

SEQ ID NO: 1217940 - RNA, 19 nt, Artificial Sequence
  Description of Artificial Sequence: Synthetic oligonucleotide
aaaaccgcugcagcaaucu

SEQ ID NO: 1217941 - RNA, 19 nt, Artificial Sequence
  Description of Artificial Sequence: Synthetic oligonucleotide
cagguauauaagagaaggc

SEQ ID NO: 1217942 - RNA, 19 nt, Artificial Sequence
  Description of Artificial Sequence: Synthetic oligonucleotide
uuaccuguccguguguaag

SEQ ID NO: 1217943 - RNA, 19 nt, Artificial Sequence
  Description of Artificial Sequence: Synthetic oligonucleotide
uugagaguaugagaggaga

SEQ ID NO: 1217944 - RNA, 19 nt, Artificial Sequence
  Description of Artificial Sequence: Synthetic oligonucleotide
gaguagaauugccaauaug

SEQ ID NO: 1217945 - RNA, 19 nt, Artificial Sequence
  Description of Artificial Sequence: Synthetic oligonucleotide
agaauaccugauguacccc

SEQ ID NO: 1217946 - RNA, 19 nt, Artificial Sequence
  Description of Artificial Sequence: Synthetic oligonucleotide
auuucgaagugagcagacc

SEQ ID NO: 1217947 - RNA, 19 nt, Artificial Sequence
  Description of Artificial Sequence: Synthetic oligonucleotide
gauggcauuagcagaaauc

SEQ ID NO: 1217948 - RNA, 19 nt, Artificial Sequence
  Description of Artificial Sequence: Synthetic oligonucleotide
auagcaaauuucgaaguga

SEQ ID NO: 1217949 - RNA, 19 nt, Artificial Sequence
  Description of Artificial Sequence: Synthetic oligonucleotide
uucaaaucacagugccuag

SEQ ID NO: 1217950 - RNA, 19 nt, Artificial Sequence
  Description of Artificial Sequence: Synthetic oligonucleotide
cuaaauuaaggcacccuga

SEQ ID NO: 1217951 - RNA, 19 nt, Artificial Sequence
  Description of Artificial Sequence: Synthetic oligonucleotide
acuauguggcacaucaaag

SEQ ID NO: 1217952 - RNA, 19 nt, Artificial Sequence
  Description of Artificial Sequence: Synthetic oligonucleotide
uuaucuguagguggucucc

SEQ ID NO: 1217953 - RNA, 19 nt, Artificial Sequence
  Description of Artificial Sequence: Synthetic oligonucleotide
cauaugcugcaccauaguc

SEQ ID NO: 1217954 - RNA, 19 nt, Artificial Sequence
  Description of Artificial Sequence: Synthetic oligonucleotide
agggcagucucagaucugc

SEQ ID NO: 1217955 - RNA, 19 nt, Artificial Sequence
  Description of Artificial Sequence: Synthetic oligonucleotide
uauuacagugccccgucuc

SEQ ID NO: 1217956 - RNA, 19 nt, Artificial Sequence
  Description of Artificial Sequence: Synthetic oligonucleotide
guucauucuaacucauuca

SEQ ID NO: 1217957 - RNA, 19 nt, Artificial Sequence
  Description of Artificial Sequence: Synthetic oligonucleotide
auccagagcgaccuguuug

SEQ ID NO: 1217958 - RNA, 19 nt, Artificial Sequence
  Description of Artificial Sequence: Synthetic oligonucleotide
cuauguggcacaucaaaga

SEQ ID NO: 1217959 - RNA, 19 nt, Artificial Sequence
  Description of Artificial Sequence: Synthetic oligonucleotide
uaaaaggcacuauguggca

SEQ ID NO: 1217960 - RNA, 19 nt, Artificial Sequence
  Description of Artificial Sequence: Synthetic oligonucleotide
ugugaucaguucauucuaa

SEQ ID NO: 1217961 - RNA, 19 nt, Artificial Sequence
  Description of Artificial Sequence: Synthetic oligonucleotide
cugcuuccaagacaagugg

SEQ ID NO: 1217962 - RNA, 19 nt, Artificial Sequence
  Description of Artificial Sequence: Synthetic oligonucleotide
uaucccucacugcagucug

SEQ ID NO: 1217963 - RNA, 19 nt, Artificial Sequence
  Description of Artificial Sequence: Synthetic oligonucleotide
ggucuuaaaaggcacuaug

SEQ ID NO: 1217964 - RNA, 19 nt, Artificial Sequence
  Description of Artificial Sequence: Synthetic oligonucleotide
aagccugaagcuauguaca

SEQ ID NO: 1217965 - RNA, 19 nt, Artificial Sequence
  Description of Artificial Sequence: Synthetic oligonucleotide
guggauuuuggggugaggc

SEQ ID NO: 1217966 - RNA, 19 nt, Artificial Sequence
  Description of Artificial Sequence: Synthetic oligonucleotide
gaucucagagccccauugc

SEQ ID NO: 1217967 - RNA, 19 nt, Artificial Sequence
  Description of Artificial Sequence: Synthetic oligonucleotide
cacgauacugaccagaaua

SEQ ID NO: 1217968 - RNA, 19 nt, Artificial Sequence
  Description of Artificial Sequence: Synthetic oligonucleotide
auuuauuacagugccccgu

SEQ ID NO: 1217969 - RNA, 19 nt, Artificial Sequence
  Description of Artificial Sequence: Synthetic oligonucleotide
ugguaacggaagcugaaau

SEQ ID NO: 1217970 - RNA, 19 nt, Artificial Sequence
  Description of Artificial Sequence: Synthetic oligonucleotide
auccuaauuaccuguccgu

SEQ ID NO: 1217971 - RNA, 19 nt, Artificial Sequence
  Description of Artificial Sequence: Synthetic oligonucleotide
uaccccacagauuagucua

SEQ ID NO: 1217972 - RNA, 19 nt, Artificial Sequence
  Description of Artificial Sequence: Synthetic oligonucleotide
uucggaagguacugaagac

SEQ ID NO: 1217973 - RNA, 19 nt, Artificial Sequence
  Description of Artificial Sequence: Synthetic oligonucleotide
uccagagcgaccuguuuga

SEQ ID NO: 1217974 - RNA, 19 nt, Artificial Sequence
  Description of Artificial Sequence: Synthetic oligonucleotide
uaccuguccguguguaagg

SEQ ID NO: 1217975 - RNA, 19 nt, Artificial Sequence
  Description of Artificial Sequence: Synthetic oligonucleotide
agauacuaucaacauuuau

SEQ ID NO: 1217976 - RNA, 19 nt, Artificial Sequence
  Description of Artificial Sequence: Synthetic oligonucleotide
ugaguagaauugccaauau

SEQ ID NO: 1217977 - RNA, 19 nt, Artificial Sequence
  Description of Artificial Sequence: Synthetic oligonucleotide
agccccauugcaaaaccgc

SEQ ID NO: 1217978 - RNA, 19 nt, Artificial Sequence
  Description of Artificial Sequence: Synthetic oligonucleotide
ucuagauacaaagcagaau

SEQ ID NO: 1217979 - RNA, 19 nt, Artificial Sequence
  Description of Artificial Sequence: Synthetic oligonucleotide
agcaaauuucgaagugagc

SEQ ID NO: 1217980 - RNA, 19 nt, Artificial Sequence
  Description of Artificial Sequence: Synthetic oligonucleotide
aguaugagaggagauacua

SEQ ID NO: 1217981 - RNA, 19 nt, Artificial Sequence
  Description of Artificial Sequence: Synthetic oligonucleotide
gauacugaccagaauaccu

SEQ ID NO: 1217982 - RNA, 19 nt, Artificial Sequence
  Description of Artificial Sequence: Synthetic oligonucleotide
ucggaagguacugaagaca

SEQ ID NO: 1217983 - RNA, 19 nt, Artificial Sequence
  Description of Artificial Sequence: Synthetic oligonucleotide
aagacaaguggaauuggaa

SEQ ID NO: 1217984 - RNA, 19 nt, Artificial Sequence
  Description of Artificial Sequence: Synthetic oligonucleotide
cauuucaugagguuguccu

SEQ ID NO: 1217985 - RNA, 19 nt, Artificial Sequence
  Description of Artificial Sequence: Synthetic oligonucleotide
uccauguugcuguaauaaa

SEQ ID NO: 1217986 - RNA, 19 nt, Artificial Sequence
  Description of Artificial Sequence: Synthetic oligonucleotide
aacaacuaacccacaacaa

SEQ ID NO: 1217987 - RNA, 19 nt, Artificial Sequence
  Description of Artificial Sequence: Synthetic oligonucleotide
ucucagagccccauugcaa

SEQ ID NO: 1217988 - RNA, 19 nt, Artificial Sequence
  Description of Artificial Sequence: Synthetic oligonucleotide
gguacugaagacauucuug

SEQ ID NO: 1217989 - RNA, 19 nt, Artificial Sequence
  Description of Artificial Sequence: Synthetic oligonucleotide
gacuuuugagccauugauc

SEQ ID NO: 1217990 - RNA, 19 nt, Artificial Sequence
  Description of Artificial Sequence: Synthetic oligonucleotide
guaagggcagguauauaag

SEQ ID NO: 1217991 - RNA, 19 nt, Artificial Sequence
  Description of Artificial Sequence: Synthetic oligonucleotide
cagcucacgauacugacca

SEQ ID NO: 1217992 - RNA, 19 nt, Artificial Sequence
  Description of Artificial Sequence: Synthetic oligonucleotide
ugcugguaacggaagcuga

SEQ ID NO: 1217993 - RNA, 19 nt, Artificial Sequence
  Description of Artificial Sequence: Synthetic oligonucleotide
ugagagccagcauccaaga

SEQ ID NO: 1217994 - RNA, 19 nt, Artificial Sequence
  Description of Artificial Sequence: Synthetic oligonucleotide
gacucaugauggcauuagc

SEQ ID NO: 1217995 - RNA, 19 nt, Artificial Sequence
  Description of Artificial Sequence: Synthetic oligonucleotide
ccuuaaaauauuaccaaca

SEQ ID NO: 1217996 - RNA, 19 nt, Artificial Sequence
  Description of Artificial Sequence: Synthetic oligonucleotide
uguguaagggcagguauau

SEQ ID NO: 1217997 - RNA, 19 nt, Artificial Sequence
  Description of Artificial Sequence: Synthetic oligonucleotide
ggcauuagcagaaauccug

SEQ ID NO: 1217998 - RNA, 19 nt, Artificial Sequence
  Description of Artificial Sequence: Synthetic oligonucleotide
gccauuaagauguuauuga

SEQ ID NO: 1217999 - RNA, 19 nt, Artificial Sequence
  Description of Artificial Sequence: Synthetic oligonucleotide
agucucagaucugccauuc

SEQ ID NO: 1218000 - RNA, 19 nt, Artificial Sequence
  Description of Artificial Sequence: Synthetic oligonucleotide
ucaccuauugaugucuuua

SEQ ID NO: 1218001 - RNA, 19 nt, Artificial Sequence
  Description of Artificial Sequence: Synthetic oligonucleotide
aguacagccccugaggaaa

SEQ ID NO: 1218002 - RNA, 19 nt, Artificial Sequence
  Description of Artificial Sequence: Synthetic oligonucleotide
uggagacaaauaagguuuc

SEQ ID NO: 1218003 - RNA, 19 nt, Artificial Sequence
  Description of Artificial Sequence: Synthetic oligonucleotide
ggauuuuggggugaggcag

SEQ ID NO: 1218004 - RNA, 19 nt, Artificial Sequence
  Description of Artificial Sequence: Synthetic oligonucleotide
aagcacgaaaagguagaug

SEQ ID NO: 1218005 - RNA, 19 nt, Artificial Sequence
  Description of Artificial Sequence: Synthetic oligonucleotide
gucuaaagcacgaaaaggu

SEQ ID NO: 1218006 - RNA, 19 nt, Artificial Sequence
  Description of Artificial Sequence: Synthetic oligonucleotide
gaggucaguucauuuauua

SEQ ID NO: 1218007 - RNA, 19 nt, Artificial Sequence
  Description of Artificial Sequence: Synthetic oligonucleotide
agcccaaugaagccaguga

SEQ ID NO: 1218008 - RNA, 19 nt, Artificial Sequence
  Description of Artificial Sequence: Synthetic oligonucleotide
uuauuacagugccccgucu

SEQ ID NO: 1218009 - RNA, 19 nt, Artificial Sequence
  Description of Artificial Sequence: Synthetic oligonucleotide
cucuaauacauaugcugca

SEQ ID NO: 1218010 - RNA, 19 nt, Artificial Sequence
  Description of Artificial Sequence: Synthetic oligonucleotide
cauagucaauagcuccacc

SEQ ID NO: 1218011 - RNA, 19 nt, Artificial Sequence
  Description of Artificial Sequence: Synthetic oligonucleotide
gcauccaagauugagcuac

SEQ ID NO: 1218012 - RNA, 19 nt, Artificial Sequence
  Description of Artificial Sequence: Synthetic oligonucleotide
uggaaaccauaggagaggu

SEQ ID NO: 1218013 - RNA, 19 nt, Artificial Sequence
  Description of Artificial Sequence: Synthetic oligonucleotide
gguaaggagugcuauuaac

SEQ ID NO: 1218014 - RNA, 19 nt, Artificial Sequence
  Description of Artificial Sequence: Synthetic oligonucleotide
ccaagauugagcuacagua

SEQ ID NO: 1218015 - RNA, 19 nt, Artificial Sequence
  Description of Artificial Sequence: Synthetic oligonucleotide
agauugagcuacaguacag

SEQ ID NO: 1218016 - RNA, 19 nt, Artificial Sequence
  Description of Artificial Sequence: Synthetic oligonucleotide
gcugcuaugccugugaaca

SEQ ID NO: 1218017 - RNA, 19 nt, Artificial Sequence
  Description of Artificial Sequence: Synthetic oligonucleotide
ugauggcauuagcagaaau

SEQ ID NO: 1218018 - RNA, 19 nt, Artificial Sequence
  Description of Artificial Sequence: Synthetic oligonucleotide
cacccugaugauucuaaac

SEQ ID NO: 1218019 - RNA, 19 nt, Artificial Sequence
  Description of Artificial Sequence: Synthetic oligonucleotide
ugguaucccucacugcagu

SEQ ID NO: 1218020 - RNA, 19 nt, Artificial Sequence
  Description of Artificial Sequence: Synthetic oligonucleotide
uaauuaccuguccgugugu

SEQ ID NO: 1218021 - RNA, 19 nt, Artificial Sequence
  Description of Artificial Sequence: Synthetic oligonucleotide
aggagauacuaucaacauu

SEQ ID NO: 1218022 - RNA, 19 nt, Artificial Sequence
  Description of Artificial Sequence: Synthetic oligonucleotide
ccaaccauacaguugaaca

SEQ ID NO: 1218023 - RNA, 19 nt, Artificial Sequence
  Description of Artificial Sequence: Synthetic oligonucleotide
uuguugaucuugccauuaa

SEQ ID NO: 1218024 - RNA, 19 nt, Artificial Sequence
  Description of Artificial Sequence: Synthetic oligonucleotide
uacucccauucugugauca

SEQ ID NO: 1218025 - RNA, 19 nt, Artificial Sequence
  Description of Artificial Sequence: Synthetic oligonucleotide
aaagcacgaaaagguagau

SEQ ID NO: 1218026 - RNA, 19 nt, Artificial Sequence
  Description of Artificial Sequence: Synthetic oligonucleotide
gguaacggaagcugaaauc

SEQ ID NO: 1218027 - RNA, 19 nt, Artificial Sequence
  Description of Artificial Sequence: Synthetic oligonucleotide
augagaggagauacuauca

SEQ ID NO: 1218028 - RNA, 19 nt, Artificial Sequence
  Description of Artificial Sequence: Synthetic oligonucleotide
cacaacaacaggccacaug

SEQ ID NO: 1218029 - RNA, 19 nt, Artificial Sequence
  Description of Artificial Sequence: Synthetic oligonucleotide
caagacaaguggaauugga

SEQ ID NO: 1218030 - RNA, 19 nt, Artificial Sequence
  Description of Artificial Sequence: Synthetic oligonucleotide
uggguacucccauucugug

SEQ ID NO: 1218031 - RNA, 19 nt, Artificial Sequence
  Description of Artificial Sequence: Synthetic oligonucleotide
gcauuagcagaaauccugg

SEQ ID NO: 1218032 - RNA, 19 nt, Artificial Sequence
  Description of Artificial Sequence: Synthetic oligonucleotide
gacuggucuuaaaaggcac

SEQ ID NO: 1218033 - RNA, 19 nt, Artificial Sequence
  Description of Artificial Sequence: Synthetic oligonucleotide
aauuaccuguccgugugua

SEQ ID NO: 1218034 - RNA, 19 nt, Artificial Sequence
  Description of Artificial Sequence: Synthetic oligonucleotide
uuaagauguuauugagcuu

SEQ ID NO: 1218035 - RNA, 19 nt, Artificial Sequence
  Description of Artificial Sequence: Synthetic oligonucleotide
acaggugacuuuugagcca

SEQ ID NO: 1218036 - RNA, 19 nt, Artificial Sequence
  Description of Artificial Sequence: Synthetic oligonucleotide
caguccaaccauacaguug

SEQ ID NO: 1218037 - RNA, 19 nt, Artificial Sequence
  Description of Artificial Sequence: Synthetic oligonucleotide
agauuagucuaaagcacga

SEQ ID NO: 1218038 - RNA, 19 nt, Artificial Sequence
  Description of Artificial Sequence: Synthetic oligonucleotide
guagaccucaggcaaagcu

SEQ ID NO: 1218039 - RNA, 19 nt, Artificial Sequence
  Description of Artificial Sequence: Synthetic oligonucleotide
auugccaauaugagaagaa

SEQ ID NO: 1218040 - RNA, 19 nt, Artificial Sequence
  Description of Artificial Sequence: Synthetic oligonucleotide
gucaauagcuccacccagc

SEQ ID NO: 1218041 - RNA, 19 nt, Artificial Sequence
  Description of Artificial Sequence: Synthetic oligonucleotide
accccugcccgccaaucac

SEQ ID NO: 1218042 - RNA, 19 nt, Artificial Sequence
  Description of Artificial Sequence: Synthetic oligonucleotide
agucugaguagaauugcca

SEQ ID NO: 1218043 - RNA, 19 nt, Artificial Sequence
  Description of Artificial Sequence: Synthetic oligonucleotide
accaacaguccccgacagg

SEQ ID NO: 1218044 - RNA, 19 nt, Artificial Sequence
  Description of Artificial Sequence: Synthetic oligonucleotide
agccuugggucuauaacag

SEQ ID NO: 1218045 - RNA, 19 nt, Artificial Sequence
  Description of Artificial Sequence: Synthetic oligonucleotide
aguagaccucaggcaaagc

SEQ ID NO: 1218046 - RNA, 19 nt, Artificial Sequence
  Description of Artificial Sequence: Synthetic oligonucleotide
cacgaaaagguagaugaga

SEQ ID NO: 1218047 - RNA, 19 nt, Artificial Sequence
  Description of Artificial Sequence: Synthetic oligonucleotide
uacagugccccgucucagc

SEQ ID NO: 1218048 - RNA, 19 nt, Artificial Sequence
  Description of Artificial Sequence: Synthetic oligonucleotide
aacauaccccacagauuag

SEQ ID NO: 1218049 - RNA, 19 nt, Artificial Sequence
  Description of Artificial Sequence: Synthetic oligonucleotide
cuaacucauucauccccac

SEQ ID NO: 1218050 - RNA, 19 nt, Artificial Sequence
  Description of Artificial Sequence: Synthetic oligonucleotide
cucuagauacaaagcagaa

SEQ ID NO: 1218051 - RNA, 19 nt, Artificial Sequence
  Description of Artificial Sequence: Synthetic oligonucleotide
caccugcuccucucgaugc

SEQ ID NO: 1218052 - RNA, 19 nt, Artificial Sequence
  Description of Artificial Sequence: Synthetic oligonucleotide
ugccaaauuguuggcuuca

SEQ ID NO: 1218053 - RNA, 19 nt, Artificial Sequence
  Description of Artificial Sequence: Synthetic oligonucleotide
caacaggccacaugggaca

SEQ ID NO: 1218054 - RNA, 19 nt, Artificial Sequence
  Description of Artificial Sequence: Synthetic oligonucleotide
acauaccccacagauuagu

SEQ ID NO: 1218055 - RNA, 19 nt, Artificial Sequence
  Description of Artificial Sequence: Synthetic oligonucleotide
gaggagauacuaucaacau

SEQ ID NO: 1218056 - RNA, 19 nt, Artificial Sequence
  Description of Artificial Sequence: Synthetic oligonucleotide
gagaggucaguucauuuau

SEQ ID NO: 1218057 - RNA, 19 nt, Artificial Sequence
  Description of Artificial Sequence: Synthetic oligonucleotide
gagaguaugagaggagaua

SEQ ID NO: 1218058 - RNA, 19 nt, Artificial Sequence
  Description of Artificial Sequence: Synthetic oligonucleotide
caagugcacuuccugucug

SEQ ID NO: 1218059 - RNA, 19 nt, Artificial Sequence
  Description of Artificial Sequence: Synthetic oligonucleotide
guacaaugcugcuaugccu

SEQ ID NO: 1218060 - RNA, 19 nt, Artificial Sequence
  Description of Artificial Sequence: Synthetic oligonucleotide
cucacgauacugaccagaa

SEQ ID NO: 1218061 - RNA, 19 nt, Artificial Sequence
  Description of Artificial Sequence: Synthetic oligonucleotide
auaugaccuuaaaauauua

SEQ ID NO: 1218062 - RNA, 19 nt, Artificial Sequence
  Description of Artificial Sequence: Synthetic oligonucleotide
gauuagucuaaagcacgaa

SEQ ID NO: 1218063 - RNA, 19 nt, Artificial Sequence
  Description of Artificial Sequence: Synthetic oligonucleotide
agguuguccuccauuccuc

SEQ ID NO: 1218064 - RNA, 19 nt, Artificial Sequence
  Description of Artificial Sequence: Synthetic oligonucleotide
cauuagcagaaauccugga

SEQ ID NO: 1218065 - RNA, 19 nt, Artificial Sequence
  Description of Artificial Sequence: Synthetic oligonucleotide
ucacgauacugaccagaau

SEQ ID NO: 1218066 - RNA, 19 nt, Artificial Sequence
  Description of Artificial Sequence: Synthetic oligonucleotide
aguggauuuuggggugagg

SEQ ID NO: 1218067 - RNA, 19 nt, Artificial Sequence
  Description of Artificial Sequence: Synthetic oligonucleotide
ugauccagagcgaccuguu

SEQ ID NO: 1218068 - RNA, 19 nt, Artificial Sequence
  Description of Artificial Sequence: Synthetic oligonucleotide
uccucucgaugccaccgcu

SEQ ID NO: 1218069 - RNA, 19 nt, Artificial Sequence
  Description of Artificial Sequence: Synthetic oligonucleotide
gaccagaauaccugaugua

SEQ ID NO: 1218070 - RNA, 19 nt, Artificial Sequence
  Description of Artificial Sequence: Synthetic oligonucleotide
caaaaccgcugcagcaauc

SEQ ID NO: 1218071 - RNA, 19 nt, Artificial Sequence
  Description of Artificial Sequence: Synthetic oligonucleotide
augguaucccucacugcag

SEQ ID NO: 1218072 - RNA, 19 nt, Artificial Sequence
  Description of Artificial Sequence: Synthetic oligonucleotide
gggucuauaacagcaacaa

SEQ ID NO: 1218073 - RNA, 19 nt, Artificial Sequence
  Description of Artificial Sequence: Synthetic oligonucleotide
agccugaagcuauguacaa

SEQ ID NO: 1218074 - RNA, 19 nt, Artificial Sequence
  Description of Artificial Sequence: Synthetic oligonucleotide
caguugaacagcugggcua

SEQ ID NO: 1218075 - RNA, 19 nt, Artificial Sequence
  Description of Artificial Sequence: Synthetic oligonucleotide
cuaugccugugaacagaac

SEQ ID NO: 1218076 - RNA, 19 nt, Artificial Sequence
  Description of Artificial Sequence: Synthetic oligonucleotide
aaucaccuauugaugucuu

SEQ ID NO: 1218077 - RNA, 19 nt, Artificial Sequence
  Description of Artificial Sequence: Synthetic oligonucleotide
caccuauugaugucuuuaa

SEQ ID NO: 1218078 - RNA, 19 nt, Artificial Sequence
  Description of Artificial Sequence: Synthetic oligonucleotide
agggguucggaagguacug

SEQ ID NO: 1218079 - RNA, 19 nt, Artificial Sequence
  Description of Artificial Sequence: Synthetic oligonucleotide
guagguggucucccaacga

SEQ ID NO: 1218080 - RNA, 19 nt, Artificial Sequence
  Description of Artificial Sequence: Synthetic oligonucleotide
gcauggacuggucuuaaaa

SEQ ID NO: 1218081 - RNA, 19 nt, Artificial Sequence
  Description of Artificial Sequence: Synthetic oligonucleotide
aagauguuauugagcuuuu

SEQ ID NO: 1218082 - RNA, 19 nt, Artificial Sequence
  Description of Artificial Sequence: Synthetic oligonucleotide
ccuugguaaauuuuaauau

SEQ ID NO: 1218083 - RNA, 19 nt, Artificial Sequence
  Description of Artificial Sequence: Synthetic oligonucleotide
uaaauagccuugggucuau

SEQ ID NO: 1218084 - RNA, 19 nt, Artificial Sequence
  Description of Artificial Sequence: Synthetic oligonucleotide
gagcgaccuguuugaauuc

SEQ ID NO: 1218085 - RNA, 19 nt, Artificial Sequence
  Description of Artificial Sequence: Synthetic oligonucleotide
gcagucugaguagaauugc

SEQ ID NO: 1218086 - RNA, 19 nt, Artificial Sequence
  Description of Artificial Sequence: Synthetic oligonucleotide
agcgaccuguuugaauucu

SEQ ID NO: 1218087 - RNA, 19 nt, Artificial Sequence
  Description of Artificial Sequence: Synthetic oligonucleotide
ggcagguauauaagagaag

SEQ ID NO: 1218088 - RNA, 19 nt, Artificial Sequence
  Description of Artificial Sequence: Synthetic oligonucleotide
ccaacgaugguaucccuca

SEQ ID NO: 1218089 - RNA, 19 nt, Artificial Sequence
  Description of Artificial Sequence: Synthetic oligonucleotide
aaggcacuauguggcacau

SEQ ID NO: 1218090 - RNA, 19 nt, Artificial Sequence
  Description of Artificial Sequence: Synthetic oligonucleotide
aucaccuauugaugucuuu

SEQ ID NO: 1218091 - RNA, 19 nt, Artificial Sequence
  Description of Artificial Sequence: Synthetic oligonucleotide
cuccucucgaugccaccgc

SEQ ID NO: 1218092 - RNA, 19 nt, Artificial Sequence
  Description of Artificial Sequence: Synthetic oligonucleotide
uggacucaugauggcauua

SEQ ID NO: 1218093 - RNA, 19 nt, Artificial Sequence
  Description of Artificial Sequence: Synthetic oligonucleotide
caacgaugguaucccucac

SEQ ID NO: 1218094 - RNA, 19 nt, Artificial Sequence
  Description of Artificial Sequence: Synthetic oligonucleotide
ccagcucacgauacugacc

SEQ ID NO: 1218095 - RNA, 19 nt, Artificial Sequence
  Description of Artificial Sequence: Synthetic oligonucleotide
ccgacaggugacuuuugag

SEQ ID NO: 1218096 - RNA, 19 nt, Artificial Sequence
  Description of Artificial Sequence: Synthetic oligonucleotide
acuuccugucuggguacuc

SEQ ID NO: 1218097 - RNA, 19 nt, Artificial Sequence
  Description of Artificial Sequence: Synthetic oligonucleotide
ccaaucaccuauugauguc

SEQ ID NO: 1218098 - RNA, 19 nt, Artificial Sequence
  Description of Artificial Sequence: Synthetic oligonucleotide
guccguguguaagggcagg

SEQ ID NO: 1218099 - RNA, 19 nt, Artificial Sequence
  Description of Artificial Sequence: Synthetic oligonucleotide
uccguguguaagggcaggu

SEQ ID NO: 1218100 - RNA, 19 nt, Artificial Sequence
  Description of Artificial Sequence: Synthetic oligonucleotide
caaucaccuauugaugucu

SEQ ID NO: 1218101 - RNA, 19 nt, Artificial Sequence
  Description of Artificial Sequence: Synthetic oligonucleotide
agcucacgauacugaccag

SEQ ID NO: 1218102 - RNA, 19 nt, Artificial Sequence
  Description of Artificial Sequence: Synthetic oligonucleotide
caugggacauggaauacuu

SEQ ID NO: 1218103 - RNA, 19 nt, Artificial Sequence
  Description of Artificial Sequence: Synthetic oligonucleotide
uccccgacaggugacuuuu

SEQ ID NO: 1218104 - RNA, 19 nt, Artificial Sequence
  Description of Artificial Sequence: Synthetic oligonucleotide
cccacagauuagucuaaag

SEQ ID NO: 1218105 - RNA, 19 nt, Artificial Sequence
  Description of Artificial Sequence: Synthetic oligonucleotide
ccaagacaaguggaauugg

SEQ ID NO: 1218106 - RNA, 19 nt, Artificial Sequence
  Description of Artificial Sequence: Synthetic oligonucleotide
agcaaucucuagauacaaa

SEQ ID NO: 1218107 - RNA, 19 nt, Artificial Sequence
  Description of Artificial Sequence: Synthetic oligonucleotide
gcccaaugaagccagugaa

SEQ ID NO: 1218108 - RNA, 19 nt, Artificial Sequence
  Description of Artificial Sequence: Synthetic oligonucleotide
augcugcuaugccugugaa

SEQ ID NO: 1218109 - RNA, 19 nt, Artificial Sequence
  Description of Artificial Sequence: Synthetic oligonucleotide
cuggguacucccauucugu

SEQ ID NO: 1218110 - RNA, 19 nt, Artificial Sequence
  Description of Artificial Sequence: Synthetic oligonucleotide
gaacugcagggguucggaa

SEQ ID NO: 1218111 - RNA, 19 nt, Artificial Sequence
  Description of Artificial Sequence: Synthetic oligonucleotide
caaaucacagugccuaguu

SEQ ID NO: 1218112 - RNA, 19 nt, Artificial Sequence
  Description of Artificial Sequence: Synthetic oligonucleotide
gagauacuaucaacauuua

SEQ ID NO: 1218113 - RNA, 19 nt, Artificial Sequence
  Description of Artificial Sequence: Synthetic oligonucleotide
cauccaagauugagcuaca

SEQ ID NO: 1218114 - RNA, 19 nt, Artificial Sequence
  Description of Artificial Sequence: Synthetic oligonucleotide
auaggagaggucaguucau

SEQ ID NO: 1218115 - RNA, 19 nt, Artificial Sequence
  Description of Artificial Sequence: Synthetic oligonucleotide
gggcuacaaccucaagccc

SEQ ID NO: 1218116 - RNA, 19 nt, Artificial Sequence
  Description of Artificial Sequence: Synthetic oligonucleotide
cacagugccuaguuuggcu

SEQ ID NO: 1218117 - RNA, 19 nt, Artificial Sequence
  Description of Artificial Sequence: Synthetic oligonucleotide
aagccugcucuaauacaua

SEQ ID NO: 1218118 - RNA, 19 nt, Artificial Sequence
  Description of Artificial Sequence: Synthetic oligonucleotide
auucugugaucaguucauu

SEQ ID NO: 1218119 - RNA, 19 nt, Artificial Sequence
  Description of Artificial Sequence: Synthetic oligonucleotide
cagcaaucucuagauacaa

SEQ ID NO: 1218120 - RNA, 19 nt, Artificial Sequence
  Description of Artificial Sequence: Synthetic oligonucleotide
ccccauugcaaaaccgcug

SEQ ID NO: 1218121 - RNA, 19 nt, Artificial Sequence
  Description of Artificial Sequence: Synthetic oligonucleotide
cccagcucacgauacugac

SEQ ID NO: 1218122 - RNA, 19 nt, Artificial Sequence
  Description of Artificial Sequence: Synthetic oligonucleotide
acccagcucacgauacuga

SEQ ID NO: 1218123 - RNA, 19 nt, Artificial Sequence
  Description of Artificial Sequence: Synthetic oligonucleotide
guguguaagggcagguaua

SEQ ID NO: 1218124 - RNA, 19 nt, Artificial Sequence
  Description of Artificial Sequence: Synthetic oligonucleotide
cagugaagccugaagcuau

SEQ ID NO: 1218125 - RNA, 19 nt, Artificial Sequence
  Description of Artificial Sequence: Synthetic oligonucleotide
guaucccucacugcagucu

SEQ ID NO: 1218126 - RNA, 19 nt, Artificial Sequence
  Description of Artificial Sequence: Synthetic oligonucleotide
ggacauggaauacuuugau

SEQ ID NO: 1218127 - RNA, 19 nt, Artificial Sequence
  Description of Artificial Sequence: Synthetic oligonucleotide
gccuugggucuauaacagc

SEQ ID NO: 1218128 - RNA, 19 nt, Artificial Sequence
  Description of Artificial Sequence: Synthetic oligonucleotide
gguaucccucacugcaguc

SEQ ID NO: 1218129 - RNA, 19 nt, Artificial Sequence
  Description of Artificial Sequence: Synthetic oligonucleotide
cugcucuaauacauaugcu

SEQ ID NO: 1218130 - RNA, 19 nt, Artificial Sequence
  Description of Artificial Sequence: Synthetic oligonucleotide
gcucacgauacugaccaga

SEQ ID NO: 1218131 - RNA, 19 nt, Artificial Sequence
  Description of Artificial Sequence: Synthetic oligonucleotide
augauggcauuagcagaaa

SEQ ID NO: 1218132 - RNA, 19 nt, Artificial Sequence
  Description of Artificial Sequence: Synthetic oligonucleotide
ccucaggcaaagcugcuca

SEQ ID NO: 1218133 - RNA, 19 nt, Artificial Sequence
  Description of Artificial Sequence: Synthetic oligonucleotide
gcucaagugcacuuccugu

SEQ ID NO: 1218134 - RNA, 19 nt, Artificial Sequence
  Description of Artificial Sequence: Synthetic oligonucleotide
gccaaauuguuggcuucag

SEQ ID NO: 1218135 - RNA, 19 nt, Artificial Sequence
  Description of Artificial Sequence: Synthetic oligonucleotide
cccaacgaugguaucccuc

SEQ ID NO: 1218136 - RNA, 19 nt, Artificial Sequence
  Description of Artificial Sequence: Synthetic oligonucleotide
ggguucggaagguacugaa

SEQ ID NO: 1218137 - RNA, 19 nt, Artificial Sequence
  Description of Artificial Sequence: Synthetic oligonucleotide
gcagggguucggaagguac

SEQ ID NO: 1218138 - RNA, 19 nt, Artificial Sequence
  Description of Artificial Sequence: Synthetic oligonucleotide
ccauagucaauagcuccac

SEQ ID NO: 1218139 - RNA, 19 nt, Artificial Sequence
  Description of Artificial Sequence: Synthetic oligonucleotide
guacucccauucugugauc

SEQ ID NO: 1218140 - RNA, 19 nt, Artificial Sequence
  Description of Artificial Sequence: Synthetic oligonucleotide
aggcacuauguggcacauc

SEQ ID NO: 1218141 - RNA, 19 nt, Artificial Sequence
  Description of Artificial Sequence: Synthetic oligonucleotide
cgauacugaccagaauacc

SEQ ID NO: 1218142 - RNA, 19 nt, Artificial Sequence
  Description of Artificial Sequence: Synthetic oligonucleotide
cccauucugugaucaguuc

SEQ ID NO: 1218143 - RNA, 19 nt, Artificial Sequence
  Description of Artificial Sequence: Synthetic oligonucleotide
gugauccagagcgaccugu

SEQ ID NO: 1218144 - RNA, 19 nt, Artificial Sequence
  Description of Artificial Sequence: Synthetic oligonucleotide
gcucuugcugguaacggaa

SEQ ID NO: 1218145 - RNA, 19 nt, Artificial Sequence
  Description of Artificial Sequence: Synthetic oligonucleotide
ugcagggguucggaaggua

SEQ ID NO: 1218146 - RNA, 19 nt, Artificial Sequence
  Description of Artificial Sequence: Synthetic oligonucleotide
ccgccaaucaccuauugau

SEQ ID NO: 1218147 - RNA, 19 nt, Artificial Sequence
  Description of Artificial Sequence: Synthetic oligonucleotide
gccugcucuaauacauaug

SEQ ID NO: 1218148 - RNA, 19 nt, Artificial Sequence
  Description of Artificial Sequence: Synthetic oligonucleotide
gcuaugccugugaacagaa

SEQ ID NO: 1218149 - RNA, 19 nt, Artificial Sequence
  Description of Artificial Sequence: Synthetic oligonucleotide
gauccagagcgaccuguuu

SEQ ID NO: 1218150 - RNA, 19 nt, Artificial Sequence
  Description of Artificial Sequence: Synthetic oligonucleotide
caguggccugaagcagugg

SEQ ID NO: 1218151 - RNA, 19 nt, Artificial Sequence
  Description of Artificial Sequence: Synthetic oligonucleotide
cgaugguaucccucacugc

SEQ ID NO: 1218152 - RNA, 19 nt, Artificial Sequence
  Description of Artificial Sequence: Synthetic oligonucleotide
cugcccgccaaucaccuau

SEQ ID NO: 1218153 - RNA, 19 nt, Artificial Sequence
  Description of Artificial Sequence: Synthetic oligonucleotide
cgaagugagcagaccuggc

SEQ ID NO: 1218154 - RNA, 19 nt, Artificial Sequence
  Description of Artificial Sequence: Synthetic oligonucleotide
cccugaggaaaacaacuaa

SEQ ID NO: 1218155 - RNA, 19 nt, Artificial Sequence
  Description of Artificial Sequence: Synthetic oligonucleotide
gcaguggccugaagcagug

SEQ ID NO: 1218156 - RNA, 19 nt, Artificial Sequence
  Description of Artificial Sequence: Synthetic oligonucleotide
cagggguucggaagguacu

SEQ ID NO: 1218157 - RNA, 19 nt, Artificial Sequence
  Description of Artificial Sequence: Synthetic oligonucleotide
ccaacaguccccgacaggu

SEQ ID NO: 1218158 - RNA, 19 nt, Artificial Sequence
  Description of Artificial Sequence: Synthetic oligonucleotide
ccaauaugagaagaagccu

SEQ ID NO: 1218159 - RNA, 19 nt, Artificial Sequence
  Description of Artificial Sequence: Synthetic oligonucleotide
ggcacccugaugauucuaa

SEQ ID NO: 1218160 - RNA, 19 nt, Artificial Sequence
  Description of Artificial Sequence: Synthetic oligonucleotide
agcugggcuacaaccucaa

SEQ ID NO: 1218161 - RNA, 19 nt, Artificial Sequence
  Description of Artificial Sequence: Synthetic oligonucleotide
ccucucgaugccaccgcug

SEQ ID NO: 1218162 - RNA, 19 nt, Artificial Sequence
  Description of Artificial Sequence: Synthetic oligonucleotide
caccccugcccgccaauca

SEQ ID NO: 1218163 - RNA, 19 nt, Artificial Sequence
  Description of Artificial Sequence: Synthetic oligonucleotide
ccccugcccgccaaucacc

SEQ ID NO: 1218164 - RNA, 19 nt, Artificial Sequence
  Description of Artificial Sequence: Synthetic oligonucleotide
gccccgucucagcacuucc

SEQ ID NO: 1218165 - RNA, 19 nt, Artificial Sequence
  Description of Artificial Sequence: Synthetic oligonucleotide
accccacagauuagucuaa

SEQ ID NO: 1218166 - RNA, 19 nt, Artificial Sequence
  Description of Artificial Sequence: Synthetic oligonucleotide
gugaagccugaagcuaugu

SEQ ID NO: 1218167 - RNA, 19 nt, Artificial Sequence
  Description of Artificial Sequence: Synthetic oligonucleotide
gcaguccaaccauacaguu

SEQ ID NO: 1218168 - RNA, 19 nt, Artificial Sequence
  Description of Artificial Sequence: Synthetic oligonucleotide
aguccccgacaggugacuu

SEQ ID NO: 1218169 - RNA, 19 nt, Artificial Sequence
  Description of Artificial Sequence: Synthetic oligonucleotide
ggagacaaauaagguuucu

SEQ ID NO: 1218170 - RNA, 19 nt, Artificial Sequence
  Description of Artificial Sequence: Synthetic oligonucleotide
cugcagcaaucucuagaua

SEQ ID NO: 1218171 - RNA, 19 nt, Artificial Sequence
  Description of Artificial Sequence: Synthetic oligonucleotide
cagagcgaccuguuugaau

SEQ ID NO: 1218172 - RNA, 19 nt, Artificial Sequence
  Description of Artificial Sequence: Synthetic oligonucleotide
cccugaugauucuaaacau

SEQ ID NO: 1218173 - RNA, 19 nt, Artificial Sequence
  Description of Artificial Sequence: Synthetic oligonucleotide
caggugacuuuugagccau

SEQ ID NO: 1218174 - RNA, 19 nt, Artificial Sequence
  Description of Artificial Sequence: Synthetic oligonucleotide
guugaacagcugggcuaca

SEQ ID NO: 1218175 - RNA, 19 nt, Artificial Sequence
  Description of Artificial Sequence: Synthetic oligonucleotide
cccgccaaucaccuauuga

SEQ ID NO: 1218176 - RNA, 19 nt, Artificial Sequence
  Description of Artificial Sequence: Synthetic oligonucleotide
gcaaaaccgcugcagcaau

SEQ ID NO: 1218177 - RNA, 19 nt, Artificial Sequence
  Description of Artificial Sequence: Synthetic oligonucleotide
aggcacuaugacagcuuua

SEQ ID NO: 1218178 - RNA, 19 nt, Artificial Sequence
  Description of Artificial Sequence: Synthetic oligonucleotide
cccgacaggugacuuuuga

SEQ ID NO: 1218179 - RNA, 19 nt, Artificial Sequence
  Description of Artificial Sequence: Synthetic oligonucleotide
gcaguggauuuugggguga

SEQ ID NO: 1218180 - RNA, 19 nt, Artificial Sequence
  Description of Artificial Sequence: Synthetic oligonucleotide
ccccugaggaaaacaacua

SEQ ID NO: 1218181 - RNA, 19 nt, Artificial Sequence
  Description of Artificial Sequence: Synthetic oligonucleotide
ggcauggacuggucuuaaa

SEQ ID NO: 1218182 - RNA, 19 nt, Artificial Sequence
  Description of Artificial Sequence: Synthetic oligonucleotide
gcccgccaaucaccuauug

SEQ ID NO: 1218183 - RNA, 19 nt, Artificial Sequence
  Description of Artificial Sequence: Synthetic oligonucleotide
gggguucggaagguacuga

SEQ ID NO: 1218184 - RNA, 19 nt, Artificial Sequence
  Description of Artificial Sequence: Synthetic oligonucleotide
ggucucccaacgaugguau

SEQ ID NO: 1218185 - RNA, 19 nt, Artificial Sequence
  Description of Artificial Sequence: Synthetic oligonucleotide
cagugccuaguuuggcuuu

SEQ ID NO: 1218186 - RNA, 19 nt, Artificial Sequence
  Description of Artificial Sequence: Synthetic oligonucleotide
cguguguaagggcagguau

SEQ ID NO: 1218187 - RNA, 19 nt, Artificial Sequence
  Description of Artificial Sequence: Synthetic oligonucleotide
gccccauugcaaaaccgcu

SEQ ID NO: 1218188 - RNA, 19 nt, Artificial Sequence
  Description of Artificial Sequence: Synthetic oligonucleotide
agccagcauccaagauuga

SEQ ID NO: 1218189 - RNA, 19 nt, Artificial Sequence
  Description of Artificial Sequence: Synthetic oligonucleotide
guccccgacaggugacuuu

SEQ ID NO: 1218190 - RNA, 19 nt, Artificial Sequence
  Description of Artificial Sequence: Synthetic oligonucleotide
ccagguaaggagugcuauu

SEQ ID NO: 1218191 - RNA, 19 nt, Artificial Sequence
  Description of Artificial Sequence: Synthetic oligonucleotide
ccccagguaaggagugcua

SEQ ID NO: 1218192 - RNA, 19 nt, Artificial Sequence
  Description of Artificial Sequence: Synthetic oligonucleotide
ccguguguaagggcaggua

SEQ ID NO: 1218193 - RNA, 19 nt, Artificial Sequence
  Description of Artificial Sequence: Synthetic oligonucleotide
ccccacagauuagucuaaa

SEQ ID NO: 1218194 - RNA, 19 nt, Artificial Sequence
  Description of Artificial Sequence: Synthetic oligonucleotide
cccugcccgccaaucaccu

SEQ ID NO: 1218195 - RNA, 19 nt, Artificial Sequence
  Description of Artificial Sequence: Synthetic oligonucleotide
ccagagcgaccuguuugaa

SEQ ID NO: 1218196 - RNA, 19 nt, Artificial Sequence
  Description of Artificial Sequence: Synthetic oligonucleotide
cuggacugacugggcucuu

SEQ ID NO: 1218197 - RNA, 19 nt, Artificial Sequence
  Description of Artificial Sequence: Synthetic oligonucleotide
aaaauuaucacguauaaga

SEQ ID NO: 1218198 - RNA, 19 nt, Artificial Sequence
  Description of Artificial Sequence: Synthetic oligonucleotide
aaugaugcuaaagaaaagc

SEQ ID NO: 1218199 - RNA, 19 nt, Artificial Sequence
  Description of Artificial Sequence: Synthetic oligonucleotide
ucuauuaacauuacaacag

SEQ ID NO: 1218200 - RNA, 19 nt, Artificial Sequence
  Description of Artificial Sequence: Synthetic oligonucleotide
aaucacaacauguauaaag

SEQ ID NO: 1218201 - RNA, 19 nt, Artificial Sequence
  Description of Artificial Sequence: Synthetic oligonucleotide
uguuuugcaacuaauaacc

SEQ ID NO: 1218202 - RNA, 19 nt, Artificial Sequence
  Description of Artificial Sequence: Synthetic oligonucleotide
aaauuaugacaucacauag

SEQ ID NO: 1218203 - RNA, 19 nt, Artificial Sequence
  Description of Artificial Sequence: Synthetic oligonucleotide
acuacaucaaaguuguacc

SEQ ID NO: 1218204 - RNA, 19 nt, Artificial Sequence
  Description of Artificial Sequence: Synthetic oligonucleotide
uaacauuacaacaggaagg

SEQ ID NO: 1218205 - RNA, 19 nt, Artificial Sequence
  Description of Artificial Sequence: Synthetic oligonucleotide
uuuugcacuacuauaauca

SEQ ID NO: 1218206 - RNA, 19 nt, Artificial Sequence
  Description of Artificial Sequence: Synthetic oligonucleotide
aauaauuuuggcuucucca

SEQ ID NO: 1218207 - RNA, 19 nt, Artificial Sequence
  Description of Artificial Sequence: Synthetic oligonucleotide
auaaaagcaaccuugagaa

SEQ ID NO: 1218208 - RNA, 19 nt, Artificial Sequence
  Description of Artificial Sequence: Synthetic oligonucleotide
aguuauauuugguaauggc

SEQ ID NO: 1218209 - RNA, 19 nt, Artificial Sequence
  Description of Artificial Sequence: Synthetic oligonucleotide
aacuacaucaaaguuguac

SEQ ID NO: 1218210 - RNA, 19 nt, Artificial Sequence
  Description of Artificial Sequence: Synthetic oligonucleotide
uuuuauauucuuuccaagc

SEQ ID NO: 1218211 - RNA, 19 nt, Artificial Sequence
  Description of Artificial Sequence: Synthetic oligonucleotide
uuugcaacuaauaaccugu

SEQ ID NO: 1218212 - RNA, 19 nt, Artificial Sequence
  Description of Artificial Sequence: Synthetic oligonucleotide
uuaauauauaacuuacaca

SEQ ID NO: 1218213 - RNA, 19 nt, Artificial Sequence
  Description of Artificial Sequence: Synthetic oligonucleotide
uauaaaggugucauguuag

SEQ ID NO: 1218214 - RNA, 19 nt, Artificial Sequence
  Description of Artificial Sequence: Synthetic oligonucleotide
aaaggugucauguuaggug

SEQ ID NO: 1218215 - RNA, 19 nt, Artificial Sequence
  Description of Artificial Sequence: Synthetic oligonucleotide
ucaguuuccauuuugggga

SEQ ID NO: 1218216 - RNA, 19 nt, Artificial Sequence
  Description of Artificial Sequence: Synthetic oligonucleotide
uguaugaugauguuccaag

SEQ ID NO: 1218217 - RNA, 19 nt, Artificial Sequence
  Description of Artificial Sequence: Synthetic oligonucleotide
uuauauuugguaauggcaa

SEQ ID NO: 1218218 - RNA, 19 nt, Artificial Sequence
  Description of Artificial Sequence: Synthetic oligonucleotide
uauaagaauaaaauugaaa

SEQ ID NO: 1218219 - RNA, 19 nt, Artificial Sequence
  Description of Artificial Sequence: Synthetic oligonucleotide
aguuguaccaaacucuuuc

SEQ ID NO: 1218220 - RNA, 19 nt, Artificial Sequence
  Description of Artificial Sequence: Synthetic oligonucleotide
uuuauauucuuuccaagcu

SEQ ID NO: 1218221 - RNA, 19 nt, Artificial Sequence
  Description of Artificial Sequence: Synthetic oligonucleotide
gauguuccaagauugaaug

SEQ ID NO: 1218222 - RNA, 19 nt, Artificial Sequence
  Description of Artificial Sequence: Synthetic oligonucleotide
ugauaaauccagcaaaacu

SEQ ID NO: 1218223 - RNA, 19 nt, Artificial Sequence
  Description of Artificial Sequence: Synthetic oligonucleotide
aaaaccgaaauuaagauuu

SEQ ID NO: 1218224 - RNA, 19 nt, Artificial Sequence
  Description of Artificial Sequence: Synthetic oligonucleotide
uguuacggcaccaacaucu

SEQ ID NO: 1218225 - RNA, 19 nt, Artificial Sequence
  Description of Artificial Sequence: Synthetic oligonucleotide
acauagggcaguuuuagac

SEQ ID NO: 1218226 - RNA, 19 nt, Artificial Sequence
  Description of Artificial Sequence: Synthetic oligonucleotide
uucuuuaacauccucuggc

SEQ ID NO: 1218227 - RNA, 19 nt, Artificial Sequence
  Description of Artificial Sequence: Synthetic oligonucleotide
auaacuuacacacagugaa

SEQ ID NO: 1218228 - RNA, 19 nt, Artificial Sequence
  Description of Artificial Sequence: Synthetic oligonucleotide
uauuaugauaaauccagca

SEQ ID NO: 1218229 - RNA, 19 nt, Artificial Sequence
  Description of Artificial Sequence: Synthetic oligonucleotide
ugaugauguuccaagauug

SEQ ID NO: 1218230 - RNA, 19 nt, Artificial Sequence
  Description of Artificial Sequence: Synthetic oligonucleotide
cauuacaacaggaagguac

SEQ ID NO: 1218231 - RNA, 19 nt, Artificial Sequence
  Description of Artificial Sequence: Synthetic oligonucleotide
uucagcauuuuccacauug

SEQ ID NO: 1218232 - RNA, 19 nt, Artificial Sequence
  Description of Artificial Sequence: Synthetic oligonucleotide
cuuguuaccaaauuaugac

SEQ ID NO: 1218233 - RNA, 19 nt, Artificial Sequence
  Description of Artificial Sequence: Synthetic oligonucleotide
gauugaaugaugcuaaaga

SEQ ID NO: 1218234 - RNA, 19 nt, Artificial Sequence
  Description of Artificial Sequence: Synthetic oligonucleotide
gugaaauucacaaaguugc

SEQ ID NO: 1218235 - RNA, 19 nt, Artificial Sequence
  Description of Artificial Sequence: Synthetic oligonucleotide
aauucuaacucuuaacauu

SEQ ID NO: 1218236 - RNA, 19 nt, Artificial Sequence
  Description of Artificial Sequence: Synthetic oligonucleotide
aacuguuuuauuaugauaa

SEQ ID NO: 1218237 - RNA, 19 nt, Artificial Sequence
  Description of Artificial Sequence: Synthetic oligonucleotide
aauuaugacaucacauagg

SEQ ID NO: 1218238 - RNA, 19 nt, Artificial Sequence
  Description of Artificial Sequence: Synthetic oligonucleotide
acguauaagaauaaaauug

SEQ ID NO: 1218239 - RNA, 19 nt, Artificial Sequence
  Description of Artificial Sequence: Synthetic oligonucleotide
cuaauaaccuguaugauga

SEQ ID NO: 1218240 - RNA, 19 nt, Artificial Sequence
  Description of Artificial Sequence: Synthetic oligonucleotide
ugcacuacuauaaucacaa

SEQ ID NO: 1218241 - RNA, 19 nt, Artificial Sequence
  Description of Artificial Sequence: Synthetic oligonucleotide
acacauaugaucaaaacug

SEQ ID NO: 1218242 - RNA, 19 nt, Artificial Sequence
  Description of Artificial Sequence: Synthetic oligonucleotide
cacagugaaauucacaaag

SEQ ID NO: 1218243 - RNA, 19 nt, Artificial Sequence
  Description of Artificial Sequence: Synthetic oligonucleotide
uauauucuuuccaagcuac

SEQ ID NO: 1218244 - RNA, 19 nt, Artificial Sequence
  Description of Artificial Sequence: Synthetic oligonucleotide
uuuuauauuuugcacuacu

SEQ ID NO: 1218245 - RNA, 19 nt, Artificial Sequence
  Description of Artificial Sequence: Synthetic oligonucleotide
uuuaacauccucuggcuug

SEQ ID NO: 1218246 - RNA, 19 nt, Artificial Sequence
  Description of Artificial Sequence: Synthetic oligonucleotide
auaaucacaacauguauaa

SEQ ID NO: 1218247 - RNA, 19 nt, Artificial Sequence
  Description of Artificial Sequence: Synthetic oligonucleotide
aacucuuaacauuaccuga

SEQ ID NO: 1218248 - RNA, 19 nt, Artificial Sequence
  Description of Artificial Sequence: Synthetic oligonucleotide
uauaaucacaacauguaua

SEQ ID NO: 1218249 - RNA, 19 nt, Artificial Sequence
  Description of Artificial Sequence: Synthetic oligonucleotide
auagggcaguuuuagacac

SEQ ID NO: 1218250 - RNA, 19 nt, Artificial Sequence
  Description of Artificial Sequence: Synthetic oligonucleotide
cucaguuuccauuuugggg

SEQ ID NO: 1218251 - RNA, 19 nt, Artificial Sequence
  Description of Artificial Sequence: Synthetic oligonucleotide
uacugauacaguuauauuu

SEQ ID NO: 1218252 - RNA, 19 nt, Artificial Sequence
  Description of Artificial Sequence: Synthetic oligonucleotide
aaugaacuaauugcagcac

SEQ ID NO: 1218253 - RNA, 19 nt, Artificial Sequence
  Description of Artificial Sequence: Synthetic oligonucleotide
uguuaccaaauuaugacau

SEQ ID NO: 1218254 - RNA, 19 nt, Artificial Sequence
  Description of Artificial Sequence: Synthetic oligonucleotide
auuuugcacuacuauaauc

SEQ ID NO: 1218255 - RNA, 19 nt, Artificial Sequence
  Description of Artificial Sequence: Synthetic oligonucleotide
ucuuuuggaauucuccuac

SEQ ID NO: 1218256 - RNA, 19 nt, Artificial Sequence
  Description of Artificial Sequence: Synthetic oligonucleotide
aacauuacaacaggaaggu

SEQ ID NO: 1218257 - RNA, 19 nt, Artificial Sequence
  Description of Artificial Sequence: Synthetic oligonucleotide
uaacucuuaacauuaccug

SEQ ID NO: 1218258 - RNA, 19 nt, Artificial Sequence
  Description of Artificial Sequence: Synthetic oligonucleotide
gagaacuacaucaaaguug

SEQ ID NO: 1218259 - RNA, 19 nt, Artificial Sequence
  Description of Artificial Sequence: Synthetic oligonucleotide
uauaacuuacacacaguga

SEQ ID NO: 1218260 - RNA, 19 nt, Artificial Sequence
  Description of Artificial Sequence: Synthetic oligonucleotide
ucuaacucuuaacauuacc

SEQ ID NO: 1218261 - RNA, 19 nt, Artificial Sequence
  Description of Artificial Sequence: Synthetic oligonucleotide
uugaaaauuaucacguaua

SEQ ID NO: 1218262 - RNA, 19 nt, Artificial Sequence
  Description of Artificial Sequence: Synthetic oligonucleotide
ugaccuucuuuauaaaagc

SEQ ID NO: 1218263 - RNA, 19 nt, Artificial Sequence
  Description of Artificial Sequence: Synthetic oligonucleotide
uuauaaaagcaaccuugag

SEQ ID NO: 1218264 - RNA, 19 nt, Artificial Sequence
  Description of Artificial Sequence: Synthetic oligonucleotide
ucaaaaccgaaauuaagau

SEQ ID NO: 1218265 - RNA, 19 nt, Artificial Sequence
  Description of Artificial Sequence: Synthetic oligonucleotide
uuugcguuuuccaucuucc

SEQ ID NO: 1218266 - RNA, 19 nt, Artificial Sequence
  Description of Artificial Sequence: Synthetic oligonucleotide
aggcauagcagacagucgg

SEQ ID NO: 1218267 - RNA, 19 nt, Artificial Sequence
  Description of Artificial Sequence: Synthetic oligonucleotide
auuaugauaaauccagcaa

SEQ ID NO: 1218268 - RNA, 19 nt, Artificial Sequence
  Description of Artificial Sequence: Synthetic oligonucleotide
uuuugcaacuaauaaccug

SEQ ID NO: 1218269 - RNA, 19 nt, Artificial Sequence
  Description of Artificial Sequence: Synthetic oligonucleotide
guuucaggaauuguuacgg

SEQ ID NO: 1218270 - RNA, 19 nt, Artificial Sequence
  Description of Artificial Sequence: Synthetic oligonucleotide
ucuuuuaggcuucaccucu

SEQ ID NO: 1218271 - RNA, 19 nt, Artificial Sequence
  Description of Artificial Sequence: Synthetic oligonucleotide
uuauuaugauaaauccagc

SEQ ID NO: 1218272 - RNA, 19 nt, Artificial Sequence
  Description of Artificial Sequence: Synthetic oligonucleotide
uucuuuauaaaagcaaccu

SEQ ID NO: 1218273 - RNA, 19 nt, Artificial Sequence
  Description of Artificial Sequence: Synthetic oligonucleotide
ugguguaaagggcacaggc

SEQ ID NO: 1218274 - RNA, 19 nt, Artificial Sequence
  Description of Artificial Sequence: Synthetic oligonucleotide
uuaacauuaccugaaaaua

SEQ ID NO: 1218275 - RNA, 19 nt, Artificial Sequence
  Description of Artificial Sequence: Synthetic oligonucleotide
uuccaagauugaaugaugc

SEQ ID NO: 1218276 - RNA, 19 nt, Artificial Sequence
  Description of Artificial Sequence: Synthetic oligonucleotide
aguuuuagacaccacucag

SEQ ID NO: 1218277 - RNA, 19 nt, Artificial Sequence
  Description of Artificial Sequence: Synthetic oligonucleotide
caaaacuuugugcauacac

SEQ ID NO: 1218278 - RNA, 19 nt, Artificial Sequence
  Description of Artificial Sequence: Synthetic oligonucleotide
ucauucaucuuuauuuccu

SEQ ID NO: 1218279 - RNA, 19 nt, Artificial Sequence
  Description of Artificial Sequence: Synthetic oligonucleotide
cacaacauguauaaaggug

SEQ ID NO: 1218280 - RNA, 19 nt, Artificial Sequence
  Description of Artificial Sequence: Synthetic oligonucleotide
uugguaauggcaauucuaa

SEQ ID NO: 1218281 - RNA, 19 nt, Artificial Sequence
  Description of Artificial Sequence: Synthetic oligonucleotide
agcaaaacuuugugcauac

SEQ ID NO: 1218282 - RNA, 19 nt, Artificial Sequence
  Description of Artificial Sequence: Synthetic oligonucleotide
guaauggcaauucuaacuc

SEQ ID NO: 1218283 - RNA, 19 nt, Artificial Sequence
  Description of Artificial Sequence: Synthetic oligonucleotide
uuuauauuuugcacuacua

SEQ ID NO: 1218284 - RNA, 19 nt, Artificial Sequence
  Description of Artificial Sequence: Synthetic oligonucleotide
uuguuaccaaauuaugaca

SEQ ID NO: 1218285 - RNA, 19 nt, Artificial Sequence
  Description of Artificial Sequence: Synthetic oligonucleotide
uacggcaccaacaucuuug

SEQ ID NO: 1218286 - RNA, 19 nt, Artificial Sequence
  Description of Artificial Sequence: Synthetic oligonucleotide
acaggcauagcagacaguc

SEQ ID NO: 1218287 - RNA, 19 nt, Artificial Sequence
  Description of Artificial Sequence: Synthetic oligonucleotide
ucaggaauuguuacggcac

SEQ ID NO: 1218288 - RNA, 19 nt, Artificial Sequence
  Description of Artificial Sequence: Synthetic oligonucleotide
agaacuacaucaaaguugu

SEQ ID NO: 1218289 - RNA, 19 nt, Artificial Sequence
  Description of Artificial Sequence: Synthetic oligonucleotide
acuacuauaaucacaacau

SEQ ID NO: 1218290 - RNA, 19 nt, Artificial Sequence
  Description of Artificial Sequence: Synthetic oligonucleotide
caacuaauaaccuguauga

SEQ ID NO: 1218291 - RNA, 19 nt, Artificial Sequence
  Description of Artificial Sequence: Synthetic oligonucleotide
agcagucuccgucugaccg

SEQ ID NO: 1218292 - RNA, 19 nt, Artificial Sequence
  Description of Artificial Sequence: Synthetic oligonucleotide
aaugccgagagcagucucc

SEQ ID NO: 1218293 - RNA, 19 nt, Artificial Sequence
  Description of Artificial Sequence: Synthetic oligonucleotide
aauaguugaccuucuuuau

SEQ ID NO: 1218294 - RNA, 19 nt, Artificial Sequence
  Description of Artificial Sequence: Synthetic oligonucleotide
uauuuaucucuauuaacau

SEQ ID NO: 1218295 - RNA, 19 nt, Artificial Sequence
  Description of Artificial Sequence: Synthetic oligonucleotide
uggaacuguuuuauuauga

SEQ ID NO: 1218296 - RNA, 19 nt, Artificial Sequence
  Description of Artificial Sequence: Synthetic oligonucleotide
auaaaggugucauguuagg

SEQ ID NO: 1218297 - RNA, 19 nt, Artificial Sequence
  Description of Artificial Sequence: Synthetic oligonucleotide
uuugguaauggcaauucua

SEQ ID NO: 1218298 - RNA, 19 nt, Artificial Sequence
  Description of Artificial Sequence: Synthetic oligonucleotide
uacuuguuaccaaauuaug

SEQ ID NO: 1218299 - RNA, 19 nt, Artificial Sequence
  Description of Artificial Sequence: Synthetic oligonucleotide
cucuauuaacauuacaaca

SEQ ID NO: 1218300 - RNA, 19 nt, Artificial Sequence
  Description of Artificial Sequence: Synthetic oligonucleotide
uguuugaaaucuuuguuuu

SEQ ID NO: 1218301 - RNA, 19 nt, Artificial Sequence
  Description of Artificial Sequence: Synthetic oligonucleotide
auacaguuauauuugguaa

SEQ ID NO: 1218302 - RNA, 19 nt, Artificial Sequence
  Description of Artificial Sequence: Synthetic oligonucleotide
aauaaccuguaugaugaug

SEQ ID NO: 1218303 - RNA, 19 nt, Artificial Sequence
  Description of Artificial Sequence: Synthetic oligonucleotide
aauuuuggcuucuccauuu

SEQ ID NO: 1218304 - RNA, 19 nt, Artificial Sequence
  Description of Artificial Sequence: Synthetic oligonucleotide
gagauccuuaggcaggagg

SEQ ID NO: 1218305 - RNA, 19 nt, Artificial Sequence
  Description of Artificial Sequence: Synthetic oligonucleotide
cauuaccugaaaauaguug

SEQ ID NO: 1218306 - RNA, 19 nt, Artificial Sequence
  Description of Artificial Sequence: Synthetic oligonucleotide
cacauaugaucaaaacugc

SEQ ID NO: 1218307 - RNA, 19 nt, Artificial Sequence
  Description of Artificial Sequence: Synthetic oligonucleotide
acaacauguauaaaggugu

SEQ ID NO: 1218308 - RNA, 19 nt, Artificial Sequence
  Description of Artificial Sequence: Synthetic oligonucleotide
auuaucacguauaagaaua

SEQ ID NO: 1218309 - RNA, 19 nt, Artificial Sequence
  Description of Artificial Sequence: Synthetic oligonucleotide
ucuucgaggauuucuuccc

SEQ ID NO: 1218310 - RNA, 19 nt, Artificial Sequence
  Description of Artificial Sequence: Synthetic oligonucleotide
acugauacaguuauauuug

SEQ ID NO: 1218311 - RNA, 19 nt, Artificial Sequence
  Description of Artificial Sequence: Synthetic oligonucleotide
aauuguuacggcaccaaca

SEQ ID NO: 1218312 - RNA, 19 nt, Artificial Sequence
  Description of Artificial Sequence: Synthetic oligonucleotide
acauaugaucaaaacugcc

SEQ ID NO: 1218313 - RNA, 19 nt, Artificial Sequence
  Description of Artificial Sequence: Synthetic oligonucleotide
auguauaaaggugucaugu

SEQ ID NO: 1218314 - RNA, 19 nt, Artificial Sequence
  Description of Artificial Sequence: Synthetic oligonucleotide
ccuacuuugaaaauuauca

SEQ ID NO: 1218315 - RNA, 19 nt, Artificial Sequence
  Description of Artificial Sequence: Synthetic oligonucleotide
gcaacuaauaaccuguaug

SEQ ID NO: 1218316 - RNA, 19 nt, Artificial Sequence
  Description of Artificial Sequence: Synthetic oligonucleotide
uucaggaauuguuacggca

SEQ ID NO: 1218317 - RNA, 19 nt, Artificial Sequence
  Description of Artificial Sequence: Synthetic oligonucleotide
ucuuuauaaaagcaaccuu

SEQ ID NO: 1218318 - RNA, 19 nt, Artificial Sequence
  Description of Artificial Sequence: Synthetic oligonucleotide
ccuauuuccaucuuuuacc

SEQ ID NO: 1218319 - RNA, 19 nt, Artificial Sequence
  Description of Artificial Sequence: Synthetic oligonucleotide
guuauauuugguaauggca

SEQ ID NO: 1218320 - RNA, 19 nt, Artificial Sequence
  Description of Artificial Sequence: Synthetic oligonucleotide
aguuggcguucuuuuaggc

SEQ ID NO: 1218321 - RNA, 19 nt, Artificial Sequence
  Description of Artificial Sequence: Synthetic oligonucleotide
aagcuacugauacaguuau

SEQ ID NO: 1218322 - RNA, 19 nt, Artificial Sequence
  Description of Artificial Sequence: Synthetic oligonucleotide
auuguuacggcaccaacau

SEQ ID NO: 1218323 - RNA, 19 nt, Artificial Sequence
  Description of Artificial Sequence: Synthetic oligonucleotide
uuggacauuuucuucuagc

SEQ ID NO: 1218324 - RNA, 19 nt, Artificial Sequence
  Description of Artificial Sequence: Synthetic oligonucleotide
ucuuaacauuaccugaaaa

SEQ ID NO: 1218325 - RNA, 19 nt, Artificial Sequence
  Description of Artificial Sequence: Synthetic oligonucleotide
guguuuugcaacuaauaac

SEQ ID NO: 1218326 - RNA, 19 nt, Artificial Sequence
  Description of Artificial Sequence: Synthetic oligonucleotide
ugaaauucacaaaguugca

SEQ ID NO: 1218327 - RNA, 19 nt, Artificial Sequence
  Description of Artificial Sequence: Synthetic oligonucleotide
auaaccuguaugaugaugu

SEQ ID NO: 1218328 - RNA, 19 nt, Artificial Sequence
  Description of Artificial Sequence: Synthetic oligonucleotide
agcauuuuccacauugcac

SEQ ID NO: 1218329 - RNA, 19 nt, Artificial Sequence
  Description of Artificial Sequence: Synthetic oligonucleotide
ucuuuaacauccucuggcu

SEQ ID NO: 1218330 - RNA, 19 nt, Artificial Sequence
  Description of Artificial Sequence: Synthetic oligonucleotide
aacaggaagguacuuguua

SEQ ID NO: 1218331 - RNA, 19 nt, Artificial Sequence
  Description of Artificial Sequence: Synthetic oligonucleotide
uguggaacuguuuuauuau

SEQ ID NO: 1218332 - RNA, 19 nt, Artificial Sequence
  Description of Artificial Sequence: Synthetic oligonucleotide
cacaaaguugcaaguauac

SEQ ID NO: 1218333 - RNA, 19 nt, Artificial Sequence
  Description of Artificial Sequence: Synthetic oligonucleotide
ucauguuagguguuuugca

SEQ ID NO: 1218334 - RNA, 19 nt, Artificial Sequence
  Description of Artificial Sequence: Synthetic oligonucleotide
agcgacugaguuuucaaug

SEQ ID NO: 1218335 - RNA, 19 nt, Artificial Sequence
  Description of Artificial Sequence: Synthetic oligonucleotide
ucagcauuuuccacauugc

SEQ ID NO: 1218336 - RNA, 19 nt, Artificial Sequence
  Description of Artificial Sequence: Synthetic oligonucleotide
uuccuuauuuuccucuucu

SEQ ID NO: 1218337 - RNA, 19 nt, Artificial Sequence
  Description of Artificial Sequence: Synthetic oligonucleotide
uauucuuuccaagcuacug

SEQ ID NO: 1218338 - RNA, 19 nt, Artificial Sequence
  Description of Artificial Sequence: Synthetic oligonucleotide
cugaaaauaguugaccuuc

SEQ ID NO: 1218339 - RNA, 19 nt, Artificial Sequence
  Description of Artificial Sequence: Synthetic oligonucleotide
accaaauuaugacaucaca

SEQ ID NO: 1218340 - RNA, 19 nt, Artificial Sequence
  Description of Artificial Sequence: Synthetic oligonucleotide
uuaccugaaaauaguugac

SEQ ID NO: 1218341 - RNA, 19 nt, Artificial Sequence
  Description of Artificial Sequence: Synthetic oligonucleotide
ugagaacuacaucaaaguu

SEQ ID NO: 1218342 - RNA, 19 nt, Artificial Sequence
  Description of Artificial Sequence: Synthetic oligonucleotide
aacuuacacacagugaaau

SEQ ID NO: 1218343 - RNA, 19 nt, Artificial Sequence
  Description of Artificial Sequence: Synthetic oligonucleotide
gauaaauccagcaaaacuu

SEQ ID NO: 1218344 - RNA, 19 nt, Artificial Sequence
  Description of Artificial Sequence: Synthetic oligonucleotide
aaaugccgagagcagucuc

SEQ ID NO: 1218345 - RNA, 19 nt, Artificial Sequence
  Description of Artificial Sequence: Synthetic oligonucleotide
aaccuguaugaugauguuc

SEQ ID NO: 1218346 - RNA, 19 nt, Artificial Sequence
  Description of Artificial Sequence: Synthetic oligonucleotide
uuaacauccucuggcuugg

SEQ ID NO: 1218347 - RNA, 19 nt, Artificial Sequence
  Description of Artificial Sequence: Synthetic oligonucleotide
uucuuugcguuuuccaucu

SEQ ID NO: 1218348 - RNA, 19 nt, Artificial Sequence
  Description of Artificial Sequence: Synthetic oligonucleotide
uguuagguguuuugcaacu

SEQ ID NO: 1218349 - RNA, 19 nt, Artificial Sequence
  Description of Artificial Sequence: Synthetic oligonucleotide
ugauacaguuauauuuggu

SEQ ID NO: 1218350 - RNA, 19 nt, Artificial Sequence
  Description of Artificial Sequence: Synthetic oligonucleotide
ucacaacauguauaaaggu

SEQ ID NO: 1218351 - RNA, 19 nt, Artificial Sequence
  Description of Artificial Sequence: Synthetic oligonucleotide
ucacauagggcaguuuuag

SEQ ID NO: 1218352 - RNA, 19 nt, Artificial Sequence
  Description of Artificial Sequence: Synthetic oligonucleotide
gaugcuaaagaaaagcacu

SEQ ID NO: 1218353 - RNA, 19 nt, Artificial Sequence
  Description of Artificial Sequence: Synthetic oligonucleotide
caaugaacuaauugcagca

SEQ ID NO: 1218354 - RNA, 19 nt, Artificial Sequence
  Description of Artificial Sequence: Synthetic oligonucleotide
cuuguuuucaucauugccu

SEQ ID NO: 1218355 - RNA, 19 nt, Artificial Sequence
  Description of Artificial Sequence: Synthetic oligonucleotide
uuugcacuacuauaaucac

SEQ ID NO: 1218356 - RNA, 19 nt, Artificial Sequence
  Description of Artificial Sequence: Synthetic oligonucleotide
uuccacauugcacucuucu

SEQ ID NO: 1218357 - RNA, 19 nt, Artificial Sequence
  Description of Artificial Sequence: Synthetic oligonucleotide
agaauaaaauugaaacuca

SEQ ID NO: 1218358 - RNA, 19 nt, Artificial Sequence
  Description of Artificial Sequence: Synthetic oligonucleotide
uuguggaacuguuuuauua

SEQ ID NO: 1218359 - RNA, 19 nt, Artificial Sequence
  Description of Artificial Sequence: Synthetic oligonucleotide
ugcugaaucugccuucucu

SEQ ID NO: 1218360 - RNA, 19 nt, Artificial Sequence
  Description of Artificial Sequence: Synthetic oligonucleotide
cacuacuauaaucacaaca

SEQ ID NO: 1218361 - RNA, 19 nt, Artificial Sequence
  Description of Artificial Sequence: Synthetic oligonucleotide
aacuaauugcagcacgaua

SEQ ID NO: 1218362 - RNA, 19 nt, Artificial Sequence
  Description of Artificial Sequence: Synthetic oligonucleotide
cucuucgaggauuucuucc

SEQ ID NO: 1218363 - RNA, 19 nt, Artificial Sequence
  Description of Artificial Sequence: Synthetic oligonucleotide
gcaauucuaacucuuaaca

SEQ ID NO: 1218364 - RNA, 19 nt, Artificial Sequence
  Description of Artificial Sequence: Synthetic oligonucleotide
aaaguugcaaguauacauu

SEQ ID NO: 1218365 - RNA, 19 nt, Artificial Sequence
  Description of Artificial Sequence: Synthetic oligonucleotide
ucugguguaaagggcacag

SEQ ID NO: 1218366 - RNA, 19 nt, Artificial Sequence
  Description of Artificial Sequence: Synthetic oligonucleotide
cauuguugcagcucuccgc

SEQ ID NO: 1218367 - RNA, 19 nt, Artificial Sequence
  Description of Artificial Sequence: Synthetic oligonucleotide
uaccugaaaauaguugacc

SEQ ID NO: 1218368 - RNA, 19 nt, Artificial Sequence
  Description of Artificial Sequence: Synthetic oligonucleotide
uuuaccuuuguggaacugu

SEQ ID NO: 1218369 - RNA, 19 nt, Artificial Sequence
  Description of Artificial Sequence: Synthetic oligonucleotide
uugcacuacuauaaucaca

SEQ ID NO: 1218370 - RNA, 19 nt, Artificial Sequence
  Description of Artificial Sequence: Synthetic oligonucleotide
acuuguuaccaaauuauga

SEQ ID NO: 1218371 - RNA, 19 nt, Artificial Sequence
  Description of Artificial Sequence: Synthetic oligonucleotide
gaguuggcguucuuuuagg

SEQ ID NO: 1218372 - RNA, 19 nt, Artificial Sequence
  Description of Artificial Sequence: Synthetic oligonucleotide
ugucauguuagguguuuug

SEQ ID NO: 1218373 - RNA, 19 nt, Artificial Sequence
  Description of Artificial Sequence: Synthetic oligonucleotide
uuaucacguauaagaauaa

SEQ ID NO: 1218374 - RNA, 19 nt, Artificial Sequence
  Description of Artificial Sequence: Synthetic oligonucleotide
agauugaaugaugcuaaag

SEQ ID NO: 1218375 - RNA, 19 nt, Artificial Sequence
  Description of Artificial Sequence: Synthetic oligonucleotide
guuuccauuuuggggaugg

SEQ ID NO: 1218376 - RNA, 19 nt, Artificial Sequence
  Description of Artificial Sequence: Synthetic oligonucleotide
caagauugaaugaugcuaa

SEQ ID NO: 1218377 - RNA, 19 nt, Artificial Sequence
  Description of Artificial Sequence: Synthetic oligonucleotide
caccuuguuuucaucauug

SEQ ID NO: 1218378 - RNA, 19 nt, Artificial Sequence
  Description of Artificial Sequence: Synthetic oligonucleotide
uuaucucuauuaacauuac

SEQ ID NO: 1218379 - RNA, 19 nt, Artificial Sequence
  Description of Artificial Sequence: Synthetic oligonucleotide
cuaacucuuaacauuaccu

SEQ ID NO: 1218380 - RNA, 19 nt, Artificial Sequence
  Description of Artificial Sequence: Synthetic oligonucleotide
gaagguacuuguuaccaaa

SEQ ID NO: 1218381 - RNA, 19 nt, Artificial Sequence
  Description of Artificial Sequence: Synthetic oligonucleotide
ugguuucaggaauuguuac

SEQ ID NO: 1218382 - RNA, 19 nt, Artificial Sequence
  Description of Artificial Sequence: Synthetic oligonucleotide
acauguauaaaggugucau

SEQ ID NO: 1218383 - RNA, 19 nt, Artificial Sequence
  Description of Artificial Sequence: Synthetic oligonucleotide
uuuucagccuccaccuugu

SEQ ID NO: 1218384 - RNA, 19 nt, Artificial Sequence
  Description of Artificial Sequence: Synthetic oligonucleotide
cuuaacauuaccugaaaau

SEQ ID NO: 1218385 - RNA, 19 nt, Artificial Sequence
  Description of Artificial Sequence: Synthetic oligonucleotide
aacauguauaaagguguca

SEQ ID NO: 1218386 - RNA, 19 nt, Artificial Sequence
  Description of Artificial Sequence: Synthetic oligonucleotide
uuggcguucuuuuaggcuu

SEQ ID NO: 1218387 - RNA, 19 nt, Artificial Sequence
  Description of Artificial Sequence: Synthetic oligonucleotide
ucuucagcgucuucauuca

SEQ ID NO: 1218388 - RNA, 19 nt, Artificial Sequence
  Description of Artificial Sequence: Synthetic oligonucleotide
ggugccucaauaauuuugg

SEQ ID NO: 1218389 - RNA, 19 nt, Artificial Sequence
  Description of Artificial Sequence: Synthetic oligonucleotide
gaauuguuacggcaccaac

SEQ ID NO: 1218390 - RNA, 19 nt, Artificial Sequence
  Description of Artificial Sequence: Synthetic oligonucleotide
uuuuggaauucuccuacuu

SEQ ID NO: 1218391 - RNA, 19 nt, Artificial Sequence
  Description of Artificial Sequence: Synthetic oligonucleotide
uuucaggaauuguuacggc

SEQ ID NO: 1218392 - RNA, 19 nt, Artificial Sequence
  Description of Artificial Sequence: Synthetic oligonucleotide
ugcguuuuccaucuuccuc

SEQ ID NO: 1218393 - RNA, 19 nt, Artificial Sequence
  Description of Artificial Sequence: Synthetic oligonucleotide
caucaaaguuguaccaaac

SEQ ID NO: 1218394 - RNA, 19 nt, Artificial Sequence
  Description of Artificial Sequence: Synthetic oligonucleotide
uguauaaaggugucauguu

SEQ ID NO: 1218395 - RNA, 19 nt, Artificial Sequence
  Description of Artificial Sequence: Synthetic oligonucleotide
agcucuccgcaggagaucc

SEQ ID NO: 1218396 - RNA, 19 nt, Artificial Sequence
  Description of Artificial Sequence: Synthetic oligonucleotide
acuauaaucacaacaugua

SEQ ID NO: 1218397 - RNA, 19 nt, Artificial Sequence
  Description of Artificial Sequence: Synthetic oligonucleotide
augaugcuaaagaaaagca

SEQ ID NO: 1218398 - RNA, 19 nt, Artificial Sequence
  Description of Artificial Sequence: Synthetic oligonucleotide
gagacuccuccuuuucucc

SEQ ID NO: 1218399 - RNA, 19 nt, Artificial Sequence
  Description of Artificial Sequence: Synthetic oligonucleotide
aagggcacaggcauagcag

SEQ ID NO: 1218400 - RNA, 19 nt, Artificial Sequence
  Description of Artificial Sequence: Synthetic oligonucleotide
caucuuuuaccuccucacc

SEQ ID NO: 1218401 - RNA, 19 nt, Artificial Sequence
  Description of Artificial Sequence: Synthetic oligonucleotide
uucuuuuaggcuucaccuc

SEQ ID NO: 1218402 - RNA, 19 nt, Artificial Sequence
  Description of Artificial Sequence: Synthetic oligonucleotide
caaaguuguaccaaacucu

SEQ ID NO: 1218403 - RNA, 19 nt, Artificial Sequence
  Description of Artificial Sequence: Synthetic oligonucleotide
uuuggcuccugacuggcau

SEQ ID NO: 1218404 - RNA, 19 nt, Artificial Sequence
  Description of Artificial Sequence: Synthetic oligonucleotide
guauaaaggugucauguua

SEQ ID NO: 1218405 - RNA, 19 nt, Artificial Sequence
  Description of Artificial Sequence: Synthetic oligonucleotide
caguuauauuugguaaugg

SEQ ID NO: 1218406 - RNA, 19 nt, Artificial Sequence
  Description of Artificial Sequence: Synthetic oligonucleotide
gucauguuagguguuuugc

SEQ ID NO: 1218407 - RNA, 19 nt, Artificial Sequence
  Description of Artificial Sequence: Synthetic oligonucleotide
auucuaacucuuaacauua

SEQ ID NO: 1218408 - RNA, 19 nt, Artificial Sequence
  Description of Artificial Sequence: Synthetic oligonucleotide
aucacguauaagaauaaaa

SEQ ID NO: 1218409 - RNA, 19 nt, Artificial Sequence
  Description of Artificial Sequence: Synthetic oligonucleotide
cauagggcaguuuuagaca

SEQ ID NO: 1218410 - RNA, 19 nt, Artificial Sequence
  Description of Artificial Sequence: Synthetic oligonucleotide
uuuccaagcuacugauaca

SEQ ID NO: 1218411 - RNA, 19 nt, Artificial Sequence
  Description of Artificial Sequence: Synthetic oligonucleotide
uuuagacaccacucagaga

SEQ ID NO: 1218412 - RNA, 19 nt, Artificial Sequence
  Description of Artificial Sequence: Synthetic oligonucleotide
aagauugaaugaugcuaaa

SEQ ID NO: 1218413 - RNA, 19 nt, Artificial Sequence
  Description of Artificial Sequence: Synthetic oligonucleotide
uggcaauucuaacucuuaa

SEQ ID NO: 1218414 - RNA, 19 nt, Artificial Sequence
  Description of Artificial Sequence: Synthetic oligonucleotide
uuuuccacauugcacucuu

SEQ ID NO: 1218415 - RNA, 19 nt, Artificial Sequence
  Description of Artificial Sequence: Synthetic oligonucleotide
uaccaaacucuuucuuuug

SEQ ID NO: 1218416 - RNA, 19 nt, Artificial Sequence
  Description of Artificial Sequence: Synthetic oligonucleotide
uccgcaggagauccuuagg

SEQ ID NO: 1218417 - RNA, 19 nt, Artificial Sequence
  Description of Artificial Sequence: Synthetic oligonucleotide
uuaccuuuguggaacuguu

SEQ ID NO: 1218418 - RNA, 19 nt, Artificial Sequence
  Description of Artificial Sequence: Synthetic oligonucleotide
gaacuguuuuauuaugaua

SEQ ID NO: 1218419 - RNA, 19 nt, Artificial Sequence
  Description of Artificial Sequence: Synthetic oligonucleotide
ggaguuggcguucuuuuag

SEQ ID NO: 1218420 - RNA, 19 nt, Artificial Sequence
  Description of Artificial Sequence: Synthetic oligonucleotide
ucuagcucaucaucuuuuc

SEQ ID NO: 1218421 - RNA, 19 nt, Artificial Sequence
  Description of Artificial Sequence: Synthetic oligonucleotide
accuuuaucuucauccucu

SEQ ID NO: 1218422 - RNA, 19 nt, Artificial Sequence
  Description of Artificial Sequence: Synthetic oligonucleotide
ugguaauggcaauucuaac

SEQ ID NO: 1218423 - RNA, 19 nt, Artificial Sequence
  Description of Artificial Sequence: Synthetic oligonucleotide
ucuuuuaccuccucaccuu

SEQ ID NO: 1218424 - RNA, 19 nt, Artificial Sequence
  Description of Artificial Sequence: Synthetic oligonucleotide
gguaauggcaauucuaacu

SEQ ID NO: 1218425 - RNA, 19 nt, Artificial Sequence
  Description of Artificial Sequence: Synthetic oligonucleotide
aaaaugccgagagcagucu

SEQ ID NO: 1218426 - RNA, 19 nt, Artificial Sequence
  Description of Artificial Sequence: Synthetic oligonucleotide
auaguugaccuucuuuaua

SEQ ID NO: 1218427 - RNA, 19 nt, Artificial Sequence
  Description of Artificial Sequence: Synthetic oligonucleotide
uucuaacucuuaacauuac

SEQ ID NO: 1218428 - RNA, 19 nt, Artificial Sequence
  Description of Artificial Sequence: Synthetic oligonucleotide
ugcccuccugaaauaaaca

SEQ ID NO: 1218429 - RNA, 19 nt, Artificial Sequence
  Description of Artificial Sequence: Synthetic oligonucleotide
ugcuaaagaaaagcacugu

SEQ ID NO: 1218430 - RNA, 19 nt, Artificial Sequence
  Description of Artificial Sequence: Synthetic oligonucleotide
gacugaguuuucaaugaac

SEQ ID NO: 1218431 - RNA, 19 nt, Artificial Sequence
  Description of Artificial Sequence: Synthetic oligonucleotide
caggaagguacuuguuacc

SEQ ID NO: 1218432 - RNA, 19 nt, Artificial Sequence
  Description of Artificial Sequence: Synthetic oligonucleotide
ugcaacuaauaaccuguau

SEQ ID NO: 1218433 - RNA, 19 nt, Artificial Sequence
  Description of Artificial Sequence: Synthetic oligonucleotide
guaugaugauguuccaaga

SEQ ID NO: 1218434 - RNA, 19 nt, Artificial Sequence
  Description of Artificial Sequence: Synthetic oligonucleotide
guuaccaaauuaugacauc

SEQ ID NO: 1218435 - RNA, 19 nt, Artificial Sequence
  Description of Artificial Sequence: Synthetic oligonucleotide
uuuuggacauuuucuucua

SEQ ID NO: 1218436 - RNA, 19 nt, Artificial Sequence
  Description of Artificial Sequence: Synthetic oligonucleotide
caggaauuguuacggcacc

SEQ ID NO: 1218437 - RNA, 19 nt, Artificial Sequence
  Description of Artificial Sequence: Synthetic oligonucleotide
caacauuuguggucuucag

SEQ ID NO: 1218438 - RNA, 19 nt, Artificial Sequence
  Description of Artificial Sequence: Synthetic oligonucleotide
uuggaguuggcguucuuuu

SEQ ID NO: 1218439 - RNA, 19 nt, Artificial Sequence
  Description of Artificial Sequence: Synthetic oligonucleotide
cguauaagaauaaaauuga

SEQ ID NO: 1218440 - RNA, 19 nt, Artificial Sequence
  Description of Artificial Sequence: Synthetic oligonucleotide
ggcaauucuaacucuuaac

SEQ ID NO: 1218441 - RNA, 19 nt, Artificial Sequence
  Description of Artificial Sequence: Synthetic oligonucleotide
gaaaagcacuguuuauaaa

SEQ ID NO: 1218442 - RNA, 19 nt, Artificial Sequence
  Description of Artificial Sequence: Synthetic oligonucleotide
uucuccuacuuugaaaauu

SEQ ID NO: 1218443 - RNA, 19 nt, Artificial Sequence
  Description of Artificial Sequence: Synthetic oligonucleotide
uuguaccaaacucuuucuu

SEQ ID NO: 1218444 - RNA, 19 nt, Artificial Sequence
  Description of Artificial Sequence: Synthetic oligonucleotide
gaccuucuuuauaaaagca

SEQ ID NO: 1218445 - RNA, 19 nt, Artificial Sequence
  Description of Artificial Sequence: Synthetic oligonucleotide
ucuccgucugaccgcuccg

SEQ ID NO: 1218446 - RNA, 19 nt, Artificial Sequence
  Description of Artificial Sequence: Synthetic oligonucleotide
uaucacguauaagaauaaa

SEQ ID NO: 1218447 - RNA, 19 nt, Artificial Sequence
  Description of Artificial Sequence: Synthetic oligonucleotide
ucugaccgcuccgcgagcg

SEQ ID NO: 1218448 - RNA, 19 nt, Artificial Sequence
  Description of Artificial Sequence: Synthetic oligonucleotide
aagcaaccuugagaacuac

SEQ ID NO: 1218449 - RNA, 19 nt, Artificial Sequence
  Description of Artificial Sequence: Synthetic oligonucleotide
cauuuuccacauugcacuc

SEQ ID NO: 1218450 - RNA, 19 nt, Artificial Sequence
  Description of Artificial Sequence: Synthetic oligonucleotide
caggcauagcagacagucg

SEQ ID NO: 1218451 - RNA, 19 nt, Artificial Sequence
  Description of Artificial Sequence: Synthetic oligonucleotide
uccgucugaccgcuccgcg

SEQ ID NO: 1218452 - RNA, 19 nt, Artificial Sequence
  Description of Artificial Sequence: Synthetic oligonucleotide
aaagcaaccuugagaacua

SEQ ID NO: 1218453 - RNA, 19 nt, Artificial Sequence
  Description of Artificial Sequence: Synthetic oligonucleotide
cauuuuggggaugggugcc

SEQ ID NO: 1218454 - RNA, 19 nt, Artificial Sequence
  Description of Artificial Sequence: Synthetic oligonucleotide
acucuuaacauuaccugaa

SEQ ID NO: 1218455 - RNA, 19 nt, Artificial Sequence
  Description of Artificial Sequence: Synthetic oligonucleotide
acuuacacacagugaaauu

SEQ ID NO: 1218456 - RNA, 19 nt, Artificial Sequence
  Description of Artificial Sequence: Synthetic oligonucleotide
caguuuuagacaccacuca

SEQ ID NO: 1218457 - RNA, 19 nt, Artificial Sequence
  Description of Artificial Sequence: Synthetic oligonucleotide
ucgaggauuucuucccuau

SEQ ID NO: 1218458 - RNA, 19 nt, Artificial Sequence
  Description of Artificial Sequence: Synthetic oligonucleotide
cugaaucugccuucucuuc

SEQ ID NO: 1218459 - RNA, 19 nt, Artificial Sequence
  Description of Artificial Sequence: Synthetic oligonucleotide
uuuuaccuuuguggaacug

SEQ ID NO: 1218460 - RNA, 19 nt, Artificial Sequence
  Description of Artificial Sequence: Synthetic oligonucleotide
ucugcugaaucugccuucu

SEQ ID NO: 1218461 - RNA, 19 nt, Artificial Sequence
  Description of Artificial Sequence: Synthetic oligonucleotide
caagcuacugauacaguua

SEQ ID NO: 1218462 - RNA, 19 nt, Artificial Sequence
  Description of Artificial Sequence: Synthetic oligonucleotide
uccuuaggcaggagggaaa

SEQ ID NO: 1218463 - RNA, 19 nt, Artificial Sequence
  Description of Artificial Sequence: Synthetic oligonucleotide
auauuugguaauggcaauu

SEQ ID NO: 1218464 - RNA, 19 nt, Artificial Sequence
  Description of Artificial Sequence: Synthetic oligonucleotide
uccaagcuacugauacagu

SEQ ID NO: 1218465 - RNA, 19 nt, Artificial Sequence
  Description of Artificial Sequence: Synthetic oligonucleotide
aagguacuuguuaccaaau

SEQ ID NO: 1218466 - RNA, 19 nt, Artificial Sequence
  Description of Artificial Sequence: Synthetic oligonucleotide
cuccgcaggagauccuuag

SEQ ID NO: 1218467 - RNA, 19 nt, Artificial Sequence
  Description of Artificial Sequence: Synthetic oligonucleotide
cuauaaucacaacauguau

SEQ ID NO: 1218468 - RNA, 19 nt, Artificial Sequence
  Description of Artificial Sequence: Synthetic oligonucleotide
uugcguuuuccaucuuccu

SEQ ID NO: 1218469 - RNA, 19 nt, Artificial Sequence
  Description of Artificial Sequence: Synthetic oligonucleotide
gaggauuucuucccuauuu

SEQ ID NO: 1218470 - RNA, 19 nt, Artificial Sequence
  Description of Artificial Sequence: Synthetic oligonucleotide
guacuuguuaccaaauuau

SEQ ID NO: 1218471 - RNA, 19 nt, Artificial Sequence
  Description of Artificial Sequence: Synthetic oligonucleotide
auucuccuacuuugaaaau

SEQ ID NO: 1218472 - RNA, 19 nt, Artificial Sequence
  Description of Artificial Sequence: Synthetic oligonucleotide
cuucaccucugguguaaag

SEQ ID NO: 1218473 - RNA, 19 nt, Artificial Sequence
  Description of Artificial Sequence: Synthetic oligonucleotide
aguugaccuucuuuauaaa

SEQ ID NO: 1218474 - RNA, 19 nt, Artificial Sequence
  Description of Artificial Sequence: Synthetic oligonucleotide
aaacugcccuccugaaaua

SEQ ID NO: 1218475 - RNA, 19 nt, Artificial Sequence
  Description of Artificial Sequence: Synthetic oligonucleotide
uaauaaccuguaugaugau

SEQ ID NO: 1218476 - RNA, 19 nt, Artificial Sequence
  Description of Artificial Sequence: Synthetic oligonucleotide
agacuccuccuuuucucca

SEQ ID NO: 1218477 - RNA, 19 nt, Artificial Sequence
  Description of Artificial Sequence: Synthetic oligonucleotide
cuuugaaaauuaucacgua

SEQ ID NO: 1218478 - RNA, 19 nt, Artificial Sequence
  Description of Artificial Sequence: Synthetic oligonucleotide
uaaucacaacauguauaaa

SEQ ID NO: 1218479 - RNA, 19 nt, Artificial Sequence
  Description of Artificial Sequence: Synthetic oligonucleotide
uuguuacggcaccaacauc

SEQ ID NO: 1218480 - RNA, 19 nt, Artificial Sequence
  Description of Artificial Sequence: Synthetic oligonucleotide
cccuauuuccaucuuuuac

SEQ ID NO: 1218481 - RNA, 19 nt, Artificial Sequence
  Description of Artificial Sequence: Synthetic oligonucleotide
acauuaccugaaaauaguu

SEQ ID NO: 1218482 - RNA, 19 nt, Artificial Sequence
  Description of Artificial Sequence: Synthetic oligonucleotide
uuaccuccucaccuuuauc

SEQ ID NO: 1218483 - RNA, 19 nt, Artificial Sequence
  Description of Artificial Sequence: Synthetic oligonucleotide
aacugcccuccugaaauaa

SEQ ID NO: 1218484 - RNA, 19 nt, Artificial Sequence
  Description of Artificial Sequence: Synthetic oligonucleotide
acggcaccaacaucuuugu

SEQ ID NO: 1218485 - RNA, 19 nt, Artificial Sequence
  Description of Artificial Sequence: Synthetic oligonucleotide
uagacaccacucagagacu

SEQ ID NO: 1218486 - RNA, 19 nt, Artificial Sequence
  Description of Artificial Sequence: Synthetic oligonucleotide
uucgaggauuucuucccua

SEQ ID NO: 1218487 - RNA, 19 nt, Artificial Sequence
  Description of Artificial Sequence: Synthetic oligonucleotide
uaaccuguaugaugauguu

SEQ ID NO: 1218488 - RNA, 19 nt, Artificial Sequence
  Description of Artificial Sequence: Synthetic oligonucleotide
cauccccuuccucuuugcc

SEQ ID NO: 1218489 - RNA, 19 nt, Artificial Sequence
  Description of Artificial Sequence: Synthetic oligonucleotide
gccucaauaauuuuggcuu

SEQ ID NO: 1218490 - RNA, 19 nt, Artificial Sequence
  Description of Artificial Sequence: Synthetic oligonucleotide
acaccacucagagacuccu

SEQ ID NO: 1218491 - RNA, 19 nt, Artificial Sequence
  Description of Artificial Sequence: Synthetic oligonucleotide
uggaguuggcguucuuuua

SEQ ID NO: 1218492 - RNA, 19 nt, Artificial Sequence
  Description of Artificial Sequence: Synthetic oligonucleotide
aggaauuguuacggcacca

SEQ ID NO: 1218493 - RNA, 19 nt, Artificial Sequence
  Description of Artificial Sequence: Synthetic oligonucleotide
ggcaguuuuagacaccacu

SEQ ID NO: 1218494 - RNA, 19 nt, Artificial Sequence
  Description of Artificial Sequence: Synthetic oligonucleotide
uaccuuuguggaacuguuu

SEQ ID NO: 1218495 - RNA, 19 nt, Artificial Sequence
  Description of Artificial Sequence: Synthetic oligonucleotide
aaaccgaaauuaagauuuu

SEQ ID NO: 1218496 - RNA, 19 nt, Artificial Sequence
  Description of Artificial Sequence: Synthetic oligonucleotide
gcgacugaguuuucaauga

SEQ ID NO: 1218497 - RNA, 19 nt, Artificial Sequence
  Description of Artificial Sequence: Synthetic oligonucleotide
ucccuauuuccaucuuuua

SEQ ID NO: 1218498 - RNA, 19 nt, Artificial Sequence
  Description of Artificial Sequence: Synthetic oligonucleotide
uggcuccugacuggcauca

SEQ ID NO: 1218499 - RNA, 19 nt, Artificial Sequence
  Description of Artificial Sequence: Synthetic oligonucleotide
cugguguaaagggcacagg

SEQ ID NO: 1218500 - RNA, 19 nt, Artificial Sequence
  Description of Artificial Sequence: Synthetic oligonucleotide
gacagucgggcagaucuuc

SEQ ID NO: 1218501 - RNA, 19 nt, Artificial Sequence
  Description of Artificial Sequence: Synthetic oligonucleotide
uccucuggcuugguuucag

SEQ ID NO: 1218502 - RNA, 19 nt, Artificial Sequence
  Description of Artificial Sequence: Synthetic oligonucleotide
acauugcacucuucuuuaa

SEQ ID NO: 1218503 - RNA, 19 nt, Artificial Sequence
  Description of Artificial Sequence: Synthetic oligonucleotide
uugggcauuguugcagcuc

SEQ ID NO: 1218504 - RNA, 19 nt, Artificial Sequence
  Description of Artificial Sequence: Synthetic oligonucleotide
gagcagucuccgucugacc

SEQ ID NO: 1218505 - RNA, 19 nt, Artificial Sequence
  Description of Artificial Sequence: Synthetic oligonucleotide
uuacggcaccaacaucuuu

SEQ ID NO: 1218506 - RNA, 19 nt, Artificial Sequence
  Description of Artificial Sequence: Synthetic oligonucleotide
uccuuucuaucuucuucuu

SEQ ID NO: 1218507 - RNA, 19 nt, Artificial Sequence
  Description of Artificial Sequence: Synthetic oligonucleotide
gcuacugauacaguuauau

SEQ ID NO: 1218508 - RNA, 19 nt, Artificial Sequence
  Description of Artificial Sequence: Synthetic oligonucleotide
gguguaaagggcacaggca

SEQ ID NO: 1218509 - RNA, 19 nt, Artificial Sequence
  Description of Artificial Sequence: Synthetic oligonucleotide
uccgcgagcgacugaguuu

SEQ ID NO: 1218510 - RNA, 19 nt, Artificial Sequence
  Description of Artificial Sequence: Synthetic oligonucleotide
cucuuaacauuaccugaaa

SEQ ID NO: 1218511 - RNA, 19 nt, Artificial Sequence
  Description of Artificial Sequence: Synthetic oligonucleotide
uuguggucuucaguuuccu

SEQ ID NO: 1218512 - RNA, 19 nt, Artificial Sequence
  Description of Artificial Sequence: Synthetic oligonucleotide
ggcauagcagacagucggg

SEQ ID NO: 1218513 - RNA, 19 nt, Artificial Sequence
  Description of Artificial Sequence: Synthetic oligonucleotide
gcguuuuccaucuuccucu

SEQ ID NO: 1218514 - RNA, 19 nt, Artificial Sequence
  Description of Artificial Sequence: Synthetic oligonucleotide
ggaauucuccuacuuugaa

SEQ ID NO: 1218515 - RNA, 19 nt, Artificial Sequence
  Description of Artificial Sequence: Synthetic oligonucleotide
uuggcuccugacuggcauc

SEQ ID NO: 1218516 - RNA, 19 nt, Artificial Sequence
  Description of Artificial Sequence: Synthetic oligonucleotide
ggcauuguugcagcucucc

SEQ ID NO: 1218517 - RNA, 19 nt, Artificial Sequence
  Description of Artificial Sequence: Synthetic oligonucleotide
gaugggugccucaauaauu

SEQ ID NO: 1218518 - RNA, 19 nt, Artificial Sequence
  Description of Artificial Sequence: Synthetic oligonucleotide
agcaaccuugagaacuaca

SEQ ID NO: 1218519 - RNA, 19 nt, Artificial Sequence
  Description of Artificial Sequence: Synthetic oligonucleotide
aguugcaaguauacauuuu

SEQ ID NO: 1218520 - RNA, 19 nt, Artificial Sequence
  Description of Artificial Sequence: Synthetic oligonucleotide
auuuuggggaugggugccu

SEQ ID NO: 1218521 - RNA, 19 nt, Artificial Sequence
  Description of Artificial Sequence: Synthetic oligonucleotide
cucuauauuuuggacauuu

SEQ ID NO: 1218522 - RNA, 19 nt, Artificial Sequence
  Description of Artificial Sequence: Synthetic oligonucleotide
cagucgggcagaucuucuc

SEQ ID NO: 1218523 - RNA, 19 nt, Artificial Sequence
  Description of Artificial Sequence: Synthetic oligonucleotide
ucgggcagaucuucucuuu

SEQ ID NO: 1218524 - RNA, 19 nt, Artificial Sequence
  Description of Artificial Sequence: Synthetic oligonucleotide
ucuccgcaggagauccuua

SEQ ID NO: 1218525 - RNA, 19 nt, Artificial Sequence
  Description of Artificial Sequence: Synthetic oligonucleotide
uuuuggggaugggugccuc

SEQ ID NO: 1218526 - RNA, 19 nt, Artificial Sequence
  Description of Artificial Sequence: Synthetic oligonucleotide
aucacauagggcaguuuua

SEQ ID NO: 1218527 - RNA, 19 nt, Artificial Sequence
  Description of Artificial Sequence: Synthetic oligonucleotide
ugaccgcuccgcgagcgac

SEQ ID NO: 1218528 - RNA, 19 nt, Artificial Sequence
  Description of Artificial Sequence: Synthetic oligonucleotide
aguuuccauuuuggggaug

SEQ ID NO: 1218529 - RNA, 19 nt, Artificial Sequence
  Description of Artificial Sequence: Synthetic oligonucleotide
ggaagguacuuguuaccaa

SEQ ID NO: 1218530 - RNA, 19 nt, Artificial Sequence
  Description of Artificial Sequence: Synthetic oligonucleotide
gcagucuccgucugaccgc

SEQ ID NO: 1218531 - RNA, 19 nt, Artificial Sequence
  Description of Artificial Sequence: Synthetic oligonucleotide
uggccuuccuuuccaucuu

SEQ ID NO: 1218532 - RNA, 19 nt, Artificial Sequence
  Description of Artificial Sequence: Synthetic oligonucleotide
gagcgacugaguuuucaau

SEQ ID NO: 1218533 - RNA, 19 nt, Artificial Sequence
  Description of Artificial Sequence: Synthetic oligonucleotide
cuguaugaugauguuccaa

SEQ ID NO: 1218534 - RNA, 19 nt, Artificial Sequence
  Description of Artificial Sequence: Synthetic oligonucleotide
ugggugccucaauaauuuu

SEQ ID NO: 1218535 - RNA, 19 nt, Artificial Sequence
  Description of Artificial Sequence: Synthetic oligonucleotide
gggaugggugccucaauaa

SEQ ID NO: 1218536 - RNA, 19 nt, Artificial Sequence
  Description of Artificial Sequence: Synthetic oligonucleotide
cagcaaaacuuugugcaua

SEQ ID NO: 1218537 - RNA, 19 nt, Artificial Sequence
  Description of Artificial Sequence: Synthetic oligonucleotide
acauuacaacaggaaggua

SEQ ID NO: 1218538 - RNA, 19 nt, Artificial Sequence
  Description of Artificial Sequence: Synthetic oligonucleotide
cuccgucugaccgcuccgc

SEQ ID NO: 1218539 - RNA, 19 nt, Artificial Sequence
  Description of Artificial Sequence: Synthetic oligonucleotide
ucucuauauuuuggacauu

SEQ ID NO: 1218540 - RNA, 19 nt, Artificial Sequence
  Description of Artificial Sequence: Synthetic oligonucleotide
cuuuaacauccucuggcuu

SEQ ID NO: 1218541 - RNA, 19 nt, Artificial Sequence
  Description of Artificial Sequence: Synthetic oligonucleotide
gcaaccuugagaacuacau

SEQ ID NO: 1218542 - RNA, 19 nt, Artificial Sequence
  Description of Artificial Sequence: Synthetic oligonucleotide
cuuuggcuccugacuggca

SEQ ID NO: 1218543 - RNA, 19 nt, Artificial Sequence
  Description of Artificial Sequence: Synthetic oligonucleotide
ucuuugcguuuuccaucuu

SEQ ID NO: 1218544 - RNA, 19 nt, Artificial Sequence
  Description of Artificial Sequence: Synthetic oligonucleotide
uccucaccuuuaucuucau

SEQ ID NO: 1218545 - RNA, 19 nt, Artificial Sequence
  Description of Artificial Sequence: Synthetic oligonucleotide
acugcccuccugaaauaaa

SEQ ID NO: 1218546 - RNA, 19 nt, Artificial Sequence
  Description of Artificial Sequence: Synthetic oligonucleotide
ucccauccccuuccucuuu

SEQ ID NO: 1218547 - RNA, 19 nt, Artificial Sequence
  Description of Artificial Sequence: Synthetic oligonucleotide
ggggaugggugccucaaua

SEQ ID NO: 1218548 - RNA, 19 nt, Artificial Sequence
  Description of Artificial Sequence: Synthetic oligonucleotide
cuucgaggauuucuucccu

SEQ ID NO: 1218549 - RNA, 19 nt, Artificial Sequence
  Description of Artificial Sequence: Synthetic oligonucleotide
gcacuacuauaaucacaac

SEQ ID NO: 1218550 - RNA, 19 nt, Artificial Sequence
  Description of Artificial Sequence: Synthetic oligonucleotide
cgucugaccgcuccgcgag

SEQ ID NO: 1218551 - RNA, 19 nt, Artificial Sequence
  Description of Artificial Sequence: Synthetic oligonucleotide
gucugaccgcuccgcgagc

SEQ ID NO: 1218552 - RNA, 19 nt, Artificial Sequence
  Description of Artificial Sequence: Synthetic oligonucleotide
cuuuuaccuccucaccuuu

SEQ ID NO: 1218553 - RNA, 19 nt, Artificial Sequence
  Description of Artificial Sequence: Synthetic oligonucleotide
uaacauccucuggcuuggu

SEQ ID NO: 1218554 - RNA, 19 nt, Artificial Sequence
  Description of Artificial Sequence: Synthetic oligonucleotide
aggcuucaccucuggugua

SEQ ID NO: 1218555 - RNA, 19 nt, Artificial Sequence
  Description of Artificial Sequence: Synthetic oligonucleotide
ccaagcuacugauacaguu

SEQ ID NO: 1218556 - RNA, 19 nt, Artificial Sequence
  Description of Artificial Sequence: Synthetic oligonucleotide
gcccuccugaaauaaacau

SEQ ID NO: 1218557 - RNA, 19 nt, Artificial Sequence
  Description of Artificial Sequence: Synthetic oligonucleotide
ccuuuguggaacuguuuua

SEQ ID NO: 1218558 - RNA, 19 nt, Artificial Sequence
  Description of Artificial Sequence: Synthetic oligonucleotide
cuccuacuuugaaaauuau

SEQ ID NO: 1218559 - RNA, 19 nt, Artificial Sequence
  Description of Artificial Sequence: Synthetic oligonucleotide
cuuggaguuggcguucuuu

SEQ ID NO: 1218560 - RNA, 19 nt, Artificial Sequence
  Description of Artificial Sequence: Synthetic oligonucleotide
ccuguaugaugauguucca

SEQ ID NO: 1218561 - RNA, 19 nt, Artificial Sequence
  Description of Artificial Sequence: Synthetic oligonucleotide
agacagucgggcagaucuu

SEQ ID NO: 1218562 - RNA, 19 nt, Artificial Sequence
  Description of Artificial Sequence: Synthetic oligonucleotide
agcuacugauacaguuaua

SEQ ID NO: 1218563 - RNA, 19 nt, Artificial Sequence
  Description of Artificial Sequence: Synthetic oligonucleotide
gcgucuucauucaucuuua

SEQ ID NO: 1218564 - RNA, 19 nt, Artificial Sequence
  Description of Artificial Sequence: Synthetic oligonucleotide
gcaaaacuuugugcauaca

SEQ ID NO: 1218565 - RNA, 19 nt, Artificial Sequence
  Description of Artificial Sequence: Synthetic oligonucleotide
agcagacagucgggcagau

SEQ ID NO: 1218566 - RNA, 19 nt, Artificial Sequence
  Description of Artificial Sequence: Synthetic oligonucleotide
gucgggcagaucuucucuu

SEQ ID NO: 1218567 - RNA, 19 nt, Artificial Sequence
  Description of Artificial Sequence: Synthetic oligonucleotide
ccacauugcacucuucuuu

SEQ ID NO: 1218568 - RNA, 19 nt, Artificial Sequence
  Description of Artificial Sequence: Synthetic oligonucleotide
guuacggcaccaacaucuu

SEQ ID NO: 1218569 - RNA, 19 nt, Artificial Sequence
  Description of Artificial Sequence: Synthetic oligonucleotide
agucuccgucugaccgcuc

SEQ ID NO: 1218570 - RNA, 19 nt, Artificial Sequence
  Description of Artificial Sequence: Synthetic oligonucleotide
gcgagcgacugaguuuuca

SEQ ID NO: 1218571 - RNA, 19 nt, Artificial Sequence
  Description of Artificial Sequence: Synthetic oligonucleotide
cgcuccgcgagcgacugag

SEQ ID NO: 1218572 - RNA, 19 nt, Artificial Sequence
  Description of Artificial Sequence: Synthetic oligonucleotide
cugaccgcuccgcgagcga

SEQ ID NO: 1218573 - RNA, 19 nt, Artificial Sequence
  Description of Artificial Sequence: Synthetic oligonucleotide
cuccgcgagcgacugaguu

SEQ ID NO: 1218574 - RNA, 19 nt, Artificial Sequence
  Description of Artificial Sequence: Synthetic oligonucleotide
cgagcgacugaguuuucaa

SEQ ID NO: 1218575 - RNA, 19 nt, Artificial Sequence
  Description of Artificial Sequence: Synthetic oligonucleotide
ggugucauguuagguguuu

SEQ ID NO: 1218576 - RNA, 19 nt, Artificial Sequence
  Description of Artificial Sequence: Synthetic oligonucleotide
cccugcaaccucuuuuccu

SEQ ID NO: 1218577 - RNA, 19 nt, Artificial Sequence
  Description of Artificial Sequence: Synthetic oligonucleotide
gggcaguuuuagacaccac

SEQ ID NO: 1218578 - RNA, 19 nt, Artificial Sequence
  Description of Artificial Sequence: Synthetic oligonucleotide
ggcguucuuuuaggcuuca

SEQ ID NO: 1218579 - RNA, 19 nt, Artificial Sequence
  Description of Artificial Sequence: Synthetic oligonucleotide
ccgucugaccgcuccgcga

SEQ ID NO: 1218580 - RNA, 19 nt, Artificial Sequence
  Description of Artificial Sequence: Synthetic oligonucleotide
gaccgcuccgcgagcgacu

SEQ ID NO: 1218581 - RNA, 19 nt, Artificial Sequence
  Description of Artificial Sequence: Synthetic oligonucleotide
gcguucuuuuaggcuucac

SEQ ID NO: 1218582 - RNA, 19 nt, Artificial Sequence
  Description of Artificial Sequence: Synthetic oligonucleotide
cucuccgcaggagauccuu

SEQ ID NO: 1218583 - RNA, 19 nt, Artificial Sequence
  Description of Artificial Sequence: Synthetic oligonucleotide
gcagacagucgggcagauc

SEQ ID NO: 1218584 - RNA, 19 nt, Artificial Sequence
  Description of Artificial Sequence: Synthetic oligonucleotide
ccgcgagcgacugaguuuu

SEQ ID NO: 1218585 - RNA, 19 nt, Artificial Sequence
  Description of Artificial Sequence: Synthetic oligonucleotide
cgaggauuucuucccuauu

SEQ ID NO: 1218586 - RNA, 19 nt, Artificial Sequence
  Description of Artificial Sequence: Synthetic oligonucleotide
ccuucccaucuuccucacu

SEQ ID NO: 1218587 - RNA, 19 nt, Artificial Sequence
  Description of Artificial Sequence: Synthetic oligonucleotide
cgcgagcgacugaguuuuc

SEQ ID NO: 1218588 - RNA, 19 nt, Artificial Sequence
  Description of Artificial Sequence: Synthetic oligonucleotide
gcucuccgcaggagauccu

SEQ ID NO: 1218589 - RNA, 19 nt, Artificial Sequence
  Description of Artificial Sequence: Synthetic oligonucleotide
gcuccgcgagcgacugagu

SEQ ID NO: 1218590 - RNA, 19 nt, Artificial Sequence
  Description of Artificial Sequence: Synthetic oligonucleotide
aacaguuugaagcuuuuac

SEQ ID NO: 1218591 - RNA, 19 nt, Artificial Sequence
  Description of Artificial Sequence: Synthetic oligonucleotide
uagaugaucaccccuaggg

SEQ ID NO: 1218592 - RNA, 19 nt, Artificial Sequence
  Description of Artificial Sequence: Synthetic oligonucleotide
agaguuauccuugaaaagc

SEQ ID NO: 1218593 - RNA, 19 nt, Artificial Sequence
  Description of Artificial Sequence: Synthetic oligonucleotide
aaagaguuauccuugaaaa

SEQ ID NO: 1218594 - RNA, 19 nt, Artificial Sequence
  Description of Artificial Sequence: Synthetic oligonucleotide
acaauuaagagucgagccc

SEQ ID NO: 1218595 - RNA, 19 nt, Artificial Sequence
  Description of Artificial Sequence: Synthetic oligonucleotide
cauaauaagggguaaacug

SEQ ID NO: 1218596 - RNA, 19 nt, Artificial Sequence
  Description of Artificial Sequence: Synthetic oligonucleotide
uaauaagggguaaacuggg

SEQ ID NO: 1218597 - RNA, 19 nt, Artificial Sequence
  Description of Artificial Sequence: Synthetic oligonucleotide
uacaauuaagagucgagcc

SEQ ID NO: 1218598 - RNA, 19 nt, Artificial Sequence
  Description of Artificial Sequence: Synthetic oligonucleotide
uaaucugaacuauauuggg

SEQ ID NO: 1218599 - RNA, 19 nt, Artificial Sequence
  Description of Artificial Sequence: Synthetic oligonucleotide
aggauauccacacagcauc

SEQ ID NO: 1218600 - RNA, 19 nt, Artificial Sequence
  Description of Artificial Sequence: Synthetic oligonucleotide
gucacauaauuucacaggg

SEQ ID NO: 1218601 - RNA, 19 nt, Artificial Sequence
  Description of Artificial Sequence: Synthetic oligonucleotide
uuuuggacgaucgagcagg

SEQ ID NO: 1218602 - RNA, 19 nt, Artificial Sequence
  Description of Artificial Sequence: Synthetic oligonucleotide
gaagcaaagagcucggagc

SEQ ID NO: 1218603 - RNA, 19 nt, Artificial Sequence
  Description of Artificial Sequence: Synthetic oligonucleotide
uuaucuagggccuccgugg

SEQ ID NO: 1218604 - RNA, 19 nt, Artificial Sequence
  Description of Artificial Sequence: Synthetic oligonucleotide
aguuugaagcuuuuacuac

SEQ ID NO: 1218605 - RNA, 19 nt, Artificial Sequence
  Description of Artificial Sequence: Synthetic oligonucleotide
uuguuguaaguguagggcg

SEQ ID NO: 1218606 - RNA, 19 nt, Artificial Sequence
  Description of Artificial Sequence: Synthetic oligonucleotide
ugaagcuuuuacuacuggg

SEQ ID NO: 1218607 - RNA, 19 nt, Artificial Sequence
  Description of Artificial Sequence: Synthetic oligonucleotide
auaauaagggguaaacugg

SEQ ID NO: 1218608 - RNA, 19 nt, Artificial Sequence
  Description of Artificial Sequence: Synthetic oligonucleotide
aaugccagacuucuccuuc

SEQ ID NO: 1218609 - RNA, 19 nt, Artificial Sequence
  Description of Artificial Sequence: Synthetic oligonucleotide
gaagcuuuuacuacugggg

SEQ ID NO: 1218610 - RNA, 19 nt, Artificial Sequence
  Description of Artificial Sequence: Synthetic oligonucleotide
auaaucugaacuauauugg

SEQ ID NO: 1218611 - RNA, 19 nt, Artificial Sequence
  Description of Artificial Sequence: Synthetic oligonucleotide
gagugaagggguuugaggc

SEQ ID NO: 1218612 - RNA, 19 nt, Artificial Sequence
  Description of Artificial Sequence: Synthetic oligonucleotide
ugaggugcuacauaauaag

SEQ ID NO: 1218613 - RNA, 19 nt, Artificial Sequence
  Description of Artificial Sequence: Synthetic oligonucleotide
cauuucuagcuuuuggacg

SEQ ID NO: 1218614 - RNA, 19 nt, Artificial Sequence
  Description of Artificial Sequence: Synthetic oligonucleotide
aaacucgaaacuuccuguc

SEQ ID NO: 1218615 - RNA, 19 nt, Artificial Sequence
  Description of Artificial Sequence: Synthetic oligonucleotide
acacaucacgugcagacgc

SEQ ID NO: 1218616 - RNA, 19 nt, Artificial Sequence
  Description of Artificial Sequence: Synthetic oligonucleotide
ucuuguuguaaguguaggg

SEQ ID NO: 1218617 - RNA, 19 nt, Artificial Sequence
  Description of Artificial Sequence: Synthetic oligonucleotide
ucuugaguagauuucuuca

SEQ ID NO: 1218618 - RNA, 19 nt, Artificial Sequence
  Description of Artificial Sequence: Synthetic oligonucleotide
aaucugaacuauauugggg

SEQ ID NO: 1218619 - RNA, 19 nt, Artificial Sequence
  Description of Artificial Sequence: Synthetic oligonucleotide
aagagucgagcccugggac

SEQ ID NO: 1218620 - RNA, 19 nt, Artificial Sequence
  Description of Artificial Sequence: Synthetic oligonucleotide
ucuaacuggaccacuaauc

SEQ ID NO: 1218621 - RNA, 19 nt, Artificial Sequence
  Description of Artificial Sequence: Synthetic oligonucleotide
uuuuaggaaaugaaauuau

SEQ ID NO: 1218622 - RNA, 19 nt, Artificial Sequence
  Description of Artificial Sequence: Synthetic oligonucleotide
uuaucugugaauccacgac

SEQ ID NO: 1218623 - RNA, 19 nt, Artificial Sequence
  Description of Artificial Sequence: Synthetic oligonucleotide
uuacaauuaagagucgagc

SEQ ID NO: 1218624 - RNA, 19 nt, Artificial Sequence
  Description of Artificial Sequence: Synthetic oligonucleotide
ucacacagacucuaacugg

SEQ ID NO: 1218625 - RNA, 19 nt, Artificial Sequence
  Description of Artificial Sequence: Synthetic oligonucleotide
ucacauaauuucacagggg

SEQ ID NO: 1218626 - RNA, 19 nt, Artificial Sequence
  Description of Artificial Sequence: Synthetic oligonucleotide
ggugcuacauaauaagggg

SEQ ID NO: 1218627 - RNA, 19 nt, Artificial Sequence
  Description of Artificial Sequence: Synthetic oligonucleotide
uguaaagugccggugcugg

SEQ ID NO: 1218628 - RNA, 19 nt, Artificial Sequence
  Description of Artificial Sequence: Synthetic oligonucleotide
uccaauacucccuccacag

SEQ ID NO: 1218629 - RNA, 19 nt, Artificial Sequence
  Description of Artificial Sequence: Synthetic oligonucleotide
ucugcuuuguuacuuggcu

SEQ ID NO: 1218630 - RNA, 19 nt, Artificial Sequence
  Description of Artificial Sequence: Synthetic oligonucleotide
ugucaucaaaucaccuugg

SEQ ID NO: 1218631 - RNA, 19 nt, Artificial Sequence
  Description of Artificial Sequence: Synthetic oligonucleotide
auucuucuaaaauggaggu

SEQ ID NO: 1218632 - RNA, 19 nt, Artificial Sequence
  Description of Artificial Sequence: Synthetic oligonucleotide
gaaacuuccugucaugauc

SEQ ID NO: 1218633 - RNA, 19 nt, Artificial Sequence
  Description of Artificial Sequence: Synthetic oligonucleotide
ugcuuuacaaccucugcca

SEQ ID NO: 1218634 - RNA, 19 nt, Artificial Sequence
  Description of Artificial Sequence: Synthetic oligonucleotide
uguuuagcaggugacagug

SEQ ID NO: 1218635 - RNA, 19 nt, Artificial Sequence
  Description of Artificial Sequence: Synthetic oligonucleotide
aaguguagggcguuggcga

SEQ ID NO: 1218636 - RNA, 19 nt, Artificial Sequence
  Description of Artificial Sequence: Synthetic oligonucleotide
ucuucuaaaauggagguuu

SEQ ID NO: 1218637 - RNA, 19 nt, Artificial Sequence
  Description of Artificial Sequence: Synthetic oligonucleotide
uuuaucugugaauccacga

SEQ ID NO: 1218638 - RNA, 19 nt, Artificial Sequence
  Description of Artificial Sequence: Synthetic oligonucleotide
aacgucuuuggccaucucu

SEQ ID NO: 1218639 - RNA, 19 nt, Artificial Sequence
  Description of Artificial Sequence: Synthetic oligonucleotide
uguauucuucuaaaaugga

SEQ ID NO: 1218640 - RNA, 19 nt, Artificial Sequence
  Description of Artificial Sequence: Synthetic oligonucleotide
aacuauauuggggugugug

SEQ ID NO: 1218641 - RNA, 19 nt, Artificial Sequence
  Description of Artificial Sequence: Synthetic oligonucleotide
ugaguagauuucuucacac

SEQ ID NO: 1218642 - RNA, 19 nt, Artificial Sequence
  Description of Artificial Sequence: Synthetic oligonucleotide
uuuacaaccucugccagcu

SEQ ID NO: 1218643 - RNA, 19 nt, Artificial Sequence
  Description of Artificial Sequence: Synthetic oligonucleotide
auauccuuugggauagucc

SEQ ID NO: 1218644 - RNA, 19 nt, Artificial Sequence
  Description of Artificial Sequence: Synthetic oligonucleotide
cagcacguuaucuagggcc

SEQ ID NO: 1218645 - RNA, 19 nt, Artificial Sequence
  Description of Artificial Sequence: Synthetic oligonucleotide
uuguucacggagugaaggg

SEQ ID NO: 1218646 - RNA, 19 nt, Artificial Sequence
  Description of Artificial Sequence: Synthetic oligonucleotide
uccgacaugcucugcaggg

SEQ ID NO: 1218647 - RNA, 19 nt, Artificial Sequence
  Description of Artificial Sequence: Synthetic oligonucleotide
ugauacuguauucuucuaa

SEQ ID NO: 1218648 - RNA, 19 nt, Artificial Sequence
  Description of Artificial Sequence: Synthetic oligonucleotide
caacauuugaauccucagc

SEQ ID NO: 1218649 - RNA, 19 nt, Artificial Sequence
  Description of Artificial Sequence: Synthetic oligonucleotide
accacuaaucccugcgccc

SEQ ID NO: 1218650 - RNA, 19 nt, Artificial Sequence
  Description of Artificial Sequence: Synthetic oligonucleotide
cauccuuuggcuuggugcc

SEQ ID NO: 1218651 - RNA, 19 nt, Artificial Sequence
  Description of Artificial Sequence: Synthetic oligonucleotide
aacuggaccacuaaucccu

SEQ ID NO: 1218652 - RNA, 19 nt, Artificial Sequence
  Description of Artificial Sequence: Synthetic oligonucleotide
uaaguguagggcguuggcg

SEQ ID NO: 1218653 - RNA, 19 nt, Artificial Sequence
  Description of Artificial Sequence: Synthetic oligonucleotide
ugaauccucagcuccauuc

SEQ ID NO: 1218654 - RNA, 19 nt, Artificial Sequence
  Description of Artificial Sequence: Synthetic oligonucleotide
cuugaguagauuucuucac

SEQ ID NO: 1218655 - RNA, 19 nt, Artificial Sequence
  Description of Artificial Sequence: Synthetic oligonucleotide
aggugcuacauaauaaggg

SEQ ID NO: 1218656 - RNA, 19 nt, Artificial Sequence
  Description of Artificial Sequence: Synthetic oligonucleotide
auaagggguaaacuggggu

SEQ ID NO: 1218657 - RNA, 19 nt, Artificial Sequence
  Description of Artificial Sequence: Synthetic oligonucleotide
guuguucacggagugaagg

SEQ ID NO: 1218658 - RNA, 19 nt, Artificial Sequence
  Description of Artificial Sequence: Synthetic oligonucleotide
gaauccacgaccguuccag

SEQ ID NO: 1218659 - RNA, 19 nt, Artificial Sequence
  Description of Artificial Sequence: Synthetic oligonucleotide
uguuguaaguguagggcgu

SEQ ID NO: 1218660 - RNA, 19 nt, Artificial Sequence
  Description of Artificial Sequence: Synthetic oligonucleotide
uacuuuaucugugaaucca

SEQ ID NO: 1218661 - RNA, 19 nt, Artificial Sequence
  Description of Artificial Sequence: Synthetic oligonucleotide
ugcuacauaauaaggggua

SEQ ID NO: 1218662 - RNA, 19 nt, Artificial Sequence
  Description of Artificial Sequence: Synthetic oligonucleotide
aauccacgaccguuccagc

SEQ ID NO: 1218663 - RNA, 19 nt, Artificial Sequence
  Description of Artificial Sequence: Synthetic oligonucleotide
ucaucaaaucaccuugguc

SEQ ID NO: 1218664 - RNA, 19 nt, Artificial Sequence
  Description of Artificial Sequence: Synthetic oligonucleotide
aauaagggguaaacugggg

SEQ ID NO: 1218665 - RNA, 19 nt, Artificial Sequence
  Description of Artificial Sequence: Synthetic oligonucleotide
ucucugugcuuccaguacc

SEQ ID NO: 1218666 - RNA, 19 nt, Artificial Sequence
  Description of Artificial Sequence: Synthetic oligonucleotide
ugcaaccacugccuuaucc

SEQ ID NO: 1218667 - RNA, 19 nt, Artificial Sequence
  Description of Artificial Sequence: Synthetic oligonucleotide
agugcaaaccguucuugag

SEQ ID NO: 1218668 - RNA, 19 nt, Artificial Sequence
  Description of Artificial Sequence: Synthetic oligonucleotide
uguucacggagugaagggg

SEQ ID NO: 1218669 - RNA, 19 nt, Artificial Sequence
  Description of Artificial Sequence: Synthetic oligonucleotide
cugugaaauagcucgcccc

SEQ ID NO: 1218670 - RNA, 19 nt, Artificial Sequence
  Description of Artificial Sequence: Synthetic oligonucleotide
ugcgcaauguuuagcaggu

SEQ ID NO: 1218671 - RNA, 19 nt, Artificial Sequence
  Description of Artificial Sequence: Synthetic oligonucleotide
gugcgcaauguuuagcagg

SEQ ID NO: 1218672 - RNA, 19 nt, Artificial Sequence
  Description of Artificial Sequence: Synthetic oligonucleotide
gaccguuccagcugaagcc

SEQ ID NO: 1218673 - RNA, 19 nt, Artificial Sequence
  Description of Artificial Sequence: Synthetic oligonucleotide
ucugaacuauauuggggug

SEQ ID NO: 1218674 - RNA, 19 nt, Artificial Sequence
  Description of Artificial Sequence: Synthetic oligonucleotide
uguaaguguagggcguugg

SEQ ID NO: 1218675 - RNA, 19 nt, Artificial Sequence
  Description of Artificial Sequence: Synthetic oligonucleotide
cucacaacgucuuuggcca

SEQ ID NO: 1218676 - RNA, 19 nt, Artificial Sequence
  Description of Artificial Sequence: Synthetic oligonucleotide
auagaugaucaccccuagg

SEQ ID NO: 1218677 - RNA, 19 nt, Artificial Sequence
  Description of Artificial Sequence: Synthetic oligonucleotide
uggacgaucgagcaggauu

SEQ ID NO: 1218678 - RNA, 19 nt, Artificial Sequence
  Description of Artificial Sequence: Synthetic oligonucleotide
cuacuuuaucugugaaucc

SEQ ID NO: 1218679 - RNA, 19 nt, Artificial Sequence
  Description of Artificial Sequence: Synthetic oligonucleotide
guuaucuagggccuccgug

SEQ ID NO: 1218680 - RNA, 19 nt, Artificial Sequence
  Description of Artificial Sequence: Synthetic oligonucleotide
ucgaucacuugcuuuacaa

SEQ ID NO: 1218681 - RNA, 19 nt, Artificial Sequence
  Description of Artificial Sequence: Synthetic oligonucleotide
uagcuuuuggacgaucgag

SEQ ID NO: 1218682 - RNA, 19 nt, Artificial Sequence
  Description of Artificial Sequence: Synthetic oligonucleotide
ucuccgcauauccuuuggg

SEQ ID NO: 1218683 - RNA, 19 nt, Artificial Sequence
  Description of Artificial Sequence: Synthetic oligonucleotide
aguugauacuguauucuuc

SEQ ID NO: 1218684 - RNA, 19 nt, Artificial Sequence
  Description of Artificial Sequence: Synthetic oligonucleotide
agacgcaccucauuucuag

SEQ ID NO: 1218685 - RNA, 19 nt, Artificial Sequence
  Description of Artificial Sequence: Synthetic oligonucleotide
cauaucgcuauccuccgac

SEQ ID NO: 1218686 - RNA, 19 nt, Artificial Sequence
  Description of Artificial Sequence: Synthetic oligonucleotide
ugaacuauauuggggugug

SEQ ID NO: 1218687 - RNA, 19 nt, Artificial Sequence
  Description of Artificial Sequence: Synthetic oligonucleotide
ucaggaguuugcacucccg

SEQ ID NO: 1218688 - RNA, 19 nt, Artificial Sequence
  Description of Artificial Sequence: Synthetic oligonucleotide
gauacacugggcaaugaca

SEQ ID NO: 1218689 - RNA, 19 nt, Artificial Sequence
  Description of Artificial Sequence: Synthetic oligonucleotide
cuuuacaaccucugccagc

SEQ ID NO: 1218690 - RNA, 19 nt, Artificial Sequence
  Description of Artificial Sequence: Synthetic oligonucleotide
gagguagguauaaugccag

SEQ ID NO: 1218691 - RNA, 19 nt, Artificial Sequence
  Description of Artificial Sequence: Synthetic oligonucleotide
ucuggugccuucucugugc

SEQ ID NO: 1218692 - RNA, 19 nt, Artificial Sequence
  Description of Artificial Sequence: Synthetic oligonucleotide
uucuccgcauauccuuugg

SEQ ID NO: 1218693 - RNA, 19 nt, Artificial Sequence
  Description of Artificial Sequence: Synthetic oligonucleotide
acauaauaagggguaaacu

SEQ ID NO: 1218694 - RNA, 19 nt, Artificial Sequence
  Description of Artificial Sequence: Synthetic oligonucleotide
ugcaaaccguucuugagua

SEQ ID NO: 1218695 - RNA, 19 nt, Artificial Sequence
  Description of Artificial Sequence: Synthetic oligonucleotide
uaccugaggugcuacauaa

SEQ ID NO: 1218696 - RNA, 19 nt, Artificial Sequence
  Description of Artificial Sequence: Synthetic oligonucleotide
accccuagggaccacaggu

SEQ ID NO: 1218697 - RNA, 19 nt, Artificial Sequence
  Description of Artificial Sequence: Synthetic oligonucleotide
agggcagcacguuaucuag

SEQ ID NO: 1218698 - RNA, 19 nt, Artificial Sequence
  Description of Artificial Sequence: Synthetic oligonucleotide
ggagugaagggguuugagg

SEQ ID NO: 1218699 - RNA, 19 nt, Artificial Sequence
  Description of Artificial Sequence: Synthetic oligonucleotide
uccaguugauacuguauuc

SEQ ID NO: 1218700 - RNA, 19 nt, Artificial Sequence
  Description of Artificial Sequence: Synthetic oligonucleotide
ugugcgcaauguuuagcag

SEQ ID NO: 1218701 - RNA, 19 nt, Artificial Sequence
  Description of Artificial Sequence: Synthetic oligonucleotide
cacagacucuaacuggacc

SEQ ID NO: 1218702 - RNA, 19 nt, Artificial Sequence
  Description of Artificial Sequence: Synthetic oligonucleotide
uguuacuuggcuggcuugc

SEQ ID NO: 1218703 - RNA, 19 nt, Artificial Sequence
  Description of Artificial Sequence: Synthetic oligonucleotide
gaaacucgaaacuuccugu

SEQ ID NO: 1218704 - RNA, 19 nt, Artificial Sequence
  Description of Artificial Sequence: Synthetic oligonucleotide
ucgcuauccuccgacaugc

SEQ ID NO: 1218705 - RNA, 19 nt, Artificial Sequence
  Description of Artificial Sequence: Synthetic oligonucleotide
agcuuuuacuacuggggcu

SEQ ID NO: 1218706 - RNA, 19 nt, Artificial Sequence
  Description of Artificial Sequence: Synthetic oligonucleotide
uggcgagguagguauaaug

SEQ ID NO: 1218707 - RNA, 19 nt, Artificial Sequence
  Description of Artificial Sequence: Synthetic oligonucleotide
uuuggcuuggugccaagua

SEQ ID NO: 1218708 - RNA, 19 nt, Artificial Sequence
  Description of Artificial Sequence: Synthetic oligonucleotide
uccaaagaguuauccuuga

SEQ ID NO: 1218709 - RNA, 19 nt, Artificial Sequence
  Description of Artificial Sequence: Synthetic oligonucleotide
uucucuguaaagugccggu

SEQ ID NO: 1218710 - RNA, 19 nt, Artificial Sequence
  Description of Artificial Sequence: Synthetic oligonucleotide
cuaucugcuuuguuacuug

SEQ ID NO: 1218711 - RNA, 19 nt, Artificial Sequence
  Description of Artificial Sequence: Synthetic oligonucleotide
ucgaaacuuccugucauga

SEQ ID NO: 1218712 - RNA, 19 nt, Artificial Sequence
  Description of Artificial Sequence: Synthetic oligonucleotide
gaugguccaauacucccuc

SEQ ID NO: 1218713 - RNA, 19 nt, Artificial Sequence
  Description of Artificial Sequence: Synthetic oligonucleotide
uagggcguuggcgagguag

SEQ ID NO: 1218714 - RNA, 19 nt, Artificial Sequence
  Description of Artificial Sequence: Synthetic oligonucleotide
aggaggauauccacacagc

SEQ ID NO: 1218715 - RNA, 19 nt, Artificial Sequence
  Description of Artificial Sequence: Synthetic oligonucleotide
ugagggaacuguacacugu

SEQ ID NO: 1218716 - RNA, 19 nt, Artificial Sequence
  Description of Artificial Sequence: Synthetic oligonucleotide
aauacucccuccacaguga

SEQ ID NO: 1218717 - RNA, 19 nt, Artificial Sequence
  Description of Artificial Sequence: Synthetic oligonucleotide
uguacacuguuagcaaaca

SEQ ID NO: 1218718 - RNA, 19 nt, Artificial Sequence
  Description of Artificial Sequence: Synthetic oligonucleotide
cagggaugguccaauacuc

SEQ ID NO: 1218719 - RNA, 19 nt, Artificial Sequence
  Description of Artificial Sequence: Synthetic oligonucleotide
ucgugagggaacuguacac

SEQ ID NO: 1218720 - RNA, 19 nt, Artificial Sequence
  Description of Artificial Sequence: Synthetic oligonucleotide
acucgaaacuuccugucau

SEQ ID NO: 1218721 - RNA, 19 nt, Artificial Sequence
  Description of Artificial Sequence: Synthetic oligonucleotide
gaguagauuucuucacaca

SEQ ID NO: 1218722 - RNA, 19 nt, Artificial Sequence
  Description of Artificial Sequence: Synthetic oligonucleotide
ucauggucguguauauaaa

SEQ ID NO: 1218723 - RNA, 19 nt, Artificial Sequence
  Description of Artificial Sequence: Synthetic oligonucleotide
uccuccgacaugcucugca

SEQ ID NO: 1218724 - RNA, 19 nt, Artificial Sequence
  Description of Artificial Sequence: Synthetic oligonucleotide
uggaaacucgaaacuuccu

SEQ ID NO: 1218725 - RNA, 19 nt, Artificial Sequence
  Description of Artificial Sequence: Synthetic oligonucleotide
uccauucucauggucgugu

SEQ ID NO: 1218726 - RNA, 19 nt, Artificial Sequence
  Description of Artificial Sequence: Synthetic oligonucleotide
cuuuuggacgaucgagcag

SEQ ID NO: 1218727 - RNA, 19 nt, Artificial Sequence
  Description of Artificial Sequence: Synthetic oligonucleotide
aaagagcucggagcucggg

SEQ ID NO: 1218728 - RNA, 19 nt, Artificial Sequence
  Description of Artificial Sequence: Synthetic oligonucleotide
aucgcuauccuccgacaug

SEQ ID NO: 1218729 - RNA, 19 nt, Artificial Sequence
  Description of Artificial Sequence: Synthetic oligonucleotide
gauaguccgacuguggugu

SEQ ID NO: 1218730 - RNA, 19 nt, Artificial Sequence
  Description of Artificial Sequence: Synthetic oligonucleotide
uaucgcuauccuccgacau

SEQ ID NO: 1218731 - RNA, 19 nt, Artificial Sequence
  Description of Artificial Sequence: Synthetic oligonucleotide
uacuuggcuggcuugcuuc

SEQ ID NO: 1218732 - RNA, 19 nt, Artificial Sequence
  Description of Artificial Sequence: Synthetic oligonucleotide
auguuuagcaggugacagu

SEQ ID NO: 1218733 - RNA, 19 nt, Artificial Sequence
  Description of Artificial Sequence: Synthetic oligonucleotide
ugugguguuuggaguaaaa

SEQ ID NO: 1218734 - RNA, 19 nt, Artificial Sequence
  Description of Artificial Sequence: Synthetic oligonucleotide
gaggcugcgcggcuguccg

SEQ ID NO: 1218735 - RNA, 19 nt, Artificial Sequence
  Description of Artificial Sequence: Synthetic oligonucleotide
cugcuuuguuacuuggcug

SEQ ID NO: 1218736 - RNA, 19 nt, Artificial Sequence
  Description of Artificial Sequence: Synthetic oligonucleotide
aguguagggcguuggcgag

SEQ ID NO: 1218737 - RNA, 19 nt, Artificial Sequence
  Description of Artificial Sequence: Synthetic oligonucleotide
ucuccauaucgcuauccuc

SEQ ID NO: 1218738 - RNA, 19 nt, Artificial Sequence
  Description of Artificial Sequence: Synthetic oligonucleotide
guaaguguagggcguuggc

SEQ ID NO: 1218739 - RNA, 19 nt, Artificial Sequence
  Description of Artificial Sequence: Synthetic oligonucleotide
uucuggugccuucucugug

SEQ ID NO: 1218740 - RNA, 19 nt, Artificial Sequence
  Description of Artificial Sequence: Synthetic oligonucleotide
uuucuccgcauauccuuug

SEQ ID NO: 1218741 - RNA, 19 nt, Artificial Sequence
  Description of Artificial Sequence: Synthetic oligonucleotide
agugagucuuuccuccggu

SEQ ID NO: 1218742 - RNA, 19 nt, Artificial Sequence
  Description of Artificial Sequence: Synthetic oligonucleotide
ccucacaacgucuuuggcc

SEQ ID NO: 1218743 - RNA, 19 nt, Artificial Sequence
  Description of Artificial Sequence: Synthetic oligonucleotide
augaucuuucuccgcauau

SEQ ID NO: 1218744 - RNA, 19 nt, Artificial Sequence
  Description of Artificial Sequence: Synthetic oligonucleotide
gaggaagcaaagagcucgg

SEQ ID NO: 1218745 - RNA, 19 nt, Artificial Sequence
  Description of Artificial Sequence: Synthetic oligonucleotide
cugugcgcaauguuuagca

SEQ ID NO: 1218746 - RNA, 19 nt, Artificial Sequence
  Description of Artificial Sequence: Synthetic oligonucleotide
ggcgagguagguauaaugc

SEQ ID NO: 1218747 - RNA, 19 nt, Artificial Sequence
  Description of Artificial Sequence: Synthetic oligonucleotide
guacacuguuagcaaacac

SEQ ID NO: 1218748 - RNA, 19 nt, Artificial Sequence
  Description of Artificial Sequence: Synthetic oligonucleotide
ggaacuguacacuguuagc

SEQ ID NO: 1218749 - RNA, 19 nt, Artificial Sequence
  Description of Artificial Sequence: Synthetic oligonucleotide
acgcaccucauuucuagcu

SEQ ID NO: 1218750 - RNA, 19 nt, Artificial Sequence
  Description of Artificial Sequence: Synthetic oligonucleotide
ucugugcgcaauguuuagc

SEQ ID NO: 1218751 - RNA, 19 nt, Artificial Sequence
  Description of Artificial Sequence: Synthetic oligonucleotide
acauaauuucacaggggca

SEQ ID NO: 1218752 - RNA, 19 nt, Artificial Sequence
  Description of Artificial Sequence: Synthetic oligonucleotide
uccugugaaauagcucgcc

SEQ ID NO: 1218753 - RNA, 19 nt, Artificial Sequence
  Description of Artificial Sequence: Synthetic oligonucleotide
ggaggauauccacacagca

SEQ ID NO: 1218754 - RNA, 19 nt, Artificial Sequence
  Description of Artificial Sequence: Synthetic oligonucleotide
auucucauggucguguaua

SEQ ID NO: 1218755 - RNA, 19 nt, Artificial Sequence
  Description of Artificial Sequence: Synthetic oligonucleotide
uucucauggucguguauau

SEQ ID NO: 1218756 - RNA, 19 nt, Artificial Sequence
  Description of Artificial Sequence: Synthetic oligonucleotide
ugaauccacgaccguucca

SEQ ID NO: 1218757 - RNA, 19 nt, Artificial Sequence
  Description of Artificial Sequence: Synthetic oligonucleotide
cucgaaacuuccugucaug

SEQ ID NO: 1218758 - RNA, 19 nt, Artificial Sequence
  Description of Artificial Sequence: Synthetic oligonucleotide
auaucgcuauccuccgaca

SEQ ID NO: 1218759 - RNA, 19 nt, Artificial Sequence
  Description of Artificial Sequence: Synthetic oligonucleotide
ucugugaauccacgaccgu

SEQ ID NO: 1218760 - RNA, 19 nt, Artificial Sequence
  Description of Artificial Sequence: Synthetic oligonucleotide
agagucgagcccugggacu

SEQ ID NO: 1218761 - RNA, 19 nt, Artificial Sequence
  Description of Artificial Sequence: Synthetic oligonucleotide
acucgugagggaacuguac

SEQ ID NO: 1218762 - RNA, 19 nt, Artificial Sequence
  Description of Artificial Sequence: Synthetic oligonucleotide
acuaaucccugcgcccagc

SEQ ID NO: 1218763 - RNA, 19 nt, Artificial Sequence
  Description of Artificial Sequence: Synthetic oligonucleotide
gccuccguggaguugagcc

SEQ ID NO: 1218764 - RNA, 19 nt, Artificial Sequence
  Description of Artificial Sequence: Synthetic oligonucleotide
ggcugauccugugaaauag

SEQ ID NO: 1218765 - RNA, 19 nt, Artificial Sequence
  Description of Artificial Sequence: Synthetic oligonucleotide
uuuggacgaucgagcagga

SEQ ID NO: 1218766 - RNA, 19 nt, Artificial Sequence
  Description of Artificial Sequence: Synthetic oligonucleotide
gcuaacuuugagguccugg

SEQ ID NO: 1218767 - RNA, 19 nt, Artificial Sequence
  Description of Artificial Sequence: Synthetic oligonucleotide
cugaggugcuacauaauaa

SEQ ID NO: 1218768 - RNA, 19 nt, Artificial Sequence
  Description of Artificial Sequence: Synthetic oligonucleotide
gacgcaccucauuucuagc

SEQ ID NO: 1218769 - RNA, 19 nt, Artificial Sequence
  Description of Artificial Sequence: Synthetic oligonucleotide
uuugcacucccgguuguac

SEQ ID NO: 1218770 - RNA, 19 nt, Artificial Sequence
  Description of Artificial Sequence: Synthetic oligonucleotide
aagggguuugaggcuaacu

SEQ ID NO: 1218771 - RNA, 19 nt, Artificial Sequence
  Description of Artificial Sequence: Synthetic oligonucleotide
cuucagucggucuacuuua

SEQ ID NO: 1218772 - RNA, 19 nt, Artificial Sequence
  Description of Artificial Sequence: Synthetic oligonucleotide
gugaauccacgaccguucc

SEQ ID NO: 1218773 - RNA, 19 nt, Artificial Sequence
  Description of Artificial Sequence: Synthetic oligonucleotide
cagugagucuuuccuccgg

SEQ ID NO: 1218774 - RNA, 19 nt, Artificial Sequence
  Description of Artificial Sequence: Synthetic oligonucleotide
gguagguauaaugccagac

SEQ ID NO: 1218775 - RNA, 19 nt, Artificial Sequence
  Description of Artificial Sequence: Synthetic oligonucleotide
uugcacucccgguuguacu

SEQ ID NO: 1218776 - RNA, 19 nt, Artificial Sequence
  Description of Artificial Sequence: Synthetic oligonucleotide
ggguuugaggcuaacuuug

SEQ ID NO: 1218777 - RNA, 19 nt, Artificial Sequence
  Description of Artificial Sequence: Synthetic oligonucleotide
cuccgguuucaccuuuagg

SEQ ID NO: 1218778 - RNA, 19 nt, Artificial Sequence
  Description of Artificial Sequence: Synthetic oligonucleotide
gggcuaucugcuuuguuac

SEQ ID NO: 1218779 - RNA, 19 nt, Artificial Sequence
  Description of Artificial Sequence: Synthetic oligonucleotide
cucugugcgcaauguuuag

SEQ ID NO: 1218780 - RNA, 19 nt, Artificial Sequence
  Description of Artificial Sequence: Synthetic oligonucleotide
ugcagacgcaccucauuuc

SEQ ID NO: 1218781 - RNA, 19 nt, Artificial Sequence
  Description of Artificial Sequence: Synthetic oligonucleotide
gaauccucagcuccauucu

SEQ ID NO: 1218782 - RNA, 19 nt, Artificial Sequence
  Description of Artificial Sequence: Synthetic oligonucleotide
cucgugagggaacuguaca

SEQ ID NO: 1218783 - RNA, 19 nt, Artificial Sequence
  Description of Artificial Sequence: Synthetic oligonucleotide
cuccgacaugcucugcagg

SEQ ID NO: 1218784 - RNA, 19 nt, Artificial Sequence
  Description of Artificial Sequence: Synthetic oligonucleotide
cuccgcauauccuuuggga

SEQ ID NO: 1218785 - RNA, 19 nt, Artificial Sequence
  Description of Artificial Sequence: Synthetic oligonucleotide
aguccgacugugguguuug

SEQ ID NO: 1218786 - RNA, 19 nt, Artificial Sequence
  Description of Artificial Sequence: Synthetic oligonucleotide
ucaccuuuaggagcuuccu

SEQ ID NO: 1218787 - RNA, 19 nt, Artificial Sequence
  Description of Artificial Sequence: Synthetic oligonucleotide
acucuaacuggaccacuaa

SEQ ID NO: 1218788 - RNA, 19 nt, Artificial Sequence
  Description of Artificial Sequence: Synthetic oligonucleotide
uuugaauccucagcuccau

SEQ ID NO: 1218789 - RNA, 19 nt, Artificial Sequence
  Description of Artificial Sequence: Synthetic oligonucleotide
ggauaguccgacuguggug

SEQ ID NO: 1218790 - RNA, 19 nt, Artificial Sequence
  Description of Artificial Sequence: Synthetic oligonucleotide
gagucgagcccugggacug

SEQ ID NO: 1218791 - RNA, 19 nt, Artificial Sequence
  Description of Artificial Sequence: Synthetic oligonucleotide
uuccugucaugaucuuucu

SEQ ID NO: 1218792 - RNA, 19 nt, Artificial Sequence
  Description of Artificial Sequence: Synthetic oligonucleotide
acuggacucgugagggaac

SEQ ID NO: 1218793 - RNA, 19 nt, Artificial Sequence
  Description of Artificial Sequence: Synthetic oligonucleotide
ucggcaugagccugcugga

SEQ ID NO: 1218794 - RNA, 19 nt, Artificial Sequence
  Description of Artificial Sequence: Synthetic oligonucleotide
acgaucgagcaggauuuuc

SEQ ID NO: 1218795 - RNA, 19 nt, Artificial Sequence
  Description of Artificial Sequence: Synthetic oligonucleotide
uguagggcguuggcgaggu

SEQ ID NO: 1218796 - RNA, 19 nt, Artificial Sequence
  Description of Artificial Sequence: Synthetic oligonucleotide
uuguaaguguagggcguug

SEQ ID NO: 1218797 - RNA, 19 nt, Artificial Sequence
  Description of Artificial Sequence: Synthetic oligonucleotide
guaaagugccggugcuggc

SEQ ID NO: 1218798 - RNA, 19 nt, Artificial Sequence
  Description of Artificial Sequence: Synthetic oligonucleotide
agcacguuaucuagggccu

SEQ ID NO: 1218799 - RNA, 19 nt, Artificial Sequence
  Description of Artificial Sequence: Synthetic oligonucleotide
ccgacugugguguuuggag

SEQ ID NO: 1218800 - RNA, 19 nt, Artificial Sequence
  Description of Artificial Sequence: Synthetic oligonucleotide
caaagagcucggagcucgg

SEQ ID NO: 1218801 - RNA, 19 nt, Artificial Sequence
  Description of Artificial Sequence: Synthetic oligonucleotide
ccgguuucaccuuuaggag

SEQ ID NO: 1218802 - RNA, 19 nt, Artificial Sequence
  Description of Artificial Sequence: Synthetic oligonucleotide
auggucguguauauaaaua

SEQ ID NO: 1218803 - RNA, 19 nt, Artificial Sequence
  Description of Artificial Sequence: Synthetic oligonucleotide
uucagucggucuacuuuau

SEQ ID NO: 1218804 - RNA, 19 nt, Artificial Sequence
  Description of Artificial Sequence: Synthetic oligonucleotide
ugcacucccgguuguacuu

SEQ ID NO: 1218805 - RNA, 19 nt, Artificial Sequence
  Description of Artificial Sequence: Synthetic oligonucleotide
gcuuuuggacgaucgagca

SEQ ID NO: 1218806 - RNA, 19 nt, Artificial Sequence
  Description of Artificial Sequence: Synthetic oligonucleotide
agccucucaucuucauucu

SEQ ID NO: 1218807 - RNA, 19 nt, Artificial Sequence
  Description of Artificial Sequence: Synthetic oligonucleotide
uccguggaguugagccagg

SEQ ID NO: 1218808 - RNA, 19 nt, Artificial Sequence
  Description of Artificial Sequence: Synthetic oligonucleotide
uucacggagugaagggguu

SEQ ID NO: 1218809 - RNA, 19 nt, Artificial Sequence
  Description of Artificial Sequence: Synthetic oligonucleotide
agguagguauaaugccaga

SEQ ID NO: 1218810 - RNA, 19 nt, Artificial Sequence
  Description of Artificial Sequence: Synthetic oligonucleotide
caauguuuagcaggugaca

SEQ ID NO: 1218811 - RNA, 19 nt, Artificial Sequence
  Description of Artificial Sequence: Synthetic oligonucleotide
cuagcuuuuggacgaucga

SEQ ID NO: 1218812 - RNA, 19 nt, Artificial Sequence
  Description of Artificial Sequence: Synthetic oligonucleotide
gugcaaaccguucuugagu

SEQ ID NO: 1218813 - RNA, 19 nt, Artificial Sequence
  Description of Artificial Sequence: Synthetic oligonucleotide
cucccgguuguacuuccag

SEQ ID NO: 1218814 - RNA, 19 nt, Artificial Sequence
  Description of Artificial Sequence: Synthetic oligonucleotide
ggggaggauacacugggca

SEQ ID NO: 1218815 - RNA, 19 nt, Artificial Sequence
  Description of Artificial Sequence: Synthetic oligonucleotide
cugggcaaugacaucucga

SEQ ID NO: 1218816 - RNA, 19 nt, Artificial Sequence
  Description of Artificial Sequence: Synthetic oligonucleotide
ccugugaaauagcucgccc

SEQ ID NO: 1218817 - RNA, 19 nt, Artificial Sequence
  Description of Artificial Sequence: Synthetic oligonucleotide
acaacgucuuuggccaucu

SEQ ID NO: 1218818 - RNA, 19 nt, Artificial Sequence
  Description of Artificial Sequence: Synthetic oligonucleotide
caccuuggucaacuuuagc

SEQ ID NO: 1218819 - RNA, 19 nt, Artificial Sequence
  Description of Artificial Sequence: Synthetic oligonucleotide
ugcgcggcuguccgguccc

SEQ ID NO: 1218820 - RNA, 19 nt, Artificial Sequence
  Description of Artificial Sequence: Synthetic oligonucleotide
cagacucuaacuggaccac

SEQ ID NO: 1218821 - RNA, 19 nt, Artificial Sequence
  Description of Artificial Sequence: Synthetic oligonucleotide
cagugcaucccucaggagu

SEQ ID NO: 1218822 - RNA, 19 nt, Artificial Sequence
  Description of Artificial Sequence: Synthetic oligonucleotide
aguccaguugauacuguau

SEQ ID NO: 1218823 - RNA, 19 nt, Artificial Sequence
  Description of Artificial Sequence: Synthetic oligonucleotide
ggaccacuaaucccugcgc

SEQ ID NO: 1218824 - RNA, 19 nt, Artificial Sequence
  Description of Artificial Sequence: Synthetic oligonucleotide
cuggaccacuaaucccugc

SEQ ID NO: 1218825 - RNA, 19 nt, Artificial Sequence
  Description of Artificial Sequence: Synthetic oligonucleotide
cacucccgguuguacuucc

SEQ ID NO: 1218826 - RNA, 19 nt, Artificial Sequence
  Description of Artificial Sequence: Synthetic oligonucleotide
gacuggacucgugagggaa

SEQ ID NO: 1218827 - RNA, 19 nt, Artificial Sequence
  Description of Artificial Sequence: Synthetic oligonucleotide
cuucgaucacuugcuuuac

SEQ ID NO: 1218828 - RNA, 19 nt, Artificial Sequence
  Description of Artificial Sequence: Synthetic oligonucleotide
cacggagugaagggguuug

SEQ ID NO: 1218829 - RNA, 19 nt, Artificial Sequence
  Description of Artificial Sequence: Synthetic oligonucleotide
uugaauccucagcuccauu

SEQ ID NO: 1218830 - RNA, 19 nt, Artificial Sequence
  Description of Artificial Sequence: Synthetic oligonucleotide
gguccaauacucccuccac

SEQ ID NO: 1218831 - RNA, 19 nt, Artificial Sequence
  Description of Artificial Sequence: Synthetic oligonucleotide
cauggucguguauauaaau

SEQ ID NO: 1218832 - RNA, 19 nt, Artificial Sequence
  Description of Artificial Sequence: Synthetic oligonucleotide
aagugccggugcuggcuga

SEQ ID NO: 1218833 - RNA, 19 nt, Artificial Sequence
  Description of Artificial Sequence: Synthetic oligonucleotide
aaccguucuugaguagauu

SEQ ID NO: 1218834 - RNA, 19 nt, Artificial Sequence
  Description of Artificial Sequence: Synthetic oligonucleotide
agacucuaacuggaccacu

SEQ ID NO: 1218835 - RNA, 19 nt, Artificial Sequence
  Description of Artificial Sequence: Synthetic oligonucleotide
caccccuagggaccacagg

SEQ ID NO: 1218836 - RNA, 19 nt, Artificial Sequence
  Description of Artificial Sequence: Synthetic oligonucleotide
gaggauauccacacagcau

SEQ ID NO: 1218837 - RNA, 19 nt, Artificial Sequence
  Description of Artificial Sequence: Synthetic oligonucleotide
uggugccaaguaacuuccu

SEQ ID NO: 1218838 - RNA, 19 nt, Artificial Sequence
  Description of Artificial Sequence: Synthetic oligonucleotide
cacaucacgugcagacgca

SEQ ID NO: 1218839 - RNA, 19 nt, Artificial Sequence
  Description of Artificial Sequence: Synthetic oligonucleotide
cacuaaucccugcgcccag

SEQ ID NO: 1218840 - RNA, 19 nt, Artificial Sequence
  Description of Artificial Sequence: Synthetic oligonucleotide
guguagggcguuggcgagg

SEQ ID NO: 1218841 - RNA, 19 nt, Artificial Sequence
  Description of Artificial Sequence: Synthetic oligonucleotide
ucucauggucguguauaua

SEQ ID NO: 1218842 - RNA, 19 nt, Artificial Sequence
  Description of Artificial Sequence: Synthetic oligonucleotide
gugcuacauaauaaggggu

SEQ ID NO: 1218843 - RNA, 19 nt, Artificial Sequence
  Description of Artificial Sequence: Synthetic oligonucleotide
guaccugaggugcuacaua

SEQ ID NO: 1218844 - RNA, 19 nt, Artificial Sequence
  Description of Artificial Sequence: Synthetic oligonucleotide
acugugguguuuggaguaa

SEQ ID NO: 1218845 - RNA, 19 nt, Artificial Sequence
  Description of Artificial Sequence: Synthetic oligonucleotide
cugaacuauauuggggugu

SEQ ID NO: 1218846 - RNA, 19 nt, Artificial Sequence
  Description of Artificial Sequence: Synthetic oligonucleotide
cgaccguuccagcugaagc

SEQ ID NO: 1218847 - RNA, 19 nt, Artificial Sequence
  Description of Artificial Sequence: Synthetic oligonucleotide
cacgugcagacgcaccuca

SEQ ID NO: 1218848 - RNA, 19 nt, Artificial Sequence
  Description of Artificial Sequence: Synthetic oligonucleotide
gcaaaccguucuugaguag

SEQ ID NO: 1218849 - RNA, 19 nt, Artificial Sequence
  Description of Artificial Sequence: Synthetic oligonucleotide
acgaccguuccagcugaag

SEQ ID NO: 1218850 - RNA, 19 nt, Artificial Sequence
  Description of Artificial Sequence: Synthetic oligonucleotide
gcuauccuccgacaugcuc

SEQ ID NO: 1218851 - RNA, 19 nt, Artificial Sequence
  Description of Artificial Sequence: Synthetic oligonucleotide
ggugucaucaaaucaccuu

SEQ ID NO: 1218852 - RNA, 19 nt, Artificial Sequence
  Description of Artificial Sequence: Synthetic oligonucleotide
gcugauccugugaaauagc

SEQ ID NO: 1218853 - RNA, 19 nt, Artificial Sequence
  Description of Artificial Sequence: Synthetic oligonucleotide
ccguucuugaguagauuuc

SEQ ID NO: 1218854 - RNA, 19 nt, Artificial Sequence
  Description of Artificial Sequence: Synthetic oligonucleotide
gccagggaugguccaauac

SEQ ID NO: 1218855 - RNA, 19 nt, Artificial Sequence
  Description of Artificial Sequence: Synthetic oligonucleotide
uggacucgugagggaacug

SEQ ID NO: 1218856 - RNA, 19 nt, Artificial Sequence
  Description of Artificial Sequence: Synthetic oligonucleotide
cgcauauccuuugggauag

SEQ ID NO: 1218857 - RNA, 19 nt, Artificial Sequence
  Description of Artificial Sequence: Synthetic oligonucleotide
guucacggagugaaggggu

SEQ ID NO: 1218858 - RNA, 19 nt, Artificial Sequence
  Description of Artificial Sequence: Synthetic oligonucleotide
gcauccaaagaguuauccu

SEQ ID NO: 1218859 - RNA, 19 nt, Artificial Sequence
  Description of Artificial Sequence: Synthetic oligonucleotide
gguuguucacggagugaag

SEQ ID NO: 1218860 - RNA, 19 nt, Artificial Sequence
  Description of Artificial Sequence: Synthetic oligonucleotide
uuggcgagguagguauaau

SEQ ID NO: 1218861 - RNA, 19 nt, Artificial Sequence
  Description of Artificial Sequence: Synthetic oligonucleotide
cugcgcggcuguccggucc

SEQ ID NO: 1218862 - RNA, 19 nt, Artificial Sequence
  Description of Artificial Sequence: Synthetic oligonucleotide
caucccucaggaguuugca

SEQ ID NO: 1218863 - RNA, 19 nt, Artificial Sequence
  Description of Artificial Sequence: Synthetic oligonucleotide
gggauaguccgacuguggu

SEQ ID NO: 1218864 - RNA, 19 nt, Artificial Sequence
  Description of Artificial Sequence: Synthetic oligonucleotide
gaagggguuugaggcuaac

SEQ ID NO: 1218865 - RNA, 19 nt, Artificial Sequence
  Description of Artificial Sequence: Synthetic oligonucleotide
ccacagugagucuuuccuc

SEQ ID NO: 1218866 - RNA, 19 nt, Artificial Sequence
  Description of Artificial Sequence: Synthetic oligonucleotide
ccugaggugcuacauaaua

SEQ ID NO: 1218867 - RNA, 19 nt, Artificial Sequence
  Description of Artificial Sequence: Synthetic oligonucleotide
gugcagacgcaccucauuu

SEQ ID NO: 1218868 - RNA, 19 nt, Artificial Sequence
  Description of Artificial Sequence: Synthetic oligonucleotide
cgcaauguuuagcagguga

SEQ ID NO: 1218869 - RNA, 19 nt, Artificial Sequence
  Description of Artificial Sequence: Synthetic oligonucleotide
agucgagcccugggacugg

SEQ ID NO: 1218870 - RNA, 19 nt, Artificial Sequence
  Description of Artificial Sequence: Synthetic oligonucleotide
cucuaacuggaccacuaau

SEQ ID NO: 1218871 - RNA, 19 nt, Artificial Sequence
  Description of Artificial Sequence: Synthetic oligonucleotide
ucacggagugaagggguuu

SEQ ID NO: 1218872 - RNA, 19 nt, Artificial Sequence
  Description of Artificial Sequence: Synthetic oligonucleotide
cuuuuacuacuggggcuca

SEQ ID NO: 1218873 - RNA, 19 nt, Artificial Sequence
  Description of Artificial Sequence: Synthetic oligonucleotide
caguugauacuguauucuu

SEQ ID NO: 1218874 - RNA, 19 nt, Artificial Sequence
  Description of Artificial Sequence: Synthetic oligonucleotide
ggggcauccaaagaguuau

SEQ ID NO: 1218875 - RNA, 19 nt, Artificial Sequence
  Description of Artificial Sequence: Synthetic oligonucleotide
cuccauucucauggucgug

SEQ ID NO: 1218876 - RNA, 19 nt, Artificial Sequence
  Description of Artificial Sequence: Synthetic oligonucleotide
cuuucuccgcauauccuuu

SEQ ID NO: 1218877 - RNA, 19 nt, Artificial Sequence
  Description of Artificial Sequence: Synthetic oligonucleotide
cuggaucccugcaaccacu

SEQ ID NO: 1218878 - RNA, 19 nt, Artificial Sequence
  Description of Artificial Sequence: Synthetic oligonucleotide
auaguccgacugugguguu

SEQ ID NO: 1218879 - RNA, 19 nt, Artificial Sequence
  Description of Artificial Sequence: Synthetic oligonucleotide
aggggcauccaaagaguua

SEQ ID NO: 1218880 - RNA, 19 nt, Artificial Sequence
  Description of Artificial Sequence: Synthetic oligonucleotide
aggcugcgcggcuguccgg

SEQ ID NO: 1218881 - RNA, 19 nt, Artificial Sequence
  Description of Artificial Sequence: Synthetic oligonucleotide
uuggacgaucgagcaggau

SEQ ID NO: 1218882 - RNA, 19 nt, Artificial Sequence
  Description of Artificial Sequence: Synthetic oligonucleotide
ccagggaugguccaauacu

SEQ ID NO: 1218883 - RNA, 19 nt, Artificial Sequence
  Description of Artificial Sequence: Synthetic oligonucleotide
uaguccgacugugguguuu

SEQ ID NO: 1218884 - RNA, 19 nt, Artificial Sequence
  Description of Artificial Sequence: Synthetic oligonucleotide
cuaaucccugcgcccagcu

SEQ ID NO: 1218885 - RNA, 19 nt, Artificial Sequence
  Description of Artificial Sequence: Synthetic oligonucleotide
gcguuggcgagguagguau

SEQ ID NO: 1218886 - RNA, 19 nt, Artificial Sequence
  Description of Artificial Sequence: Synthetic oligonucleotide
agcaggugacagugcugua

SEQ ID NO: 1218887 - RNA, 19 nt, Artificial Sequence
  Description of Artificial Sequence: Synthetic oligonucleotide
ccaguugauacuguauucu

SEQ ID NO: 1218888 - RNA, 19 nt, Artificial Sequence
  Description of Artificial Sequence: Synthetic oligonucleotide
ccuccgguuucaccuuuag

SEQ ID NO: 1218889 - RNA, 19 nt, Artificial Sequence
  Description of Artificial Sequence: Synthetic oligonucleotide
guuacuuggcuggcuugcu

SEQ ID NO: 1218890 - RNA, 19 nt, Artificial Sequence
  Description of Artificial Sequence: Synthetic oligonucleotide
gcaucccucaggaguuugc

SEQ ID NO: 1218891 - RNA, 19 nt, Artificial Sequence
  Description of Artificial Sequence: Synthetic oligonucleotide
ggaugguccaauacucccu

SEQ ID NO: 1218892 - RNA, 19 nt, Artificial Sequence
  Description of Artificial Sequence: Synthetic oligonucleotide
cagacgcaccucauuucua

SEQ ID NO: 1218893 - RNA, 19 nt, Artificial Sequence
  Description of Artificial Sequence: Synthetic oligonucleotide
ggacgaucgagcaggauuu

SEQ ID NO: 1218894 - RNA, 19 nt, Artificial Sequence
  Description of Artificial Sequence: Synthetic oligonucleotide
gaacuauauuggggugugu

SEQ ID NO: 1218895 - RNA, 19 nt, Artificial Sequence
  Description of Artificial Sequence: Synthetic oligonucleotide
accugaggugcuacauaau

SEQ ID NO: 1218896 - RNA, 19 nt, Artificial Sequence
  Description of Artificial Sequence: Synthetic oligonucleotide
guuguaaguguagggcguu

SEQ ID NO: 1218897 - RNA, 19 nt, Artificial Sequence
  Description of Artificial Sequence: Synthetic oligonucleotide
cugugaauccacgaccguu

SEQ ID NO: 1218898 - RNA, 19 nt, Artificial Sequence
  Description of Artificial Sequence: Synthetic oligonucleotide
ggaggauacacugggcaau

SEQ ID NO: 1218899 - RNA, 19 nt, Artificial Sequence
  Description of Artificial Sequence: Synthetic oligonucleotide
caacgucuuuggccaucuc

SEQ ID NO: 1218900 - RNA, 19 nt, Artificial Sequence
  Description of Artificial Sequence: Synthetic oligonucleotide
cauucucauggucguguau

SEQ ID NO: 1218901 - RNA, 19 nt, Artificial Sequence
  Description of Artificial Sequence: Synthetic oligonucleotide
ccgcauauccuuugggaua

SEQ ID NO: 1218902 - RNA, 19 nt, Artificial Sequence
  Description of Artificial Sequence: Synthetic oligonucleotide
cacggcccggagcagcgga

SEQ ID NO: 1218903 - RNA, 19 nt, Artificial Sequence
  Description of Artificial Sequence: Synthetic oligonucleotide
ggacucgugagggaacugu

SEQ ID NO: 1218904 - RNA, 19 nt, Artificial Sequence
  Description of Artificial Sequence: Synthetic oligonucleotide
caggggcauccaaagaguu

SEQ ID NO: 1218905 - RNA, 19 nt, Artificial Sequence
  Description of Artificial Sequence: Synthetic oligonucleotide
ggacuggacucgugaggga

SEQ ID NO: 1218906 - RNA, 19 nt, Artificial Sequence
  Description of Artificial Sequence: Synthetic oligonucleotide
cuggacucgugagggaacu

SEQ ID NO: 1218907 - RNA, 19 nt, Artificial Sequence
  Description of Artificial Sequence: Synthetic oligonucleotide
ccuccguggaguugagcca

SEQ ID NO: 1218908 - RNA, 19 nt, Artificial Sequence
  Description of Artificial Sequence: Synthetic oligonucleotide
ccacuaaucccugcgccca

SEQ ID NO: 1218909 - RNA, 19 nt, Artificial Sequence
  Description of Artificial Sequence: Synthetic oligonucleotide
acucccgguuguacuucca

SEQ ID NO: 1218910 - RNA, 19 nt, Artificial Sequence
  Description of Artificial Sequence: Synthetic oligonucleotide
ggcuaucugcuuuguuacu

SEQ ID NO: 1218911 - RNA, 19 nt, Artificial Sequence
  Description of Artificial Sequence: Synthetic oligonucleotide
gcggcuguccgguccccug

SEQ ID NO: 1218912 - RNA, 19 nt, Artificial Sequence
  Description of Artificial Sequence: Synthetic oligonucleotide
gggguuguucacggaguga

SEQ ID NO: 1218913 - RNA, 19 nt, Artificial Sequence
  Description of Artificial Sequence: Synthetic oligonucleotide
ccguggaguugagccaggg

SEQ ID NO: 1218914 - RNA, 19 nt, Artificial Sequence
  Description of Artificial Sequence: Synthetic oligonucleotide
gcaccucauuucuagcuuu

SEQ ID NO: 1218915 - RNA, 19 nt, Artificial Sequence
  Description of Artificial Sequence: Synthetic oligonucleotide
ccacgaccguuccagcuga

SEQ ID NO: 1218916 - RNA, 19 nt, Artificial Sequence
  Description of Artificial Sequence: Synthetic oligonucleotide
cguucuugaguagauuucu

SEQ ID NO: 1218917 - RNA, 19 nt, Artificial Sequence
  Description of Artificial Sequence: Synthetic oligonucleotide
ccugcaaccacugccuuau

SEQ ID NO: 1218918 - RNA, 19 nt, Artificial Sequence
  Description of Artificial Sequence: Synthetic oligonucleotide
ccauucucauggucgugua

SEQ ID NO: 1218919 - RNA, 19 nt, Artificial Sequence
  Description of Artificial Sequence: Synthetic oligonucleotide
gcacucccgguuguacuuc

SEQ ID NO: 1218920 - RNA, 19 nt, Artificial Sequence
  Description of Artificial Sequence: Synthetic oligonucleotide
ccauaucgcuauccuccga

SEQ ID NO: 1218921 - RNA, 19 nt, Artificial Sequence
  Description of Artificial Sequence: Synthetic oligonucleotide
gggcauccaaagaguuauc

SEQ ID NO: 1218922 - RNA, 19 nt, Artificial Sequence
  Description of Artificial Sequence: Synthetic oligonucleotide
gcgcaauguuuagcaggug

SEQ ID NO: 1218923 - RNA, 19 nt, Artificial Sequence
  Description of Artificial Sequence: Synthetic oligonucleotide
gacgaucgagcaggauuuu

SEQ ID NO: 1218924 - RNA, 19 nt, Artificial Sequence
  Description of Artificial Sequence: Synthetic oligonucleotide
ccaauacucccuccacagu

SEQ ID NO: 1218925 - RNA, 19 nt, Artificial Sequence
  Description of Artificial Sequence: Synthetic oligonucleotide
cucccuccacagugagucu

SEQ ID NO: 1218926 - RNA, 19 nt, Artificial Sequence
  Description of Artificial Sequence: Synthetic oligonucleotide
cacgaccguuccagcugaa

SEQ ID NO: 1218927 - RNA, 19 nt, Artificial Sequence
  Description of Artificial Sequence: Synthetic oligonucleotide
gugccggugcuggcugauc

SEQ ID NO: 1218928 - RNA, 19 nt, Artificial Sequence
  Description of Artificial Sequence: Synthetic oligonucleotide
ggccuccguggaguugagc

SEQ ID NO: 1218929 - RNA, 19 nt, Artificial Sequence
  Description of Artificial Sequence: Synthetic oligonucleotide
ccgguuguacuuccaggcu

SEQ ID NO: 1218930 - RNA, 19 nt, Artificial Sequence
  Description of Artificial Sequence: Synthetic oligonucleotide
cccugggacuggacucgug

SEQ ID NO: 1218931 - RNA, 19 nt, Artificial Sequence
  Description of Artificial Sequence: Synthetic oligonucleotide
cgugagggaacuguacacu

SEQ ID NO: 1218932 - RNA, 19 nt, Artificial Sequence
  Description of Artificial Sequence: Synthetic oligonucleotide
cgacaugcucugcagggcu

SEQ ID NO: 1218933 - RNA, 19 nt, Artificial Sequence
  Description of Artificial Sequence: Synthetic oligonucleotide
cagggcuaucugcuuuguu

SEQ ID NO: 1218934 - RNA, 19 nt, Artificial Sequence
  Description of Artificial Sequence: Synthetic oligonucleotide
cccugcgcccagcuucuga

SEQ ID NO: 1218935 - RNA, 19 nt, Artificial Sequence
  Description of Artificial Sequence: Synthetic oligonucleotide
guagggcguuggcgaggua

SEQ ID NO: 1218936 - RNA, 19 nt, Artificial Sequence
  Description of Artificial Sequence: Synthetic oligonucleotide
gggccuccguggaguugag

SEQ ID NO: 1218937 - RNA, 19 nt, Artificial Sequence
  Description of Artificial Sequence: Synthetic oligonucleotide
cgguuguacuuccaggcuu

SEQ ID NO: 1218938 - RNA, 19 nt, Artificial Sequence
  Description of Artificial Sequence: Synthetic oligonucleotide
ggggcucauggggaacagu

SEQ ID NO: 1218939 - RNA, 19 nt, Artificial Sequence
  Description of Artificial Sequence: Synthetic oligonucleotide
ccguuccagcugaagcccu

SEQ ID NO: 1218940 - RNA, 19 nt, Artificial Sequence
  Description of Artificial Sequence: Synthetic oligonucleotide
cgcaccucauuucuagcuu

SEQ ID NO: 1218941 - RNA, 19 nt, Artificial Sequence
  Description of Artificial Sequence: Synthetic oligonucleotide
cgugcagacgcaccucauu

SEQ ID NO: 1218942 - RNA, 19 nt, Artificial Sequence
  Description of Artificial Sequence: Synthetic oligonucleotide
cgcuauccuccgacaugcu

SEQ ID NO: 1218943 - RNA, 19 nt, Artificial Sequence
  Description of Artificial Sequence: Synthetic oligonucleotide
cggcaugagccugcuggau

SEQ ID NO: 1218944 - RNA, 19 nt, Artificial Sequence
  Description of Artificial Sequence: Synthetic oligonucleotide
uccaaugagacaagggucg

SEQ ID NO: 1218945 - RNA, 19 nt, Artificial Sequence
  Description of Artificial Sequence: Synthetic oligonucleotide
ucagggauuuugaagaucc

SEQ ID NO: 1218946 - RNA, 19 nt, Artificial Sequence
  Description of Artificial Sequence: Synthetic oligonucleotide
acugaaauccacuguuucc

SEQ ID NO: 1218947 - RNA, 19 nt, Artificial Sequence
  Description of Artificial Sequence: Synthetic oligonucleotide
aaauccacuguuuccugac

SEQ ID NO: 1218948 - RNA, 19 nt, Artificial Sequence
  Description of Artificial Sequence: Synthetic oligonucleotide
uuagcaaucacggugguga

SEQ ID NO: 1218949 - RNA, 19 nt, Artificial Sequence
  Description of Artificial Sequence: Synthetic oligonucleotide
gaguuagagauguagggcc

SEQ ID NO: 1218950 - RNA, 19 nt, Artificial Sequence
  Description of Artificial Sequence: Synthetic oligonucleotide
accacuaccggccucugcc

SEQ ID NO: 1218951 - RNA, 19 nt, Artificial Sequence
  Description of Artificial Sequence: Synthetic oligonucleotide
uccuggaagaaugagagug

SEQ ID NO: 1218952 - RNA, 19 nt, Artificial Sequence
  Description of Artificial Sequence: Synthetic oligonucleotide
aauuuugccaguggagagg

SEQ ID NO: 1218953 - RNA, 19 nt, Artificial Sequence
  Description of Artificial Sequence: Synthetic oligonucleotide
ugggaguuagagauguagg

SEQ ID NO: 1218954 - RNA, 19 nt, Artificial Sequence
  Description of Artificial Sequence: Synthetic oligonucleotide
uugagggucugcuaacugg

SEQ ID NO: 1218955 - RNA, 19 nt, Artificial Sequence
  Description of Artificial Sequence: Synthetic oligonucleotide
acgggguagauuuuacccc

SEQ ID NO: 1218956 - RNA, 19 nt, Artificial Sequence
  Description of Artificial Sequence: Synthetic oligonucleotide
agacaagggucguugaggg

SEQ ID NO: 1218957 - RNA, 19 nt, Artificial Sequence
  Description of Artificial Sequence: Synthetic oligonucleotide
uguaggucaugccuggggc

SEQ ID NO: 1218958 - RNA, 19 nt, Artificial Sequence
  Description of Artificial Sequence: Synthetic oligonucleotide
aaugcucuuagccaagguu

SEQ ID NO: 1218959 - RNA, 19 nt, Artificial Sequence
  Description of Artificial Sequence: Synthetic oligonucleotide
uuccugagcuuccagacug

SEQ ID NO: 1218960 - RNA, 19 nt, Artificial Sequence
  Description of Artificial Sequence: Synthetic oligonucleotide
agauguagggccccgagug

SEQ ID NO: 1218961 - RNA, 19 nt, Artificial Sequence
  Description of Artificial Sequence: Synthetic oligonucleotide
uggaacacgacgccugagg

SEQ ID NO: 1218962 - RNA, 19 nt, Artificial Sequence
  Description of Artificial Sequence: Synthetic oligonucleotide
aggagaucugggaagaccc

SEQ ID NO: 1218963 - RNA, 19 nt, Artificial Sequence
  Description of Artificial Sequence: Synthetic oligonucleotide
gauaaugggauugcuggag

SEQ ID NO: 1218964 - RNA, 19 nt, Artificial Sequence
  Description of Artificial Sequence: Synthetic oligonucleotide
gauuuugaagauccucccc

SEQ ID NO: 1218965 - RNA, 19 nt, Artificial Sequence
  Description of Artificial Sequence: Synthetic oligonucleotide
cagggcuuagcaaucacgg

SEQ ID NO: 1218966 - RNA, 19 nt, Artificial Sequence
  Description of Artificial Sequence: Synthetic oligonucleotide
cuuacaugggucugagagg

SEQ ID NO: 1218967 - RNA, 19 nt, Artificial Sequence
  Description of Artificial Sequence: Synthetic oligonucleotide
aacacgacgccugaggaug

SEQ ID NO: 1218968 - RNA, 19 nt, Artificial Sequence
  Description of Artificial Sequence: Synthetic oligonucleotide
cacgggguagauuuuaccc

SEQ ID NO: 1218969 - RNA, 19 nt, Artificial Sequence
  Description of Artificial Sequence: Synthetic oligonucleotide
aauaggagaucugggaaga

SEQ ID NO: 1218970 - RNA, 19 nt, Artificial Sequence
  Description of Artificial Sequence: Synthetic oligonucleotide
uuccaaugagacaaggguc

SEQ ID NO: 1218971 - RNA, 19 nt, Artificial Sequence
  Description of Artificial Sequence: Synthetic oligonucleotide
agcuacaggguugucaucg

SEQ ID NO: 1218972 - RNA, 19 nt, Artificial Sequence
  Description of Artificial Sequence: Synthetic oligonucleotide
ugagaacugcugcuuaccc

SEQ ID NO: 1218973 - RNA, 19 nt, Artificial Sequence
  Description of Artificial Sequence: Synthetic oligonucleotide
acuguuggcagagccaccc

SEQ ID NO: 1218974 - RNA, 19 nt, Artificial Sequence
  Description of Artificial Sequence: Synthetic oligonucleotide
gucaucgguugguagagcg

SEQ ID NO: 1218975 - RNA, 19 nt, Artificial Sequence
  Description of Artificial Sequence: Synthetic oligonucleotide
gagacaagggucguugagg

SEQ ID NO: 1218976 - RNA, 19 nt, Artificial Sequence
  Description of Artificial Sequence: Synthetic oligonucleotide
gacaauuuugccaguggag

SEQ ID NO: 1218977 - RNA, 19 nt, Artificial Sequence
  Description of Artificial Sequence: Synthetic oligonucleotide
aaagagggcgccccuggag

SEQ ID NO: 1218978 - RNA, 19 nt, Artificial Sequence
  Description of Artificial Sequence: Synthetic oligonucleotide
ugagacaagggucguugag

SEQ ID NO: 1218979 - RNA, 19 nt, Artificial Sequence
  Description of Artificial Sequence: Synthetic oligonucleotide
uagccaagguuccuggaag

SEQ ID NO: 1218980 - RNA, 19 nt, Artificial Sequence
  Description of Artificial Sequence: Synthetic oligonucleotide
uccgccguuacccacgggc

SEQ ID NO: 1218981 - RNA, 19 nt, Artificial Sequence
  Description of Artificial Sequence: Synthetic oligonucleotide
gggaguuagagauguaggg

SEQ ID NO: 1218982 - RNA, 19 nt, Artificial Sequence
  Description of Artificial Sequence: Synthetic oligonucleotide
uacggugugggaguuagag

SEQ ID NO: 1218983 - RNA, 19 nt, Artificial Sequence
  Description of Artificial Sequence: Synthetic oligonucleotide
acaauuuugccaguggaga

SEQ ID NO: 1218984 - RNA, 19 nt, Artificial Sequence
  Description of Artificial Sequence: Synthetic oligonucleotide
gauacggugugggaguuag

SEQ ID NO: 1218985 - RNA, 19 nt, Artificial Sequence
  Description of Artificial Sequence: Synthetic oligonucleotide
aaggagguacugguacugc

SEQ ID NO: 1218986 - RNA, 19 nt, Artificial Sequence
  Description of Artificial Sequence: Synthetic oligonucleotide
ucaucgguugguagagcgg

SEQ ID NO: 1218987 - RNA, 19 nt, Artificial Sequence
  Description of Artificial Sequence: Synthetic oligonucleotide
aguuagagauguagggccc

SEQ ID NO: 1218988 - RNA, 19 nt, Artificial Sequence
  Description of Artificial Sequence: Synthetic oligonucleotide
aggaguucauugugcacgg

SEQ ID NO: 1218989 - RNA, 19 nt, Artificial Sequence
  Description of Artificial Sequence: Synthetic oligonucleotide
gaggaauaggagaucuggg

SEQ ID NO: 1218990 - RNA, 19 nt, Artificial Sequence
  Description of Artificial Sequence: Synthetic oligonucleotide
uucauugugcacggugugg

SEQ ID NO: 1218991 - RNA, 19 nt, Artificial Sequence
  Description of Artificial Sequence: Synthetic oligonucleotide
uacuugcccucagagaccg

SEQ ID NO: 1218992 - RNA, 19 nt, Artificial Sequence
  Description of Artificial Sequence: Synthetic oligonucleotide
gagucgggcacguuggagc

SEQ ID NO: 1218993 - RNA, 19 nt, Artificial Sequence
  Description of Artificial Sequence: Synthetic oligonucleotide
ucguugagggaggugaucc

SEQ ID NO: 1218994 - RNA, 19 nt, Artificial Sequence
  Description of Artificial Sequence: Synthetic oligonucleotide
agggauuuugaagauccuc

SEQ ID NO: 1218995 - RNA, 19 nt, Artificial Sequence
  Description of Artificial Sequence: Synthetic oligonucleotide
aagagggcgccccuggaga

SEQ ID NO: 1218996 - RNA, 19 nt, Artificial Sequence
  Description of Artificial Sequence: Synthetic oligonucleotide
aaugucccggauggaacgg

SEQ ID NO: 1218997 - RNA, 19 nt, Artificial Sequence
  Description of Artificial Sequence: Synthetic oligonucleotide
guugucaucgguugguaga

SEQ ID NO: 1218998 - RNA, 19 nt, Artificial Sequence
  Description of Artificial Sequence: Synthetic oligonucleotide
auaaugggauugcuggaga

SEQ ID NO: 1218999 - RNA, 19 nt, Artificial Sequence
  Description of Artificial Sequence: Synthetic oligonucleotide
agaaccgacgccacagggc

SEQ ID NO: 1219000 - RNA, 19 nt, Artificial Sequence
  Description of Artificial Sequence: Synthetic oligonucleotide
ggucccaaugcucuuagcc

SEQ ID NO: 1219001 - RNA, 19 nt, Artificial Sequence
  Description of Artificial Sequence: Synthetic oligonucleotide
uuuccugacugagagccgc

SEQ ID NO: 1219002 - RNA, 19 nt, Artificial Sequence
  Description of Artificial Sequence: Synthetic oligonucleotide
cagggcaugccuugaaacc

SEQ ID NO: 1219003 - RNA, 19 nt, Artificial Sequence
  Description of Artificial Sequence: Synthetic oligonucleotide
uugucaucgguugguagag

SEQ ID NO: 1219004 - RNA, 19 nt, Artificial Sequence
  Description of Artificial Sequence: Synthetic oligonucleotide
guagagcggagccauuucc

SEQ ID NO: 1219005 - RNA, 19 nt, Artificial Sequence
  Description of Artificial Sequence: Synthetic oligonucleotide
caaaagagggcgccccugg

SEQ ID NO: 1219006 - RNA, 19 nt, Artificial Sequence
  Description of Artificial Sequence: Synthetic oligonucleotide
ugacacgcugcggagagcc

SEQ ID NO: 1219007 - RNA, 19 nt, Artificial Sequence
  Description of Artificial Sequence: Synthetic oligonucleotide
cagcaaugccaucagcccg

SEQ ID NO: 1219008 - RNA, 19 nt, Artificial Sequence
  Description of Artificial Sequence: Synthetic oligonucleotide
gggauuuugaagauccucc

SEQ ID NO: 1219009 - RNA, 19 nt, Artificial Sequence
  Description of Artificial Sequence: Synthetic oligonucleotide
uuccagacugagaacugcu

SEQ ID NO: 1219010 - RNA, 19 nt, Artificial Sequence
  Description of Artificial Sequence: Synthetic oligonucleotide
uagcccacgggguagauuu

SEQ ID NO: 1219011 - RNA, 19 nt, Artificial Sequence
  Description of Artificial Sequence: Synthetic oligonucleotide
ucccggauggaacggcagg

SEQ ID NO: 1219012 - RNA, 19 nt, Artificial Sequence
  Description of Artificial Sequence: Synthetic oligonucleotide
ggauuuugaagauccuccc

SEQ ID NO: 1219013 - RNA, 19 nt, Artificial Sequence
  Description of Artificial Sequence: Synthetic oligonucleotide
auugcuggagaaguacuug

SEQ ID NO: 1219014 - RNA, 19 nt, Artificial Sequence
  Description of Artificial Sequence: Synthetic oligonucleotide
ggggcuagguaacuguugg

SEQ ID NO: 1219015 - RNA, 19 nt, Artificial Sequence
  Description of Artificial Sequence: Synthetic oligonucleotide
uucagcgcggaggaggaag

SEQ ID NO: 1219016 - RNA, 19 nt, Artificial Sequence
  Description of Artificial Sequence: Synthetic oligonucleotide
cuuccugucugagagccgc

SEQ ID NO: 1219017 - RNA, 19 nt, Artificial Sequence
  Description of Artificial Sequence: Synthetic oligonucleotide
uagagcggagccauuuccu

SEQ ID NO: 1219018 - RNA, 19 nt, Artificial Sequence
  Description of Artificial Sequence: Synthetic oligonucleotide
cuggacuccgccguuaccc

SEQ ID NO: 1219019 - RNA, 19 nt, Artificial Sequence
  Description of Artificial Sequence: Synthetic oligonucleotide
uugaaacccuccagggcca

SEQ ID NO: 1219020 - RNA, 19 nt, Artificial Sequence
  Description of Artificial Sequence: Synthetic oligonucleotide
uaaugggauugcuggagaa

SEQ ID NO: 1219021 - RNA, 19 nt, Artificial Sequence
  Description of Artificial Sequence: Synthetic oligonucleotide
augggauugcuggagaagu

SEQ ID NO: 1219022 - RNA, 19 nt, Artificial Sequence
  Description of Artificial Sequence: Synthetic oligonucleotide
cuggaagaaugagaguggc

SEQ ID NO: 1219023 - RNA, 19 nt, Artificial Sequence
  Description of Artificial Sequence: Synthetic oligonucleotide
ggcuuagcaaucacggugg

SEQ ID NO: 1219024 - RNA, 19 nt, Artificial Sequence
  Description of Artificial Sequence: Synthetic oligonucleotide
ggaguuagagauguagggc

SEQ ID NO: 1219025 - RNA, 19 nt, Artificial Sequence
  Description of Artificial Sequence: Synthetic oligonucleotide
agagcggagccauuuccug

SEQ ID NO: 1219026 - RNA, 19 nt, Artificial Sequence
  Description of Artificial Sequence: Synthetic oligonucleotide
cuugcugccgcagggcugg

SEQ ID NO: 1219027 - RNA, 19 nt, Artificial Sequence
  Description of Artificial Sequence: Synthetic oligonucleotide
uggaacugcugcuucccga

SEQ ID NO: 1219028 - RNA, 19 nt, Artificial Sequence
  Description of Artificial Sequence: Synthetic oligonucleotide
ucagcgcggaggaggaagc

SEQ ID NO: 1219029 - RNA, 19 nt, Artificial Sequence
  Description of Artificial Sequence: Synthetic oligonucleotide
cuuccugacugggaguugc

SEQ ID NO: 1219030 - RNA, 19 nt, Artificial Sequence
  Description of Artificial Sequence: Synthetic oligonucleotide
cuagaaccgacgccacagg

SEQ ID NO: 1219031 - RNA, 19 nt, Artificial Sequence
  Description of Artificial Sequence: Synthetic oligonucleotide
cuugagccagaaugucccg

SEQ ID NO: 1219032 - RNA, 19 nt, Artificial Sequence
  Description of Artificial Sequence: Synthetic oligonucleotide
agggccccugguuagcccg

SEQ ID NO: 1219033 - RNA, 19 nt, Artificial Sequence
  Description of Artificial Sequence: Synthetic oligonucleotide
cugguuagcccgcgcaggg

SEQ ID NO: 1219034 - RNA, 19 nt, Artificial Sequence
  Description of Artificial Sequence: Synthetic oligonucleotide
gcggcagaaagacuugagg

SEQ ID NO: 1219035 - RNA, 19 nt, Artificial Sequence
  Description of Artificial Sequence: Synthetic oligonucleotide
guugcuacagggcaugccu

SEQ ID NO: 1219036 - RNA, 19 nt, Artificial Sequence
  Description of Artificial Sequence: Synthetic oligonucleotide
cugguggcgagcagggccc

SEQ ID NO: 1219037 - RNA, 19 nt, Artificial Sequence
  Description of Artificial Sequence: Synthetic oligonucleotide
cuugagggucugcuaacug

SEQ ID NO: 1219038 - RNA, 19 nt, Artificial Sequence
  Description of Artificial Sequence: Synthetic oligonucleotide
agcggaaaggcagggguag

SEQ ID NO: 1219039 - RNA, 19 nt, Artificial Sequence
  Description of Artificial Sequence: Synthetic oligonucleotide
ggcacguuggagcuacagg

SEQ ID NO: 1219040 - RNA, 19 nt, Artificial Sequence
  Description of Artificial Sequence: Synthetic oligonucleotide
gaaauccgcugcuuccuga

SEQ ID NO: 1219041 - RNA, 19 nt, Artificial Sequence
  Description of Artificial Sequence: Synthetic oligonucleotide
agauagacuugcugccgca

SEQ ID NO: 1219042 - RNA, 19 nt, Artificial Sequence
  Description of Artificial Sequence: Synthetic oligonucleotide
gaaccgacgccacagggcu

SEQ ID NO: 1219043 - RNA, 19 nt, Artificial Sequence
  Description of Artificial Sequence: Synthetic oligonucleotide
gaucugaauucucgagcca

SEQ ID NO: 1219044 - RNA, 19 nt, Artificial Sequence
  Description of Artificial Sequence: Synthetic oligonucleotide
ggugacacgcugcggagag

SEQ ID NO: 1219045 - RNA, 19 nt, Artificial Sequence
  Description of Artificial Sequence: Synthetic oligonucleotide
cauugugcacgguguggcc

SEQ ID NO: 1219046 - RNA, 19 nt, Artificial Sequence
  Description of Artificial Sequence: Synthetic oligonucleotide
cagacccagaggaauagga

SEQ ID NO: 1219047 - RNA, 19 nt, Artificial Sequence
  Description of Artificial Sequence: Synthetic oligonucleotide
ugucccggauggaacggca

SEQ ID NO: 1219048 - RNA, 19 nt, Artificial Sequence
  Description of Artificial Sequence: Synthetic oligonucleotide
gaucccgagggaguggcug

SEQ ID NO: 1219049 - RNA, 19 nt, Artificial Sequence
  Description of Artificial Sequence: Synthetic oligonucleotide
ggagauagacuugcugccg

SEQ ID NO: 1219050 - RNA, 19 nt, Artificial Sequence
  Description of Artificial Sequence: Synthetic oligonucleotide
agucgggcacguuggagcu

SEQ ID NO: 1219051 - RNA, 19 nt, Artificial Sequence
  Description of Artificial Sequence: Synthetic oligonucleotide
gacuccgccguuacccacg

SEQ ID NO: 1219052 - RNA, 19 nt, Artificial Sequence
  Description of Artificial Sequence: Synthetic oligonucleotide
acccgauacggugugggag

SEQ ID NO: 1219053 - RNA, 19 nt, Artificial Sequence
  Description of Artificial Sequence: Synthetic oligonucleotide
ugagaguggccaucagcaa

SEQ ID NO: 1219054 - RNA, 19 nt, Artificial Sequence
  Description of Artificial Sequence: Synthetic oligonucleotide
caggguugucaucgguugg

SEQ ID NO: 1219055 - RNA, 19 nt, Artificial Sequence
  Description of Artificial Sequence: Synthetic oligonucleotide
cucccggggcuguugaggc

SEQ ID NO: 1219056 - RNA, 19 nt, Artificial Sequence
  Description of Artificial Sequence: Synthetic oligonucleotide
ucacuugagccagaauguc

SEQ ID NO: 1219057 - RNA, 19 nt, Artificial Sequence
  Description of Artificial Sequence: Synthetic oligonucleotide
agccaagguuccuggaaga

SEQ ID NO: 1219058 - RNA, 19 nt, Artificial Sequence
  Description of Artificial Sequence: Synthetic oligonucleotide
accgacgccacagggcugg

SEQ ID NO: 1219059 - RNA, 19 nt, Artificial Sequence
  Description of Artificial Sequence: Synthetic oligonucleotide
ucccgggugcccgagagga

SEQ ID NO: 1219060 - RNA, 19 nt, Artificial Sequence
  Description of Artificial Sequence: Synthetic oligonucleotide
accucguacccgccguagg

SEQ ID NO: 1219061 - RNA, 19 nt, Artificial Sequence
  Description of Artificial Sequence: Synthetic oligonucleotide
agagggcgccccuggagag

SEQ ID NO: 1219062 - RNA, 19 nt, Artificial Sequence
  Description of Artificial Sequence: Synthetic oligonucleotide
gggagagucgggcacguug

SEQ ID NO: 1219063 - RNA, 19 nt, Artificial Sequence
  Description of Artificial Sequence: Synthetic oligonucleotide
gagccggucuuuccaauga

SEQ ID NO: 1219064 - RNA, 19 nt, Artificial Sequence
  Description of Artificial Sequence: Synthetic oligonucleotide
augagacaagggucguuga

SEQ ID NO: 1219065 - RNA, 19 nt, Artificial Sequence
  Description of Artificial Sequence: Synthetic oligonucleotide
cucgagccagagcaaggcc

SEQ ID NO: 1219066 - RNA, 19 nt, Artificial Sequence
  Description of Artificial Sequence: Synthetic oligonucleotide
cagaggaauaggagaucug

SEQ ID NO: 1219067 - RNA, 19 nt, Artificial Sequence
  Description of Artificial Sequence: Synthetic oligonucleotide
agggcgccccuggagagcc

SEQ ID NO: 1219068 - RNA, 19 nt, Artificial Sequence
  Description of Artificial Sequence: Synthetic oligonucleotide
augucccggauggaacggc

SEQ ID NO: 1219069 - RNA, 19 nt, Artificial Sequence
  Description of Artificial Sequence: Synthetic oligonucleotide
acgccacagggcuggacuc

SEQ ID NO: 1219070 - RNA, 19 nt, Artificial Sequence
  Description of Artificial Sequence: Synthetic oligonucleotide
aggaagcggaaaggcaggg

SEQ ID NO: 1219071 - RNA, 19 nt, Artificial Sequence
  Description of Artificial Sequence: Synthetic oligonucleotide
agccggucuuuccaaugag

SEQ ID NO: 1219072 - RNA, 19 nt, Artificial Sequence
  Description of Artificial Sequence: Synthetic oligonucleotide
cuggggauaaugggauugc

SEQ ID NO: 1219073 - RNA, 19 nt, Artificial Sequence
  Description of Artificial Sequence: Synthetic oligonucleotide
agggcuuagcaaucacggu

SEQ ID NO: 1219074 - RNA, 19 nt, Artificial Sequence
  Description of Artificial Sequence: Synthetic oligonucleotide
cucuuagccaagguuccug

SEQ ID NO: 1219075 - RNA, 19 nt, Artificial Sequence
  Description of Artificial Sequence: Synthetic oligonucleotide
ccggucuuuccaaugagac

SEQ ID NO: 1219076 - RNA, 19 nt, Artificial Sequence
  Description of Artificial Sequence: Synthetic oligonucleotide
acggugugggaguuagaga

SEQ ID NO: 1219077 - RNA, 19 nt, Artificial Sequence
  Description of Artificial Sequence: Synthetic oligonucleotide
cccgagugugugaugacgg

SEQ ID NO: 1219078 - RNA, 19 nt, Artificial Sequence
  Description of Artificial Sequence: Synthetic oligonucleotide
ugcuucccgacugggagcu

SEQ ID NO: 1219079 - RNA, 19 nt, Artificial Sequence
  Description of Artificial Sequence: Synthetic oligonucleotide
ugcccacccgauacggugu

SEQ ID NO: 1219080 - RNA, 19 nt, Artificial Sequence
  Description of Artificial Sequence: Synthetic oligonucleotide
ugggauugcuggagaagua

SEQ ID NO: 1219081 - RNA, 19 nt, Artificial Sequence
  Description of Artificial Sequence: Synthetic oligonucleotide
uggguaggcguuggaacug

SEQ ID NO: 1219082 - RNA, 19 nt, Artificial Sequence
  Description of Artificial Sequence: Synthetic oligonucleotide
guggugacacgcugcggag

SEQ ID NO: 1219083 - RNA, 19 nt, Artificial Sequence
  Description of Artificial Sequence: Synthetic oligonucleotide
uagccggcggagauagacu

SEQ ID NO: 1219084 - RNA, 19 nt, Artificial Sequence
  Description of Artificial Sequence: Synthetic oligonucleotide
gagcagggccccugguuag

SEQ ID NO: 1219085 - RNA, 19 nt, Artificial Sequence
  Description of Artificial Sequence: Synthetic oligonucleotide
gacugggaguugcugcuuc

SEQ ID NO: 1219086 - RNA, 19 nt, Artificial Sequence
  Description of Artificial Sequence: Synthetic oligonucleotide
uggacuccgccguuaccca

SEQ ID NO: 1219087 - RNA, 19 nt, Artificial Sequence
  Description of Artificial Sequence: Synthetic oligonucleotide
guaggcguuggaacuggag

SEQ ID NO: 1219088 - RNA, 19 nt, Artificial Sequence
  Description of Artificial Sequence: Synthetic oligonucleotide
cugcuucccgacugggagc

SEQ ID NO: 1219089 - RNA, 19 nt, Artificial Sequence
  Description of Artificial Sequence: Synthetic oligonucleotide
caucccgggugcccgagag

SEQ ID NO: 1219090 - RNA, 19 nt, Artificial Sequence
  Description of Artificial Sequence: Synthetic oligonucleotide
cuuagcaaucacgguggug

SEQ ID NO: 1219091 - RNA, 19 nt, Artificial Sequence
  Description of Artificial Sequence: Synthetic oligonucleotide
acuccgccguuacccacgg

SEQ ID NO: 1219092 - RNA, 19 nt, Artificial Sequence
  Description of Artificial Sequence: Synthetic oligonucleotide
acguuggagcuacaggguu

SEQ ID NO: 1219093 - RNA, 19 nt, Artificial Sequence
  Description of Artificial Sequence: Synthetic oligonucleotide
ccuagaaccgacgccacag

SEQ ID NO: 1219094 - RNA, 19 nt, Artificial Sequence
  Description of Artificial Sequence: Synthetic oligonucleotide
cucugcccacccgauacgg

SEQ ID NO: 1219095 - RNA, 19 nt, Artificial Sequence
  Description of Artificial Sequence: Synthetic oligonucleotide
agagucgggcacguuggag

SEQ ID NO: 1219096 - RNA, 19 nt, Artificial Sequence
  Description of Artificial Sequence: Synthetic oligonucleotide
gcugccgcagggcuggagg

SEQ ID NO: 1219097 - RNA, 19 nt, Artificial Sequence
  Description of Artificial Sequence: Synthetic oligonucleotide
augccuggggcuagguaac

SEQ ID NO: 1219098 - RNA, 19 nt, Artificial Sequence
  Description of Artificial Sequence: Synthetic oligonucleotide
ggcggagauagacuugcug

SEQ ID NO: 1219099 - RNA, 19 nt, Artificial Sequence
  Description of Artificial Sequence: Synthetic oligonucleotide
ggaacacgacgccugagga

SEQ ID NO: 1219100 - RNA, 19 nt, Artificial Sequence
  Description of Artificial Sequence: Synthetic oligonucleotide
uagcaaucacgguggugac

SEQ ID NO: 1219101 - RNA, 19 nt, Artificial Sequence
  Description of Artificial Sequence: Synthetic oligonucleotide
uccuggugggguccuuaca

SEQ ID NO: 1219102 - RNA, 19 nt, Artificial Sequence
  Description of Artificial Sequence: Synthetic oligonucleotide
aggguugucaucgguuggu

SEQ ID NO: 1219103 - RNA, 19 nt, Artificial Sequence
  Description of Artificial Sequence: Synthetic oligonucleotide
ucgggcacguuggagcuac

SEQ ID NO: 1219104 - RNA, 19 nt, Artificial Sequence
  Description of Artificial Sequence: Synthetic oligonucleotide
uuccgccaccgauggagcc

SEQ ID NO: 1219105 - RNA, 19 nt, Artificial Sequence
  Description of Artificial Sequence: Synthetic oligonucleotide
ugcuuccugacugggaguu

SEQ ID NO: 1219106 - RNA, 19 nt, Artificial Sequence
  Description of Artificial Sequence: Synthetic oligonucleotide
ggcuagguaacuguuggca

SEQ ID NO: 1219107 - RNA, 19 nt, Artificial Sequence
  Description of Artificial Sequence: Synthetic oligonucleotide
agccggcggagauagacuu

SEQ ID NO: 1219108 - RNA, 19 nt, Artificial Sequence
  Description of Artificial Sequence: Synthetic oligonucleotide
gaacggcagggcauccucc

SEQ ID NO: 1219109 - RNA, 19 nt, Artificial Sequence
  Description of Artificial Sequence: Synthetic oligonucleotide
acacgccccaucccgggug

SEQ ID NO: 1219110 - RNA, 19 nt, Artificial Sequence
  Description of Artificial Sequence: Synthetic oligonucleotide
ucaugccuggggcuaggua

SEQ ID NO: 1219111 - RNA, 19 nt, Artificial Sequence
  Description of Artificial Sequence: Synthetic oligonucleotide
guacuugcccucagagacc

SEQ ID NO: 1219112 - RNA, 19 nt, Artificial Sequence
  Description of Artificial Sequence: Synthetic oligonucleotide
cugucccggcggcagaaag

SEQ ID NO: 1219113 - RNA, 19 nt, Artificial Sequence
  Description of Artificial Sequence: Synthetic oligonucleotide
uuccugacugagagccgcu

SEQ ID NO: 1219114 - RNA, 19 nt, Artificial Sequence
  Description of Artificial Sequence: Synthetic oligonucleotide
uccugaguggaaggagcca

SEQ ID NO: 1219115 - RNA, 19 nt, Artificial Sequence
  Description of Artificial Sequence: Synthetic oligonucleotide
uccuuacaugggucugaga

SEQ ID NO: 1219116 - RNA, 19 nt, Artificial Sequence
  Description of Artificial Sequence: Synthetic oligonucleotide
caaucacgguggugacacg

SEQ ID NO: 1219117 - RNA, 19 nt, Artificial Sequence
  Description of Artificial Sequence: Synthetic oligonucleotide
gucccggcggcagaaagac

SEQ ID NO: 1219118 - RNA, 19 nt, Artificial Sequence
  Description of Artificial Sequence: Synthetic oligonucleotide
uccugacugagagccgcug

SEQ ID NO: 1219119 - RNA, 19 nt, Artificial Sequence
  Description of Artificial Sequence: Synthetic oligonucleotide
cggagauagacuugcugcc

SEQ ID NO: 1219120 - RNA, 19 nt, Artificial Sequence
  Description of Artificial Sequence: Synthetic oligonucleotide
gcuguugaggccacagggc

SEQ ID NO: 1219121 - RNA, 19 nt, Artificial Sequence
  Description of Artificial Sequence: Synthetic oligonucleotide
guacugcuggaagugaucu

SEQ ID NO: 1219122 - RNA, 19 nt, Artificial Sequence
  Description of Artificial Sequence: Synthetic oligonucleotide
cagacugagaacugcugcu

SEQ ID NO: 1219123 - RNA, 19 nt, Artificial Sequence
  Description of Artificial Sequence: Synthetic oligonucleotide
auugagcccuguccaggau

SEQ ID NO: 1219124 - RNA, 19 nt, Artificial Sequence
  Description of Artificial Sequence: Synthetic oligonucleotide
ggagccggucuuuccaaug

SEQ ID NO: 1219125 - RNA, 19 nt, Artificial Sequence
  Description of Artificial Sequence: Synthetic oligonucleotide
ccucguacccgccguaggg

SEQ ID NO: 1219126 - RNA, 19 nt, Artificial Sequence
  Description of Artificial Sequence: Synthetic oligonucleotide
agacugagaacugcugcuu

SEQ ID NO: 1219127 - RNA, 19 nt, Artificial Sequence
  Description of Artificial Sequence: Synthetic oligonucleotide
ggaagcggaaaggcagggg

SEQ ID NO: 1219128 - RNA, 19 nt, Artificial Sequence
  Description of Artificial Sequence: Synthetic oligonucleotide
agagccguucagaccuccg

SEQ ID NO: 1219129 - RNA, 19 nt, Artificial Sequence
  Description of Artificial Sequence: Synthetic oligonucleotide
ggccaccguugcuacaggg

SEQ ID NO: 1219130 - RNA, 19 nt, Artificial Sequence
  Description of Artificial Sequence: Synthetic oligonucleotide
ggaggagcuuccgccaccg

SEQ ID NO: 1219131 - RNA, 19 nt, Artificial Sequence
  Description of Artificial Sequence: Synthetic oligonucleotide
uuccugucugagagccgcu

SEQ ID NO: 1219132 - RNA, 19 nt, Artificial Sequence
  Description of Artificial Sequence: Synthetic oligonucleotide
ggagcuacaggguugucau

SEQ ID NO: 1219133 - RNA, 19 nt, Artificial Sequence
  Description of Artificial Sequence: Synthetic oligonucleotide
ucguacccgccguaggguu

SEQ ID NO: 1219134 - RNA, 19 nt, Artificial Sequence
  Description of Artificial Sequence: Synthetic oligonucleotide
aagcggaaaggcaggggua

SEQ ID NO: 1219135 - RNA, 19 nt, Artificial Sequence
  Description of Artificial Sequence: Synthetic oligonucleotide
ggggccaccguugcuacag

SEQ ID NO: 1219136 - RNA, 19 nt, Artificial Sequence
  Description of Artificial Sequence: Synthetic oligonucleotide
ccaaguuuauugagcccug

SEQ ID NO: 1219137 - RNA, 19 nt, Artificial Sequence
  Description of Artificial Sequence: Synthetic oligonucleotide
cccgccguaggguuucugg

SEQ ID NO: 1219138 - RNA, 19 nt, Artificial Sequence
  Description of Artificial Sequence: Synthetic oligonucleotide
ugguuagcccgcgcagggc

SEQ ID NO: 1219139 - RNA, 19 nt, Artificial Sequence
  Description of Artificial Sequence: Synthetic oligonucleotide
ggaacggcagggcauccuc

SEQ ID NO: 1219140 - RNA, 19 nt, Artificial Sequence
  Description of Artificial Sequence: Synthetic oligonucleotide
guugaggccacagggcuua

SEQ ID NO: 1219141 - RNA, 19 nt, Artificial Sequence
  Description of Artificial Sequence: Synthetic oligonucleotide
ccgagaggaguucauugug

SEQ ID NO: 1219142 - RNA, 19 nt, Artificial Sequence
  Description of Artificial Sequence: Synthetic oligonucleotide
ggcguuggaacuggaggag

SEQ ID NO: 1219143 - RNA, 19 nt, Artificial Sequence
  Description of Artificial Sequence: Synthetic oligonucleotide
acacgacgccugaggaugg

SEQ ID NO: 1219144 - RNA, 19 nt, Artificial Sequence
  Description of Artificial Sequence: Synthetic oligonucleotide
gacacgcugcggagagccg

SEQ ID NO: 1219145 - RNA, 19 nt, Artificial Sequence
  Description of Artificial Sequence: Synthetic oligonucleotide
uggagccggucuuuccaau

SEQ ID NO: 1219146 - RNA, 19 nt, Artificial Sequence
  Description of Artificial Sequence: Synthetic oligonucleotide
gaacacgacgccugaggau

SEQ ID NO: 1219147 - RNA, 19 nt, Artificial Sequence
  Description of Artificial Sequence: Synthetic oligonucleotide
ggcugcaaaagagggcgcc

SEQ ID NO: 1219148 - RNA, 19 nt, Artificial Sequence
  Description of Artificial Sequence: Synthetic oligonucleotide
uggaacggcagggcauccu

SEQ ID NO: 1219149 - RNA, 19 nt, Artificial Sequence
  Description of Artificial Sequence: Synthetic oligonucleotide
gccguuacccacgggcugg

SEQ ID NO: 1219150 - RNA, 19 nt, Artificial Sequence
  Description of Artificial Sequence: Synthetic oligonucleotide
ccgagugugugaugacggg

SEQ ID NO: 1219151 - RNA, 19 nt, Artificial Sequence
  Description of Artificial Sequence: Synthetic oligonucleotide
accuccguucagcgcggag

SEQ ID NO: 1219152 - RNA, 19 nt, Artificial Sequence
  Description of Artificial Sequence: Synthetic oligonucleotide
guaggucaugccuggggcu

SEQ ID NO: 1219153 - RNA, 19 nt, Artificial Sequence
  Description of Artificial Sequence: Synthetic oligonucleotide
ggugauccugguggggucc

SEQ ID NO: 1219154 - RNA, 19 nt, Artificial Sequence
  Description of Artificial Sequence: Synthetic oligonucleotide
gcccggcugcaaaagaggg

SEQ ID NO: 1219155 - RNA, 19 nt, Artificial Sequence
  Description of Artificial Sequence: Synthetic oligonucleotide
cuugcccgaggggccaccg

SEQ ID NO: 1219156 - RNA, 19 nt, Artificial Sequence
  Description of Artificial Sequence: Synthetic oligonucleotide
ccguucagcgcggaggagg

SEQ ID NO: 1219157 - RNA, 19 nt, Artificial Sequence
  Description of Artificial Sequence: Synthetic oligonucleotide
gagagucgggcacguugga

SEQ ID NO: 1219158 - RNA, 19 nt, Artificial Sequence
  Description of Artificial Sequence: Synthetic oligonucleotide
gagcuacaggguugucauc

SEQ ID NO: 1219159 - RNA, 19 nt, Artificial Sequence
  Description of Artificial Sequence: Synthetic oligonucleotide
accggccucugcccacccg

SEQ ID NO: 1219160 - RNA, 19 nt, Artificial Sequence
  Description of Artificial Sequence: Synthetic oligonucleotide
cacgccccaucccgggugc

SEQ ID NO: 1219161 - RNA, 19 nt, Artificial Sequence
  Description of Artificial Sequence: Synthetic oligonucleotide
cuggaacacgacgccugag

SEQ ID NO: 1219162 - RNA, 19 nt, Artificial Sequence
  Description of Artificial Sequence: Synthetic oligonucleotide
guuggagcuacaggguugu

SEQ ID NO: 1219163 - RNA, 19 nt, Artificial Sequence
  Description of Artificial Sequence: Synthetic oligonucleotide
gccguaggguuucuggaca

SEQ ID NO: 1219164 - RNA, 19 nt, Artificial Sequence
  Description of Artificial Sequence: Synthetic oligonucleotide
ccaccgauggagccggggc

SEQ ID NO: 1219165 - RNA, 19 nt, Artificial Sequence
  Description of Artificial Sequence: Synthetic oligonucleotide
uagggccccgaguguguga

SEQ ID NO: 1219166 - RNA, 19 nt, Artificial Sequence
  Description of Artificial Sequence: Synthetic oligonucleotide
ccugucugagagccgcugc

SEQ ID NO: 1219167 - RNA, 19 nt, Artificial Sequence
  Description of Artificial Sequence: Synthetic oligonucleotide
agaccuccguucagcgcgg

SEQ ID NO: 1219168 - RNA, 19 nt, Artificial Sequence
  Description of Artificial Sequence: Synthetic oligonucleotide
gcugcaaaagagggcgccc

SEQ ID NO: 1219169 - RNA, 19 nt, Artificial Sequence
  Description of Artificial Sequence: Synthetic oligonucleotide
gccguucagaccuccguuc

SEQ ID NO: 1219170 - RNA, 19 nt, Artificial Sequence
  Description of Artificial Sequence: Synthetic oligonucleotide
gugggguccuuacaugggu

SEQ ID NO: 1219171 - RNA, 19 nt, Artificial Sequence
  Description of Artificial Sequence: Synthetic oligonucleotide
gcggagagccguucagacc

SEQ ID NO: 1219172 - RNA, 19 nt, Artificial Sequence
  Description of Artificial Sequence: Synthetic oligonucleotide
cugacugagagccgcugcu

SEQ ID NO: 1219173 - RNA, 19 nt, Artificial Sequence
  Description of Artificial Sequence: Synthetic oligonucleotide
cccgacugggagcugcugc

SEQ ID NO: 1219174 - RNA, 19 nt, Artificial Sequence
  Description of Artificial Sequence: Synthetic oligonucleotide
ggcggcagaaagacuugag

SEQ ID NO: 1219175 - RNA, 19 nt, Artificial Sequence
  Description of Artificial Sequence: Synthetic oligonucleotide
gagcccuugacaggguugu

SEQ ID NO: 1219176 - RNA, 19 nt, Artificial Sequence
  Description of Artificial Sequence: Synthetic oligonucleotide
cuaccggccucugcccacc

SEQ ID NO: 1219177 - RNA, 19 nt, Artificial Sequence
  Description of Artificial Sequence: Synthetic oligonucleotide
ggggcuguugaggccacag

SEQ ID NO: 1219178 - RNA, 19 nt, Artificial Sequence
  Description of Artificial Sequence: Synthetic oligonucleotide
acccacgggcuggaacacg

SEQ ID NO: 1219179 - RNA, 19 nt, Artificial Sequence
  Description of Artificial Sequence: Synthetic oligonucleotide
caucagcccgugcccuccc

SEQ ID NO: 1219180 - RNA, 19 nt, Artificial Sequence
  Description of Artificial Sequence: Synthetic oligonucleotide
cacguuggagcuacagggu

SEQ ID NO: 1219181 - RNA, 19 nt, Artificial Sequence
  Description of Artificial Sequence: Synthetic oligonucleotide
guuagcccgcgcagggcug

SEQ ID NO: 1219182 - RNA, 19 nt, Artificial Sequence
  Description of Artificial Sequence: Synthetic oligonucleotide
ccguaggguuucuggacag

SEQ ID NO: 1219183 - RNA, 19 nt, Artificial Sequence
  Description of Artificial Sequence: Synthetic oligonucleotide
guagggccccgagugugug

SEQ ID NO: 1219184 - RNA, 19 nt, Artificial Sequence
  Description of Artificial Sequence: Synthetic oligonucleotide
uacccacgggcuggaacac

SEQ ID NO: 1219185 - RNA, 19 nt, Artificial Sequence
  Description of Artificial Sequence: Synthetic oligonucleotide
ccacccgauacgguguggg

SEQ ID NO: 1219186 - RNA, 19 nt, Artificial Sequence
  Description of Artificial Sequence: Synthetic oligonucleotide
cacgacgccugaggauggg

SEQ ID NO: 1219187 - RNA, 19 nt, Artificial Sequence
  Description of Artificial Sequence: Synthetic oligonucleotide
aaccgacgccacagggcug

SEQ ID NO: 1219188 - RNA, 19 nt, Artificial Sequence
  Description of Artificial Sequence: Synthetic oligonucleotide
agggccccgagugugugau

SEQ ID NO: 1219189 - RNA, 19 nt, Artificial Sequence
  Description of Artificial Sequence: Synthetic oligonucleotide
cuggagccggucuuuccaa

SEQ ID NO: 1219190 - RNA, 19 nt, Artificial Sequence
  Description of Artificial Sequence: Synthetic oligonucleotide
guggaaggagccagaccca

SEQ ID NO: 1219191 - RNA, 19 nt, Artificial Sequence
  Description of Artificial Sequence: Synthetic oligonucleotide
ggagcuguagcuggggaua

SEQ ID NO: 1219192 - RNA, 19 nt, Artificial Sequence
  Description of Artificial Sequence: Synthetic oligonucleotide
cagcgcggaggaggaagcg

SEQ ID NO: 1219193 - RNA, 19 nt, Artificial Sequence
  Description of Artificial Sequence: Synthetic oligonucleotide
ccccgagugugugaugacg

SEQ ID NO: 1219194 - RNA, 19 nt, Artificial Sequence
  Description of Artificial Sequence: Synthetic oligonucleotide
gguuagcccgcgcagggcu

SEQ ID NO: 1219195 - RNA, 19 nt, Artificial Sequence
  Description of Artificial Sequence: Synthetic oligonucleotide
cccgcgcagggcuggaagg

SEQ ID NO: 1219196 - RNA, 19 nt, Artificial Sequence
  Description of Artificial Sequence: Synthetic oligonucleotide
gguccuuacaugggucuga

SEQ ID NO: 1219197 - RNA, 19 nt, Artificial Sequence
  Description of Artificial Sequence: Synthetic oligonucleotide
ugcccgagaggaguucauu

SEQ ID NO: 1219198 - RNA, 19 nt, Artificial Sequence
  Description of Artificial Sequence: Synthetic oligonucleotide
guacccgccguaggguuuc

SEQ ID NO: 1219199 - RNA, 19 nt, Artificial Sequence
  Description of Artificial Sequence: Synthetic oligonucleotide
cacuaccggccucugccca

SEQ ID NO: 1219200 - RNA, 19 nt, Artificial Sequence
  Description of Artificial Sequence: Synthetic oligonucleotide
cugucugagagccgcugcu

SEQ ID NO: 1219201 - RNA, 19 nt, Artificial Sequence
  Description of Artificial Sequence: Synthetic oligonucleotide
ugacugggaguugcugcuu

SEQ ID NO: 1219202 - RNA, 19 nt, Artificial Sequence
  Description of Artificial Sequence: Synthetic oligonucleotide
ccacuaccggccucugccc

SEQ ID NO: 1219203 - RNA, 19 nt, Artificial Sequence
  Description of Artificial Sequence: Synthetic oligonucleotide
gcuggaacacgacgccuga

SEQ ID NO: 1219204 - RNA, 19 nt, Artificial Sequence
  Description of Artificial Sequence: Synthetic oligonucleotide
gagggucccaaugcucuua

SEQ ID NO: 1219205 - RNA, 19 nt, Artificial Sequence
  Description of Artificial Sequence: Synthetic oligonucleotide
cccacacgccccaucccgg

SEQ ID NO: 1219206 - RNA, 19 nt, Artificial Sequence
  Description of Artificial Sequence: Synthetic oligonucleotide
cacccgauacgguguggga

SEQ ID NO: 1219207 - RNA, 19 nt, Artificial Sequence
  Description of Artificial Sequence: Synthetic oligonucleotide
gggcacguuggagcuacag

SEQ ID NO: 1219208 - RNA, 19 nt, Artificial Sequence
  Description of Artificial Sequence: Synthetic oligonucleotide
acgacgccugaggaugggu

SEQ ID NO: 1219209 - RNA, 19 nt, Artificial Sequence
  Description of Artificial Sequence: Synthetic oligonucleotide
ggccccgagugugugauga

SEQ ID NO: 1219210 - RNA, 19 nt, Artificial Sequence
  Description of Artificial Sequence: Synthetic oligonucleotide
caaugcucuuagccaaggu

SEQ ID NO: 1219211 - RNA, 19 nt, Artificial Sequence
  Description of Artificial Sequence: Synthetic oligonucleotide
ggguccuuacaugggucug

SEQ ID NO: 1219212 - RNA, 19 nt, Artificial Sequence
  Description of Artificial Sequence: Synthetic oligonucleotide
cccacgggguagauuuuac

SEQ ID NO: 1219213 - RNA, 19 nt, Artificial Sequence
  Description of Artificial Sequence: Synthetic oligonucleotide
ggauugcuggagaaguacu

SEQ ID NO: 1219214 - RNA, 19 nt, Artificial Sequence
  Description of Artificial Sequence: Synthetic oligonucleotide
ccacacgccccaucccggg

SEQ ID NO: 1219215 - RNA, 19 nt, Artificial Sequence
  Description of Artificial Sequence: Synthetic oligonucleotide
cgugcccucccacacgccc

SEQ ID NO: 1219216 - RNA, 19 nt, Artificial Sequence
  Description of Artificial Sequence: Synthetic oligonucleotide
ggcuggacuccgccguuac

SEQ ID NO: 1219217 - RNA, 19 nt, Artificial Sequence
  Description of Artificial Sequence: Synthetic oligonucleotide
gcuggacuccgccguuacc

SEQ ID NO: 1219218 - RNA, 19 nt, Artificial Sequence
  Description of Artificial Sequence: Synthetic oligonucleotide
gggguccuuacaugggucu

SEQ ID NO: 1219219 - RNA, 19 nt, Artificial Sequence
  Description of Artificial Sequence: Synthetic oligonucleotide
cugcggagagccguucaga

SEQ ID NO: 1219220 - RNA, 19 nt, Artificial Sequence
  Description of Artificial Sequence: Synthetic oligonucleotide
acgcugcggagagccguuc

SEQ ID NO: 1219221 - RNA, 19 nt, Artificial Sequence
  Description of Artificial Sequence: Synthetic oligonucleotide
gggccaccguugcuacagg

SEQ ID NO: 1219222 - RNA, 19 nt, Artificial Sequence
  Description of Artificial Sequence: Synthetic oligonucleotide
gugacacgcugcggagagc

SEQ ID NO: 1219223 - RNA, 19 nt, Artificial Sequence
  Description of Artificial Sequence: Synthetic oligonucleotide
gggucccaaugcucuuagc

SEQ ID NO: 1219224 - RNA, 19 nt, Artificial Sequence
  Description of Artificial Sequence: Synthetic oligonucleotide
gaggagcuuccgccaccga

SEQ ID NO: 1219225 - RNA, 19 nt, Artificial Sequence
  Description of Artificial Sequence: Synthetic oligonucleotide
agggcuggacuccgccguu

SEQ ID NO: 1219226 - RNA, 19 nt, Artificial Sequence
  Description of Artificial Sequence: Synthetic oligonucleotide
agcuuccgccaccgaugga

SEQ ID NO: 1219227 - RNA, 19 nt, Artificial Sequence
  Description of Artificial Sequence: Synthetic oligonucleotide
cguucagaccuccguucag

SEQ ID NO: 1219228 - RNA, 19 nt, Artificial Sequence
  Description of Artificial Sequence: Synthetic oligonucleotide
acgccccaucccgggugcc

SEQ ID NO: 1219229 - RNA, 19 nt, Artificial Sequence
  Description of Artificial Sequence: Synthetic oligonucleotide
gccaccgauggagccgggg

SEQ ID NO: 1219230 - RNA, 19 nt, Artificial Sequence
  Description of Artificial Sequence: Synthetic oligonucleotide
cgccguaggguuucuggac

SEQ ID NO: 1219231 - RNA, 19 nt, Artificial Sequence
  Description of Artificial Sequence: Synthetic oligonucleotide
gccggucuuuccaaugaga

SEQ ID NO: 1219232 - RNA, 19 nt, Artificial Sequence
  Description of Artificial Sequence: Synthetic oligonucleotide
gcuacagggcaugccuuga

SEQ ID NO: 1219233 - RNA, 19 nt, Artificial Sequence
  Description of Artificial Sequence: Synthetic oligonucleotide
uuggagcuacaggguuguc

SEQ ID NO: 1219234 - RNA, 19 nt, Artificial Sequence
  Description of Artificial Sequence: Synthetic oligonucleotide
auacggugugggaguuaga

SEQ ID NO: 1219235 - RNA, 19 nt, Artificial Sequence
  Description of Artificial Sequence: Synthetic oligonucleotide
ccguucagaccuccguuca

SEQ ID NO: 1219236 - RNA, 19 nt, Artificial Sequence
  Description of Artificial Sequence: Synthetic oligonucleotide
cguugcuacagggcaugcc

SEQ ID NO: 1219237 - RNA, 19 nt, Artificial Sequence
  Description of Artificial Sequence: Synthetic oligonucleotide
cuccgccguuacccacggg

SEQ ID NO: 1219238 - RNA, 19 nt, Artificial Sequence
  Description of Artificial Sequence: Synthetic oligonucleotide
gcccacccgauacggugug

SEQ ID NO: 1219239 - RNA, 19 nt, Artificial Sequence
  Description of Artificial Sequence: Synthetic oligonucleotide
cugagagccgcugcuuccu

SEQ ID NO: 1219240 - RNA, 19 nt, Artificial Sequence
  Description of Artificial Sequence: Synthetic oligonucleotide
gccaagguuccuggaagaa

SEQ ID NO: 1219241 - RNA, 19 nt, Artificial Sequence
  Description of Artificial Sequence: Synthetic oligonucleotide
ccuggggcuagguaacugu

SEQ ID NO: 1219242 - RNA, 19 nt, Artificial Sequence
  Description of Artificial Sequence: Synthetic oligonucleotide
gcggaaaggcagggguagc

SEQ ID NO: 1219243 - RNA, 19 nt, Artificial Sequence
  Description of Artificial Sequence: Synthetic oligonucleotide
gccuggggcuagguaacug

SEQ ID NO: 1219244 - RNA, 19 nt, Artificial Sequence
  Description of Artificial Sequence: Synthetic oligonucleotide
ggggcccggcugcaaaaga

SEQ ID NO: 1219245 - RNA, 19 nt, Artificial Sequence
  Description of Artificial Sequence: Synthetic oligonucleotide
gcuuccugacugggaguug

SEQ ID NO: 1219246 - RNA, 19 nt, Artificial Sequence
  Description of Artificial Sequence: Synthetic oligonucleotide
cucguacccgccguagggu

SEQ ID NO: 1219247 - RNA, 19 nt, Artificial Sequence
  Description of Artificial Sequence: Synthetic oligonucleotide
cguucagcgcggaggagga

SEQ ID NO: 1219248 - RNA, 19 nt, Artificial Sequence
  Description of Artificial Sequence: Synthetic oligonucleotide
ccccuagaaccgacgccac

SEQ ID NO: 1219249 - RNA, 19 nt, Artificial Sequence
  Description of Artificial Sequence: Synthetic oligonucleotide
cccgauacggugugggagu

SEQ ID NO: 1219250 - RNA, 19 nt, Artificial Sequence
  Description of Artificial Sequence: Synthetic oligonucleotide
ccgccguaggguuucugga

SEQ ID NO: 1219251 - RNA, 19 nt, Artificial Sequence
  Description of Artificial Sequence: Synthetic oligonucleotide
caccguugcuacagggcau

SEQ ID NO: 1219252 - RNA, 19 nt, Artificial Sequence
  Description of Artificial Sequence: Synthetic oligonucleotide
ccucccggcugcuuccuga

SEQ ID NO: 1219253 - RNA, 19 nt, Artificial Sequence
  Description of Artificial Sequence: Synthetic oligonucleotide
cgagugugugaugacggga

SEQ ID NO: 1219254 - RNA, 19 nt, Artificial Sequence
  Description of Artificial Sequence: Synthetic oligonucleotide
agccacccaccaccucgua

SEQ ID NO: 1219255 - RNA, 19 nt, Artificial Sequence
  Description of Artificial Sequence: Synthetic oligonucleotide
gcccuguccaggaucccga

SEQ ID NO: 1219256 - RNA, 19 nt, Artificial Sequence
  Description of Artificial Sequence: Synthetic oligonucleotide
gcuuagcaaucacgguggu

SEQ ID NO: 1219257 - RNA, 19 nt, Artificial Sequence
  Description of Artificial Sequence: Synthetic oligonucleotide
ccacgggcuggaacacgac

SEQ ID NO: 1219258 - RNA, 19 nt, Artificial Sequence
  Description of Artificial Sequence: Synthetic oligonucleotide
ggccccugguuagcccgcg

SEQ ID NO: 1219259 - RNA, 19 nt, Artificial Sequence
  Description of Artificial Sequence: Synthetic oligonucleotide
ccggccucugcccacccga

SEQ ID NO: 1219260 - RNA, 19 nt, Artificial Sequence
  Description of Artificial Sequence: Synthetic oligonucleotide
ccccugguuagcccgcgca

SEQ ID NO: 1219261 - RNA, 19 nt, Artificial Sequence
  Description of Artificial Sequence: Synthetic oligonucleotide
ccguugcuacagggcaugc

SEQ ID NO: 1219262 - RNA, 19 nt, Artificial Sequence
  Description of Artificial Sequence: Synthetic oligonucleotide
gaccuccguucagcgcgga

SEQ ID NO: 1219263 - RNA, 19 nt, Artificial Sequence
  Description of Artificial Sequence: Synthetic oligonucleotide
cccuagaaccgacgccaca

SEQ ID NO: 1219264 - RNA, 19 nt, Artificial Sequence
  Description of Artificial Sequence: Synthetic oligonucleotide
cgccguuacccacgggcug

SEQ ID NO: 1219265 - RNA, 19 nt, Artificial Sequence
  Description of Artificial Sequence: Synthetic oligonucleotide
guucagcgcggaggaggaa

SEQ ID NO: 1219266 - RNA, 19 nt, Artificial Sequence
  Description of Artificial Sequence: Synthetic oligonucleotide
ccgacugggagcugcugcu

SEQ ID NO: 1219267 - RNA, 19 nt, Artificial Sequence
  Description of Artificial Sequence: Synthetic oligonucleotide
gucaugccuggggcuaggu

SEQ ID NO: 1219268 - RNA, 19 nt, Artificial Sequence
  Description of Artificial Sequence: Synthetic oligonucleotide
ggagagccguucagaccuc

SEQ ID NO: 1219269 - RNA, 19 nt, Artificial Sequence
  Description of Artificial Sequence: Synthetic oligonucleotide
cccgggugcccgagaggag

SEQ ID NO: 1219270 - RNA, 19 nt, Artificial Sequence
  Description of Artificial Sequence: Synthetic oligonucleotide
cccacccgauacggugugg

SEQ ID NO: 1219271 - RNA, 19 nt, Artificial Sequence
  Description of Artificial Sequence: Synthetic oligonucleotide
gccccugguuagcccgcgc

SEQ ID NO: 1219272 - RNA, 19 nt, Artificial Sequence
  Description of Artificial Sequence: Synthetic oligonucleotide
cacacgccccaucccgggu

SEQ ID NO: 1219273 - RNA, 19 nt, Artificial Sequence
  Description of Artificial Sequence: Synthetic oligonucleotide
agggagagucgggcacguu

SEQ ID NO: 1219274 - RNA, 19 nt, Artificial Sequence
  Description of Artificial Sequence: Synthetic oligonucleotide
gggccccgagugugugaug

SEQ ID NO: 1219275 - RNA, 19 nt, Artificial Sequence
  Description of Artificial Sequence: Synthetic oligonucleotide
gggccccugguuagcccgc

SEQ ID NO: 1219276 - RNA, 19 nt, Artificial Sequence
  Description of Artificial Sequence: Synthetic oligonucleotide
cacgcugcggagagccguu

SEQ ID NO: 1219277 - RNA, 19 nt, Artificial Sequence
  Description of Artificial Sequence: Synthetic oligonucleotide
gcccacgggguagauuuua

SEQ ID NO: 1219278 - RNA, 19 nt, Artificial Sequence
  Description of Artificial Sequence: Synthetic oligonucleotide
gggugcccgagaggaguuc

SEQ ID NO: 1219279 - RNA, 19 nt, Artificial Sequence
  Description of Artificial Sequence: Synthetic oligonucleotide
cgacgccugaggaugggua

SEQ ID NO: 1219280 - RNA, 19 nt, Artificial Sequence
  Description of Artificial Sequence: Synthetic oligonucleotide
ccgugcccucccacacgcc

SEQ ID NO: 1219281 - RNA, 19 nt, Artificial Sequence
  Description of Artificial Sequence: Synthetic oligonucleotide
ggucguugagggaggugau

SEQ ID NO: 1219282 - RNA, 19 nt, Artificial Sequence
  Description of Artificial Sequence: Synthetic oligonucleotide
ccaaugagacaagggucgu

SEQ ID NO: 1219283 - RNA, 19 nt, Artificial Sequence
  Description of Artificial Sequence: Synthetic oligonucleotide
gucgggcacguuggagcua

SEQ ID NO: 1219284 - RNA, 19 nt, Artificial Sequence
  Description of Artificial Sequence: Synthetic oligonucleotide
cccaucccgggugcccgag

SEQ ID NO: 1219285 - RNA, 19 nt, Artificial Sequence
  Description of Artificial Sequence: Synthetic oligonucleotide
gggguagccggcggagaua

SEQ ID NO: 1219286 - RNA, 19 nt, Artificial Sequence
  Description of Artificial Sequence: Synthetic oligonucleotide
ccgccguuacccacgggcu

SEQ ID NO: 1219287 - RNA, 19 nt, Artificial Sequence
  Description of Artificial Sequence: Synthetic oligonucleotide
agcccgcgcagggcuggaa

SEQ ID NO: 1219288 - RNA, 19 nt, Artificial Sequence
  Description of Artificial Sequence: Synthetic oligonucleotide
ccgauggagccggggccug

SEQ ID NO: 1219289 - RNA, 19 nt, Artificial Sequence
  Description of Artificial Sequence: Synthetic oligonucleotide
gugcccgagaggaguucau

SEQ ID NO: 1219290 - RNA, 19 nt, Artificial Sequence
  Description of Artificial Sequence: Synthetic oligonucleotide
ccgcgcagggcuggaagga

SEQ ID NO: 1219291 - RNA, 19 nt, Artificial Sequence
  Description of Artificial Sequence: Synthetic oligonucleotide
cccucccggcugcuuccug

SEQ ID NO: 1219292 - RNA, 19 nt, Artificial Sequence
  Description of Artificial Sequence: Synthetic oligonucleotide
ggcgccccuggagagcccu

SEQ ID NO: 1219293 - RNA, 19 nt, Artificial Sequence
  Description of Artificial Sequence: Synthetic oligonucleotide
ccgggugcccgagaggagu

SEQ ID NO: 1219294 - RNA, 19 nt, Artificial Sequence
  Description of Artificial Sequence: Synthetic oligonucleotide
gcugucccggcggcagaaa

SEQ ID NO: 1219295 - RNA, 19 nt, Artificial Sequence
  Description of Artificial Sequence: Synthetic oligonucleotide
gggcuggacuccgccguua

SEQ ID NO: 1219296 - RNA, 19 nt, Artificial Sequence
  Description of Artificial Sequence: Synthetic oligonucleotide
cgcugcuuccugaguggaa

SEQ ID NO: 1219297 - RNA, 19 nt, Artificial Sequence
  Description of Artificial Sequence: Synthetic oligonucleotide
cggcggcagaaagacuuga

SEQ ID NO: 1219298 - RNA, 19 nt, Artificial Sequence
  Description of Artificial Sequence: Synthetic oligonucleotide
ccguuacccacgggcugga

SEQ ID NO: 1219299 - RNA, 19 nt, Artificial Sequence
  Description of Artificial Sequence: Synthetic oligonucleotide
cgacgccacagggcuggac

SEQ ID NO: 1219300 - RNA, 19 nt, Artificial Sequence
  Description of Artificial Sequence: Synthetic oligonucleotide
ccccaucccgggugcccga

SEQ ID NO: 1219301 - RNA, 19 nt, Artificial Sequence
  Description of Artificial Sequence: Synthetic oligonucleotide
gggcgccccuggagagccc

SEQ ID NO: 1219302 - RNA, 19 nt, Artificial Sequence
  Description of Artificial Sequence: Synthetic oligonucleotide
cgccaccgauggagccggg

SEQ ID NO: 1219303 - RNA, 19 nt, Artificial Sequence
  Description of Artificial Sequence: Synthetic oligonucleotide
cguacccgccguaggguuu

SEQ ID NO: 1219304 - RNA, 19 nt, Artificial Sequence
  Description of Artificial Sequence: Synthetic oligonucleotide
cgauacggugugggaguua

SEQ ID NO: 1219305 - RNA, 19 nt, Artificial Sequence
  Description of Artificial Sequence: Synthetic oligonucleotide
ccgaggggccaccguugcu

SEQ ID NO: 1219306 - RNA, 19 nt, Artificial Sequence
  Description of Artificial Sequence: Synthetic oligonucleotide
ccgauacggugugggaguu

SEQ ID NO: 1219307 - RNA, 19 nt, Artificial Sequence
  Description of Artificial Sequence: Synthetic oligonucleotide
cggcggagauagacuugcu

SEQ ID NO: 1219308 - RNA, 19 nt, Artificial Sequence
  Description of Artificial Sequence: Synthetic oligonucleotide
cgggugcccgagaggaguu

SEQ ID NO: 1219309 - RNA, 19 nt, Artificial Sequence
  Description of Artificial Sequence: Synthetic oligonucleotide
cgggcacguuggagcuaca

SEQ ID NO: 1219310 - RNA, 19 nt, Artificial Sequence
  Description of Artificial Sequence: Synthetic oligonucleotide
ccgacgccacagggcugga

SEQ ID NO: 1219311 - RNA, 19 nt, Artificial Sequence
  Description of Artificial Sequence: Synthetic oligonucleotide
ugaacuuagggucaaaugg

SEQ ID NO: 1219312 - RNA, 19 nt, Artificial Sequence
  Description of Artificial Sequence: Synthetic oligonucleotide
ugagacaucaucucuagug

SEQ ID NO: 1219313 - RNA, 19 nt, Artificial Sequence
  Description of Artificial Sequence: Synthetic oligonucleotide
ucaaaagucuucucaauag

SEQ ID NO: 1219314 - RNA, 19 nt, Artificial Sequence
  Description of Artificial Sequence: Synthetic oligonucleotide
agcucauuguaguaaaccc

SEQ ID NO: 1219315 - RNA, 19 nt, Artificial Sequence
  Description of Artificial Sequence: Synthetic oligonucleotide
agaaaccccaaucuugacc

SEQ ID NO: 1219316 - RNA, 19 nt, Artificial Sequence
  Description of Artificial Sequence: Synthetic oligonucleotide
aaguugacuuuauuaacag

SEQ ID NO: 1219317 - RNA, 19 nt, Artificial Sequence
  Description of Artificial Sequence: Synthetic oligonucleotide
agaaguugacuuuauuaac

SEQ ID NO: 1219318 - RNA, 19 nt, Artificial Sequence
  Description of Artificial Sequence: Synthetic oligonucleotide
aauaccguaucuguugaac

SEQ ID NO: 1219319 - RNA, 19 nt, Artificial Sequence
  Description of Artificial Sequence: Synthetic oligonucleotide
gaacauugggaucaaugcg

SEQ ID NO: 1219320 - RNA, 19 nt, Artificial Sequence
  Description of Artificial Sequence: Synthetic oligonucleotide
uucucaauagccgugaucu

SEQ ID NO: 1219321 - RNA, 19 nt, Artificial Sequence
  Description of Artificial Sequence: Synthetic oligonucleotide
gaucucuuagagcuggugg

SEQ ID NO: 1219322 - RNA, 19 nt, Artificial Sequence
  Description of Artificial Sequence: Synthetic oligonucleotide
aaugcugggagaucgauuu

SEQ ID NO: 1219323 - RNA, 19 nt, Artificial Sequence
  Description of Artificial Sequence: Synthetic oligonucleotide
ugggagaucgauuucuggg

SEQ ID NO: 1219324 - RNA, 19 nt, Artificial Sequence
  Description of Artificial Sequence: Synthetic oligonucleotide
uauugcaguauuugacucg

SEQ ID NO: 1219325 - RNA, 19 nt, Artificial Sequence
  Description of Artificial Sequence: Synthetic oligonucleotide
aaauaagccacaaacuggu

SEQ ID NO: 1219326 - RNA, 19 nt, Artificial Sequence
  Description of Artificial Sequence: Synthetic oligonucleotide
acucuugucgcuucccucc

SEQ ID NO: 1219327 - RNA, 19 nt, Artificial Sequence
  Description of Artificial Sequence: Synthetic oligonucleotide
uugaugagaucaaugguga

SEQ ID NO: 1219328 - RNA, 19 nt, Artificial Sequence
  Description of Artificial Sequence: Synthetic oligonucleotide
guaggugaugaacuuaggg

SEQ ID NO: 1219329 - RNA, 19 nt, Artificial Sequence
  Description of Artificial Sequence: Synthetic oligonucleotide
aaugaccugagcacaaggg

SEQ ID NO: 1219330 - RNA, 19 nt, Artificial Sequence
  Description of Artificial Sequence: Synthetic oligonucleotide
aucucuuagagcugguggg

SEQ ID NO: 1219331 - RNA, 19 nt, Artificial Sequence
  Description of Artificial Sequence: Synthetic oligonucleotide
aaccccaucgcccucucgg

SEQ ID NO: 1219332 - RNA, 19 nt, Artificial Sequence
  Description of Artificial Sequence: Synthetic oligonucleotide
guaucuguugaacucagug

SEQ ID NO: 1219333 - RNA, 19 nt, Artificial Sequence
  Description of Artificial Sequence: Synthetic oligonucleotide
guugaugagaucaauggug

SEQ ID NO: 1219334 - RNA, 19 nt, Artificial Sequence
  Description of Artificial Sequence: Synthetic oligonucleotide
aaugggaugucgggaaggc

SEQ ID NO: 1219335 - RNA, 19 nt, Artificial Sequence
  Description of Artificial Sequence: Synthetic oligonucleotide
aaugcgguaggugucgggg

SEQ ID NO: 1219336 - RNA, 19 nt, Artificial Sequence
  Description of Artificial Sequence: Synthetic oligonucleotide
uucgugguuuuccaacugg

SEQ ID NO: 1219337 - RNA, 19 nt, Artificial Sequence
  Description of Artificial Sequence: Synthetic oligonucleotide
aauuguauucccgagcgau

SEQ ID NO: 1219338 - RNA, 19 nt, Artificial Sequence
  Description of Artificial Sequence: Synthetic oligonucleotide
gaugagaucaauggugacc

SEQ ID NO: 1219339 - RNA, 19 nt, Artificial Sequence
  Description of Artificial Sequence: Synthetic oligonucleotide
uccaauuguauucccgagc

SEQ ID NO: 1219340 - RNA, 19 nt, Artificial Sequence
  Description of Artificial Sequence: Synthetic oligonucleotide
ucaucuggugcauagucca

SEQ ID NO: 1219341 - RNA, 19 nt, Artificial Sequence
  Description of Artificial Sequence: Synthetic oligonucleotide
cuuagggucaaaugggaug

SEQ ID NO: 1219342 - RNA, 19 nt, Artificial Sequence
  Description of Artificial Sequence: Synthetic oligonucleotide
acuaagacggacccugguc

SEQ ID NO: 1219343 - RNA, 19 nt, Artificial Sequence
  Description of Artificial Sequence: Synthetic oligonucleotide
aaagauucgaggggugggg

SEQ ID NO: 1219344 - RNA, 19 nt, Artificial Sequence
  Description of Artificial Sequence: Synthetic oligonucleotide
ugcaguauuugacucggca

SEQ ID NO: 1219345 - RNA, 19 nt, Artificial Sequence
  Description of Artificial Sequence: Synthetic oligonucleotide
uccacucguguccuuaggg

SEQ ID NO: 1219346 - RNA, 19 nt, Artificial Sequence
  Description of Artificial Sequence: Synthetic oligonucleotide
uucucauuggaaauaccgu

SEQ ID NO: 1219347 - RNA, 19 nt, Artificial Sequence
  Description of Artificial Sequence: Synthetic oligonucleotide
aauagccgugaucuggcug

SEQ ID NO: 1219348 - RNA, 19 nt, Artificial Sequence
  Description of Artificial Sequence: Synthetic oligonucleotide
auugcaguauuugacucgg

SEQ ID NO: 1219349 - RNA, 19 nt, Artificial Sequence
  Description of Artificial Sequence: Synthetic oligonucleotide
gauauacucugucuuccgc

SEQ ID NO: 1219350 - RNA, 19 nt, Artificial Sequence
  Description of Artificial Sequence: Synthetic oligonucleotide
ugaacaaaccuguucuggu

SEQ ID NO: 1219351 - RNA, 19 nt, Artificial Sequence
  Description of Artificial Sequence: Synthetic oligonucleotide
augaacuuagggucaaaug

SEQ ID NO: 1219352 - RNA, 19 nt, Artificial Sequence
  Description of Artificial Sequence: Synthetic oligonucleotide
agauauacucugucuuccg

SEQ ID NO: 1219353 - RNA, 19 nt, Artificial Sequence
  Description of Artificial Sequence: Synthetic oligonucleotide
ggaaauaccguaucuguug

SEQ ID NO: 1219354 - RNA, 19 nt, Artificial Sequence
  Description of Artificial Sequence: Synthetic oligonucleotide
ucucauuggaaauaccgua

SEQ ID NO: 1219355 - RNA, 19 nt, Artificial Sequence
  Description of Artificial Sequence: Synthetic oligonucleotide
ucaaaugggaugucgggaa

SEQ ID NO: 1219356 - RNA, 19 nt, Artificial Sequence
  Description of Artificial Sequence: Synthetic oligonucleotide
uaggugucgggguugauga

SEQ ID NO: 1219357 - RNA, 19 nt, Artificial Sequence
  Description of Artificial Sequence: Synthetic oligonucleotide
auaguccaucucuuccucc

SEQ ID NO: 1219358 - RNA, 19 nt, Artificial Sequence
  Description of Artificial Sequence: Synthetic oligonucleotide
uuagggucaaaugggaugu

SEQ ID NO: 1219359 - RNA, 19 nt, Artificial Sequence
  Description of Artificial Sequence: Synthetic oligonucleotide
gaaaccccaaucuugaccu

SEQ ID NO: 1219360 - RNA, 19 nt, Artificial Sequence
  Description of Artificial Sequence: Synthetic oligonucleotide
auuggaaauaccguaucug

SEQ ID NO: 1219361 - RNA, 19 nt, Artificial Sequence
  Description of Artificial Sequence: Synthetic oligonucleotide
cucaauagccgugaucugg

SEQ ID NO: 1219362 - RNA, 19 nt, Artificial Sequence
  Description of Artificial Sequence: Synthetic oligonucleotide
ucaggcuucucauuggaaa

SEQ ID NO: 1219363 - RNA, 19 nt, Artificial Sequence
  Description of Artificial Sequence: Synthetic oligonucleotide
uugaacucaguggagauau

SEQ ID NO: 1219364 - RNA, 19 nt, Artificial Sequence
  Description of Artificial Sequence: Synthetic oligonucleotide
auauacucugucuuccgca

SEQ ID NO: 1219365 - RNA, 19 nt, Artificial Sequence
  Description of Artificial Sequence: Synthetic oligonucleotide
augucgggaaggcuauugc

SEQ ID NO: 1219366 - RNA, 19 nt, Artificial Sequence
  Description of Artificial Sequence: Synthetic oligonucleotide
ugcccuaacggugugugcg

SEQ ID NO: 1219367 - RNA, 19 nt, Artificial Sequence
  Description of Artificial Sequence: Synthetic oligonucleotide
auagccgugaucuggcugu

SEQ ID NO: 1219368 - RNA, 19 nt, Artificial Sequence
  Description of Artificial Sequence: Synthetic oligonucleotide
gaaauaccguaucuguuga

SEQ ID NO: 1219369 - RNA, 19 nt, Artificial Sequence
  Description of Artificial Sequence: Synthetic oligonucleotide
guaguaaaccccaucgccc

SEQ ID NO: 1219370 - RNA, 19 nt, Artificial Sequence
  Description of Artificial Sequence: Synthetic oligonucleotide
ugaaucagcgucgcugccg

SEQ ID NO: 1219371 - RNA, 19 nt, Artificial Sequence
  Description of Artificial Sequence: Synthetic oligonucleotide
uuacuaagacggacccugg

SEQ ID NO: 1219372 - RNA, 19 nt, Artificial Sequence
  Description of Artificial Sequence: Synthetic oligonucleotide
ccaauuguauucccgagcg

SEQ ID NO: 1219373 - RNA, 19 nt, Artificial Sequence
  Description of Artificial Sequence: Synthetic oligonucleotide
ucauuggaaauaccguauc

SEQ ID NO: 1219374 - RNA, 19 nt, Artificial Sequence
  Description of Artificial Sequence: Synthetic oligonucleotide
caaggaaguugcuuuguac

SEQ ID NO: 1219375 - RNA, 19 nt, Artificial Sequence
  Description of Artificial Sequence: Synthetic oligonucleotide
auaccguaucuguugaacu

SEQ ID NO: 1219376 - RNA, 19 nt, Artificial Sequence
  Description of Artificial Sequence: Synthetic oligonucleotide
agucagaaggucauguuug

SEQ ID NO: 1219377 - RNA, 19 nt, Artificial Sequence
  Description of Artificial Sequence: Synthetic oligonucleotide
uguuugugcuguuucucca

SEQ ID NO: 1219378 - RNA, 19 nt, Artificial Sequence
  Description of Artificial Sequence: Synthetic oligonucleotide
guggggacgaacaaggggc

SEQ ID NO: 1219379 - RNA, 19 nt, Artificial Sequence
  Description of Artificial Sequence: Synthetic oligonucleotide
ucgugguuuuccaacuggc

SEQ ID NO: 1219380 - RNA, 19 nt, Artificial Sequence
  Description of Artificial Sequence: Synthetic oligonucleotide
uaguaaaccccaucgcccu

SEQ ID NO: 1219381 - RNA, 19 nt, Artificial Sequence
  Description of Artificial Sequence: Synthetic oligonucleotide
ucucauucaugucccggug

SEQ ID NO: 1219382 - RNA, 19 nt, Artificial Sequence
  Description of Artificial Sequence: Synthetic oligonucleotide
ugggaugucgggaaggcua

SEQ ID NO: 1219383 - RNA, 19 nt, Artificial Sequence
  Description of Artificial Sequence: Synthetic oligonucleotide
ucuggugcauaguccaucu

SEQ ID NO: 1219384 - RNA, 19 nt, Artificial Sequence
  Description of Artificial Sequence: Synthetic oligonucleotide
ccgacgcuuacuaagacgg

SEQ ID NO: 1219385 - RNA, 19 nt, Artificial Sequence
  Description of Artificial Sequence: Synthetic oligonucleotide
gauucgagggguggggacg

SEQ ID NO: 1219386 - RNA, 19 nt, Artificial Sequence
  Description of Artificial Sequence: Synthetic oligonucleotide
ucgauuucugggcaucuuc

SEQ ID NO: 1219387 - RNA, 19 nt, Artificial Sequence
  Description of Artificial Sequence: Synthetic oligonucleotide
caaggguugauccacaucu

SEQ ID NO: 1219388 - RNA, 19 nt, Artificial Sequence
  Description of Artificial Sequence: Synthetic oligonucleotide
cuuagagcuggugggagcc

SEQ ID NO: 1219389 - RNA, 19 nt, Artificial Sequence
  Description of Artificial Sequence: Synthetic oligonucleotide
aagacggacccuggucucc

SEQ ID NO: 1219390 - RNA, 19 nt, Artificial Sequence
  Description of Artificial Sequence: Synthetic oligonucleotide
acgcuuacuaagacggacc

SEQ ID NO: 1219391 - RNA, 19 nt, Artificial Sequence
  Description of Artificial Sequence: Synthetic oligonucleotide
ggcagcacgagcuucgucc

SEQ ID NO: 1219392 - RNA, 19 nt, Artificial Sequence
  Description of Artificial Sequence: Synthetic oligonucleotide
aucaaugcgguaggugucg

SEQ ID NO: 1219393 - RNA, 19 nt, Artificial Sequence
  Description of Artificial Sequence: Synthetic oligonucleotide
ucuuagagcuggugggagc

SEQ ID NO: 1219394 - RNA, 19 nt, Artificial Sequence
  Description of Artificial Sequence: Synthetic oligonucleotide
ucugguucgugguuuucca

SEQ ID NO: 1219395 - RNA, 19 nt, Artificial Sequence
  Description of Artificial Sequence: Synthetic oligonucleotide
ugguucgugguuuuccaac

SEQ ID NO: 1219396 - RNA, 19 nt, Artificial Sequence
  Description of Artificial Sequence: Synthetic oligonucleotide
uauacucugucuuccgcau

SEQ ID NO: 1219397 - RNA, 19 nt, Artificial Sequence
  Description of Artificial Sequence: Synthetic oligonucleotide
uguaaugcugggagaucga

SEQ ID NO: 1219398 - RNA, 19 nt, Artificial Sequence
  Description of Artificial Sequence: Synthetic oligonucleotide
ucccgagcgaucuuguagu

SEQ ID NO: 1219399 - RNA, 19 nt, Artificial Sequence
  Description of Artificial Sequence: Synthetic oligonucleotide
uggaaauaccguaucuguu

SEQ ID NO: 1219400 - RNA, 19 nt, Artificial Sequence
  Description of Artificial Sequence: Synthetic oligonucleotide
caaagauucgagggguggg

SEQ ID NO: 1219401 - RNA, 19 nt, Artificial Sequence
  Description of Artificial Sequence: Synthetic oligonucleotide
uggcccgacgcuuacuaag

SEQ ID NO: 1219402 - RNA, 19 nt, Artificial Sequence
  Description of Artificial Sequence: Synthetic oligonucleotide
acgaacaaggggcucacaa

SEQ ID NO: 1219403 - RNA, 19 nt, Artificial Sequence
  Description of Artificial Sequence: Synthetic oligonucleotide
gaugucgggaaggcuauug

SEQ ID NO: 1219404 - RNA, 19 nt, Artificial Sequence
  Description of Artificial Sequence: Synthetic oligonucleotide
cauuguaguaaaccccauc

SEQ ID NO: 1219405 - RNA, 19 nt, Artificial Sequence
  Description of Artificial Sequence: Synthetic oligonucleotide
ugugcgcuggccucaggag

SEQ ID NO: 1219406 - RNA, 19 nt, Artificial Sequence
  Description of Artificial Sequence: Synthetic oligonucleotide
aaaccccaaucuugaccuc

SEQ ID NO: 1219407 - RNA, 19 nt, Artificial Sequence
  Description of Artificial Sequence: Synthetic oligonucleotide
cuaacggugugugcgcugg

SEQ ID NO: 1219408 - RNA, 19 nt, Artificial Sequence
  Description of Artificial Sequence: Synthetic oligonucleotide
ucgggaaggcuauugcagu

SEQ ID NO: 1219409 - RNA, 19 nt, Artificial Sequence
  Description of Artificial Sequence: Synthetic oligonucleotide
gacgcuuacuaagacggac

SEQ ID NO: 1219410 - RNA, 19 nt, Artificial Sequence
  Description of Artificial Sequence: Synthetic oligonucleotide
aaauaccguaucuguugaa

SEQ ID NO: 1219411 - RNA, 19 nt, Artificial Sequence
  Description of Artificial Sequence: Synthetic oligonucleotide
gaaguugcuuuguacugaa

SEQ ID NO: 1219412 - RNA, 19 nt, Artificial Sequence
  Description of Artificial Sequence: Synthetic oligonucleotide
gucgggaaggcuauugcag

SEQ ID NO: 1219413 - RNA, 19 nt, Artificial Sequence
  Description of Artificial Sequence: Synthetic oligonucleotide
agaucgauuucugggcauc

SEQ ID NO: 1219414 - RNA, 19 nt, Artificial Sequence
  Description of Artificial Sequence: Synthetic oligonucleotide
auuguauucccgagcgauc

SEQ ID NO: 1219415 - RNA, 19 nt, Artificial Sequence
  Description of Artificial Sequence: Synthetic oligonucleotide
gggagaucgauuucugggc

SEQ ID NO: 1219416 - RNA, 19 nt, Artificial Sequence
  Description of Artificial Sequence: Synthetic oligonucleotide
gaccugagcacaaggguug

SEQ ID NO: 1219417 - RNA, 19 nt, Artificial Sequence
  Description of Artificial Sequence: Synthetic oligonucleotide
uucuggucaaagggguagg

SEQ ID NO: 1219418 - RNA, 19 nt, Artificial Sequence
  Description of Artificial Sequence: Synthetic oligonucleotide
aucguccucugaaucagcg

SEQ ID NO: 1219419 - RNA, 19 nt, Artificial Sequence
  Description of Artificial Sequence: Synthetic oligonucleotide
ugaugagaucaauggugac

SEQ ID NO: 1219420 - RNA, 19 nt, Artificial Sequence
  Description of Artificial Sequence: Synthetic oligonucleotide
aguaaaccccaucgcccuc

SEQ ID NO: 1219421 - RNA, 19 nt, Artificial Sequence
  Description of Artificial Sequence: Synthetic oligonucleotide
agugcucgcugccacuuug

SEQ ID NO: 1219422 - RNA, 19 nt, Artificial Sequence
  Description of Artificial Sequence: Synthetic oligonucleotide
cucgcugccagagcgcucg

SEQ ID NO: 1219423 - RNA, 19 nt, Artificial Sequence
  Description of Artificial Sequence: Synthetic oligonucleotide
aaccccaaucuugaccuca

SEQ ID NO: 1219424 - RNA, 19 nt, Artificial Sequence
  Description of Artificial Sequence: Synthetic oligonucleotide
ggagauauacucugucuuc

SEQ ID NO: 1219425 - RNA, 19 nt, Artificial Sequence
  Description of Artificial Sequence: Synthetic oligonucleotide
aucuggugcauaguccauc

SEQ ID NO: 1219426 - RNA, 19 nt, Artificial Sequence
  Description of Artificial Sequence: Synthetic oligonucleotide
augucccgguguuugacca

SEQ ID NO: 1219427 - RNA, 19 nt, Artificial Sequence
  Description of Artificial Sequence: Synthetic oligonucleotide
aaaccccaucgcccucucg

SEQ ID NO: 1219428 - RNA, 19 nt, Artificial Sequence
  Description of Artificial Sequence: Synthetic oligonucleotide
ggauccaggagaacauugg

SEQ ID NO: 1219429 - RNA, 19 nt, Artificial Sequence
  Description of Artificial Sequence: Synthetic oligonucleotide
aagauucgaggggugggga

SEQ ID NO: 1219430 - RNA, 19 nt, Artificial Sequence
  Description of Artificial Sequence: Synthetic oligonucleotide
aaguugcuuuguacugaac

SEQ ID NO: 1219431 - RNA, 19 nt, Artificial Sequence
  Description of Artificial Sequence: Synthetic oligonucleotide
ggaucaaugcgguaggugu

SEQ ID NO: 1219432 - RNA, 19 nt, Artificial Sequence
  Description of Artificial Sequence: Synthetic oligonucleotide
acggacccuggucuccagc

SEQ ID NO: 1219433 - RNA, 19 nt, Artificial Sequence
  Description of Artificial Sequence: Synthetic oligonucleotide
guauucccgagcgaucuug

SEQ ID NO: 1219434 - RNA, 19 nt, Artificial Sequence
  Description of Artificial Sequence: Synthetic oligonucleotide
guucgugguuuuccaacug

SEQ ID NO: 1219435 - RNA, 19 nt, Artificial Sequence
  Description of Artificial Sequence: Synthetic oligonucleotide
ucauagcccuuacuggcuu

SEQ ID NO: 1219436 - RNA, 19 nt, Artificial Sequence
  Description of Artificial Sequence: Synthetic oligonucleotide
acgggccugcccucugucc

SEQ ID NO: 1219437 - RNA, 19 nt, Artificial Sequence
  Description of Artificial Sequence: Synthetic oligonucleotide
gaaccccagccuuggcccg

SEQ ID NO: 1219438 - RNA, 19 nt, Artificial Sequence
  Description of Artificial Sequence: Synthetic oligonucleotide
gucaaaugggaugucggga

SEQ ID NO: 1219439 - RNA, 19 nt, Artificial Sequence
  Description of Artificial Sequence: Synthetic oligonucleotide
ucgcaugcugcugggaucu

SEQ ID NO: 1219440 - RNA, 19 nt, Artificial Sequence
  Description of Artificial Sequence: Synthetic oligonucleotide
uucaugucccgguguuuga

SEQ ID NO: 1219441 - RNA, 19 nt, Artificial Sequence
  Description of Artificial Sequence: Synthetic oligonucleotide
uaagacggacccuggucuc

SEQ ID NO: 1219442 - RNA, 19 nt, Artificial Sequence
  Description of Artificial Sequence: Synthetic oligonucleotide
ugucgcuucccuccucccu

SEQ ID NO: 1219443 - RNA, 19 nt, Artificial Sequence
  Description of Artificial Sequence: Synthetic oligonucleotide
uucgcaugcugcugggauc

SEQ ID NO: 1219444 - RNA, 19 nt, Artificial Sequence
  Description of Artificial Sequence: Synthetic oligonucleotide
ucccugucuuuguauauuu

SEQ ID NO: 1219445 - RNA, 19 nt, Artificial Sequence
  Description of Artificial Sequence: Synthetic oligonucleotide
caggcaugaccuccacugg

SEQ ID NO: 1219446 - RNA, 19 nt, Artificial Sequence
  Description of Artificial Sequence: Synthetic oligonucleotide
gcaaagauucgaggggugg

SEQ ID NO: 1219447 - RNA, 19 nt, Artificial Sequence
  Description of Artificial Sequence: Synthetic oligonucleotide
cccguuuucguuucuuuag

SEQ ID NO: 1219448 - RNA, 19 nt, Artificial Sequence
  Description of Artificial Sequence: Synthetic oligonucleotide
cuaagacggacccuggucu

SEQ ID NO: 1219449 - RNA, 19 nt, Artificial Sequence
  Description of Artificial Sequence: Synthetic oligonucleotide
ccaacuggcuuccuaauuc

SEQ ID NO: 1219450 - RNA, 19 nt, Artificial Sequence
  Description of Artificial Sequence: Synthetic oligonucleotide
uggccugagacaucaucuc

SEQ ID NO: 1219451 - RNA, 19 nt, Artificial Sequence
  Description of Artificial Sequence: Synthetic oligonucleotide
ugucccugucuuuguauau

SEQ ID NO: 1219452 - RNA, 19 nt, Artificial Sequence
  Description of Artificial Sequence: Synthetic oligonucleotide
uggcacuucggcuccggcu

SEQ ID NO: 1219453 - RNA, 19 nt, Artificial Sequence
  Description of Artificial Sequence: Synthetic oligonucleotide
ccugaucauggccugagac

SEQ ID NO: 1219454 - RNA, 19 nt, Artificial Sequence
  Description of Artificial Sequence: Synthetic oligonucleotide
uuccuugucgcgggcagca

SEQ ID NO: 1219455 - RNA, 19 nt, Artificial Sequence
  Description of Artificial Sequence: Synthetic oligonucleotide
caaugcgguaggugucggg

SEQ ID NO: 1219456 - RNA, 19 nt, Artificial Sequence
  Description of Artificial Sequence: Synthetic oligonucleotide
ucuucucaauagccgugau

SEQ ID NO: 1219457 - RNA, 19 nt, Artificial Sequence
  Description of Artificial Sequence: Synthetic oligonucleotide
ugucgcgggcagcacgagc

SEQ ID NO: 1219458 - RNA, 19 nt, Artificial Sequence
  Description of Artificial Sequence: Synthetic oligonucleotide
uccuccuccuccuccucug

SEQ ID NO: 1219459 - RNA, 19 nt, Artificial Sequence
  Description of Artificial Sequence: Synthetic oligonucleotide
cugcucucauccucgccgc

SEQ ID NO: 1219460 - RNA, 19 nt, Artificial Sequence
  Description of Artificial Sequence: Synthetic oligonucleotide
ucaugucccgguguuugac

SEQ ID NO: 1219461 - RNA, 19 nt, Artificial Sequence
  Description of Artificial Sequence: Synthetic oligonucleotide
ucguccucugaaucagcgu

SEQ ID NO: 1219462 - RNA, 19 nt, Artificial Sequence
  Description of Artificial Sequence: Synthetic oligonucleotide
gugcuucccugcccuaacg

SEQ ID NO: 1219463 - RNA, 19 nt, Artificial Sequence
  Description of Artificial Sequence: Synthetic oligonucleotide
uuccgcauccauggcacca

SEQ ID NO: 1219464 - RNA, 19 nt, Artificial Sequence
  Description of Artificial Sequence: Synthetic oligonucleotide
uugcaguauuugacucggc

SEQ ID NO: 1219465 - RNA, 19 nt, Artificial Sequence
  Description of Artificial Sequence: Synthetic oligonucleotide
aucuccuccuccuccuccu

SEQ ID NO: 1219466 - RNA, 19 nt, Artificial Sequence
  Description of Artificial Sequence: Synthetic oligonucleotide
gucggcaucguccucugaa

SEQ ID NO: 1219467 - RNA, 19 nt, Artificial Sequence
  Description of Artificial Sequence: Synthetic oligonucleotide
ccacucguguccuuagggg

SEQ ID NO: 1219468 - RNA, 19 nt, Artificial Sequence
  Description of Artificial Sequence: Synthetic oligonucleotide
auggcaccaccuucgcaug

SEQ ID NO: 1219469 - RNA, 19 nt, Artificial Sequence
  Description of Artificial Sequence: Synthetic oligonucleotide
guuugugcuguuucuccaa

SEQ ID NO: 1219470 - RNA, 19 nt, Artificial Sequence
  Description of Artificial Sequence: Synthetic oligonucleotide
acauugggaucaaugcggu

SEQ ID NO: 1219471 - RNA, 19 nt, Artificial Sequence
  Description of Artificial Sequence: Synthetic oligonucleotide
caugaccuccacugguguc

SEQ ID NO: 1219472 - RNA, 19 nt, Artificial Sequence
  Description of Artificial Sequence: Synthetic oligonucleotide
cacuggugucacucggggc

SEQ ID NO: 1219473 - RNA, 19 nt, Artificial Sequence
  Description of Artificial Sequence: Synthetic oligonucleotide
ucggcaucguccucugaau

SEQ ID NO: 1219474 - RNA, 19 nt, Artificial Sequence
  Description of Artificial Sequence: Synthetic oligonucleotide
gaugaacuuagggucaaau

SEQ ID NO: 1219475 - RNA, 19 nt, Artificial Sequence
  Description of Artificial Sequence: Synthetic oligonucleotide
cuugucgcgggcagcacga

SEQ ID NO: 1219476 - RNA, 19 nt, Artificial Sequence
  Description of Artificial Sequence: Synthetic oligonucleotide
ucgcggcucagucacuguc

SEQ ID NO: 1219477 - RNA, 19 nt, Artificial Sequence
  Description of Artificial Sequence: Synthetic oligonucleotide
cucauuggaaauaccguau

SEQ ID NO: 1219478 - RNA, 19 nt, Artificial Sequence
  Description of Artificial Sequence: Synthetic oligonucleotide
cauuggaaauaccguaucu

SEQ ID NO: 1219479 - RNA, 19 nt, Artificial Sequence
  Description of Artificial Sequence: Synthetic oligonucleotide
auagcccuuacuggcuuug

SEQ ID NO: 1219480 - RNA, 19 nt, Artificial Sequence
  Description of Artificial Sequence: Synthetic oligonucleotide
ggagaucgauuucugggca

SEQ ID NO: 1219481 - RNA, 19 nt, Artificial Sequence
  Description of Artificial Sequence: Synthetic oligonucleotide
gccacuguccgagucauug

SEQ ID NO: 1219482 - RNA, 19 nt, Artificial Sequence
  Description of Artificial Sequence: Synthetic oligonucleotide
cugaaucagcgucgcugcc

SEQ ID NO: 1219483 - RNA, 19 nt, Artificial Sequence
  Description of Artificial Sequence: Synthetic oligonucleotide
uccuccuccuccuccuccu

SEQ ID NO: 1219484 - RNA, 19 nt, Artificial Sequence
  Description of Artificial Sequence: Synthetic oligonucleotide
ugcgguaggugucgggguu

SEQ ID NO: 1219485 - RNA, 19 nt, Artificial Sequence
  Description of Artificial Sequence: Synthetic oligonucleotide
cauuggugccugacugaac

SEQ ID NO: 1219486 - RNA, 19 nt, Artificial Sequence
  Description of Artificial Sequence: Synthetic oligonucleotide
agggguaggugaugaacuu

SEQ ID NO: 1219487 - RNA, 19 nt, Artificial Sequence
  Description of Artificial Sequence: Synthetic oligonucleotide
cccgacgcuuacuaagacg

SEQ ID NO: 1219488 - RNA, 19 nt, Artificial Sequence
  Description of Artificial Sequence: Synthetic oligonucleotide
uguauucccgagcgaucuu

SEQ ID NO: 1219489 - RNA, 19 nt, Artificial Sequence
  Description of Artificial Sequence: Synthetic oligonucleotide
cucguguccuuaggggccg

SEQ ID NO: 1219490 - RNA, 19 nt, Artificial Sequence
  Description of Artificial Sequence: Synthetic oligonucleotide
agcaaagauucgaggggug

SEQ ID NO: 1219491 - RNA, 19 nt, Artificial Sequence
  Description of Artificial Sequence: Synthetic oligonucleotide
gccugacugaaccccagcc

SEQ ID NO: 1219492 - RNA, 19 nt, Artificial Sequence
  Description of Artificial Sequence: Synthetic oligonucleotide
ggugggagccugaauuucc

SEQ ID NO: 1219493 - RNA, 19 nt, Artificial Sequence
  Description of Artificial Sequence: Synthetic oligonucleotide
ugugugcgcuggccucagg

SEQ ID NO: 1219494 - RNA, 19 nt, Artificial Sequence
  Description of Artificial Sequence: Synthetic oligonucleotide
augcgguaggugucggggu

SEQ ID NO: 1219495 - RNA, 19 nt, Artificial Sequence
  Description of Artificial Sequence: Synthetic oligonucleotide
uccugagcugagugcucgc

SEQ ID NO: 1219496 - RNA, 19 nt, Artificial Sequence
  Description of Artificial Sequence: Synthetic oligonucleotide
ggaaguugcuuuguacuga

SEQ ID NO: 1219497 - RNA, 19 nt, Artificial Sequence
  Description of Artificial Sequence: Synthetic oligonucleotide
gcccuuacuggcuuuguuc

SEQ ID NO: 1219498 - RNA, 19 nt, Artificial Sequence
  Description of Artificial Sequence: Synthetic oligonucleotide
uaacggugugugcgcuggc

SEQ ID NO: 1219499 - RNA, 19 nt, Artificial Sequence
  Description of Artificial Sequence: Synthetic oligonucleotide
cuccuccuccuccuccucc

SEQ ID NO: 1219500 - RNA, 19 nt, Artificial Sequence
  Description of Artificial Sequence: Synthetic oligonucleotide
uccuggucccguuuucguu

SEQ ID NO: 1219501 - RNA, 19 nt, Artificial Sequence
  Description of Artificial Sequence: Synthetic oligonucleotide
ugaacucaguggagauaua

SEQ ID NO: 1219502 - RNA, 19 nt, Artificial Sequence
  Description of Artificial Sequence: Synthetic oligonucleotide
cuuccgcauccauggcacc

SEQ ID NO: 1219503 - RNA, 19 nt, Artificial Sequence
  Description of Artificial Sequence: Synthetic oligonucleotide
aggugucgggguugaugag

SEQ ID NO: 1219504 - RNA, 19 nt, Artificial Sequence
  Description of Artificial Sequence: Synthetic oligonucleotide
ugccagagcgcucguccuc

SEQ ID NO: 1219505 - RNA, 19 nt, Artificial Sequence
  Description of Artificial Sequence: Synthetic oligonucleotide
agcuucguccucgcugcuc

SEQ ID NO: 1219506 - RNA, 19 nt, Artificial Sequence
  Description of Artificial Sequence: Synthetic oligonucleotide
uccgcauccauggcaccac

SEQ ID NO: 1219507 - RNA, 19 nt, Artificial Sequence
  Description of Artificial Sequence: Synthetic oligonucleotide
cgagcuucguccucgcugc

SEQ ID NO: 1219508 - RNA, 19 nt, Artificial Sequence
  Description of Artificial Sequence: Synthetic oligonucleotide
gucgcugccgaaaaucucu

SEQ ID NO: 1219509 - RNA, 19 nt, Artificial Sequence
  Description of Artificial Sequence: Synthetic oligonucleotide
caauuguauucccgagcga

SEQ ID NO: 1219510 - RNA, 19 nt, Artificial Sequence
  Description of Artificial Sequence: Synthetic oligonucleotide
gucagaaggucauguuugu

SEQ ID NO: 1219511 - RNA, 19 nt, Artificial Sequence
  Description of Artificial Sequence: Synthetic oligonucleotide
gggaucaaugcgguaggug

SEQ ID NO: 1219512 - RNA, 19 nt, Artificial Sequence
  Description of Artificial Sequence: Synthetic oligonucleotide
ugggaucaaugcgguaggu

SEQ ID NO: 1219513 - RNA, 19 nt, Artificial Sequence
  Description of Artificial Sequence: Synthetic oligonucleotide
agccgugaucuggcugucc

SEQ ID NO: 1219514 - RNA, 19 nt, Artificial Sequence
  Description of Artificial Sequence: Synthetic oligonucleotide
cuggucccguuuucguuuc

SEQ ID NO: 1219515 - RNA, 19 nt, Artificial Sequence
  Description of Artificial Sequence: Synthetic oligonucleotide
auucgagggguggggacga

SEQ ID NO: 1219516 - RNA, 19 nt, Artificial Sequence
  Description of Artificial Sequence: Synthetic oligonucleotide
cgcuuacuaagacggaccc

SEQ ID NO: 1219517 - RNA, 19 nt, Artificial Sequence
  Description of Artificial Sequence: Synthetic oligonucleotide
cuuggcccgacgcuuacua

SEQ ID NO: 1219518 - RNA, 19 nt, Artificial Sequence
  Description of Artificial Sequence: Synthetic oligonucleotide
cguuuucguuucuuuagug

SEQ ID NO: 1219519 - RNA, 19 nt, Artificial Sequence
  Description of Artificial Sequence: Synthetic oligonucleotide
aucagcgucgcugccgaaa

SEQ ID NO: 1219520 - RNA, 19 nt, Artificial Sequence
  Description of Artificial Sequence: Synthetic oligonucleotide
aaggguugauccacaucuu

SEQ ID NO: 1219521 - RNA, 19 nt, Artificial Sequence
  Description of Artificial Sequence: Synthetic oligonucleotide
gugcucgcugccacuuugg

SEQ ID NO: 1219522 - RNA, 19 nt, Artificial Sequence
  Description of Artificial Sequence: Synthetic oligonucleotide
ucgcugccgaaaaucucuu

SEQ ID NO: 1219523 - RNA, 19 nt, Artificial Sequence
  Description of Artificial Sequence: Synthetic oligonucleotide
ugaugaacuuagggucaaa

SEQ ID NO: 1219524 - RNA, 19 nt, Artificial Sequence
  Description of Artificial Sequence: Synthetic oligonucleotide
ccuugucgcgggcagcacg

SEQ ID NO: 1219525 - RNA, 19 nt, Artificial Sequence
  Description of Artificial Sequence: Synthetic oligonucleotide
agcagggcauuggugccug

SEQ ID NO: 1219526 - RNA, 19 nt, Artificial Sequence
  Description of Artificial Sequence: Synthetic oligonucleotide
ggccucgcggcucagucac

SEQ ID NO: 1219527 - RNA, 19 nt, Artificial Sequence
  Description of Artificial Sequence: Synthetic oligonucleotide
cugucccugucuuuguaua

SEQ ID NO: 1219528 - RNA, 19 nt, Artificial Sequence
  Description of Artificial Sequence: Synthetic oligonucleotide
agcccuuacuggcuuuguu

SEQ ID NO: 1219529 - RNA, 19 nt, Artificial Sequence
  Description of Artificial Sequence: Synthetic oligonucleotide
ccguaucuguugaacucag

SEQ ID NO: 1219530 - RNA, 19 nt, Artificial Sequence
  Description of Artificial Sequence: Synthetic oligonucleotide
gacggacccuggucuccag

SEQ ID NO: 1219531 - RNA, 19 nt, Artificial Sequence
  Description of Artificial Sequence: Synthetic oligonucleotide
acucggggcuugcuguaau

SEQ ID NO: 1219532 - RNA, 19 nt, Artificial Sequence
  Description of Artificial Sequence: Synthetic oligonucleotide
gagaucgauuucugggcau

SEQ ID NO: 1219533 - RNA, 19 nt, Artificial Sequence
  Description of Artificial Sequence: Synthetic oligonucleotide
ucgcuucccuccucccugu

SEQ ID NO: 1219534 - RNA, 19 nt, Artificial Sequence
  Description of Artificial Sequence: Synthetic oligonucleotide
auucccgagcgaucuugua

SEQ ID NO: 1219535 - RNA, 19 nt, Artificial Sequence
  Description of Artificial Sequence: Synthetic oligonucleotide
gguucgugguuuuccaacu

SEQ ID NO: 1219536 - RNA, 19 nt, Artificial Sequence
  Description of Artificial Sequence: Synthetic oligonucleotide
ucuccuccuccuccuccuc

SEQ ID NO: 1219537 - RNA, 19 nt, Artificial Sequence
  Description of Artificial Sequence: Synthetic oligonucleotide
ggugucgggguugaugaga

SEQ ID NO: 1219538 - RNA, 19 nt, Artificial Sequence
  Description of Artificial Sequence: Synthetic oligonucleotide
cucaggcuucucauuggaa

SEQ ID NO: 1219539 - RNA, 19 nt, Artificial Sequence
  Description of Artificial Sequence: Synthetic oligonucleotide
aaucagcgucgcugccgaa

SEQ ID NO: 1219540 - RNA, 19 nt, Artificial Sequence
  Description of Artificial Sequence: Synthetic oligonucleotide
gaucgauuucugggcaucu

SEQ ID NO: 1219541 - RNA, 19 nt, Artificial Sequence
  Description of Artificial Sequence: Synthetic oligonucleotide
cucauucaugucccggugu

SEQ ID NO: 1219542 - RNA, 19 nt, Artificial Sequence
  Description of Artificial Sequence: Synthetic oligonucleotide
cugcccucuguccuccuca

SEQ ID NO: 1219543 - RNA, 19 nt, Artificial Sequence
  Description of Artificial Sequence: Synthetic oligonucleotide
ucccugcccuaacggugug

SEQ ID NO: 1219544 - RNA, 19 nt, Artificial Sequence
  Description of Artificial Sequence: Synthetic oligonucleotide
gggacgaacaaggggcuca

SEQ ID NO: 1219545 - RNA, 19 nt, Artificial Sequence
  Description of Artificial Sequence: Synthetic oligonucleotide
cuucgcaugcugcugggau

SEQ ID NO: 1219546 - RNA, 19 nt, Artificial Sequence
  Description of Artificial Sequence: Synthetic oligonucleotide
cugguucgugguuuuccaa

SEQ ID NO: 1219547 - RNA, 19 nt, Artificial Sequence
  Description of Artificial Sequence: Synthetic oligonucleotide
cagcaaagauucgaggggu

SEQ ID NO: 1219548 - RNA, 19 nt, Artificial Sequence
  Description of Artificial Sequence: Synthetic oligonucleotide
ucucgcugccagagcgcuc

SEQ ID NO: 1219549 - RNA, 19 nt, Artificial Sequence
  Description of Artificial Sequence: Synthetic oligonucleotide
gucgcgggcagcacgagcu

SEQ ID NO: 1219550 - RNA, 19 nt, Artificial Sequence
  Description of Artificial Sequence: Synthetic oligonucleotide
uagcccuuacuggcuuugu

SEQ ID NO: 1219551 - RNA, 19 nt, Artificial Sequence
  Description of Artificial Sequence: Synthetic oligonucleotide
aucgauuucugggcaucuu

SEQ ID NO: 1219552 - RNA, 19 nt, Artificial Sequence
  Description of Artificial Sequence: Synthetic oligonucleotide
aaccccagccuuggcccga

SEQ ID NO: 1219553 - RNA, 19 nt, Artificial Sequence
  Description of Artificial Sequence: Synthetic oligonucleotide
guaaaccccaucgcccucu

SEQ ID NO: 1219554 - RNA, 19 nt, Artificial Sequence
  Description of Artificial Sequence: Synthetic oligonucleotide
gcccuaacggugugugcgc

SEQ ID NO: 1219555 - RNA, 19 nt, Artificial Sequence
  Description of Artificial Sequence: Synthetic oligonucleotide
uugucgcgggcagcacgag

SEQ ID NO: 1219556 - RNA, 19 nt, Artificial Sequence
  Description of Artificial Sequence: Synthetic oligonucleotide
cgauuucugggcaucuuca

SEQ ID NO: 1219557 - RNA, 19 nt, Artificial Sequence
  Description of Artificial Sequence: Synthetic oligonucleotide
ucguguccuuaggggccgg

SEQ ID NO: 1219558 - RNA, 19 nt, Artificial Sequence
  Description of Artificial Sequence: Synthetic oligonucleotide
ccugcccuaacggugugug

SEQ ID NO: 1219559 - RNA, 19 nt, Artificial Sequence
  Description of Artificial Sequence: Synthetic oligonucleotide
cugggaagacaggcaugac

SEQ ID NO: 1219560 - RNA, 19 nt, Artificial Sequence
  Description of Artificial Sequence: Synthetic oligonucleotide
cgaaaaucucuuccuuguc

SEQ ID NO: 1219561 - RNA, 19 nt, Artificial Sequence
  Description of Artificial Sequence: Synthetic oligonucleotide
agucggcaucguccucuga

SEQ ID NO: 1219562 - RNA, 19 nt, Artificial Sequence
  Description of Artificial Sequence: Synthetic oligonucleotide
ccuaacggugugugcgcug

SEQ ID NO: 1219563 - RNA, 19 nt, Artificial Sequence
  Description of Artificial Sequence: Synthetic oligonucleotide
caguggagauauacucugu

SEQ ID NO: 1219564 - RNA, 19 nt, Artificial Sequence
  Description of Artificial Sequence: Synthetic oligonucleotide
ggugccugacugaacccca

SEQ ID NO: 1219565 - RNA, 19 nt, Artificial Sequence
  Description of Artificial Sequence: Synthetic oligonucleotide
uccucgccgcugccacucu

SEQ ID NO: 1219566 - RNA, 19 nt, Artificial Sequence
  Description of Artificial Sequence: Synthetic oligonucleotide
cuccucccggucgcucucg

SEQ ID NO: 1219567 - RNA, 19 nt, Artificial Sequence
  Description of Artificial Sequence: Synthetic oligonucleotide
gacgaacaaggggcucaca

SEQ ID NO: 1219568 - RNA, 19 nt, Artificial Sequence
  Description of Artificial Sequence: Synthetic oligonucleotide
cacgggccugcccucuguc

SEQ ID NO: 1219569 - RNA, 19 nt, Artificial Sequence
  Description of Artificial Sequence: Synthetic oligonucleotide
uccuugucgcgggcagcac

SEQ ID NO: 1219570 - RNA, 19 nt, Artificial Sequence
  Description of Artificial Sequence: Synthetic oligonucleotide
caugcugcugggaucucuu

SEQ ID NO: 1219571 - RNA, 19 nt, Artificial Sequence
  Description of Artificial Sequence: Synthetic oligonucleotide
ggacgaacaaggggcucac

SEQ ID NO: 1219572 - RNA, 19 nt, Artificial Sequence
  Description of Artificial Sequence: Synthetic oligonucleotide
gugugugcgcuggccucag

SEQ ID NO: 1219573 - RNA, 19 nt, Artificial Sequence
  Description of Artificial Sequence: Synthetic oligonucleotide
cuggugggagccugaauuu

SEQ ID NO: 1219574 - RNA, 19 nt, Artificial Sequence
  Description of Artificial Sequence: Synthetic oligonucleotide
gcucgcugccacuuuggaa

SEQ ID NO: 1219575 - RNA, 19 nt, Artificial Sequence
  Description of Artificial Sequence: Synthetic oligonucleotide
ccucucggaagaugaagaa

SEQ ID NO: 1219576 - RNA, 19 nt, Artificial Sequence
  Description of Artificial Sequence: Synthetic oligonucleotide
cacaaggguugauccacau

SEQ ID NO: 1219577 - RNA, 19 nt, Artificial Sequence
  Description of Artificial Sequence: Synthetic oligonucleotide
aggucugggcucagucaga

SEQ ID NO: 1219578 - RNA, 19 nt, Artificial Sequence
  Description of Artificial Sequence: Synthetic oligonucleotide
caauagccgugaucuggcu

SEQ ID NO: 1219579 - RNA, 19 nt, Artificial Sequence
  Description of Artificial Sequence: Synthetic oligonucleotide
caggaggccucgcggcuca

SEQ ID NO: 1219580 - RNA, 19 nt, Artificial Sequence
  Description of Artificial Sequence: Synthetic oligonucleotide
gccugagacaucaucucua

SEQ ID NO: 1219581 - RNA, 19 nt, Artificial Sequence
  Description of Artificial Sequence: Synthetic oligonucleotide
ggugugugcgcuggccuca

SEQ ID NO: 1219582 - RNA, 19 nt, Artificial Sequence
  Description of Artificial Sequence: Synthetic oligonucleotide
ggcccgacgcuuacuaaga

SEQ ID NO: 1219583 - RNA, 19 nt, Artificial Sequence
  Description of Artificial Sequence: Synthetic oligonucleotide
gccacucuugucgcuuccc

SEQ ID NO: 1219584 - RNA, 19 nt, Artificial Sequence
  Description of Artificial Sequence: Synthetic oligonucleotide
gcccgacgcuuacuaagac

SEQ ID NO: 1219585 - RNA, 19 nt, Artificial Sequence
  Description of Artificial Sequence: Synthetic oligonucleotide
uagccgugaucuggcuguc

SEQ ID NO: 1219586 - RNA, 19 nt, Artificial Sequence
  Description of Artificial Sequence: Synthetic oligonucleotide
ccaaggaaguugcuuugua

SEQ ID NO: 1219587 - RNA, 19 nt, Artificial Sequence
  Description of Artificial Sequence: Synthetic oligonucleotide
cucuugucgcuucccuccu

SEQ ID NO: 1219588 - RNA, 19 nt, Artificial Sequence
  Description of Artificial Sequence: Synthetic oligonucleotide
ucgcugccagagcgcucgu

SEQ ID NO: 1219589 - RNA, 19 nt, Artificial Sequence
  Description of Artificial Sequence: Synthetic oligonucleotide
gcacaaggguugauccaca

SEQ ID NO: 1219590 - RNA, 19 nt, Artificial Sequence
  Description of Artificial Sequence: Synthetic oligonucleotide
gcuggauccaggagaacau

SEQ ID NO: 1219591 - RNA, 19 nt, Artificial Sequence
  Description of Artificial Sequence: Synthetic oligonucleotide
cccgagcgaucuuguaguc

SEQ ID NO: 1219592 - RNA, 19 nt, Artificial Sequence
  Description of Artificial Sequence: Synthetic oligonucleotide
cgagcgaucuuguagucau

SEQ ID NO: 1219593 - RNA, 19 nt, Artificial Sequence
  Description of Artificial Sequence: Synthetic oligonucleotide
uucgagggguggggacgaa

SEQ ID NO: 1219594 - RNA, 19 nt, Artificial Sequence
  Description of Artificial Sequence: Synthetic oligonucleotide
cauagcccuuacuggcuuu

SEQ ID NO: 1219595 - RNA, 19 nt, Artificial Sequence
  Description of Artificial Sequence: Synthetic oligonucleotide
cuccuccuccuccuccucu

SEQ ID NO: 1219596 - RNA, 19 nt, Artificial Sequence
  Description of Artificial Sequence: Synthetic oligonucleotide
gcuuacuaagacggacccu

SEQ ID NO: 1219597 - RNA, 19 nt, Artificial Sequence
  Description of Artificial Sequence: Synthetic oligonucleotide
ggucgcucucgcugccaga

SEQ ID NO: 1219598 - RNA, 19 nt, Artificial Sequence
  Description of Artificial Sequence: Synthetic oligonucleotide
ccagagcgcucguccucgc

SEQ ID NO: 1219599 - RNA, 19 nt, Artificial Sequence
  Description of Artificial Sequence: Synthetic oligonucleotide
guguccuuaggggccgggu

SEQ ID NO: 1219600 - RNA, 19 nt, Artificial Sequence
  Description of Artificial Sequence: Synthetic oligonucleotide
ggggacgaacaaggggcuc

SEQ ID NO: 1219601 - RNA, 19 nt, Artificial Sequence
  Description of Artificial Sequence: Synthetic oligonucleotide
gagugcucgcugccacuuu

SEQ ID NO: 1219602 - RNA, 19 nt, Artificial Sequence
  Description of Artificial Sequence: Synthetic oligonucleotide
ccuggucccguuuucguuu

SEQ ID NO: 1219603 - RNA, 19 nt, Artificial Sequence
  Description of Artificial Sequence: Synthetic oligonucleotide
cacucggggcuugcuguaa

SEQ ID NO: 1219604 - RNA, 19 nt, Artificial Sequence
  Description of Artificial Sequence: Synthetic oligonucleotide
cgcggcucagucacuguca

SEQ ID NO: 1219605 - RNA, 19 nt, Artificial Sequence
  Description of Artificial Sequence: Synthetic oligonucleotide
ccgagcgaucuuguaguca

SEQ ID NO: 1219606 - RNA, 19 nt, Artificial Sequence
  Description of Artificial Sequence: Synthetic oligonucleotide
gggaugucgggaaggcuau

SEQ ID NO: 1219607 - RNA, 19 nt, Artificial Sequence
  Description of Artificial Sequence: Synthetic oligonucleotide
cucgcggcucagucacugu

SEQ ID NO: 1219608 - RNA, 19 nt, Artificial Sequence
  Description of Artificial Sequence: Synthetic oligonucleotide
cggucgcucucgcugccag

SEQ ID NO: 1219609 - RNA, 19 nt, Artificial Sequence
  Description of Artificial Sequence: Synthetic oligonucleotide
cagagcgcucguccucgcu

SEQ ID NO: 1219610 - RNA, 19 nt, Artificial Sequence
  Description of Artificial Sequence: Synthetic oligonucleotide
cgacgcuuacuaagacgga

SEQ ID NO: 1219611 - RNA, 19 nt, Artificial Sequence
  Description of Artificial Sequence: Synthetic oligonucleotide
ccuccuccuccuccuccuc

SEQ ID NO: 1219612 - RNA, 19 nt, Artificial Sequence
  Description of Artificial Sequence: Synthetic oligonucleotide
gcacuucggcuccggcucu

SEQ ID NO: 1219613 - RNA, 19 nt, Artificial Sequence
  Description of Artificial Sequence: Synthetic oligonucleotide
ggucccguuuucguuucuu

SEQ ID NO: 1219614 - RNA, 19 nt, Artificial Sequence
  Description of Artificial Sequence: Synthetic oligonucleotide
ccccaucgcccucucggaa

SEQ ID NO: 1219615 - RNA, 19 nt, Artificial Sequence
  Description of Artificial Sequence: Synthetic oligonucleotide
gccccugaucauggccuga

SEQ ID NO: 1219616 - RNA, 19 nt, Artificial Sequence
  Description of Artificial Sequence: Synthetic oligonucleotide
ccucauccaucaugccccu

SEQ ID NO: 1219617 - RNA, 19 nt, Artificial Sequence
  Description of Artificial Sequence: Synthetic oligonucleotide
caucgcccucucggaagau

SEQ ID NO: 1219618 - RNA, 19 nt, Artificial Sequence
  Description of Artificial Sequence: Synthetic oligonucleotide
cccuaacggugugugcgcu

SEQ ID NO: 1219619 - RNA, 19 nt, Artificial Sequence
  Description of Artificial Sequence: Synthetic oligonucleotide
cgcccucucggaagaugaa

SEQ ID NO: 1219620 - RNA, 19 nt, Artificial Sequence
  Description of Artificial Sequence: Synthetic oligonucleotide
ccucccggucgcucucgcu

SEQ ID NO: 1219621 - RNA, 19 nt, Artificial Sequence
  Description of Artificial Sequence: Synthetic oligonucleotide
ccacgggccugcccucugu

SEQ ID NO: 1219622 - RNA, 19 nt, Artificial Sequence
  Description of Artificial Sequence: Synthetic oligonucleotide
cacccuccucccggucgcu

SEQ ID NO: 1219623 - RNA, 19 nt, Artificial Sequence
  Description of Artificial Sequence: Synthetic oligonucleotide
ccuuggcccgacgcuuacu

SEQ ID NO: 1219624 - RNA, 19 nt, Artificial Sequence
  Description of Artificial Sequence: Synthetic oligonucleotide
cccugcccuaacggugugu

SEQ ID NO: 1219625 - RNA, 19 nt, Artificial Sequence
  Description of Artificial Sequence: Synthetic oligonucleotide
gggccgggucugagucaaa

SEQ ID NO: 1219626 - RNA, 19 nt, Artificial Sequence
  Description of Artificial Sequence: Synthetic oligonucleotide
aagacuacgaguuugacac

SEQ ID NO: 1219627 - RNA, 19 nt, Artificial Sequence
  Description of Artificial Sequence: Synthetic oligonucleotide
aauaacgccaaccuuaacc

SEQ ID NO: 1219628 - RNA, 19 nt, Artificial Sequence
  Description of Artificial Sequence: Synthetic oligonucleotide
auuauaaccaaguaagucc

SEQ ID NO: 1219629 - RNA, 19 nt, Artificial Sequence
  Description of Artificial Sequence: Synthetic oligonucleotide
auuaguauuauaugugugc

SEQ ID NO: 1219630 - RNA, 19 nt, Artificial Sequence
  Description of Artificial Sequence: Synthetic oligonucleotide
ugugauauauaaaacauac

SEQ ID NO: 1219631 - RNA, 19 nt, Artificial Sequence
  Description of Artificial Sequence: Synthetic oligonucleotide
aacuacauaaauaaguacg

SEQ ID NO: 1219632 - RNA, 19 nt, Artificial Sequence
  Description of Artificial Sequence: Synthetic oligonucleotide
aauacaagaguguuuagcu

SEQ ID NO: 1219633 - RNA, 19 nt, Artificial Sequence
  Description of Artificial Sequence: Synthetic oligonucleotide
aaauacaagaguguuuagc

SEQ ID NO: 1219634 - RNA, 19 nt, Artificial Sequence
  Description of Artificial Sequence: Synthetic oligonucleotide
acuaaaguucccuucaucg

SEQ ID NO: 1219635 - RNA, 19 nt, Artificial Sequence
  Description of Artificial Sequence: Synthetic oligonucleotide
uaaauaaguacgagcaggg

SEQ ID NO: 1219636 - RNA, 19 nt, Artificial Sequence
  Description of Artificial Sequence: Synthetic oligonucleotide
uguguaaugcaccaaaugu

SEQ ID NO: 1219637 - RNA, 19 nt, Artificial Sequence
  Description of Artificial Sequence: Synthetic oligonucleotide
aguuuaagaaagccaaagc

SEQ ID NO: 1219638 - RNA, 19 nt, Artificial Sequence
  Description of Artificial Sequence: Synthetic oligonucleotide
aaccaaguaaguccaagcg

SEQ ID NO: 1219639 - RNA, 19 nt, Artificial Sequence
  Description of Artificial Sequence: Synthetic oligonucleotide
uaaaccaugcuuuagugug

SEQ ID NO: 1219640 - RNA, 19 nt, Artificial Sequence
  Description of Artificial Sequence: Synthetic oligonucleotide
gaaguucccaaauacacag

SEQ ID NO: 1219641 - RNA, 19 nt, Artificial Sequence
  Description of Artificial Sequence: Synthetic oligonucleotide
aguuauaaaugacguacgc

SEQ ID NO: 1219642 - RNA, 19 nt, Artificial Sequence
  Description of Artificial Sequence: Synthetic oligonucleotide
uguauauuaguauuauaug

SEQ ID NO: 1219643 - RNA, 19 nt, Artificial Sequence
  Description of Artificial Sequence: Synthetic oligonucleotide
auaaauaaguacgagcagg

SEQ ID NO: 1219644 - RNA, 19 nt, Artificial Sequence
  Description of Artificial Sequence: Synthetic oligonucleotide
uuuaugaugccauagcagu

SEQ ID NO: 1219645 - RNA, 19 nt, Artificial Sequence
  Description of Artificial Sequence: Synthetic oligonucleotide
uaguuguuaaggaauauca

SEQ ID NO: 1219646 - RNA, 19 nt, Artificial Sequence
  Description of Artificial Sequence: Synthetic oligonucleotide
aauuggucugaccacagug

SEQ ID NO: 1219647 - RNA, 19 nt, Artificial Sequence
  Description of Artificial Sequence: Synthetic oligonucleotide
cagguauccacguauaugg

SEQ ID NO: 1219648 - RNA, 19 nt, Artificial Sequence
  Description of Artificial Sequence: Synthetic oligonucleotide
uauaugugugcucuucugg

SEQ ID NO: 1219649 - RNA, 19 nt, Artificial Sequence
  Description of Artificial Sequence: Synthetic oligonucleotide
aaugaugggcuaucgccgc

SEQ ID NO: 1219650 - RNA, 19 nt, Artificial Sequence
  Description of Artificial Sequence: Synthetic oligonucleotide
aauguuauuugugauauau

SEQ ID NO: 1219651 - RNA, 19 nt, Artificial Sequence
  Description of Artificial Sequence: Synthetic oligonucleotide
uuauaaccaaguaagucca

SEQ ID NO: 1219652 - RNA, 19 nt, Artificial Sequence
  Description of Artificial Sequence: Synthetic oligonucleotide
uaaugaugggcuaucgccg

SEQ ID NO: 1219653 - RNA, 19 nt, Artificial Sequence
  Description of Artificial Sequence: Synthetic oligonucleotide
aagauaccagcaauaaacc

SEQ ID NO: 1219654 - RNA, 19 nt, Artificial Sequence
  Description of Artificial Sequence: Synthetic oligonucleotide
uuauaaaugacguacgcuu

SEQ ID NO: 1219655 - RNA, 19 nt, Artificial Sequence
  Description of Artificial Sequence: Synthetic oligonucleotide
aaccuuaaccaacaaagcu

SEQ ID NO: 1219656 - RNA, 19 nt, Artificial Sequence
  Description of Artificial Sequence: Synthetic oligonucleotide
aaucguguguccaaagccc

SEQ ID NO: 1219657 - RNA, 19 nt, Artificial Sequence
  Description of Artificial Sequence: Synthetic oligonucleotide
aaugacguacgcuucauaa

SEQ ID NO: 1219658 - RNA, 19 nt, Artificial Sequence
  Description of Artificial Sequence: Synthetic oligonucleotide
guaaugaugggcuaucgcc

SEQ ID NO: 1219659 - RNA, 19 nt, Artificial Sequence
  Description of Artificial Sequence: Synthetic oligonucleotide
agaaacuaaaguucccuuc

SEQ ID NO: 1219660 - RNA, 19 nt, Artificial Sequence
  Description of Artificial Sequence: Synthetic oligonucleotide
uccgacacaucccacauag

SEQ ID NO: 1219661 - RNA, 19 nt, Artificial Sequence
  Description of Artificial Sequence: Synthetic oligonucleotide
uuacuguuugaauuuauga

SEQ ID NO: 1219662 - RNA, 19 nt, Artificial Sequence
  Description of Artificial Sequence: Synthetic oligonucleotide
aagccuaggaaauuuaaau

SEQ ID NO: 1219663 - RNA, 19 nt, Artificial Sequence
  Description of Artificial Sequence: Synthetic oligonucleotide
uauuaguauuauaugugug

SEQ ID NO: 1219664 - RNA, 19 nt, Artificial Sequence
  Description of Artificial Sequence: Synthetic oligonucleotide
uucccaaauacacagggga

SEQ ID NO: 1219665 - RNA, 19 nt, Artificial Sequence
  Description of Artificial Sequence: Synthetic oligonucleotide
auauuaguauuauaugugu

SEQ ID NO: 1219666 - RNA, 19 nt, Artificial Sequence
  Description of Artificial Sequence: Synthetic oligonucleotide
gaauuuaugaugccauagc

SEQ ID NO: 1219667 - RNA, 19 nt, Artificial Sequence
  Description of Artificial Sequence: Synthetic oligonucleotide
aguaaugaugggcuaucgc

SEQ ID NO: 1219668 - RNA, 19 nt, Artificial Sequence
  Description of Artificial Sequence: Synthetic oligonucleotide
uuugcaucgaaagagcagc

SEQ ID NO: 1219669 - RNA, 19 nt, Artificial Sequence
  Description of Artificial Sequence: Synthetic oligonucleotide
aaagacuacgaguuugaca

SEQ ID NO: 1219670 - RNA, 19 nt, Artificial Sequence
  Description of Artificial Sequence: Synthetic oligonucleotide
acuaagccgagauuuuggc

SEQ ID NO: 1219671 - RNA, 19 nt, Artificial Sequence
  Description of Artificial Sequence: Synthetic oligonucleotide
cuaguuugcaucgaaagag

SEQ ID NO: 1219672 - RNA, 19 nt, Artificial Sequence
  Description of Artificial Sequence: Synthetic oligonucleotide
uauauugggaccauccaaa

SEQ ID NO: 1219673 - RNA, 19 nt, Artificial Sequence
  Description of Artificial Sequence: Synthetic oligonucleotide
acgaguuugacacaaagaa

SEQ ID NO: 1219674 - RNA, 19 nt, Artificial Sequence
  Description of Artificial Sequence: Synthetic oligonucleotide
gaaacugcaucuugugacg

SEQ ID NO: 1219675 - RNA, 19 nt, Artificial Sequence
  Description of Artificial Sequence: Synthetic oligonucleotide
ugacguacgcuucauaaca

SEQ ID NO: 1219676 - RNA, 19 nt, Artificial Sequence
  Description of Artificial Sequence: Synthetic oligonucleotide
uccuuuagcacuuuguaaa

SEQ ID NO: 1219677 - RNA, 19 nt, Artificial Sequence
  Description of Artificial Sequence: Synthetic oligonucleotide
aagcuauaaguacugcuug

SEQ ID NO: 1219678 - RNA, 19 nt, Artificial Sequence
  Description of Artificial Sequence: Synthetic oligonucleotide
uaagccgagauuuuggcgu

SEQ ID NO: 1219679 - RNA, 19 nt, Artificial Sequence
  Description of Artificial Sequence: Synthetic oligonucleotide
cuugugacgaugaggaaag

SEQ ID NO: 1219680 - RNA, 19 nt, Artificial Sequence
  Description of Artificial Sequence: Synthetic oligonucleotide
agcuauaaguacugcuugc

SEQ ID NO: 1219681 - RNA, 19 nt, Artificial Sequence
  Description of Artificial Sequence: Synthetic oligonucleotide
uccuaguuugcaucgaaag

SEQ ID NO: 1219682 - RNA, 19 nt, Artificial Sequence
  Description of Artificial Sequence: Synthetic oligonucleotide
acguuugggaaucggaugg

SEQ ID NO: 1219683 - RNA, 19 nt, Artificial Sequence
  Description of Artificial Sequence: Synthetic oligonucleotide
auaacgccaaccuuaacca

SEQ ID NO: 1219684 - RNA, 19 nt, Artificial Sequence
  Description of Artificial Sequence: Synthetic oligonucleotide
uaacauguguauauuagua

SEQ ID NO: 1219685 - RNA, 19 nt, Artificial Sequence
  Description of Artificial Sequence: Synthetic oligonucleotide
uuaaccaacaaagcuauaa

SEQ ID NO: 1219686 - RNA, 19 nt, Artificial Sequence
  Description of Artificial Sequence: Synthetic oligonucleotide
aaacgaacuaagccgagau

SEQ ID NO: 1219687 - RNA, 19 nt, Artificial Sequence
  Description of Artificial Sequence: Synthetic oligonucleotide
guauauuaguauuauaugu

SEQ ID NO: 1219688 - RNA, 19 nt, Artificial Sequence
  Description of Artificial Sequence: Synthetic oligonucleotide
ugauauccgacacauccca

SEQ ID NO: 1219689 - RNA, 19 nt, Artificial Sequence
  Description of Artificial Sequence: Synthetic oligonucleotide
acguauauggcaauuuugg

SEQ ID NO: 1219690 - RNA, 19 nt, Artificial Sequence
  Description of Artificial Sequence: Synthetic oligonucleotide
acgagcaggggucggaucc

SEQ ID NO: 1219691 - RNA, 19 nt, Artificial Sequence
  Description of Artificial Sequence: Synthetic oligonucleotide
aacuauccaaacuguauau

SEQ ID NO: 1219692 - RNA, 19 nt, Artificial Sequence
  Description of Artificial Sequence: Synthetic oligonucleotide
uguauauugggaccaucca

SEQ ID NO: 1219693 - RNA, 19 nt, Artificial Sequence
  Description of Artificial Sequence: Synthetic oligonucleotide
uuaguauuauaugugugcu

SEQ ID NO: 1219694 - RNA, 19 nt, Artificial Sequence
  Description of Artificial Sequence: Synthetic oligonucleotide
auaucaaugcuguaacagu

SEQ ID NO: 1219695 - RNA, 19 nt, Artificial Sequence
  Description of Artificial Sequence: Synthetic oligonucleotide
acacaaagaaauuugccaa

SEQ ID NO: 1219696 - RNA, 19 nt, Artificial Sequence
  Description of Artificial Sequence: Synthetic oligonucleotide
uuguauagggcugaguucu

SEQ ID NO: 1219697 - RNA, 19 nt, Artificial Sequence
  Description of Artificial Sequence: Synthetic oligonucleotide
uugggaaucggaugguuag

SEQ ID NO: 1219698 - RNA, 19 nt, Artificial Sequence
  Description of Artificial Sequence: Synthetic oligonucleotide
caucuugugacgaugagga

SEQ ID NO: 1219699 - RNA, 19 nt, Artificial Sequence
  Description of Artificial Sequence: Synthetic oligonucleotide
aaauuugccaacagguugu

SEQ ID NO: 1219700 - RNA, 19 nt, Artificial Sequence
  Description of Artificial Sequence: Synthetic oligonucleotide
agccuaggaaauuuaaaug

SEQ ID NO: 1219701 - RNA, 19 nt, Artificial Sequence
  Description of Artificial Sequence: Synthetic oligonucleotide
uauaaaugacguacgcuuc

SEQ ID NO: 1219702 - RNA, 19 nt, Artificial Sequence
  Description of Artificial Sequence: Synthetic oligonucleotide
aacucgucuuacuuguuca

SEQ ID NO: 1219703 - RNA, 19 nt, Artificial Sequence
  Description of Artificial Sequence: Synthetic oligonucleotide
aaauaaguacgagcagggg

SEQ ID NO: 1219704 - RNA, 19 nt, Artificial Sequence
  Description of Artificial Sequence: Synthetic oligonucleotide
uugcacguaggguuuauag

SEQ ID NO: 1219705 - RNA, 19 nt, Artificial Sequence
  Description of Artificial Sequence: Synthetic oligonucleotide
uccgguuacacgcgcaggg

SEQ ID NO: 1219706 - RNA, 19 nt, Artificial Sequence
  Description of Artificial Sequence: Synthetic oligonucleotide
aacgccaaccuuaaccaac

SEQ ID NO: 1219707 - RNA, 19 nt, Artificial Sequence
  Description of Artificial Sequence: Synthetic oligonucleotide
gaacgagacaaagacuacg

SEQ ID NO: 1219708 - RNA, 19 nt, Artificial Sequence
  Description of Artificial Sequence: Synthetic oligonucleotide
gaguguuuagcugaaguug

SEQ ID NO: 1219709 - RNA, 19 nt, Artificial Sequence
  Description of Artificial Sequence: Synthetic oligonucleotide
auacuccuaguuugcaucg

SEQ ID NO: 1219710 - RNA, 19 nt, Artificial Sequence
  Description of Artificial Sequence: Synthetic oligonucleotide
uguguauuccaaccuucag

SEQ ID NO: 1219711 - RNA, 19 nt, Artificial Sequence
  Description of Artificial Sequence: Synthetic oligonucleotide
augacguacgcuucauaac

SEQ ID NO: 1219712 - RNA, 19 nt, Artificial Sequence
  Description of Artificial Sequence: Synthetic oligonucleotide
uuauaugugugcucuucug

SEQ ID NO: 1219713 - RNA, 19 nt, Artificial Sequence
  Description of Artificial Sequence: Synthetic oligonucleotide
ugcaauacuccuaguuugc

SEQ ID NO: 1219714 - RNA, 19 nt, Artificial Sequence
  Description of Artificial Sequence: Synthetic oligonucleotide
ucaucguagacaccaacaa

SEQ ID NO: 1219715 - RNA, 19 nt, Artificial Sequence
  Description of Artificial Sequence: Synthetic oligonucleotide
auuuaugaugccauagcag

SEQ ID NO: 1219716 - RNA, 19 nt, Artificial Sequence
  Description of Artificial Sequence: Synthetic oligonucleotide
agugguaagaagcacugau

SEQ ID NO: 1219717 - RNA, 19 nt, Artificial Sequence
  Description of Artificial Sequence: Synthetic oligonucleotide
auuucgaugcagaugauga

SEQ ID NO: 1219718 - RNA, 19 nt, Artificial Sequence
  Description of Artificial Sequence: Synthetic oligonucleotide
uaguuugcaucgaaagagc

SEQ ID NO: 1219719 - RNA, 19 nt, Artificial Sequence
  Description of Artificial Sequence: Synthetic oligonucleotide
aaguaaguccaagcguugg

SEQ ID NO: 1219720 - RNA, 19 nt, Artificial Sequence
  Description of Artificial Sequence: Synthetic oligonucleotide
cacauaucaaugcuguaac

SEQ ID NO: 1219721 - RNA, 19 nt, Artificial Sequence
  Description of Artificial Sequence: Synthetic oligonucleotide
ugaaguuguuacuuacugu

SEQ ID NO: 1219722 - RNA, 19 nt, Artificial Sequence
  Description of Artificial Sequence: Synthetic oligonucleotide
aaccucgcauuguucuccc

SEQ ID NO: 1219723 - RNA, 19 nt, Artificial Sequence
  Description of Artificial Sequence: Synthetic oligonucleotide
aaacuguauauugggacca

SEQ ID NO: 1219724 - RNA, 19 nt, Artificial Sequence
  Description of Artificial Sequence: Synthetic oligonucleotide
auuauaugugugcucuucu

SEQ ID NO: 1219725 - RNA, 19 nt, Artificial Sequence
  Description of Artificial Sequence: Synthetic oligonucleotide
aaauaacgccaaccuuaac

SEQ ID NO: 1219726 - RNA, 19 nt, Artificial Sequence
  Description of Artificial Sequence: Synthetic oligonucleotide
auaaaugacguacgcuuca

SEQ ID NO: 1219727 - RNA, 19 nt, Artificial Sequence
  Description of Artificial Sequence: Synthetic oligonucleotide
uaacagugguaauuggucu

SEQ ID NO: 1219728 - RNA, 19 nt, Artificial Sequence
  Description of Artificial Sequence: Synthetic oligonucleotide
uugggauauuucaaagcca

SEQ ID NO: 1219729 - RNA, 19 nt, Artificial Sequence
  Description of Artificial Sequence: Synthetic oligonucleotide
gggaggacggcuuugaacc

SEQ ID NO: 1219730 - RNA, 19 nt, Artificial Sequence
  Description of Artificial Sequence: Synthetic oligonucleotide
agcauuucucccauagccc

SEQ ID NO: 1219731 - RNA, 19 nt, Artificial Sequence
  Description of Artificial Sequence: Synthetic oligonucleotide
acauagcaaggaaagaguc

SEQ ID NO: 1219732 - RNA, 19 nt, Artificial Sequence
  Description of Artificial Sequence: Synthetic oligonucleotide
uguaaaacagcaggagaca

SEQ ID NO: 1219733 - RNA, 19 nt, Artificial Sequence
  Description of Artificial Sequence: Synthetic oligonucleotide
cuaagccgagauuuuggcg

SEQ ID NO: 1219734 - RNA, 19 nt, Artificial Sequence
  Description of Artificial Sequence: Synthetic oligonucleotide
auacaagaguguuuagcug

SEQ ID NO: 1219735 - RNA, 19 nt, Artificial Sequence
  Description of Artificial Sequence: Synthetic oligonucleotide
guaaucguguguccaaagc

SEQ ID NO: 1219736 - RNA, 19 nt, Artificial Sequence
  Description of Artificial Sequence: Synthetic oligonucleotide
guuguuaaggaauaucaua

SEQ ID NO: 1219737 - RNA, 19 nt, Artificial Sequence
  Description of Artificial Sequence: Synthetic oligonucleotide
ucguagacaccaacaaucu

SEQ ID NO: 1219738 - RNA, 19 nt, Artificial Sequence
  Description of Artificial Sequence: Synthetic oligonucleotide
gauaaccucgcauuguucu

SEQ ID NO: 1219739 - RNA, 19 nt, Artificial Sequence
  Description of Artificial Sequence: Synthetic oligonucleotide
uguuaaggaauaucauaaa

SEQ ID NO: 1219740 - RNA, 19 nt, Artificial Sequence
  Description of Artificial Sequence: Synthetic oligonucleotide
ggaaccgagaucaggaugg

SEQ ID NO: 1219741 - RNA, 19 nt, Artificial Sequence
  Description of Artificial Sequence: Synthetic oligonucleotide
accaaguaaguccaagcgu

SEQ ID NO: 1219742 - RNA, 19 nt, Artificial Sequence
  Description of Artificial Sequence: Synthetic oligonucleotide
aauacacaggggaaccgag

SEQ ID NO: 1219743 - RNA, 19 nt, Artificial Sequence
  Description of Artificial Sequence: Synthetic oligonucleotide
cagaacgagacaaagacua

SEQ ID NO: 1219744 - RNA, 19 nt, Artificial Sequence
  Description of Artificial Sequence: Synthetic oligonucleotide
aacgagacaaagacuacga

SEQ ID NO: 1219745 - RNA, 19 nt, Artificial Sequence
  Description of Artificial Sequence: Synthetic oligonucleotide
acugcaauacuccuaguuu

SEQ ID NO: 1219746 - RNA, 19 nt, Artificial Sequence
  Description of Artificial Sequence: Synthetic oligonucleotide
uauugggaccauccaaaga

SEQ ID NO: 1219747 - RNA, 19 nt, Artificial Sequence
  Description of Artificial Sequence: Synthetic oligonucleotide
ucuuacuuguucagaaaua

SEQ ID NO: 1219748 - RNA, 19 nt, Artificial Sequence
  Description of Artificial Sequence: Synthetic oligonucleotide
aguaaucguguguccaaag

SEQ ID NO: 1219749 - RNA, 19 nt, Artificial Sequence
  Description of Artificial Sequence: Synthetic oligonucleotide
aggggucggauccaucgcc

SEQ ID NO: 1219750 - RNA, 19 nt, Artificial Sequence
  Description of Artificial Sequence: Synthetic oligonucleotide
uuauaggaaaaggaguaau

SEQ ID NO: 1219751 - RNA, 19 nt, Artificial Sequence
  Description of Artificial Sequence: Synthetic oligonucleotide
agaaaacgaacuaagccga

SEQ ID NO: 1219752 - RNA, 19 nt, Artificial Sequence
  Description of Artificial Sequence: Synthetic oligonucleotide
gaaguuguuacuuacuguu

SEQ ID NO: 1219753 - RNA, 19 nt, Artificial Sequence
  Description of Artificial Sequence: Synthetic oligonucleotide
ucaguccagagcauuacau

SEQ ID NO: 1219754 - RNA, 19 nt, Artificial Sequence
  Description of Artificial Sequence: Synthetic oligonucleotide
cacguauauggcaauuuug

SEQ ID NO: 1219755 - RNA, 19 nt, Artificial Sequence
  Description of Artificial Sequence: Synthetic oligonucleotide
guaaaacagcaggagacag

SEQ ID NO: 1219756 - RNA, 19 nt, Artificial Sequence
  Description of Artificial Sequence: Synthetic oligonucleotide
agcaguuuaagaaagccaa

SEQ ID NO: 1219757 - RNA, 19 nt, Artificial Sequence
  Description of Artificial Sequence: Synthetic oligonucleotide
uguuacuuacuguuugaau

SEQ ID NO: 1219758 - RNA, 19 nt, Artificial Sequence
  Description of Artificial Sequence: Synthetic oligonucleotide
ucgaugcagaugaugaaau

SEQ ID NO: 1219759 - RNA, 19 nt, Artificial Sequence
  Description of Artificial Sequence: Synthetic oligonucleotide
uauuauaugugugcucuuc

SEQ ID NO: 1219760 - RNA, 19 nt, Artificial Sequence
  Description of Artificial Sequence: Synthetic oligonucleotide
aaguacugcuugccagaac

SEQ ID NO: 1219761 - RNA, 19 nt, Artificial Sequence
  Description of Artificial Sequence: Synthetic oligonucleotide
uucggguuguguguaaugc

SEQ ID NO: 1219762 - RNA, 19 nt, Artificial Sequence
  Description of Artificial Sequence: Synthetic oligonucleotide
uacugcaauacuccuaguu

SEQ ID NO: 1219763 - RNA, 19 nt, Artificial Sequence
  Description of Artificial Sequence: Synthetic oligonucleotide
cauaguuuggaugcagcag

SEQ ID NO: 1219764 - RNA, 19 nt, Artificial Sequence
  Description of Artificial Sequence: Synthetic oligonucleotide
ucacguuugggaaucggau

SEQ ID NO: 1219765 - RNA, 19 nt, Artificial Sequence
  Description of Artificial Sequence: Synthetic oligonucleotide
ccaacaaagcuauaaguac

SEQ ID NO: 1219766 - RNA, 19 nt, Artificial Sequence
  Description of Artificial Sequence: Synthetic oligonucleotide
guguguaaugcaccaaaug

SEQ ID NO: 1219767 - RNA, 19 nt, Artificial Sequence
  Description of Artificial Sequence: Synthetic oligonucleotide
aaaacgaacuaagccgaga

SEQ ID NO: 1219768 - RNA, 19 nt, Artificial Sequence
  Description of Artificial Sequence: Synthetic oligonucleotide
auauccgacacaucccaca

SEQ ID NO: 1219769 - RNA, 19 nt, Artificial Sequence
  Description of Artificial Sequence: Synthetic oligonucleotide
agaacauuucgaugcagau

SEQ ID NO: 1219770 - RNA, 19 nt, Artificial Sequence
  Description of Artificial Sequence: Synthetic oligonucleotide
agaguguuuagcugaaguu

SEQ ID NO: 1219771 - RNA, 19 nt, Artificial Sequence
  Description of Artificial Sequence: Synthetic oligonucleotide
guguauauuaguauuauau

SEQ ID NO: 1219772 - RNA, 19 nt, Artificial Sequence
  Description of Artificial Sequence: Synthetic oligonucleotide
ugggcuaucgccgcaaaga

SEQ ID NO: 1219773 - RNA, 19 nt, Artificial Sequence
  Description of Artificial Sequence: Synthetic oligonucleotide
agguguaacaucacguuug

SEQ ID NO: 1219774 - RNA, 19 nt, Artificial Sequence
  Description of Artificial Sequence: Synthetic oligonucleotide
acgaacuaagccgagauuu

SEQ ID NO: 1219775 - RNA, 19 nt, Artificial Sequence
  Description of Artificial Sequence: Synthetic oligonucleotide
uucgaugcagaugaugaaa

SEQ ID NO: 1219776 - RNA, 19 nt, Artificial Sequence
  Description of Artificial Sequence: Synthetic oligonucleotide
aguguuuagcugaaguugu

SEQ ID NO: 1219777 - RNA, 19 nt, Artificial Sequence
  Description of Artificial Sequence: Synthetic oligonucleotide
aaucggaugguuagguagu

SEQ ID NO: 1219778 - RNA, 19 nt, Artificial Sequence
  Description of Artificial Sequence: Synthetic oligonucleotide
guaggguuuauaggaaaag

SEQ ID NO: 1219779 - RNA, 19 nt, Artificial Sequence
  Description of Artificial Sequence: Synthetic oligonucleotide
aguaaguccaagcguugga

SEQ ID NO: 1219780 - RNA, 19 nt, Artificial Sequence
  Description of Artificial Sequence: Synthetic oligonucleotide
aagcaugagccuuccucug

SEQ ID NO: 1219781 - RNA, 19 nt, Artificial Sequence
  Description of Artificial Sequence: Synthetic oligonucleotide
accaacaaagcuauaagua

SEQ ID NO: 1219782 - RNA, 19 nt, Artificial Sequence
  Description of Artificial Sequence: Synthetic oligonucleotide
acgagacaaagacuacgag

SEQ ID NO: 1219783 - RNA, 19 nt, Artificial Sequence
  Description of Artificial Sequence: Synthetic oligonucleotide
uaaguacgagcaggggucg

SEQ ID NO: 1219784 - RNA, 19 nt, Artificial Sequence
  Description of Artificial Sequence: Synthetic oligonucleotide
guauauugggaccauccaa

SEQ ID NO: 1219785 - RNA, 19 nt, Artificial Sequence
  Description of Artificial Sequence: Synthetic oligonucleotide
gauccaucgccuccaguug

SEQ ID NO: 1219786 - RNA, 19 nt, Artificial Sequence
  Description of Artificial Sequence: Synthetic oligonucleotide
acauaucaaugcuguaaca

SEQ ID NO: 1219787 - RNA, 19 nt, Artificial Sequence
  Description of Artificial Sequence: Synthetic oligonucleotide
gguguaacaucacguuugg

SEQ ID NO: 1219788 - RNA, 19 nt, Artificial Sequence
  Description of Artificial Sequence: Synthetic oligonucleotide
guacauggcaaacaguugu

SEQ ID NO: 1219789 - RNA, 19 nt, Artificial Sequence
  Description of Artificial Sequence: Synthetic oligonucleotide
ugguuagguaguuguuaag

SEQ ID NO: 1219790 - RNA, 19 nt, Artificial Sequence
  Description of Artificial Sequence: Synthetic oligonucleotide
guuguauagggcugaguuc

SEQ ID NO: 1219791 - RNA, 19 nt, Artificial Sequence
  Description of Artificial Sequence: Synthetic oligonucleotide
uaaccucgcauuguucucc

SEQ ID NO: 1219792 - RNA, 19 nt, Artificial Sequence
  Description of Artificial Sequence: Synthetic oligonucleotide
uugaauuuaugaugccaua

SEQ ID NO: 1219793 - RNA, 19 nt, Artificial Sequence
  Description of Artificial Sequence: Synthetic oligonucleotide
gagacaaagacuacgaguu

SEQ ID NO: 1219794 - RNA, 19 nt, Artificial Sequence
  Description of Artificial Sequence: Synthetic oligonucleotide
cuaggaaauuuaaauguua

SEQ ID NO: 1219795 - RNA, 19 nt, Artificial Sequence
  Description of Artificial Sequence: Synthetic oligonucleotide
aaguucccaaauacacagg

SEQ ID NO: 1219796 - RNA, 19 nt, Artificial Sequence
  Description of Artificial Sequence: Synthetic oligonucleotide
ugaaauccugcaagccugu

SEQ ID NO: 1219797 - RNA, 19 nt, Artificial Sequence
  Description of Artificial Sequence: Synthetic oligonucleotide
cacagguaucgucagcagc

SEQ ID NO: 1219798 - RNA, 19 nt, Artificial Sequence
  Description of Artificial Sequence: Synthetic oligonucleotide
uagcuuucgacagccaaga

SEQ ID NO: 1219799 - RNA, 19 nt, Artificial Sequence
  Description of Artificial Sequence: Synthetic oligonucleotide
ugggaccauccaaagaauc

SEQ ID NO: 1219800 - RNA, 19 nt, Artificial Sequence
  Description of Artificial Sequence: Synthetic oligonucleotide
cacguuugggaaucggaug

SEQ ID NO: 1219801 - RNA, 19 nt, Artificial Sequence
  Description of Artificial Sequence: Synthetic oligonucleotide
uaugaugccauagcaguuu

SEQ ID NO: 1219802 - RNA, 19 nt, Artificial Sequence
  Description of Artificial Sequence: Synthetic oligonucleotide
agaucaggauggaaacuac

SEQ ID NO: 1219803 - RNA, 19 nt, Artificial Sequence
  Description of Artificial Sequence: Synthetic oligonucleotide
guaguuguuaaggaauauc

SEQ ID NO: 1219804 - RNA, 19 nt, Artificial Sequence
  Description of Artificial Sequence: Synthetic oligonucleotide
uauggcaauuuugggauau

SEQ ID NO: 1219805 - RNA, 19 nt, Artificial Sequence
  Description of Artificial Sequence: Synthetic oligonucleotide
uaguguguauuccaaccuu

SEQ ID NO: 1219806 - RNA, 19 nt, Artificial Sequence
  Description of Artificial Sequence: Synthetic oligonucleotide
guaaugcaccaaauguugc

SEQ ID NO: 1219807 - RNA, 19 nt, Artificial Sequence
  Description of Artificial Sequence: Synthetic oligonucleotide
aguuucugaaguucccaaa

SEQ ID NO: 1219808 - RNA, 19 nt, Artificial Sequence
  Description of Artificial Sequence: Synthetic oligonucleotide
gaaaacgaacuaagccgag

SEQ ID NO: 1219809 - RNA, 19 nt, Artificial Sequence
  Description of Artificial Sequence: Synthetic oligonucleotide
accuuaaccaacaaagcua

SEQ ID NO: 1219810 - RNA, 19 nt, Artificial Sequence
  Description of Artificial Sequence: Synthetic oligonucleotide
ccauagcaguuuaagaaag

SEQ ID NO: 1219811 - RNA, 19 nt, Artificial Sequence
  Description of Artificial Sequence: Synthetic oligonucleotide
ucggguuguguguaaugca

SEQ ID NO: 1219812 - RNA, 19 nt, Artificial Sequence
  Description of Artificial Sequence: Synthetic oligonucleotide
agaacgagacaaagacuac

SEQ ID NO: 1219813 - RNA, 19 nt, Artificial Sequence
  Description of Artificial Sequence: Synthetic oligonucleotide
gcauaguggagggagaugc

SEQ ID NO: 1219814 - RNA, 19 nt, Artificial Sequence
  Description of Artificial Sequence: Synthetic oligonucleotide
aacgaacuaagccgagauu

SEQ ID NO: 1219815 - RNA, 19 nt, Artificial Sequence
  Description of Artificial Sequence: Synthetic oligonucleotide
guacgcuucauaacacucc

SEQ ID NO: 1219816 - RNA, 19 nt, Artificial Sequence
  Description of Artificial Sequence: Synthetic oligonucleotide
gaaauaacgccaaccuuaa

SEQ ID NO: 1219817 - RNA, 19 nt, Artificial Sequence
  Description of Artificial Sequence: Synthetic oligonucleotide
uuggucugaccacagugua

SEQ ID NO: 1219818 - RNA, 19 nt, Artificial Sequence
  Description of Artificial Sequence: Synthetic oligonucleotide
aaauguuauuugugauaua

SEQ ID NO: 1219819 - RNA, 19 nt, Artificial Sequence
  Description of Artificial Sequence: Synthetic oligonucleotide
gacggcuuugaaccugcag

SEQ ID NO: 1219820 - RNA, 19 nt, Artificial Sequence
  Description of Artificial Sequence: Synthetic oligonucleotide
aacacucccuccagguauc

SEQ ID NO: 1219821 - RNA, 19 nt, Artificial Sequence
  Description of Artificial Sequence: Synthetic oligonucleotide
uugcaucgaaagagcagca

SEQ ID NO: 1219822 - RNA, 19 nt, Artificial Sequence
  Description of Artificial Sequence: Synthetic oligonucleotide
gagaucaggauggaaacua

SEQ ID NO: 1219823 - RNA, 19 nt, Artificial Sequence
  Description of Artificial Sequence: Synthetic oligonucleotide
acguacgcuuuucugaaau

SEQ ID NO: 1219824 - RNA, 19 nt, Artificial Sequence
  Description of Artificial Sequence: Synthetic oligonucleotide
gcuaucgccgcaaagaaca

SEQ ID NO: 1219825 - RNA, 19 nt, Artificial Sequence
  Description of Artificial Sequence: Synthetic oligonucleotide
cuauaaguacugcuugcca

SEQ ID NO: 1219826 - RNA, 19 nt, Artificial Sequence
  Description of Artificial Sequence: Synthetic oligonucleotide
uuucaguccagagcauuac

SEQ ID NO: 1219827 - RNA, 19 nt, Artificial Sequence
  Description of Artificial Sequence: Synthetic oligonucleotide
caacaaagcuauaaguacu

SEQ ID NO: 1219828 - RNA, 19 nt, Artificial Sequence
  Description of Artificial Sequence: Synthetic oligonucleotide
ugggaaucggaugguuagg

SEQ ID NO: 1219829 - RNA, 19 nt, Artificial Sequence
  Description of Artificial Sequence: Synthetic oligonucleotide
uccgcacuuugccauuccc

SEQ ID NO: 1219830 - RNA, 19 nt, Artificial Sequence
  Description of Artificial Sequence: Synthetic oligonucleotide
aaaugacguacgcuucaua

SEQ ID NO: 1219831 - RNA, 19 nt, Artificial Sequence
  Description of Artificial Sequence: Synthetic oligonucleotide
agguauccacguauauggc

SEQ ID NO: 1219832 - RNA, 19 nt, Artificial Sequence
  Description of Artificial Sequence: Synthetic oligonucleotide
uguugcuggucuuuagcuu

SEQ ID NO: 1219833 - RNA, 19 nt, Artificial Sequence
  Description of Artificial Sequence: Synthetic oligonucleotide
guaauuggucugaccacag

SEQ ID NO: 1219834 - RNA, 19 nt, Artificial Sequence
  Description of Artificial Sequence: Synthetic oligonucleotide
aagcguuggagaaacuaaa

SEQ ID NO: 1219835 - RNA, 19 nt, Artificial Sequence
  Description of Artificial Sequence: Synthetic oligonucleotide
accgagaucaggauggaaa

SEQ ID NO: 1219836 - RNA, 19 nt, Artificial Sequence
  Description of Artificial Sequence: Synthetic oligonucleotide
uuggauaaccucgcauugu

SEQ ID NO: 1219837 - RNA, 19 nt, Artificial Sequence
  Description of Artificial Sequence: Synthetic oligonucleotide
agcguuggagaaacuaaag

SEQ ID NO: 1219838 - RNA, 19 nt, Artificial Sequence
  Description of Artificial Sequence: Synthetic oligonucleotide
uguuccgguuacacgcgca

SEQ ID NO: 1219839 - RNA, 19 nt, Artificial Sequence
  Description of Artificial Sequence: Synthetic oligonucleotide
caacuauccaaacuguaua

SEQ ID NO: 1219840 - RNA, 19 nt, Artificial Sequence
  Description of Artificial Sequence: Synthetic oligonucleotide
guuccgguuacacgcgcag

SEQ ID NO: 1219841 - RNA, 19 nt, Artificial Sequence
  Description of Artificial Sequence: Synthetic oligonucleotide
aaaccaugcuuuagugugu

SEQ ID NO: 1219842 - RNA, 19 nt, Artificial Sequence
  Description of Artificial Sequence: Synthetic oligonucleotide
caagcguuggagaaacuaa

SEQ ID NO: 1219843 - RNA, 19 nt, Artificial Sequence
  Description of Artificial Sequence: Synthetic oligonucleotide
guuauaaaugacguacgcu

SEQ ID NO: 1219844 - RNA, 19 nt, Artificial Sequence
  Description of Artificial Sequence: Synthetic oligonucleotide
ucccacguacgcuuuucug

SEQ ID NO: 1219845 - RNA, 19 nt, Artificial Sequence
  Description of Artificial Sequence: Synthetic oligonucleotide
caaagcuauaaguacugcu

SEQ ID NO: 1219846 - RNA, 19 nt, Artificial Sequence
  Description of Artificial Sequence: Synthetic oligonucleotide
uuguuccgguuacacgcgc

SEQ ID NO: 1219847 - RNA, 19 nt, Artificial Sequence
  Description of Artificial Sequence: Synthetic oligonucleotide
acguacgcuucauaacacu

SEQ ID NO: 1219848 - RNA, 19 nt, Artificial Sequence
  Description of Artificial Sequence: Synthetic oligonucleotide
gguauccacguauauggca

SEQ ID NO: 1219849 - RNA, 19 nt, Artificial Sequence
  Description of Artificial Sequence: Synthetic oligonucleotide
aggacggcuuugaaccugc

SEQ ID NO: 1219850 - RNA, 19 nt, Artificial Sequence
  Description of Artificial Sequence: Synthetic oligonucleotide
gcuauaaguacugcuugcc

SEQ ID NO: 1219851 - RNA, 19 nt, Artificial Sequence
  Description of Artificial Sequence: Synthetic oligonucleotide
auuguucucccaacucguc

SEQ ID NO: 1219852 - RNA, 19 nt, Artificial Sequence
  Description of Artificial Sequence: Synthetic oligonucleotide
gaucaggauggaaacuaca

SEQ ID NO: 1219853 - RNA, 19 nt, Artificial Sequence
  Description of Artificial Sequence: Synthetic oligonucleotide
caaagccuaggaaauuuaa

SEQ ID NO: 1219854 - RNA, 19 nt, Artificial Sequence
  Description of Artificial Sequence: Synthetic oligonucleotide
acguaggguuuauaggaaa

SEQ ID NO: 1219855 - RNA, 19 nt, Artificial Sequence
  Description of Artificial Sequence: Synthetic oligonucleotide
caacagguuguauagggcu

SEQ ID NO: 1219856 - RNA, 19 nt, Artificial Sequence
  Description of Artificial Sequence: Synthetic oligonucleotide
gacuacgaguuugacacaa

SEQ ID NO: 1219857 - RNA, 19 nt, Artificial Sequence
  Description of Artificial Sequence: Synthetic oligonucleotide
guucggguuguguguaaug

SEQ ID NO: 1219858 - RNA, 19 nt, Artificial Sequence
  Description of Artificial Sequence: Synthetic oligonucleotide
auucccacguacgcuuuuc

SEQ ID NO: 1219859 - RNA, 19 nt, Artificial Sequence
  Description of Artificial Sequence: Synthetic oligonucleotide
aucgccgcaaagaacauuu

SEQ ID NO: 1219860 - RNA, 19 nt, Artificial Sequence
  Description of Artificial Sequence: Synthetic oligonucleotide
cgcuuuucugaaauaacgc

SEQ ID NO: 1219861 - RNA, 19 nt, Artificial Sequence
  Description of Artificial Sequence: Synthetic oligonucleotide
uaaaugacguacgcuucau

SEQ ID NO: 1219862 - RNA, 19 nt, Artificial Sequence
  Description of Artificial Sequence: Synthetic oligonucleotide
guacgcuuuucugaaauaa

SEQ ID NO: 1219863 - RNA, 19 nt, Artificial Sequence
  Description of Artificial Sequence: Synthetic oligonucleotide
gacguacgcuucauaacac

SEQ ID NO: 1219864 - RNA, 19 nt, Artificial Sequence
  Description of Artificial Sequence: Synthetic oligonucleotide
aaguuguuacuuacuguuu

SEQ ID NO: 1219865 - RNA, 19 nt, Artificial Sequence
  Description of Artificial Sequence: Synthetic oligonucleotide
agaauccuuauaauagguu

SEQ ID NO: 1219866 - RNA, 19 nt, Artificial Sequence
  Description of Artificial Sequence: Synthetic oligonucleotide
gguaauuggucugaccaca

SEQ ID NO: 1219867 - RNA, 19 nt, Artificial Sequence
  Description of Artificial Sequence: Synthetic oligonucleotide
ggcuuguguguucagugug

SEQ ID NO: 1219868 - RNA, 19 nt, Artificial Sequence
  Description of Artificial Sequence: Synthetic oligonucleotide
aaguacgagcaggggucgg

SEQ ID NO: 1219869 - RNA, 19 nt, Artificial Sequence
  Description of Artificial Sequence: Synthetic oligonucleotide
aucacguuugggaaucgga

SEQ ID NO: 1219870 - RNA, 19 nt, Artificial Sequence
  Description of Artificial Sequence: Synthetic oligonucleotide
gguuguauagggcugaguu

SEQ ID NO: 1219871 - RNA, 19 nt, Artificial Sequence
  Description of Artificial Sequence: Synthetic oligonucleotide
uuccgguuacacgcgcagg

SEQ ID NO: 1219872 - RNA, 19 nt, Artificial Sequence
  Description of Artificial Sequence: Synthetic oligonucleotide
augggcuaucgccgcaaag

SEQ ID NO: 1219873 - RNA, 19 nt, Artificial Sequence
  Description of Artificial Sequence: Synthetic oligonucleotide
uaacgccaaccuuaaccaa

SEQ ID NO: 1219874 - RNA, 19 nt, Artificial Sequence
  Description of Artificial Sequence: Synthetic oligonucleotide
guccaagcguuggagaaac

SEQ ID NO: 1219875 - RNA, 19 nt, Artificial Sequence
  Description of Artificial Sequence: Synthetic oligonucleotide
gggaaccgagaucaggaug

SEQ ID NO: 1219876 - RNA, 19 nt, Artificial Sequence
  Description of Artificial Sequence: Synthetic oligonucleotide
ccaacagguuguauagggc

SEQ ID NO: 1219877 - RNA, 19 nt, Artificial Sequence
  Description of Artificial Sequence: Synthetic oligonucleotide
aagccgagauuuuggcguu

SEQ ID NO: 1219878 - RNA, 19 nt, Artificial Sequence
  Description of Artificial Sequence: Synthetic oligonucleotide
gauauccgacacaucccac

SEQ ID NO: 1219879 - RNA, 19 nt, Artificial Sequence
  Description of Artificial Sequence: Synthetic oligonucleotide
caucacguuugggaaucgg

SEQ ID NO: 1219880 - RNA, 19 nt, Artificial Sequence
  Description of Artificial Sequence: Synthetic oligonucleotide
caaagacuacgaguuugac

SEQ ID NO: 1219881 - RNA, 19 nt, Artificial Sequence
  Description of Artificial Sequence: Synthetic oligonucleotide
caggggcauuuucauaaac

SEQ ID NO: 1219882 - RNA, 19 nt, Artificial Sequence
  Description of Artificial Sequence: Synthetic oligonucleotide
uuccgcacuuugccauucc

SEQ ID NO: 1219883 - RNA, 19 nt, Artificial Sequence
  Description of Artificial Sequence: Synthetic oligonucleotide
gagaaacuaaaguucccuu

SEQ ID NO: 1219884 - RNA, 19 nt, Artificial Sequence
  Description of Artificial Sequence: Synthetic oligonucleotide
aaccaugcuuuagugugua

SEQ ID NO: 1219885 - RNA, 19 nt, Artificial Sequence
  Description of Artificial Sequence: Synthetic oligonucleotide
gcuuucgacagccaagaaa

SEQ ID NO: 1219886 - RNA, 19 nt, Artificial Sequence
  Description of Artificial Sequence: Synthetic oligonucleotide
ucggaugguuagguaguug

SEQ ID NO: 1219887 - RNA, 19 nt, Artificial Sequence
  Description of Artificial Sequence: Synthetic oligonucleotide
ccgagaucaggauggaaac

SEQ ID NO: 1219888 - RNA, 19 nt, Artificial Sequence
  Description of Artificial Sequence: Synthetic oligonucleotide
ugcaucgaaagagcagcau

SEQ ID NO: 1219889 - RNA, 19 nt, Artificial Sequence
  Description of Artificial Sequence: Synthetic oligonucleotide
gaaauccugcaagccugug

SEQ ID NO: 1219890 - RNA, 19 nt, Artificial Sequence
  Description of Artificial Sequence: Synthetic oligonucleotide
aggauggaaacuacauaaa

SEQ ID NO: 1219891 - RNA, 19 nt, Artificial Sequence
  Description of Artificial Sequence: Synthetic oligonucleotide
agcauaguggagggagaug

SEQ ID NO: 1219892 - RNA, 19 nt, Artificial Sequence
  Description of Artificial Sequence: Synthetic oligonucleotide
uguauagggcugaguucuu

SEQ ID NO: 1219893 - RNA, 19 nt, Artificial Sequence
  Description of Artificial Sequence: Synthetic oligonucleotide
gcaugagccuuccucugcc

SEQ ID NO: 1219894 - RNA, 19 nt, Artificial Sequence
  Description of Artificial Sequence: Synthetic oligonucleotide
auauggcaauuuugggaua

SEQ ID NO: 1219895 - RNA, 19 nt, Artificial Sequence
  Description of Artificial Sequence: Synthetic oligonucleotide
ggauggaaacuacauaaau

SEQ ID NO: 1219896 - RNA, 19 nt, Artificial Sequence
  Description of Artificial Sequence: Synthetic oligonucleotide
agguaucgucagcagcaga

SEQ ID NO: 1219897 - RNA, 19 nt, Artificial Sequence
  Description of Artificial Sequence: Synthetic oligonucleotide
agacuacgaguuugacaca

SEQ ID NO: 1219898 - RNA, 19 nt, Artificial Sequence
  Description of Artificial Sequence: Synthetic oligonucleotide
acaucacguuugggaaucg

SEQ ID NO: 1219899 - RNA, 19 nt, Artificial Sequence
  Description of Artificial Sequence: Synthetic oligonucleotide
gaaguucggguugugugua

SEQ ID NO: 1219900 - RNA, 19 nt, Artificial Sequence
  Description of Artificial Sequence: Synthetic oligonucleotide
gaguaaucguguguccaaa

SEQ ID NO: 1219901 - RNA, 19 nt, Artificial Sequence
  Description of Artificial Sequence: Synthetic oligonucleotide
ccuaguuugcaucgaaaga

SEQ ID NO: 1219902 - RNA, 19 nt, Artificial Sequence
  Description of Artificial Sequence: Synthetic oligonucleotide
ggggaggacggcuuugaac

SEQ ID NO: 1219903 - RNA, 19 nt, Artificial Sequence
  Description of Artificial Sequence: Synthetic oligonucleotide
caucccacauagcaaggaa

SEQ ID NO: 1219904 - RNA, 19 nt, Artificial Sequence
  Description of Artificial Sequence: Synthetic oligonucleotide
auacacaggggaaccgaga

SEQ ID NO: 1219905 - RNA, 19 nt, Artificial Sequence
  Description of Artificial Sequence: Synthetic oligonucleotide
cacguaggguuuauaggaa

SEQ ID NO: 1219906 - RNA, 19 nt, Artificial Sequence
  Description of Artificial Sequence: Synthetic oligonucleotide
gccgcaaagaacauuucga

SEQ ID NO: 1219907 - RNA, 19 nt, Artificial Sequence
  Description of Artificial Sequence: Synthetic oligonucleotide
caggggucggauccaucgc

SEQ ID NO: 1219908 - RNA, 19 nt, Artificial Sequence
  Description of Artificial Sequence: Synthetic oligonucleotide
ggaguaaucguguguccaa

SEQ ID NO: 1219909 - RNA, 19 nt, Artificial Sequence
  Description of Artificial Sequence: Synthetic oligonucleotide
ugaugggcuaucgccgcaa

SEQ ID NO: 1219910 - RNA, 19 nt, Artificial Sequence
  Description of Artificial Sequence: Synthetic oligonucleotide
guguaaugcaccaaauguu

SEQ ID NO: 1219911 - RNA, 19 nt, Artificial Sequence
  Description of Artificial Sequence: Synthetic oligonucleotide
ggguuguguguaaugcacc

SEQ ID NO: 1219912 - RNA, 19 nt, Artificial Sequence
  Description of Artificial Sequence: Synthetic oligonucleotide
cagguaucgucagcagcag

SEQ ID NO: 1219913 - RNA, 19 nt, Artificial Sequence
  Description of Artificial Sequence: Synthetic oligonucleotide
uccaucgccuccaguuguu

SEQ ID NO: 1219914 - RNA, 19 nt, Artificial Sequence
  Description of Artificial Sequence: Synthetic oligonucleotide
guauagggcugaguucuuc

SEQ ID NO: 1219915 - RNA, 19 nt, Artificial Sequence
  Description of Artificial Sequence: Synthetic oligonucleotide
ggaguaaugaugggcuauc

SEQ ID NO: 1219916 - RNA, 19 nt, Artificial Sequence
  Description of Artificial Sequence: Synthetic oligonucleotide
uacgagcaggggucggauc

SEQ ID NO: 1219917 - RNA, 19 nt, Artificial Sequence
  Description of Artificial Sequence: Synthetic oligonucleotide
gagucaaagcaugagccuu

SEQ ID NO: 1219918 - RNA, 19 nt, Artificial Sequence
  Description of Artificial Sequence: Synthetic oligonucleotide
aguccaagcguuggagaaa

SEQ ID NO: 1219919 - RNA, 19 nt, Artificial Sequence
  Description of Artificial Sequence: Synthetic oligonucleotide
ucccuucaucguagacacc

SEQ ID NO: 1219920 - RNA, 19 nt, Artificial Sequence
  Description of Artificial Sequence: Synthetic oligonucleotide
cguacgcuucauaacacuc

SEQ ID NO: 1219921 - RNA, 19 nt, Artificial Sequence
  Description of Artificial Sequence: Synthetic oligonucleotide
uuccaaccuucaguuucug

SEQ ID NO: 1219922 - RNA, 19 nt, Artificial Sequence
  Description of Artificial Sequence: Synthetic oligonucleotide
cucgucuuacuuguucaga

SEQ ID NO: 1219923 - RNA, 19 nt, Artificial Sequence
  Description of Artificial Sequence: Synthetic oligonucleotide
cgccgcaaagaacauuucg

SEQ ID NO: 1219924 - RNA, 19 nt, Artificial Sequence
  Description of Artificial Sequence: Synthetic oligonucleotide
ucgccgcaaagaacauuuc

SEQ ID NO: 1219925 - RNA, 19 nt, Artificial Sequence
  Description of Artificial Sequence: Synthetic oligonucleotide
uugugacgaugaggaaagc

SEQ ID NO: 1219926 - RNA, 19 nt, Artificial Sequence
  Description of Artificial Sequence: Synthetic oligonucleotide
caaugcuguaacaguggua

SEQ ID NO: 1219927 - RNA, 19 nt, Artificial Sequence
  Description of Artificial Sequence: Synthetic oligonucleotide
cccacguacgcuuuucuga

SEQ ID NO: 1219928 - RNA, 19 nt, Artificial Sequence
  Description of Artificial Sequence: Synthetic oligonucleotide
uaucgccgcaaagaacauu

SEQ ID NO: 1219929 - RNA, 19 nt, Artificial Sequence
  Description of Artificial Sequence: Synthetic oligonucleotide
gcguuggagaaacuaaagu

SEQ ID NO: 1219930 - RNA, 19 nt, Artificial Sequence
  Description of Artificial Sequence: Synthetic oligonucleotide
ccaguuguuccgguuacac

SEQ ID NO: 1219931 - RNA, 19 nt, Artificial Sequence
  Description of Artificial Sequence: Synthetic oligonucleotide
guuguguguaaugcaccaa

SEQ ID NO: 1219932 - RNA, 19 nt, Artificial Sequence
  Description of Artificial Sequence: Synthetic oligonucleotide
ucuugcacguaggguuuau

SEQ ID NO: 1219933 - RNA, 19 nt, Artificial Sequence
  Description of Artificial Sequence: Synthetic oligonucleotide
gaugggcuaucgccgcaaa

SEQ ID NO: 1219934 - RNA, 19 nt, Artificial Sequence
  Description of Artificial Sequence: Synthetic oligonucleotide
ccacaguguacugcaauac

SEQ ID NO: 1219935 - RNA, 19 nt, Artificial Sequence
  Description of Artificial Sequence: Synthetic oligonucleotide
agguuguauagggcugagu

SEQ ID NO: 1219936 - RNA, 19 nt, Artificial Sequence
  Description of Artificial Sequence: Synthetic oligonucleotide
ccaaguaaguccaagcguu

SEQ ID NO: 1219937 - RNA, 19 nt, Artificial Sequence
  Description of Artificial Sequence: Synthetic oligonucleotide
caucguagacaccaacaau

SEQ ID NO: 1219938 - RNA, 19 nt, Artificial Sequence
  Description of Artificial Sequence: Synthetic oligonucleotide
gguuacacgcgcaggggca

SEQ ID NO: 1219939 - RNA, 19 nt, Artificial Sequence
  Description of Artificial Sequence: Synthetic oligonucleotide
cuuccgcacuuugccauuc

SEQ ID NO: 1219940 - RNA, 19 nt, Artificial Sequence
  Description of Artificial Sequence: Synthetic oligonucleotide
guacugcuugccagaacga

SEQ ID NO: 1219941 - RNA, 19 nt, Artificial Sequence
  Description of Artificial Sequence: Synthetic oligonucleotide
gaaccgagaucaggaugga

SEQ ID NO: 1219942 - RNA, 19 nt, Artificial Sequence
  Description of Artificial Sequence: Synthetic oligonucleotide
acgcgcaggggcauuuuca

SEQ ID NO: 1219943 - RNA, 19 nt, Artificial Sequence
  Description of Artificial Sequence: Synthetic oligonucleotide
cuuaaccaacaaagcuaua

SEQ ID NO: 1219944 - RNA, 19 nt, Artificial Sequence
  Description of Artificial Sequence: Synthetic oligonucleotide
cacgcgcaggggcauuuuc

SEQ ID NO: 1219945 - RNA, 19 nt, Artificial Sequence
  Description of Artificial Sequence: Synthetic oligonucleotide
gggcuaucgccgcaaagaa

SEQ ID NO: 1219946 - RNA, 19 nt, Artificial Sequence
  Description of Artificial Sequence: Synthetic oligonucleotide
auccgacacaucccacaua

SEQ ID NO: 1219947 - RNA, 19 nt, Artificial Sequence
  Description of Artificial Sequence: Synthetic oligonucleotide
ccaacuauccaaacuguau

SEQ ID NO: 1219948 - RNA, 19 nt, Artificial Sequence
  Description of Artificial Sequence: Synthetic oligonucleotide
ggauaaccucgcauuguuc

SEQ ID NO: 1219949 - RNA, 19 nt, Artificial Sequence
  Description of Artificial Sequence: Synthetic oligonucleotide
acuacgaguuugacacaaa

SEQ ID NO: 1219950 - RNA, 19 nt, Artificial Sequence
  Description of Artificial Sequence: Synthetic oligonucleotide
cgagacaaagacuacgagu

SEQ ID NO: 1219951 - RNA, 19 nt, Artificial Sequence
  Description of Artificial Sequence: Synthetic oligonucleotide
aucggaugguuagguaguu

SEQ ID NO: 1219952 - RNA, 19 nt, Artificial Sequence
  Description of Artificial Sequence: Synthetic oligonucleotide
cgaguuugacacaaagaaa

SEQ ID NO: 1219953 - RNA, 19 nt, Artificial Sequence
  Description of Artificial Sequence: Synthetic oligonucleotide
uacacgcgcaggggcauuu

SEQ ID NO: 1219954 - RNA, 19 nt, Artificial Sequence
  Description of Artificial Sequence: Synthetic oligonucleotide
gcccacgguggacagcagc

SEQ ID NO: 1219955 - RNA, 19 nt, Artificial Sequence
  Description of Artificial Sequence: Synthetic oligonucleotide
ggcuaucgccgcaaagaac

SEQ ID NO: 1219956 - RNA, 19 nt, Artificial Sequence
  Description of Artificial Sequence: Synthetic oligonucleotide
cgcauuguucucccaacuc

SEQ ID NO: 1219957 - RNA, 19 nt, Artificial Sequence
  Description of Artificial Sequence: Synthetic oligonucleotide
ccacguacgcuuuucugaa

SEQ ID NO: 1219958 - RNA, 19 nt, Artificial Sequence
  Description of Artificial Sequence: Synthetic oligonucleotide
cgguuacacgcgcaggggc

SEQ ID NO: 1219959 - RNA, 19 nt, Artificial Sequence
  Description of Artificial Sequence: Synthetic oligonucleotide
cccaacucgucuuacuugu

SEQ ID NO: 1219960 - RNA, 19 nt, Artificial Sequence
  Description of Artificial Sequence: Synthetic oligonucleotide
cucccaacucgucuuacuu

SEQ ID NO: 1219961 - RNA, 19 nt, Artificial Sequence
  Description of Artificial Sequence: Synthetic oligonucleotide
cacguacgcuuuucugaaa

SEQ ID NO: 1219962 - RNA, 19 nt, Artificial Sequence
  Description of Artificial Sequence: Synthetic oligonucleotide
cguagacaccaacaaucuc

SEQ ID NO: 1219963 - RNA, 19 nt, Artificial Sequence
  Description of Artificial Sequence: Synthetic oligonucleotide
ccgguuacacgcgcagggg

SEQ ID NO: 1219964 - RNA, 19 nt, Artificial Sequence
  Description of Artificial Sequence: Synthetic oligonucleotide
ccaaagccuaggaaauuua

SEQ ID NO: 1219965 - RNA, 19 nt, Artificial Sequence
  Description of Artificial Sequence: Synthetic oligonucleotide
gggaaucggaugguuaggu

SEQ ID NO: 1219966 - RNA, 19 nt, Artificial Sequence
  Description of Artificial Sequence: Synthetic oligonucleotide
ccagaacgagacaaagacu

SEQ ID NO: 1219967 - RNA, 19 nt, Artificial Sequence
  Description of Artificial Sequence: Synthetic oligonucleotide
ccgacacaucccacauagc

SEQ ID NO: 1219968 - RNA, 19 nt, Artificial Sequence
  Description of Artificial Sequence: Synthetic oligonucleotide
uuacacgcgcaggggcauu

SEQ ID NO: 1219969 - RNA, 19 nt, Artificial Sequence
  Description of Artificial Sequence: Synthetic oligonucleotide
caugagccuuccucugccu

SEQ ID NO: 1219970 - RNA, 19 nt, Artificial Sequence
  Description of Artificial Sequence: Synthetic oligonucleotide
ccucgcauuguucucccaa

SEQ ID NO: 1219971 - RNA, 19 nt, Artificial Sequence
  Description of Artificial Sequence: Synthetic oligonucleotide
gccauucccacguacgcuu

SEQ ID NO: 1219972 - RNA, 19 nt, Artificial Sequence
  Description of Artificial Sequence: Synthetic oligonucleotide
guacugcaauacuccuagu

SEQ ID NO: 1219973 - RNA, 19 nt, Artificial Sequence
  Description of Artificial Sequence: Synthetic oligonucleotide
cuugcacguaggguuuaua

SEQ ID NO: 1219974 - RNA, 19 nt, Artificial Sequence
  Description of Artificial Sequence: Synthetic oligonucleotide
gggucggauccaucgccuc

SEQ ID NO: 1219975 - RNA, 19 nt, Artificial Sequence
  Description of Artificial Sequence: Synthetic oligonucleotide
ccgcaaagaacauuucgau

SEQ ID NO: 1219976 - RNA, 19 nt, Artificial Sequence
  Description of Artificial Sequence: Synthetic oligonucleotide
cuaucgccgcaaagaacau

SEQ ID NO: 1219977 - RNA, 19 nt, Artificial Sequence
  Description of Artificial Sequence: Synthetic oligonucleotide
guuacacgcgcaggggcau

SEQ ID NO: 1219978 - RNA, 19 nt, Artificial Sequence
  Description of Artificial Sequence: Synthetic oligonucleotide
cgucuuacuuguucagaaa

SEQ ID NO: 1219979 - RNA, 19 nt, Artificial Sequence
  Description of Artificial Sequence: Synthetic oligonucleotide
ggcaaacaguugugacaaa

SEQ ID NO: 1219980 - RNA, 19 nt, Artificial Sequence
  Description of Artificial Sequence: Synthetic oligonucleotide
ccuccagguauccacguau

SEQ ID NO: 1219981 - RNA, 19 nt, Artificial Sequence
  Description of Artificial Sequence: Synthetic oligonucleotide
cugggagaucaaucaugau

SEQ ID NO: 1219982 - RNA, 19 nt, Artificial Sequence
  Description of Artificial Sequence: Synthetic oligonucleotide
guguuuagcugaaguuguu

SEQ ID NO: 1219983 - RNA, 19 nt, Artificial Sequence
  Description of Artificial Sequence: Synthetic oligonucleotide
agccgagauuuuggcguuu

SEQ ID NO: 1219984 - RNA, 19 nt, Artificial Sequence
  Description of Artificial Sequence: Synthetic oligonucleotide
guacgagcaggggucggau

SEQ ID NO: 1219985 - RNA, 19 nt, Artificial Sequence
  Description of Artificial Sequence: Synthetic oligonucleotide
ccacguauauggcaauuuu

SEQ ID NO: 1219986 - RNA, 19 nt, Artificial Sequence
  Description of Artificial Sequence: Synthetic oligonucleotide
ggaugguuagguaguuguu

SEQ ID NO: 1219987 - RNA, 19 nt, Artificial Sequence
  Description of Artificial Sequence: Synthetic oligonucleotide
acacgcgcaggggcauuuu

SEQ ID NO: 1219988 - RNA, 19 nt, Artificial Sequence
  Description of Artificial Sequence: Synthetic oligonucleotide
cguacgcuuuucugaaaua

SEQ ID NO: 1219989 - RNA, 19 nt, Artificial Sequence
  Description of Artificial Sequence: Synthetic oligonucleotide
ccaucgccuccaguuguuc

SEQ ID NO: 1219990 - RNA, 19 nt, Artificial Sequence
  Description of Artificial Sequence: Synthetic oligonucleotide
ccgggucuucaggaaaaca

SEQ ID NO: 1219991 - RNA, 19 nt, Artificial Sequence
  Description of Artificial Sequence: Synthetic oligonucleotide
ggggucggauccaucgccu

SEQ ID NO: 1219992 - RNA, 19 nt, Artificial Sequence
  Description of Artificial Sequence: Synthetic oligonucleotide
gcuuccgcacuuugccauu

SEQ ID NO: 1219993 - RNA, 19 nt, Artificial Sequence
  Description of Artificial Sequence: Synthetic oligonucleotide
ggacggcuuugaaccugca

SEQ ID NO: 1219994 - RNA, 19 nt, Artificial Sequence
  Description of Artificial Sequence: Synthetic oligonucleotide
cgagaucaggauggaaacu

SEQ ID NO: 1219995 - RNA, 19 nt, Artificial Sequence
  Description of Artificial Sequence: Synthetic oligonucleotide
cgccaaccuuaaccaacaa

SEQ ID NO: 1219996 - RNA, 19 nt, Artificial Sequence
  Description of Artificial Sequence: Synthetic oligonucleotide
cggauccaucgccuccagu

SEQ ID NO: 1219997 - RNA, 19 nt, Artificial Sequence
  Description of Artificial Sequence: Synthetic oligonucleotide
aauacaacaacauggacuc

SEQ ID NO: 1219998 - RNA, 19 nt, Artificial Sequence
  Description of Artificial Sequence: Synthetic oligonucleotide
uucacugccacgaagaggg

SEQ ID NO: 1219999 - RNA, 19 nt, Artificial Sequence
  Description of Artificial Sequence: Synthetic oligonucleotide
aaauacaacaacauggacu

SEQ ID NO: 1220000 - RNA, 19 nt, Artificial Sequence
  Description of Artificial Sequence: Synthetic oligonucleotide
cuucuuuacacccagguag

SEQ ID NO: 1220001 - RNA, 19 nt, Artificial Sequence
  Description of Artificial Sequence: Synthetic oligonucleotide
aaugaaguagcgaucgugg

SEQ ID NO: 1220002 - RNA, 19 nt, Artificial Sequence
  Description of Artificial Sequence: Synthetic oligonucleotide
aacucaaggagagggaccc

SEQ ID NO: 1220003 - RNA, 19 nt, Artificial Sequence
  Description of Artificial Sequence: Synthetic oligonucleotide
cuaugcucagacaugacgg

SEQ ID NO: 1220004 - RNA, 19 nt, Artificial Sequence
  Description of Artificial Sequence: Synthetic oligonucleotide
aaagcaaguccaguagucc

SEQ ID NO: 1220005 - RNA, 19 nt, Artificial Sequence
  Description of Artificial Sequence: Synthetic oligonucleotide
aguccaguaguccuuuucc

SEQ ID NO: 1220006 - RNA, 19 nt, Artificial Sequence
  Description of Artificial Sequence: Synthetic oligonucleotide
gaggcuucggucuucacgg

SEQ ID NO: 1220007 - RNA, 19 nt, Artificial Sequence
  Description of Artificial Sequence: Synthetic oligonucleotide
uguacaaugggcagcaccu

SEQ ID NO: 1220008 - RNA, 19 nt, Artificial Sequence
  Description of Artificial Sequence: Synthetic oligonucleotide
agggguagcaaacagccac

SEQ ID NO: 1220009 - RNA, 19 nt, Artificial Sequence
  Description of Artificial Sequence: Synthetic oligonucleotide
acgaagagggaucagcgac

SEQ ID NO: 1220010 - RNA, 19 nt, Artificial Sequence
  Description of Artificial Sequence: Synthetic oligonucleotide
gccaaauacaacaacaugg

SEQ ID NO: 1220011 - RNA, 19 nt, Artificial Sequence
  Description of Artificial Sequence: Synthetic oligonucleotide
ucuucacggaacuucauca

SEQ ID NO: 1220012 - RNA, 19 nt, Artificial Sequence
  Description of Artificial Sequence: Synthetic oligonucleotide
uucccugaugcucacauug

SEQ ID NO: 1220013 - RNA, 19 nt, Artificial Sequence
  Description of Artificial Sequence: Synthetic oligonucleotide
ucacggaacuucaucaugc

SEQ ID NO: 1220014 - RNA, 19 nt, Artificial Sequence
  Description of Artificial Sequence: Synthetic oligonucleotide
cacaaacucaaggagaggg

SEQ ID NO: 1220015 - RNA, 19 nt, Artificial Sequence
  Description of Artificial Sequence: Synthetic oligonucleotide
ucucguugaccucaaagca

SEQ ID NO: 1220016 - RNA, 19 nt, Artificial Sequence
  Description of Artificial Sequence: Synthetic oligonucleotide
aagagugugggcccaaaca

SEQ ID NO: 1220017 - RNA, 19 nt, Artificial Sequence
  Description of Artificial Sequence: Synthetic oligonucleotide
ucguugaccucaaagcaag

SEQ ID NO: 1220018 - RNA, 19 nt, Artificial Sequence
  Description of Artificial Sequence: Synthetic oligonucleotide
uguguguucauuuggcacu

SEQ ID NO: 1220019 - RNA, 19 nt, Artificial Sequence
  Description of Artificial Sequence: Synthetic oligonucleotide
aaacucaaggagagggacc

SEQ ID NO: 1220020 - RNA, 19 nt, Artificial Sequence
  Description of Artificial Sequence: Synthetic oligonucleotide
ugcucagacaugacggagg

SEQ ID NO: 1220021 - RNA, 19 nt, Artificial Sequence
  Description of Artificial Sequence: Synthetic oligonucleotide
cuugacaugcuguucaguc

SEQ ID NO: 1220022 - RNA, 19 nt, Artificial Sequence
  Description of Artificial Sequence: Synthetic oligonucleotide
cagauggcugauaagggcc

SEQ ID NO: 1220023 - RNA, 19 nt, Artificial Sequence
  Description of Artificial Sequence: Synthetic oligonucleotide
acgacuccuaugcucagac

SEQ ID NO: 1220024 - RNA, 19 nt, Artificial Sequence
  Description of Artificial Sequence: Synthetic oligonucleotide
ugcaugacuggagagcagg

SEQ ID NO: 1220025 - RNA, 19 nt, Artificial Sequence
  Description of Artificial Sequence: Synthetic oligonucleotide
aguagguggccgcaguuuc

SEQ ID NO: 1220026 - RNA, 19 nt, Artificial Sequence
  Description of Artificial Sequence: Synthetic oligonucleotide
uucuuuacacccagguaga

SEQ ID NO: 1220027 - RNA, 19 nt, Artificial Sequence
  Description of Artificial Sequence: Synthetic oligonucleotide
gaaugaaguagcgaucgug

SEQ ID NO: 1220028 - RNA, 19 nt, Artificial Sequence
  Description of Artificial Sequence: Synthetic oligonucleotide
ucuaggaucuccagggcaa

SEQ ID NO: 1220029 - RNA, 19 nt, Artificial Sequence
  Description of Artificial Sequence: Synthetic oligonucleotide
ugacaugcuguucagucuc

SEQ ID NO: 1220030 - RNA, 19 nt, Artificial Sequence
  Description of Artificial Sequence: Synthetic oligonucleotide
uccuuguagagccguaggc

SEQ ID NO: 1220031 - RNA, 19 nt, Artificial Sequence
  Description of Artificial Sequence: Synthetic oligonucleotide
aggagcauugcaugacugg

SEQ ID NO: 1220032 - RNA, 19 nt, Artificial Sequence
  Description of Artificial Sequence: Synthetic oligonucleotide
uguccgaacaggaaggcuu

SEQ ID NO: 1220033 - RNA, 19 nt, Artificial Sequence
  Description of Artificial Sequence: Synthetic oligonucleotide
gcgcauuucauuuucacug

SEQ ID NO: 1220034 - RNA, 19 nt, Artificial Sequence
  Description of Artificial Sequence: Synthetic oligonucleotide
caugacggaggagagaaag

SEQ ID NO: 1220035 - RNA, 19 nt, Artificial Sequence
  Description of Artificial Sequence: Synthetic oligonucleotide
acuccgaaccuccuuguag

SEQ ID NO: 1220036 - RNA, 19 nt, Artificial Sequence
  Description of Artificial Sequence: Synthetic oligonucleotide
aguacagauggcugauaag

SEQ ID NO: 1220037 - RNA, 19 nt, Artificial Sequence
  Description of Artificial Sequence: Synthetic oligonucleotide
aggccacuccuucucaggc

SEQ ID NO: 1220038 - RNA, 19 nt, Artificial Sequence
  Description of Artificial Sequence: Synthetic oligonucleotide
ugcuuauagagcuucccau

SEQ ID NO: 1220039 - RNA, 19 nt, Artificial Sequence
  Description of Artificial Sequence: Synthetic oligonucleotide
aguagcccgguugacaggg

SEQ ID NO: 1220040 - RNA, 19 nt, Artificial Sequence
  Description of Artificial Sequence: Synthetic oligonucleotide
ugugggcccaaacacaaua

SEQ ID NO: 1220041 - RNA, 19 nt, Artificial Sequence
  Description of Artificial Sequence: Synthetic oligonucleotide
agaccucucuugcagagcu

SEQ ID NO: 1220042 - RNA, 19 nt, Artificial Sequence
  Description of Artificial Sequence: Synthetic oligonucleotide
uggccaaauacaacaacau

SEQ ID NO: 1220043 - RNA, 19 nt, Artificial Sequence
  Description of Artificial Sequence: Synthetic oligonucleotide
cuggccaaauacaacaaca

SEQ ID NO: 1220044 - RNA, 19 nt, Artificial Sequence
  Description of Artificial Sequence: Synthetic oligonucleotide
caucaugccaugcuuggug

SEQ ID NO: 1220045 - RNA, 19 nt, Artificial Sequence
  Description of Artificial Sequence: Synthetic oligonucleotide
cauugcaugacuggagagc

SEQ ID NO: 1220046 - RNA, 19 nt, Artificial Sequence
  Description of Artificial Sequence: Synthetic oligonucleotide
ugucccagagccagaacga

SEQ ID NO: 1220047 - RNA, 19 nt, Artificial Sequence
  Description of Artificial Sequence: Synthetic oligonucleotide
gccagaacgacuccuaugc

SEQ ID NO: 1220048 - RNA, 19 nt, Artificial Sequence
  Description of Artificial Sequence: Synthetic oligonucleotide
cagcccauguacaaugggc

SEQ ID NO: 1220049 - RNA, 19 nt, Artificial Sequence
  Description of Artificial Sequence: Synthetic oligonucleotide
uccgcguagugcaaugggc

SEQ ID NO: 1220050 - RNA, 19 nt, Artificial Sequence
  Description of Artificial Sequence: Synthetic oligonucleotide
ggaucagcgacacacugcc

SEQ ID NO: 1220051 - RNA, 19 nt, Artificial Sequence
  Description of Artificial Sequence: Synthetic oligonucleotide
ucccgggaaaaucccauug

SEQ ID NO: 1220052 - RNA, 19 nt, Artificial Sequence
  Description of Artificial Sequence: Synthetic oligonucleotide
uaagcaagccaggucagga

SEQ ID NO: 1220053 - RNA, 19 nt, Artificial Sequence
  Description of Artificial Sequence: Synthetic oligonucleotide
ucaggagcauugcaugacu

SEQ ID NO: 1220054 - RNA, 19 nt, Artificial Sequence
  Description of Artificial Sequence: Synthetic oligonucleotide
gucuggaagagugugggcc

SEQ ID NO: 1220055 - RNA, 19 nt, Artificial Sequence
  Description of Artificial Sequence: Synthetic oligonucleotide
ugggcccaaacacaauagc

SEQ ID NO: 1220056 - RNA, 19 nt, Artificial Sequence
  Description of Artificial Sequence: Synthetic oligonucleotide
acucgagaggguucugagg

SEQ ID NO: 1220057 - RNA, 19 nt, Artificial Sequence
  Description of Artificial Sequence: Synthetic oligonucleotide
cacacggcuggccaaauac

SEQ ID NO: 1220058 - RNA, 19 nt, Artificial Sequence
  Description of Artificial Sequence: Synthetic oligonucleotide
uaugcccagcccauguaca

SEQ ID NO: 1220059 - RNA, 19 nt, Artificial Sequence
  Description of Artificial Sequence: Synthetic oligonucleotide
cuucacaguagcccgguug

SEQ ID NO: 1220060 - RNA, 19 nt, Artificial Sequence
  Description of Artificial Sequence: Synthetic oligonucleotide
guguguguucauuuggcac

SEQ ID NO: 1220061 - RNA, 19 nt, Artificial Sequence
  Description of Artificial Sequence: Synthetic oligonucleotide
gacaugacggaggagagaa

SEQ ID NO: 1220062 - RNA, 19 nt, Artificial Sequence
  Description of Artificial Sequence: Synthetic oligonucleotide
cugucuggaagaguguggg

SEQ ID NO: 1220063 - RNA, 19 nt, Artificial Sequence
  Description of Artificial Sequence: Synthetic oligonucleotide
agaacgacuccuaugcuca

SEQ ID NO: 1220064 - RNA, 19 nt, Artificial Sequence
  Description of Artificial Sequence: Synthetic oligonucleotide
acggcuuccccgugugucc

SEQ ID NO: 1220065 - RNA, 19 nt, Artificial Sequence
  Description of Artificial Sequence: Synthetic oligonucleotide
cagaacgacuccuaugcuc

SEQ ID NO: 1220066 - RNA, 19 nt, Artificial Sequence
  Description of Artificial Sequence: Synthetic oligonucleotide
agcacgaggguguccgaac

SEQ ID NO: 1220067 - RNA, 19 nt, Artificial Sequence
  Description of Artificial Sequence: Synthetic oligonucleotide
agacccagacccaggaggc

SEQ ID NO: 1220068 - RNA, 19 nt, Artificial Sequence
  Description of Artificial Sequence: Synthetic oligonucleotide
uuguagagccguaggcagc

SEQ ID NO: 1220069 - RNA, 19 nt, Artificial Sequence
  Description of Artificial Sequence: Synthetic oligonucleotide
gacggaggagagaaagggg

SEQ ID NO: 1220070 - RNA, 19 nt, Artificial Sequence
  Description of Artificial Sequence: Synthetic oligonucleotide
ccuaugcucagacaugacg

SEQ ID NO: 1220071 - RNA, 19 nt, Artificial Sequence
  Description of Artificial Sequence: Synthetic oligonucleotide
ggaggcuucggucuucacg

SEQ ID NO: 1220072 - RNA, 19 nt, Artificial Sequence
  Description of Artificial Sequence: Synthetic oligonucleotide
gaucguggaagccacccga

SEQ ID NO: 1220073 - RNA, 19 nt, Artificial Sequence
  Description of Artificial Sequence: Synthetic oligonucleotide
ggagggguagcaaacagcc

SEQ ID NO: 1220074 - RNA, 19 nt, Artificial Sequence
  Description of Artificial Sequence: Synthetic oligonucleotide
ggguaagcaagccagguca

SEQ ID NO: 1220075 - RNA, 19 nt, Artificial Sequence
  Description of Artificial Sequence: Synthetic oligonucleotide
ucguggaagccacccgagg

SEQ ID NO: 1220076 - RNA, 19 nt, Artificial Sequence
  Description of Artificial Sequence: Synthetic oligonucleotide
auagagcuucccaugagcu

SEQ ID NO: 1220077 - RNA, 19 nt, Artificial Sequence
  Description of Artificial Sequence: Synthetic oligonucleotide
ucgcaucuucacaauggca

SEQ ID NO: 1220078 - RNA, 19 nt, Artificial Sequence
  Description of Artificial Sequence: Synthetic oligonucleotide
gacuccuaugcucagacau

SEQ ID NO: 1220079 - RNA, 19 nt, Artificial Sequence
  Description of Artificial Sequence: Synthetic oligonucleotide
uguagagccguaggcagcu

SEQ ID NO: 1220080 - RNA, 19 nt, Artificial Sequence
  Description of Artificial Sequence: Synthetic oligonucleotide
ucccugaugcucacauugc

SEQ ID NO: 1220081 - RNA, 19 nt, Artificial Sequence
  Description of Artificial Sequence: Synthetic oligonucleotide
auagccaaguugugugugu

SEQ ID NO: 1220082 - RNA, 19 nt, Artificial Sequence
  Description of Artificial Sequence: Synthetic oligonucleotide
augaaguagcgaucgugga

SEQ ID NO: 1220083 - RNA, 19 nt, Artificial Sequence
  Description of Artificial Sequence: Synthetic oligonucleotide
gcuuauagagcuucccaug

SEQ ID NO: 1220084 - RNA, 19 nt, Artificial Sequence
  Description of Artificial Sequence: Synthetic oligonucleotide
accaagcaugcagagcacg

SEQ ID NO: 1220085 - RNA, 19 nt, Artificial Sequence
  Description of Artificial Sequence: Synthetic oligonucleotide
uccgaaccuccuuguagag

SEQ ID NO: 1220086 - RNA, 19 nt, Artificial Sequence
  Description of Artificial Sequence: Synthetic oligonucleotide
cacggaacuucaucaugcc

SEQ ID NO: 1220087 - RNA, 19 nt, Artificial Sequence
  Description of Artificial Sequence: Synthetic oligonucleotide
gagcauugcaugacuggag

SEQ ID NO: 1220088 - RNA, 19 nt, Artificial Sequence
  Description of Artificial Sequence: Synthetic oligonucleotide
caccuugccggccuuguag

SEQ ID NO: 1220089 - RNA, 19 nt, Artificial Sequence
  Description of Artificial Sequence: Synthetic oligonucleotide
guugagaaugaaguagcga

SEQ ID NO: 1220090 - RNA, 19 nt, Artificial Sequence
  Description of Artificial Sequence: Synthetic oligonucleotide
cacucgagaggguucugag

SEQ ID NO: 1220091 - RNA, 19 nt, Artificial Sequence
  Description of Artificial Sequence: Synthetic oligonucleotide
auacaacaacauggacucc

SEQ ID NO: 1220092 - RNA, 19 nt, Artificial Sequence
  Description of Artificial Sequence: Synthetic oligonucleotide
agaaugaaguagcgaucgu

SEQ ID NO: 1220093 - RNA, 19 nt, Artificial Sequence
  Description of Artificial Sequence: Synthetic oligonucleotide
uccggcgcauuucauuuuc

SEQ ID NO: 1220094 - RNA, 19 nt, Artificial Sequence
  Description of Artificial Sequence: Synthetic oligonucleotide
caugcaccacugugaagcc

SEQ ID NO: 1220095 - RNA, 19 nt, Artificial Sequence
  Description of Artificial Sequence: Synthetic oligonucleotide
gcagcauacaccagaagug

SEQ ID NO: 1220096 - RNA, 19 nt, Artificial Sequence
  Description of Artificial Sequence: Synthetic oligonucleotide
acaccaggccgucaugcug

SEQ ID NO: 1220097 - RNA, 19 nt, Artificial Sequence
  Description of Artificial Sequence: Synthetic oligonucleotide
acuccggcgcauuucauuu

SEQ ID NO: 1220098 - RNA, 19 nt, Artificial Sequence
  Description of Artificial Sequence: Synthetic oligonucleotide
acgaggguguccgaacagg

SEQ ID NO: 1220099 - RNA, 19 nt, Artificial Sequence
  Description of Artificial Sequence: Synthetic oligonucleotide
ucuccgcguagugcaaugg

SEQ ID NO: 1220100 - RNA, 19 nt, Artificial Sequence
  Description of Artificial Sequence: Synthetic oligonucleotide
uacacccagguagacuuug

SEQ ID NO: 1220101 - RNA, 19 nt, Artificial Sequence
  Description of Artificial Sequence: Synthetic oligonucleotide
ugcccgggacacucgagag

SEQ ID NO: 1220102 - RNA, 19 nt, Artificial Sequence
  Description of Artificial Sequence: Synthetic oligonucleotide
uccccgugugucccgcugg

SEQ ID NO: 1220103 - RNA, 19 nt, Artificial Sequence
  Description of Artificial Sequence: Synthetic oligonucleotide
caggagcauugcaugacug

SEQ ID NO: 1220104 - RNA, 19 nt, Artificial Sequence
  Description of Artificial Sequence: Synthetic oligonucleotide
ugcaaugggcgcucugccu

SEQ ID NO: 1220105 - RNA, 19 nt, Artificial Sequence
  Description of Artificial Sequence: Synthetic oligonucleotide
cuccgcguagugcaauggg

SEQ ID NO: 1220106 - RNA, 19 nt, Artificial Sequence
  Description of Artificial Sequence: Synthetic oligonucleotide
gaugugggcuguggguacg

SEQ ID NO: 1220107 - RNA, 19 nt, Artificial Sequence
  Description of Artificial Sequence: Synthetic oligonucleotide
guaagcaagccaggucagg

SEQ ID NO: 1220108 - RNA, 19 nt, Artificial Sequence
  Description of Artificial Sequence: Synthetic oligonucleotide
uggagccuauaggaagggg

SEQ ID NO: 1220109 - RNA, 19 nt, Artificial Sequence
  Description of Artificial Sequence: Synthetic oligonucleotide
guugaccucaaagcaaguc

SEQ ID NO: 1220110 - RNA, 19 nt, Artificial Sequence
  Description of Artificial Sequence: Synthetic oligonucleotide
uucuccgcguagugcaaug

SEQ ID NO: 1220111 - RNA, 19 nt, Artificial Sequence
  Description of Artificial Sequence: Synthetic oligonucleotide
cuccgaaccuccuuguaga

SEQ ID NO: 1220112 - RNA, 19 nt, Artificial Sequence
  Description of Artificial Sequence: Synthetic oligonucleotide
agcccauguacaaugggca

SEQ ID NO: 1220113 - RNA, 19 nt, Artificial Sequence
  Description of Artificial Sequence: Synthetic oligonucleotide
gugaagccccagcaaguag

SEQ ID NO: 1220114 - RNA, 19 nt, Artificial Sequence
  Description of Artificial Sequence: Synthetic oligonucleotide
guaggcagcugcuguugag

SEQ ID NO: 1220115 - RNA, 19 nt, Artificial Sequence
  Description of Artificial Sequence: Synthetic oligonucleotide
uaguccugcccaucugucu

SEQ ID NO: 1220116 - RNA, 19 nt, Artificial Sequence
  Description of Artificial Sequence: Synthetic oligonucleotide
gccgucaugcuguacagac

SEQ ID NO: 1220117 - RNA, 19 nt, Artificial Sequence
  Description of Artificial Sequence: Synthetic oligonucleotide
augcucagacaugacggag

SEQ ID NO: 1220118 - RNA, 19 nt, Artificial Sequence
  Description of Artificial Sequence: Synthetic oligonucleotide
ggacugguacuucuugacc

SEQ ID NO: 1220119 - RNA, 19 nt, Artificial Sequence
  Description of Artificial Sequence: Synthetic oligonucleotide
uugaggcucuugacaggcc

SEQ ID NO: 1220120 - RNA, 19 nt, Artificial Sequence
  Description of Artificial Sequence: Synthetic oligonucleotide
cucguugaccucaaagcaa

SEQ ID NO: 1220121 - RNA, 19 nt, Artificial Sequence
  Description of Artificial Sequence: Synthetic oligonucleotide
augcaccacugugaagccc

SEQ ID NO: 1220122 - RNA, 19 nt, Artificial Sequence
  Description of Artificial Sequence: Synthetic oligonucleotide
cccuggguaagcaagccag

SEQ ID NO: 1220123 - RNA, 19 nt, Artificial Sequence
  Description of Artificial Sequence: Synthetic oligonucleotide
acaaacucaaggagaggga

SEQ ID NO: 1220124 - RNA, 19 nt, Artificial Sequence
  Description of Artificial Sequence: Synthetic oligonucleotide
ugcugucauggaugcuggg

SEQ ID NO: 1220125 - RNA, 19 nt, Artificial Sequence
  Description of Artificial Sequence: Synthetic oligonucleotide
gaaggcugccacacuccgg

SEQ ID NO: 1220126 - RNA, 19 nt, Artificial Sequence
  Description of Artificial Sequence: Synthetic oligonucleotide
ugugaagccccagcaagua

SEQ ID NO: 1220127 - RNA, 19 nt, Artificial Sequence
  Description of Artificial Sequence: Synthetic oligonucleotide
gaacgacuccuaugcucag

SEQ ID NO: 1220128 - RNA, 19 nt, Artificial Sequence
  Description of Artificial Sequence: Synthetic oligonucleotide
cucaaggagagggacccug

SEQ ID NO: 1220129 - RNA, 19 nt, Artificial Sequence
  Description of Artificial Sequence: Synthetic oligonucleotide
ccggaguuccaucugagug

SEQ ID NO: 1220130 - RNA, 19 nt, Artificial Sequence
  Description of Artificial Sequence: Synthetic oligonucleotide
aaucccauugucagcccau

SEQ ID NO: 1220131 - RNA, 19 nt, Artificial Sequence
  Description of Artificial Sequence: Synthetic oligonucleotide
gacccaggaggcuucgguc

SEQ ID NO: 1220132 - RNA, 19 nt, Artificial Sequence
  Description of Artificial Sequence: Synthetic oligonucleotide
ucuuuacacccagguagac

SEQ ID NO: 1220133 - RNA, 19 nt, Artificial Sequence
  Description of Artificial Sequence: Synthetic oligonucleotide
ucuugacaugcuguucagu

SEQ ID NO: 1220134 - RNA, 19 nt, Artificial Sequence
  Description of Artificial Sequence: Synthetic oligonucleotide
gggcccaaacacaauagcc

SEQ ID NO: 1220135 - RNA, 19 nt, Artificial Sequence
  Description of Artificial Sequence: Synthetic oligonucleotide
aacgacuccuaugcucaga

SEQ ID NO: 1220136 - RNA, 19 nt, Artificial Sequence
  Description of Artificial Sequence: Synthetic oligonucleotide
caaugggcgcucugccucc

SEQ ID NO: 1220137 - RNA, 19 nt, Artificial Sequence
  Description of Artificial Sequence: Synthetic oligonucleotide
uccuaugcucagacaugac

SEQ ID NO: 1220138 - RNA, 19 nt, Artificial Sequence
  Description of Artificial Sequence: Synthetic oligonucleotide
uacggcuuccccguguguc

SEQ ID NO: 1220139 - RNA, 19 nt, Artificial Sequence
  Description of Artificial Sequence: Synthetic oligonucleotide
gcauugcaugacuggagag

SEQ ID NO: 1220140 - RNA, 19 nt, Artificial Sequence
  Description of Artificial Sequence: Synthetic oligonucleotide
acuccuaugcucagacaug

SEQ ID NO: 1220141 - RNA, 19 nt, Artificial Sequence
  Description of Artificial Sequence: Synthetic oligonucleotide
ccgcguagugcaaugggcg

SEQ ID NO: 1220142 - RNA, 19 nt, Artificial Sequence
  Description of Artificial Sequence: Synthetic oligonucleotide
gcggucuaggaucuccagg

SEQ ID NO: 1220143 - RNA, 19 nt, Artificial Sequence
  Description of Artificial Sequence: Synthetic oligonucleotide
ugaccuccccaaguccuag

SEQ ID NO: 1220144 - RNA, 19 nt, Artificial Sequence
  Description of Artificial Sequence: Synthetic oligonucleotide
gacaugcuguucagucucc

SEQ ID NO: 1220145 - RNA, 19 nt, Artificial Sequence
  Description of Artificial Sequence: Synthetic oligonucleotide
gucaggagcauugcaugac

SEQ ID NO: 1220146 - RNA, 19 nt, Artificial Sequence
  Description of Artificial Sequence: Synthetic oligonucleotide
uucucaggccggugacucc

SEQ ID NO: 1220147 - RNA, 19 nt, Artificial Sequence
  Description of Artificial Sequence: Synthetic oligonucleotide
ucaucaugccaugcuuggu

SEQ ID NO: 1220148 - RNA, 19 nt, Artificial Sequence
  Description of Artificial Sequence: Synthetic oligonucleotide
uuccccgugugucccgcug

SEQ ID NO: 1220149 - RNA, 19 nt, Artificial Sequence
  Description of Artificial Sequence: Synthetic oligonucleotide
cuccuaugcucagacauga

SEQ ID NO: 1220150 - RNA, 19 nt, Artificial Sequence
  Description of Artificial Sequence: Synthetic oligonucleotide
ggugggcucccucccagcg

SEQ ID NO: 1220151 - RNA, 19 nt, Artificial Sequence
  Description of Artificial Sequence: Synthetic oligonucleotide
guacacaguacagauggcu

SEQ ID NO: 1220152 - RNA, 19 nt, Artificial Sequence
  Description of Artificial Sequence: Synthetic oligonucleotide
uagugcaaugggcgcucug

SEQ ID NO: 1220153 - RNA, 19 nt, Artificial Sequence
  Description of Artificial Sequence: Synthetic oligonucleotide
gaaccuccuuguagagccg

SEQ ID NO: 1220154 - RNA, 19 nt, Artificial Sequence
  Description of Artificial Sequence: Synthetic oligonucleotide
cuggagccuauaggaaggg

SEQ ID NO: 1220155 - RNA, 19 nt, Artificial Sequence
  Description of Artificial Sequence: Synthetic oligonucleotide
cacgaggguguccgaacag

SEQ ID NO: 1220156 - RNA, 19 nt, Artificial Sequence
  Description of Artificial Sequence: Synthetic oligonucleotide
ugggccucccugcagcaua

SEQ ID NO: 1220157 - RNA, 19 nt, Artificial Sequence
  Description of Artificial Sequence: Synthetic oligonucleotide
agauggcugauaagggccu

SEQ ID NO: 1220158 - RNA, 19 nt, Artificial Sequence
  Description of Artificial Sequence: Synthetic oligonucleotide
gagagggacccuggguaag

SEQ ID NO: 1220159 - RNA, 19 nt, Artificial Sequence
  Description of Artificial Sequence: Synthetic oligonucleotide
aagagggaucagcgacaca

SEQ ID NO: 1220160 - RNA, 19 nt, Artificial Sequence
  Description of Artificial Sequence: Synthetic oligonucleotide
cuaggaucuccagggcaag

SEQ ID NO: 1220161 - RNA, 19 nt, Artificial Sequence
  Description of Artificial Sequence: Synthetic oligonucleotide
ccacucuggagccuauagg

SEQ ID NO: 1220162 - RNA, 19 nt, Artificial Sequence
  Description of Artificial Sequence: Synthetic oligonucleotide
cuuguaguccugcccaucu

SEQ ID NO: 1220163 - RNA, 19 nt, Artificial Sequence
  Description of Artificial Sequence: Synthetic oligonucleotide
cacacuccggcgcauuuca

SEQ ID NO: 1220164 - RNA, 19 nt, Artificial Sequence
  Description of Artificial Sequence: Synthetic oligonucleotide
cuguggguacggcuucccc

SEQ ID NO: 1220165 - RNA, 19 nt, Artificial Sequence
  Description of Artificial Sequence: Synthetic oligonucleotide
aguaguccuuuucccugau

SEQ ID NO: 1220166 - RNA, 19 nt, Artificial Sequence
  Description of Artificial Sequence: Synthetic oligonucleotide
cacgaagagggaucagcga

SEQ ID NO: 1220167 - RNA, 19 nt, Artificial Sequence
  Description of Artificial Sequence: Synthetic oligonucleotide
ggagcauugcaugacugga

SEQ ID NO: 1220168 - RNA, 19 nt, Artificial Sequence
  Description of Artificial Sequence: Synthetic oligonucleotide
gcucuugacaggccacucc

SEQ ID NO: 1220169 - RNA, 19 nt, Artificial Sequence
  Description of Artificial Sequence: Synthetic oligonucleotide
gguaagcaagccaggucag

SEQ ID NO: 1220170 - RNA, 19 nt, Artificial Sequence
  Description of Artificial Sequence: Synthetic oligonucleotide
gcaaugggcgcucugccuc

SEQ ID NO: 1220171 - RNA, 19 nt, Artificial Sequence
  Description of Artificial Sequence: Synthetic oligonucleotide
gccacucgcaucuucacaa

SEQ ID NO: 1220172 - RNA, 19 nt, Artificial Sequence
  Description of Artificial Sequence: Synthetic oligonucleotide
aucguggaagccacccgag

SEQ ID NO: 1220173 - RNA, 19 nt, Artificial Sequence
  Description of Artificial Sequence: Synthetic oligonucleotide
ugucuaugcccagcccaug

SEQ ID NO: 1220174 - RNA, 19 nt, Artificial Sequence
  Description of Artificial Sequence: Synthetic oligonucleotide
gcccauguacaaugggcag

SEQ ID NO: 1220175 - RNA, 19 nt, Artificial Sequence
  Description of Artificial Sequence: Synthetic oligonucleotide
caguaguccuuuucccuga

SEQ ID NO: 1220176 - RNA, 19 nt, Artificial Sequence
  Description of Artificial Sequence: Synthetic oligonucleotide
acacucgagaggguucuga

SEQ ID NO: 1220177 - RNA, 19 nt, Artificial Sequence
  Description of Artificial Sequence: Synthetic oligonucleotide
gguacggcuuccccgugug

SEQ ID NO: 1220178 - RNA, 19 nt, Artificial Sequence
  Description of Artificial Sequence: Synthetic oligonucleotide
ccacauagugguugaugag

SEQ ID NO: 1220179 - RNA, 19 nt, Artificial Sequence
  Description of Artificial Sequence: Synthetic oligonucleotide
uccgaacaggaaggcuucc

SEQ ID NO: 1220180 - RNA, 19 nt, Artificial Sequence
  Description of Artificial Sequence: Synthetic oligonucleotide
uuacacccagguagacuuu

SEQ ID NO: 1220181 - RNA, 19 nt, Artificial Sequence
  Description of Artificial Sequence: Synthetic oligonucleotide
gcccagcccauguacaaug

SEQ ID NO: 1220182 - RNA, 19 nt, Artificial Sequence
  Description of Artificial Sequence: Synthetic oligonucleotide
ugccaugcuuggugucacc

SEQ ID NO: 1220183 - RNA, 19 nt, Artificial Sequence
  Description of Artificial Sequence: Synthetic oligonucleotide
caccaagcaugcagagcac

SEQ ID NO: 1220184 - RNA, 19 nt, Artificial Sequence
  Description of Artificial Sequence: Synthetic oligonucleotide
aggaggcuucggucuucac

SEQ ID NO: 1220185 - RNA, 19 nt, Artificial Sequence
  Description of Artificial Sequence: Synthetic oligonucleotide
gcccaaacacaauagccaa

SEQ ID NO: 1220186 - RNA, 19 nt, Artificial Sequence
  Description of Artificial Sequence: Synthetic oligonucleotide
augugggcuguggguacgg

SEQ ID NO: 1220187 - RNA, 19 nt, Artificial Sequence
  Description of Artificial Sequence: Synthetic oligonucleotide
cacccgagggcagacccag

SEQ ID NO: 1220188 - RNA, 19 nt, Artificial Sequence
  Description of Artificial Sequence: Synthetic oligonucleotide
agcgaucguggaagccacc

SEQ ID NO: 1220189 - RNA, 19 nt, Artificial Sequence
  Description of Artificial Sequence: Synthetic oligonucleotide
gaagccacccgagggcaga

SEQ ID NO: 1220190 - RNA, 19 nt, Artificial Sequence
  Description of Artificial Sequence: Synthetic oligonucleotide
gaucagcgacacacugccc

SEQ ID NO: 1220191 - RNA, 19 nt, Artificial Sequence
  Description of Artificial Sequence: Synthetic oligonucleotide
acauugcggcggucuagga

SEQ ID NO: 1220192 - RNA, 19 nt, Artificial Sequence
  Description of Artificial Sequence: Synthetic oligonucleotide
agagccguaggcagcugcu

SEQ ID NO: 1220193 - RNA, 19 nt, Artificial Sequence
  Description of Artificial Sequence: Synthetic oligonucleotide
ccagccaaggagccugugc

SEQ ID NO: 1220194 - RNA, 19 nt, Artificial Sequence
  Description of Artificial Sequence: Synthetic oligonucleotide
cccauguacaaugggcagc

SEQ ID NO: 1220195 - RNA, 19 nt, Artificial Sequence
  Description of Artificial Sequence: Synthetic oligonucleotide
cccaugagcucccuuccag

SEQ ID NO: 1220196 - RNA, 19 nt, Artificial Sequence
  Description of Artificial Sequence: Synthetic oligonucleotide
guccgaacaggaaggcuuc

SEQ ID NO: 1220197 - RNA, 19 nt, Artificial Sequence
  Description of Artificial Sequence: Synthetic oligonucleotide
ccagcccauguacaauggg

SEQ ID NO: 1220198 - RNA, 19 nt, Artificial Sequence
  Description of Artificial Sequence: Synthetic oligonucleotide
uggguacggcuuccccgug

SEQ ID NO: 1220199 - RNA, 19 nt, Artificial Sequence
  Description of Artificial Sequence: Synthetic oligonucleotide
auccggaccucaggcacug

SEQ ID NO: 1220200 - RNA, 19 nt, Artificial Sequence
  Description of Artificial Sequence: Synthetic oligonucleotide
gguguccgaacaggaaggc

SEQ ID NO: 1220201 - RNA, 19 nt, Artificial Sequence
  Description of Artificial Sequence: Synthetic oligonucleotide
gugucccgcugguucacac

SEQ ID NO: 1220202 - RNA, 19 nt, Artificial Sequence
  Description of Artificial Sequence: Synthetic oligonucleotide
gagccguaggcagcugcug

SEQ ID NO: 1220203 - RNA, 19 nt, Artificial Sequence
  Description of Artificial Sequence: Synthetic oligonucleotide
ucaggccggugacuccgaa

SEQ ID NO: 1220204 - RNA, 19 nt, Artificial Sequence
  Description of Artificial Sequence: Synthetic oligonucleotide
gcgaucguggaagccaccc

SEQ ID NO: 1220205 - RNA, 19 nt, Artificial Sequence
  Description of Artificial Sequence: Synthetic oligonucleotide
aaugggcgcucugccuccu

SEQ ID NO: 1220206 - RNA, 19 nt, Artificial Sequence
  Description of Artificial Sequence: Synthetic oligonucleotide
gccaugcuuggugucaccc

SEQ ID NO: 1220207 - RNA, 19 nt, Artificial Sequence
  Description of Artificial Sequence: Synthetic oligonucleotide
cuuuacacccagguagacu

SEQ ID NO: 1220208 - RNA, 19 nt, Artificial Sequence
  Description of Artificial Sequence: Synthetic oligonucleotide
cugcccgggacacucgaga

SEQ ID NO: 1220209 - RNA, 19 nt, Artificial Sequence
  Description of Artificial Sequence: Synthetic oligonucleotide
gcuucggucuucacggaac

SEQ ID NO: 1220210 - RNA, 19 nt, Artificial Sequence
  Description of Artificial Sequence: Synthetic oligonucleotide
ugugucccgcugguucaca

SEQ ID NO: 1220211 - RNA, 19 nt, Artificial Sequence
  Description of Artificial Sequence: Synthetic oligonucleotide
gaggguguccgaacaggaa

SEQ ID NO: 1220212 - RNA, 19 nt, Artificial Sequence
  Description of Artificial Sequence: Synthetic oligonucleotide
gagggguagcaaacagcca

SEQ ID NO: 1220213 - RNA, 19 nt, Artificial Sequence
  Description of Artificial Sequence: Synthetic oligonucleotide
cuucacggaacuucaucau

SEQ ID NO: 1220214 - RNA, 19 nt, Artificial Sequence
  Description of Artificial Sequence: Synthetic oligonucleotide
gacuccgaaccuccuugua

SEQ ID NO: 1220215 - RNA, 19 nt, Artificial Sequence
  Description of Artificial Sequence: Synthetic oligonucleotide
agagcacgaggguguccga

SEQ ID NO: 1220216 - RNA, 19 nt, Artificial Sequence
  Description of Artificial Sequence: Synthetic oligonucleotide
caccagaagugggcugacc

SEQ ID NO: 1220217 - RNA, 19 nt, Artificial Sequence
  Description of Artificial Sequence: Synthetic oligonucleotide
ccaagcaugcagagcacga

SEQ ID NO: 1220218 - RNA, 19 nt, Artificial Sequence
  Description of Artificial Sequence: Synthetic oligonucleotide
ugccacgaagagggaucag

SEQ ID NO: 1220219 - RNA, 19 nt, Artificial Sequence
  Description of Artificial Sequence: Synthetic oligonucleotide
ggaagguggcaaaccacuc

SEQ ID NO: 1220220 - RNA, 19 nt, Artificial Sequence
  Description of Artificial Sequence: Synthetic oligonucleotide
ccauguacaaugggcagca

SEQ ID NO: 1220221 - RNA, 19 nt, Artificial Sequence
  Description of Artificial Sequence: Synthetic oligonucleotide
gacacucgagaggguucug

SEQ ID NO: 1220222 - RNA, 19 nt, Artificial Sequence
  Description of Artificial Sequence: Synthetic oligonucleotide
ggagagggacccuggguaa

SEQ ID NO: 1220223 - RNA, 19 nt, Artificial Sequence
  Description of Artificial Sequence: Synthetic oligonucleotide
cgggaaaaucccauuguca

SEQ ID NO: 1220224 - RNA, 19 nt, Artificial Sequence
  Description of Artificial Sequence: Synthetic oligonucleotide
gggcugaccuccccaaguc

SEQ ID NO: 1220225 - RNA, 19 nt, Artificial Sequence
  Description of Artificial Sequence: Synthetic oligonucleotide
acaguacagauggcugaua

SEQ ID NO: 1220226 - RNA, 19 nt, Artificial Sequence
  Description of Artificial Sequence: Synthetic oligonucleotide
uucggucuucacggaacuu

SEQ ID NO: 1220227 - RNA, 19 nt, Artificial Sequence
  Description of Artificial Sequence: Synthetic oligonucleotide
cugccacgaagagggauca

SEQ ID NO: 1220228 - RNA, 19 nt, Artificial Sequence
  Description of Artificial Sequence: Synthetic oligonucleotide
gcacgaggguguccgaaca

SEQ ID NO: 1220229 - RNA, 19 nt, Artificial Sequence
  Description of Artificial Sequence: Synthetic oligonucleotide
cgcguagugcaaugggcgc

SEQ ID NO: 1220230 - RNA, 19 nt, Artificial Sequence
  Description of Artificial Sequence: Synthetic oligonucleotide
gagcacgaggguguccgaa

SEQ ID NO: 1220231 - RNA, 19 nt, Artificial Sequence
  Description of Artificial Sequence: Synthetic oligonucleotide
cucccagcggggccccaag

SEQ ID NO: 1220232 - RNA, 19 nt, Artificial Sequence
  Description of Artificial Sequence: Synthetic oligonucleotide
agucaggaugugggcugug

SEQ ID NO: 1220233 - RNA, 19 nt, Artificial Sequence
  Description of Artificial Sequence: Synthetic oligonucleotide
acucaaggagagggacccu

SEQ ID NO: 1220234 - RNA, 19 nt, Artificial Sequence
  Description of Artificial Sequence: Synthetic oligonucleotide
cgaucguggaagccacccg

SEQ ID NO: 1220235 - RNA, 19 nt, Artificial Sequence
  Description of Artificial Sequence: Synthetic oligonucleotide
gggguagcaaacagccaca

SEQ ID NO: 1220236 - RNA, 19 nt, Artificial Sequence
  Description of Artificial Sequence: Synthetic oligonucleotide
gagggaucagcgacacacu

SEQ ID NO: 1220237 - RNA, 19 nt, Artificial Sequence
  Description of Artificial Sequence: Synthetic oligonucleotide
ggguucugagggccacacc

SEQ ID NO: 1220238 - RNA, 19 nt, Artificial Sequence
  Description of Artificial Sequence: Synthetic oligonucleotide
ccgaaccuccuuguagagc

SEQ ID NO: 1220239 - RNA, 19 nt, Artificial Sequence
  Description of Artificial Sequence: Synthetic oligonucleotide
gaccucucuugcagagcuc

SEQ ID NO: 1220240 - RNA, 19 nt, Artificial Sequence
  Description of Artificial Sequence: Synthetic oligonucleotide
caccacugugaagccccag

SEQ ID NO: 1220241 - RNA, 19 nt, Artificial Sequence
  Description of Artificial Sequence: Synthetic oligonucleotide
cugaccuccccaaguccua

SEQ ID NO: 1220242 - RNA, 19 nt, Artificial Sequence
  Description of Artificial Sequence: Synthetic oligonucleotide
gggacacucgagaggguuc

SEQ ID NO: 1220243 - RNA, 19 nt, Artificial Sequence
  Description of Artificial Sequence: Synthetic oligonucleotide
ggcuucggucuucacggaa

SEQ ID NO: 1220244 - RNA, 19 nt, Artificial Sequence
  Description of Artificial Sequence: Synthetic oligonucleotide
cacugcccgggacacucga

SEQ ID NO: 1220245 - RNA, 19 nt, Artificial Sequence
  Description of Artificial Sequence: Synthetic oligonucleotide
guagagccguaggcagcug

SEQ ID NO: 1220246 - RNA, 19 nt, Artificial Sequence
  Description of Artificial Sequence: Synthetic oligonucleotide
cccagcggggccccaagac

SEQ ID NO: 1220247 - RNA, 19 nt, Artificial Sequence
  Description of Artificial Sequence: Synthetic oligonucleotide
cagagguaccacugcugcu

SEQ ID NO: 1220248 - RNA, 19 nt, Artificial Sequence
  Description of Artificial Sequence: Synthetic oligonucleotide
ggaagccacccgagggcag

SEQ ID NO: 1220249 - RNA, 19 nt, Artificial Sequence
  Description of Artificial Sequence: Synthetic oligonucleotide
cggcgcauuucauuuucac

SEQ ID NO: 1220250 - RNA, 19 nt, Artificial Sequence
  Description of Artificial Sequence: Synthetic oligonucleotide
gugugucccgcugguucac

SEQ ID NO: 1220251 - RNA, 19 nt, Artificial Sequence
  Description of Artificial Sequence: Synthetic oligonucleotide
ccaugcuuggugucaccca

SEQ ID NO: 1220252 - RNA, 19 nt, Artificial Sequence
  Description of Artificial Sequence: Synthetic oligonucleotide
cacaguacagauggcugau

SEQ ID NO: 1220253 - RNA, 19 nt, Artificial Sequence
  Description of Artificial Sequence: Synthetic oligonucleotide
ccccucccgggaaaauccc

SEQ ID NO: 1220254 - RNA, 19 nt, Artificial Sequence
  Description of Artificial Sequence: Synthetic oligonucleotide
gcugaccuccccaaguccu

SEQ ID NO: 1220255 - RNA, 19 nt, Artificial Sequence
  Description of Artificial Sequence: Synthetic oligonucleotide
gcuguggguacggcuuccc

SEQ ID NO: 1220256 - RNA, 19 nt, Artificial Sequence
  Description of Artificial Sequence: Synthetic oligonucleotide
guagguggccgcaguuucu

SEQ ID NO: 1220257 - RNA, 19 nt, Artificial Sequence
  Description of Artificial Sequence: Synthetic oligonucleotide
guguccgaacaggaaggcu

SEQ ID NO: 1220258 - RNA, 19 nt, Artificial Sequence
  Description of Artificial Sequence: Synthetic oligonucleotide
accaggccgucaugcugua

SEQ ID NO: 1220259 - RNA, 19 nt, Artificial Sequence
  Description of Artificial Sequence: Synthetic oligonucleotide
gggugggcucccucccagc

SEQ ID NO: 1220260 - RNA, 19 nt, Artificial Sequence
  Description of Artificial Sequence: Synthetic oligonucleotide
ggacacucgagaggguucu

SEQ ID NO: 1220261 - RNA, 19 nt, Artificial Sequence
  Description of Artificial Sequence: Synthetic oligonucleotide
cucaggccggugacuccga

SEQ ID NO: 1220262 - RNA, 19 nt, Artificial Sequence
  Description of Artificial Sequence: Synthetic oligonucleotide
gccggugacuccgaaccuc

SEQ ID NO: 1220263 - RNA, 19 nt, Artificial Sequence
  Description of Artificial Sequence: Synthetic oligonucleotide
gagggccacaccaggccgu

SEQ ID NO: 1220264 - RNA, 19 nt, Artificial Sequence
  Description of Artificial Sequence: Synthetic oligonucleotide
cgaggguguccgaacagga

SEQ ID NO: 1220265 - RNA, 19 nt, Artificial Sequence
  Description of Artificial Sequence: Synthetic oligonucleotide
cugucucaugcaccacugu

SEQ ID NO: 1220266 - RNA, 19 nt, Artificial Sequence
  Description of Artificial Sequence: Synthetic oligonucleotide
ccguaggcagcugcuguug

SEQ ID NO: 1220267 - RNA, 19 nt, Artificial Sequence
  Description of Artificial Sequence: Synthetic oligonucleotide
gguucacaccaagcaugca

SEQ ID NO: 1220268 - RNA, 19 nt, Artificial Sequence
  Description of Artificial Sequence: Synthetic oligonucleotide
cccauccggaccucaggca

SEQ ID NO: 1220269 - RNA, 19 nt, Artificial Sequence
  Description of Artificial Sequence: Synthetic oligonucleotide
ggccccucccgggaaaauc

SEQ ID NO: 1220270 - RNA, 19 nt, Artificial Sequence
  Description of Artificial Sequence: Synthetic oligonucleotide
gauggcugauaagggccuu

SEQ ID NO: 1220271 - RNA, 19 nt, Artificial Sequence
  Description of Artificial Sequence: Synthetic oligonucleotide
ggugacuccgaaccuccuu

SEQ ID NO: 1220272 - RNA, 19 nt, Artificial Sequence
  Description of Artificial Sequence: Synthetic oligonucleotide
cguagugcaaugggcgcuc

SEQ ID NO: 1220273 - RNA, 19 nt, Artificial Sequence
  Description of Artificial Sequence: Synthetic oligonucleotide
ggucggcagugaaggcugc

SEQ ID NO: 1220274 - RNA, 19 nt, Artificial Sequence
  Description of Artificial Sequence: Synthetic oligonucleotide
gacccagacccaggaggcu

SEQ ID NO: 1220275 - RNA, 19 nt, Artificial Sequence
  Description of Artificial Sequence: Synthetic oligonucleotide
cacugccacgaagagggau

SEQ ID NO: 1220276 - RNA, 19 nt, Artificial Sequence
  Description of Artificial Sequence: Synthetic oligonucleotide
cccgggaaaaucccauugu

SEQ ID NO: 1220277 - RNA, 19 nt, Artificial Sequence
  Description of Artificial Sequence: Synthetic oligonucleotide
ccccaagaccucucuugca

SEQ ID NO: 1220278 - RNA, 19 nt, Artificial Sequence
  Description of Artificial Sequence: Synthetic oligonucleotide
guacggcuuccccgugugu

SEQ ID NO: 1220279 - RNA, 19 nt, Artificial Sequence
  Description of Artificial Sequence: Synthetic oligonucleotide
guagugcaaugggcgcucu

SEQ ID NO: 1220280 - RNA, 19 nt, Artificial Sequence
  Description of Artificial Sequence: Synthetic oligonucleotide
ggccgucaugcuguacaga

SEQ ID NO: 1220281 - RNA, 19 nt, Artificial Sequence
  Description of Artificial Sequence: Synthetic oligonucleotide
gcguagugcaaugggcgcu

SEQ ID NO: 1220282 - RNA, 19 nt, Artificial Sequence
  Description of Artificial Sequence: Synthetic oligonucleotide
ccggcgcauuucauuuuca

SEQ ID NO: 1220283 - RNA, 19 nt, Artificial Sequence
  Description of Artificial Sequence: Synthetic oligonucleotide
cuucuccgcguagugcaau

SEQ ID NO: 1220284 - RNA, 19 nt, Artificial Sequence
  Description of Artificial Sequence: Synthetic oligonucleotide
cuccggcgcauuucauuuu

SEQ ID NO: 1220285 - RNA, 19 nt, Artificial Sequence
  Description of Artificial Sequence: Synthetic oligonucleotide
ccagaacgacuccuaugcu

SEQ ID NO: 1220286 - RNA, 19 nt, Artificial Sequence
  Description of Artificial Sequence: Synthetic oligonucleotide
acccgagggcagacccaga

SEQ ID NO: 1220287 - RNA, 19 nt, Artificial Sequence
  Description of Artificial Sequence: Synthetic oligonucleotide
cgacuccuaugcucagaca

SEQ ID NO: 1220288 - RNA, 19 nt, Artificial Sequence
  Description of Artificial Sequence: Synthetic oligonucleotide
cuuccccgugugucccgcu

SEQ ID NO: 1220289 - RNA, 19 nt, Artificial Sequence
  Description of Artificial Sequence: Synthetic oligonucleotide
cggcuuccccguguguccc

SEQ ID NO: 1220290 - RNA, 19 nt, Artificial Sequence
  Description of Artificial Sequence: Synthetic oligonucleotide
cccggaguuccaucugagu

SEQ ID NO: 1220291 - RNA, 19 nt, Artificial Sequence
  Description of Artificial Sequence: Synthetic oligonucleotide
ccgaacaggaaggcuuccu

SEQ ID NO: 1220292 - RNA, 19 nt, Artificial Sequence
  Description of Artificial Sequence: Synthetic oligonucleotide
cccagccaaggagccugug

SEQ ID NO: 1220293 - RNA, 19 nt, Artificial Sequence
  Description of Artificial Sequence: Synthetic oligonucleotide
ccaggccgucaugcuguac

SEQ ID NO: 1220294 - RNA, 19 nt, Artificial Sequence
  Description of Artificial Sequence: Synthetic oligonucleotide
cugccacucuggagccuau

SEQ ID NO: 1220295 - RNA, 19 nt, Artificial Sequence
  Description of Artificial Sequence: Synthetic oligonucleotide
ccacucgcaucuucacaau

SEQ ID NO: 1220296 - RNA, 19 nt, Artificial Sequence
  Description of Artificial Sequence: Synthetic oligonucleotide
gguagacuuugaggcucuu

SEQ ID NO: 1220297 - RNA, 19 nt, Artificial Sequence
  Description of Artificial Sequence: Synthetic oligonucleotide
cccaggaggcuucggucuu

SEQ ID NO: 1220298 - RNA, 19 nt, Artificial Sequence
  Description of Artificial Sequence: Synthetic oligonucleotide
gcggggccccaagaccucu

SEQ ID NO: 1220299 - RNA, 19 nt, Artificial Sequence
  Description of Artificial Sequence: Synthetic oligonucleotide
ccccgugugucccgcuggu

SEQ ID NO: 1220300 - RNA, 19 nt, Artificial Sequence
  Description of Artificial Sequence: Synthetic oligonucleotide
cgggacacucgagaggguu

SEQ ID NO: 1220301 - RNA, 19 nt, Artificial Sequence
  Description of Artificial Sequence: Synthetic oligonucleotide
ccgggacacucgagagggu

SEQ ID NO: 1220302 - RNA, 19 nt, Artificial Sequence
  Description of Artificial Sequence: Synthetic oligonucleotide
cccgugugucccgcugguu

SEQ ID NO: 1220303 - RNA, 19 nt, Artificial Sequence
  Description of Artificial Sequence: Synthetic oligonucleotide
aacuuuauaacauuauugg

SEQ ID NO: 1220304 - RNA, 19 nt, Artificial Sequence
  Description of Artificial Sequence: Synthetic oligonucleotide
aagggguagaaauaaauac

SEQ ID NO: 1220305 - RNA, 19 nt, Artificial Sequence
  Description of Artificial Sequence: Synthetic oligonucleotide
aaaagcuaaauguccaggc

SEQ ID NO: 1220306 - RNA, 19 nt, Artificial Sequence
  Description of Artificial Sequence: Synthetic oligonucleotide
acgaagaaaacuuauuugc

SEQ ID NO: 1220307 - RNA, 19 nt, Artificial Sequence
  Description of Artificial Sequence: Synthetic oligonucleotide
aaugugaacucuuugcaac

SEQ ID NO: 1220308 - RNA, 19 nt, Artificial Sequence
  Description of Artificial Sequence: Synthetic oligonucleotide
aaaccugucucagauaucc

SEQ ID NO: 1220309 - RNA, 19 nt, Artificial Sequence
  Description of Artificial Sequence: Synthetic oligonucleotide
uguucuaggaaugauaaag

SEQ ID NO: 1220310 - RNA, 19 nt, Artificial Sequence
  Description of Artificial Sequence: Synthetic oligonucleotide
uugguaaacaauaauuggc

SEQ ID NO: 1220311 - RNA, 19 nt, Artificial Sequence
  Description of Artificial Sequence: Synthetic oligonucleotide
aacaagucuagaccaauuc

SEQ ID NO: 1220312 - RNA, 19 nt, Artificial Sequence
  Description of Artificial Sequence: Synthetic oligonucleotide
ucaauaaaguaucaaggga

SEQ ID NO: 1220313 - RNA, 19 nt, Artificial Sequence
  Description of Artificial Sequence: Synthetic oligonucleotide
uauaaaggaagacaaucug

SEQ ID NO: 1220314 - RNA, 19 nt, Artificial Sequence
  Description of Artificial Sequence: Synthetic oligonucleotide
agaauugucgucuugccag

SEQ ID NO: 1220315 - RNA, 19 nt, Artificial Sequence
  Description of Artificial Sequence: Synthetic oligonucleotide
cuugguaaacaauaauugg

SEQ ID NO: 1220316 - RNA, 19 nt, Artificial Sequence
  Description of Artificial Sequence: Synthetic oligonucleotide
aauaguguuccccuggcug

SEQ ID NO: 1220317 - RNA, 19 nt, Artificial Sequence
  Description of Artificial Sequence: Synthetic oligonucleotide
uauaacauuauuggugugg

SEQ ID NO: 1220318 - RNA, 19 nt, Artificial Sequence
  Description of Artificial Sequence: Synthetic oligonucleotide
uaauuggcaacaaauuaag

SEQ ID NO: 1220319 - RNA, 19 nt, Artificial Sequence
  Description of Artificial Sequence: Synthetic oligonucleotide
uccuuuaauaaccaagaug

SEQ ID NO: 1220320 - RNA, 19 nt, Artificial Sequence
  Description of Artificial Sequence: Synthetic oligonucleotide
uauccuuuaauaaccaaga

SEQ ID NO: 1220321 - RNA, 19 nt, Artificial Sequence
  Description of Artificial Sequence: Synthetic oligonucleotide
aauugaauaguguuccccu

SEQ ID NO: 1220322 - RNA, 19 nt, Artificial Sequence
  Description of Artificial Sequence: Synthetic oligonucleotide
aagguaucaauaaaguauc

SEQ ID NO: 1220323 - RNA, 19 nt, Artificial Sequence
  Description of Artificial Sequence: Synthetic oligonucleotide
uaaacaauaauuggcaaca

SEQ ID NO: 1220324 - RNA, 19 nt, Artificial Sequence
  Description of Artificial Sequence: Synthetic oligonucleotide
uuuaaaggugucacaaaag

SEQ ID NO: 1220325 - RNA, 19 nt, Artificial Sequence
  Description of Artificial Sequence: Synthetic oligonucleotide
cuaaauagcaacguugugc

SEQ ID NO: 1220326 - RNA, 19 nt, Artificial Sequence
  Description of Artificial Sequence: Synthetic oligonucleotide
uccaaaagcaacaugcaac

SEQ ID NO: 1220327 - RNA, 19 nt, Artificial Sequence
  Description of Artificial Sequence: Synthetic oligonucleotide
uaaauagcaacguugugcu

SEQ ID NO: 1220328 - RNA, 19 nt, Artificial Sequence
  Description of Artificial Sequence: Synthetic oligonucleotide
auugcuaucuaccacaaaa

SEQ ID NO: 1220329 - RNA, 19 nt, Artificial Sequence
  Description of Artificial Sequence: Synthetic oligonucleotide
auaauuucaaauggguuac

SEQ ID NO: 1220330 - RNA, 19 nt, Artificial Sequence
  Description of Artificial Sequence: Synthetic oligonucleotide
ucuuaaugaagauauguuc

SEQ ID NO: 1220331 - RNA, 19 nt, Artificial Sequence
  Description of Artificial Sequence: Synthetic oligonucleotide
aguuuauacagaauugucg

SEQ ID NO: 1220332 - RNA, 19 nt, Artificial Sequence
  Description of Artificial Sequence: Synthetic oligonucleotide
aacauuauuggugugggcu

SEQ ID NO: 1220333 - RNA, 19 nt, Artificial Sequence
  Description of Artificial Sequence: Synthetic oligonucleotide
uacgaagaaaacuuauuug

SEQ ID NO: 1220334 - RNA, 19 nt, Artificial Sequence
  Description of Artificial Sequence: Synthetic oligonucleotide
aaaauaagacccuggguau

SEQ ID NO: 1220335 - RNA, 19 nt, Artificial Sequence
  Description of Artificial Sequence: Synthetic oligonucleotide
ucauuugacagccaaucga

SEQ ID NO: 1220336 - RNA, 19 nt, Artificial Sequence
  Description of Artificial Sequence: Synthetic oligonucleotide
aaguuuggcugguggaagc

SEQ ID NO: 1220337 - RNA, 19 nt, Artificial Sequence
  Description of Artificial Sequence: Synthetic oligonucleotide
aauccaaaccacauugacg

SEQ ID NO: 1220338 - RNA, 19 nt, Artificial Sequence
  Description of Artificial Sequence: Synthetic oligonucleotide
uguucuguuacggagagac

SEQ ID NO: 1220339 - RNA, 19 nt, Artificial Sequence
  Description of Artificial Sequence: Synthetic oligonucleotide
cuaucaaacauguccuugg

SEQ ID NO: 1220340 - RNA, 19 nt, Artificial Sequence
  Description of Artificial Sequence: Synthetic oligonucleotide
ugcuguaauauucugccca

SEQ ID NO: 1220341 - RNA, 19 nt, Artificial Sequence
  Description of Artificial Sequence: Synthetic oligonucleotide
uuagcguuuugaaaguuca

SEQ ID NO: 1220342 - RNA, 19 nt, Artificial Sequence
  Description of Artificial Sequence: Synthetic oligonucleotide
uuuuguuguaacaagucua

SEQ ID NO: 1220343 - RNA, 19 nt, Artificial Sequence
  Description of Artificial Sequence: Synthetic oligonucleotide
aacuaucauauacugggca

SEQ ID NO: 1220344 - RNA, 19 nt, Artificial Sequence
  Description of Artificial Sequence: Synthetic oligonucleotide
uuacgaagaaaacuuauuu

SEQ ID NO: 1220345 - RNA, 19 nt, Artificial Sequence
  Description of Artificial Sequence: Synthetic oligonucleotide
auaaccaagaugcaaacua

SEQ ID NO: 1220346 - RNA, 19 nt, Artificial Sequence
  Description of Artificial Sequence: Synthetic oligonucleotide
auacagaccaguuccuugg

SEQ ID NO: 1220347 - RNA, 19 nt, Artificial Sequence
  Description of Artificial Sequence: Synthetic oligonucleotide
aaagcuaaauguccaggcu

SEQ ID NO: 1220348 - RNA, 19 nt, Artificial Sequence
  Description of Artificial Sequence: Synthetic oligonucleotide
aguaaaauaucagcagaac

SEQ ID NO: 1220349 - RNA, 19 nt, Artificial Sequence
  Description of Artificial Sequence: Synthetic oligonucleotide
acaguaaaauaucagcaga

SEQ ID NO: 1220350 - RNA, 19 nt, Artificial Sequence
  Description of Artificial Sequence: Synthetic oligonucleotide
ugcuaaauagcaacguugu

SEQ ID NO: 1220351 - RNA, 19 nt, Artificial Sequence
  Description of Artificial Sequence: Synthetic oligonucleotide
guaauauucugcccaaacc

SEQ ID NO: 1220352 - RNA, 19 nt, Artificial Sequence
  Description of Artificial Sequence: Synthetic oligonucleotide
uuauacagaauugucgucu

SEQ ID NO: 1220353 - RNA, 19 nt, Artificial Sequence
  Description of Artificial Sequence: Synthetic oligonucleotide
cuuacacccaagcauauug

SEQ ID NO: 1220354 - RNA, 19 nt, Artificial Sequence
  Description of Artificial Sequence: Synthetic oligonucleotide
aaaauaucagcagaacuau

SEQ ID NO: 1220355 - RNA, 19 nt, Artificial Sequence
  Description of Artificial Sequence: Synthetic oligonucleotide
uucacgaucauugcuaucu

SEQ ID NO: 1220356 - RNA, 19 nt, Artificial Sequence
  Description of Artificial Sequence: Synthetic oligonucleotide
augugaacucuuugcaacc

SEQ ID NO: 1220357 - RNA, 19 nt, Artificial Sequence
  Description of Artificial Sequence: Synthetic oligonucleotide
aauaagacccuggguauuc

SEQ ID NO: 1220358 - RNA, 19 nt, Artificial Sequence
  Description of Artificial Sequence: Synthetic oligonucleotide
aaauggguuacgaagaaaa

SEQ ID NO: 1220359 - RNA, 19 nt, Artificial Sequence
  Description of Artificial Sequence: Synthetic oligonucleotide
aaucauuuuauuaggaaua

SEQ ID NO: 1220360 - RNA, 19 nt, Artificial Sequence
  Description of Artificial Sequence: Synthetic oligonucleotide
auaacauuauugguguggg

SEQ ID NO: 1220361 - RNA, 19 nt, Artificial Sequence
  Description of Artificial Sequence: Synthetic oligonucleotide
uuaaguguucggcugugcc

SEQ ID NO: 1220362 - RNA, 19 nt, Artificial Sequence
  Description of Artificial Sequence: Synthetic oligonucleotide
ugcuugguaaacaauaauu

SEQ ID NO: 1220363 - RNA, 19 nt, Artificial Sequence
  Description of Artificial Sequence: Synthetic oligonucleotide
guuacggagagacugaaga

SEQ ID NO: 1220364 - RNA, 19 nt, Artificial Sequence
  Description of Artificial Sequence: Synthetic oligonucleotide
acuuuauaacauuauuggu

SEQ ID NO: 1220365 - RNA, 19 nt, Artificial Sequence
  Description of Artificial Sequence: Synthetic oligonucleotide
uucuguuacggagagacug

SEQ ID NO: 1220366 - RNA, 19 nt, Artificial Sequence
  Description of Artificial Sequence: Synthetic oligonucleotide
aaguguucggcugugccac

SEQ ID NO: 1220367 - RNA, 19 nt, Artificial Sequence
  Description of Artificial Sequence: Synthetic oligonucleotide
uggguuacgaagaaaacuu

SEQ ID NO: 1220368 - RNA, 19 nt, Artificial Sequence
  Description of Artificial Sequence: Synthetic oligonucleotide
agcuaucaaauccaaacca

SEQ ID NO: 1220369 - RNA, 19 nt, Artificial Sequence
  Description of Artificial Sequence: Synthetic oligonucleotide
ucuuucacgaucauugcua

SEQ ID NO: 1220370 - RNA, 19 nt, Artificial Sequence
  Description of Artificial Sequence: Synthetic oligonucleotide
auauccuuuaauaaccaag

SEQ ID NO: 1220371 - RNA, 19 nt, Artificial Sequence
  Description of Artificial Sequence: Synthetic oligonucleotide
aagaccugucucucuggcc

SEQ ID NO: 1220372 - RNA, 19 nt, Artificial Sequence
  Description of Artificial Sequence: Synthetic oligonucleotide
auaaacaguaaaauaucag

SEQ ID NO: 1220373 - RNA, 19 nt, Artificial Sequence
  Description of Artificial Sequence: Synthetic oligonucleotide
uaucaagggaauaacuuua

SEQ ID NO: 1220374 - RNA, 19 nt, Artificial Sequence
  Description of Artificial Sequence: Synthetic oligonucleotide
cauaccauguucuguuacg

SEQ ID NO: 1220375 - RNA, 19 nt, Artificial Sequence
  Description of Artificial Sequence: Synthetic oligonucleotide
agcaacaugcaacauaaaa

SEQ ID NO: 1220376 - RNA, 19 nt, Artificial Sequence
  Description of Artificial Sequence: Synthetic oligonucleotide
acaauaauuggcaacaaau

SEQ ID NO: 1220377 - RNA, 19 nt, Artificial Sequence
  Description of Artificial Sequence: Synthetic oligonucleotide
aaaggugucacaaaagcua

SEQ ID NO: 1220378 - RNA, 19 nt, Artificial Sequence
  Description of Artificial Sequence: Synthetic oligonucleotide
acgaucauugcuaucuacc

SEQ ID NO: 1220379 - RNA, 19 nt, Artificial Sequence
  Description of Artificial Sequence: Synthetic oligonucleotide
aauggguuacgaagaaaac

SEQ ID NO: 1220380 - RNA, 19 nt, Artificial Sequence
  Description of Artificial Sequence: Synthetic oligonucleotide
aauauucugcccaaaccug

SEQ ID NO: 1220381 - RNA, 19 nt, Artificial Sequence
  Description of Artificial Sequence: Synthetic oligonucleotide
aucugcugaguauuaaaag

SEQ ID NO: 1220382 - RNA, 19 nt, Artificial Sequence
  Description of Artificial Sequence: Synthetic oligonucleotide
acauuauuggugugggcuc

SEQ ID NO: 1220383 - RNA, 19 nt, Artificial Sequence
  Description of Artificial Sequence: Synthetic oligonucleotide
uucuaggaaugauaaaggu

SEQ ID NO: 1220384 - RNA, 19 nt, Artificial Sequence
  Description of Artificial Sequence: Synthetic oligonucleotide
gucuagaccaauucuauca

SEQ ID NO: 1220385 - RNA, 19 nt, Artificial Sequence
  Description of Artificial Sequence: Synthetic oligonucleotide
acauaccauguucuguuac

SEQ ID NO: 1220386 - RNA, 19 nt, Artificial Sequence
  Description of Artificial Sequence: Synthetic oligonucleotide
uauaacaguggauacuuuu

SEQ ID NO: 1220387 - RNA, 19 nt, Artificial Sequence
  Description of Artificial Sequence: Synthetic oligonucleotide
aacguugugcuugguaaac

SEQ ID NO: 1220388 - RNA, 19 nt, Artificial Sequence
  Description of Artificial Sequence: Synthetic oligonucleotide
agaaucauuuuauuaggaa

SEQ ID NO: 1220389 - RNA, 19 nt, Artificial Sequence
  Description of Artificial Sequence: Synthetic oligonucleotide
uuuagcguuuugaaaguuc

SEQ ID NO: 1220390 - RNA, 19 nt, Artificial Sequence
  Description of Artificial Sequence: Synthetic oligonucleotide
acaagucuagaccaauucu

SEQ ID NO: 1220391 - RNA, 19 nt, Artificial Sequence
  Description of Artificial Sequence: Synthetic oligonucleotide
caucaaaaugcgcaucugc

SEQ ID NO: 1220392 - RNA, 19 nt, Artificial Sequence
  Description of Artificial Sequence: Synthetic oligonucleotide
aagcuaaauguccaggcuu

SEQ ID NO: 1220393 - RNA, 19 nt, Artificial Sequence
  Description of Artificial Sequence: Synthetic oligonucleotide
ugaauaguguuccccuggc

SEQ ID NO: 1220394 - RNA, 19 nt, Artificial Sequence
  Description of Artificial Sequence: Synthetic oligonucleotide
gaggccacgggacacgacg

SEQ ID NO: 1220395 - RNA, 19 nt, Artificial Sequence
  Description of Artificial Sequence: Synthetic oligonucleotide
uuacacccaagcauauugc

SEQ ID NO: 1220396 - RNA, 19 nt, Artificial Sequence
  Description of Artificial Sequence: Synthetic oligonucleotide
auuaaguuuuaaaugcugu

SEQ ID NO: 1220397 - RNA, 19 nt, Artificial Sequence
  Description of Artificial Sequence: Synthetic oligonucleotide
agguaaguuuggcuggugg

SEQ ID NO: 1220398 - RNA, 19 nt, Artificial Sequence
  Description of Artificial Sequence: Synthetic oligonucleotide
guggcuugaacauaccaug

SEQ ID NO: 1220399 - RNA, 19 nt, Artificial Sequence
  Description of Artificial Sequence: Synthetic oligonucleotide
aaguggcuugaacauacca

SEQ ID NO: 1220400 - RNA, 19 nt, Artificial Sequence
  Description of Artificial Sequence: Synthetic oligonucleotide
agacugaagaccuaacuua

SEQ ID NO: 1220401 - RNA, 19 nt, Artificial Sequence
  Description of Artificial Sequence: Synthetic oligonucleotide
uacggagagacugaagacc

SEQ ID NO: 1220402 - RNA, 19 nt, Artificial Sequence
  Description of Artificial Sequence: Synthetic oligonucleotide
aaguauaacaguggauacu

SEQ ID NO: 1220403 - RNA, 19 nt, Artificial Sequence
  Description of Artificial Sequence: Synthetic oligonucleotide
auucuaucaaacauguccu

SEQ ID NO: 1220404 - RNA, 19 nt, Artificial Sequence
  Description of Artificial Sequence: Synthetic oligonucleotide
ugggcggaagagaaaaggc

SEQ ID NO: 1220405 - RNA, 19 nt, Artificial Sequence
  Description of Artificial Sequence: Synthetic oligonucleotide
auagcaacguugugcuugg

SEQ ID NO: 1220406 - RNA, 19 nt, Artificial Sequence
  Description of Artificial Sequence: Synthetic oligonucleotide
gaauuagcuaucaaaucca

SEQ ID NO: 1220407 - RNA, 19 nt, Artificial Sequence
  Description of Artificial Sequence: Synthetic oligonucleotide
uccuugguuagauauccca

SEQ ID NO: 1220408 - RNA, 19 nt, Artificial Sequence
  Description of Artificial Sequence: Synthetic oligonucleotide
uaucauauacugggcaaag

SEQ ID NO: 1220409 - RNA, 19 nt, Artificial Sequence
  Description of Artificial Sequence: Synthetic oligonucleotide
cagcagaacuaucauauac

SEQ ID NO: 1220410 - RNA, 19 nt, Artificial Sequence
  Description of Artificial Sequence: Synthetic oligonucleotide
acuaucauauacugggcaa

SEQ ID NO: 1220411 - RNA, 19 nt, Artificial Sequence
  Description of Artificial Sequence: Synthetic oligonucleotide
ucuguuccggcucacgaac

SEQ ID NO: 1220412 - RNA, 19 nt, Artificial Sequence
  Description of Artificial Sequence: Synthetic oligonucleotide
agucuagaccaauucuauc

SEQ ID NO: 1220413 - RNA, 19 nt, Artificial Sequence
  Description of Artificial Sequence: Synthetic oligonucleotide
cuugggacggucagaagag

SEQ ID NO: 1220414 - RNA, 19 nt, Artificial Sequence
  Description of Artificial Sequence: Synthetic oligonucleotide
aaauaucagcagaacuauc

SEQ ID NO: 1220415 - RNA, 19 nt, Artificial Sequence
  Description of Artificial Sequence: Synthetic oligonucleotide
uuuauacagaauugucguc

SEQ ID NO: 1220416 - RNA, 19 nt, Artificial Sequence
  Description of Artificial Sequence: Synthetic oligonucleotide
acgagguaaguuuggcugg

SEQ ID NO: 1220417 - RNA, 19 nt, Artificial Sequence
  Description of Artificial Sequence: Synthetic oligonucleotide
aaccacauugacgagguaa

SEQ ID NO: 1220418 - RNA, 19 nt, Artificial Sequence
  Description of Artificial Sequence: Synthetic oligonucleotide
agaccaauucuaucaaaca

SEQ ID NO: 1220419 - RNA, 19 nt, Artificial Sequence
  Description of Artificial Sequence: Synthetic oligonucleotide
ucuguuacggagagacuga

SEQ ID NO: 1220420 - RNA, 19 nt, Artificial Sequence
  Description of Artificial Sequence: Synthetic oligonucleotide
agggaaguauaacagugga

SEQ ID NO: 1220421 - RNA, 19 nt, Artificial Sequence
  Description of Artificial Sequence: Synthetic oligonucleotide
uacucuacuguuuccacau

SEQ ID NO: 1220422 - RNA, 19 nt, Artificial Sequence
  Description of Artificial Sequence: Synthetic oligonucleotide
uagauaucccaguucauuu

SEQ ID NO: 1220423 - RNA, 19 nt, Artificial Sequence
  Description of Artificial Sequence: Synthetic oligonucleotide
gaucauugcuaucuaccac

SEQ ID NO: 1220424 - RNA, 19 nt, Artificial Sequence
  Description of Artificial Sequence: Synthetic oligonucleotide
auaccauguucuguuacgg

SEQ ID NO: 1220425 - RNA, 19 nt, Artificial Sequence
  Description of Artificial Sequence: Synthetic oligonucleotide
cauugacgagguaaguuug

SEQ ID NO: 1220426 - RNA, 19 nt, Artificial Sequence
  Description of Artificial Sequence: Synthetic oligonucleotide
ucgagucccucauacagac

SEQ ID NO: 1220427 - RNA, 19 nt, Artificial Sequence
  Description of Artificial Sequence: Synthetic oligonucleotide
ugcugaguauuaaaaguua

SEQ ID NO: 1220428 - RNA, 19 nt, Artificial Sequence
  Description of Artificial Sequence: Synthetic oligonucleotide
auggguuacgaagaaaacu

SEQ ID NO: 1220429 - RNA, 19 nt, Artificial Sequence
  Description of Artificial Sequence: Synthetic oligonucleotide
uaggcuuaagggaaguaua

SEQ ID NO: 1220430 - RNA, 19 nt, Artificial Sequence
  Description of Artificial Sequence: Synthetic oligonucleotide
uacaaauggaaugcuacau

SEQ ID NO: 1220431 - RNA, 19 nt, Artificial Sequence
  Description of Artificial Sequence: Synthetic oligonucleotide
uuuggcugguggaagccug

SEQ ID NO: 1220432 - RNA, 19 nt, Artificial Sequence
  Description of Artificial Sequence: Synthetic oligonucleotide
uuaggcuuaagggaaguau

SEQ ID NO: 1220433 - RNA, 19 nt, Artificial Sequence
  Description of Artificial Sequence: Synthetic oligonucleotide
cuuuuaggcuuaagggaag

SEQ ID NO: 1220434 - RNA, 19 nt, Artificial Sequence
  Description of Artificial Sequence: Synthetic oligonucleotide
uugcugaauuuaaugaauu

SEQ ID NO: 1220435 - RNA, 19 nt, Artificial Sequence
  Description of Artificial Sequence: Synthetic oligonucleotide
uuacggagagacugaagac

SEQ ID NO: 1220436 - RNA, 19 nt, Artificial Sequence
  Description of Artificial Sequence: Synthetic oligonucleotide
uuagauaucccaguucauu

SEQ ID NO: 1220437 - RNA, 19 nt, Artificial Sequence
  Description of Artificial Sequence: Synthetic oligonucleotide
acuguucuaggaaugauaa

SEQ ID NO: 1220438 - RNA, 19 nt, Artificial Sequence
  Description of Artificial Sequence: Synthetic oligonucleotide
gggucaauaaugugagggg

SEQ ID NO: 1220439 - RNA, 19 nt, Artificial Sequence
  Description of Artificial Sequence: Synthetic oligonucleotide
uugguuagauaucccaguu

SEQ ID NO: 1220440 - RNA, 19 nt, Artificial Sequence
  Description of Artificial Sequence: Synthetic oligonucleotide
gaauugucgucuugccagc

SEQ ID NO: 1220441 - RNA, 19 nt, Artificial Sequence
  Description of Artificial Sequence: Synthetic oligonucleotide
aggaaugauaaagguauca

SEQ ID NO: 1220442 - RNA, 19 nt, Artificial Sequence
  Description of Artificial Sequence: Synthetic oligonucleotide
aaaucagcagacuguucua

SEQ ID NO: 1220443 - RNA, 19 nt, Artificial Sequence
  Description of Artificial Sequence: Synthetic oligonucleotide
ucccauacggugaaacaaa

SEQ ID NO: 1220444 - RNA, 19 nt, Artificial Sequence
  Description of Artificial Sequence: Synthetic oligonucleotide
ccaaccaucaaaaugcgca

SEQ ID NO: 1220445 - RNA, 19 nt, Artificial Sequence
  Description of Artificial Sequence: Synthetic oligonucleotide
aaaaugcgcaucugcuuuu

SEQ ID NO: 1220446 - RNA, 19 nt, Artificial Sequence
  Description of Artificial Sequence: Synthetic oligonucleotide
gaacuaucauauacugggc

SEQ ID NO: 1220447 - RNA, 19 nt, Artificial Sequence
  Description of Artificial Sequence: Synthetic oligonucleotide
aauuagcuaucaaauccaa

SEQ ID NO: 1220448 - RNA, 19 nt, Artificial Sequence
  Description of Artificial Sequence: Synthetic oligonucleotide
uuggcaagggguagaaaua

SEQ ID NO: 1220449 - RNA, 19 nt, Artificial Sequence
  Description of Artificial Sequence: Synthetic oligonucleotide
caguaaaauaucagcagaa

SEQ ID NO: 1220450 - RNA, 19 nt, Artificial Sequence
  Description of Artificial Sequence: Synthetic oligonucleotide
uaacauuauuggugugggc

SEQ ID NO: 1220451 - RNA, 19 nt, Artificial Sequence
  Description of Artificial Sequence: Synthetic oligonucleotide
aagucuagaccaauucuau

SEQ ID NO: 1220452 - RNA, 19 nt, Artificial Sequence
  Description of Artificial Sequence: Synthetic oligonucleotide
ugguccaagcaguauuaga

SEQ ID NO: 1220453 - RNA, 19 nt, Artificial Sequence
  Description of Artificial Sequence: Synthetic oligonucleotide
auugacgagguaaguuugg

SEQ ID NO: 1220454 - RNA, 19 nt, Artificial Sequence
  Description of Artificial Sequence: Synthetic oligonucleotide
accacauugacgagguaag

SEQ ID NO: 1220455 - RNA, 19 nt, Artificial Sequence
  Description of Artificial Sequence: Synthetic oligonucleotide
aucauuuuauuaggaauaa

SEQ ID NO: 1220456 - RNA, 19 nt, Artificial Sequence
  Description of Artificial Sequence: Synthetic oligonucleotide
aaggugucacaaaagcuaa

SEQ ID NO: 1220457 - RNA, 19 nt, Artificial Sequence
  Description of Artificial Sequence: Synthetic oligonucleotide
ggcuuuuaggcuuaaggga

SEQ ID NO: 1220458 - RNA, 19 nt, Artificial Sequence
  Description of Artificial Sequence: Synthetic oligonucleotide
uauucugcccaaaccuguc

SEQ ID NO: 1220459 - RNA, 19 nt, Artificial Sequence
  Description of Artificial Sequence: Synthetic oligonucleotide
caagucuagaccaauucua

SEQ ID NO: 1220460 - RNA, 19 nt, Artificial Sequence
  Description of Artificial Sequence: Synthetic oligonucleotide
ucaagggaauaacuuuaua

SEQ ID NO: 1220461 - RNA, 19 nt, Artificial Sequence
  Description of Artificial Sequence: Synthetic oligonucleotide
uauacagaauugucgucuu

SEQ ID NO: 1220462 - RNA, 19 nt, Artificial Sequence
  Description of Artificial Sequence: Synthetic oligonucleotide
acuuaucugucaucucacu

SEQ ID NO: 1220463 - RNA, 19 nt, Artificial Sequence
  Description of Artificial Sequence: Synthetic oligonucleotide
uugacgagguaaguuuggc

SEQ ID NO: 1220464 - RNA, 19 nt, Artificial Sequence
  Description of Artificial Sequence: Synthetic oligonucleotide
uccggcgcggcguuaagug

SEQ ID NO: 1220465 - RNA, 19 nt, Artificial Sequence
  Description of Artificial Sequence: Synthetic oligonucleotide
aaacaauaauuggcaacaa

SEQ ID NO: 1220466 - RNA, 19 nt, Artificial Sequence
  Description of Artificial Sequence: Synthetic oligonucleotide
cuuuaauaaccaagaugca

SEQ ID NO: 1220467 - RNA, 19 nt, Artificial Sequence
  Description of Artificial Sequence: Synthetic oligonucleotide
agauaucccaguucauuua

SEQ ID NO: 1220468 - RNA, 19 nt, Artificial Sequence
  Description of Artificial Sequence: Synthetic oligonucleotide
cacccaagcauauugcuaa

SEQ ID NO: 1220469 - RNA, 19 nt, Artificial Sequence
  Description of Artificial Sequence: Synthetic oligonucleotide
auccuuuaauaaccaagau

SEQ ID NO: 1220470 - RNA, 19 nt, Artificial Sequence
  Description of Artificial Sequence: Synthetic oligonucleotide
uaccauguucuguuacgga

SEQ ID NO: 1220471 - RNA, 19 nt, Artificial Sequence
  Description of Artificial Sequence: Synthetic oligonucleotide
gacacgacguagcgggagc

SEQ ID NO: 1220472 - RNA, 19 nt, Artificial Sequence
  Description of Artificial Sequence: Synthetic oligonucleotide
caagggguagaaauaaaua

SEQ ID NO: 1220473 - RNA, 19 nt, Artificial Sequence
  Description of Artificial Sequence: Synthetic oligonucleotide
ugucucagauauccuuuaa

SEQ ID NO: 1220474 - RNA, 19 nt, Artificial Sequence
  Description of Artificial Sequence: Synthetic oligonucleotide
gccuaauuuuaucuugacc

SEQ ID NO: 1220475 - RNA, 19 nt, Artificial Sequence
  Description of Artificial Sequence: Synthetic oligonucleotide
cugaagaccuaacuuaucu

SEQ ID NO: 1220476 - RNA, 19 nt, Artificial Sequence
  Description of Artificial Sequence: Synthetic oligonucleotide
aggcugaagaccugucucu

SEQ ID NO: 1220477 - RNA, 19 nt, Artificial Sequence
  Description of Artificial Sequence: Synthetic oligonucleotide
cacgaucauugcuaucuac

SEQ ID NO: 1220478 - RNA, 19 nt, Artificial Sequence
  Description of Artificial Sequence: Synthetic oligonucleotide
auauucugcccaaaccugu

SEQ ID NO: 1220479 - RNA, 19 nt, Artificial Sequence
  Description of Artificial Sequence: Synthetic oligonucleotide
ucggcgacuggugcggugg

SEQ ID NO: 1220480 - RNA, 19 nt, Artificial Sequence
  Description of Artificial Sequence: Synthetic oligonucleotide
uggggucaauaaugugagg

SEQ ID NO: 1220481 - RNA, 19 nt, Artificial Sequence
  Description of Artificial Sequence: Synthetic oligonucleotide
cacggagaauuucucuuac

SEQ ID NO: 1220482 - RNA, 19 nt, Artificial Sequence
  Description of Artificial Sequence: Synthetic oligonucleotide
ccuugguuagauaucccag

SEQ ID NO: 1220483 - RNA, 19 nt, Artificial Sequence
  Description of Artificial Sequence: Synthetic oligonucleotide
aucccauacggugaaacaa

SEQ ID NO: 1220484 - RNA, 19 nt, Artificial Sequence
  Description of Artificial Sequence: Synthetic oligonucleotide
ucccacggagaauuucucu

SEQ ID NO: 1220485 - RNA, 19 nt, Artificial Sequence
  Description of Artificial Sequence: Synthetic oligonucleotide
uccugaauucuuucacgau

SEQ ID NO: 1220486 - RNA, 19 nt, Artificial Sequence
  Description of Artificial Sequence: Synthetic oligonucleotide
gguaaacaauaauuggcaa

SEQ ID NO: 1220487 - RNA, 19 nt, Artificial Sequence
  Description of Artificial Sequence: Synthetic oligonucleotide
ggcguuaaguguucggcug

SEQ ID NO: 1220488 - RNA, 19 nt, Artificial Sequence
  Description of Artificial Sequence: Synthetic oligonucleotide
agcguuuugaaaguucauu

SEQ ID NO: 1220489 - RNA, 19 nt, Artificial Sequence
  Description of Artificial Sequence: Synthetic oligonucleotide
acggagagacugaagaccu

SEQ ID NO: 1220490 - RNA, 19 nt, Artificial Sequence
  Description of Artificial Sequence: Synthetic oligonucleotide
cacgggacacgacguagcg

SEQ ID NO: 1220491 - RNA, 19 nt, Artificial Sequence
  Description of Artificial Sequence: Synthetic oligonucleotide
ugucucucuggccggcgug

SEQ ID NO: 1220492 - RNA, 19 nt, Artificial Sequence
  Description of Artificial Sequence: Synthetic oligonucleotide
ggcgagagaagagagagga

SEQ ID NO: 1220493 - RNA, 19 nt, Artificial Sequence
  Description of Artificial Sequence: Synthetic oligonucleotide
auccaaccaucaaaaugcg

SEQ ID NO: 1220494 - RNA, 19 nt, Artificial Sequence
  Description of Artificial Sequence: Synthetic oligonucleotide
ccaaucgagucccucauac

SEQ ID NO: 1220495 - RNA, 19 nt, Artificial Sequence
  Description of Artificial Sequence: Synthetic oligonucleotide
auaaaguaucaagggaaua

SEQ ID NO: 1220496 - RNA, 19 nt, Artificial Sequence
  Description of Artificial Sequence: Synthetic oligonucleotide
gguaaguuuggcuggugga

SEQ ID NO: 1220497 - RNA, 19 nt, Artificial Sequence
  Description of Artificial Sequence: Synthetic oligonucleotide
aaauagcaacguugugcuu

SEQ ID NO: 1220498 - RNA, 19 nt, Artificial Sequence
  Description of Artificial Sequence: Synthetic oligonucleotide
ggcggaagagaaaaggcug

SEQ ID NO: 1220499 - RNA, 19 nt, Artificial Sequence
  Description of Artificial Sequence: Synthetic oligonucleotide
gaccugucucucuggccgg

SEQ ID NO: 1220500 - RNA, 19 nt, Artificial Sequence
  Description of Artificial Sequence: Synthetic oligonucleotide
uucucuguuccggcucacg

SEQ ID NO: 1220501 - RNA, 19 nt, Artificial Sequence
  Description of Artificial Sequence: Synthetic oligonucleotide
caaaccacauugacgaggu

SEQ ID NO: 1220502 - RNA, 19 nt, Artificial Sequence
  Description of Artificial Sequence: Synthetic oligonucleotide
acggagaauuucucuuaca

SEQ ID NO: 1220503 - RNA, 19 nt, Artificial Sequence
  Description of Artificial Sequence: Synthetic oligonucleotide
gggguagaaauaaauacaa

SEQ ID NO: 1220504 - RNA, 19 nt, Artificial Sequence
  Description of Artificial Sequence: Synthetic oligonucleotide
acagaccaguuccuugggu

SEQ ID NO: 1220505 - RNA, 19 nt, Artificial Sequence
  Description of Artificial Sequence: Synthetic oligonucleotide
cuugguuagauaucccagu

SEQ ID NO: 1220506 - RNA, 19 nt, Artificial Sequence
  Description of Artificial Sequence: Synthetic oligonucleotide
gacuguucuaggaaugaua

SEQ ID NO: 1220507 - RNA, 19 nt, Artificial Sequence
  Description of Artificial Sequence: Synthetic oligonucleotide
cgggacacgacguagcggg

SEQ ID NO: 1220508 - RNA, 19 nt, Artificial Sequence
  Description of Artificial Sequence: Synthetic oligonucleotide
acgacguagcgggagcggg

SEQ ID NO: 1220509 - RNA, 19 nt, Artificial Sequence
  Description of Artificial Sequence: Synthetic oligonucleotide
ggaaugauaaagguaucaa

SEQ ID NO: 1220510 - RNA, 19 nt, Artificial Sequence
  Description of Artificial Sequence: Synthetic oligonucleotide
uucccacggagaauuucuc

SEQ ID NO: 1220511 - RNA, 19 nt, Artificial Sequence
  Description of Artificial Sequence: Synthetic oligonucleotide
uuuaggcuuaagggaagua

SEQ ID NO: 1220512 - RNA, 19 nt, Artificial Sequence
  Description of Artificial Sequence: Synthetic oligonucleotide
gguaucaauaaaguaucaa

SEQ ID NO: 1220513 - RNA, 19 nt, Artificial Sequence
  Description of Artificial Sequence: Synthetic oligonucleotide
uagcguuuugaaaguucau

SEQ ID NO: 1220514 - RNA, 19 nt, Artificial Sequence
  Description of Artificial Sequence: Synthetic oligonucleotide
ucacgaucauugcuaucua

SEQ ID NO: 1220515 - RNA, 19 nt, Artificial Sequence
  Description of Artificial Sequence: Synthetic oligonucleotide
auuagcuaucaaauccaaa

SEQ ID NO: 1220516 - RNA, 19 nt, Artificial Sequence
  Description of Artificial Sequence: Synthetic oligonucleotide
gcuaaauagcaacguugug

SEQ ID NO: 1220517 - RNA, 19 nt, Artificial Sequence
  Description of Artificial Sequence: Synthetic oligonucleotide
ggugcgguggcuccggcgc

SEQ ID NO: 1220518 - RNA, 19 nt, Artificial Sequence
  Description of Artificial Sequence: Synthetic oligonucleotide
aguguucggcugugccacg

SEQ ID NO: 1220519 - RNA, 19 nt, Artificial Sequence
  Description of Artificial Sequence: Synthetic oligonucleotide
cggagaauuucucuuacac

SEQ ID NO: 1220520 - RNA, 19 nt, Artificial Sequence
  Description of Artificial Sequence: Synthetic oligonucleotide
auacggugaaacaaauguu

SEQ ID NO: 1220521 - RNA, 19 nt, Artificial Sequence
  Description of Artificial Sequence: Synthetic oligonucleotide
ucggcgaggccacgggaca

SEQ ID NO: 1220522 - RNA, 19 nt, Artificial Sequence
  Description of Artificial Sequence: Synthetic oligonucleotide
guuaaguguucggcugugc

SEQ ID NO: 1220523 - RNA, 19 nt, Artificial Sequence
  Description of Artificial Sequence: Synthetic oligonucleotide
cauuuagcguuuugaaagu

SEQ ID NO: 1220524 - RNA, 19 nt, Artificial Sequence
  Description of Artificial Sequence: Synthetic oligonucleotide
acacgacguagcgggagcg

SEQ ID NO: 1220525 - RNA, 19 nt, Artificial Sequence
  Description of Artificial Sequence: Synthetic oligonucleotide
cuaucauauacugggcaaa

SEQ ID NO: 1220526 - RNA, 19 nt, Artificial Sequence
  Description of Artificial Sequence: Synthetic oligonucleotide
gagcgggaccugcucggcg

SEQ ID NO: 1220527 - RNA, 19 nt, Artificial Sequence
  Description of Artificial Sequence: Synthetic oligonucleotide
aucaagggaauaacuuuau

SEQ ID NO: 1220528 - RNA, 19 nt, Artificial Sequence
  Description of Artificial Sequence: Synthetic oligonucleotide
cucgggccuucucuguucc

SEQ ID NO: 1220529 - RNA, 19 nt, Artificial Sequence
  Description of Artificial Sequence: Synthetic oligonucleotide
auuugacagccaaucgagu

SEQ ID NO: 1220530 - RNA, 19 nt, Artificial Sequence
  Description of Artificial Sequence: Synthetic oligonucleotide
agccaaucgagucccucau

SEQ ID NO: 1220531 - RNA, 19 nt, Artificial Sequence
  Description of Artificial Sequence: Synthetic oligonucleotide
agcgggaccugcucggcga

SEQ ID NO: 1220532 - RNA, 19 nt, Artificial Sequence
  Description of Artificial Sequence: Synthetic oligonucleotide
acguagcgggagcgggacc

SEQ ID NO: 1220533 - RNA, 19 nt, Artificial Sequence
  Description of Artificial Sequence: Synthetic oligonucleotide
aggcuuaagggaaguauaa

SEQ ID NO: 1220534 - RNA, 19 nt, Artificial Sequence
  Description of Artificial Sequence: Synthetic oligonucleotide
agguaucaauaaaguauca

SEQ ID NO: 1220535 - RNA, 19 nt, Artificial Sequence
  Description of Artificial Sequence: Synthetic oligonucleotide
gacugaagaccuaacuuau

SEQ ID NO: 1220536 - RNA, 19 nt, Artificial Sequence
  Description of Artificial Sequence: Synthetic oligonucleotide
cacugcgucuugcagcuca

SEQ ID NO: 1220537 - RNA, 19 nt, Artificial Sequence
  Description of Artificial Sequence: Synthetic oligonucleotide
cauuauuggugugggcuca

SEQ ID NO: 1220538 - RNA, 19 nt, Artificial Sequence
  Description of Artificial Sequence: Synthetic oligonucleotide
aucgagucccucauacaga

SEQ ID NO: 1220539 - RNA, 19 nt, Artificial Sequence
  Description of Artificial Sequence: Synthetic oligonucleotide
gugucggcgaggccacggg

SEQ ID NO: 1220540 - RNA, 19 nt, Artificial Sequence
  Description of Artificial Sequence: Synthetic oligonucleotide
acgggacacgacguagcgg

SEQ ID NO: 1220541 - RNA, 19 nt, Artificial Sequence
  Description of Artificial Sequence: Synthetic oligonucleotide
ugaccaccgacaucccaua

SEQ ID NO: 1220542 - RNA, 19 nt, Artificial Sequence
  Description of Artificial Sequence: Synthetic oligonucleotide
cagccaaucgagucccuca

SEQ ID NO: 1220543 - RNA, 19 nt, Artificial Sequence
  Description of Artificial Sequence: Synthetic oligonucleotide
ccggcucacgaacagcugg

SEQ ID NO: 1220544 - RNA, 19 nt, Artificial Sequence
  Description of Artificial Sequence: Synthetic oligonucleotide
auaagacccuggguauucu

SEQ ID NO: 1220545 - RNA, 19 nt, Artificial Sequence
  Description of Artificial Sequence: Synthetic oligonucleotide
auagcggugguggcacuug

SEQ ID NO: 1220546 - RNA, 19 nt, Artificial Sequence
  Description of Artificial Sequence: Synthetic oligonucleotide
gaauaguguuccccuggcu

SEQ ID NO: 1220547 - RNA, 19 nt, Artificial Sequence
  Description of Artificial Sequence: Synthetic oligonucleotide
ucuuacacccaagcauauu

SEQ ID NO: 1220548 - RNA, 19 nt, Artificial Sequence
  Description of Artificial Sequence: Synthetic oligonucleotide
cucucuggccggcgugucg

SEQ ID NO: 1220549 - RNA, 19 nt, Artificial Sequence
  Description of Artificial Sequence: Synthetic oligonucleotide
cugaguauuaaaaguuauu

SEQ ID NO: 1220550 - RNA, 19 nt, Artificial Sequence
  Description of Artificial Sequence: Synthetic oligonucleotide
ucuggccggcgugucggcg

SEQ ID NO: 1220551 - RNA, 19 nt, Artificial Sequence
  Description of Artificial Sequence: Synthetic oligonucleotide
guuacgaagaaaacuuauu

SEQ ID NO: 1220552 - RNA, 19 nt, Artificial Sequence
  Description of Artificial Sequence: Synthetic oligonucleotide
agacuguucuaggaaugau

SEQ ID NO: 1220553 - RNA, 19 nt, Artificial Sequence
  Description of Artificial Sequence: Synthetic oligonucleotide
gucucagauauccuuuaau

SEQ ID NO: 1220554 - RNA, 19 nt, Artificial Sequence
  Description of Artificial Sequence: Synthetic oligonucleotide
ggccuaauuuuaucuugac

SEQ ID NO: 1220555 - RNA, 19 nt, Artificial Sequence
  Description of Artificial Sequence: Synthetic oligonucleotide
ucgggccuucucuguuccg

SEQ ID NO: 1220556 - RNA, 19 nt, Artificial Sequence
  Description of Artificial Sequence: Synthetic oligonucleotide
caacguugugcuugguaaa

SEQ ID NO: 1220557 - RNA, 19 nt, Artificial Sequence
  Description of Artificial Sequence: Synthetic oligonucleotide
gagguaaguuuggcuggug

SEQ ID NO: 1220558 - RNA, 19 nt, Artificial Sequence
  Description of Artificial Sequence: Synthetic oligonucleotide
ggcuuaagggaaguauaac

SEQ ID NO: 1220559 - RNA, 19 nt, Artificial Sequence
  Description of Artificial Sequence: Synthetic oligonucleotide
uuauuggugugggcucaaa

SEQ ID NO: 1220560 - RNA, 19 nt, Artificial Sequence
  Description of Artificial Sequence: Synthetic oligonucleotide
uaguguuccccuggcuggu

SEQ ID NO: 1220561 - RNA, 19 nt, Artificial Sequence
  Description of Artificial Sequence: Synthetic oligonucleotide
cacgacguagcgggagcgg

SEQ ID NO: 1220562 - RNA, 19 nt, Artificial Sequence
  Description of Artificial Sequence: Synthetic oligonucleotide
ccuaacuuaucugucaucu

SEQ ID NO: 1220563 - RNA, 19 nt, Artificial Sequence
  Description of Artificial Sequence: Synthetic oligonucleotide
ggagagacugaagaccuaa

SEQ ID NO: 1220564 - RNA, 19 nt, Artificial Sequence
  Description of Artificial Sequence: Synthetic oligonucleotide
aguguuccccuggcugguc

SEQ ID NO: 1220565 - RNA, 19 nt, Artificial Sequence
  Description of Artificial Sequence: Synthetic oligonucleotide
uccucgggccuucucuguu

SEQ ID NO: 1220566 - RNA, 19 nt, Artificial Sequence
  Description of Artificial Sequence: Synthetic oligonucleotide
caaauggguuacgaagaaa

SEQ ID NO: 1220567 - RNA, 19 nt, Artificial Sequence
  Description of Artificial Sequence: Synthetic oligonucleotide
gcguuuugaaaguucauuu

SEQ ID NO: 1220568 - RNA, 19 nt, Artificial Sequence
  Description of Artificial Sequence: Synthetic oligonucleotide
guaacaagucuagaccaau

SEQ ID NO: 1220569 - RNA, 19 nt, Artificial Sequence
  Description of Artificial Sequence: Synthetic oligonucleotide
guccuugguuagauauccc

SEQ ID NO: 1220570 - RNA, 19 nt, Artificial Sequence
  Description of Artificial Sequence: Synthetic oligonucleotide
caaccaucaaaaugcgcau

SEQ ID NO: 1220571 - RNA, 19 nt, Artificial Sequence
  Description of Artificial Sequence: Synthetic oligonucleotide
cgaucauugcuaucuacca

SEQ ID NO: 1220572 - RNA, 19 nt, Artificial Sequence
  Description of Artificial Sequence: Synthetic oligonucleotide
gguuacgaagaaaacuuau

SEQ ID NO: 1220573 - RNA, 19 nt, Artificial Sequence
  Description of Artificial Sequence: Synthetic oligonucleotide
ccacgggacacgacguagc

SEQ ID NO: 1220574 - RNA, 19 nt, Artificial Sequence
  Description of Artificial Sequence: Synthetic oligonucleotide
cacucaaaacagauuuguu

SEQ ID NO: 1220575 - RNA, 19 nt, Artificial Sequence
  Description of Artificial Sequence: Synthetic oligonucleotide
gcaagggguagaaauaaau

SEQ ID NO: 1220576 - RNA, 19 nt, Artificial Sequence
  Description of Artificial Sequence: Synthetic oligonucleotide
cucggcgacuggugcggug

SEQ ID NO: 1220577 - RNA, 19 nt, Artificial Sequence
  Description of Artificial Sequence: Synthetic oligonucleotide
cagagaggccuaauuuuau

SEQ ID NO: 1220578 - RNA, 19 nt, Artificial Sequence
  Description of Artificial Sequence: Synthetic oligonucleotide
auguucuguuacggagaga

SEQ ID NO: 1220579 - RNA, 19 nt, Artificial Sequence
  Description of Artificial Sequence: Synthetic oligonucleotide
gcacuugggacggucagaa

SEQ ID NO: 1220580 - RNA, 19 nt, Artificial Sequence
  Description of Artificial Sequence: Synthetic oligonucleotide
cuguuacggagagacugaa

SEQ ID NO: 1220581 - RNA, 19 nt, Artificial Sequence
  Description of Artificial Sequence: Synthetic oligonucleotide
aggugucacaaaagcuaaa

SEQ ID NO: 1220582 - RNA, 19 nt, Artificial Sequence
  Description of Artificial Sequence: Synthetic oligonucleotide
gcgagagaagagagaggag

SEQ ID NO: 1220583 - RNA, 19 nt, Artificial Sequence
  Description of Artificial Sequence: Synthetic oligonucleotide
guuagauaucccaguucau

SEQ ID NO: 1220584 - RNA, 19 nt, Artificial Sequence
  Description of Artificial Sequence: Synthetic oligonucleotide
cuggcugguccaagcagua

SEQ ID NO: 1220585 - RNA, 19 nt, Artificial Sequence
  Description of Artificial Sequence: Synthetic oligonucleotide
cggcucacgaacagcuggg

SEQ ID NO: 1220586 - RNA, 19 nt, Artificial Sequence
  Description of Artificial Sequence: Synthetic oligonucleotide
aggccacgggacacgacgu

SEQ ID NO: 1220587 - RNA, 19 nt, Artificial Sequence
  Description of Artificial Sequence: Synthetic oligonucleotide
cuggccggcgugucggcga

SEQ ID NO: 1220588 - RNA, 19 nt, Artificial Sequence
  Description of Artificial Sequence: Synthetic oligonucleotide
ggguuacgaagaaaacuua

SEQ ID NO: 1220589 - RNA, 19 nt, Artificial Sequence
  Description of Artificial Sequence: Synthetic oligonucleotide
ggcucacgaacagcugggc

SEQ ID NO: 1220590 - RNA, 19 nt, Artificial Sequence
  Description of Artificial Sequence: Synthetic oligonucleotide
ccacggagaauuucucuua

SEQ ID NO: 1220591 - RNA, 19 nt, Artificial Sequence
  Description of Artificial Sequence: Synthetic oligonucleotide
ggcaagggguagaaauaaa

SEQ ID NO: 1220592 - RNA, 19 nt, Artificial Sequence
  Description of Artificial Sequence: Synthetic oligonucleotide
cgcggcguuaaguguucgg

SEQ ID NO: 1220593 - RNA, 19 nt, Artificial Sequence
  Description of Artificial Sequence: Synthetic oligonucleotide
guucuguuacggagagacu

SEQ ID NO: 1220594 - RNA, 19 nt, Artificial Sequence
  Description of Artificial Sequence: Synthetic oligonucleotide
ggcacuugggacggucaga

SEQ ID NO: 1220595 - RNA, 19 nt, Artificial Sequence
  Description of Artificial Sequence: Synthetic oligonucleotide
gggaaguauaacaguggau

SEQ ID NO: 1220596 - RNA, 19 nt, Artificial Sequence
  Description of Artificial Sequence: Synthetic oligonucleotide
gccggcgugucggcgaggc

SEQ ID NO: 1220597 - RNA, 19 nt, Artificial Sequence
  Description of Artificial Sequence: Synthetic oligonucleotide
cugcgucuugcagcucauc

SEQ ID NO: 1220598 - RNA, 19 nt, Artificial Sequence
  Description of Artificial Sequence: Synthetic oligonucleotide
ggagcgggaccugcucggc

SEQ ID NO: 1220599 - RNA, 19 nt, Artificial Sequence
  Description of Artificial Sequence: Synthetic oligonucleotide
cguuaaguguucggcugug

SEQ ID NO: 1220600 - RNA, 19 nt, Artificial Sequence
  Description of Artificial Sequence: Synthetic oligonucleotide
ggcgugucggcgaggccac

SEQ ID NO: 1220601 - RNA, 19 nt, Artificial Sequence
  Description of Artificial Sequence: Synthetic oligonucleotide
cgugucggcgaggccacgg

SEQ ID NO: 1220602 - RNA, 19 nt, Artificial Sequence
  Description of Artificial Sequence: Synthetic oligonucleotide
cccacggagaauuucucuu

SEQ ID NO: 1220603 - RNA, 19 nt, Artificial Sequence
  Description of Artificial Sequence: Synthetic oligonucleotide
gccaaucgagucccucaua

SEQ ID NO: 1220604 - RNA, 19 nt, Artificial Sequence
  Description of Artificial Sequence: Synthetic oligonucleotide
ggcgcggcguuaaguguuc

SEQ ID NO: 1220605 - RNA, 19 nt, Artificial Sequence
  Description of Artificial Sequence: Synthetic oligonucleotide
gcgcggcguuaaguguucg

SEQ ID NO: 1220606 - RNA, 19 nt, Artificial Sequence
  Description of Artificial Sequence: Synthetic oligonucleotide
gcuccggcgcggcguuaag

SEQ ID NO: 1220607 - RNA, 19 nt, Artificial Sequence
  Description of Artificial Sequence: Synthetic oligonucleotide
cauagcggugguggcacuu

SEQ ID NO: 1220608 - RNA, 19 nt, Artificial Sequence
  Description of Artificial Sequence: Synthetic oligonucleotide
gguggcuccggcgcggcgu

SEQ ID NO: 1220609 - RNA, 19 nt, Artificial Sequence
  Description of Artificial Sequence: Synthetic oligonucleotide
ggccacgggacacgacgua

SEQ ID NO: 1220610 - RNA, 19 nt, Artificial Sequence
  Description of Artificial Sequence: Synthetic oligonucleotide
cggcgugucggcgaggcca

SEQ ID NO: 1220611 - RNA, 19 nt, Artificial Sequence
  Description of Artificial Sequence: Synthetic oligonucleotide
cggcguuaaguguucggcu

SEQ ID NO: 1220612 - RNA, 19 nt, Artificial Sequence
  Description of Artificial Sequence: Synthetic oligonucleotide
ggcuccggcgcggcguuaa

SEQ ID NO: 1220613 - RNA, 19 nt, Artificial Sequence
  Description of Artificial Sequence: Synthetic oligonucleotide
cuggugcguccucgggccu

SEQ ID NO: 1220614 - RNA, 19 nt, Artificial Sequence
  Description of Artificial Sequence: Synthetic oligonucleotide
cguagcgggagcgggaccu

SEQ ID NO: 1220615 - RNA, 19 nt, Artificial Sequence
  Description of Artificial Sequence: Synthetic oligonucleotide
cgaggccacgggacacgac

SEQ ID NO: 1220616 - RNA, 19 nt, Artificial Sequence
  Description of Artificial Sequence: Synthetic oligonucleotide
ccggcgugucggcgaggcc

SEQ ID NO: 1220617 - RNA, 19 nt, Artificial Sequence
  Description of Artificial Sequence: Synthetic oligonucleotide
gcgugucggcgaggccacg

SEQ ID NO: 1220618 - RNA, 19 nt, Artificial Sequence
  Description of Artificial Sequence: Synthetic oligonucleotide
cggcgacuggugcgguggc

SEQ ID NO: 1220619 - RNA, 19 nt, Artificial Sequence
  Description of Artificial Sequence: Synthetic oligonucleotide
ggccggcgugucggcgagg

SEQ ID NO: 1220620 - RNA, 19 nt, Artificial Sequence
  Description of Artificial Sequence: Synthetic oligonucleotide
ccggcgcggcguuaagugu

SEQ ID NO: 1220621 - RNA, 19 nt, Artificial Sequence
  Description of Artificial Sequence: Synthetic oligonucleotide
cgagguaaguuuggcuggu

SEQ ID NO: 1220622 - RNA, 19 nt, Artificial Sequence
  Description of Artificial Sequence: Synthetic oligonucleotide
gcacugcgucuugcagcuc

SEQ ID NO: 1220623 - RNA, 19 nt, Artificial Sequence
  Description of Artificial Sequence: Synthetic oligonucleotide
ccauagcggugguggcacu

SEQ ID NO: 1220624 - RNA, 19 nt, Artificial Sequence
  Description of Artificial Sequence: Synthetic oligonucleotide
cggcgcggcguuaaguguu

SEQ ID NO: 1220625 - RNA, 19 nt, Artificial Sequence
  Description of Artificial Sequence: Synthetic oligonucleotide
ucuaagaugacucugagug

SEQ ID NO: 1220626 - RNA, 19 nt, Artificial Sequence
  Description of Artificial Sequence: Synthetic oligonucleotide
agauccagaacucaguagc

SEQ ID NO: 1220627 - RNA, 19 nt, Artificial Sequence
  Description of Artificial Sequence: Synthetic oligonucleotide
uauacuagggagcagaacu

SEQ ID NO: 1220628 - RNA, 19 nt, Artificial Sequence
  Description of Artificial Sequence: Synthetic oligonucleotide
ucuacgauguaacucaucc

SEQ ID NO: 1220629 - RNA, 19 nt, Artificial Sequence
  Description of Artificial Sequence: Synthetic oligonucleotide
uacgauguaacucauccag

SEQ ID NO: 1220630 - RNA, 19 nt, Artificial Sequence
  Description of Artificial Sequence: Synthetic oligonucleotide
cuggcuauaaucaauuugc

SEQ ID NO: 1220631 - RNA, 19 nt, Artificial Sequence
  Description of Artificial Sequence: Synthetic oligonucleotide
ugaauacuggcuauaauca

SEQ ID NO: 1220632 - RNA, 19 nt, Artificial Sequence
  Description of Artificial Sequence: Synthetic oligonucleotide
gagugcacaacuaacaugg

SEQ ID NO: 1220633 - RNA, 19 nt, Artificial Sequence
  Description of Artificial Sequence: Synthetic oligonucleotide
agagauaaccuuucuuucc

SEQ ID NO: 1220634 - RNA, 19 nt, Artificial Sequence
  Description of Artificial Sequence: Synthetic oligonucleotide
ugaaucccauuucagaagg

SEQ ID NO: 1220635 - RNA, 19 nt, Artificial Sequence
  Description of Artificial Sequence: Synthetic oligonucleotide
uguaguuccaagcuuagcu

SEQ ID NO: 1220636 - RNA, 19 nt, Artificial Sequence
  Description of Artificial Sequence: Synthetic oligonucleotide
gaggaagccgacuauaagg

SEQ ID NO: 1220637 - RNA, 19 nt, Artificial Sequence
  Description of Artificial Sequence: Synthetic oligonucleotide
uccauuucaagcaagguuc

SEQ ID NO: 1220638 - RNA, 19 nt, Artificial Sequence
  Description of Artificial Sequence: Synthetic oligonucleotide
uacacuaauaaauuauaga

SEQ ID NO: 1220639 - RNA, 19 nt, Artificial Sequence
  Description of Artificial Sequence: Synthetic oligonucleotide
uucgguacaucacugaaug

SEQ ID NO: 1220640 - RNA, 19 nt, Artificial Sequence
  Description of Artificial Sequence: Synthetic oligonucleotide
uaaaaccucagcauuggcc

SEQ ID NO: 1220641 - RNA, 19 nt, Artificial Sequence
  Description of Artificial Sequence: Synthetic oligonucleotide
gauaaccuuucuuuccucg

SEQ ID NO: 1220642 - RNA, 19 nt, Artificial Sequence
  Description of Artificial Sequence: Synthetic oligonucleotide
uuuucguguccauagaaca

SEQ ID NO: 1220643 - RNA, 19 nt, Artificial Sequence
  Description of Artificial Sequence: Synthetic oligonucleotide
aagggaauguuccauuuca

SEQ ID NO: 1220644 - RNA, 19 nt, Artificial Sequence
  Description of Artificial Sequence: Synthetic oligonucleotide
ucaguagcccuaaacauac

SEQ ID NO: 1220645 - RNA, 19 nt, Artificial Sequence
  Description of Artificial Sequence: Synthetic oligonucleotide
ugauccauucgguacauca

SEQ ID NO: 1220646 - RNA, 19 nt, Artificial Sequence
  Description of Artificial Sequence: Synthetic oligonucleotide
cuacacuaauaaauuauag

SEQ ID NO: 1220647 - RNA, 19 nt, Artificial Sequence
  Description of Artificial Sequence: Synthetic oligonucleotide
cuagagauggcaccaaacc

SEQ ID NO: 1220648 - RNA, 19 nt, Artificial Sequence
  Description of Artificial Sequence: Synthetic oligonucleotide
uggguaguaacccucuacc

SEQ ID NO: 1220649 - RNA, 19 nt, Artificial Sequence
  Description of Artificial Sequence: Synthetic oligonucleotide
accugauguaguuccaagc

SEQ ID NO: 1220650 - RNA, 19 nt, Artificial Sequence
  Description of Artificial Sequence: Synthetic oligonucleotide
aagccgacuauaaggaggc

SEQ ID NO: 1220651 - RNA, 19 nt, Artificial Sequence
  Description of Artificial Sequence: Synthetic oligonucleotide
agaagguagaagcagggca

SEQ ID NO: 1220652 - RNA, 19 nt, Artificial Sequence
  Description of Artificial Sequence: Synthetic oligonucleotide
gaagccgacuauaaggagg

SEQ ID NO: 1220653 - RNA, 19 nt, Artificial Sequence
  Description of Artificial Sequence: Synthetic oligonucleotide
guucucuauacucaauucc

SEQ ID NO: 1220654 - RNA, 19 nt, Artificial Sequence
  Description of Artificial Sequence: Synthetic oligonucleotide
aguuaaugccuccaaauaa

SEQ ID NO: 1220655 - RNA, 19 nt, Artificial Sequence
  Description of Artificial Sequence: Synthetic oligonucleotide
ugaccaaggugaauacugg

SEQ ID NO: 1220656 - RNA, 19 nt, Artificial Sequence
  Description of Artificial Sequence: Synthetic oligonucleotide
auauguacucauucagauc

SEQ ID NO: 1220657 - RNA, 19 nt, Artificial Sequence
  Description of Artificial Sequence: Synthetic oligonucleotide
uugguuccaauguaggagc

SEQ ID NO: 1220658 - RNA, 19 nt, Artificial Sequence
  Description of Artificial Sequence: Synthetic oligonucleotide
auaaaaccucagcauuggc

SEQ ID NO: 1220659 - RNA, 19 nt, Artificial Sequence
  Description of Artificial Sequence: Synthetic oligonucleotide
aacucauccagacuaggau

SEQ ID NO: 1220660 - RNA, 19 nt, Artificial Sequence
  Description of Artificial Sequence: Synthetic oligonucleotide
uuagcugcucacuugagau

SEQ ID NO: 1220661 - RNA, 19 nt, Artificial Sequence
  Description of Artificial Sequence: Synthetic oligonucleotide
cagaccaugauccacccag

SEQ ID NO: 1220662 - RNA, 19 nt, Artificial Sequence
  Description of Artificial Sequence: Synthetic oligonucleotide
auuagagugggaccacccg

SEQ ID NO: 1220663 - RNA, 19 nt, Artificial Sequence
  Description of Artificial Sequence: Synthetic oligonucleotide
uccaaaugggaugagguca

SEQ ID NO: 1220664 - RNA, 19 nt, Artificial Sequence
  Description of Artificial Sequence: Synthetic oligonucleotide
cuaaacauacuccuacuuc

SEQ ID NO: 1220665 - RNA, 19 nt, Artificial Sequence
  Description of Artificial Sequence: Synthetic oligonucleotide
aaguuaaugccuccaaaua

SEQ ID NO: 1220666 - RNA, 19 nt, Artificial Sequence
  Description of Artificial Sequence: Synthetic oligonucleotide
acuauaaggaggcucccug

SEQ ID NO: 1220667 - RNA, 19 nt, Artificial Sequence
  Description of Artificial Sequence: Synthetic oligonucleotide
ugauguaguuccaagcuua

SEQ ID NO: 1220668 - RNA, 19 nt, Artificial Sequence
  Description of Artificial Sequence: Synthetic oligonucleotide
aaauaugcaaccaguggga

SEQ ID NO: 1220669 - RNA, 19 nt, Artificial Sequence
  Description of Artificial Sequence: Synthetic oligonucleotide
guaacccucuaccuguugg

SEQ ID NO: 1220670 - RNA, 19 nt, Artificial Sequence
  Description of Artificial Sequence: Synthetic oligonucleotide
ugaucugccuacuuagugu

SEQ ID NO: 1220671 - RNA, 19 nt, Artificial Sequence
  Description of Artificial Sequence: Synthetic oligonucleotide
ugggccauuauuuccuucc

SEQ ID NO: 1220672 - RNA, 19 nt, Artificial Sequence
  Description of Artificial Sequence: Synthetic oligonucleotide
ugagugcacaacuaacaug

SEQ ID NO: 1220673 - RNA, 19 nt, Artificial Sequence
  Description of Artificial Sequence: Synthetic oligonucleotide
acuaacaugggagccaaag

SEQ ID NO: 1220674 - RNA, 19 nt, Artificial Sequence
  Description of Artificial Sequence: Synthetic oligonucleotide
guccauagaacacugguuc

SEQ ID NO: 1220675 - RNA, 19 nt, Artificial Sequence
  Description of Artificial Sequence: Synthetic oligonucleotide
caaccagugggauauguac

SEQ ID NO: 1220676 - RNA, 19 nt, Artificial Sequence
  Description of Artificial Sequence: Synthetic oligonucleotide
cuuuucguguccauagaac

SEQ ID NO: 1220677 - RNA, 19 nt, Artificial Sequence
  Description of Artificial Sequence: Synthetic oligonucleotide
ucgaguugggccauuauuu

SEQ ID NO: 1220678 - RNA, 19 nt, Artificial Sequence
  Description of Artificial Sequence: Synthetic oligonucleotide
aaccgagauacuguugguc

SEQ ID NO: 1220679 - RNA, 19 nt, Artificial Sequence
  Description of Artificial Sequence: Synthetic oligonucleotide
cuauaaggaggcucccugg

SEQ ID NO: 1220680 - RNA, 19 nt, Artificial Sequence
  Description of Artificial Sequence: Synthetic oligonucleotide
uggacucgggcacauagga

SEQ ID NO: 1220681 - RNA, 19 nt, Artificial Sequence
  Description of Artificial Sequence: Synthetic oligonucleotide
aucacuaguuuccacugcu

SEQ ID NO: 1220682 - RNA, 19 nt, Artificial Sequence
  Description of Artificial Sequence: Synthetic oligonucleotide
uucagauccagaacucagu

SEQ ID NO: 1220683 - RNA, 19 nt, Artificial Sequence
  Description of Artificial Sequence: Synthetic oligonucleotide
auacucaauucccggguuc

SEQ ID NO: 1220684 - RNA, 19 nt, Artificial Sequence
  Description of Artificial Sequence: Synthetic oligonucleotide
gauauguacucauucagau

SEQ ID NO: 1220685 - RNA, 19 nt, Artificial Sequence
  Description of Artificial Sequence: Synthetic oligonucleotide
cuaagaugacucugagugc

SEQ ID NO: 1220686 - RNA, 19 nt, Artificial Sequence
  Description of Artificial Sequence: Synthetic oligonucleotide
ucagauccagaacucagua

SEQ ID NO: 1220687 - RNA, 19 nt, Artificial Sequence
  Description of Artificial Sequence: Synthetic oligonucleotide
uagcccuaaacauacuccu

SEQ ID NO: 1220688 - RNA, 19 nt, Artificial Sequence
  Description of Artificial Sequence: Synthetic oligonucleotide
uccauucgguacaucacug

SEQ ID NO: 1220689 - RNA, 19 nt, Artificial Sequence
  Description of Artificial Sequence: Synthetic oligonucleotide
aagugagucuucaauacaa

SEQ ID NO: 1220690 - RNA, 19 nt, Artificial Sequence
  Description of Artificial Sequence: Synthetic oligonucleotide
agacaggcuacacuaauaa

SEQ ID NO: 1220691 - RNA, 19 nt, Artificial Sequence
  Description of Artificial Sequence: Synthetic oligonucleotide
cugcauuggaccagcaccc

SEQ ID NO: 1220692 - RNA, 19 nt, Artificial Sequence
  Description of Artificial Sequence: Synthetic oligonucleotide
ugucaaagcugauccauuc

SEQ ID NO: 1220693 - RNA, 19 nt, Artificial Sequence
  Description of Artificial Sequence: Synthetic oligonucleotide
augaccaaggugaauacug

SEQ ID NO: 1220694 - RNA, 19 nt, Artificial Sequence
  Description of Artificial Sequence: Synthetic oligonucleotide
gauacuguuggucggucuc

SEQ ID NO: 1220695 - RNA, 19 nt, Artificial Sequence
  Description of Artificial Sequence: Synthetic oligonucleotide
gaguugggccauuauuucc

SEQ ID NO: 1220696 - RNA, 19 nt, Artificial Sequence
  Description of Artificial Sequence: Synthetic oligonucleotide
acucaguagcccuaaacau

SEQ ID NO: 1220697 - RNA, 19 nt, Artificial Sequence
  Description of Artificial Sequence: Synthetic oligonucleotide
gaagguagaagcagggcac

SEQ ID NO: 1220698 - RNA, 19 nt, Artificial Sequence
  Description of Artificial Sequence: Synthetic oligonucleotide
ugaaggcgcaaaaggaggu

SEQ ID NO: 1220699 - RNA, 19 nt, Artificial Sequence
  Description of Artificial Sequence: Synthetic oligonucleotide
guaacuccuggucucuggg

SEQ ID NO: 1220700 - RNA, 19 nt, Artificial Sequence
  Description of Artificial Sequence: Synthetic oligonucleotide
ucccuagcuaccuugaauu

SEQ ID NO: 1220701 - RNA, 19 nt, Artificial Sequence
  Description of Artificial Sequence: Synthetic oligonucleotide
aacaagggaauguuccauu

SEQ ID NO: 1220702 - RNA, 19 nt, Artificial Sequence
  Description of Artificial Sequence: Synthetic oligonucleotide
uacuagggagcagaacugg

SEQ ID NO: 1220703 - RNA, 19 nt, Artificial Sequence
  Description of Artificial Sequence: Synthetic oligonucleotide
cauuagagugggaccaccc

SEQ ID NO: 1220704 - RNA, 19 nt, Artificial Sequence
  Description of Artificial Sequence: Synthetic oligonucleotide
uccagaacucaguagcccu

SEQ ID NO: 1220705 - RNA, 19 nt, Artificial Sequence
  Description of Artificial Sequence: Synthetic oligonucleotide
aaugagcaaaugaauccca

SEQ ID NO: 1220706 - RNA, 19 nt, Artificial Sequence
  Description of Artificial Sequence: Synthetic oligonucleotide
uuguuugauaggaggcuga

SEQ ID NO: 1220707 - RNA, 19 nt, Artificial Sequence
  Description of Artificial Sequence: Synthetic oligonucleotide
uuuggauguucuagagaug

SEQ ID NO: 1220708 - RNA, 19 nt, Artificial Sequence
  Description of Artificial Sequence: Synthetic oligonucleotide
ucuuguuugauaggaggcu

SEQ ID NO: 1220709 - RNA, 19 nt, Artificial Sequence
  Description of Artificial Sequence: Synthetic oligonucleotide
uuguacuucccuagcuacc

SEQ ID NO: 1220710 - RNA, 19 nt, Artificial Sequence
  Description of Artificial Sequence: Synthetic oligonucleotide
aggaagaccaaaacaaaca

SEQ ID NO: 1220711 - RNA, 19 nt, Artificial Sequence
  Description of Artificial Sequence: Synthetic oligonucleotide
aaaauugagaaaggccuua

SEQ ID NO: 1220712 - RNA, 19 nt, Artificial Sequence
  Description of Artificial Sequence: Synthetic oligonucleotide
agauaaccuuucuuuccuc

SEQ ID NO: 1220713 - RNA, 19 nt, Artificial Sequence
  Description of Artificial Sequence: Synthetic oligonucleotide
guucuaagaugacucugag

SEQ ID NO: 1220714 - RNA, 19 nt, Artificial Sequence
  Description of Artificial Sequence: Synthetic oligonucleotide
uguugguaucgcucucugg

SEQ ID NO: 1220715 - RNA, 19 nt, Artificial Sequence
  Description of Artificial Sequence: Synthetic oligonucleotide
auccauucgguacaucacu

SEQ ID NO: 1220716 - RNA, 19 nt, Artificial Sequence
  Description of Artificial Sequence: Synthetic oligonucleotide
uguacuucccuagcuaccu

SEQ ID NO: 1220717 - RNA, 19 nt, Artificial Sequence
  Description of Artificial Sequence: Synthetic oligonucleotide
gaagugagucuucaauaca

SEQ ID NO: 1220718 - RNA, 19 nt, Artificial Sequence
  Description of Artificial Sequence: Synthetic oligonucleotide
gcuauaaucaauuugcuuu

SEQ ID NO: 1220719 - RNA, 19 nt, Artificial Sequence
  Description of Artificial Sequence: Synthetic oligonucleotide
ugugucaaagcugauccau

SEQ ID NO: 1220720 - RNA, 19 nt, Artificial Sequence
  Description of Artificial Sequence: Synthetic oligonucleotide
auauacuagggagcagaac

SEQ ID NO: 1220721 - RNA, 19 nt, Artificial Sequence
  Description of Artificial Sequence: Synthetic oligonucleotide
auaaccuuucuuuccucga

SEQ ID NO: 1220722 - RNA, 19 nt, Artificial Sequence
  Description of Artificial Sequence: Synthetic oligonucleotide
uucuaagaugacucugagu

SEQ ID NO: 1220723 - RNA, 19 nt, Artificial Sequence
  Description of Artificial Sequence: Synthetic oligonucleotide
gugaucugccuacuuagug

SEQ ID NO: 1220724 - RNA, 19 nt, Artificial Sequence
  Description of Artificial Sequence: Synthetic oligonucleotide
agcuuagcugcucacuuga

SEQ ID NO: 1220725 - RNA, 19 nt, Artificial Sequence
  Description of Artificial Sequence: Synthetic oligonucleotide
uguuugauaggaggcugag

SEQ ID NO: 1220726 - RNA, 19 nt, Artificial Sequence
  Description of Artificial Sequence: Synthetic oligonucleotide
auacuguuggucggucucc

SEQ ID NO: 1220727 - RNA, 19 nt, Artificial Sequence
  Description of Artificial Sequence: Synthetic oligonucleotide
guaucacaugaccaaggug

SEQ ID NO: 1220728 - RNA, 19 nt, Artificial Sequence
  Description of Artificial Sequence: Synthetic oligonucleotide
uucguguccauagaacacu

SEQ ID NO: 1220729 - RNA, 19 nt, Artificial Sequence
  Description of Artificial Sequence: Synthetic oligonucleotide
uguccauagaacacugguu

SEQ ID NO: 1220730 - RNA, 19 nt, Artificial Sequence
  Description of Artificial Sequence: Synthetic oligonucleotide
uggcuauaaucaauuugcu

SEQ ID NO: 1220731 - RNA, 19 nt, Artificial Sequence
  Description of Artificial Sequence: Synthetic oligonucleotide
gucuuguuugauaggaggc

SEQ ID NO: 1220732 - RNA, 19 nt, Artificial Sequence
  Description of Artificial Sequence: Synthetic oligonucleotide
auucagauccagaacucag

SEQ ID NO: 1220733 - RNA, 19 nt, Artificial Sequence
  Description of Artificial Sequence: Synthetic oligonucleotide
uacccaauuugcuuuucgu

SEQ ID NO: 1220734 - RNA, 19 nt, Artificial Sequence
  Description of Artificial Sequence: Synthetic oligonucleotide
cuaccuguugguaucgcuc

SEQ ID NO: 1220735 - RNA, 19 nt, Artificial Sequence
  Description of Artificial Sequence: Synthetic oligonucleotide
agugguugaccugccaggg

SEQ ID NO: 1220736 - RNA, 19 nt, Artificial Sequence
  Description of Artificial Sequence: Synthetic oligonucleotide
auucccggguucucuugcc

SEQ ID NO: 1220737 - RNA, 19 nt, Artificial Sequence
  Description of Artificial Sequence: Synthetic oligonucleotide
cuuguuugauaggaggcug

SEQ ID NO: 1220738 - RNA, 19 nt, Artificial Sequence
  Description of Artificial Sequence: Synthetic oligonucleotide
aaaccgagauacuguuggu

SEQ ID NO: 1220739 - RNA, 19 nt, Artificial Sequence
  Description of Artificial Sequence: Synthetic oligonucleotide
aguucuaagaugacucuga

SEQ ID NO: 1220740 - RNA, 19 nt, Artificial Sequence
  Description of Artificial Sequence: Synthetic oligonucleotide
gauguaguuccaagcuuag

SEQ ID NO: 1220741 - RNA, 19 nt, Artificial Sequence
  Description of Artificial Sequence: Synthetic oligonucleotide
uuccuuccgucuacgaugu

SEQ ID NO: 1220742 - RNA, 19 nt, Artificial Sequence
  Description of Artificial Sequence: Synthetic oligonucleotide
cugggacuuuguuuugugg

SEQ ID NO: 1220743 - RNA, 19 nt, Artificial Sequence
  Description of Artificial Sequence: Synthetic oligonucleotide
cacaacuaacaugggagcc

SEQ ID NO: 1220744 - RNA, 19 nt, Artificial Sequence
  Description of Artificial Sequence: Synthetic oligonucleotide
ugugaucugccuacuuagu

SEQ ID NO: 1220745 - RNA, 19 nt, Artificial Sequence
  Description of Artificial Sequence: Synthetic oligonucleotide
agcugauccauucgguaca

SEQ ID NO: 1220746 - RNA, 19 nt, Artificial Sequence
  Description of Artificial Sequence: Synthetic oligonucleotide
ucuaccuguugguaucgcu

SEQ ID NO: 1220747 - RNA, 19 nt, Artificial Sequence
  Description of Artificial Sequence: Synthetic oligonucleotide
ugucaauguaaggucuuca

SEQ ID NO: 1220748 - RNA, 19 nt, Artificial Sequence
  Description of Artificial Sequence: Synthetic oligonucleotide
aauuugcuuuucgugucca

SEQ ID NO: 1220749 - RNA, 19 nt, Artificial Sequence
  Description of Artificial Sequence: Synthetic oligonucleotide
ucgugcccucauuagagug

SEQ ID NO: 1220750 - RNA, 19 nt, Artificial Sequence
  Description of Artificial Sequence: Synthetic oligonucleotide
uauacucaauucccggguu

SEQ ID NO: 1220751 - RNA, 19 nt, Artificial Sequence
  Description of Artificial Sequence: Synthetic oligonucleotide
aucacugaaugucaaugua

SEQ ID NO: 1220752 - RNA, 19 nt, Artificial Sequence
  Description of Artificial Sequence: Synthetic oligonucleotide
aaauugagaaaggccuuaa

SEQ ID NO: 1220753 - RNA, 19 nt, Artificial Sequence
  Description of Artificial Sequence: Synthetic oligonucleotide
uggagagauaaccuuucuu

SEQ ID NO: 1220754 - RNA, 19 nt, Artificial Sequence
  Description of Artificial Sequence: Synthetic oligonucleotide
acaacuaacaugggagcca

SEQ ID NO: 1220755 - RNA, 19 nt, Artificial Sequence
  Description of Artificial Sequence: Synthetic oligonucleotide
aaccagugggauauguacu

SEQ ID NO: 1220756 - RNA, 19 nt, Artificial Sequence
  Description of Artificial Sequence: Synthetic oligonucleotide
guaguaacccucuaccugu

SEQ ID NO: 1220757 - RNA, 19 nt, Artificial Sequence
  Description of Artificial Sequence: Synthetic oligonucleotide
uucccuagcuaccuugaau

SEQ ID NO: 1220758 - RNA, 19 nt, Artificial Sequence
  Description of Artificial Sequence: Synthetic oligonucleotide
guaacucauccagacuagg

SEQ ID NO: 1220759 - RNA, 19 nt, Artificial Sequence
  Description of Artificial Sequence: Synthetic oligonucleotide
uucugcauuggaccagcac

SEQ ID NO: 1220760 - RNA, 19 nt, Artificial Sequence
  Description of Artificial Sequence: Synthetic oligonucleotide
aucccauuucagaagguag

SEQ ID NO: 1220761 - RNA, 19 nt, Artificial Sequence
  Description of Artificial Sequence: Synthetic oligonucleotide
acauaggaacacauggaug

SEQ ID NO: 1220762 - RNA, 19 nt, Artificial Sequence
  Description of Artificial Sequence: Synthetic oligonucleotide
uguucugcauuggaccagc

SEQ ID NO: 1220763 - RNA, 19 nt, Artificial Sequence
  Description of Artificial Sequence: Synthetic oligonucleotide
ugguuccaauguaggagcc

SEQ ID NO: 1220764 - RNA, 19 nt, Artificial Sequence
  Description of Artificial Sequence: Synthetic oligonucleotide
gagugggaccacccgacag

SEQ ID NO: 1220765 - RNA, 19 nt, Artificial Sequence
  Description of Artificial Sequence: Synthetic oligonucleotide
uugcuuaccuuguacccaa

SEQ ID NO: 1220766 - RNA, 19 nt, Artificial Sequence
  Description of Artificial Sequence: Synthetic oligonucleotide
auguaguuccaagcuuagc

SEQ ID NO: 1220767 - RNA, 19 nt, Artificial Sequence
  Description of Artificial Sequence: Synthetic oligonucleotide
aguguuguuugcuuccauu

SEQ ID NO: 1220768 - RNA, 19 nt, Artificial Sequence
  Description of Artificial Sequence: Synthetic oligonucleotide
agagacaggcuacacuaau

SEQ ID NO: 1220769 - RNA, 19 nt, Artificial Sequence
  Description of Artificial Sequence: Synthetic oligonucleotide
ucugccuacuuaguguuaa

SEQ ID NO: 1220770 - RNA, 19 nt, Artificial Sequence
  Description of Artificial Sequence: Synthetic oligonucleotide
agugggaccacccgacagu

SEQ ID NO: 1220771 - RNA, 19 nt, Artificial Sequence
  Description of Artificial Sequence: Synthetic oligonucleotide
ccuuuacuugucuacauuc

SEQ ID NO: 1220772 - RNA, 19 nt, Artificial Sequence
  Description of Artificial Sequence: Synthetic oligonucleotide
ugcuuuucguguccauaga

SEQ ID NO: 1220773 - RNA, 19 nt, Artificial Sequence
  Description of Artificial Sequence: Synthetic oligonucleotide
uccgucuacgauguaacuc

SEQ ID NO: 1220774 - RNA, 19 nt, Artificial Sequence
  Description of Artificial Sequence: Synthetic oligonucleotide
agcacccugauacaguguu

SEQ ID NO: 1220775 - RNA, 19 nt, Artificial Sequence
  Description of Artificial Sequence: Synthetic oligonucleotide
aggaagccgacuauaagga

SEQ ID NO: 1220776 - RNA, 19 nt, Artificial Sequence
  Description of Artificial Sequence: Synthetic oligonucleotide
gauccauucgguacaucac

SEQ ID NO: 1220777 - RNA, 19 nt, Artificial Sequence
  Description of Artificial Sequence: Synthetic oligonucleotide
uugguaucgcucucuggac

SEQ ID NO: 1220778 - RNA, 19 nt, Artificial Sequence
  Description of Artificial Sequence: Synthetic oligonucleotide
gguaugaaggucugaucug

SEQ ID NO: 1220779 - RNA, 19 nt, Artificial Sequence
  Description of Artificial Sequence: Synthetic oligonucleotide
ucauuagagugggaccacc

SEQ ID NO: 1220780 - RNA, 19 nt, Artificial Sequence
  Description of Artificial Sequence: Synthetic oligonucleotide
uccuuuacuugucuacauu

SEQ ID NO: 1220781 - RNA, 19 nt, Artificial Sequence
  Description of Artificial Sequence: Synthetic oligonucleotide
augucaauguaaggucuuc

SEQ ID NO: 1220782 - RNA, 19 nt, Artificial Sequence
  Description of Artificial Sequence: Synthetic oligonucleotide
auacuccuacuucuuuucu

SEQ ID NO: 1220783 - RNA, 19 nt, Artificial Sequence
  Description of Artificial Sequence: Synthetic oligonucleotide
uacucaauucccggguucu

SEQ ID NO: 1220784 - RNA, 19 nt, Artificial Sequence
  Description of Artificial Sequence: Synthetic oligonucleotide
auaggaggcugagauucuc

SEQ ID NO: 1220785 - RNA, 19 nt, Artificial Sequence
  Description of Artificial Sequence: Synthetic oligonucleotide
caccugauguaguuccaag

SEQ ID NO: 1220786 - RNA, 19 nt, Artificial Sequence
  Description of Artificial Sequence: Synthetic oligonucleotide
uccagacuaggauggggcu

SEQ ID NO: 1220787 - RNA, 19 nt, Artificial Sequence
  Description of Artificial Sequence: Synthetic oligonucleotide
agauacuguuggucggucu

SEQ ID NO: 1220788 - RNA, 19 nt, Artificial Sequence
  Description of Artificial Sequence: Synthetic oligonucleotide
ugggguaugaaggucugau

SEQ ID NO: 1220789 - RNA, 19 nt, Artificial Sequence
  Description of Artificial Sequence: Synthetic oligonucleotide
acccauauacuagggagca

SEQ ID NO: 1220790 - RNA, 19 nt, Artificial Sequence
  Description of Artificial Sequence: Synthetic oligonucleotide
gaaugucaauguaaggucu

SEQ ID NO: 1220791 - RNA, 19 nt, Artificial Sequence
  Description of Artificial Sequence: Synthetic oligonucleotide
auacuagggagcagaacug

SEQ ID NO: 1220792 - RNA, 19 nt, Artificial Sequence
  Description of Artificial Sequence: Synthetic oligonucleotide
gauguaacucauccagacu

SEQ ID NO: 1220793 - RNA, 19 nt, Artificial Sequence
  Description of Artificial Sequence: Synthetic oligonucleotide
caugauccacccaguguug

SEQ ID NO: 1220794 - RNA, 19 nt, Artificial Sequence
  Description of Artificial Sequence: Synthetic oligonucleotide
caagggaauguuccauuuc

SEQ ID NO: 1220795 - RNA, 19 nt, Artificial Sequence
  Description of Artificial Sequence: Synthetic oligonucleotide
cuuagcugcucacuugaga

SEQ ID NO: 1220796 - RNA, 19 nt, Artificial Sequence
  Description of Artificial Sequence: Synthetic oligonucleotide
cucaguagcccuaaacaua

SEQ ID NO: 1220797 - RNA, 19 nt, Artificial Sequence
  Description of Artificial Sequence: Synthetic oligonucleotide
aggcuacacuaauaaauua

SEQ ID NO: 1220798 - RNA, 19 nt, Artificial Sequence
  Description of Artificial Sequence: Synthetic oligonucleotide
guuggucggucuccaaaug

SEQ ID NO: 1220799 - RNA, 19 nt, Artificial Sequence
  Description of Artificial Sequence: Synthetic oligonucleotide
ggagagauaaccuuucuuu

SEQ ID NO: 1220800 - RNA, 19 nt, Artificial Sequence
  Description of Artificial Sequence: Synthetic oligonucleotide
ucgcucucuggacucgggc

SEQ ID NO: 1220801 - RNA, 19 nt, Artificial Sequence
  Description of Artificial Sequence: Synthetic oligonucleotide
guuccaauguaggagccga

SEQ ID NO: 1220802 - RNA, 19 nt, Artificial Sequence
  Description of Artificial Sequence: Synthetic oligonucleotide
caguucuaagaugacucug

SEQ ID NO: 1220803 - RNA, 19 nt, Artificial Sequence
  Description of Artificial Sequence: Synthetic oligonucleotide
cuuucgugcccucauuaga

SEQ ID NO: 1220804 - RNA, 19 nt, Artificial Sequence
  Description of Artificial Sequence: Synthetic oligonucleotide
aaccccagaccaugaucca

SEQ ID NO: 1220805 - RNA, 19 nt, Artificial Sequence
  Description of Artificial Sequence: Synthetic oligonucleotide
gcagugguugaccugccag

SEQ ID NO: 1220806 - RNA, 19 nt, Artificial Sequence
  Description of Artificial Sequence: Synthetic oligonucleotide
auacuggcuauaaucaauu

SEQ ID NO: 1220807 - RNA, 19 nt, Artificial Sequence
  Description of Artificial Sequence: Synthetic oligonucleotide
gguacaucacugaauguca

SEQ ID NO: 1220808 - RNA, 19 nt, Artificial Sequence
  Description of Artificial Sequence: Synthetic oligonucleotide
uucgugcccucauuagagu

SEQ ID NO: 1220809 - RNA, 19 nt, Artificial Sequence
  Description of Artificial Sequence: Synthetic oligonucleotide
uaucgcucucuggacucgg

SEQ ID NO: 1220810 - RNA, 19 nt, Artificial Sequence
  Description of Artificial Sequence: Synthetic oligonucleotide
gcccuaaacauacuccuac

SEQ ID NO: 1220811 - RNA, 19 nt, Artificial Sequence
  Description of Artificial Sequence: Synthetic oligonucleotide
auaugcaaccagugggaua

SEQ ID NO: 1220812 - RNA, 19 nt, Artificial Sequence
  Description of Artificial Sequence: Synthetic oligonucleotide
uccaagcuuagcugcucac

SEQ ID NO: 1220813 - RNA, 19 nt, Artificial Sequence
  Description of Artificial Sequence: Synthetic oligonucleotide
guguccauagaacacuggu

SEQ ID NO: 1220814 - RNA, 19 nt, Artificial Sequence
  Description of Artificial Sequence: Synthetic oligonucleotide
gugcccucauuagaguggg

SEQ ID NO: 1220815 - RNA, 19 nt, Artificial Sequence
  Description of Artificial Sequence: Synthetic oligonucleotide
ugagaucauuccaggccau

SEQ ID NO: 1220816 - RNA, 19 nt, Artificial Sequence
  Description of Artificial Sequence: Synthetic oligonucleotide
ugcaaccagugggauaugu

SEQ ID NO: 1220817 - RNA, 19 nt, Artificial Sequence
  Description of Artificial Sequence: Synthetic oligonucleotide
uuccgucuacgauguaacu

SEQ ID NO: 1220818 - RNA, 19 nt, Artificial Sequence
  Description of Artificial Sequence: Synthetic oligonucleotide
cauauacuagggagcagaa

SEQ ID NO: 1220819 - RNA, 19 nt, Artificial Sequence
  Description of Artificial Sequence: Synthetic oligonucleotide
cuugcuuaccuuguaccca

SEQ ID NO: 1220820 - RNA, 19 nt, Artificial Sequence
  Description of Artificial Sequence: Synthetic oligonucleotide
ggaagccgacuauaaggag

SEQ ID NO: 1220821 - RNA, 19 nt, Artificial Sequence
  Description of Artificial Sequence: Synthetic oligonucleotide
uucccggguucucuugcca

SEQ ID NO: 1220822 - RNA, 19 nt, Artificial Sequence
  Description of Artificial Sequence: Synthetic oligonucleotide
ccgaugguaucacaugacc

SEQ ID NO: 1220823 - RNA, 19 nt, Artificial Sequence
  Description of Artificial Sequence: Synthetic oligonucleotide
accccagaccaugauccac

SEQ ID NO: 1220824 - RNA, 19 nt, Artificial Sequence
  Description of Artificial Sequence: Synthetic oligonucleotide
gaacuggaaguaacuccug

SEQ ID NO: 1220825 - RNA, 19 nt, Artificial Sequence
  Description of Artificial Sequence: Synthetic oligonucleotide
accuuucgugcccucauua

SEQ ID NO: 1220826 - RNA, 19 nt, Artificial Sequence
  Description of Artificial Sequence: Synthetic oligonucleotide
cgauguaacucauccagac

SEQ ID NO: 1220827 - RNA, 19 nt, Artificial Sequence
  Description of Artificial Sequence: Synthetic oligonucleotide
ggauauguacucauucaga

SEQ ID NO: 1220828 - RNA, 19 nt, Artificial Sequence
  Description of Artificial Sequence: Synthetic oligonucleotide
caauucccggguucucuug

SEQ ID NO: 1220829 - RNA, 19 nt, Artificial Sequence
  Description of Artificial Sequence: Synthetic oligonucleotide
cuauacucaauucccgggu

SEQ ID NO: 1220830 - RNA, 19 nt, Artificial Sequence
  Description of Artificial Sequence: Synthetic oligonucleotide
acccucuaccuguugguau

SEQ ID NO: 1220831 - RNA, 19 nt, Artificial Sequence
  Description of Artificial Sequence: Synthetic oligonucleotide
gaucugccuacuuaguguu

SEQ ID NO: 1220832 - RNA, 19 nt, Artificial Sequence
  Description of Artificial Sequence: Synthetic oligonucleotide
cuguugguaucgcucucug

SEQ ID NO: 1220833 - RNA, 19 nt, Artificial Sequence
  Description of Artificial Sequence: Synthetic oligonucleotide
gggaccacccgacaguuuc

SEQ ID NO: 1220834 - RNA, 19 nt, Artificial Sequence
  Description of Artificial Sequence: Synthetic oligonucleotide
agugcacaacuaacauggg

SEQ ID NO: 1220835 - RNA, 19 nt, Artificial Sequence
  Description of Artificial Sequence: Synthetic oligonucleotide
gccauuuuggaggcagugg

SEQ ID NO: 1220836 - RNA, 19 nt, Artificial Sequence
  Description of Artificial Sequence: Synthetic oligonucleotide
uccacccaguguuguuugc

SEQ ID NO: 1220837 - RNA, 19 nt, Artificial Sequence
  Description of Artificial Sequence: Synthetic oligonucleotide
auagaacacugguucucua

SEQ ID NO: 1220838 - RNA, 19 nt, Artificial Sequence
  Description of Artificial Sequence: Synthetic oligonucleotide
ccgucuacgauguaacuca

SEQ ID NO: 1220839 - RNA, 19 nt, Artificial Sequence
  Description of Artificial Sequence: Synthetic oligonucleotide
gggccauuauuuccuuccg

SEQ ID NO: 1220840 - RNA, 19 nt, Artificial Sequence
  Description of Artificial Sequence: Synthetic oligonucleotide
cccucauuagagugggacc

SEQ ID NO: 1220841 - RNA, 19 nt, Artificial Sequence
  Description of Artificial Sequence: Synthetic oligonucleotide
acucaauucccggguucuc

SEQ ID NO: 1220842 - RNA, 19 nt, Artificial Sequence
  Description of Artificial Sequence: Synthetic oligonucleotide
uacuguuggucggucucca

SEQ ID NO: 1220843 - RNA, 19 nt, Artificial Sequence
  Description of Artificial Sequence: Synthetic oligonucleotide
acuugugaucugccuacuu

SEQ ID NO: 1220844 - RNA, 19 nt, Artificial Sequence
  Description of Artificial Sequence: Synthetic oligonucleotide
acgauguaacucauccaga

SEQ ID NO: 1220845 - RNA, 19 nt, Artificial Sequence
  Description of Artificial Sequence: Synthetic oligonucleotide
cucauuagagugggaccac

SEQ ID NO: 1220846 - RNA, 19 nt, Artificial Sequence
  Description of Artificial Sequence: Synthetic oligonucleotide
ucccggguucucuugccaa

SEQ ID NO: 1220847 - RNA, 19 nt, Artificial Sequence
  Description of Artificial Sequence: Synthetic oligonucleotide
ccuuucgugcccucauuag

SEQ ID NO: 1220848 - RNA, 19 nt, Artificial Sequence
  Description of Artificial Sequence: Synthetic oligonucleotide
gcuuuucguguccauagaa

SEQ ID NO: 1220849 - RNA, 19 nt, Artificial Sequence
  Description of Artificial Sequence: Synthetic oligonucleotide
aacccucuaccuguuggua

SEQ ID NO: 1220850 - RNA, 19 nt, Artificial Sequence
  Description of Artificial Sequence: Synthetic oligonucleotide
ccccagaccaugauccacc

SEQ ID NO: 1220851 - RNA, 19 nt, Artificial Sequence
  Description of Artificial Sequence: Synthetic oligonucleotide
agguggagagauaaccuuu

SEQ ID NO: 1220852 - RNA, 19 nt, Artificial Sequence
  Description of Artificial Sequence: Synthetic oligonucleotide
caaagcugauccauucggu

SEQ ID NO: 1220853 - RNA, 19 nt, Artificial Sequence
  Description of Artificial Sequence: Synthetic oligonucleotide
uaguaacccucuaccuguu

SEQ ID NO: 1220854 - RNA, 19 nt, Artificial Sequence
  Description of Artificial Sequence: Synthetic oligonucleotide
accacccgacaguuuccag

SEQ ID NO: 1220855 - RNA, 19 nt, Artificial Sequence
  Description of Artificial Sequence: Synthetic oligonucleotide
guacucauucagauccaga

SEQ ID NO: 1220856 - RNA, 19 nt, Artificial Sequence
  Description of Artificial Sequence: Synthetic oligonucleotide
caucauuuccacacucccu

SEQ ID NO: 1220857 - RNA, 19 nt, Artificial Sequence
  Description of Artificial Sequence: Synthetic oligonucleotide
cacuaguuuccacugcucu

SEQ ID NO: 1220858 - RNA, 19 nt, Artificial Sequence
  Description of Artificial Sequence: Synthetic oligonucleotide
guuugauaggaggcugaga

SEQ ID NO: 1220859 - RNA, 19 nt, Artificial Sequence
  Description of Artificial Sequence: Synthetic oligonucleotide
cgugcccucauuagagugg

SEQ ID NO: 1220860 - RNA, 19 nt, Artificial Sequence
  Description of Artificial Sequence: Synthetic oligonucleotide
gguggagagauaaccuuuc

SEQ ID NO: 1220861 - RNA, 19 nt, Artificial Sequence
  Description of Artificial Sequence: Synthetic oligonucleotide
ugcauuggaccagcacccu

SEQ ID NO: 1220862 - RNA, 19 nt, Artificial Sequence
  Description of Artificial Sequence: Synthetic oligonucleotide
cuguuggucggucuccaaa

SEQ ID NO: 1220863 - RNA, 19 nt, Artificial Sequence
  Description of Artificial Sequence: Synthetic oligonucleotide
uaggagccgaugguaucac

SEQ ID NO: 1220864 - RNA, 19 nt, Artificial Sequence
  Description of Artificial Sequence: Synthetic oligonucleotide
gcuaccuugaauucuucau

SEQ ID NO: 1220865 - RNA, 19 nt, Artificial Sequence
  Description of Artificial Sequence: Synthetic oligonucleotide
cugagugcacaacuaacau

SEQ ID NO: 1220866 - RNA, 19 nt, Artificial Sequence
  Description of Artificial Sequence: Synthetic oligonucleotide
agugggauauguacucauu

SEQ ID NO: 1220867 - RNA, 19 nt, Artificial Sequence
  Description of Artificial Sequence: Synthetic oligonucleotide
gcccucauuagagugggac

SEQ ID NO: 1220868 - RNA, 19 nt, Artificial Sequence
  Description of Artificial Sequence: Synthetic oligonucleotide
aggagccgaugguaucaca

SEQ ID NO: 1220869 - RNA, 19 nt, Artificial Sequence
  Description of Artificial Sequence: Synthetic oligonucleotide
ccucauuagagugggacca

SEQ ID NO: 1220870 - RNA, 19 nt, Artificial Sequence
  Description of Artificial Sequence: Synthetic oligonucleotide
ggcuacacuaauaaauuau

SEQ ID NO: 1220871 - RNA, 19 nt, Artificial Sequence
  Description of Artificial Sequence: Synthetic oligonucleotide
ccaaaccgagauacuguug

SEQ ID NO: 1220872 - RNA, 19 nt, Artificial Sequence
  Description of Artificial Sequence: Synthetic oligonucleotide
gaagcagggcacccauaua

SEQ ID NO: 1220873 - RNA, 19 nt, Artificial Sequence
  Description of Artificial Sequence: Synthetic oligonucleotide
gggguaugaaggucugauc

SEQ ID NO: 1220874 - RNA, 19 nt, Artificial Sequence
  Description of Artificial Sequence: Synthetic oligonucleotide
cucuaccuguugguaucgc

SEQ ID NO: 1220875 - RNA, 19 nt, Artificial Sequence
  Description of Artificial Sequence: Synthetic oligonucleotide
gacuauaaggaggcucccu

SEQ ID NO: 1220876 - RNA, 19 nt, Artificial Sequence
  Description of Artificial Sequence: Synthetic oligonucleotide
ccugauguaguuccaagcu

SEQ ID NO: 1220877 - RNA, 19 nt, Artificial Sequence
  Description of Artificial Sequence: Synthetic oligonucleotide
aucgcucucuggacucggg

SEQ ID NO: 1220878 - RNA, 19 nt, Artificial Sequence
  Description of Artificial Sequence: Synthetic oligonucleotide
ggcgcaaaaggagguggag

SEQ ID NO: 1220879 - RNA, 19 nt, Artificial Sequence
  Description of Artificial Sequence: Synthetic oligonucleotide
acuguuggucggucuccaa

SEQ ID NO: 1220880 - RNA, 19 nt, Artificial Sequence
  Description of Artificial Sequence: Synthetic oligonucleotide
gaaggcuguuuuguuuugu

SEQ ID NO: 1220881 - RNA, 19 nt, Artificial Sequence
  Description of Artificial Sequence: Synthetic oligonucleotide
caagcuuagcugcucacuu

SEQ ID NO: 1220882 - RNA, 19 nt, Artificial Sequence
  Description of Artificial Sequence: Synthetic oligonucleotide
gaccacccgacaguuucca

SEQ ID NO: 1220883 - RNA, 19 nt, Artificial Sequence
  Description of Artificial Sequence: Synthetic oligonucleotide
uuggaccagcacccugaua

SEQ ID NO: 1220884 - RNA, 19 nt, Artificial Sequence
  Description of Artificial Sequence: Synthetic oligonucleotide
ccauagaacacugguucuc

SEQ ID NO: 1220885 - RNA, 19 nt, Artificial Sequence
  Description of Artificial Sequence: Synthetic oligonucleotide
agaccaugauccacccagu

SEQ ID NO: 1220886 - RNA, 19 nt, Artificial Sequence
  Description of Artificial Sequence: Synthetic oligonucleotide
cccucuaccuguugguauc

SEQ ID NO: 1220887 - RNA, 19 nt, Artificial Sequence
  Description of Artificial Sequence: Synthetic oligonucleotide
gccgacuauaaggaggcuc

SEQ ID NO: 1220888 - RNA, 19 nt, Artificial Sequence
  Description of Artificial Sequence: Synthetic oligonucleotide
cgaguugggccauuauuuc

SEQ ID NO: 1220889 - RNA, 19 nt, Artificial Sequence
  Description of Artificial Sequence: Synthetic oligonucleotide
cucgaguugggccauuauu

SEQ ID NO: 1220890 - RNA, 19 nt, Artificial Sequence
  Description of Artificial Sequence: Synthetic oligonucleotide
cccagaccaugauccaccc

SEQ ID NO: 1220891 - RNA, 19 nt, Artificial Sequence
  Description of Artificial Sequence: Synthetic oligonucleotide
agacuaggauggggcuggg

SEQ ID NO: 1220892 - RNA, 19 nt, Artificial Sequence
  Description of Artificial Sequence: Synthetic oligonucleotide
cccuagcuaccuugaauuc

SEQ ID NO: 1220893 - RNA, 19 nt, Artificial Sequence
  Description of Artificial Sequence: Synthetic oligonucleotide
ccucuaccuguugguaucg

SEQ ID NO: 1220894 - RNA, 19 nt, Artificial Sequence
  Description of Artificial Sequence: Synthetic oligonucleotide
aacuaacaugggagccaaa

SEQ ID NO: 1220895 - RNA, 19 nt, Artificial Sequence
  Description of Artificial Sequence: Synthetic oligonucleotide
uccucgaguugggccauua

SEQ ID NO: 1220896 - RNA, 19 nt, Artificial Sequence
  Description of Artificial Sequence: Synthetic oligonucleotide
agcccuaaacauacuccua

SEQ ID NO: 1220897 - RNA, 19 nt, Artificial Sequence
  Description of Artificial Sequence: Synthetic oligonucleotide
cuucccuagcuaccuugaa

SEQ ID NO: 1220898 - RNA, 19 nt, Artificial Sequence
  Description of Artificial Sequence: Synthetic oligonucleotide
ccauucgguacaucacuga

SEQ ID NO: 1220899 - RNA, 19 nt, Artificial Sequence
  Description of Artificial Sequence: Synthetic oligonucleotide
gcgcaaaaggagguggaga

SEQ ID NO: 1220900 - RNA, 19 nt, Artificial Sequence
  Description of Artificial Sequence: Synthetic oligonucleotide
gccgaugguaucacaugac

SEQ ID NO: 1220901 - RNA, 19 nt, Artificial Sequence
  Description of Artificial Sequence: Synthetic oligonucleotide
ugggaccacccgacaguuu

SEQ ID NO: 1220902 - RNA, 19 nt, Artificial Sequence
  Description of Artificial Sequence: Synthetic oligonucleotide
ggccagagagacaggcuac

SEQ ID NO: 1220903 - RNA, 19 nt, Artificial Sequence
  Description of Artificial Sequence: Synthetic oligonucleotide
cacccgacaguuuccaguu

SEQ ID NO: 1220904 - RNA, 19 nt, Artificial Sequence
  Description of Artificial Sequence: Synthetic oligonucleotide
agauggcaccaaaccgaga

SEQ ID NO: 1220905 - RNA, 19 nt, Artificial Sequence
  Description of Artificial Sequence: Synthetic oligonucleotide
ggaccacccgacaguuucc

SEQ ID NO: 1220906 - RNA, 19 nt, Artificial Sequence
  Description of Artificial Sequence: Synthetic oligonucleotide
cugauccauucgguacauc

SEQ ID NO: 1220907 - RNA, 19 nt, Artificial Sequence
  Description of Artificial Sequence: Synthetic oligonucleotide
gacuugugaucugccuacu

SEQ ID NO: 1220908 - RNA, 19 nt, Artificial Sequence
  Description of Artificial Sequence: Synthetic oligonucleotide
aggccauuuuggaggcagu

SEQ ID NO: 1220909 - RNA, 19 nt, Artificial Sequence
  Description of Artificial Sequence: Synthetic oligonucleotide
ccuuccgucuacgauguaa

SEQ ID NO: 1220910 - RNA, 19 nt, Artificial Sequence
  Description of Artificial Sequence: Synthetic oligonucleotide
ggagccgaugguaucacau

SEQ ID NO: 1220911 - RNA, 19 nt, Artificial Sequence
  Description of Artificial Sequence: Synthetic oligonucleotide
acacucccugcugccacau

SEQ ID NO: 1220912 - RNA, 19 nt, Artificial Sequence
  Description of Artificial Sequence: Synthetic oligonucleotide
ccaguucuaagaugacucu

SEQ ID NO: 1220913 - RNA, 19 nt, Artificial Sequence
  Description of Artificial Sequence: Synthetic oligonucleotide
ggcagugguugaccugcca

SEQ ID NO: 1220914 - RNA, 19 nt, Artificial Sequence
  Description of Artificial Sequence: Synthetic oligonucleotide
gccacuggguaguaacccu

SEQ ID NO: 1220915 - RNA, 19 nt, Artificial Sequence
  Description of Artificial Sequence: Synthetic oligonucleotide
cccauauacuagggagcag

SEQ ID NO: 1220916 - RNA, 19 nt, Artificial Sequence
  Description of Artificial Sequence: Synthetic oligonucleotide
aggagccacuggguaguaa

SEQ ID NO: 1220917 - RNA, 19 nt, Artificial Sequence
  Description of Artificial Sequence: Synthetic oligonucleotide
aucugccuacuuaguguua

SEQ ID NO: 1220918 - RNA, 19 nt, Artificial Sequence
  Description of Artificial Sequence: Synthetic oligonucleotide
agccgacuauaaggaggcu

SEQ ID NO: 1220919 - RNA, 19 nt, Artificial Sequence
  Description of Artificial Sequence: Synthetic oligonucleotide
cugggguaugaaggucuga

SEQ ID NO: 1220920 - RNA, 19 nt, Artificial Sequence
  Description of Artificial Sequence: Synthetic oligonucleotide
ccuagcuaccuugaauucu

SEQ ID NO: 1220921 - RNA, 19 nt, Artificial Sequence
  Description of Artificial Sequence: Synthetic oligonucleotide
uccuuccgucuacgaugua

SEQ ID NO: 1220922 - RNA, 19 nt, Artificial Sequence
  Description of Artificial Sequence: Synthetic oligonucleotide
cccgacaguuuccaguucu

SEQ ID NO: 1220923 - RNA, 19 nt, Artificial Sequence
  Description of Artificial Sequence: Synthetic oligonucleotide
ccacccgacaguuuccagu

SEQ ID NO: 1220924 - RNA, 19 nt, Artificial Sequence
  Description of Artificial Sequence: Synthetic oligonucleotide
ggacucgggcacauaggaa

SEQ ID NO: 1220925 - RNA, 19 nt, Artificial Sequence
  Description of Artificial Sequence: Synthetic oligonucleotide
ccagugggauauguacuca

SEQ ID NO: 1220926 - RNA, 19 nt, Artificial Sequence
  Description of Artificial Sequence: Synthetic oligonucleotide
guacuucccuagcuaccuu

SEQ ID NO: 1220927 - RNA, 19 nt, Artificial Sequence
  Description of Artificial Sequence: Synthetic oligonucleotide
caguagcccuaaacauacu

SEQ ID NO: 1220928 - RNA, 19 nt, Artificial Sequence
  Description of Artificial Sequence: Synthetic oligonucleotide
gguugaccugccagggugu

SEQ ID NO: 1220929 - RNA, 19 nt, Artificial Sequence
  Description of Artificial Sequence: Synthetic oligonucleotide
caguguuguuugcuuccau

SEQ ID NO: 1220930 - RNA, 19 nt, Artificial Sequence
  Description of Artificial Sequence: Synthetic oligonucleotide
ccaagcuuagcugcucacu

SEQ ID NO: 1220931 - RNA, 19 nt, Artificial Sequence
  Description of Artificial Sequence: Synthetic oligonucleotide
ggucugaucugagcuggau

SEQ ID NO: 1220932 - RNA, 19 nt, Artificial Sequence
  Description of Artificial Sequence: Synthetic oligonucleotide
ccgacaguuuccaguucua

SEQ ID NO: 1220933 - RNA, 19 nt, Artificial Sequence
  Description of Artificial Sequence: Synthetic oligonucleotide
guugaccugccaggguguu

SEQ ID NO: 1220934 - RNA, 19 nt, Artificial Sequence
  Description of Artificial Sequence: Synthetic oligonucleotide
gcugauccauucgguacau

SEQ ID NO: 1220935 - RNA, 19 nt, Artificial Sequence
  Description of Artificial Sequence: Synthetic oligonucleotide
cucuggacucgggcacaua

SEQ ID NO: 1220936 - RNA, 19 nt, Artificial Sequence
  Description of Artificial Sequence: Synthetic oligonucleotide
cccggguucucuugccaau

SEQ ID NO: 1220937 - RNA, 19 nt, Artificial Sequence
  Description of Artificial Sequence: Synthetic oligonucleotide
cggguucucuugccaauuu

SEQ ID NO: 1220938 - RNA, 19 nt, Artificial Sequence
  Description of Artificial Sequence: Synthetic oligonucleotide
ccggguucucuugccaauu

SEQ ID NO: 1220939 - RNA, 19 nt, Artificial Sequence
  Description of Artificial Sequence: Synthetic oligonucleotide
aauaauagugacugcaagc

SEQ ID NO: 1220940 - RNA, 19 nt, Artificial Sequence
  Description of Artificial Sequence: Synthetic oligonucleotide
augaaauagagcuaugacc

SEQ ID NO: 1220941 - RNA, 19 nt, Artificial Sequence
  Description of Artificial Sequence: Synthetic oligonucleotide
ucugcuaacacugacaggg

SEQ ID NO: 1220942 - RNA, 19 nt, Artificial Sequence
  Description of Artificial Sequence: Synthetic oligonucleotide
uuagaaaugggacaauuag

SEQ ID NO: 1220943 - RNA, 19 nt, Artificial Sequence
  Description of Artificial Sequence: Synthetic oligonucleotide
ugacauacaaguuugaaac

SEQ ID NO: 1220944 - RNA, 19 nt, Artificial Sequence
  Description of Artificial Sequence: Synthetic oligonucleotide
aagaauaacucucauccag

SEQ ID NO: 1220945 - RNA, 19 nt, Artificial Sequence
  Description of Artificial Sequence: Synthetic oligonucleotide
agaaguugccacuaaaucg

SEQ ID NO: 1220946 - RNA, 19 nt, Artificial Sequence
  Description of Artificial Sequence: Synthetic oligonucleotide
aauccgaugacaugauccc

SEQ ID NO: 1220947 - RNA, 19 nt, Artificial Sequence
  Description of Artificial Sequence: Synthetic oligonucleotide
acagacuuagcucagcgcc

SEQ ID NO: 1220948 - RNA, 19 nt, Artificial Sequence
  Description of Artificial Sequence: Synthetic oligonucleotide
uuuacuaagaaguugccac

SEQ ID NO: 1220949 - RNA, 19 nt, Artificial Sequence
  Description of Artificial Sequence: Synthetic oligonucleotide
ugcuccauaacucauuagg

SEQ ID NO: 1220950 - RNA, 19 nt, Artificial Sequence
  Description of Artificial Sequence: Synthetic oligonucleotide
acaugaagaugauauauac

SEQ ID NO: 1220951 - RNA, 19 nt, Artificial Sequence
  Description of Artificial Sequence: Synthetic oligonucleotide
aacaagggaauauucagug

SEQ ID NO: 1220952 - RNA, 19 nt, Artificial Sequence
  Description of Artificial Sequence: Synthetic oligonucleotide
aaaugggacaauuagcacu

SEQ ID NO: 1220953 - RNA, 19 nt, Artificial Sequence
  Description of Artificial Sequence: Synthetic oligonucleotide
auauaaaugcuccauaacu

SEQ ID NO: 1220954 - RNA, 19 nt, Artificial Sequence
  Description of Artificial Sequence: Synthetic oligonucleotide
aaauaauagugacugcaag

SEQ ID NO: 1220955 - RNA, 19 nt, Artificial Sequence
  Description of Artificial Sequence: Synthetic oligonucleotide
cauuauuugacagaaacag

SEQ ID NO: 1220956 - RNA, 19 nt, Artificial Sequence
  Description of Artificial Sequence: Synthetic oligonucleotide
cacuaaaucgaacagacag

SEQ ID NO: 1220957 - RNA, 19 nt, Artificial Sequence
  Description of Artificial Sequence: Synthetic oligonucleotide
uguuccuuaacaaauauuu

SEQ ID NO: 1220958 - RNA, 19 nt, Artificial Sequence
  Description of Artificial Sequence: Synthetic oligonucleotide
cauuagauauaaaugcucc

SEQ ID NO: 1220959 - RNA, 19 nt, Artificial Sequence
  Description of Artificial Sequence: Synthetic oligonucleotide
aguaacaaagaccuccgac

SEQ ID NO: 1220960 - RNA, 19 nt, Artificial Sequence
  Description of Artificial Sequence: Synthetic oligonucleotide
aaugagguucauaagauug

SEQ ID NO: 1220961 - RNA, 19 nt, Artificial Sequence
  Description of Artificial Sequence: Synthetic oligonucleotide
gacaugaucccaaacagcg

SEQ ID NO: 1220962 - RNA, 19 nt, Artificial Sequence
  Description of Artificial Sequence: Synthetic oligonucleotide
uacaaguuugaaacuaggg

SEQ ID NO: 1220963 - RNA, 19 nt, Artificial Sequence
  Description of Artificial Sequence: Synthetic oligonucleotide
acucucauccaguagaagg

SEQ ID NO: 1220964 - RNA, 19 nt, Artificial Sequence
  Description of Artificial Sequence: Synthetic oligonucleotide
agaauuaugggaauauucg

SEQ ID NO: 1220965 - RNA, 19 nt, Artificial Sequence
  Description of Artificial Sequence: Synthetic oligonucleotide
uuugacagaaacaguaugu

SEQ ID NO: 1220966 - RNA, 19 nt, Artificial Sequence
  Description of Artificial Sequence: Synthetic oligonucleotide
auccaaauaguuucugggc

SEQ ID NO: 1220967 - RNA, 19 nt, Artificial Sequence
  Description of Artificial Sequence: Synthetic oligonucleotide
aaacagcggaaucugacag

SEQ ID NO: 1220968 - RNA, 19 nt, Artificial Sequence
  Description of Artificial Sequence: Synthetic oligonucleotide
aagaguguuauagcagucc

SEQ ID NO: 1220969 - RNA, 19 nt, Artificial Sequence
  Description of Artificial Sequence: Synthetic oligonucleotide
gaaccagacacuucuaucc

SEQ ID NO: 1220970 - RNA, 19 nt, Artificial Sequence
  Description of Artificial Sequence: Synthetic oligonucleotide
cugaccaacagcuaggcag

SEQ ID NO: 1220971 - RNA, 19 nt, Artificial Sequence
  Description of Artificial Sequence: Synthetic oligonucleotide
ucuaucuuuggguguaucg

SEQ ID NO: 1220972 - RNA, 19 nt, Artificial Sequence
  Description of Artificial Sequence: Synthetic oligonucleotide
uucgauguguagaagagcu

SEQ ID NO: 1220973 - RNA, 19 nt, Artificial Sequence
  Description of Artificial Sequence: Synthetic oligonucleotide
uacaauuggggaaaugccc

SEQ ID NO: 1220974 - RNA, 19 nt, Artificial Sequence
  Description of Artificial Sequence: Synthetic oligonucleotide
uauucgauguguagaagag

SEQ ID NO: 1220975 - RNA, 19 nt, Artificial Sequence
  Description of Artificial Sequence: Synthetic oligonucleotide
auaaauaauagugacugca

SEQ ID NO: 1220976 - RNA, 19 nt, Artificial Sequence
  Description of Artificial Sequence: Synthetic oligonucleotide
uuacaauuggggaaaugcc

SEQ ID NO: 1220977 - RNA, 19 nt, Artificial Sequence
  Description of Artificial Sequence: Synthetic oligonucleotide
ugaauuuuccuuucgggcu

SEQ ID NO: 1220978 - RNA, 19 nt, Artificial Sequence
  Description of Artificial Sequence: Synthetic oligonucleotide
uauaugacaacagcaaaca

SEQ ID NO: 1220979 - RNA, 19 nt, Artificial Sequence
  Description of Artificial Sequence: Synthetic oligonucleotide
auuaugggaauauucgaug

SEQ ID NO: 1220980 - RNA, 19 nt, Artificial Sequence
  Description of Artificial Sequence: Synthetic oligonucleotide
guuacaauuggggaaaugc

SEQ ID NO: 1220981 - RNA, 19 nt, Artificial Sequence
  Description of Artificial Sequence: Synthetic oligonucleotide
accuguuaagcucauggac

SEQ ID NO: 1220982 - RNA, 19 nt, Artificial Sequence
  Description of Artificial Sequence: Synthetic oligonucleotide
cacgcaaagaaauauauga

SEQ ID NO: 1220983 - RNA, 19 nt, Artificial Sequence
  Description of Artificial Sequence: Synthetic oligonucleotide
uuagccacgucuuuggcug

SEQ ID NO: 1220984 - RNA, 19 nt, Artificial Sequence
  Description of Artificial Sequence: Synthetic oligonucleotide
aacagcggaaucugacagc

SEQ ID NO: 1220985 - RNA, 19 nt, Artificial Sequence
  Description of Artificial Sequence: Synthetic oligonucleotide
ucucuaaacugaauuuucc

SEQ ID NO: 1220986 - RNA, 19 nt, Artificial Sequence
  Description of Artificial Sequence: Synthetic oligonucleotide
gaauccgaugacaugaucc

SEQ ID NO: 1220987 - RNA, 19 nt, Artificial Sequence
  Description of Artificial Sequence: Synthetic oligonucleotide
agguucauaagauugggga

SEQ ID NO: 1220988 - RNA, 19 nt, Artificial Sequence
  Description of Artificial Sequence: Synthetic oligonucleotide
ugaagaguguuauagcagu

SEQ ID NO: 1220989 - RNA, 19 nt, Artificial Sequence
  Description of Artificial Sequence: Synthetic oligonucleotide
caagucaugacauacacaa

SEQ ID NO: 1220990 - RNA, 19 nt, Artificial Sequence
  Description of Artificial Sequence: Synthetic oligonucleotide
agucugcuaacacugacag

SEQ ID NO: 1220991 - RNA, 19 nt, Artificial Sequence
  Description of Artificial Sequence: Synthetic oligonucleotide
ugacagcacacuaagaaaa

SEQ ID NO: 1220992 - RNA, 19 nt, Artificial Sequence
  Description of Artificial Sequence: Synthetic oligonucleotide
auuugacagaaacaguaug

SEQ ID NO: 1220993 - RNA, 19 nt, Artificial Sequence
  Description of Artificial Sequence: Synthetic oligonucleotide
gauauaaaugcuccauaac

SEQ ID NO: 1220994 - RNA, 19 nt, Artificial Sequence
  Description of Artificial Sequence: Synthetic oligonucleotide
auaauagugacugcaagca

SEQ ID NO: 1220995 - RNA, 19 nt, Artificial Sequence
  Description of Artificial Sequence: Synthetic oligonucleotide
caugggcaacacuagaugg

SEQ ID NO: 1220996 - RNA, 19 nt, Artificial Sequence
  Description of Artificial Sequence: Synthetic oligonucleotide
acuaaaucgaacagacagc

SEQ ID NO: 1220997 - RNA, 19 nt, Artificial Sequence
  Description of Artificial Sequence: Synthetic oligonucleotide
uccauaacucauuagggaa

SEQ ID NO: 1220998 - RNA, 19 nt, Artificial Sequence
  Description of Artificial Sequence: Synthetic oligonucleotide
uuuggcuccagcuaacaac

SEQ ID NO: 1220999 - RNA, 19 nt, Artificial Sequence
  Description of Artificial Sequence: Synthetic oligonucleotide
aguagaagggaucugcaga

SEQ ID NO: 1221000 - RNA, 19 nt, Artificial Sequence
  Description of Artificial Sequence: Synthetic oligonucleotide
ucuguuggaugcaagaaua

SEQ ID NO: 1221001 - RNA, 19 nt, Artificial Sequence
  Description of Artificial Sequence: Synthetic oligonucleotide
uuauagcaguccauaauac

SEQ ID NO: 1221002 - RNA, 19 nt, Artificial Sequence
  Description of Artificial Sequence: Synthetic oligonucleotide
uucccuuucacacacgcaa

SEQ ID NO: 1221003 - RNA, 19 nt, Artificial Sequence
  Description of Artificial Sequence: Synthetic oligonucleotide
uggggaaaugcccaauucc

SEQ ID NO: 1221004 - RNA, 19 nt, Artificial Sequence
  Description of Artificial Sequence: Synthetic oligonucleotide
uauauacaacuacauggac

SEQ ID NO: 1221005 - RNA, 19 nt, Artificial Sequence
  Description of Artificial Sequence: Synthetic oligonucleotide
guaacaaagaccuccgaca

SEQ ID NO: 1221006 - RNA, 19 nt, Artificial Sequence
  Description of Artificial Sequence: Synthetic oligonucleotide
agauuggggagguucugcc

SEQ ID NO: 1221007 - RNA, 19 nt, Artificial Sequence
  Description of Artificial Sequence: Synthetic oligonucleotide
agugucaacaaauaaugua

SEQ ID NO: 1221008 - RNA, 19 nt, Artificial Sequence
  Description of Artificial Sequence: Synthetic oligonucleotide
aacuagggcagacuggaga

SEQ ID NO: 1221009 - RNA, 19 nt, Artificial Sequence
  Description of Artificial Sequence: Synthetic oligonucleotide
uaagaaguugccacuaaau

SEQ ID NO: 1221010 - RNA, 19 nt, Artificial Sequence
  Description of Artificial Sequence: Synthetic oligonucleotide
ucugggaaaugacauacaa

SEQ ID NO: 1221011 - RNA, 19 nt, Artificial Sequence
  Description of Artificial Sequence: Synthetic oligonucleotide
cagauaguaacaaagaccu

SEQ ID NO: 1221012 - RNA, 19 nt, Artificial Sequence
  Description of Artificial Sequence: Synthetic oligonucleotide
aauuaugggaauauucgau

SEQ ID NO: 1221013 - RNA, 19 nt, Artificial Sequence
  Description of Artificial Sequence: Synthetic oligonucleotide
aauagagcuaugaccgcac

SEQ ID NO: 1221014 - RNA, 19 nt, Artificial Sequence
  Description of Artificial Sequence: Synthetic oligonucleotide
cuggauaguggcaauuugc

SEQ ID NO: 1221015 - RNA, 19 nt, Artificial Sequence
  Description of Artificial Sequence: Synthetic oligonucleotide
guugccacuaaaucgaaca

SEQ ID NO: 1221016 - RNA, 19 nt, Artificial Sequence
  Description of Artificial Sequence: Synthetic oligonucleotide
gauaguggcaauuugcacu

SEQ ID NO: 1221017 - RNA, 19 nt, Artificial Sequence
  Description of Artificial Sequence: Synthetic oligonucleotide
uuuuaaggcagcugguacu

SEQ ID NO: 1221018 - RNA, 19 nt, Artificial Sequence
  Description of Artificial Sequence: Synthetic oligonucleotide
gaauuaugggaauauucga

SEQ ID NO: 1221019 - RNA, 19 nt, Artificial Sequence
  Description of Artificial Sequence: Synthetic oligonucleotide
uuaaugggcaagucaacac

SEQ ID NO: 1221020 - RNA, 19 nt, Artificial Sequence
  Description of Artificial Sequence: Synthetic oligonucleotide
aaagcuaauccaugucacu

SEQ ID NO: 1221021 - RNA, 19 nt, Artificial Sequence
  Description of Artificial Sequence: Synthetic oligonucleotide
agagcucuaucuuugggug

SEQ ID NO: 1221022 - RNA, 19 nt, Artificial Sequence
  Description of Artificial Sequence: Synthetic oligonucleotide
uguuauagcaguccauaau

SEQ ID NO: 1221023 - RNA, 19 nt, Artificial Sequence
  Description of Artificial Sequence: Synthetic oligonucleotide
uaugaccgcacccucaagu

SEQ ID NO: 1221024 - RNA, 19 nt, Artificial Sequence
  Description of Artificial Sequence: Synthetic oligonucleotide
uauagcaguccauaauacu

SEQ ID NO: 1221025 - RNA, 19 nt, Artificial Sequence
  Description of Artificial Sequence: Synthetic oligonucleotide
aauauggcacccauggacu

SEQ ID NO: 1221026 - RNA, 19 nt, Artificial Sequence
  Description of Artificial Sequence: Synthetic oligonucleotide
uaccgggccgacuuaaugg

SEQ ID NO: 1221027 - RNA, 19 nt, Artificial Sequence
  Description of Artificial Sequence: Synthetic oligonucleotide
gaauauucgauguguagaa

SEQ ID NO: 1221028 - RNA, 19 nt, Artificial Sequence
  Description of Artificial Sequence: Synthetic oligonucleotide
gagaauuaugggaauauuc

SEQ ID NO: 1221029 - RNA, 19 nt, Artificial Sequence
  Description of Artificial Sequence: Synthetic oligonucleotide
agauguuacaauuggggaa

SEQ ID NO: 1221030 - RNA, 19 nt, Artificial Sequence
  Description of Artificial Sequence: Synthetic oligonucleotide
gaaguugccacuaaaucga

SEQ ID NO: 1221031 - RNA, 19 nt, Artificial Sequence
  Description of Artificial Sequence: Synthetic oligonucleotide
ugagguucauaagauuggg

SEQ ID NO: 1221032 - RNA, 19 nt, Artificial Sequence
  Description of Artificial Sequence: Synthetic oligonucleotide
ugucaaaauauuuucccuu

SEQ ID NO: 1221033 - RNA, 19 nt, Artificial Sequence
  Description of Artificial Sequence: Synthetic oligonucleotide
aaugcuccauaacucauua

SEQ ID NO: 1221034 - RNA, 19 nt, Artificial Sequence
  Description of Artificial Sequence: Synthetic oligonucleotide
auauauacaacuacaugga

SEQ ID NO: 1221035 - RNA, 19 nt, Artificial Sequence
  Description of Artificial Sequence: Synthetic oligonucleotide
aaauagagcuaugaccgca

SEQ ID NO: 1221036 - RNA, 19 nt, Artificial Sequence
  Description of Artificial Sequence: Synthetic oligonucleotide
guuauagcaguccauaaua

SEQ ID NO: 1221037 - RNA, 19 nt, Artificial Sequence
  Description of Artificial Sequence: Synthetic oligonucleotide
cagacuggagaauuauggg

SEQ ID NO: 1221038 - RNA, 19 nt, Artificial Sequence
  Description of Artificial Sequence: Synthetic oligonucleotide
acacuagauggacaguguc

SEQ ID NO: 1221039 - RNA, 19 nt, Artificial Sequence
  Description of Artificial Sequence: Synthetic oligonucleotide
agaaacaguaugucaaaau

SEQ ID NO: 1221040 - RNA, 19 nt, Artificial Sequence
  Description of Artificial Sequence: Synthetic oligonucleotide
gucacuaucuugcugucug

SEQ ID NO: 1221041 - RNA, 19 nt, Artificial Sequence
  Description of Artificial Sequence: Synthetic oligonucleotide
gguaggaacgagcaggucc

SEQ ID NO: 1221042 - RNA, 19 nt, Artificial Sequence
  Description of Artificial Sequence: Synthetic oligonucleotide
aggauccucaaauauggca

SEQ ID NO: 1221043 - RNA, 19 nt, Artificial Sequence
  Description of Artificial Sequence: Synthetic oligonucleotide
aagggaauauucaguguuc

SEQ ID NO: 1221044 - RNA, 19 nt, Artificial Sequence
  Description of Artificial Sequence: Synthetic oligonucleotide
aauauucaguguucugaau

SEQ ID NO: 1221045 - RNA, 19 nt, Artificial Sequence
  Description of Artificial Sequence: Synthetic oligonucleotide
uuacuaagaaguugccacu

SEQ ID NO: 1221046 - RNA, 19 nt, Artificial Sequence
  Description of Artificial Sequence: Synthetic oligonucleotide
auucgauguguagaagagc

SEQ ID NO: 1221047 - RNA, 19 nt, Artificial Sequence
  Description of Artificial Sequence: Synthetic oligonucleotide
uugccacuaaaucgaacag

SEQ ID NO: 1221048 - RNA, 19 nt, Artificial Sequence
  Description of Artificial Sequence: Synthetic oligonucleotide
cauaagauuggggagguuc

SEQ ID NO: 1221049 - RNA, 19 nt, Artificial Sequence
  Description of Artificial Sequence: Synthetic oligonucleotide
auagagcuaugaccgcacc

SEQ ID NO: 1221050 - RNA, 19 nt, Artificial Sequence
  Description of Artificial Sequence: Synthetic oligonucleotide
ugaauguugugugcaaagc

SEQ ID NO: 1221051 - RNA, 19 nt, Artificial Sequence
  Description of Artificial Sequence: Synthetic oligonucleotide
cuaucuuuggguguaucgc

SEQ ID NO: 1221052 - RNA, 19 nt, Artificial Sequence
  Description of Artificial Sequence: Synthetic oligonucleotide
gaaaugggacaauuagcac

SEQ ID NO: 1221053 - RNA, 19 nt, Artificial Sequence
  Description of Artificial Sequence: Synthetic oligonucleotide
aauggcuugccaaugguaa

SEQ ID NO: 1221054 - RNA, 19 nt, Artificial Sequence
  Description of Artificial Sequence: Synthetic oligonucleotide
agaguguuauagcagucca

SEQ ID NO: 1221055 - RNA, 19 nt, Artificial Sequence
  Description of Artificial Sequence: Synthetic oligonucleotide
gaauauucaguguucugaa

SEQ ID NO: 1221056 - RNA, 19 nt, Artificial Sequence
  Description of Artificial Sequence: Synthetic oligonucleotide
ugggauagcuacuguacug

SEQ ID NO: 1221057 - RNA, 19 nt, Artificial Sequence
  Description of Artificial Sequence: Synthetic oligonucleotide
agcaguccauaauacuuuc

SEQ ID NO: 1221058 - RNA, 19 nt, Artificial Sequence
  Description of Artificial Sequence: Synthetic oligonucleotide
aguuuacuaagaaguugcc

SEQ ID NO: 1221059 - RNA, 19 nt, Artificial Sequence
  Description of Artificial Sequence: Synthetic oligonucleotide
guccauaauacuuucucuc

SEQ ID NO: 1221060 - RNA, 19 nt, Artificial Sequence
  Description of Artificial Sequence: Synthetic oligonucleotide
ggcaacacuagauggacag

SEQ ID NO: 1221061 - RNA, 19 nt, Artificial Sequence
  Description of Artificial Sequence: Synthetic oligonucleotide
agcggaaucugacagcaca

SEQ ID NO: 1221062 - RNA, 19 nt, Artificial Sequence
  Description of Artificial Sequence: Synthetic oligonucleotide
cuaucuugcugucugacca

SEQ ID NO: 1221063 - RNA, 19 nt, Artificial Sequence
  Description of Artificial Sequence: Synthetic oligonucleotide
gaaauagagcuaugaccgc

SEQ ID NO: 1221064 - RNA, 19 nt, Artificial Sequence
  Description of Artificial Sequence: Synthetic oligonucleotide
cugggaaaugacauacaag

SEQ ID NO: 1221065 - RNA, 19 nt, Artificial Sequence
  Description of Artificial Sequence: Synthetic oligonucleotide
gguucauaagauuggggag

SEQ ID NO: 1221066 - RNA, 19 nt, Artificial Sequence
  Description of Artificial Sequence: Synthetic oligonucleotide
cuaaaucgaacagacagca

SEQ ID NO: 1221067 - RNA, 19 nt, Artificial Sequence
  Description of Artificial Sequence: Synthetic oligonucleotide
cugucugaccaacagcuag

SEQ ID NO: 1221068 - RNA, 19 nt, Artificial Sequence
  Description of Artificial Sequence: Synthetic oligonucleotide
ucauggaccauggagguau

SEQ ID NO: 1221069 - RNA, 19 nt, Artificial Sequence
  Description of Artificial Sequence: Synthetic oligonucleotide
augaccgcacccucaaguc

SEQ ID NO: 1221070 - RNA, 19 nt, Artificial Sequence
  Description of Artificial Sequence: Synthetic oligonucleotide
aaagaccuccgacagggua

SEQ ID NO: 1221071 - RNA, 19 nt, Artificial Sequence
  Description of Artificial Sequence: Synthetic oligonucleotide
gcagacuggagaauuaugg

SEQ ID NO: 1221072 - RNA, 19 nt, Artificial Sequence
  Description of Artificial Sequence: Synthetic oligonucleotide
auacacaauggcuugccaa

SEQ ID NO: 1221073 - RNA, 19 nt, Artificial Sequence
  Description of Artificial Sequence: Synthetic oligonucleotide
gcaaacacgaaaacugugg

SEQ ID NO: 1221074 - RNA, 19 nt, Artificial Sequence
  Description of Artificial Sequence: Synthetic oligonucleotide
ucgccaacuucaaugauuu

SEQ ID NO: 1221075 - RNA, 19 nt, Artificial Sequence
  Description of Artificial Sequence: Synthetic oligonucleotide
ggcaaugagguucauaaga

SEQ ID NO: 1221076 - RNA, 19 nt, Artificial Sequence
  Description of Artificial Sequence: Synthetic oligonucleotide
caguccauaauacuuucuc

SEQ ID NO: 1221077 - RNA, 19 nt, Artificial Sequence
  Description of Artificial Sequence: Synthetic oligonucleotide
agaauccgaugacaugauc

SEQ ID NO: 1221078 - RNA, 19 nt, Artificial Sequence
  Description of Artificial Sequence: Synthetic oligonucleotide
acuggauaguggcaauuug

SEQ ID NO: 1221079 - RNA, 19 nt, Artificial Sequence
  Description of Artificial Sequence: Synthetic oligonucleotide
uugacagaaacaguauguc

SEQ ID NO: 1221080 - RNA, 19 nt, Artificial Sequence
  Description of Artificial Sequence: Synthetic oligonucleotide
agacacuucuauccauguc

SEQ ID NO: 1221081 - RNA, 19 nt, Artificial Sequence
  Description of Artificial Sequence: Synthetic oligonucleotide
aacaugaagaugauauaua

SEQ ID NO: 1221082 - RNA, 19 nt, Artificial Sequence
  Description of Artificial Sequence: Synthetic oligonucleotide
uggaugcaagaauaacucu

SEQ ID NO: 1221083 - RNA, 19 nt, Artificial Sequence
  Description of Artificial Sequence: Synthetic oligonucleotide
caugaucccaaacagcgga

SEQ ID NO: 1221084 - RNA, 19 nt, Artificial Sequence
  Description of Artificial Sequence: Synthetic oligonucleotide
auaaucaaaccagauguua

SEQ ID NO: 1221085 - RNA, 19 nt, Artificial Sequence
  Description of Artificial Sequence: Synthetic oligonucleotide
aaaccccugaaaauauaug

SEQ ID NO: 1221086 - RNA, 19 nt, Artificial Sequence
  Description of Artificial Sequence: Synthetic oligonucleotide
acuagggcagacuggagaa

SEQ ID NO: 1221087 - RNA, 19 nt, Artificial Sequence
  Description of Artificial Sequence: Synthetic oligonucleotide
aagcuaauccaugucacua

SEQ ID NO: 1221088 - RNA, 19 nt, Artificial Sequence
  Description of Artificial Sequence: Synthetic oligonucleotide
accgggccgacuuaauggg

SEQ ID NO: 1221089 - RNA, 19 nt, Artificial Sequence
  Description of Artificial Sequence: Synthetic oligonucleotide
gaaccagcauuauuugaca

SEQ ID NO: 1221090 - RNA, 19 nt, Artificial Sequence
  Description of Artificial Sequence: Synthetic oligonucleotide
gaauguugugugcaaagcu

SEQ ID NO: 1221091 - RNA, 19 nt, Artificial Sequence
  Description of Artificial Sequence: Synthetic oligonucleotide
auagcaguccauaauacuu

SEQ ID NO: 1221092 - RNA, 19 nt, Artificial Sequence
  Description of Artificial Sequence: Synthetic oligonucleotide
uaccuguuaagcucaugga

SEQ ID NO: 1221093 - RNA, 19 nt, Artificial Sequence
  Description of Artificial Sequence: Synthetic oligonucleotide
aacaaaugaaauagagcua

SEQ ID NO: 1221094 - RNA, 19 nt, Artificial Sequence
  Description of Artificial Sequence: Synthetic oligonucleotide
ucagcgcccauuuuagaaa

SEQ ID NO: 1221095 - RNA, 19 nt, Artificial Sequence
  Description of Artificial Sequence: Synthetic oligonucleotide
gccaacaaaugaaauagag

SEQ ID NO: 1221096 - RNA, 19 nt, Artificial Sequence
  Description of Artificial Sequence: Synthetic oligonucleotide
ggaauauucaguguucuga

SEQ ID NO: 1221097 - RNA, 19 nt, Artificial Sequence
  Description of Artificial Sequence: Synthetic oligonucleotide
cuaacacugacagggcacc

SEQ ID NO: 1221098 - RNA, 19 nt, Artificial Sequence
  Description of Artificial Sequence: Synthetic oligonucleotide
cuguccucgauaccgggcc

SEQ ID NO: 1221099 - RNA, 19 nt, Artificial Sequence
  Description of Artificial Sequence: Synthetic oligonucleotide
uuugcacuacguuuauuuu

SEQ ID NO: 1221100 - RNA, 19 nt, Artificial Sequence
  Description of Artificial Sequence: Synthetic oligonucleotide
guagaagggaucugcagaa

SEQ ID NO: 1221101 - RNA, 19 nt, Artificial Sequence
  Description of Artificial Sequence: Synthetic oligonucleotide
gggaauauucgauguguag

SEQ ID NO: 1221102 - RNA, 19 nt, Artificial Sequence
  Description of Artificial Sequence: Synthetic oligonucleotide
uggagaauuaugggaauau

SEQ ID NO: 1221103 - RNA, 19 nt, Artificial Sequence
  Description of Artificial Sequence: Synthetic oligonucleotide
cuccauaacucauuaggga

SEQ ID NO: 1221104 - RNA, 19 nt, Artificial Sequence
  Description of Artificial Sequence: Synthetic oligonucleotide
uuuggguguaucgccaacu

SEQ ID NO: 1221105 - RNA, 19 nt, Artificial Sequence
  Description of Artificial Sequence: Synthetic oligonucleotide
aaagcacccaucccuccaa

SEQ ID NO: 1221106 - RNA, 19 nt, Artificial Sequence
  Description of Artificial Sequence: Synthetic oligonucleotide
acuuaaugggcaagucaac

SEQ ID NO: 1221107 - RNA, 19 nt, Artificial Sequence
  Description of Artificial Sequence: Synthetic oligonucleotide
ggaauauucgauguguaga

SEQ ID NO: 1221108 - RNA, 19 nt, Artificial Sequence
  Description of Artificial Sequence: Synthetic oligonucleotide
ggauccucaaauauggcac

SEQ ID NO: 1221109 - RNA, 19 nt, Artificial Sequence
  Description of Artificial Sequence: Synthetic oligonucleotide
agauggacagugucaacaa

SEQ ID NO: 1221110 - RNA, 19 nt, Artificial Sequence
  Description of Artificial Sequence: Synthetic oligonucleotide
gcaaagcuaauccauguca

SEQ ID NO: 1221111 - RNA, 19 nt, Artificial Sequence
  Description of Artificial Sequence: Synthetic oligonucleotide
uuucccuuucacacacgca

SEQ ID NO: 1221112 - RNA, 19 nt, Artificial Sequence
  Description of Artificial Sequence: Synthetic oligonucleotide
cuuaaugggcaagucaaca

SEQ ID NO: 1221113 - RNA, 19 nt, Artificial Sequence
  Description of Artificial Sequence: Synthetic oligonucleotide
gcuaacaacugcauaauca

SEQ ID NO: 1221114 - RNA, 19 nt, Artificial Sequence
  Description of Artificial Sequence: Synthetic oligonucleotide
gucaacacgaaaccccuga

SEQ ID NO: 1221115 - RNA, 19 nt, Artificial Sequence
  Description of Artificial Sequence: Synthetic oligonucleotide
ggaaccagcauuauuugac

SEQ ID NO: 1221116 - RNA, 19 nt, Artificial Sequence
  Description of Artificial Sequence: Synthetic oligonucleotide
ugccacuaaaucgaacaga

SEQ ID NO: 1221117 - RNA, 19 nt, Artificial Sequence
  Description of Artificial Sequence: Synthetic oligonucleotide
cacagacuuagcucagcgc

SEQ ID NO: 1221118 - RNA, 19 nt, Artificial Sequence
  Description of Artificial Sequence: Synthetic oligonucleotide
acagcggaaucugacagca

SEQ ID NO: 1221119 - RNA, 19 nt, Artificial Sequence
  Description of Artificial Sequence: Synthetic oligonucleotide
cagacuuagcucagcgccc

SEQ ID NO: 1221120 - RNA, 19 nt, Artificial Sequence
  Description of Artificial Sequence: Synthetic oligonucleotide
ugggcaagucaacacgaaa

SEQ ID NO: 1221121 - RNA, 19 nt, Artificial Sequence
  Description of Artificial Sequence: Synthetic oligonucleotide
aggggaaccagcauuauuu

SEQ ID NO: 1221122 - RNA, 19 nt, Artificial Sequence
  Description of Artificial Sequence: Synthetic oligonucleotide
aacacuagauggacagugu

SEQ ID NO: 1221123 - RNA, 19 nt, Artificial Sequence
  Description of Artificial Sequence: Synthetic oligonucleotide
ucaacacgaaaccccugaa

SEQ ID NO: 1221124 - RNA, 19 nt, Artificial Sequence
  Description of Artificial Sequence: Synthetic oligonucleotide
ugaccgcacccucaaguca

SEQ ID NO: 1221125 - RNA, 19 nt, Artificial Sequence
  Description of Artificial Sequence: Synthetic oligonucleotide
uguccucgauaccgggccg

SEQ ID NO: 1221126 - RNA, 19 nt, Artificial Sequence
  Description of Artificial Sequence: Synthetic oligonucleotide
auaccgggccgacuuaaug

SEQ ID NO: 1221127 - RNA, 19 nt, Artificial Sequence
  Description of Artificial Sequence: Synthetic oligonucleotide
acacgaaaccccugaaaau

SEQ ID NO: 1221128 - RNA, 19 nt, Artificial Sequence
  Description of Artificial Sequence: Synthetic oligonucleotide
ugguacuacugcugcacac

SEQ ID NO: 1221129 - RNA, 19 nt, Artificial Sequence
  Description of Artificial Sequence: Synthetic oligonucleotide
acuguccucgauaccgggc

SEQ ID NO: 1221130 - RNA, 19 nt, Artificial Sequence
  Description of Artificial Sequence: Synthetic oligonucleotide
caacugcauaaucaaacca

SEQ ID NO: 1221131 - RNA, 19 nt, Artificial Sequence
  Description of Artificial Sequence: Synthetic oligonucleotide
ugggcaacacuagauggac

SEQ ID NO: 1221132 - RNA, 19 nt, Artificial Sequence
  Description of Artificial Sequence: Synthetic oligonucleotide
uguagggauguaccuguua

SEQ ID NO: 1221133 - RNA, 19 nt, Artificial Sequence
  Description of Artificial Sequence: Synthetic oligonucleotide
ccauaacucauuagggaag

SEQ ID NO: 1221134 - RNA, 19 nt, Artificial Sequence
  Description of Artificial Sequence: Synthetic oligonucleotide
ucugaccaacagcuaggca

SEQ ID NO: 1221135 - RNA, 19 nt, Artificial Sequence
  Description of Artificial Sequence: Synthetic oligonucleotide
aauaguuucugggcuccau

SEQ ID NO: 1221136 - RNA, 19 nt, Artificial Sequence
  Description of Artificial Sequence: Synthetic oligonucleotide
cuccgacaggguaggaacg

SEQ ID NO: 1221137 - RNA, 19 nt, Artificial Sequence
  Description of Artificial Sequence: Synthetic oligonucleotide
aaggggaaccagcauuauu

SEQ ID NO: 1221138 - RNA, 19 nt, Artificial Sequence
  Description of Artificial Sequence: Synthetic oligonucleotide
uguugugugcaaagcuaau

SEQ ID NO: 1221139 - RNA, 19 nt, Artificial Sequence
  Description of Artificial Sequence: Synthetic oligonucleotide
aggaaccagacacuucuau

SEQ ID NO: 1221140 - RNA, 19 nt, Artificial Sequence
  Description of Artificial Sequence: Synthetic oligonucleotide
aggaacgagcagguccucc

SEQ ID NO: 1221141 - RNA, 19 nt, Artificial Sequence
  Description of Artificial Sequence: Synthetic oligonucleotide
gcagaauccgaugacauga

SEQ ID NO: 1221142 - RNA, 19 nt, Artificial Sequence
  Description of Artificial Sequence: Synthetic oligonucleotide
agcaaacacgaaaacugug

SEQ ID NO: 1221143 - RNA, 19 nt, Artificial Sequence
  Description of Artificial Sequence: Synthetic oligonucleotide
uggcaauuugcacuacguu

SEQ ID NO: 1221144 - RNA, 19 nt, Artificial Sequence
  Description of Artificial Sequence: Synthetic oligonucleotide
guugugugcaaagcuaauc

SEQ ID NO: 1221145 - RNA, 19 nt, Artificial Sequence
  Description of Artificial Sequence: Synthetic oligonucleotide
ucggacuuugucuguccug

SEQ ID NO: 1221146 - RNA, 19 nt, Artificial Sequence
  Description of Artificial Sequence: Synthetic oligonucleotide
ugacaucggcccacugucc

SEQ ID NO: 1221147 - RNA, 19 nt, Artificial Sequence
  Description of Artificial Sequence: Synthetic oligonucleotide
gccacuaaaucgaacagac

SEQ ID NO: 1221148 - RNA, 19 nt, Artificial Sequence
  Description of Artificial Sequence: Synthetic oligonucleotide
ugcuucccagcaucauggg

SEQ ID NO: 1221149 - RNA, 19 nt, Artificial Sequence
  Description of Artificial Sequence: Synthetic oligonucleotide
acgaaaacuguggcaauga

SEQ ID NO: 1221150 - RNA, 19 nt, Artificial Sequence
  Description of Artificial Sequence: Synthetic oligonucleotide
aaaugcuccauaacucauu

SEQ ID NO: 1221151 - RNA, 19 nt, Artificial Sequence
  Description of Artificial Sequence: Synthetic oligonucleotide
gaaaggggaaccagcauua

SEQ ID NO: 1221152 - RNA, 19 nt, Artificial Sequence
  Description of Artificial Sequence: Synthetic oligonucleotide
gaacgagcagguccucccc

SEQ ID NO: 1221153 - RNA, 19 nt, Artificial Sequence
  Description of Artificial Sequence: Synthetic oligonucleotide
uacuaagaaguugccacua

SEQ ID NO: 1221154 - RNA, 19 nt, Artificial Sequence
  Description of Artificial Sequence: Synthetic oligonucleotide
gguucugccgauagaaggc

SEQ ID NO: 1221155 - RNA, 19 nt, Artificial Sequence
  Description of Artificial Sequence: Synthetic oligonucleotide
acacgcaaagaaauauaug

SEQ ID NO: 1221156 - RNA, 19 nt, Artificial Sequence
  Description of Artificial Sequence: Synthetic oligonucleotide
acuacauggacaggauccu

SEQ ID NO: 1221157 - RNA, 19 nt, Artificial Sequence
  Description of Artificial Sequence: Synthetic oligonucleotide
aguugccacuaaaucgaac

SEQ ID NO: 1221158 - RNA, 19 nt, Artificial Sequence
  Description of Artificial Sequence: Synthetic oligonucleotide
uggguguaucgccaacuuc

SEQ ID NO: 1221159 - RNA, 19 nt, Artificial Sequence
  Description of Artificial Sequence: Synthetic oligonucleotide
cuaagaaguugccacuaaa

SEQ ID NO: 1221160 - RNA, 19 nt, Artificial Sequence
  Description of Artificial Sequence: Synthetic oligonucleotide
caacuacauggacaggauc

SEQ ID NO: 1221161 - RNA, 19 nt, Artificial Sequence
  Description of Artificial Sequence: Synthetic oligonucleotide
gaagaguguuauagcaguc

SEQ ID NO: 1221162 - RNA, 19 nt, Artificial Sequence
  Description of Artificial Sequence: Synthetic oligonucleotide
ggcuccauugaacagagcu

SEQ ID NO: 1221163 - RNA, 19 nt, Artificial Sequence
  Description of Artificial Sequence: Synthetic oligonucleotide
ggguguaucgccaacuuca

SEQ ID NO: 1221164 - RNA, 19 nt, Artificial Sequence
  Description of Artificial Sequence: Synthetic oligonucleotide
gagguucugccgauagaag

SEQ ID NO: 1221165 - RNA, 19 nt, Artificial Sequence
  Description of Artificial Sequence: Synthetic oligonucleotide
uuggguguaucgccaacuu

SEQ ID NO: 1221166 - RNA, 19 nt, Artificial Sequence
  Description of Artificial Sequence: Synthetic oligonucleotide
guuugaaacuagggcagac

SEQ ID NO: 1221167 - RNA, 19 nt, Artificial Sequence
  Description of Artificial Sequence: Synthetic oligonucleotide
caggauccucaaauauggc

SEQ ID NO: 1221168 - RNA, 19 nt, Artificial Sequence
  Description of Artificial Sequence: Synthetic oligonucleotide
ggaacgagcagguccuccc

SEQ ID NO: 1221169 - RNA, 19 nt, Artificial Sequence
  Description of Artificial Sequence: Synthetic oligonucleotide
ccaaacagcggaaucugac

SEQ ID NO: 1221170 - RNA, 19 nt, Artificial Sequence
  Description of Artificial Sequence: Synthetic oligonucleotide
agauaguaacaaagaccuc

SEQ ID NO: 1221171 - RNA, 19 nt, Artificial Sequence
  Description of Artificial Sequence: Synthetic oligonucleotide
cucagcgcccauuuuagaa

SEQ ID NO: 1221172 - RNA, 19 nt, Artificial Sequence
  Description of Artificial Sequence: Synthetic oligonucleotide
auagugacugcaagcagaa

SEQ ID NO: 1221173 - RNA, 19 nt, Artificial Sequence
  Description of Artificial Sequence: Synthetic oligonucleotide
acgcaaagaaauauaugaa

SEQ ID NO: 1221174 - RNA, 19 nt, Artificial Sequence
  Description of Artificial Sequence: Synthetic oligonucleotide
cugguggccaacaaaugaa

SEQ ID NO: 1221175 - RNA, 19 nt, Artificial Sequence
  Description of Artificial Sequence: Synthetic oligonucleotide
ggaaccagacacuucuauc

SEQ ID NO: 1221176 - RNA, 19 nt, Artificial Sequence
  Description of Artificial Sequence: Synthetic oligonucleotide
cuaagaaaaugaagagugu

SEQ ID NO: 1221177 - RNA, 19 nt, Artificial Sequence
  Description of Artificial Sequence: Synthetic oligonucleotide
guacuguccucgauaccgg

SEQ ID NO: 1221178 - RNA, 19 nt, Artificial Sequence
  Description of Artificial Sequence: Synthetic oligonucleotide
gauggacagugucaacaaa

SEQ ID NO: 1221179 - RNA, 19 nt, Artificial Sequence
  Description of Artificial Sequence: Synthetic oligonucleotide
cuagauggacagugucaac

SEQ ID NO: 1221180 - RNA, 19 nt, Artificial Sequence
  Description of Artificial Sequence: Synthetic oligonucleotide
ggauaguggcaauuugcac

SEQ ID NO: 1221181 - RNA, 19 nt, Artificial Sequence
  Description of Artificial Sequence: Synthetic oligonucleotide
gaaaccccugaaaauauau

SEQ ID NO: 1221182 - RNA, 19 nt, Artificial Sequence
  Description of Artificial Sequence: Synthetic oligonucleotide
uacuggauaguggcaauuu

SEQ ID NO: 1221183 - RNA, 19 nt, Artificial Sequence
  Description of Artificial Sequence: Synthetic oligonucleotide
gcgcccauuuuagaaaugg

SEQ ID NO: 1221184 - RNA, 19 nt, Artificial Sequence
  Description of Artificial Sequence: Synthetic oligonucleotide
uccgacaggguaggaacga

SEQ ID NO: 1221185 - RNA, 19 nt, Artificial Sequence
  Description of Artificial Sequence: Synthetic oligonucleotide
cacacgcaaagaaauauau

SEQ ID NO: 1221186 - RNA, 19 nt, Artificial Sequence
  Description of Artificial Sequence: Synthetic oligonucleotide
cuuuggguguaucgccaac

SEQ ID NO: 1221187 - RNA, 19 nt, Artificial Sequence
  Description of Artificial Sequence: Synthetic oligonucleotide
auacaacuacauggacagg

SEQ ID NO: 1221188 - RNA, 19 nt, Artificial Sequence
  Description of Artificial Sequence: Synthetic oligonucleotide
ccaaauaguuucugggcuc

SEQ ID NO: 1221189 - RNA, 19 nt, Artificial Sequence
  Description of Artificial Sequence: Synthetic oligonucleotide
cacuguccuaguaaguuua

SEQ ID NO: 1221190 - RNA, 19 nt, Artificial Sequence
  Description of Artificial Sequence: Synthetic oligonucleotide
cacuaucuugcugucugac

SEQ ID NO: 1221191 - RNA, 19 nt, Artificial Sequence
  Description of Artificial Sequence: Synthetic oligonucleotide
cacugacagggcaccaaug

SEQ ID NO: 1221192 - RNA, 19 nt, Artificial Sequence
  Description of Artificial Sequence: Synthetic oligonucleotide
aauuugcacuacguuuauu

SEQ ID NO: 1221193 - RNA, 19 nt, Artificial Sequence
  Description of Artificial Sequence: Synthetic oligonucleotide
gaauuuuccuuucgggcuu

SEQ ID NO: 1221194 - RNA, 19 nt, Artificial Sequence
  Description of Artificial Sequence: Synthetic oligonucleotide
cacccaucccuccaacuuc

SEQ ID NO: 1221195 - RNA, 19 nt, Artificial Sequence
  Description of Artificial Sequence: Synthetic oligonucleotide
ggggaaccagcauuauuug

SEQ ID NO: 1221196 - RNA, 19 nt, Artificial Sequence
  Description of Artificial Sequence: Synthetic oligonucleotide
gcacccucaagucaugaca

SEQ ID NO: 1221197 - RNA, 19 nt, Artificial Sequence
  Description of Artificial Sequence: Synthetic oligonucleotide
aucgccaacuucaaugauu

SEQ ID NO: 1221198 - RNA, 19 nt, Artificial Sequence
  Description of Artificial Sequence: Synthetic oligonucleotide
gacugcaagcagaauccca

SEQ ID NO: 1221199 - RNA, 19 nt, Artificial Sequence
  Description of Artificial Sequence: Synthetic oligonucleotide
ggggaaaugcccaauucca

SEQ ID NO: 1221200 - RNA, 19 nt, Artificial Sequence
  Description of Artificial Sequence: Synthetic oligonucleotide
ccuccgacaggguaggaac

SEQ ID NO: 1221201 - RNA, 19 nt, Artificial Sequence
  Description of Artificial Sequence: Synthetic oligonucleotide
acacgaaaacuguggcaau

SEQ ID NO: 1221202 - RNA, 19 nt, Artificial Sequence
  Description of Artificial Sequence: Synthetic oligonucleotide
ggcaauuugcacuacguuu

SEQ ID NO: 1221203 - RNA, 19 nt, Artificial Sequence
  Description of Artificial Sequence: Synthetic oligonucleotide
agacuuagcucagcgccca

SEQ ID NO: 1221204 - RNA, 19 nt, Artificial Sequence
  Description of Artificial Sequence: Synthetic oligonucleotide
gcaauuugcacuacguuua

SEQ ID NO: 1221205 - RNA, 19 nt, Artificial Sequence
  Description of Artificial Sequence: Synthetic oligonucleotide
aaaggggaaccagcauuau

SEQ ID NO: 1221206 - RNA, 19 nt, Artificial Sequence
  Description of Artificial Sequence: Synthetic oligonucleotide
caggaggagacagauagua

SEQ ID NO: 1221207 - RNA, 19 nt, Artificial Sequence
  Description of Artificial Sequence: Synthetic oligonucleotide
gcuaacacugacagggcac

SEQ ID NO: 1221208 - RNA, 19 nt, Artificial Sequence
  Description of Artificial Sequence: Synthetic oligonucleotide
ggggagguucugccgauag

SEQ ID NO: 1221209 - RNA, 19 nt, Artificial Sequence
  Description of Artificial Sequence: Synthetic oligonucleotide
cuuagccacgucuuuggcu

SEQ ID NO: 1221210 - RNA, 19 nt, Artificial Sequence
  Description of Artificial Sequence: Synthetic oligonucleotide
caucggcccacuguccuag

SEQ ID NO: 1221211 - RNA, 19 nt, Artificial Sequence
  Description of Artificial Sequence: Synthetic oligonucleotide
guaggaacgagcagguccu

SEQ ID NO: 1221212 - RNA, 19 nt, Artificial Sequence
  Description of Artificial Sequence: Synthetic oligonucleotide
gacaucggcccacuguccu

SEQ ID NO: 1221213 - RNA, 19 nt, Artificial Sequence
  Description of Artificial Sequence: Synthetic oligonucleotide
gagcuaugaccgcacccuc

SEQ ID NO: 1221214 - RNA, 19 nt, Artificial Sequence
  Description of Artificial Sequence: Synthetic oligonucleotide
gguacuacugcugcacaca

SEQ ID NO: 1221215 - RNA, 19 nt, Artificial Sequence
  Description of Artificial Sequence: Synthetic oligonucleotide
uaacacugacagggcacca

SEQ ID NO: 1221216 - RNA, 19 nt, Artificial Sequence
  Description of Artificial Sequence: Synthetic oligonucleotide
caacacgaaaccccugaaa

SEQ ID NO: 1221217 - RNA, 19 nt, Artificial Sequence
  Description of Artificial Sequence: Synthetic oligonucleotide
caauggcuugccaauggua

SEQ ID NO: 1221218 - RNA, 19 nt, Artificial Sequence
  Description of Artificial Sequence: Synthetic oligonucleotide
cuaugaccgcacccucaag

SEQ ID NO: 1221219 - RNA, 19 nt, Artificial Sequence
  Description of Artificial Sequence: Synthetic oligonucleotide
aaguugccacuaaaucgaa

SEQ ID NO: 1221220 - RNA, 19 nt, Artificial Sequence
  Description of Artificial Sequence: Synthetic oligonucleotide
acacacgcaaagaaauaua

SEQ ID NO: 1221221 - RNA, 19 nt, Artificial Sequence
  Description of Artificial Sequence: Synthetic oligonucleotide
gggacaauuagcacugaaa

SEQ ID NO: 1221222 - RNA, 19 nt, Artificial Sequence
  Description of Artificial Sequence: Synthetic oligonucleotide
auccgaugacaugauccca

SEQ ID NO: 1221223 - RNA, 19 nt, Artificial Sequence
  Description of Artificial Sequence: Synthetic oligonucleotide
ggauagcuacuguacuguc

SEQ ID NO: 1221224 - RNA, 19 nt, Artificial Sequence
  Description of Artificial Sequence: Synthetic oligonucleotide
ccugguggccaacaaauga

SEQ ID NO: 1221225 - RNA, 19 nt, Artificial Sequence
  Description of Artificial Sequence: Synthetic oligonucleotide
caauuggggaaaugcccaa

SEQ ID NO: 1221226 - RNA, 19 nt, Artificial Sequence
  Description of Artificial Sequence: Synthetic oligonucleotide
cuacauggacaggauccuc

SEQ ID NO: 1221227 - RNA, 19 nt, Artificial Sequence
  Description of Artificial Sequence: Synthetic oligonucleotide
uagaagggaucugcagaau

SEQ ID NO: 1221228 - RNA, 19 nt, Artificial Sequence
  Description of Artificial Sequence: Synthetic oligonucleotide
cggacuuugucuguccugg

SEQ ID NO: 1221229 - RNA, 19 nt, Artificial Sequence
  Description of Artificial Sequence: Synthetic oligonucleotide
cucuguuggaugcaagaau

SEQ ID NO: 1221230 - RNA, 19 nt, Artificial Sequence
  Description of Artificial Sequence: Synthetic oligonucleotide
cugguacuacugcugcaca

SEQ ID NO: 1221231 - RNA, 19 nt, Artificial Sequence
  Description of Artificial Sequence: Synthetic oligonucleotide
ucgauaccgggccgacuua

SEQ ID NO: 1221232 - RNA, 19 nt, Artificial Sequence
  Description of Artificial Sequence: Synthetic oligonucleotide
gcuacuguacuguccucga

SEQ ID NO: 1221233 - RNA, 19 nt, Artificial Sequence
  Description of Artificial Sequence: Synthetic oligonucleotide
acccauggacucaggagga

SEQ ID NO: 1221234 - RNA, 19 nt, Artificial Sequence
  Description of Artificial Sequence: Synthetic oligonucleotide
cucuaucuuuggguguauc

SEQ ID NO: 1221235 - RNA, 19 nt, Artificial Sequence
  Description of Artificial Sequence: Synthetic oligonucleotide
agucaacacgaaaccccug

SEQ ID NO: 1221236 - RNA, 19 nt, Artificial Sequence
  Description of Artificial Sequence: Synthetic oligonucleotide
acucauuagggaagcucaa

SEQ ID NO: 1221237 - RNA, 19 nt, Artificial Sequence
  Description of Artificial Sequence: Synthetic oligonucleotide
auggacucaggaggagaca

SEQ ID NO: 1221238 - RNA, 19 nt, Artificial Sequence
  Description of Artificial Sequence: Synthetic oligonucleotide
gcuuagccacgucuuuggc

SEQ ID NO: 1221239 - RNA, 19 nt, Artificial Sequence
  Description of Artificial Sequence: Synthetic oligonucleotide
uagccacgucuuuggcuga

SEQ ID NO: 1221240 - RNA, 19 nt, Artificial Sequence
  Description of Artificial Sequence: Synthetic oligonucleotide
cacccucaagucaugacau

SEQ ID NO: 1221241 - RNA, 19 nt, Artificial Sequence
  Description of Artificial Sequence: Synthetic oligonucleotide
ucggcccacuguccuagua

SEQ ID NO: 1221242 - RNA, 19 nt, Artificial Sequence
  Description of Artificial Sequence: Synthetic oligonucleotide
cuuagcucagcgcccauuu

SEQ ID NO: 1221243 - RNA, 19 nt, Artificial Sequence
  Description of Artificial Sequence: Synthetic oligonucleotide
cuggagaauuaugggaaua

SEQ ID NO: 1221244 - RNA, 19 nt, Artificial Sequence
  Description of Artificial Sequence: Synthetic oligonucleotide
accuccgacaggguaggaa

SEQ ID NO: 1221245 - RNA, 19 nt, Artificial Sequence
  Description of Artificial Sequence: Synthetic oligonucleotide
augaucccaaacagcggaa

SEQ ID NO: 1221246 - RNA, 19 nt, Artificial Sequence
  Description of Artificial Sequence: Synthetic oligonucleotide
cucgauaccgggccgacuu

SEQ ID NO: 1221247 - RNA, 19 nt, Artificial Sequence
  Description of Artificial Sequence: Synthetic oligonucleotide
acccucaagucaugacaua

SEQ ID NO: 1221248 - RNA, 19 nt, Artificial Sequence
  Description of Artificial Sequence: Synthetic oligonucleotide
acaucggcccacuguccua

SEQ ID NO: 1221249 - RNA, 19 nt, Artificial Sequence
  Description of Artificial Sequence: Synthetic oligonucleotide
ccaguagaagggaucugca

SEQ ID NO: 1221250 - RNA, 19 nt, Artificial Sequence
  Description of Artificial Sequence: Synthetic oligonucleotide
acuuagcucagcgcccauu

SEQ ID NO: 1221251 - RNA, 19 nt, Artificial Sequence
  Description of Artificial Sequence: Synthetic oligonucleotide
cagcggaaucugacagcac

SEQ ID NO: 1221252 - RNA, 19 nt, Artificial Sequence
  Description of Artificial Sequence: Synthetic oligonucleotide
gggauagcuacuguacugu

SEQ ID NO: 1221253 - RNA, 19 nt, Artificial Sequence
  Description of Artificial Sequence: Synthetic oligonucleotide
ucauaagauuggggagguu

SEQ ID NO: 1221254 - RNA, 19 nt, Artificial Sequence
  Description of Artificial Sequence: Synthetic oligonucleotide
gcggaaucugacagcacac

SEQ ID NO: 1221255 - RNA, 19 nt, Artificial Sequence
  Description of Artificial Sequence: Synthetic oligonucleotide
cauggacaggauccucaaa

SEQ ID NO: 1221256 - RNA, 19 nt, Artificial Sequence
  Description of Artificial Sequence: Synthetic oligonucleotide
cuuucgggcuucugaauuu

SEQ ID NO: 1221257 - RNA, 19 nt, Artificial Sequence
  Description of Artificial Sequence: Synthetic oligonucleotide
augggcaagucaacacgaa

SEQ ID NO: 1221258 - RNA, 19 nt, Artificial Sequence
  Description of Artificial Sequence: Synthetic oligonucleotide
ccaaggaagucugcuaaca

SEQ ID NO: 1221259 - RNA, 19 nt, Artificial Sequence
  Description of Artificial Sequence: Synthetic oligonucleotide
gaguguuauagcaguccau

SEQ ID NO: 1221260 - RNA, 19 nt, Artificial Sequence
  Description of Artificial Sequence: Synthetic oligonucleotide
uaguggcaauuugcacuac

SEQ ID NO: 1221261 - RNA, 19 nt, Artificial Sequence
  Description of Artificial Sequence: Synthetic oligonucleotide
agcgcccauuuuagaaaug

SEQ ID NO: 1221262 - RNA, 19 nt, Artificial Sequence
  Description of Artificial Sequence: Synthetic oligonucleotide
gaccgcacccucaagucau

SEQ ID NO: 1221263 - RNA, 19 nt, Artificial Sequence
  Description of Artificial Sequence: Synthetic oligonucleotide
augggacaauuagcacuga

SEQ ID NO: 1221264 - RNA, 19 nt, Artificial Sequence
  Description of Artificial Sequence: Synthetic oligonucleotide
cagcgcccauuuuagaaau

SEQ ID NO: 1221265 - RNA, 19 nt, Artificial Sequence
  Description of Artificial Sequence: Synthetic oligonucleotide
ccacuaaaucgaacagaca

SEQ ID NO: 1221266 - RNA, 19 nt, Artificial Sequence
  Description of Artificial Sequence: Synthetic oligonucleotide
accaacagcuaggcagaua

SEQ ID NO: 1221267 - RNA, 19 nt, Artificial Sequence
  Description of Artificial Sequence: Synthetic oligonucleotide
gguguaucgccaacuucaa

SEQ ID NO: 1221268 - RNA, 19 nt, Artificial Sequence
  Description of Artificial Sequence: Synthetic oligonucleotide
uaggaacgagcagguccuc

SEQ ID NO: 1221269 - RNA, 19 nt, Artificial Sequence
  Description of Artificial Sequence: Synthetic oligonucleotide
ccuuucacacacgcaaaga

SEQ ID NO: 1221270 - RNA, 19 nt, Artificial Sequence
  Description of Artificial Sequence: Synthetic oligonucleotide
cagaauccgaugacaugau

SEQ ID NO: 1221271 - RNA, 19 nt, Artificial Sequence
  Description of Artificial Sequence: Synthetic oligonucleotide
cucggacuuugucuguccu

SEQ ID NO: 1221272 - RNA, 19 nt, Artificial Sequence
  Description of Artificial Sequence: Synthetic oligonucleotide
ggccgacuuaaugggcaag

SEQ ID NO: 1221273 - RNA, 19 nt, Artificial Sequence
  Description of Artificial Sequence: Synthetic oligonucleotide
aucggcccacuguccuagu

SEQ ID NO: 1221274 - RNA, 19 nt, Artificial Sequence
  Description of Artificial Sequence: Synthetic oligonucleotide
ccgggccgacuuaaugggc

SEQ ID NO: 1221275 - RNA, 19 nt, Artificial Sequence
  Description of Artificial Sequence: Synthetic oligonucleotide
ggagaauuaugggaauauu

SEQ ID NO: 1221276 - RNA, 19 nt, Artificial Sequence
  Description of Artificial Sequence: Synthetic oligonucleotide
guguaucgccaacuucaau

SEQ ID NO: 1221277 - RNA, 19 nt, Artificial Sequence
  Description of Artificial Sequence: Synthetic oligonucleotide
gccacgucuuuggcugagg

SEQ ID NO: 1221278 - RNA, 19 nt, Artificial Sequence
  Description of Artificial Sequence: Synthetic oligonucleotide
accgcacccucaagucaug

SEQ ID NO: 1221279 - RNA, 19 nt, Artificial Sequence
  Description of Artificial Sequence: Synthetic oligonucleotide
ccacgucuuuggcugagga

SEQ ID NO: 1221280 - RNA, 19 nt, Artificial Sequence
  Description of Artificial Sequence: Synthetic oligonucleotide
gauaccgggccgacuuaau

SEQ ID NO: 1221281 - RNA, 19 nt, Artificial Sequence
  Description of Artificial Sequence: Synthetic oligonucleotide
gggcaacacuagauggaca

SEQ ID NO: 1221282 - RNA, 19 nt, Artificial Sequence
  Description of Artificial Sequence: Synthetic oligonucleotide
ccgacaggguaggaacgag

SEQ ID NO: 1221283 - RNA, 19 nt, Artificial Sequence
  Description of Artificial Sequence: Synthetic oligonucleotide
ccucuguuggaugcaagaa

SEQ ID NO: 1221284 - RNA, 19 nt, Artificial Sequence
  Description of Artificial Sequence: Synthetic oligonucleotide
cgcacccucaagucaugac

SEQ ID NO: 1221285 - RNA, 19 nt, Artificial Sequence
  Description of Artificial Sequence: Synthetic oligonucleotide
caaagaccuccgacagggu

SEQ ID NO: 1221286 - RNA, 19 nt, Artificial Sequence
  Description of Artificial Sequence: Synthetic oligonucleotide
gggccgacuuaaugggcaa

SEQ ID NO: 1221287 - RNA, 19 nt, Artificial Sequence
  Description of Artificial Sequence: Synthetic oligonucleotide
gccgacuuaaugggcaagu

SEQ ID NO: 1221288 - RNA, 19 nt, Artificial Sequence
  Description of Artificial Sequence: Synthetic oligonucleotide
cgggccgacuuaaugggca

SEQ ID NO: 1221289 - RNA, 19 nt, Artificial Sequence
  Description of Artificial Sequence: Synthetic oligonucleotide
gacuuagcucagcgcccau

SEQ ID NO: 1221290 - RNA, 19 nt, Artificial Sequence
  Description of Artificial Sequence: Synthetic oligonucleotide
ggguaggaacgagcagguc

SEQ ID NO: 1221291 - RNA, 19 nt, Artificial Sequence
  Description of Artificial Sequence: Synthetic oligonucleotide
gaccuccgacaggguagga

SEQ ID NO: 1221292 - RNA, 19 nt, Artificial Sequence
  Description of Artificial Sequence: Synthetic oligonucleotide
ccacuguccuaguaaguuu

SEQ ID NO: 1221293 - RNA, 19 nt, Artificial Sequence
  Description of Artificial Sequence: Synthetic oligonucleotide
cgauaccgggccgacuuaa

SEQ ID NO: 1221294 - RNA, 19 nt, Artificial Sequence
  Description of Artificial Sequence: Synthetic oligonucleotide
ggccucccucaaggcucgg

SEQ ID NO: 1221295 - RNA, 19 nt, Artificial Sequence
  Description of Artificial Sequence: Synthetic oligonucleotide
ccgcacccucaagucauga

SEQ ID NO: 1221296 - RNA, 19 nt, Artificial Sequence
  Description of Artificial Sequence: Synthetic oligonucleotide
gcucuaucuuuggguguau

SEQ ID NO: 1221297 - RNA, 19 nt, Artificial Sequence
  Description of Artificial Sequence: Synthetic oligonucleotide
agaugaaagacgcaaaggc

SEQ ID NO: 1221298 - RNA, 19 nt, Artificial Sequence
  Description of Artificial Sequence: Synthetic oligonucleotide
uggagauaaacucugaggc

SEQ ID NO: 1221299 - RNA, 19 nt, Artificial Sequence
  Description of Artificial Sequence: Synthetic oligonucleotide
ugaaauuucuacaucugag

SEQ ID NO: 1221300 - RNA, 19 nt, Artificial Sequence
  Description of Artificial Sequence: Synthetic oligonucleotide
gacgcaaaggcauagcugg

SEQ ID NO: 1221301 - RNA, 19 nt, Artificial Sequence
  Description of Artificial Sequence: Synthetic oligonucleotide
ugagagauaaacuaguguc

SEQ ID NO: 1221302 - RNA, 19 nt, Artificial Sequence
  Description of Artificial Sequence: Synthetic oligonucleotide
uaucuuuucugauucagag

SEQ ID NO: 1221303 - RNA, 19 nt, Artificial Sequence
  Description of Artificial Sequence: Synthetic oligonucleotide
agcgagaugaggaagagcc

SEQ ID NO: 1221304 - RNA, 19 nt, Artificial Sequence
  Description of Artificial Sequence: Synthetic oligonucleotide
uaaaugguccaaaauaccu

SEQ ID NO: 1221305 - RNA, 19 nt, Artificial Sequence
  Description of Artificial Sequence: Synthetic oligonucleotide
uggauuaucuguaacaaau

SEQ ID NO: 1221306 - RNA, 19 nt, Artificial Sequence
  Description of Artificial Sequence: Synthetic oligonucleotide
acuguuuccgucuccaugg

SEQ ID NO: 1221307 - RNA, 19 nt, Artificial Sequence
  Description of Artificial Sequence: Synthetic oligonucleotide
uuuucugauucagaggugg

SEQ ID NO: 1221308 - RNA, 19 nt, Artificial Sequence
  Description of Artificial Sequence: Synthetic oligonucleotide
ucagaugaaagacgcaaag

SEQ ID NO: 1221309 - RNA, 19 nt, Artificial Sequence
  Description of Artificial Sequence: Synthetic oligonucleotide
ucuacaaaccccuguagcc

SEQ ID NO: 1221310 - RNA, 19 nt, Artificial Sequence
  Description of Artificial Sequence: Synthetic oligonucleotide
ucuuuucuucuacaaaccc

SEQ ID NO: 1221311 - RNA, 19 nt, Artificial Sequence
  Description of Artificial Sequence: Synthetic oligonucleotide
aaugcuauuggggucacug

SEQ ID NO: 1221312 - RNA, 19 nt, Artificial Sequence
  Description of Artificial Sequence: Synthetic oligonucleotide
uauauauugugugugugug

SEQ ID NO: 1221313 - RNA, 19 nt, Artificial Sequence
  Description of Artificial Sequence: Synthetic oligonucleotide
uguguggagauaaacucug

SEQ ID NO: 1221314 - RNA, 19 nt, Artificial Sequence
  Description of Artificial Sequence: Synthetic oligonucleotide
ugcuauuggggucacuggg

SEQ ID NO: 1221315 - RNA, 19 nt, Artificial Sequence
  Description of Artificial Sequence: Synthetic oligonucleotide
gagauaaacucugaggccc

SEQ ID NO: 1221316 - RNA, 19 nt, Artificial Sequence
  Description of Artificial Sequence: Synthetic oligonucleotide
guggagauaaacucugagg

SEQ ID NO: 1221317 - RNA, 19 nt, Artificial Sequence
  Description of Artificial Sequence: Synthetic oligonucleotide
gaugagauggacuagggcu

SEQ ID NO: 1221318 - RNA, 19 nt, Artificial Sequence
  Description of Artificial Sequence: Synthetic oligonucleotide
uucuacaaaccccuguagc

SEQ ID NO: 1221319 - RNA, 19 nt, Artificial Sequence
  Description of Artificial Sequence: Synthetic oligonucleotide
uccaugguuucacaagagg

SEQ ID NO: 1221320 - RNA, 19 nt, Artificial Sequence
  Description of Artificial Sequence: Synthetic oligonucleotide
uauauugugugugugugug

SEQ ID NO: 1221321 - RNA, 19 nt, Artificial Sequence
  Description of Artificial Sequence: Synthetic oligonucleotide
aguugugagagauaaacua

SEQ ID NO: 1221322 - RNA, 19 nt, Artificial Sequence
  Description of Artificial Sequence: Synthetic oligonucleotide
uguuccaugguuucacaag

SEQ ID NO: 1221323 - RNA, 19 nt, Artificial Sequence
  Description of Artificial Sequence: Synthetic oligonucleotide
ugggguucggauuuucugg

SEQ ID NO: 1221324 - RNA, 19 nt, Artificial Sequence
  Description of Artificial Sequence: Synthetic oligonucleotide
guaguugugagagauaaac

SEQ ID NO: 1221325 - RNA, 19 nt, Artificial Sequence
  Description of Artificial Sequence: Synthetic oligonucleotide
ugugagagauaaacuagug

SEQ ID NO: 1221326 - RNA, 19 nt, Artificial Sequence
  Description of Artificial Sequence: Synthetic oligonucleotide
cacaagagggguuacacug

SEQ ID NO: 1221327 - RNA, 19 nt, Artificial Sequence
  Description of Artificial Sequence: Synthetic oligonucleotide
aaacucugaggcccugggc

SEQ ID NO: 1221328 - RNA, 19 nt, Artificial Sequence
  Description of Artificial Sequence: Synthetic oligonucleotide
aagacgcaaaggcauagcu

SEQ ID NO: 1221329 - RNA, 19 nt, Artificial Sequence
  Description of Artificial Sequence: Synthetic oligonucleotide
auuuucuggaugccaacuc

SEQ ID NO: 1221330 - RNA, 19 nt, Artificial Sequence
  Description of Artificial Sequence: Synthetic oligonucleotide
uaaacuaguguccugucuu

SEQ ID NO: 1221331 - RNA, 19 nt, Artificial Sequence
  Description of Artificial Sequence: Synthetic oligonucleotide
uaaacucugaggcccuggg

SEQ ID NO: 1221332 - RNA, 19 nt, Artificial Sequence
  Description of Artificial Sequence: Synthetic oligonucleotide
uuuccacagauuucucugg

SEQ ID NO: 1221333 - RNA, 19 nt, Artificial Sequence
  Description of Artificial Sequence: Synthetic oligonucleotide
ugugggugaaauuucuaca

SEQ ID NO: 1221334 - RNA, 19 nt, Artificial Sequence
  Description of Artificial Sequence: Synthetic oligonucleotide
uuacacugcacuguuuccg

SEQ ID NO: 1221335 - RNA, 19 nt, Artificial Sequence
  Description of Artificial Sequence: Synthetic oligonucleotide
uugugagagauaaacuagu

SEQ ID NO: 1221336 - RNA, 19 nt, Artificial Sequence
  Description of Artificial Sequence: Synthetic oligonucleotide
uuuucuggaugccaacucu

SEQ ID NO: 1221337 - RNA, 19 nt, Artificial Sequence
  Description of Artificial Sequence: Synthetic oligonucleotide
accuguuuggcucucagcu

SEQ ID NO: 1221338 - RNA, 19 nt, Artificial Sequence
  Description of Artificial Sequence: Synthetic oligonucleotide
gaugccaacucuuuucuuc

SEQ ID NO: 1221339 - RNA, 19 nt, Artificial Sequence
  Description of Artificial Sequence: Synthetic oligonucleotide
uccaaaauaccuguuuggc

SEQ ID NO: 1221340 - RNA, 19 nt, Artificial Sequence
  Description of Artificial Sequence: Synthetic oligonucleotide
guugugagagauaaacuag

SEQ ID NO: 1221341 - RNA, 19 nt, Artificial Sequence
  Description of Artificial Sequence: Synthetic oligonucleotide
uggggaagcgagaugagga

SEQ ID NO: 1221342 - RNA, 19 nt, Artificial Sequence
  Description of Artificial Sequence: Synthetic oligonucleotide
gagagauaaacuagugucc

SEQ ID NO: 1221343 - RNA, 19 nt, Artificial Sequence
  Description of Artificial Sequence: Synthetic oligonucleotide
aaaccccuguagcccaugc

SEQ ID NO: 1221344 - RNA, 19 nt, Artificial Sequence
  Description of Artificial Sequence: Synthetic oligonucleotide
ugcuucuucagaugaaaga

SEQ ID NO: 1221345 - RNA, 19 nt, Artificial Sequence
  Description of Artificial Sequence: Synthetic oligonucleotide
guccaaaauaccuguuugg

SEQ ID NO: 1221346 - RNA, 19 nt, Artificial Sequence
  Description of Artificial Sequence: Synthetic oligonucleotide
aaacuaguguccugucuug

SEQ ID NO: 1221347 - RNA, 19 nt, Artificial Sequence
  Description of Artificial Sequence: Synthetic oligonucleotide
auucacuugacugggguuc

SEQ ID NO: 1221348 - RNA, 19 nt, Artificial Sequence
  Description of Artificial Sequence: Synthetic oligonucleotide
auuaugggaugugagauga

SEQ ID NO: 1221349 - RNA, 19 nt, Artificial Sequence
  Description of Artificial Sequence: Synthetic oligonucleotide
caaaggcauagcuggaucc

SEQ ID NO: 1221350 - RNA, 19 nt, Artificial Sequence
  Description of Artificial Sequence: Synthetic oligonucleotide
gauuaugggaugugagaug

SEQ ID NO: 1221351 - RNA, 19 nt, Artificial Sequence
  Description of Artificial Sequence: Synthetic oligonucleotide
aggccauucacuugacugg

SEQ ID NO: 1221352 - RNA, 19 nt, Artificial Sequence
  Description of Artificial Sequence: Synthetic oligonucleotide
caucuaucuuuucugauuc

SEQ ID NO: 1221353 - RNA, 19 nt, Artificial Sequence
  Description of Artificial Sequence: Synthetic oligonucleotide
guuuccgucuccauggagg

SEQ ID NO: 1221354 - RNA, 19 nt, Artificial Sequence
  Description of Artificial Sequence: Synthetic oligonucleotide
ucuucuacaaaccccugua

SEQ ID NO: 1221355 - RNA, 19 nt, Artificial Sequence
  Description of Artificial Sequence: Synthetic oligonucleotide
uauugugugugugugugug

SEQ ID NO: 1221356 - RNA, 19 nt, Artificial Sequence
  Description of Artificial Sequence: Synthetic oligonucleotide
uaguugugagagauaaacu

SEQ ID NO: 1221357 - RNA, 19 nt, Artificial Sequence
  Description of Artificial Sequence: Synthetic oligonucleotide
agauaaacuaguguccugu

SEQ ID NO: 1221358 - RNA, 19 nt, Artificial Sequence
  Description of Artificial Sequence: Synthetic oligonucleotide
auaaacuaguguccugucu

SEQ ID NO: 1221359 - RNA, 19 nt, Artificial Sequence
  Description of Artificial Sequence: Synthetic oligonucleotide
gagcagcucuuccugaccg

SEQ ID NO: 1221360 - RNA, 19 nt, Artificial Sequence
  Description of Artificial Sequence: Synthetic oligonucleotide
uuugcuugcuugcaguuuu

SEQ ID NO: 1221361 - RNA, 19 nt, Artificial Sequence
  Description of Artificial Sequence: Synthetic oligonucleotide
gaugaaagacgcaaaggca

SEQ ID NO: 1221362 - RNA, 19 nt, Artificial Sequence
  Description of Artificial Sequence: Synthetic oligonucleotide
agagggguuacacugcacu

SEQ ID NO: 1221363 - RNA, 19 nt, Artificial Sequence
  Description of Artificial Sequence: Synthetic oligonucleotide
ugggaugugagaugagaug

SEQ ID NO: 1221364 - RNA, 19 nt, Artificial Sequence
  Description of Artificial Sequence: Synthetic oligonucleotide
gggaugugagaugagaugg

SEQ ID NO: 1221365 - RNA, 19 nt, Artificial Sequence
  Description of Artificial Sequence: Synthetic oligonucleotide
aauguuccaugguuucaca

SEQ ID NO: 1221366 - RNA, 19 nt, Artificial Sequence
  Description of Artificial Sequence: Synthetic oligonucleotide
ccaugguuucacaagaggg

SEQ ID NO: 1221367 - RNA, 19 nt, Artificial Sequence
  Description of Artificial Sequence: Synthetic oligonucleotide
agagauaaacuaguguccu

SEQ ID NO: 1221368 - RNA, 19 nt, Artificial Sequence
  Description of Artificial Sequence: Synthetic oligonucleotide
uaugggaugugagaugaga

SEQ ID NO: 1221369 - RNA, 19 nt, Artificial Sequence
  Description of Artificial Sequence: Synthetic oligonucleotide
uggaugccaacucuuuucu

SEQ ID NO: 1221370 - RNA, 19 nt, Artificial Sequence
  Description of Artificial Sequence: Synthetic oligonucleotide
cagaugaaagacgcaaagg

SEQ ID NO: 1221371 - RNA, 19 nt, Artificial Sequence
  Description of Artificial Sequence: Synthetic oligonucleotide
uggacuagggcuucucugu

SEQ ID NO: 1221372 - RNA, 19 nt, Artificial Sequence
  Description of Artificial Sequence: Synthetic oligonucleotide
uucagaugaaagacgcaaa

SEQ ID NO: 1221373 - RNA, 19 nt, Artificial Sequence
  Description of Artificial Sequence: Synthetic oligonucleotide
caaaugcuucuucagauga

SEQ ID NO: 1221374 - RNA, 19 nt, Artificial Sequence
  Description of Artificial Sequence: Synthetic oligonucleotide
uucacaagagggguuacac

SEQ ID NO: 1221375 - RNA, 19 nt, Artificial Sequence
  Description of Artificial Sequence: Synthetic oligonucleotide
auugugugugugugugugg

SEQ ID NO: 1221376 - RNA, 19 nt, Artificial Sequence
  Description of Artificial Sequence: Synthetic oligonucleotide
gaaagacgcaaaggcauag

SEQ ID NO: 1221377 - RNA, 19 nt, Artificial Sequence
  Description of Artificial Sequence: Synthetic oligonucleotide
acaucuaucuuuucugauu

SEQ ID NO: 1221378 - RNA, 19 nt, Artificial Sequence
  Description of Artificial Sequence: Synthetic oligonucleotide
cuccauuuugcuugcuugc

SEQ ID NO: 1221379 - RNA, 19 nt, Artificial Sequence
  Description of Artificial Sequence: Synthetic oligonucleotide
aguguccugucuugugugg

SEQ ID NO: 1221380 - RNA, 19 nt, Artificial Sequence
  Description of Artificial Sequence: Synthetic oligonucleotide
auauauugugugugugugu

SEQ ID NO: 1221381 - RNA, 19 nt, Artificial Sequence
  Description of Artificial Sequence: Synthetic oligonucleotide
uguguguguguggugagug

SEQ ID NO: 1221382 - RNA, 19 nt, Artificial Sequence
  Description of Artificial Sequence: Synthetic oligonucleotide
cuacaaaccccuguagccc

SEQ ID NO: 1221383 - RNA, 19 nt, Artificial Sequence
  Description of Artificial Sequence: Synthetic oligonucleotide
acaagagggguuacacugc

SEQ ID NO: 1221384 - RNA, 19 nt, Artificial Sequence
  Description of Artificial Sequence: Synthetic oligonucleotide
augaaagacgcaaaggcau

SEQ ID NO: 1221385 - RNA, 19 nt, Artificial Sequence
  Description of Artificial Sequence: Synthetic oligonucleotide
aaaggcauagcuggauccu

SEQ ID NO: 1221386 - RNA, 19 nt, Artificial Sequence
  Description of Artificial Sequence: Synthetic oligonucleotide
gagaugagauggacuaggg

SEQ ID NO: 1221387 - RNA, 19 nt, Artificial Sequence
  Description of Artificial Sequence: Synthetic oligonucleotide
gagauaaacuaguguccug

SEQ ID NO: 1221388 - RNA, 19 nt, Artificial Sequence
  Description of Artificial Sequence: Synthetic oligonucleotide
cucuggauuaucuguaaca

SEQ ID NO: 1221389 - RNA, 19 nt, Artificial Sequence
  Description of Artificial Sequence: Synthetic oligonucleotide
gauaaacuaguguccuguc

SEQ ID NO: 1221390 - RNA, 19 nt, Artificial Sequence
  Description of Artificial Sequence: Synthetic oligonucleotide
uucugauucagagguggcc

SEQ ID NO: 1221391 - RNA, 19 nt, Artificial Sequence
  Description of Artificial Sequence: Synthetic oligonucleotide
ucucuggauuaucuguaac

SEQ ID NO: 1221392 - RNA, 19 nt, Artificial Sequence
  Description of Artificial Sequence: Synthetic oligonucleotide
auggacuagggcuucucug

SEQ ID NO: 1221393 - RNA, 19 nt, Artificial Sequence
  Description of Artificial Sequence: Synthetic oligonucleotide
ugaccgacucccuuggccu

SEQ ID NO: 1221394 - RNA, 19 nt, Artificial Sequence
  Description of Artificial Sequence: Synthetic oligonucleotide
cuucuacaaaccccuguag

SEQ ID NO: 1221395 - RNA, 19 nt, Artificial Sequence
  Description of Artificial Sequence: Synthetic oligonucleotide
uggaauguuccaugguuuc

SEQ ID NO: 1221396 - RNA, 19 nt, Artificial Sequence
  Description of Artificial Sequence: Synthetic oligonucleotide
ugaaagacgcaaaggcaua

SEQ ID NO: 1221397 - RNA, 19 nt, Artificial Sequence
  Description of Artificial Sequence: Synthetic oligonucleotide
cuggaugccaacucuuuuc

SEQ ID NO: 1221398 - RNA, 19 nt, Artificial Sequence
  Description of Artificial Sequence: Synthetic oligonucleotide
gaugugagaugagauggac

SEQ ID NO: 1221399 - RNA, 19 nt, Artificial Sequence
  Description of Artificial Sequence: Synthetic oligonucleotide
ggagauaaacucugaggcc

SEQ ID NO: 1221400 - RNA, 19 nt, Artificial Sequence
  Description of Artificial Sequence: Synthetic oligonucleotide
guuacacugcacuguuucc

SEQ ID NO: 1221401 - RNA, 19 nt, Artificial Sequence
  Description of Artificial Sequence: Synthetic oligonucleotide
acuaguguccugucuugug

SEQ ID NO: 1221402 - RNA, 19 nt, Artificial Sequence
  Description of Artificial Sequence: Synthetic oligonucleotide
uguuuccgucuccauggag

SEQ ID NO: 1221403 - RNA, 19 nt, Artificial Sequence
  Description of Artificial Sequence: Synthetic oligonucleotide
cuauacacaaaaccaucca

SEQ ID NO: 1221404 - RNA, 19 nt, Artificial Sequence
  Description of Artificial Sequence: Synthetic oligonucleotide
ugauucagagguggccugg

SEQ ID NO: 1221405 - RNA, 19 nt, Artificial Sequence
  Description of Artificial Sequence: Synthetic oligonucleotide
ugggugaaauuucuacauc

SEQ ID NO: 1221406 - RNA, 19 nt, Artificial Sequence
  Description of Artificial Sequence: Synthetic oligonucleotide
gggacaucuaucuuuucug

SEQ ID NO: 1221407 - RNA, 19 nt, Artificial Sequence
  Description of Artificial Sequence: Synthetic oligonucleotide
uucacuugacugggguucg

SEQ ID NO: 1221408 - RNA, 19 nt, Artificial Sequence
  Description of Artificial Sequence: Synthetic oligonucleotide
auuggggucacugggcuug

SEQ ID NO: 1221409 - RNA, 19 nt, Artificial Sequence
  Description of Artificial Sequence: Synthetic oligonucleotide
ucacaagagggguuacacu

SEQ ID NO: 1221410 - RNA, 19 nt, Artificial Sequence
  Description of Artificial Sequence: Synthetic oligonucleotide
uguguguguguguggugag

SEQ ID NO: 1221411 - RNA, 19 nt, Artificial Sequence
  Description of Artificial Sequence: Synthetic oligonucleotide
gguuacacugcacuguuuc

SEQ ID NO: 1221412 - RNA, 19 nt, Artificial Sequence
  Description of Artificial Sequence: Synthetic oligonucleotide
gagggguuacacugcacug

SEQ ID NO: 1221413 - RNA, 19 nt, Artificial Sequence
  Description of Artificial Sequence: Synthetic oligonucleotide
uuucuucuacaaaccccug

SEQ ID NO: 1221414 - RNA, 19 nt, Artificial Sequence
  Description of Artificial Sequence: Synthetic oligonucleotide
agcccaugcaucccaguag

SEQ ID NO: 1221415 - RNA, 19 nt, Artificial Sequence
  Description of Artificial Sequence: Synthetic oligonucleotide
gauggaauguuccaugguu

SEQ ID NO: 1221416 - RNA, 19 nt, Artificial Sequence
  Description of Artificial Sequence: Synthetic oligonucleotide
auaccuguuuggcucucag

SEQ ID NO: 1221417 - RNA, 19 nt, Artificial Sequence
  Description of Artificial Sequence: Synthetic oligonucleotide
cugaccgacucccuuggcc

SEQ ID NO: 1221418 - RNA, 19 nt, Artificial Sequence
  Description of Artificial Sequence: Synthetic oligonucleotide
uuaugggaugugagaugag

SEQ ID NO: 1221419 - RNA, 19 nt, Artificial Sequence
  Description of Artificial Sequence: Synthetic oligonucleotide
auaaacucugaggcccugg

SEQ ID NO: 1221420 - RNA, 19 nt, Artificial Sequence
  Description of Artificial Sequence: Synthetic oligonucleotide
cuggauccuggccugcugg

SEQ ID NO: 1221421 - RNA, 19 nt, Artificial Sequence
  Description of Artificial Sequence: Synthetic oligonucleotide
ucuccauggagggauuaug

SEQ ID NO: 1221422 - RNA, 19 nt, Artificial Sequence
  Description of Artificial Sequence: Synthetic oligonucleotide
gaagcgagaugaggaagag

SEQ ID NO: 1221423 - RNA, 19 nt, Artificial Sequence
  Description of Artificial Sequence: Synthetic oligonucleotide
cugggguucggauuuucug

SEQ ID NO: 1221424 - RNA, 19 nt, Artificial Sequence
  Description of Artificial Sequence: Synthetic oligonucleotide
uuguguguguguguguggu

SEQ ID NO: 1221425 - RNA, 19 nt, Artificial Sequence
  Description of Artificial Sequence: Synthetic oligonucleotide
uggauccuggccugcuggg

SEQ ID NO: 1221426 - RNA, 19 nt, Artificial Sequence
  Description of Artificial Sequence: Synthetic oligonucleotide
aaauaccuguuuggcucuc

SEQ ID NO: 1221427 - RNA, 19 nt, Artificial Sequence
  Description of Artificial Sequence: Synthetic oligonucleotide
agggauuaugggaugugag

SEQ ID NO: 1221428 - RNA, 19 nt, Artificial Sequence
  Description of Artificial Sequence: Synthetic oligonucleotide
cacuguuuccgucuccaug

SEQ ID NO: 1221429 - RNA, 19 nt, Artificial Sequence
  Description of Artificial Sequence: Synthetic oligonucleotide
auuuugcuugcuugcaguu

SEQ ID NO: 1221430 - RNA, 19 nt, Artificial Sequence
  Description of Artificial Sequence: Synthetic oligonucleotide
auauugugugugugugugu

SEQ ID NO: 1221431 - RNA, 19 nt, Artificial Sequence
  Description of Artificial Sequence: Synthetic oligonucleotide
aacuaguguccugucuugu

SEQ ID NO: 1221432 - RNA, 19 nt, Artificial Sequence
  Description of Artificial Sequence: Synthetic oligonucleotide
accccuguagcccaugcau

SEQ ID NO: 1221433 - RNA, 19 nt, Artificial Sequence
  Description of Artificial Sequence: Synthetic oligonucleotide
uuucacaagagggguuaca

SEQ ID NO: 1221434 - RNA, 19 nt, Artificial Sequence
  Description of Artificial Sequence: Synthetic oligonucleotide
uguguguguguguguggug

SEQ ID NO: 1221435 - RNA, 19 nt, Artificial Sequence
  Description of Artificial Sequence: Synthetic oligonucleotide
ggauuaucuguaacaaaug

SEQ ID NO: 1221436 - RNA, 19 nt, Artificial Sequence
  Description of Artificial Sequence: Synthetic oligonucleotide
gguucggauuuucuggaug

SEQ ID NO: 1221437 - RNA, 19 nt, Artificial Sequence
  Description of Artificial Sequence: Synthetic oligonucleotide
uccgucuccauggagggau

SEQ ID NO: 1221438 - RNA, 19 nt, Artificial Sequence
  Description of Artificial Sequence: Synthetic oligonucleotide
gugagagauaaacuagugu

SEQ ID NO: 1221439 - RNA, 19 nt, Artificial Sequence
  Description of Artificial Sequence: Synthetic oligonucleotide
aagagggguuacacugcac

SEQ ID NO: 1221440 - RNA, 19 nt, Artificial Sequence
  Description of Artificial Sequence: Synthetic oligonucleotide
auguuccaugguuucacaa

SEQ ID NO: 1221441 - RNA, 19 nt, Artificial Sequence
  Description of Artificial Sequence: Synthetic oligonucleotide
cauagcuggauccuggccu

SEQ ID NO: 1221442 - RNA, 19 nt, Artificial Sequence
  Description of Artificial Sequence: Synthetic oligonucleotide
ggugaaauuucuacaucug

SEQ ID NO: 1221443 - RNA, 19 nt, Artificial Sequence
  Description of Artificial Sequence: Synthetic oligonucleotide
acacugcacuguuuccguc

SEQ ID NO: 1221444 - RNA, 19 nt, Artificial Sequence
  Description of Artificial Sequence: Synthetic oligonucleotide
agacgcaaaggcauagcug

SEQ ID NO: 1221445 - RNA, 19 nt, Artificial Sequence
  Description of Artificial Sequence: Synthetic oligonucleotide
cugauucagagguggccug

SEQ ID NO: 1221446 - RNA, 19 nt, Artificial Sequence
  Description of Artificial Sequence: Synthetic oligonucleotide
auggagggauuaugggaug

SEQ ID NO: 1221447 - RNA, 19 nt, Artificial Sequence
  Description of Artificial Sequence: Synthetic oligonucleotide
gauccuggccugcugggga

SEQ ID NO: 1221448 - RNA, 19 nt, Artificial Sequence
  Description of Artificial Sequence: Synthetic oligonucleotide
augcuucuucagaugaaag

SEQ ID NO: 1221449 - RNA, 19 nt, Artificial Sequence
  Description of Artificial Sequence: Synthetic oligonucleotide
gggauuaugggaugugaga

SEQ ID NO: 1221450 - RNA, 19 nt, Artificial Sequence
  Description of Artificial Sequence: Synthetic oligonucleotide
aauaccuguuuggcucuca

SEQ ID NO: 1221451 - RNA, 19 nt, Artificial Sequence
  Description of Artificial Sequence: Synthetic oligonucleotide
caugcaucccaguaguugu

SEQ ID NO: 1221452 - RNA, 19 nt, Artificial Sequence
  Description of Artificial Sequence: Synthetic oligonucleotide
gucuuguguggagauaaac

SEQ ID NO: 1221453 - RNA, 19 nt, Artificial Sequence
  Description of Artificial Sequence: Synthetic oligonucleotide
uguuuccuuagaguucguc

SEQ ID NO: 1221454 - RNA, 19 nt, Artificial Sequence
  Description of Artificial Sequence: Synthetic oligonucleotide
uccacagauuucucuggau

SEQ ID NO: 1221455 - RNA, 19 nt, Artificial Sequence
  Description of Artificial Sequence: Synthetic oligonucleotide
cauggagggauuaugggau

SEQ ID NO: 1221456 - RNA, 19 nt, Artificial Sequence
  Description of Artificial Sequence: Synthetic oligonucleotide
gggugaaauuucuacaucu

SEQ ID NO: 1221457 - RNA, 19 nt, Artificial Sequence
  Description of Artificial Sequence: Synthetic oligonucleotide
gagggauuaugggauguga

SEQ ID NO: 1221458 - RNA, 19 nt, Artificial Sequence
  Description of Artificial Sequence: Synthetic oligonucleotide
gauuuucuggaugccaacu

SEQ ID NO: 1221459 - RNA, 19 nt, Artificial Sequence
  Description of Artificial Sequence: Synthetic oligonucleotide
agagccugcagagcaggag

SEQ ID NO: 1221460 - RNA, 19 nt, Artificial Sequence
  Description of Artificial Sequence: Synthetic oligonucleotide
aggcauagcuggauccugg

SEQ ID NO: 1221461 - RNA, 19 nt, Artificial Sequence
  Description of Artificial Sequence: Synthetic oligonucleotide
caacucuuuucuucuacaa

SEQ ID NO: 1221462 - RNA, 19 nt, Artificial Sequence
  Description of Artificial Sequence: Synthetic oligonucleotide
agggguuacacugcacugu

SEQ ID NO: 1221463 - RNA, 19 nt, Artificial Sequence
  Description of Artificial Sequence: Synthetic oligonucleotide
ugucuuguguggagauaaa

SEQ ID NO: 1221464 - RNA, 19 nt, Artificial Sequence
  Description of Artificial Sequence: Synthetic oligonucleotide
uccugucuuguguggagau

SEQ ID NO: 1221465 - RNA, 19 nt, Artificial Sequence
  Description of Artificial Sequence: Synthetic oligonucleotide
agauggacuagggcuucuc

SEQ ID NO: 1221466 - RNA, 19 nt, Artificial Sequence
  Description of Artificial Sequence: Synthetic oligonucleotide
ggacaucuaucuuuucuga

SEQ ID NO: 1221467 - RNA, 19 nt, Artificial Sequence
  Description of Artificial Sequence: Synthetic oligonucleotide
gugugugugugugugguga

SEQ ID NO: 1221468 - RNA, 19 nt, Artificial Sequence
  Description of Artificial Sequence: Synthetic oligonucleotide
uuuugcuugcuugcaguuu

SEQ ID NO: 1221469 - RNA, 19 nt, Artificial Sequence
  Description of Artificial Sequence: Synthetic oligonucleotide
augggaugugagaugagau

SEQ ID NO: 1221470 - RNA, 19 nt, Artificial Sequence
  Description of Artificial Sequence: Synthetic oligonucleotide
cauuuugcuugcuugcagu

SEQ ID NO: 1221471 - RNA, 19 nt, Artificial Sequence
  Description of Artificial Sequence: Synthetic oligonucleotide
auggaauguuccaugguuu

SEQ ID NO: 1221472 - RNA, 19 nt, Artificial Sequence
  Description of Artificial Sequence: Synthetic oligonucleotide
caucccaguaguugugaga

SEQ ID NO: 1221473 - RNA, 19 nt, Artificial Sequence
  Description of Artificial Sequence: Synthetic oligonucleotide
gacaucuaucuuuucugau

SEQ ID NO: 1221474 - RNA, 19 nt, Artificial Sequence
  Description of Artificial Sequence: Synthetic oligonucleotide
augagauggacuagggcuu

SEQ ID NO: 1221475 - RNA, 19 nt, Artificial Sequence
  Description of Artificial Sequence: Synthetic oligonucleotide
ugagauggacuagggcuuc

SEQ ID NO: 1221476 - RNA, 19 nt, Artificial Sequence
  Description of Artificial Sequence: Synthetic oligonucleotide
caagagggguuacacugca

SEQ ID NO: 1221477 - RNA, 19 nt, Artificial Sequence
  Description of Artificial Sequence: Synthetic oligonucleotide
gauggacuagggcuucucu

SEQ ID NO: 1221478 - RNA, 19 nt, Artificial Sequence
  Description of Artificial Sequence: Synthetic oligonucleotide
cccuguagcccaugcaucc

SEQ ID NO: 1221479 - RNA, 19 nt, Artificial Sequence
  Description of Artificial Sequence: Synthetic oligonucleotide
cagauuucucuggauuauc

SEQ ID NO: 1221480 - RNA, 19 nt, Artificial Sequence
  Description of Artificial Sequence: Synthetic oligonucleotide
ucacuugacugggguucgg

SEQ ID NO: 1221481 - RNA, 19 nt, Artificial Sequence
  Description of Artificial Sequence: Synthetic oligonucleotide
ggaagcgagaugaggaaga

SEQ ID NO: 1221482 - RNA, 19 nt, Artificial Sequence
  Description of Artificial Sequence: Synthetic oligonucleotide
gcaaaggcauagcuggauc

SEQ ID NO: 1221483 - RNA, 19 nt, Artificial Sequence
  Description of Artificial Sequence: Synthetic oligonucleotide
gcuauuggggucacugggc

SEQ ID NO: 1221484 - RNA, 19 nt, Artificial Sequence
  Description of Artificial Sequence: Synthetic oligonucleotide
ccauuuugcuugcuugcag

SEQ ID NO: 1221485 - RNA, 19 nt, Artificial Sequence
  Description of Artificial Sequence: Synthetic oligonucleotide
gaccgacucccuuggccug

SEQ ID NO: 1221486 - RNA, 19 nt, Artificial Sequence
  Description of Artificial Sequence: Synthetic oligonucleotide
cuaguguccugucuugugu

SEQ ID NO: 1221487 - RNA, 19 nt, Artificial Sequence
  Description of Artificial Sequence: Synthetic oligonucleotide
gccaacucuuuucuucuac

SEQ ID NO: 1221488 - RNA, 19 nt, Artificial Sequence
  Description of Artificial Sequence: Synthetic oligonucleotide
gggaagcgagaugaggaag

SEQ ID NO: 1221489 - RNA, 19 nt, Artificial Sequence
  Description of Artificial Sequence: Synthetic oligonucleotide
ggucacugggcuugauggc

SEQ ID NO: 1221490 - RNA, 19 nt, Artificial Sequence
  Description of Artificial Sequence: Synthetic oligonucleotide
aggaggcucuguuuccuua

SEQ ID NO: 1221491 - RNA, 19 nt, Artificial Sequence
  Description of Artificial Sequence: Synthetic oligonucleotide
ggauuaugggaugugagau

SEQ ID NO: 1221492 - RNA, 19 nt, Artificial Sequence
  Description of Artificial Sequence: Synthetic oligonucleotide
aagagccugcagagcagga

SEQ ID NO: 1221493 - RNA, 19 nt, Artificial Sequence
  Description of Artificial Sequence: Synthetic oligonucleotide
gcaucccaguaguugugag

SEQ ID NO: 1221494 - RNA, 19 nt, Artificial Sequence
  Description of Artificial Sequence: Synthetic oligonucleotide
guuucacaagagggguuac

SEQ ID NO: 1221495 - RNA, 19 nt, Artificial Sequence
  Description of Artificial Sequence: Synthetic oligonucleotide
accgacucccuuggccugg

SEQ ID NO: 1221496 - RNA, 19 nt, Artificial Sequence
  Description of Artificial Sequence: Synthetic oligonucleotide
gggguucggauuuucugga

SEQ ID NO: 1221497 - RNA, 19 nt, Artificial Sequence
  Description of Artificial Sequence: Synthetic oligonucleotide
ccaugcaucccaguaguug

SEQ ID NO: 1221498 - RNA, 19 nt, Artificial Sequence
  Description of Artificial Sequence: Synthetic oligonucleotide
acugggguucggauuuucu

SEQ ID NO: 1221499 - RNA, 19 nt, Artificial Sequence
  Description of Artificial Sequence: Synthetic oligonucleotide
aguaguugugagagauaaa

SEQ ID NO: 1221500 - RNA, 19 nt, Artificial Sequence
  Description of Artificial Sequence: Synthetic oligonucleotide
ggggucacugggcuugaug

SEQ ID NO: 1221501 - RNA, 19 nt, Artificial Sequence
  Description of Artificial Sequence: Synthetic oligonucleotide
ggaagagccugcagagcag

SEQ ID NO: 1221502 - RNA, 19 nt, Artificial Sequence
  Description of Artificial Sequence: Synthetic oligonucleotide
gguuucacaagagggguua

SEQ ID NO: 1221503 - RNA, 19 nt, Artificial Sequence
  Description of Artificial Sequence: Synthetic oligonucleotide
cugcacuguuuccgucucc

SEQ ID NO: 1221504 - RNA, 19 nt, Artificial Sequence
  Description of Artificial Sequence: Synthetic oligonucleotide
ggaauguuccaugguuuca

SEQ ID NO: 1221505 - RNA, 19 nt, Artificial Sequence
  Description of Artificial Sequence: Synthetic oligonucleotide
gaaggccauucacuugacu

SEQ ID NO: 1221506 - RNA, 19 nt, Artificial Sequence
  Description of Artificial Sequence: Synthetic oligonucleotide
ggcucuguuuccuuagagu

SEQ ID NO: 1221507 - RNA, 19 nt, Artificial Sequence
  Description of Artificial Sequence: Synthetic oligonucleotide
ggagggauuaugggaugug

SEQ ID NO: 1221508 - RNA, 19 nt, Artificial Sequence
  Description of Artificial Sequence: Synthetic oligonucleotide
cuugacugggguucggauu

SEQ ID NO: 1221509 - RNA, 19 nt, Artificial Sequence
  Description of Artificial Sequence: Synthetic oligonucleotide
cacugcacuguuuccgucu

SEQ ID NO: 1221510 - RNA, 19 nt, Artificial Sequence
  Description of Artificial Sequence: Synthetic oligonucleotide
ccaaaauaccuguuuggcu

SEQ ID NO: 1221511 - RNA, 19 nt, Artificial Sequence
  Description of Artificial Sequence: Synthetic oligonucleotide
ggaugugagaugagaugga

SEQ ID NO: 1221512 - RNA, 19 nt, Artificial Sequence
  Description of Artificial Sequence: Synthetic oligonucleotide
guguggagauaaacucuga

SEQ ID NO: 1221513 - RNA, 19 nt, Artificial Sequence
  Description of Artificial Sequence: Synthetic oligonucleotide
guguccugucuugugugga

SEQ ID NO: 1221514 - RNA, 19 nt, Artificial Sequence
  Description of Artificial Sequence: Synthetic oligonucleotide
guccugucuuguguggaga

SEQ ID NO: 1221515 - RNA, 19 nt, Artificial Sequence
  Description of Artificial Sequence: Synthetic oligonucleotide
uuccgucuccauggaggga

SEQ ID NO: 1221516 - RNA, 19 nt, Artificial Sequence
  Description of Artificial Sequence: Synthetic oligonucleotide
gauucagagguggccuggu

SEQ ID NO: 1221517 - RNA, 19 nt, Artificial Sequence
  Description of Artificial Sequence: Synthetic oligonucleotide
cuggggacaucuaucuuuu

SEQ ID NO: 1221518 - RNA, 19 nt, Artificial Sequence
  Description of Artificial Sequence: Synthetic oligonucleotide
cauucacuugacugggguu

SEQ ID NO: 1221519 - RNA, 19 nt, Artificial Sequence
  Description of Artificial Sequence: Synthetic oligonucleotide
cuguuuccgucuccaugga

SEQ ID NO: 1221520 - RNA, 19 nt, Artificial Sequence
  Description of Artificial Sequence: Synthetic oligonucleotide
caaaccccuguagcccaug

SEQ ID NO: 1221521 - RNA, 19 nt, Artificial Sequence
  Description of Artificial Sequence: Synthetic oligonucleotide
gccauucacuugacugggg

SEQ ID NO: 1221522 - RNA, 19 nt, Artificial Sequence
  Description of Artificial Sequence: Synthetic oligonucleotide
agcuggauccuggccugcu

SEQ ID NO: 1221523 - RNA, 19 nt, Artificial Sequence
  Description of Artificial Sequence: Synthetic oligonucleotide
acgcaaaggcauagcugga

SEQ ID NO: 1221524 - RNA, 19 nt, Artificial Sequence
  Description of Artificial Sequence: Synthetic oligonucleotide
cacuugacugggguucgga

SEQ ID NO: 1221525 - RNA, 19 nt, Artificial Sequence
  Description of Artificial Sequence: Synthetic oligonucleotide
gcagcucuuccugaccgac

SEQ ID NO: 1221526 - RNA, 19 nt, Artificial Sequence
  Description of Artificial Sequence: Synthetic oligonucleotide
ucccuuggccuggggacau

SEQ ID NO: 1221527 - RNA, 19 nt, Artificial Sequence
  Description of Artificial Sequence: Synthetic oligonucleotide
cugugucuccauuuugcuu

SEQ ID NO: 1221528 - RNA, 19 nt, Artificial Sequence
  Description of Artificial Sequence: Synthetic oligonucleotide
ccccuguagcccaugcauc

SEQ ID NO: 1221529 - RNA, 19 nt, Artificial Sequence
  Description of Artificial Sequence: Synthetic oligonucleotide
gcccaugcaucccaguagu

SEQ ID NO: 1221530 - RNA, 19 nt, Artificial Sequence
  Description of Artificial Sequence: Synthetic oligonucleotide
guagcccaugcaucccagu

SEQ ID NO: 1221531 - RNA, 19 nt, Artificial Sequence
  Description of Artificial Sequence: Synthetic oligonucleotide
ccuggggacaucuaucuuu

SEQ ID NO: 1221532 - RNA, 19 nt, Artificial Sequence
  Description of Artificial Sequence: Synthetic oligonucleotide
ugacugggguucggauuuu

SEQ ID NO: 1221533 - RNA, 19 nt, Artificial Sequence
  Description of Artificial Sequence: Synthetic oligonucleotide
gggguuacacugcacuguu

SEQ ID NO: 1221534 - RNA, 19 nt, Artificial Sequence
  Description of Artificial Sequence: Synthetic oligonucleotide
gagauggacuagggcuucu

SEQ ID NO: 1221535 - RNA, 19 nt, Artificial Sequence
  Description of Artificial Sequence: Synthetic oligonucleotide
cuuggccuggggacaucua

SEQ ID NO: 1221536 - RNA, 19 nt, Artificial Sequence
  Description of Artificial Sequence: Synthetic oligonucleotide
guguguguguguggugagu

SEQ ID NO: 1221537 - RNA, 19 nt, Artificial Sequence
  Description of Artificial Sequence: Synthetic oligonucleotide
gucuccauggagggauuau

SEQ ID NO: 1221538 - RNA, 19 nt, Artificial Sequence
  Description of Artificial Sequence: Synthetic oligonucleotide
cagcucuuccugaccgacu

SEQ ID NO: 1221539 - RNA, 19 nt, Artificial Sequence
  Description of Artificial Sequence: Synthetic oligonucleotide
gaggcccugggcucuucuu

SEQ ID NO: 1221540 - RNA, 19 nt, Artificial Sequence
  Description of Artificial Sequence: Synthetic oligonucleotide
ggguucggauuuucuggau

SEQ ID NO: 1221541 - RNA, 19 nt, Artificial Sequence
  Description of Artificial Sequence: Synthetic oligonucleotide
cuguuuccuuagaguucgu

SEQ ID NO: 1221542 - RNA, 19 nt, Artificial Sequence
  Description of Artificial Sequence: Synthetic oligonucleotide
cugaggcccugggcucuuc

SEQ ID NO: 1221543 - RNA, 19 nt, Artificial Sequence
  Description of Artificial Sequence: Synthetic oligonucleotide
cccugggcucuucuuucca

SEQ ID NO: 1221544 - RNA, 19 nt, Artificial Sequence
  Description of Artificial Sequence: Synthetic oligonucleotide
gcgagaugaggaagagccu

SEQ ID NO: 1221545 - RNA, 19 nt, Artificial Sequence
  Description of Artificial Sequence: Synthetic oligonucleotide
ccugcuggggaagcgagau

SEQ ID NO: 1221546 - RNA, 19 nt, Artificial Sequence
  Description of Artificial Sequence: Synthetic oligonucleotide
ccuuggccuggggacaucu

SEQ ID NO: 1221547 - RNA, 19 nt, Artificial Sequence
  Description of Artificial Sequence: Synthetic oligonucleotide
cgacucccuuggccugggg

SEQ ID NO: 1221548 - RNA, 19 nt, Artificial Sequence
  Description of Artificial Sequence: Synthetic oligonucleotide
gccuggggacaucuaucuu

SEQ ID NO: 1221549 - RNA, 19 nt, Artificial Sequence
  Description of Artificial Sequence: Synthetic oligonucleotide
ggguuacacugcacuguuu

SEQ ID NO: 1221550 - RNA, 19 nt, Artificial Sequence
  Description of Artificial Sequence: Synthetic oligonucleotide
cgcaaaggcauagcuggau

SEQ ID NO: 1221551 - RNA, 19 nt, Artificial Sequence
  Description of Artificial Sequence: Synthetic oligonucleotide
cccaugcaucccaguaguu

SEQ ID NO: 1221552 - RNA, 19 nt, Artificial Sequence
  Description of Artificial Sequence: Synthetic oligonucleotide
cccuuggccuggggacauc

SEQ ID NO: 1221553 - RNA, 19 nt, Artificial Sequence
  Description of Artificial Sequence: Synthetic oligonucleotide
ccgucuccauggagggauu

SEQ ID NO: 1221554 - RNA, 19 nt, Artificial Sequence
  Description of Artificial Sequence: Synthetic oligonucleotide
uguugaaacauucagaacc

SEQ ID NO: 1221555 - RNA, 19 nt, Artificial Sequence
  Description of Artificial Sequence: Synthetic oligonucleotide
ugucguauugcuaaggagg

SEQ ID NO: 1221556 - RNA, 19 nt, Artificial Sequence
  Description of Artificial Sequence: Synthetic oligonucleotide
uuuacuuccaacauaggga

SEQ ID NO: 1221557 - RNA, 19 nt, Artificial Sequence
  Description of Artificial Sequence: Synthetic oligonucleotide
ugacacuccacacaggucg

SEQ ID NO: 1221558 - RNA, 19 nt, Artificial Sequence
  Description of Artificial Sequence: Synthetic oligonucleotide
guuagggaagucuaggagg

SEQ ID NO: 1221559 - RNA, 19 nt, Artificial Sequence
  Description of Artificial Sequence: Synthetic oligonucleotide
uccucgggcauucugacgg

SEQ ID NO: 1221560 - RNA, 19 nt, Artificial Sequence
  Description of Artificial Sequence: Synthetic oligonucleotide
acgggaaugucucagggac

SEQ ID NO: 1221561 - RNA, 19 nt, Artificial Sequence
  Description of Artificial Sequence: Synthetic oligonucleotide
uuaaagaugcugagcgagg

SEQ ID NO: 1221562 - RNA, 19 nt, Artificial Sequence
  Description of Artificial Sequence: Synthetic oligonucleotide
aaagaugcugagcgagggc

SEQ ID NO: 1221563 - RNA, 19 nt, Artificial Sequence
  Description of Artificial Sequence: Synthetic oligonucleotide
aucacgguccuccacagcg

SEQ ID NO: 1221564 - RNA, 19 nt, Artificial Sequence
  Description of Artificial Sequence: Synthetic oligonucleotide
uuuauccccaccauucuug

SEQ ID NO: 1221565 - RNA, 19 nt, Artificial Sequence
  Description of Artificial Sequence: Synthetic oligonucleotide
aacuuuacuugcauuuagc

SEQ ID NO: 1221566 - RNA, 19 nt, Artificial Sequence
  Description of Artificial Sequence: Synthetic oligonucleotide
agugcaauggaggaagggc

SEQ ID NO: 1221567 - RNA, 19 nt, Artificial Sequence
  Description of Artificial Sequence: Synthetic oligonucleotide
gacggcaaaggucagguag

SEQ ID NO: 1221568 - RNA, 19 nt, Artificial Sequence
  Description of Artificial Sequence: Synthetic oligonucleotide
uggcguaccacgauagugg

SEQ ID NO: 1221569 - RNA, 19 nt, Artificial Sequence
  Description of Artificial Sequence: Synthetic oligonucleotide
aaagguaccaggagggcac

SEQ ID NO: 1221570 - RNA, 19 nt, Artificial Sequence
  Description of Artificial Sequence: Synthetic oligonucleotide
aacucauauccacgguagc

SEQ ID NO: 1221571 - RNA, 19 nt, Artificial Sequence
  Description of Artificial Sequence: Synthetic oligonucleotide
agcacuuagauuucuuaag

SEQ ID NO: 1221572 - RNA, 19 nt, Artificial Sequence
  Description of Artificial Sequence: Synthetic oligonucleotide
uguaugagaggucccuggg

SEQ ID NO: 1221573 - RNA, 19 nt, Artificial Sequence
  Description of Artificial Sequence: Synthetic oligonucleotide
acaaccaaaauaaagugcu

SEQ ID NO: 1221574 - RNA, 19 nt, Artificial Sequence
  Description of Artificial Sequence: Synthetic oligonucleotide
uagggaaagaacuguguag

SEQ ID NO: 1221575 - RNA, 19 nt, Artificial Sequence
  Description of Artificial Sequence: Synthetic oligonucleotide
uaugagaggucccugggga

SEQ ID NO: 1221576 - RNA, 19 nt, Artificial Sequence
  Description of Artificial Sequence: Synthetic oligonucleotide
ugagcgagggcucucuagg

SEQ ID NO: 1221577 - RNA, 19 nt, Artificial Sequence
  Description of Artificial Sequence: Synthetic oligonucleotide
gaaccaagcacuuagauuu

SEQ ID NO: 1221578 - RNA, 19 nt, Artificial Sequence
  Description of Artificial Sequence: Synthetic oligonucleotide
uguagcacgggguggaaag

SEQ ID NO: 1221579 - RNA, 19 nt, Artificial Sequence
  Description of Artificial Sequence: Synthetic oligonucleotide
acaggucgcagacaggugg

SEQ ID NO: 1221580 - RNA, 19 nt, Artificial Sequence
  Description of Artificial Sequence: Synthetic oligonucleotide
guuaaagaugcugagcgag

SEQ ID NO: 1221581 - RNA, 19 nt, Artificial Sequence
  Description of Artificial Sequence: Synthetic oligonucleotide
aaacucauauccacgguag

SEQ ID NO: 1221582 - RNA, 19 nt, Artificial Sequence
  Description of Artificial Sequence: Synthetic oligonucleotide
cauucuuggagccauccgc

SEQ ID NO: 1221583 - RNA, 19 nt, Artificial Sequence
  Description of Artificial Sequence: Synthetic oligonucleotide
uaaagaugcugagcgaggg

SEQ ID NO: 1221584 - RNA, 19 nt, Artificial Sequence
  Description of Artificial Sequence: Synthetic oligonucleotide
agaacugugaucaaacaca

SEQ ID NO: 1221585 - RNA, 19 nt, Artificial Sequence
  Description of Artificial Sequence: Synthetic oligonucleotide
aggucgaagacacaggccu

SEQ ID NO: 1221586 - RNA, 19 nt, Artificial Sequence
  Description of Artificial Sequence: Synthetic oligonucleotide
cagccuauuggccacacgg

SEQ ID NO: 1221587 - RNA, 19 nt, Artificial Sequence
  Description of Artificial Sequence: Synthetic oligonucleotide
agugaggguccccacuucc

SEQ ID NO: 1221588 - RNA, 19 nt, Artificial Sequence
  Description of Artificial Sequence: Synthetic oligonucleotide
auguuuauccccaccauuc

SEQ ID NO: 1221589 - RNA, 19 nt, Artificial Sequence
  Description of Artificial Sequence: Synthetic oligonucleotide
guguagaugcuucagcccc

SEQ ID NO: 1221590 - RNA, 19 nt, Artificial Sequence
  Description of Artificial Sequence: Synthetic oligonucleotide
agcguugaccacuuccucg

SEQ ID NO: 1221591 - RNA, 19 nt, Artificial Sequence
  Description of Artificial Sequence: Synthetic oligonucleotide
auacgggaaugucucaggg

SEQ ID NO: 1221592 - RNA, 19 nt, Artificial Sequence
  Description of Artificial Sequence: Synthetic oligonucleotide
ucuucuacaggcagcuucu

SEQ ID NO: 1221593 - RNA, 19 nt, Artificial Sequence
  Description of Artificial Sequence: Synthetic oligonucleotide
cauccgcaaaagcagacgg

SEQ ID NO: 1221594 - RNA, 19 nt, Artificial Sequence
  Description of Artificial Sequence: Synthetic oligonucleotide
ugcuuguguaacagugugg

SEQ ID NO: 1221595 - RNA, 19 nt, Artificial Sequence
  Description of Artificial Sequence: Synthetic oligonucleotide
ucggcguuggcacggaaag

SEQ ID NO: 1221596 - RNA, 19 nt, Artificial Sequence
  Description of Artificial Sequence: Synthetic oligonucleotide
uauguacacgcagugacac

SEQ ID NO: 1221597 - RNA, 19 nt, Artificial Sequence
  Description of Artificial Sequence: Synthetic oligonucleotide
aggaucaauucucuguuga

SEQ ID NO: 1221598 - RNA, 19 nt, Artificial Sequence
  Description of Artificial Sequence: Synthetic oligonucleotide
uugcacuuggccacagcgg

SEQ ID NO: 1221599 - RNA, 19 nt, Artificial Sequence
  Description of Artificial Sequence: Synthetic oligonucleotide
agggaugucguauugcuaa

SEQ ID NO: 1221600 - RNA, 19 nt, Artificial Sequence
  Description of Artificial Sequence: Synthetic oligonucleotide
gaugucguauugcuaagga

SEQ ID NO: 1221601 - RNA, 19 nt, Artificial Sequence
  Description of Artificial Sequence: Synthetic oligonucleotide
uaagugcaauggaggaagg

SEQ ID NO: 1221602 - RNA, 19 nt, Artificial Sequence
  Description of Artificial Sequence: Synthetic oligonucleotide
gauaguggugccgauguac

SEQ ID NO: 1221603 - RNA, 19 nt, Artificial Sequence
  Description of Artificial Sequence: Synthetic oligonucleotide
aauagcucugggcucccca

SEQ ID NO: 1221604 - RNA, 19 nt, Artificial Sequence
  Description of Artificial Sequence: Synthetic oligonucleotide
uguuaaagaugcugagcga

SEQ ID NO: 1221605 - RNA, 19 nt, Artificial Sequence
  Description of Artificial Sequence: Synthetic oligonucleotide
ugggaauggcaccucaaac

SEQ ID NO: 1221606 - RNA, 19 nt, Artificial Sequence
  Description of Artificial Sequence: Synthetic oligonucleotide
ugugcuuguguaacagugu

SEQ ID NO: 1221607 - RNA, 19 nt, Artificial Sequence
  Description of Artificial Sequence: Synthetic oligonucleotide
acgauaguggugccgaugu

SEQ ID NO: 1221608 - RNA, 19 nt, Artificial Sequence
  Description of Artificial Sequence: Synthetic oligonucleotide
guugugaggaggucgaaga

SEQ ID NO: 1221609 - RNA, 19 nt, Artificial Sequence
  Description of Artificial Sequence: Synthetic oligonucleotide
uguacacgcagugacacuc

SEQ ID NO: 1221610 - RNA, 19 nt, Artificial Sequence
  Description of Artificial Sequence: Synthetic oligonucleotide
ucauacgggaaugucucag

SEQ ID NO: 1221611 - RNA, 19 nt, Artificial Sequence
  Description of Artificial Sequence: Synthetic oligonucleotide
guguaugagaggucccugg

SEQ ID NO: 1221612 - RNA, 19 nt, Artificial Sequence
  Description of Artificial Sequence: Synthetic oligonucleotide
aagugcaauggaggaaggg

SEQ ID NO: 1221613 - RNA, 19 nt, Artificial Sequence
  Description of Artificial Sequence: Synthetic oligonucleotide
cauacgggaaugucucagg

SEQ ID NO: 1221614 - RNA, 19 nt, Artificial Sequence
  Description of Artificial Sequence: Synthetic oligonucleotide
gauccgagcccaugagugg

SEQ ID NO: 1221615 - RNA, 19 nt, Artificial Sequence
  Description of Artificial Sequence: Synthetic oligonucleotide
accaguugugaggaggucg

SEQ ID NO: 1221616 - RNA, 19 nt, Artificial Sequence
  Description of Artificial Sequence: Synthetic oligonucleotide
aacauagggauagcuaaaa

SEQ ID NO: 1221617 - RNA, 19 nt, Artificial Sequence
  Description of Artificial Sequence: Synthetic oligonucleotide
agggaaagaacuguguaga

SEQ ID NO: 1221618 - RNA, 19 nt, Artificial Sequence
  Description of Artificial Sequence: Synthetic oligonucleotide
guaugagaggucccugggg

SEQ ID NO: 1221619 - RNA, 19 nt, Artificial Sequence
  Description of Artificial Sequence: Synthetic oligonucleotide
accauucuuggagccaucc

SEQ ID NO: 1221620 - RNA, 19 nt, Artificial Sequence
  Description of Artificial Sequence: Synthetic oligonucleotide
acagcggucucauacggga

SEQ ID NO: 1221621 - RNA, 19 nt, Artificial Sequence
  Description of Artificial Sequence: Synthetic oligonucleotide
uccaucuccgcuugguaca

SEQ ID NO: 1221622 - RNA, 19 nt, Artificial Sequence
  Description of Artificial Sequence: Synthetic oligonucleotide
caugaguggcacuucuaag

SEQ ID NO: 1221623 - RNA, 19 nt, Artificial Sequence
  Description of Artificial Sequence: Synthetic oligonucleotide
agagauagcaggaaccgga

SEQ ID NO: 1221624 - RNA, 19 nt, Artificial Sequence
  Description of Artificial Sequence: Synthetic oligonucleotide
cuacccaugugguuuuggc

SEQ ID NO: 1221625 - RNA, 19 nt, Artificial Sequence
  Description of Artificial Sequence: Synthetic oligonucleotide
gggaccaccaugcuggucc

SEQ ID NO: 1221626 - RNA, 19 nt, Artificial Sequence
  Description of Artificial Sequence: Synthetic oligonucleotide
ccuacgagggcuuucggcg

SEQ ID NO: 1221627 - RNA, 19 nt, Artificial Sequence
  Description of Artificial Sequence: Synthetic oligonucleotide
aguucacaucaccaguugu

SEQ ID NO: 1221628 - RNA, 19 nt, Artificial Sequence
  Description of Artificial Sequence: Synthetic oligonucleotide
gagccauccgcaaaagcag

SEQ ID NO: 1221629 - RNA, 19 nt, Artificial Sequence
  Description of Artificial Sequence: Synthetic oligonucleotide
ucuagggaugucguauugc

SEQ ID NO: 1221630 - RNA, 19 nt, Artificial Sequence
  Description of Artificial Sequence: Synthetic oligonucleotide
guaccaggagggcacagcc

SEQ ID NO: 1221631 - RNA, 19 nt, Artificial Sequence
  Description of Artificial Sequence: Synthetic oligonucleotide
ggagagauagcaggaaccg

SEQ ID NO: 1221632 - RNA, 19 nt, Artificial Sequence
  Description of Artificial Sequence: Synthetic oligonucleotide
agaugggaauagcucuggg

SEQ ID NO: 1221633 - RNA, 19 nt, Artificial Sequence
  Description of Artificial Sequence: Synthetic oligonucleotide
ggcacggaaagccuggaag

SEQ ID NO: 1221634 - RNA, 19 nt, Artificial Sequence
  Description of Artificial Sequence: Synthetic oligonucleotide
gucguauugcuaaggaggc

SEQ ID NO: 1221635 - RNA, 19 nt, Artificial Sequence
  Description of Artificial Sequence: Synthetic oligonucleotide
cucauauccacgguagcug

SEQ ID NO: 1221636 - RNA, 19 nt, Artificial Sequence
  Description of Artificial Sequence: Synthetic oligonucleotide
gagagauagcaggaaccgg

SEQ ID NO: 1221637 - RNA, 19 nt, Artificial Sequence
  Description of Artificial Sequence: Synthetic oligonucleotide
uccgcaaaagcagacggaa

SEQ ID NO: 1221638 - RNA, 19 nt, Artificial Sequence
  Description of Artificial Sequence: Synthetic oligonucleotide
auccgagcccaugaguggc

SEQ ID NO: 1221639 - RNA, 19 nt, Artificial Sequence
  Description of Artificial Sequence: Synthetic oligonucleotide
acggaaagccuggaagucg

SEQ ID NO: 1221640 - RNA, 19 nt, Artificial Sequence
  Description of Artificial Sequence: Synthetic oligonucleotide
uaguaggcagccaguguga

SEQ ID NO: 1221641 - RNA, 19 nt, Artificial Sequence
  Description of Artificial Sequence: Synthetic oligonucleotide
gagugugcuuguguaacag

SEQ ID NO: 1221642 - RNA, 19 nt, Artificial Sequence
  Description of Artificial Sequence: Synthetic oligonucleotide
acucauauccacgguagcu

SEQ ID NO: 1221643 - RNA, 19 nt, Artificial Sequence
  Description of Artificial Sequence: Synthetic oligonucleotide
cuaaggaggcccugccuag

SEQ ID NO: 1221644 - RNA, 19 nt, Artificial Sequence
  Description of Artificial Sequence: Synthetic oligonucleotide
aguggugccgauguacuug

SEQ ID NO: 1221645 - RNA, 19 nt, Artificial Sequence
  Description of Artificial Sequence: Synthetic oligonucleotide
cauauccacgguagcuggg

SEQ ID NO: 1221646 - RNA, 19 nt, Artificial Sequence
  Description of Artificial Sequence: Synthetic oligonucleotide
gagauagcaggaaccggag

SEQ ID NO: 1221647 - RNA, 19 nt, Artificial Sequence
  Description of Artificial Sequence: Synthetic oligonucleotide
uacgggaaugucucaggga

SEQ ID NO: 1221648 - RNA, 19 nt, Artificial Sequence
  Description of Artificial Sequence: Synthetic oligonucleotide
uugggguguccccaugggc

SEQ ID NO: 1221649 - RNA, 19 nt, Artificial Sequence
  Description of Artificial Sequence: Synthetic oligonucleotide
agggaagucuaggaggcag

SEQ ID NO: 1221650 - RNA, 19 nt, Artificial Sequence
  Description of Artificial Sequence: Synthetic oligonucleotide
aguugugaggaggucgaag

SEQ ID NO: 1221651 - RNA, 19 nt, Artificial Sequence
  Description of Artificial Sequence: Synthetic oligonucleotide
ggccaaaacacaucuuccc

SEQ ID NO: 1221652 - RNA, 19 nt, Artificial Sequence
  Description of Artificial Sequence: Synthetic oligonucleotide
acgcagugacacuccacac

SEQ ID NO: 1221653 - RNA, 19 nt, Artificial Sequence
  Description of Artificial Sequence: Synthetic oligonucleotide
uggagccauccgcaaaagc

SEQ ID NO: 1221654 - RNA, 19 nt, Artificial Sequence
  Description of Artificial Sequence: Synthetic oligonucleotide
guuggcacggaaagccugg

SEQ ID NO: 1221655 - RNA, 19 nt, Artificial Sequence
  Description of Artificial Sequence: Synthetic oligonucleotide
guaguacaggucuucuaca

SEQ ID NO: 1221656 - RNA, 19 nt, Artificial Sequence
  Description of Artificial Sequence: Synthetic oligonucleotide
aaccaagcacuuagauuuc

SEQ ID NO: 1221657 - RNA, 19 nt, Artificial Sequence
  Description of Artificial Sequence: Synthetic oligonucleotide
agugugcuuguguaacagu

SEQ ID NO: 1221658 - RNA, 19 nt, Artificial Sequence
  Description of Artificial Sequence: Synthetic oligonucleotide
gucgaagacacaggccugg

SEQ ID NO: 1221659 - RNA, 19 nt, Artificial Sequence
  Description of Artificial Sequence: Synthetic oligonucleotide
gguuccauccaucuguuaa

SEQ ID NO: 1221660 - RNA, 19 nt, Artificial Sequence
  Description of Artificial Sequence: Synthetic oligonucleotide
ccucaaacucauauccacg

SEQ ID NO: 1221661 - RNA, 19 nt, Artificial Sequence
  Description of Artificial Sequence: Synthetic oligonucleotide
uggccacacgguuccaucc

SEQ ID NO: 1221662 - RNA, 19 nt, Artificial Sequence
  Description of Artificial Sequence: Synthetic oligonucleotide
gcguugaccacuuccucgg

SEQ ID NO: 1221663 - RNA, 19 nt, Artificial Sequence
  Description of Artificial Sequence: Synthetic oligonucleotide
acuuccaagcagaacugug

SEQ ID NO: 1221664 - RNA, 19 nt, Artificial Sequence
  Description of Artificial Sequence: Synthetic oligonucleotide
cguaccacgauaguggugc

SEQ ID NO: 1221665 - RNA, 19 nt, Artificial Sequence
  Description of Artificial Sequence: Synthetic oligonucleotide
cacgcagugacacuccaca

SEQ ID NO: 1221666 - RNA, 19 nt, Artificial Sequence
  Description of Artificial Sequence: Synthetic oligonucleotide
gacggaagcucauccaucu

SEQ ID NO: 1221667 - RNA, 19 nt, Artificial Sequence
  Description of Artificial Sequence: Synthetic oligonucleotide
gcaguuagggaagucuagg

SEQ ID NO: 1221668 - RNA, 19 nt, Artificial Sequence
  Description of Artificial Sequence: Synthetic oligonucleotide
cuagggaaagaacugugua

SEQ ID NO: 1221669 - RNA, 19 nt, Artificial Sequence
  Description of Artificial Sequence: Synthetic oligonucleotide
cuggcguaccacgauagug

SEQ ID NO: 1221670 - RNA, 19 nt, Artificial Sequence
  Description of Artificial Sequence: Synthetic oligonucleotide
cacgggguggaaagguacc

SEQ ID NO: 1221671 - RNA, 19 nt, Artificial Sequence
  Description of Artificial Sequence: Synthetic oligonucleotide
uucggcguuggcacggaaa

SEQ ID NO: 1221672 - RNA, 19 nt, Artificial Sequence
  Description of Artificial Sequence: Synthetic oligonucleotide
gaaccggaggaucaauucu

SEQ ID NO: 1221673 - RNA, 19 nt, Artificial Sequence
  Description of Artificial Sequence: Synthetic oligonucleotide
cgcaaaagcagacggaagc

SEQ ID NO: 1221674 - RNA, 19 nt, Artificial Sequence
  Description of Artificial Sequence: Synthetic oligonucleotide
agggcuuucggcguuggca

SEQ ID NO: 1221675 - RNA, 19 nt, Artificial Sequence
  Description of Artificial Sequence: Synthetic oligonucleotide
cugagcgagggcucucuag

SEQ ID NO: 1221676 - RNA, 19 nt, Artificial Sequence
  Description of Artificial Sequence: Synthetic oligonucleotide
ggauccgagcccaugagug

SEQ ID NO: 1221677 - RNA, 19 nt, Artificial Sequence
  Description of Artificial Sequence: Synthetic oligonucleotide
accacgauaguggugccga

SEQ ID NO: 1221678 - RNA, 19 nt, Artificial Sequence
  Description of Artificial Sequence: Synthetic oligonucleotide
auaguggugccgauguacu

SEQ ID NO: 1221679 - RNA, 19 nt, Artificial Sequence
  Description of Artificial Sequence: Synthetic oligonucleotide
uaccacgauaguggugccg

SEQ ID NO: 1221680 - RNA, 19 nt, Artificial Sequence
  Description of Artificial Sequence: Synthetic oligonucleotide
cacagcggucucauacggg

SEQ ID NO: 1221681 - RNA, 19 nt, Artificial Sequence
  Description of Artificial Sequence: Synthetic oligonucleotide
cuuggagccauccgcaaaa

SEQ ID NO: 1221682 - RNA, 19 nt, Artificial Sequence
  Description of Artificial Sequence: Synthetic oligonucleotide
gggagagauagcaggaacc

SEQ ID NO: 1221683 - RNA, 19 nt, Artificial Sequence
  Description of Artificial Sequence: Synthetic oligonucleotide
guuccauccaucuguuaaa

SEQ ID NO: 1221684 - RNA, 19 nt, Artificial Sequence
  Description of Artificial Sequence: Synthetic oligonucleotide
ugacacuuucucugugauc

SEQ ID NO: 1221685 - RNA, 19 nt, Artificial Sequence
  Description of Artificial Sequence: Synthetic oligonucleotide
caguuagggaagucuagga

SEQ ID NO: 1221686 - RNA, 19 nt, Artificial Sequence
  Description of Artificial Sequence: Synthetic oligonucleotide
ggugccgauguacuuggcc

SEQ ID NO: 1221687 - RNA, 19 nt, Artificial Sequence
  Description of Artificial Sequence: Synthetic oligonucleotide
ucucuagggaugucguauu

SEQ ID NO: 1221688 - RNA, 19 nt, Artificial Sequence
  Description of Artificial Sequence: Synthetic oligonucleotide
cucuagggaugucguauug

SEQ ID NO: 1221689 - RNA, 19 nt, Artificial Sequence
  Description of Artificial Sequence: Synthetic oligonucleotide
gaagucuaggaggcaggug

SEQ ID NO: 1221690 - RNA, 19 nt, Artificial Sequence
  Description of Artificial Sequence: Synthetic oligonucleotide
gcuaucacgguccuccaca

SEQ ID NO: 1221691 - RNA, 19 nt, Artificial Sequence
  Description of Artificial Sequence: Synthetic oligonucleotide
uagggaugucguauugcua

SEQ ID NO: 1221692 - RNA, 19 nt, Artificial Sequence
  Description of Artificial Sequence: Synthetic oligonucleotide
ggaaccggaggaucaauuc

SEQ ID NO: 1221693 - RNA, 19 nt, Artificial Sequence
  Description of Artificial Sequence: Synthetic oligonucleotide
gggaccacaggagaggggc

SEQ ID NO: 1221694 - RNA, 19 nt, Artificial Sequence
  Description of Artificial Sequence: Synthetic oligonucleotide
agcgagggcucucuaggga

SEQ ID NO: 1221695 - RNA, 19 nt, Artificial Sequence
  Description of Artificial Sequence: Synthetic oligonucleotide
cuagggaugucguauugcu

SEQ ID NO: 1221696 - RNA, 19 nt, Artificial Sequence
  Description of Artificial Sequence: Synthetic oligonucleotide
ucguauugcuaaggaggcc

SEQ ID NO: 1221697 - RNA, 19 nt, Artificial Sequence
  Description of Artificial Sequence: Synthetic oligonucleotide
gugaucaaacacaaccaaa

SEQ ID NO: 1221698 - RNA, 19 nt, Artificial Sequence
  Description of Artificial Sequence: Synthetic oligonucleotide
ggaugucguauugcuaagg

SEQ ID NO: 1221699 - RNA, 19 nt, Artificial Sequence
  Description of Artificial Sequence: Synthetic oligonucleotide
uggccccauguuuaucccc

SEQ ID NO: 1221700 - RNA, 19 nt, Artificial Sequence
  Description of Artificial Sequence: Synthetic oligonucleotide
uggcccuauccacuggauc

SEQ ID NO: 1221701 - RNA, 19 nt, Artificial Sequence
  Description of Artificial Sequence: Synthetic oligonucleotide
agcggucucauacgggaau

SEQ ID NO: 1221702 - RNA, 19 nt, Artificial Sequence
  Description of Artificial Sequence: Synthetic oligonucleotide
uauugcuaaggaggcccug

SEQ ID NO: 1221703 - RNA, 19 nt, Artificial Sequence
  Description of Artificial Sequence: Synthetic oligonucleotide
auuuagccauuaauaaaua

SEQ ID NO: 1221704 - RNA, 19 nt, Artificial Sequence
  Description of Artificial Sequence: Synthetic oligonucleotide
augggcuuagugugugcga

SEQ ID NO: 1221705 - RNA, 19 nt, Artificial Sequence
  Description of Artificial Sequence: Synthetic oligonucleotide
cacgguuccauccaucugu

SEQ ID NO: 1221706 - RNA, 19 nt, Artificial Sequence
  Description of Artificial Sequence: Synthetic oligonucleotide
guagcacgggguggaaagg

SEQ ID NO: 1221707 - RNA, 19 nt, Artificial Sequence
  Description of Artificial Sequence: Synthetic oligonucleotide
uuggagccauccgcaaaag

SEQ ID NO: 1221708 - RNA, 19 nt, Artificial Sequence
  Description of Artificial Sequence: Synthetic oligonucleotide
auguacacgcagugacacu

SEQ ID NO: 1221709 - RNA, 19 nt, Artificial Sequence
  Description of Artificial Sequence: Synthetic oligonucleotide
aucuccgcuugguacacuu

SEQ ID NO: 1221710 - RNA, 19 nt, Artificial Sequence
  Description of Artificial Sequence: Synthetic oligonucleotide
caacauagggauagcuaaa

SEQ ID NO: 1221711 - RNA, 19 nt, Artificial Sequence
  Description of Artificial Sequence: Synthetic oligonucleotide
gcuugggguguccccaugg

SEQ ID NO: 1221712 - RNA, 19 nt, Artificial Sequence
  Description of Artificial Sequence: Synthetic oligonucleotide
aaggcauaguaggcagcca

SEQ ID NO: 1221713 - RNA, 19 nt, Artificial Sequence
  Description of Artificial Sequence: Synthetic oligonucleotide
ucgggcauucugacggcaa

SEQ ID NO: 1221714 - RNA, 19 nt, Artificial Sequence
  Description of Artificial Sequence: Synthetic oligonucleotide
gggaauagcucugggcucc

SEQ ID NO: 1221715 - RNA, 19 nt, Artificial Sequence
  Description of Artificial Sequence: Synthetic oligonucleotide
gccgcugaccagcaguuag

SEQ ID NO: 1221716 - RNA, 19 nt, Artificial Sequence
  Description of Artificial Sequence: Synthetic oligonucleotide
accuggcguaccacgauag

SEQ ID NO: 1221717 - RNA, 19 nt, Artificial Sequence
  Description of Artificial Sequence: Synthetic oligonucleotide
agacuguuggccccauguu

SEQ ID NO: 1221718 - RNA, 19 nt, Artificial Sequence
  Description of Artificial Sequence: Synthetic oligonucleotide
gaccucaggccaaaacaca

SEQ ID NO: 1221719 - RNA, 19 nt, Artificial Sequence
  Description of Artificial Sequence: Synthetic oligonucleotide
gggcuuucggcguuggcac

SEQ ID NO: 1221720 - RNA, 19 nt, Artificial Sequence
  Description of Artificial Sequence: Synthetic oligonucleotide
cuuccaacauagggauagc

SEQ ID NO: 1221721 - RNA, 19 nt, Artificial Sequence
  Description of Artificial Sequence: Synthetic oligonucleotide
aguucccgaguccuuucaa

SEQ ID NO: 1221722 - RNA, 19 nt, Artificial Sequence
  Description of Artificial Sequence: Synthetic oligonucleotide
accaagcacuuagauuucu

SEQ ID NO: 1221723 - RNA, 19 nt, Artificial Sequence
  Description of Artificial Sequence: Synthetic oligonucleotide
gguagcggcccaccuggcg

SEQ ID NO: 1221724 - RNA, 19 nt, Artificial Sequence
  Description of Artificial Sequence: Synthetic oligonucleotide
accccucccagcuacccau

SEQ ID NO: 1221725 - RNA, 19 nt, Artificial Sequence
  Description of Artificial Sequence: Synthetic oligonucleotide
cacgauaguggugccgaug

SEQ ID NO: 1221726 - RNA, 19 nt, Artificial Sequence
  Description of Artificial Sequence: Synthetic oligonucleotide
gggaugucguauugcuaag

SEQ ID NO: 1221727 - RNA, 19 nt, Artificial Sequence
  Description of Artificial Sequence: Synthetic oligonucleotide
cacggaaagccuggaaguc

SEQ ID NO: 1221728 - RNA, 19 nt, Artificial Sequence
  Description of Artificial Sequence: Synthetic oligonucleotide
gcacuuagauuucuuaagu

SEQ ID NO: 1221729 - RNA, 19 nt, Artificial Sequence
  Description of Artificial Sequence: Synthetic oligonucleotide
ugggauguacagggcaguc

SEQ ID NO: 1221730 - RNA, 19 nt, Artificial Sequence
  Description of Artificial Sequence: Synthetic oligonucleotide
guacacgcagugacacucc

SEQ ID NO: 1221731 - RNA, 19 nt, Artificial Sequence
  Description of Artificial Sequence: Synthetic oligonucleotide
ggcccuauccacuggaucu

SEQ ID NO: 1221732 - RNA, 19 nt, Artificial Sequence
  Description of Artificial Sequence: Synthetic oligonucleotide
ggaucaauucucuguugaa

SEQ ID NO: 1221733 - RNA, 19 nt, Artificial Sequence
  Description of Artificial Sequence: Synthetic oligonucleotide
gggcucucuagggaugucg

SEQ ID NO: 1221734 - RNA, 19 nt, Artificial Sequence
  Description of Artificial Sequence: Synthetic oligonucleotide
gccuacgagggcuuucggc

SEQ ID NO: 1221735 - RNA, 19 nt, Artificial Sequence
  Description of Artificial Sequence: Synthetic oligonucleotide
cugggaauggcaccucaaa

SEQ ID NO: 1221736 - RNA, 19 nt, Artificial Sequence
  Description of Artificial Sequence: Synthetic oligonucleotide
cagcuggcccuauccacug

SEQ ID NO: 1221737 - RNA, 19 nt, Artificial Sequence
  Description of Artificial Sequence: Synthetic oligonucleotide
ggaaagguaccaggagggc

SEQ ID NO: 1221738 - RNA, 19 nt, Artificial Sequence
  Description of Artificial Sequence: Synthetic oligonucleotide
cacacgguuccauccaucu

SEQ ID NO: 1221739 - RNA, 19 nt, Artificial Sequence
  Description of Artificial Sequence: Synthetic oligonucleotide
gcuaaggaggcccugccua

SEQ ID NO: 1221740 - RNA, 19 nt, Artificial Sequence
  Description of Artificial Sequence: Synthetic oligonucleotide
ccacagcggucucauacgg

SEQ ID NO: 1221741 - RNA, 19 nt, Artificial Sequence
  Description of Artificial Sequence: Synthetic oligonucleotide
cucauacgggaaugucuca

SEQ ID NO: 1221742 - RNA, 19 nt, Artificial Sequence
  Description of Artificial Sequence: Synthetic oligonucleotide
agccuauuggccacacggu

SEQ ID NO: 1221743 - RNA, 19 nt, Artificial Sequence
  Description of Artificial Sequence: Synthetic oligonucleotide
guaccacgauaguggugcc

SEQ ID NO: 1221744 - RNA, 19 nt, Artificial Sequence
  Description of Artificial Sequence: Synthetic oligonucleotide
uaguggugccgauguacuu

SEQ ID NO: 1221745 - RNA, 19 nt, Artificial Sequence
  Description of Artificial Sequence: Synthetic oligonucleotide
uagggaagucuaggaggca

SEQ ID NO: 1221746 - RNA, 19 nt, Artificial Sequence
  Description of Artificial Sequence: Synthetic oligonucleotide
cccauguuuauccccacca

SEQ ID NO: 1221747 - RNA, 19 nt, Artificial Sequence
  Description of Artificial Sequence: Synthetic oligonucleotide
uacgagggcuuucggcguu

SEQ ID NO: 1221748 - RNA, 19 nt, Artificial Sequence
  Description of Artificial Sequence: Synthetic oligonucleotide
accggaggaucaauucucu

SEQ ID NO: 1221749 - RNA, 19 nt, Artificial Sequence
  Description of Artificial Sequence: Synthetic oligonucleotide
gcuuucggcguuggcacgg

SEQ ID NO: 1221750 - RNA, 19 nt, Artificial Sequence
  Description of Artificial Sequence: Synthetic oligonucleotide
ucgaagacacaggccuggu

SEQ ID NO: 1221751 - RNA, 19 nt, Artificial Sequence
  Description of Artificial Sequence: Synthetic oligonucleotide
auucagaaccaagcacuua

SEQ ID NO: 1221752 - RNA, 19 nt, Artificial Sequence
  Description of Artificial Sequence: Synthetic oligonucleotide
agcugccggccuacgaggg

SEQ ID NO: 1221753 - RNA, 19 nt, Artificial Sequence
  Description of Artificial Sequence: Synthetic oligonucleotide
gccuuggcuaucacggucc

SEQ ID NO: 1221754 - RNA, 19 nt, Artificial Sequence
  Description of Artificial Sequence: Synthetic oligonucleotide
ccacuuccaagcagaacug

SEQ ID NO: 1221755 - RNA, 19 nt, Artificial Sequence
  Description of Artificial Sequence: Synthetic oligonucleotide
auccgcaaaagcagacgga

SEQ ID NO: 1221756 - RNA, 19 nt, Artificial Sequence
  Description of Artificial Sequence: Synthetic oligonucleotide
ccaaggcauaguaggcagc

SEQ ID NO: 1221757 - RNA, 19 nt, Artificial Sequence
  Description of Artificial Sequence: Synthetic oligonucleotide
ccauccgcaaaagcagacg

SEQ ID NO: 1221758 - RNA, 19 nt, Artificial Sequence
  Description of Artificial Sequence: Synthetic oligonucleotide
guagcggcccaccuggcgu

SEQ ID NO: 1221759 - RNA, 19 nt, Artificial Sequence
  Description of Artificial Sequence: Synthetic oligonucleotide
gaacagcagcagagauggg

SEQ ID NO: 1221760 - RNA, 19 nt, Artificial Sequence
  Description of Artificial Sequence: Synthetic oligonucleotide
cauguuuauccccaccauu

SEQ ID NO: 1221761 - RNA, 19 nt, Artificial Sequence
  Description of Artificial Sequence: Synthetic oligonucleotide
agccauccgcaaaagcaga

SEQ ID NO: 1221762 - RNA, 19 nt, Artificial Sequence
  Description of Artificial Sequence: Synthetic oligonucleotide
cagcguugaccacuuccuc

SEQ ID NO: 1221763 - RNA, 19 nt, Artificial Sequence
  Description of Artificial Sequence: Synthetic oligonucleotide
ggggauccgagcccaugag

SEQ ID NO: 1221764 - RNA, 19 nt, Artificial Sequence
  Description of Artificial Sequence: Synthetic oligonucleotide
gccaaaacacaucuucccu

SEQ ID NO: 1221765 - RNA, 19 nt, Artificial Sequence
  Description of Artificial Sequence: Synthetic oligonucleotide
gagggcuuucggcguuggc

SEQ ID NO: 1221766 - RNA, 19 nt, Artificial Sequence
  Description of Artificial Sequence: Synthetic oligonucleotide
uguuggccccauguuuauc

SEQ ID NO: 1221767 - RNA, 19 nt, Artificial Sequence
  Description of Artificial Sequence: Synthetic oligonucleotide
uggugccgauguacuuggc

SEQ ID NO: 1221768 - RNA, 19 nt, Artificial Sequence
  Description of Artificial Sequence: Synthetic oligonucleotide
ggccugguaguacaggucu

SEQ ID NO: 1221769 - RNA, 19 nt, Artificial Sequence
  Description of Artificial Sequence: Synthetic oligonucleotide
ugacagcugccggccuacg

SEQ ID NO: 1221770 - RNA, 19 nt, Artificial Sequence
  Description of Artificial Sequence: Synthetic oligonucleotide
cugacagcugccggccuac

SEQ ID NO: 1221771 - RNA, 19 nt, Artificial Sequence
  Description of Artificial Sequence: Synthetic oligonucleotide
ggcuuucggcguuggcacg

SEQ ID NO: 1221772 - RNA, 19 nt, Artificial Sequence
  Description of Artificial Sequence: Synthetic oligonucleotide
cuucagccccacugacaug

SEQ ID NO: 1221773 - RNA, 19 nt, Artificial Sequence
  Description of Artificial Sequence: Synthetic oligonucleotide
caggucgcagacaggugga

SEQ ID NO: 1221774 - RNA, 19 nt, Artificial Sequence
  Description of Artificial Sequence: Synthetic oligonucleotide
uuucggcguuggcacggaa

SEQ ID NO: 1221775 - RNA, 19 nt, Artificial Sequence
  Description of Artificial Sequence: Synthetic oligonucleotide
guuuauccccaccauucuu

SEQ ID NO: 1221776 - RNA, 19 nt, Artificial Sequence
  Description of Artificial Sequence: Synthetic oligonucleotide
cagaaccaagcacuuagau

SEQ ID NO: 1221777 - RNA, 19 nt, Artificial Sequence
  Description of Artificial Sequence: Synthetic oligonucleotide
gcuacccaugugguuuugg

SEQ ID NO: 1221778 - RNA, 19 nt, Artificial Sequence
  Description of Artificial Sequence: Synthetic oligonucleotide
gcagacggaagcucaucca

SEQ ID NO: 1221779 - RNA, 19 nt, Artificial Sequence
  Description of Artificial Sequence: Synthetic oligonucleotide
gggcauucugacggcaaag

SEQ ID NO: 1221780 - RNA, 19 nt, Artificial Sequence
  Description of Artificial Sequence: Synthetic oligonucleotide
agggaccacaggagagggg

SEQ ID NO: 1221781 - RNA, 19 nt, Artificial Sequence
  Description of Artificial Sequence: Synthetic oligonucleotide
ugacggcaaaggucaggua

SEQ ID NO: 1221782 - RNA, 19 nt, Artificial Sequence
  Description of Artificial Sequence: Synthetic oligonucleotide
aggaaccggaggaucaauu

SEQ ID NO: 1221783 - RNA, 19 nt, Artificial Sequence
  Description of Artificial Sequence: Synthetic oligonucleotide
ccgcugaccagcaguuagg

SEQ ID NO: 1221784 - RNA, 19 nt, Artificial Sequence
  Description of Artificial Sequence: Synthetic oligonucleotide
ccaguugugaggaggucga

SEQ ID NO: 1221785 - RNA, 19 nt, Artificial Sequence
  Description of Artificial Sequence: Synthetic oligonucleotide
gccccacugacaugguggc

SEQ ID NO: 1221786 - RNA, 19 nt, Artificial Sequence
  Description of Artificial Sequence: Synthetic oligonucleotide
ccgcaaaagcagacggaag

SEQ ID NO: 1221787 - RNA, 19 nt, Artificial Sequence
  Description of Artificial Sequence: Synthetic oligonucleotide
gcacggaaagccuggaagu

SEQ ID NO: 1221788 - RNA, 19 nt, Artificial Sequence
  Description of Artificial Sequence: Synthetic oligonucleotide
cucucuagggaugucguau

SEQ ID NO: 1221789 - RNA, 19 nt, Artificial Sequence
  Description of Artificial Sequence: Synthetic oligonucleotide
ggucucauacgggaauguc

SEQ ID NO: 1221790 - RNA, 19 nt, Artificial Sequence
  Description of Artificial Sequence: Synthetic oligonucleotide
cagugaggguccccacuuc

SEQ ID NO: 1221791 - RNA, 19 nt, Artificial Sequence
  Description of Artificial Sequence: Synthetic oligonucleotide
caagcagaacugugaucaa

SEQ ID NO: 1221792 - RNA, 19 nt, Artificial Sequence
  Description of Artificial Sequence: Synthetic oligonucleotide
ccaugaguggcacuucuaa

SEQ ID NO: 1221793 - RNA, 19 nt, Artificial Sequence
  Description of Artificial Sequence: Synthetic oligonucleotide
ggucgaagacacaggccug

SEQ ID NO: 1221794 - RNA, 19 nt, Artificial Sequence
  Description of Artificial Sequence: Synthetic oligonucleotide
uagcggcccaccuggcgua

SEQ ID NO: 1221795 - RNA, 19 nt, Artificial Sequence
  Description of Artificial Sequence: Synthetic oligonucleotide
ccuggcaguucccgagucc

SEQ ID NO: 1221796 - RNA, 19 nt, Artificial Sequence
  Description of Artificial Sequence: Synthetic oligonucleotide
aggaccucugggagggaga

SEQ ID NO: 1221797 - RNA, 19 nt, Artificial Sequence
  Description of Artificial Sequence: Synthetic oligonucleotide
ggacagggcaggccagcug

SEQ ID NO: 1221798 - RNA, 19 nt, Artificial Sequence
  Description of Artificial Sequence: Synthetic oligonucleotide
agccagagauggggauccg

SEQ ID NO: 1221799 - RNA, 19 nt, Artificial Sequence
  Description of Artificial Sequence: Synthetic oligonucleotide
gcacgggguggaaagguac

SEQ ID NO: 1221800 - RNA, 19 nt, Artificial Sequence
  Description of Artificial Sequence: Synthetic oligonucleotide
ccacugacaugguggcuug

SEQ ID NO: 1221801 - RNA, 19 nt, Artificial Sequence
  Description of Artificial Sequence: Synthetic oligonucleotide
gcggucucauacgggaaug

SEQ ID NO: 1221802 - RNA, 19 nt, Artificial Sequence
  Description of Artificial Sequence: Synthetic oligonucleotide
ggccacacgguuccaucca

SEQ ID NO: 1221803 - RNA, 19 nt, Artificial Sequence
  Description of Artificial Sequence: Synthetic oligonucleotide
guauugcuaaggaggcccu

SEQ ID NO: 1221804 - RNA, 19 nt, Artificial Sequence
  Description of Artificial Sequence: Synthetic oligonucleotide
ggccuacgagggcuuucgg

SEQ ID NO: 1221805 - RNA, 19 nt, Artificial Sequence
  Description of Artificial Sequence: Synthetic oligonucleotide
cuacgagggcuuucggcgu

SEQ ID NO: 1221806 - RNA, 19 nt, Artificial Sequence
  Description of Artificial Sequence: Synthetic oligonucleotide
agcggcccaccuggcguac

SEQ ID NO: 1221807 - RNA, 19 nt, Artificial Sequence
  Description of Artificial Sequence: Synthetic oligonucleotide
gcaguucccgaguccuuuc

SEQ ID NO: 1221808 - RNA, 19 nt, Artificial Sequence
  Description of Artificial Sequence: Synthetic oligonucleotide
acgagggcuuucggcguug

SEQ ID NO: 1221809 - RNA, 19 nt, Artificial Sequence
  Description of Artificial Sequence: Synthetic oligonucleotide
ccaagaaauccaggcaaga

SEQ ID NO: 1221810 - RNA, 19 nt, Artificial Sequence
  Description of Artificial Sequence: Synthetic oligonucleotide
cccugccuagggaaagaac

SEQ ID NO: 1221811 - RNA, 19 nt, Artificial Sequence
  Description of Artificial Sequence: Synthetic oligonucleotide
agcuacccaugugguuuug

SEQ ID NO: 1221812 - RNA, 19 nt, Artificial Sequence
  Description of Artificial Sequence: Synthetic oligonucleotide
agcacgggguggaaaggua

SEQ ID NO: 1221813 - RNA, 19 nt, Artificial Sequence
  Description of Artificial Sequence: Synthetic oligonucleotide
caccaguugugaggagguc

SEQ ID NO: 1221814 - RNA, 19 nt, Artificial Sequence
  Description of Artificial Sequence: Synthetic oligonucleotide
gguguccccaugggcuuag

SEQ ID NO: 1221815 - RNA, 19 nt, Artificial Sequence
  Description of Artificial Sequence: Synthetic oligonucleotide
ggaauagcucugggcuccc

SEQ ID NO: 1221816 - RNA, 19 nt, Artificial Sequence
  Description of Artificial Sequence: Synthetic oligonucleotide
gcccuauccacuggaucug

SEQ ID NO: 1221817 - RNA, 19 nt, Artificial Sequence
  Description of Artificial Sequence: Synthetic oligonucleotide
acgguuccauccaucuguu

SEQ ID NO: 1221818 - RNA, 19 nt, Artificial Sequence
  Description of Artificial Sequence: Synthetic oligonucleotide
ggucgcagacagguggaca

SEQ ID NO: 1221819 - RNA, 19 nt, Artificial Sequence
  Description of Artificial Sequence: Synthetic oligonucleotide
caccuggcguaccacgaua

SEQ ID NO: 1221820 - RNA, 19 nt, Artificial Sequence
  Description of Artificial Sequence: Synthetic oligonucleotide
cugguaguacaggucuucu

SEQ ID NO: 1221821 - RNA, 19 nt, Artificial Sequence
  Description of Artificial Sequence: Synthetic oligonucleotide
ggcguaccacgauaguggu

SEQ ID NO: 1221822 - RNA, 19 nt, Artificial Sequence
  Description of Artificial Sequence: Synthetic oligonucleotide
cagcggucucauacgggaa

SEQ ID NO: 1221823 - RNA, 19 nt, Artificial Sequence
  Description of Artificial Sequence: Synthetic oligonucleotide
ggaagucuaggaggcaggu

SEQ ID NO: 1221824 - RNA, 19 nt, Artificial Sequence
  Description of Artificial Sequence: Synthetic oligonucleotide
ccacacgguuccauccauc

SEQ ID NO: 1221825 - RNA, 19 nt, Artificial Sequence
  Description of Artificial Sequence: Synthetic oligonucleotide
cccaugggcuuagugugug

SEQ ID NO: 1221826 - RNA, 19 nt, Artificial Sequence
  Description of Artificial Sequence: Synthetic oligonucleotide
cccuauccacuggaucugc

SEQ ID NO: 1221827 - RNA, 19 nt, Artificial Sequence
  Description of Artificial Sequence: Synthetic oligonucleotide
gggauccgagcccaugagu

SEQ ID NO: 1221828 - RNA, 19 nt, Artificial Sequence
  Description of Artificial Sequence: Synthetic oligonucleotide
ccucgggcauucugacggc

SEQ ID NO: 1221829 - RNA, 19 nt, Artificial Sequence
  Description of Artificial Sequence: Synthetic oligonucleotide
cuuucggcguuggcacgga

SEQ ID NO: 1221830 - RNA, 19 nt, Artificial Sequence
  Description of Artificial Sequence: Synthetic oligonucleotide
guguaacaguguggccaca

SEQ ID NO: 1221831 - RNA, 19 nt, Artificial Sequence
  Description of Artificial Sequence: Synthetic oligonucleotide
gccuauuggccacacgguu

SEQ ID NO: 1221832 - RNA, 19 nt, Artificial Sequence
  Description of Artificial Sequence: Synthetic oligonucleotide
cccaccuggcguaccacga

SEQ ID NO: 1221833 - RNA, 19 nt, Artificial Sequence
  Description of Artificial Sequence: Synthetic oligonucleotide
cggccuacgagggcuuucg

SEQ ID NO: 1221834 - RNA, 19 nt, Artificial Sequence
  Description of Artificial Sequence: Synthetic oligonucleotide
gcguaccacgauaguggug

SEQ ID NO: 1221835 - RNA, 19 nt, Artificial Sequence
  Description of Artificial Sequence: Synthetic oligonucleotide
gagccgcugaccagcaguu

SEQ ID NO: 1221836 - RNA, 19 nt, Artificial Sequence
  Description of Artificial Sequence: Synthetic oligonucleotide
gcucucuagggaugucgua

SEQ ID NO: 1221837 - RNA, 19 nt, Artificial Sequence
  Description of Artificial Sequence: Synthetic oligonucleotide
cgaguccuuucaaacaggu

SEQ ID NO: 1221838 - RNA, 19 nt, Artificial Sequence
  Description of Artificial Sequence: Synthetic oligonucleotide
gccccauguuuauccccac

SEQ ID NO: 1221839 - RNA, 19 nt, Artificial Sequence
  Description of Artificial Sequence: Synthetic oligonucleotide
ccagcuacccaugugguuu

SEQ ID NO: 1221840 - RNA, 19 nt, Artificial Sequence
  Description of Artificial Sequence: Synthetic oligonucleotide
ggcucucuagggaugucgu

SEQ ID NO: 1221841 - RNA, 19 nt, Artificial Sequence
  Description of Artificial Sequence: Synthetic oligonucleotide
cugccggccuacgagggcu

SEQ ID NO: 1221842 - RNA, 19 nt, Artificial Sequence
  Description of Artificial Sequence: Synthetic oligonucleotide
gcccaugaguggcacuucu

SEQ ID NO: 1221843 - RNA, 19 nt, Artificial Sequence
  Description of Artificial Sequence: Synthetic oligonucleotide
gcaggaaccggaggaucaa

SEQ ID NO: 1221844 - RNA, 19 nt, Artificial Sequence
  Description of Artificial Sequence: Synthetic oligonucleotide
caccuggcaguucccgagu

SEQ ID NO: 1221845 - RNA, 19 nt, Artificial Sequence
  Description of Artificial Sequence: Synthetic oligonucleotide
ggccaguguaugagagguc

SEQ ID NO: 1221846 - RNA, 19 nt, Artificial Sequence
  Description of Artificial Sequence: Synthetic oligonucleotide
cuggcccuauccacuggau

SEQ ID NO: 1221847 - RNA, 19 nt, Artificial Sequence
  Description of Artificial Sequence: Synthetic oligonucleotide
gggcuuagugugugcgagu

SEQ ID NO: 1221848 - RNA, 19 nt, Artificial Sequence
  Description of Artificial Sequence: Synthetic oligonucleotide
caguugugaggaggucgaa

SEQ ID NO: 1221849 - RNA, 19 nt, Artificial Sequence
  Description of Artificial Sequence: Synthetic oligonucleotide
ggcuccccaccaagaaauc

SEQ ID NO: 1221850 - RNA, 19 nt, Artificial Sequence
  Description of Artificial Sequence: Synthetic oligonucleotide
agccgcugaccagcaguua

SEQ ID NO: 1221851 - RNA, 19 nt, Artificial Sequence
  Description of Artificial Sequence: Synthetic oligonucleotide
cagcuacccaugugguuuu

SEQ ID NO: 1221852 - RNA, 19 nt, Artificial Sequence
  Description of Artificial Sequence: Synthetic oligonucleotide
cacgguccuccacagcguu

SEQ ID NO: 1221853 - RNA, 19 nt, Artificial Sequence
  Description of Artificial Sequence: Synthetic oligonucleotide
cccaugaguggcacuucua

SEQ ID NO: 1221854 - RNA, 19 nt, Artificial Sequence
  Description of Artificial Sequence: Synthetic oligonucleotide
ccgagcccaugaguggcac

SEQ ID NO: 1221855 - RNA, 19 nt, Artificial Sequence
  Description of Artificial Sequence: Synthetic oligonucleotide
caggaaccggaggaucaau

SEQ ID NO: 1221856 - RNA, 19 nt, Artificial Sequence
  Description of Artificial Sequence: Synthetic oligonucleotide
gccacacgguuccauccau

SEQ ID NO: 1221857 - RNA, 19 nt, Artificial Sequence
  Description of Artificial Sequence: Synthetic oligonucleotide
cgagggcuuucggcguugg

SEQ ID NO: 1221858 - RNA, 19 nt, Artificial Sequence
  Description of Artificial Sequence: Synthetic oligonucleotide
caucuccgcuugguacacu

SEQ ID NO: 1221859 - RNA, 19 nt, Artificial Sequence
  Description of Artificial Sequence: Synthetic oligonucleotide
ccuggcguaccacgauagu

SEQ ID NO: 1221860 - RNA, 19 nt, Artificial Sequence
  Description of Artificial Sequence: Synthetic oligonucleotide
ccggccuacgagggcuuuc

SEQ ID NO: 1221861 - RNA, 19 nt, Artificial Sequence
  Description of Artificial Sequence: Synthetic oligonucleotide
ccuuggcuaucacgguccu

SEQ ID NO: 1221862 - RNA, 19 nt, Artificial Sequence
  Description of Artificial Sequence: Synthetic oligonucleotide
cccagcuacccaugugguu

SEQ ID NO: 1221863 - RNA, 19 nt, Artificial Sequence
  Description of Artificial Sequence: Synthetic oligonucleotide
ccaccuggcguaccacgau

SEQ ID NO: 1221864 - RNA, 19 nt, Artificial Sequence
  Description of Artificial Sequence: Synthetic oligonucleotide
cgguuccauccaucuguua

SEQ ID NO: 1221865 - RNA, 19 nt, Artificial Sequence
  Description of Artificial Sequence: Synthetic oligonucleotide
cggucucauacgggaaugu

SEQ ID NO: 1221866 - RNA, 19 nt, Artificial Sequence
  Description of Artificial Sequence: Synthetic oligonucleotide
cgagcccaugaguggcacu

SEQ ID NO: 1221867 - RNA, 19 nt, Artificial Sequence
  Description of Artificial Sequence: Synthetic oligonucleotide
aauuucaccaaacuggugg

SEQ ID NO: 1221868 - RNA, 19 nt, Artificial Sequence
  Description of Artificial Sequence: Synthetic oligonucleotide
aaucuguagacccaaacuc

SEQ ID NO: 1221869 - RNA, 19 nt, Artificial Sequence
  Description of Artificial Sequence: Synthetic oligonucleotide
aaguugauauaacauuucc

SEQ ID NO: 1221870 - RNA, 19 nt, Artificial Sequence
  Description of Artificial Sequence: Synthetic oligonucleotide
aagacuauauaggacagcc

SEQ ID NO: 1221871 - RNA, 19 nt, Artificial Sequence
  Description of Artificial Sequence: Synthetic oligonucleotide
uguauucuaggucagaagc

SEQ ID NO: 1221872 - RNA, 19 nt, Artificial Sequence
  Description of Artificial Sequence: Synthetic oligonucleotide
uacacaaucaaucagcuaa

SEQ ID NO: 1221873 - RNA, 19 nt, Artificial Sequence
  Description of Artificial Sequence: Synthetic oligonucleotide
uuuuagauuuaacaggcag

SEQ ID NO: 1221874 - RNA, 19 nt, Artificial Sequence
  Description of Artificial Sequence: Synthetic oligonucleotide
caaucaaucagcuaacccg

SEQ ID NO: 1221875 - RNA, 19 nt, Artificial Sequence
  Description of Artificial Sequence: Synthetic oligonucleotide
uaaaugaauauuuaauucu

SEQ ID NO: 1221876 - RNA, 19 nt, Artificial Sequence
  Description of Artificial Sequence: Synthetic oligonucleotide
agaguuauugaacuggcac

SEQ ID NO: 1221877 - RNA, 19 nt, Artificial Sequence
  Description of Artificial Sequence: Synthetic oligonucleotide
aguaaugccaaauuaaagu

SEQ ID NO: 1221878 - RNA, 19 nt, Artificial Sequence
  Description of Artificial Sequence: Synthetic oligonucleotide
uguuacacaaucaaucagc

SEQ ID NO: 1221879 - RNA, 19 nt, Artificial Sequence
  Description of Artificial Sequence: Synthetic oligonucleotide
aaguugaacauccucuuuc

SEQ ID NO: 1221880 - RNA, 19 nt, Artificial Sequence
  Description of Artificial Sequence: Synthetic oligonucleotide
aaaacgcauagcuacauca

SEQ ID NO: 1221881 - RNA, 19 nt, Artificial Sequence
  Description of Artificial Sequence: Synthetic oligonucleotide
uuugcuagaagcucgacca

SEQ ID NO: 1221882 - RNA, 19 nt, Artificial Sequence
  Description of Artificial Sequence: Synthetic oligonucleotide
auagccuuaauuuccgagc

SEQ ID NO: 1221883 - RNA, 19 nt, Artificial Sequence
  Description of Artificial Sequence: Synthetic oligonucleotide
uguuuagcuacaaacagcu

SEQ ID NO: 1221884 - RNA, 19 nt, Artificial Sequence
  Description of Artificial Sequence: Synthetic oligonucleotide
acuccgauaagcccaaucc

SEQ ID NO: 1221885 - RNA, 19 nt, Artificial Sequence
  Description of Artificial Sequence: Synthetic oligonucleotide
uuuagauuuaacaggcagc

SEQ ID NO: 1221886 - RNA, 19 nt, Artificial Sequence
  Description of Artificial Sequence: Synthetic oligonucleotide
uuugcgaagaaauaacugu

SEQ ID NO: 1221887 - RNA, 19 nt, Artificial Sequence
  Description of Artificial Sequence: Synthetic oligonucleotide
aagcuugcaauacaauuuc

SEQ ID NO: 1221888 - RNA, 19 nt, Artificial Sequence
  Description of Artificial Sequence: Synthetic oligonucleotide
aaagaucagaaucuguaga

SEQ ID NO: 1221889 - RNA, 19 nt, Artificial Sequence
  Description of Artificial Sequence: Synthetic oligonucleotide
ugauauaacauuuccacau

SEQ ID NO: 1221890 - RNA, 19 nt, Artificial Sequence
  Description of Artificial Sequence: Synthetic oligonucleotide
uuagaaaaccuuuccaagc

SEQ ID NO: 1221891 - RNA, 19 nt, Artificial Sequence
  Description of Artificial Sequence: Synthetic oligonucleotide
acaaacucguauuacgaac

SEQ ID NO: 1221892 - RNA, 19 nt, Artificial Sequence
  Description of Artificial Sequence: Synthetic oligonucleotide
uguauuuuguauucuaggu

SEQ ID NO: 1221893 - RNA, 19 nt, Artificial Sequence
  Description of Artificial Sequence: Synthetic oligonucleotide
aauagaucuguccacaguu

SEQ ID NO: 1221894 - RNA, 19 nt, Artificial Sequence
  Description of Artificial Sequence: Synthetic oligonucleotide
uguaaacuuuuaaacacug

SEQ ID NO: 1221895 - RNA, 19 nt, Artificial Sequence
  Description of Artificial Sequence: Synthetic oligonucleotide
uugaaugcaagcaugguuc

SEQ ID NO: 1221896 - RNA, 19 nt, Artificial Sequence
  Description of Artificial Sequence: Synthetic oligonucleotide
ucaaacuguaucaucuucc

SEQ ID NO: 1221897 - RNA, 19 nt, Artificial Sequence
  Description of Artificial Sequence: Synthetic oligonucleotide
aaacuggugguacucuucg

SEQ ID NO: 1221898 - RNA, 19 nt, Artificial Sequence
  Description of Artificial Sequence: Synthetic oligonucleotide
cuaagaugagcuuugguac

SEQ ID NO: 1221899 - RNA, 19 nt, Artificial Sequence
  Description of Artificial Sequence: Synthetic oligonucleotide
aaauggacggcuuuccugu

SEQ ID NO: 1221900 - RNA, 19 nt, Artificial Sequence
  Description of Artificial Sequence: Synthetic oligonucleotide
caaagcuuccuuaaagagg

SEQ ID NO: 1221901 - RNA, 19 nt, Artificial Sequence
  Description of Artificial Sequence: Synthetic oligonucleotide
aaagaguaaugccaaauua

SEQ ID NO: 1221902 - RNA, 19 nt, Artificial Sequence
  Description of Artificial Sequence: Synthetic oligonucleotide
uauccugcuaagaugagcu

SEQ ID NO: 1221903 - RNA, 19 nt, Artificial Sequence
  Description of Artificial Sequence: Synthetic oligonucleotide
aaaauggacggcuuuccug

SEQ ID NO: 1221904 - RNA, 19 nt, Artificial Sequence
  Description of Artificial Sequence: Synthetic oligonucleotide
accaacugaaaauggacgg

SEQ ID NO: 1221905 - RNA, 19 nt, Artificial Sequence
  Description of Artificial Sequence: Synthetic oligonucleotide
aacgcauagcuacaucagg

SEQ ID NO: 1221906 - RNA, 19 nt, Artificial Sequence
  Description of Artificial Sequence: Synthetic oligonucleotide
uauaacauuuccacauggc

SEQ ID NO: 1221907 - RNA, 19 nt, Artificial Sequence
  Description of Artificial Sequence: Synthetic oligonucleotide
ucagaaaggaguuucaguu

SEQ ID NO: 1221908 - RNA, 19 nt, Artificial Sequence
  Description of Artificial Sequence: Synthetic oligonucleotide
auaacugucuggcacuuuc

SEQ ID NO: 1221909 - RNA, 19 nt, Artificial Sequence
  Description of Artificial Sequence: Synthetic oligonucleotide
cuuaaagauugcuucagug

SEQ ID NO: 1221910 - RNA, 19 nt, Artificial Sequence
  Description of Artificial Sequence: Synthetic oligonucleotide
uccuguaaacuuuuaaaca

SEQ ID NO: 1221911 - RNA, 19 nt, Artificial Sequence
  Description of Artificial Sequence: Synthetic oligonucleotide
aaugccaaauuaaaguaug

SEQ ID NO: 1221912 - RNA, 19 nt, Artificial Sequence
  Description of Artificial Sequence: Synthetic oligonucleotide
ucguauuacgaacuguccc

SEQ ID NO: 1221913 - RNA, 19 nt, Artificial Sequence
  Description of Artificial Sequence: Synthetic oligonucleotide
uuuaacaggcagcaggagu

SEQ ID NO: 1221914 - RNA, 19 nt, Artificial Sequence
  Description of Artificial Sequence: Synthetic oligonucleotide
uagaucuuugcgaagaaau

SEQ ID NO: 1221915 - RNA, 19 nt, Artificial Sequence
  Description of Artificial Sequence: Synthetic oligonucleotide
acugaaaaguccgacgcgc

SEQ ID NO: 1221916 - RNA, 19 nt, Artificial Sequence
  Description of Artificial Sequence: Synthetic oligonucleotide
gaguuauugaacuggcacc

SEQ ID NO: 1221917 - RNA, 19 nt, Artificial Sequence
  Description of Artificial Sequence: Synthetic oligonucleotide
aaccaacugaaaauggacg

SEQ ID NO: 1221918 - RNA, 19 nt, Artificial Sequence
  Description of Artificial Sequence: Synthetic oligonucleotide
gauagccuuaauuuccgag

SEQ ID NO: 1221919 - RNA, 19 nt, Artificial Sequence
  Description of Artificial Sequence: Synthetic oligonucleotide
uccgauaagcccaauccag

SEQ ID NO: 1221920 - RNA, 19 nt, Artificial Sequence
  Description of Artificial Sequence: Synthetic oligonucleotide
ucuuauacaaacucguauu

SEQ ID NO: 1221921 - RNA, 19 nt, Artificial Sequence
  Description of Artificial Sequence: Synthetic oligonucleotide
acaauagaauauucaaucu

SEQ ID NO: 1221922 - RNA, 19 nt, Artificial Sequence
  Description of Artificial Sequence: Synthetic oligonucleotide
uaauauucccucagguuug

SEQ ID NO: 1221923 - RNA, 19 nt, Artificial Sequence
  Description of Artificial Sequence: Synthetic oligonucleotide
aaagacaccuuguacccga

SEQ ID NO: 1221924 - RNA, 19 nt, Artificial Sequence
  Description of Artificial Sequence: Synthetic oligonucleotide
uacaaagacuauauaggac

SEQ ID NO: 1221925 - RNA, 19 nt, Artificial Sequence
  Description of Artificial Sequence: Synthetic oligonucleotide
aggaagagucuucacugcc

SEQ ID NO: 1221926 - RNA, 19 nt, Artificial Sequence
  Description of Artificial Sequence: Synthetic oligonucleotide
ccaaauuaaaguauguuac

SEQ ID NO: 1221927 - RNA, 19 nt, Artificial Sequence
  Description of Artificial Sequence: Synthetic oligonucleotide
gaauauccugcuaagauga

SEQ ID NO: 1221928 - RNA, 19 nt, Artificial Sequence
  Description of Artificial Sequence: Synthetic oligonucleotide
uaauugauaaagucuuccu

SEQ ID NO: 1221929 - RNA, 19 nt, Artificial Sequence
  Description of Artificial Sequence: Synthetic oligonucleotide
auauaggacagccaaaguu

SEQ ID NO: 1221930 - RNA, 19 nt, Artificial Sequence
  Description of Artificial Sequence: Synthetic oligonucleotide
ugccauaauccacaaagcu

SEQ ID NO: 1221931 - RNA, 19 nt, Artificial Sequence
  Description of Artificial Sequence: Synthetic oligonucleotide
ugcaauacaauuucaccaa

SEQ ID NO: 1221932 - RNA, 19 nt, Artificial Sequence
  Description of Artificial Sequence: Synthetic oligonucleotide
ucguacacugcacagcacc

SEQ ID NO: 1221933 - RNA, 19 nt, Artificial Sequence
  Description of Artificial Sequence: Synthetic oligonucleotide
gacuauauaggacagccaa

SEQ ID NO: 1221934 - RNA, 19 nt, Artificial Sequence
  Description of Artificial Sequence: Synthetic oligonucleotide
ugaaggucaucauaaauuu

SEQ ID NO: 1221935 - RNA, 19 nt, Artificial Sequence
  Description of Artificial Sequence: Synthetic oligonucleotide
ucaugggccuucuugaaug

SEQ ID NO: 1221936 - RNA, 19 nt, Artificial Sequence
  Description of Artificial Sequence: Synthetic oligonucleotide
guauguuacacaaucaauc

SEQ ID NO: 1221937 - RNA, 19 nt, Artificial Sequence
  Description of Artificial Sequence: Synthetic oligonucleotide
auaaucccaagugaguggg

SEQ ID NO: 1221938 - RNA, 19 nt, Artificial Sequence
  Description of Artificial Sequence: Synthetic oligonucleotide
auguuuagcuacaaacagc

SEQ ID NO: 1221939 - RNA, 19 nt, Artificial Sequence
  Description of Artificial Sequence: Synthetic oligonucleotide
uugaacauccucuuuccac

SEQ ID NO: 1221940 - RNA, 19 nt, Artificial Sequence
  Description of Artificial Sequence: Synthetic oligonucleotide
uguaauccauccaaagauc

SEQ ID NO: 1221941 - RNA, 19 nt, Artificial Sequence
  Description of Artificial Sequence: Synthetic oligonucleotide
cuuugcgaagaaauaacug

SEQ ID NO: 1221942 - RNA, 19 nt, Artificial Sequence
  Description of Artificial Sequence: Synthetic oligonucleotide
uaagaugagcuuugguacc

SEQ ID NO: 1221943 - RNA, 19 nt, Artificial Sequence
  Description of Artificial Sequence: Synthetic oligonucleotide
uuuguagccaccacuccga

SEQ ID NO: 1221944 - RNA, 19 nt, Artificial Sequence
  Description of Artificial Sequence: Synthetic oligonucleotide
aauauucccucagguuugc

SEQ ID NO: 1221945 - RNA, 19 nt, Artificial Sequence
  Description of Artificial Sequence: Synthetic oligonucleotide
uuuccgagcgacugaaaag

SEQ ID NO: 1221946 - RNA, 19 nt, Artificial Sequence
  Description of Artificial Sequence: Synthetic oligonucleotide
uucgcuaguggccagccug

SEQ ID NO: 1221947 - RNA, 19 nt, Artificial Sequence
  Description of Artificial Sequence: Synthetic oligonucleotide
ugaacuggcaccugugaca

SEQ ID NO: 1221948 - RNA, 19 nt, Artificial Sequence
  Description of Artificial Sequence: Synthetic oligonucleotide
aagaguaaugccaaauuaa

SEQ ID NO: 1221949 - RNA, 19 nt, Artificial Sequence
  Description of Artificial Sequence: Synthetic oligonucleotide
uacccgauguacaauagaa

SEQ ID NO: 1221950 - RNA, 19 nt, Artificial Sequence
  Description of Artificial Sequence: Synthetic oligonucleotide
uaauccauccaaagaucag

SEQ ID NO: 1221951 - RNA, 19 nt, Artificial Sequence
  Description of Artificial Sequence: Synthetic oligonucleotide
ucucaggucuaccgaaggg

SEQ ID NO: 1221952 - RNA, 19 nt, Artificial Sequence
  Description of Artificial Sequence: Synthetic oligonucleotide
cuuaauuuccgagcgacug

SEQ ID NO: 1221953 - RNA, 19 nt, Artificial Sequence
  Description of Artificial Sequence: Synthetic oligonucleotide
uccaagcaaaaguugauau

SEQ ID NO: 1221954 - RNA, 19 nt, Artificial Sequence
  Description of Artificial Sequence: Synthetic oligonucleotide
uuugccaucuugcaggguu

SEQ ID NO: 1221955 - RNA, 19 nt, Artificial Sequence
  Description of Artificial Sequence: Synthetic oligonucleotide
ucuggaaccaaagaguaau

SEQ ID NO: 1221956 - RNA, 19 nt, Artificial Sequence
  Description of Artificial Sequence: Synthetic oligonucleotide
agggauacacuacuggucu

SEQ ID NO: 1221957 - RNA, 19 nt, Artificial Sequence
  Description of Artificial Sequence: Synthetic oligonucleotide
uuugaaugaauggcaagca

SEQ ID NO: 1221958 - RNA, 19 nt, Artificial Sequence
  Description of Artificial Sequence: Synthetic oligonucleotide
uacaucagggcucuuugac

SEQ ID NO: 1221959 - RNA, 19 nt, Artificial Sequence
  Description of Artificial Sequence: Synthetic oligonucleotide
ugcgaagaaauaacugucu

SEQ ID NO: 1221960 - RNA, 19 nt, Artificial Sequence
  Description of Artificial Sequence: Synthetic oligonucleotide
uugcgaagaaauaacuguc

SEQ ID NO: 1221961 - RNA, 19 nt, Artificial Sequence
  Description of Artificial Sequence: Synthetic oligonucleotide
ggcauguuuagcuacaaac

SEQ ID NO: 1221962 - RNA, 19 nt, Artificial Sequence
  Description of Artificial Sequence: Synthetic oligonucleotide
auaagcccaauccagguau

SEQ ID NO: 1221963 - RNA, 19 nt, Artificial Sequence
  Description of Artificial Sequence: Synthetic oligonucleotide
uucucaggucuaccgaagg

SEQ ID NO: 1221964 - RNA, 19 nt, Artificial Sequence
  Description of Artificial Sequence: Synthetic oligonucleotide
auauccugcuaagaugagc

SEQ ID NO: 1221965 - RNA, 19 nt, Artificial Sequence
  Description of Artificial Sequence: Synthetic oligonucleotide
uugagaaggguucuccgcu

SEQ ID NO: 1221966 - RNA, 19 nt, Artificial Sequence
  Description of Artificial Sequence: Synthetic oligonucleotide
aacuggugguacucuucgc

SEQ ID NO: 1221967 - RNA, 19 nt, Artificial Sequence
  Description of Artificial Sequence: Synthetic oligonucleotide
ucgccuugccacauaaucc

SEQ ID NO: 1221968 - RNA, 19 nt, Artificial Sequence
  Description of Artificial Sequence: Synthetic oligonucleotide
cuucuugaaugcaagcaug

SEQ ID NO: 1221969 - RNA, 19 nt, Artificial Sequence
  Description of Artificial Sequence: Synthetic oligonucleotide
ugcaacuucaucugccaca

SEQ ID NO: 1221970 - RNA, 19 nt, Artificial Sequence
  Description of Artificial Sequence: Synthetic oligonucleotide
uauucuaggucagaagccu

SEQ ID NO: 1221971 - RNA, 19 nt, Artificial Sequence
  Description of Artificial Sequence: Synthetic oligonucleotide
acauaauugauaaagucuu

SEQ ID NO: 1221972 - RNA, 19 nt, Artificial Sequence
  Description of Artificial Sequence: Synthetic oligonucleotide
gacugaaaaguccgacgcg

SEQ ID NO: 1221973 - RNA, 19 nt, Artificial Sequence
  Description of Artificial Sequence: Synthetic oligonucleotide
guaaugccaaauuaaagua

SEQ ID NO: 1221974 - RNA, 19 nt, Artificial Sequence
  Description of Artificial Sequence: Synthetic oligonucleotide
cuugagaaggguucuccgc

SEQ ID NO: 1221975 - RNA, 19 nt, Artificial Sequence
  Description of Artificial Sequence: Synthetic oligonucleotide
aggacagccaaaguugaac

SEQ ID NO: 1221976 - RNA, 19 nt, Artificial Sequence
  Description of Artificial Sequence: Synthetic oligonucleotide
auuacgaacugucccagaa

SEQ ID NO: 1221977 - RNA, 19 nt, Artificial Sequence
  Description of Artificial Sequence: Synthetic oligonucleotide
uauauaggacagccaaagu

SEQ ID NO: 1221978 - RNA, 19 nt, Artificial Sequence
  Description of Artificial Sequence: Synthetic oligonucleotide
uucacugccucuucguaca

SEQ ID NO: 1221979 - RNA, 19 nt, Artificial Sequence
  Description of Artificial Sequence: Synthetic oligonucleotide
uguacccgauguacaauag

SEQ ID NO: 1221980 - RNA, 19 nt, Artificial Sequence
  Description of Artificial Sequence: Synthetic oligonucleotide
cauagcuacaucagggcuc

SEQ ID NO: 1221981 - RNA, 19 nt, Artificial Sequence
  Description of Artificial Sequence: Synthetic oligonucleotide
aguuauugaacuggcaccu

SEQ ID NO: 1221982 - RNA, 19 nt, Artificial Sequence
  Description of Artificial Sequence: Synthetic oligonucleotide
cuuugacccaaugagcacc

SEQ ID NO: 1221983 - RNA, 19 nt, Artificial Sequence
  Description of Artificial Sequence: Synthetic oligonucleotide
aaacgcauagcuacaucag

SEQ ID NO: 1221984 - RNA, 19 nt, Artificial Sequence
  Description of Artificial Sequence: Synthetic oligonucleotide
gaaaaguccgacgcgcucc

SEQ ID NO: 1221985 - RNA, 19 nt, Artificial Sequence
  Description of Artificial Sequence: Synthetic oligonucleotide
ugguacucuucgcuagugg

SEQ ID NO: 1221986 - RNA, 19 nt, Artificial Sequence
  Description of Artificial Sequence: Synthetic oligonucleotide
agaagcucgaccaaagaca

SEQ ID NO: 1221987 - RNA, 19 nt, Artificial Sequence
  Description of Artificial Sequence: Synthetic oligonucleotide
cucuuugacccaaugagca

SEQ ID NO: 1221988 - RNA, 19 nt, Artificial Sequence
  Description of Artificial Sequence: Synthetic oligonucleotide
ugacccaaugagcaccugc

SEQ ID NO: 1221989 - RNA, 19 nt, Artificial Sequence
  Description of Artificial Sequence: Synthetic oligonucleotide
ugacagcuaaaauagcuuu

SEQ ID NO: 1221990 - RNA, 19 nt, Artificial Sequence
  Description of Artificial Sequence: Synthetic oligonucleotide
uggcuuuuagcacuuucac

SEQ ID NO: 1221991 - RNA, 19 nt, Artificial Sequence
  Description of Artificial Sequence: Synthetic oligonucleotide
acaaaccuggggcuugagg

SEQ ID NO: 1221992 - RNA, 19 nt, Artificial Sequence
  Description of Artificial Sequence: Synthetic oligonucleotide
ugcccaagaaauccacaag

SEQ ID NO: 1221993 - RNA, 19 nt, Artificial Sequence
  Description of Artificial Sequence: Synthetic oligonucleotide
uacaaacucguauuacgaa

SEQ ID NO: 1221994 - RNA, 19 nt, Artificial Sequence
  Description of Artificial Sequence: Synthetic oligonucleotide
acuacuggucuucuuagaa

SEQ ID NO: 1221995 - RNA, 19 nt, Artificial Sequence
  Description of Artificial Sequence: Synthetic oligonucleotide
aaugcaagcaugguucuuu

SEQ ID NO: 1221996 - RNA, 19 nt, Artificial Sequence
  Description of Artificial Sequence: Synthetic oligonucleotide
cucguauuacgaacugucc

SEQ ID NO: 1221997 - RNA, 19 nt, Artificial Sequence
  Description of Artificial Sequence: Synthetic oligonucleotide
auuuccgagcgacugaaaa

SEQ ID NO: 1221998 - RNA, 19 nt, Artificial Sequence
  Description of Artificial Sequence: Synthetic oligonucleotide
uuuccaagcaaaaguugau

SEQ ID NO: 1221999 - RNA, 19 nt, Artificial Sequence
  Description of Artificial Sequence: Synthetic oligonucleotide
uuuagcacuuucacuccac

SEQ ID NO: 1222000 - RNA, 19 nt, Artificial Sequence
  Description of Artificial Sequence: Synthetic oligonucleotide
ucaggucuaccgaaggggu

SEQ ID NO: 1222001 - RNA, 19 nt, Artificial Sequence
  Description of Artificial Sequence: Synthetic oligonucleotide
gaagcucgaccaaagacac

SEQ ID NO: 1222002 - RNA, 19 nt, Artificial Sequence
  Description of Artificial Sequence: Synthetic oligonucleotide
agcucgaccaaagacaccu

SEQ ID NO: 1222003 - RNA, 19 nt, Artificial Sequence
  Description of Artificial Sequence: Synthetic oligonucleotide
uaacccgucugcuacuucu

SEQ ID NO: 1222004 - RNA, 19 nt, Artificial Sequence
  Description of Artificial Sequence: Synthetic oligonucleotide
aaagcugguuuguuugaau

SEQ ID NO: 1222005 - RNA, 19 nt, Artificial Sequence
  Description of Artificial Sequence: Synthetic oligonucleotide
ggacauaauugauaaaguc

SEQ ID NO: 1222006 - RNA, 19 nt, Artificial Sequence
  Description of Artificial Sequence: Synthetic oligonucleotide
cucaggucuaccgaagggg

SEQ ID NO: 1222007 - RNA, 19 nt, Artificial Sequence
  Description of Artificial Sequence: Synthetic oligonucleotide
cauaauugauaaagucuuc

SEQ ID NO: 1222008 - RNA, 19 nt, Artificial Sequence
  Description of Artificial Sequence: Synthetic oligonucleotide
uuccgagcgacugaaaagu

SEQ ID NO: 1222009 - RNA, 19 nt, Artificial Sequence
  Description of Artificial Sequence: Synthetic oligonucleotide
uccaauagaucuguccaca

SEQ ID NO: 1222010 - RNA, 19 nt, Artificial Sequence
  Description of Artificial Sequence: Synthetic oligonucleotide
agcuuugguaccccauuuc

SEQ ID NO: 1222011 - RNA, 19 nt, Artificial Sequence
  Description of Artificial Sequence: Synthetic oligonucleotide
uuugacccaaugagcaccu

SEQ ID NO: 1222012 - RNA, 19 nt, Artificial Sequence
  Description of Artificial Sequence: Synthetic oligonucleotide
uccgcuguauuuuguauuc

SEQ ID NO: 1222013 - RNA, 19 nt, Artificial Sequence
  Description of Artificial Sequence: Synthetic oligonucleotide
acgcauagcuacaucaggg

SEQ ID NO: 1222014 - RNA, 19 nt, Artificial Sequence
  Description of Artificial Sequence: Synthetic oligonucleotide
gaccaaagacaccuuguac

SEQ ID NO: 1222015 - RNA, 19 nt, Artificial Sequence
  Description of Artificial Sequence: Synthetic oligonucleotide
acagcuaaaauagcuuucu

SEQ ID NO: 1222016 - RNA, 19 nt, Artificial Sequence
  Description of Artificial Sequence: Synthetic oligonucleotide
agacaaucgaucuuccauu

SEQ ID NO: 1222017 - RNA, 19 nt, Artificial Sequence
  Description of Artificial Sequence: Synthetic oligonucleotide
gcuacaaacagcuccgcug

SEQ ID NO: 1222018 - RNA, 19 nt, Artificial Sequence
  Description of Artificial Sequence: Synthetic oligonucleotide
guauucuaggucagaagcc

SEQ ID NO: 1222019 - RNA, 19 nt, Artificial Sequence
  Description of Artificial Sequence: Synthetic oligonucleotide
auacaaacucguauuacga

SEQ ID NO: 1222020 - RNA, 19 nt, Artificial Sequence
  Description of Artificial Sequence: Synthetic oligonucleotide
aaaaguccgacgcgcucca

SEQ ID NO: 1222021 - RNA, 19 nt, Artificial Sequence
  Description of Artificial Sequence: Synthetic oligonucleotide
ugaaugcaagcaugguucu

SEQ ID NO: 1222022 - RNA, 19 nt, Artificial Sequence
  Description of Artificial Sequence: Synthetic oligonucleotide
ucuucguacacugcacagc

SEQ ID NO: 1222023 - RNA, 19 nt, Artificial Sequence
  Description of Artificial Sequence: Synthetic oligonucleotide
gaagagucuucacugccuc

SEQ ID NO: 1222024 - RNA, 19 nt, Artificial Sequence
  Description of Artificial Sequence: Synthetic oligonucleotide
acacaaucaaucagcuaac

SEQ ID NO: 1222025 - RNA, 19 nt, Artificial Sequence
  Description of Artificial Sequence: Synthetic oligonucleotide
cucgccuugccacauaauc

SEQ ID NO: 1222026 - RNA, 19 nt, Artificial Sequence
  Description of Artificial Sequence: Synthetic oligonucleotide
agaguaaugccaaauuaaa

SEQ ID NO: 1222027 - RNA, 19 nt, Artificial Sequence
  Description of Artificial Sequence: Synthetic oligonucleotide
uuguacccgauguacaaua

SEQ ID NO: 1222028 - RNA, 19 nt, Artificial Sequence
  Description of Artificial Sequence: Synthetic oligonucleotide
ugaacaauucugucccauc

SEQ ID NO: 1222029 - RNA, 19 nt, Artificial Sequence
  Description of Artificial Sequence: Synthetic oligonucleotide
ucgcuaguggccagccugg

SEQ ID NO: 1222030 - RNA, 19 nt, Artificial Sequence
  Description of Artificial Sequence: Synthetic oligonucleotide
ucuuugacccaaugagcac

SEQ ID NO: 1222031 - RNA, 19 nt, Artificial Sequence
  Description of Artificial Sequence: Synthetic oligonucleotide
gcuaagaugagcuuuggua

SEQ ID NO: 1222032 - RNA, 19 nt, Artificial Sequence
  Description of Artificial Sequence: Synthetic oligonucleotide
ucugcccaagaaauccaca

SEQ ID NO: 1222033 - RNA, 19 nt, Artificial Sequence
  Description of Artificial Sequence: Synthetic oligonucleotide
ugaaaaguccgacgcgcuc

SEQ ID NO: 1222034 - RNA, 19 nt, Artificial Sequence
  Description of Artificial Sequence: Synthetic oligonucleotide
gaguuucaguucaugggcc

SEQ ID NO: 1222035 - RNA, 19 nt, Artificial Sequence
  Description of Artificial Sequence: Synthetic oligonucleotide
cuucguacacugcacagca

SEQ ID NO: 1222036 - RNA, 19 nt, Artificial Sequence
  Description of Artificial Sequence: Synthetic oligonucleotide
acggcuuuccuguaaacuu

SEQ ID NO: 1222037 - RNA, 19 nt, Artificial Sequence
  Description of Artificial Sequence: Synthetic oligonucleotide
cucuucguacacugcacag

SEQ ID NO: 1222038 - RNA, 19 nt, Artificial Sequence
  Description of Artificial Sequence: Synthetic oligonucleotide
uacucuucgcuaguggcca

SEQ ID NO: 1222039 - RNA, 19 nt, Artificial Sequence
  Description of Artificial Sequence: Synthetic oligonucleotide
ccacauaaucccaagugag

SEQ ID NO: 1222040 - RNA, 19 nt, Artificial Sequence
  Description of Artificial Sequence: Synthetic oligonucleotide
ugcuaagaugagcuuuggu

SEQ ID NO: 1222041 - RNA, 19 nt, Artificial Sequence
  Description of Artificial Sequence: Synthetic oligonucleotide
gaagggguggcucaauucu

SEQ ID NO: 1222042 - RNA, 19 nt, Artificial Sequence
  Description of Artificial Sequence: Synthetic oligonucleotide
gccaaauuaaaguauguua

SEQ ID NO: 1222043 - RNA, 19 nt, Artificial Sequence
  Description of Artificial Sequence: Synthetic oligonucleotide
gacaccuuguacccgaugu

SEQ ID NO: 1222044 - RNA, 19 nt, Artificial Sequence
  Description of Artificial Sequence: Synthetic oligonucleotide
ucagcgcccucucauaaua

SEQ ID NO: 1222045 - RNA, 19 nt, Artificial Sequence
  Description of Artificial Sequence: Synthetic oligonucleotide
ucagaaucuguagacccaa

SEQ ID NO: 1222046 - RNA, 19 nt, Artificial Sequence
  Description of Artificial Sequence: Synthetic oligonucleotide
ugagcuuugguaccccauu

SEQ ID NO: 1222047 - RNA, 19 nt, Artificial Sequence
  Description of Artificial Sequence: Synthetic oligonucleotide
ucccuguaacauuuucaug

SEQ ID NO: 1222048 - RNA, 19 nt, Artificial Sequence
  Description of Artificial Sequence: Synthetic oligonucleotide
cauccuucuuaaaugaaua

SEQ ID NO: 1222049 - RNA, 19 nt, Artificial Sequence
  Description of Artificial Sequence: Synthetic oligonucleotide
aucuguagacccaaacucu

SEQ ID NO: 1222050 - RNA, 19 nt, Artificial Sequence
  Description of Artificial Sequence: Synthetic oligonucleotide
guauuacgaacugucccag

SEQ ID NO: 1222051 - RNA, 19 nt, Artificial Sequence
  Description of Artificial Sequence: Synthetic oligonucleotide
uagauuuaacaggcagcag

SEQ ID NO: 1222052 - RNA, 19 nt, Artificial Sequence
  Description of Artificial Sequence: Synthetic oligonucleotide
uugguaccccauuucuuac

SEQ ID NO: 1222053 - RNA, 19 nt, Artificial Sequence
  Description of Artificial Sequence: Synthetic oligonucleotide
auauuggacauaauugaua

SEQ ID NO: 1222054 - RNA, 19 nt, Artificial Sequence
  Description of Artificial Sequence: Synthetic oligonucleotide
uauuacgaacugucccaga

SEQ ID NO: 1222055 - RNA, 19 nt, Artificial Sequence
  Description of Artificial Sequence: Synthetic oligonucleotide
cucgaccaaagacaccuug

SEQ ID NO: 1222056 - RNA, 19 nt, Artificial Sequence
  Description of Artificial Sequence: Synthetic oligonucleotide
cagcuaacccgucugcuac

SEQ ID NO: 1222057 - RNA, 19 nt, Artificial Sequence
  Description of Artificial Sequence: Synthetic oligonucleotide
uggcucuccaauagaucug

SEQ ID NO: 1222058 - RNA, 19 nt, Artificial Sequence
  Description of Artificial Sequence: Synthetic oligonucleotide
gagggauacacuacugguc

SEQ ID NO: 1222059 - RNA, 19 nt, Artificial Sequence
  Description of Artificial Sequence: Synthetic oligonucleotide
agugagugggucaucggug

SEQ ID NO: 1222060 - RNA, 19 nt, Artificial Sequence
  Description of Artificial Sequence: Synthetic oligonucleotide
agaugagcuuugguacccc

SEQ ID NO: 1222061 - RNA, 19 nt, Artificial Sequence
  Description of Artificial Sequence: Synthetic oligonucleotide
gaagcuugcaauacaauuu

SEQ ID NO: 1222062 - RNA, 19 nt, Artificial Sequence
  Description of Artificial Sequence: Synthetic oligonucleotide
uucucgccuugccacauaa

SEQ ID NO: 1222063 - RNA, 19 nt, Artificial Sequence
  Description of Artificial Sequence: Synthetic oligonucleotide
cacaaucaaucagcuaacc

SEQ ID NO: 1222064 - RNA, 19 nt, Artificial Sequence
  Description of Artificial Sequence: Synthetic oligonucleotide
gauaagcccaauccaggua

SEQ ID NO: 1222065 - RNA, 19 nt, Artificial Sequence
  Description of Artificial Sequence: Synthetic oligonucleotide
cucuguaggaagagucuuc

SEQ ID NO: 1222066 - RNA, 19 nt, Artificial Sequence
  Description of Artificial Sequence: Synthetic oligonucleotide
uugaacaauucugucccau

SEQ ID NO: 1222067 - RNA, 19 nt, Artificial Sequence
  Description of Artificial Sequence: Synthetic oligonucleotide
ugcauggcauguuuagcua

SEQ ID NO: 1222068 - RNA, 19 nt, Artificial Sequence
  Description of Artificial Sequence: Synthetic oligonucleotide
gcgaagaaauaacugucug

SEQ ID NO: 1222069 - RNA, 19 nt, Artificial Sequence
  Description of Artificial Sequence: Synthetic oligonucleotide
guacucuucgcuaguggcc

SEQ ID NO: 1222070 - RNA, 19 nt, Artificial Sequence
  Description of Artificial Sequence: Synthetic oligonucleotide
uggacggcuuuccuguaaa

SEQ ID NO: 1222071 - RNA, 19 nt, Artificial Sequence
  Description of Artificial Sequence: Synthetic oligonucleotide
caugggccuucuugaaugc

SEQ ID NO: 1222072 - RNA, 19 nt, Artificial Sequence
  Description of Artificial Sequence: Synthetic oligonucleotide
gaaauccacaagggcagac

SEQ ID NO: 1222073 - RNA, 19 nt, Artificial Sequence
  Description of Artificial Sequence: Synthetic oligonucleotide
auagaauauucaaucucau

SEQ ID NO: 1222074 - RNA, 19 nt, Artificial Sequence
  Description of Artificial Sequence: Synthetic oligonucleotide
aaacucucucagcgcccuc

SEQ ID NO: 1222075 - RNA, 19 nt, Artificial Sequence
  Description of Artificial Sequence: Synthetic oligonucleotide
cgagcgacugaaaaguccg

SEQ ID NO: 1222076 - RNA, 19 nt, Artificial Sequence
  Description of Artificial Sequence: Synthetic oligonucleotide
caaaacgcauagcuacauc

SEQ ID NO: 1222077 - RNA, 19 nt, Artificial Sequence
  Description of Artificial Sequence: Synthetic oligonucleotide
ucuccgcuguauuuuguau

SEQ ID NO: 1222078 - RNA, 19 nt, Artificial Sequence
  Description of Artificial Sequence: Synthetic oligonucleotide
ucuaccgaagggguggcuc

SEQ ID NO: 1222079 - RNA, 19 nt, Artificial Sequence
  Description of Artificial Sequence: Synthetic oligonucleotide
caccacuccgauaagccca

SEQ ID NO: 1222080 - RNA, 19 nt, Artificial Sequence
  Description of Artificial Sequence: Synthetic oligonucleotide
gguuugccaucuugcaggg

SEQ ID NO: 1222081 - RNA, 19 nt, Artificial Sequence
  Description of Artificial Sequence: Synthetic oligonucleotide
caccuuguacccgauguac

SEQ ID NO: 1222082 - RNA, 19 nt, Artificial Sequence
  Description of Artificial Sequence: Synthetic oligonucleotide
ugcccucugagggauacac

SEQ ID NO: 1222083 - RNA, 19 nt, Artificial Sequence
  Description of Artificial Sequence: Synthetic oligonucleotide
gugcauggcauguuuagcu

SEQ ID NO: 1222084 - RNA, 19 nt, Artificial Sequence
  Description of Artificial Sequence: Synthetic oligonucleotide
ccgauaagcccaauccagg

SEQ ID NO: 1222085 - RNA, 19 nt, Artificial Sequence
  Description of Artificial Sequence: Synthetic oligonucleotide
ugcuagaagcucgaccaaa

SEQ ID NO: 1222086 - RNA, 19 nt, Artificial Sequence
  Description of Artificial Sequence: Synthetic oligonucleotide
ucuucgcuaguggccagcc

SEQ ID NO: 1222087 - RNA, 19 nt, Artificial Sequence
  Description of Artificial Sequence: Synthetic oligonucleotide
cucuuauacaaacucguau

SEQ ID NO: 1222088 - RNA, 19 nt, Artificial Sequence
  Description of Artificial Sequence: Synthetic oligonucleotide
auauucccucagguuugcc

SEQ ID NO: 1222089 - RNA, 19 nt, Artificial Sequence
  Description of Artificial Sequence: Synthetic oligonucleotide
cauggcauguuuagcuaca

SEQ ID NO: 1222090 - RNA, 19 nt, Artificial Sequence
  Description of Artificial Sequence: Synthetic oligonucleotide
aacccgucugcuacuucuc

SEQ ID NO: 1222091 - RNA, 19 nt, Artificial Sequence
  Description of Artificial Sequence: Synthetic oligonucleotide
uggcauguuuagcuacaaa

SEQ ID NO: 1222092 - RNA, 19 nt, Artificial Sequence
  Description of Artificial Sequence: Synthetic oligonucleotide
guucucaggucuaccgaag

SEQ ID NO: 1222093 - RNA, 19 nt, Artificial Sequence
  Description of Artificial Sequence: Synthetic oligonucleotide
ccuugagaaggguucuccg

SEQ ID NO: 1222094 - RNA, 19 nt, Artificial Sequence
  Description of Artificial Sequence: Synthetic oligonucleotide
uaaucccaagugagugggu

SEQ ID NO: 1222095 - RNA, 19 nt, Artificial Sequence
  Description of Artificial Sequence: Synthetic oligonucleotide
uccgagcgacugaaaaguc

SEQ ID NO: 1222096 - RNA, 19 nt, Artificial Sequence
  Description of Artificial Sequence: Synthetic oligonucleotide
guacccgauguacaauaga

SEQ ID NO: 1222097 - RNA, 19 nt, Artificial Sequence
  Description of Artificial Sequence: Synthetic oligonucleotide
cuccgauaagcccaaucca

SEQ ID NO: 1222098 - RNA, 19 nt, Artificial Sequence
  Description of Artificial Sequence: Synthetic oligonucleotide
ccaagugagugggucaucg

SEQ ID NO: 1222099 - RNA, 19 nt, Artificial Sequence
  Description of Artificial Sequence: Synthetic oligonucleotide
caucggugugcagagcuug

SEQ ID NO: 1222100 - RNA, 19 nt, Artificial Sequence
  Description of Artificial Sequence: Synthetic oligonucleotide
gucaucggugugcagagcu

SEQ ID NO: 1222101 - RNA, 19 nt, Artificial Sequence
  Description of Artificial Sequence: Synthetic oligonucleotide
gguucuccgcuguauuuug

SEQ ID NO: 1222102 - RNA, 19 nt, Artificial Sequence
  Description of Artificial Sequence: Synthetic oligonucleotide
augccaaauuaaaguaugu

SEQ ID NO: 1222103 - RNA, 19 nt, Artificial Sequence
  Description of Artificial Sequence: Synthetic oligonucleotide
agggcucuuugacccaaug

SEQ ID NO: 1222104 - RNA, 19 nt, Artificial Sequence
  Description of Artificial Sequence: Synthetic oligonucleotide
cuugaaugcaagcaugguu

SEQ ID NO: 1222105 - RNA, 19 nt, Artificial Sequence
  Description of Artificial Sequence: Synthetic oligonucleotide
aauggacggcuuuccugua

SEQ ID NO: 1222106 - RNA, 19 nt, Artificial Sequence
  Description of Artificial Sequence: Synthetic oligonucleotide
gggucaucggugugcagag

SEQ ID NO: 1222107 - RNA, 19 nt, Artificial Sequence
  Description of Artificial Sequence: Synthetic oligonucleotide
agucaauccacugcuuaua

SEQ ID NO: 1222108 - RNA, 19 nt, Artificial Sequence
  Description of Artificial Sequence: Synthetic oligonucleotide
ccaauagaucuguccacag

SEQ ID NO: 1222109 - RNA, 19 nt, Artificial Sequence
  Description of Artificial Sequence: Synthetic oligonucleotide
gcucuuugacccaaugagc

SEQ ID NO: 1222110 - RNA, 19 nt, Artificial Sequence
  Description of Artificial Sequence: Synthetic oligonucleotide
ucuuuccacuuugcuagaa

SEQ ID NO: 1222111 - RNA, 19 nt, Artificial Sequence
  Description of Artificial Sequence: Synthetic oligonucleotide
agacuauauaggacagcca

SEQ ID NO: 1222112 - RNA, 19 nt, Artificial Sequence
  Description of Artificial Sequence: Synthetic oligonucleotide
gcuuauacugggcuucaga

SEQ ID NO: 1222113 - RNA, 19 nt, Artificial Sequence
  Description of Artificial Sequence: Synthetic oligonucleotide
gcauggcauguuuagcuac

SEQ ID NO: 1222114 - RNA, 19 nt, Artificial Sequence
  Description of Artificial Sequence: Synthetic oligonucleotide
caggucuaccgaaggggug

SEQ ID NO: 1222115 - RNA, 19 nt, Artificial Sequence
  Description of Artificial Sequence: Synthetic oligonucleotide
uucaguucaugggccuucu

SEQ ID NO: 1222116 - RNA, 19 nt, Artificial Sequence
  Description of Artificial Sequence: Synthetic oligonucleotide
cccgauguacaauagaaua

SEQ ID NO: 1222117 - RNA, 19 nt, Artificial Sequence
  Description of Artificial Sequence: Synthetic oligonucleotide
gccuuaauuuccgagcgac

SEQ ID NO: 1222118 - RNA, 19 nt, Artificial Sequence
  Description of Artificial Sequence: Synthetic oligonucleotide
cacauaaucccaagugagu

SEQ ID NO: 1222119 - RNA, 19 nt, Artificial Sequence
  Description of Artificial Sequence: Synthetic oligonucleotide
ucaucggugugcagagcuu

SEQ ID NO: 1222120 - RNA, 19 nt, Artificial Sequence
  Description of Artificial Sequence: Synthetic oligonucleotide
auggcaagcauggcagaga

SEQ ID NO: 1222121 - RNA, 19 nt, Artificial Sequence
  Description of Artificial Sequence: Synthetic oligonucleotide
cugcuaagaugagcuuugg

SEQ ID NO: 1222122 - RNA, 19 nt, Artificial Sequence
  Description of Artificial Sequence: Synthetic oligonucleotide
agcuaacccgucugcuacu

SEQ ID NO: 1222123 - RNA, 19 nt, Artificial Sequence
  Description of Artificial Sequence: Synthetic oligonucleotide
aggguucuccgcuguauuu

SEQ ID NO: 1222124 - RNA, 19 nt, Artificial Sequence
  Description of Artificial Sequence: Synthetic oligonucleotide
uaagcccaauccagguauu

SEQ ID NO: 1222125 - RNA, 19 nt, Artificial Sequence
  Description of Artificial Sequence: Synthetic oligonucleotide
acaccuuguacccgaugua

SEQ ID NO: 1222126 - RNA, 19 nt, Artificial Sequence
  Description of Artificial Sequence: Synthetic oligonucleotide
cucauccuucuuaaaugaa

SEQ ID NO: 1222127 - RNA, 19 nt, Artificial Sequence
  Description of Artificial Sequence: Synthetic oligonucleotide
cguauuacgaacuguccca

SEQ ID NO: 1222128 - RNA, 19 nt, Artificial Sequence
  Description of Artificial Sequence: Synthetic oligonucleotide
auaauccacaaagcugguu

SEQ ID NO: 1222129 - RNA, 19 nt, Artificial Sequence
  Description of Artificial Sequence: Synthetic oligonucleotide
acucuuauacaaacucgua

SEQ ID NO: 1222130 - RNA, 19 nt, Artificial Sequence
  Description of Artificial Sequence: Synthetic oligonucleotide
guagaucuuugcgaagaaa

SEQ ID NO: 1222131 - RNA, 19 nt, Artificial Sequence
  Description of Artificial Sequence: Synthetic oligonucleotide
gacggcuuuccuguaaacu

SEQ ID NO: 1222132 - RNA, 19 nt, Artificial Sequence
  Description of Artificial Sequence: Synthetic oligonucleotide
ggugcauggcauguuuagc

SEQ ID NO: 1222133 - RNA, 19 nt, Artificial Sequence
  Description of Artificial Sequence: Synthetic oligonucleotide
accuuguacccgauguaca

SEQ ID NO: 1222134 - RNA, 19 nt, Artificial Sequence
  Description of Artificial Sequence: Synthetic oligonucleotide
caguucucaggucuaccga

SEQ ID NO: 1222135 - RNA, 19 nt, Artificial Sequence
  Description of Artificial Sequence: Synthetic oligonucleotide
aacacuguucuggccuuuu

SEQ ID NO: 1222136 - RNA, 19 nt, Artificial Sequence
  Description of Artificial Sequence: Synthetic oligonucleotide
ucacugccucuucguacac

SEQ ID NO: 1222137 - RNA, 19 nt, Artificial Sequence
  Description of Artificial Sequence: Synthetic oligonucleotide
auggacggcuuuccuguaa

SEQ ID NO: 1222138 - RNA, 19 nt, Artificial Sequence
  Description of Artificial Sequence: Synthetic oligonucleotide
agcgcccucucauaauauu

SEQ ID NO: 1222139 - RNA, 19 nt, Artificial Sequence
  Description of Artificial Sequence: Synthetic oligonucleotide
gcccucucauaauauuccc

SEQ ID NO: 1222140 - RNA, 19 nt, Artificial Sequence
  Description of Artificial Sequence: Synthetic oligonucleotide
gugguacucuucgcuagug

SEQ ID NO: 1222141 - RNA, 19 nt, Artificial Sequence
  Description of Artificial Sequence: Synthetic oligonucleotide
acccgucugcuacuucuca

SEQ ID NO: 1222142 - RNA, 19 nt, Artificial Sequence
  Description of Artificial Sequence: Synthetic oligonucleotide
cgcauagcuacaucagggc

SEQ ID NO: 1222143 - RNA, 19 nt, Artificial Sequence
  Description of Artificial Sequence: Synthetic oligonucleotide
acccaaugagcaccugcaa

SEQ ID NO: 1222144 - RNA, 19 nt, Artificial Sequence
  Description of Artificial Sequence: Synthetic oligonucleotide
cugccucuucguacacugc

SEQ ID NO: 1222145 - RNA, 19 nt, Artificial Sequence
  Description of Artificial Sequence: Synthetic oligonucleotide
caacugaaaauggacggcu

SEQ ID NO: 1222146 - RNA, 19 nt, Artificial Sequence
  Description of Artificial Sequence: Synthetic oligonucleotide
guccuggcgcagcaacaag

SEQ ID NO: 1222147 - RNA, 19 nt, Artificial Sequence
  Description of Artificial Sequence: Synthetic oligonucleotide
caauagaucuguccacagu

SEQ ID NO: 1222148 - RNA, 19 nt, Artificial Sequence
  Description of Artificial Sequence: Synthetic oligonucleotide
aaaguccgacgcgcuccag

SEQ ID NO: 1222149 - RNA, 19 nt, Artificial Sequence
  Description of Artificial Sequence: Synthetic oligonucleotide
guuuagcuacaaacagcuc

SEQ ID NO: 1222150 - RNA, 19 nt, Artificial Sequence
  Description of Artificial Sequence: Synthetic oligonucleotide
cgcccucucauaauauucc

SEQ ID NO: 1222151 - RNA, 19 nt, Artificial Sequence
  Description of Artificial Sequence: Synthetic oligonucleotide
acccgauguacaauagaau

SEQ ID NO: 1222152 - RNA, 19 nt, Artificial Sequence
  Description of Artificial Sequence: Synthetic oligonucleotide
ucucgccuugccacauaau

SEQ ID NO: 1222153 - RNA, 19 nt, Artificial Sequence
  Description of Artificial Sequence: Synthetic oligonucleotide
cuggugguacucuucgcua

SEQ ID NO: 1222154 - RNA, 19 nt, Artificial Sequence
  Description of Artificial Sequence: Synthetic oligonucleotide
agcuccgcugacugucccu

SEQ ID NO: 1222155 - RNA, 19 nt, Artificial Sequence
  Description of Artificial Sequence: Synthetic oligonucleotide
cucuucgcuaguggccagc

SEQ ID NO: 1222156 - RNA, 19 nt, Artificial Sequence
  Description of Artificial Sequence: Synthetic oligonucleotide
agaaggguucuccgcugua

SEQ ID NO: 1222157 - RNA, 19 nt, Artificial Sequence
  Description of Artificial Sequence: Synthetic oligonucleotide
gggcucuuugacccaauga

SEQ ID NO: 1222158 - RNA, 19 nt, Artificial Sequence
  Description of Artificial Sequence: Synthetic oligonucleotide
cuaacccgucugcuacuuc

SEQ ID NO: 1222159 - RNA, 19 nt, Artificial Sequence
  Description of Artificial Sequence: Synthetic oligonucleotide
auccugcuaagaugagcuu

SEQ ID NO: 1222160 - RNA, 19 nt, Artificial Sequence
  Description of Artificial Sequence: Synthetic oligonucleotide
auggcauguuuagcuacaa

SEQ ID NO: 1222161 - RNA, 19 nt, Artificial Sequence
  Description of Artificial Sequence: Synthetic oligonucleotide
gcauagcuacaucagggcu

SEQ ID NO: 1222162 - RNA, 19 nt, Artificial Sequence
  Description of Artificial Sequence: Synthetic oligonucleotide
cugaaaaguccgacgcgcu

SEQ ID NO: 1222163 - RNA, 19 nt, Artificial Sequence
  Description of Artificial Sequence: Synthetic oligonucleotide
augagcuuugguaccccau

SEQ ID NO: 1222164 - RNA, 19 nt, Artificial Sequence
  Description of Artificial Sequence: Synthetic oligonucleotide
cuguaacauuuucauggcu

SEQ ID NO: 1222165 - RNA, 19 nt, Artificial Sequence
  Description of Artificial Sequence: Synthetic oligonucleotide
cuggcgcagcaacaaguca

SEQ ID NO: 1222166 - RNA, 19 nt, Artificial Sequence
  Description of Artificial Sequence: Synthetic oligonucleotide
aagacaccuuguacccgau

SEQ ID NO: 1222167 - RNA, 19 nt, Artificial Sequence
  Description of Artificial Sequence: Synthetic oligonucleotide
uugacccaaugagcaccug

SEQ ID NO: 1222168 - RNA, 19 nt, Artificial Sequence
  Description of Artificial Sequence: Synthetic oligonucleotide
cccucugagggauacacua

SEQ ID NO: 1222169 - RNA, 19 nt, Artificial Sequence
  Description of Artificial Sequence: Synthetic oligonucleotide
gcuaguggccagccuggug

SEQ ID NO: 1222170 - RNA, 19 nt, Artificial Sequence
  Description of Artificial Sequence: Synthetic oligonucleotide
cuggugcauggcauguuua

SEQ ID NO: 1222171 - RNA, 19 nt, Artificial Sequence
  Description of Artificial Sequence: Synthetic oligonucleotide
cacauggccucuguaggaa

SEQ ID NO: 1222172 - RNA, 19 nt, Artificial Sequence
  Description of Artificial Sequence: Synthetic oligonucleotide
gagcgacugaaaaguccga

SEQ ID NO: 1222173 - RNA, 19 nt, Artificial Sequence
  Description of Artificial Sequence: Synthetic oligonucleotide
caagcauggcagagaauau

SEQ ID NO: 1222174 - RNA, 19 nt, Artificial Sequence
  Description of Artificial Sequence: Synthetic oligonucleotide
ggacggcuuuccuguaaac

SEQ ID NO: 1222175 - RNA, 19 nt, Artificial Sequence
  Description of Artificial Sequence: Synthetic oligonucleotide
uaccgaagggguggcucaa

SEQ ID NO: 1222176 - RNA, 19 nt, Artificial Sequence
  Description of Artificial Sequence: Synthetic oligonucleotide
gaggugugcaaaggcuucu

SEQ ID NO: 1222177 - RNA, 19 nt, Artificial Sequence
  Description of Artificial Sequence: Synthetic oligonucleotide
ccgauguacaauagaauau

SEQ ID NO: 1222178 - RNA, 19 nt, Artificial Sequence
  Description of Artificial Sequence: Synthetic oligonucleotide
cuccgcuguauuuuguauu

SEQ ID NO: 1222179 - RNA, 19 nt, Artificial Sequence
  Description of Artificial Sequence: Synthetic oligonucleotide
gcgcccucucauaauauuc

SEQ ID NO: 1222180 - RNA, 19 nt, Artificial Sequence
  Description of Artificial Sequence: Synthetic oligonucleotide
accacuccgauaagcccaa

SEQ ID NO: 1222181 - RNA, 19 nt, Artificial Sequence
  Description of Artificial Sequence: Synthetic oligonucleotide
ggguuccugcuccuuuuca

SEQ ID NO: 1222182 - RNA, 19 nt, Artificial Sequence
  Description of Artificial Sequence: Synthetic oligonucleotide
cuguaucaucuuccugaaa

SEQ ID NO: 1222183 - RNA, 19 nt, Artificial Sequence
  Description of Artificial Sequence: Synthetic oligonucleotide
ccucuucguacacugcaca

SEQ ID NO: 1222184 - RNA, 19 nt, Artificial Sequence
  Description of Artificial Sequence: Synthetic oligonucleotide
acauuguugcagaguccuu

SEQ ID NO: 1222185 - RNA, 19 nt, Artificial Sequence
  Description of Artificial Sequence: Synthetic oligonucleotide
gccucuucguacacugcac

SEQ ID NO: 1222186 - RNA, 19 nt, Artificial Sequence
  Description of Artificial Sequence: Synthetic oligonucleotide
ggugguacucuucgcuagu

SEQ ID NO: 1222187 - RNA, 19 nt, Artificial Sequence
  Description of Artificial Sequence: Synthetic oligonucleotide
ggcucuccaauagaucugu

SEQ ID NO: 1222188 - RNA, 19 nt, Artificial Sequence
  Description of Artificial Sequence: Synthetic oligonucleotide
cacugcuuauacugggcuu

SEQ ID NO: 1222189 - RNA, 19 nt, Artificial Sequence
  Description of Artificial Sequence: Synthetic oligonucleotide
gaaugcaagcaugguucuu

SEQ ID NO: 1222190 - RNA, 19 nt, Artificial Sequence
  Description of Artificial Sequence: Synthetic oligonucleotide
ccgucugcuacuucucaaa

SEQ ID NO: 1222191 - RNA, 19 nt, Artificial Sequence
  Description of Artificial Sequence: Synthetic oligonucleotide
accgaagggguggcucaau

SEQ ID NO: 1222192 - RNA, 19 nt, Artificial Sequence
  Description of Artificial Sequence: Synthetic oligonucleotide
caaugagcaccugcaacuu

SEQ ID NO: 1222193 - RNA, 19 nt, Artificial Sequence
  Description of Artificial Sequence: Synthetic oligonucleotide
cccucucauaauauucccu

SEQ ID NO: 1222194 - RNA, 19 nt, Artificial Sequence
  Description of Artificial Sequence: Synthetic oligonucleotide
ccuuaauuuccgagcgacu

SEQ ID NO: 1222195 - RNA, 19 nt, Artificial Sequence
  Description of Artificial Sequence: Synthetic oligonucleotide
cucagcgcccucucauaau

SEQ ID NO: 1222196 - RNA, 19 nt, Artificial Sequence
  Description of Artificial Sequence: Synthetic oligonucleotide
cuucucgccuugccacaua

SEQ ID NO: 1222197 - RNA, 19 nt, Artificial Sequence
  Description of Artificial Sequence: Synthetic oligonucleotide
cgaccaaagacaccuugua

SEQ ID NO: 1222198 - RNA, 19 nt, Artificial Sequence
  Description of Artificial Sequence: Synthetic oligonucleotide
ggcugccauaauccacaaa

SEQ ID NO: 1222199 - RNA, 19 nt, Artificial Sequence
  Description of Artificial Sequence: Synthetic oligonucleotide
cuucgcuaguggccagccu

SEQ ID NO: 1222200 - RNA, 19 nt, Artificial Sequence
  Description of Artificial Sequence: Synthetic oligonucleotide
cagcgcccucucauaauau

SEQ ID NO: 1222201 - RNA, 19 nt, Artificial Sequence
  Description of Artificial Sequence: Synthetic oligonucleotide
ggguucuccgcuguauuuu

SEQ ID NO: 1222202 - RNA, 19 nt, Artificial Sequence
  Description of Artificial Sequence: Synthetic oligonucleotide
gcucuccaauagaucuguc

SEQ ID NO: 1222203 - RNA, 19 nt, Artificial Sequence
  Description of Artificial Sequence: Synthetic oligonucleotide
gggauacacuacuggucuu

SEQ ID NO: 1222204 - RNA, 19 nt, Artificial Sequence
  Description of Artificial Sequence: Synthetic oligonucleotide
cacugccucuucguacacu

SEQ ID NO: 1222205 - RNA, 19 nt, Artificial Sequence
  Description of Artificial Sequence: Synthetic oligonucleotide
cucugcccucugagggaua

SEQ ID NO: 1222206 - RNA, 19 nt, Artificial Sequence
  Description of Artificial Sequence: Synthetic oligonucleotide
ccgcugacugucccuguaa

SEQ ID NO: 1222207 - RNA, 19 nt, Artificial Sequence
  Description of Artificial Sequence: Synthetic oligonucleotide
cccaagugagugggucauc

SEQ ID NO: 1222208 - RNA, 19 nt, Artificial Sequence
  Description of Artificial Sequence: Synthetic oligonucleotide
gucuaccgaagggguggcu

SEQ ID NO: 1222209 - RNA, 19 nt, Artificial Sequence
  Description of Artificial Sequence: Synthetic oligonucleotide
gcuaacccgucugcuacuu

SEQ ID NO: 1222210 - RNA, 19 nt, Artificial Sequence
  Description of Artificial Sequence: Synthetic oligonucleotide
ccgaagggguggcucaauu

SEQ ID NO: 1222211 - RNA, 19 nt, Artificial Sequence
  Description of Artificial Sequence: Synthetic oligonucleotide
ccgcuguauuuuguauucu

SEQ ID NO: 1222212 - RNA, 19 nt, Artificial Sequence
  Description of Artificial Sequence: Synthetic oligonucleotide
gcucgaccaaagacaccuu

SEQ ID NO: 1222213 - RNA, 19 nt, Artificial Sequence
  Description of Artificial Sequence: Synthetic oligonucleotide
cgcuaguggccagccuggu

SEQ ID NO: 1222214 - RNA, 19 nt, Artificial Sequence
  Description of Artificial Sequence: Synthetic oligonucleotide
ucuacaaagauccaagcag

SEQ ID NO: 1222215 - RNA, 19 nt, Artificial Sequence
  Description of Artificial Sequence: Synthetic oligonucleotide
uuuaguaaagcguucaugc

SEQ ID NO: 1222216 - RNA, 19 nt, Artificial Sequence
  Description of Artificial Sequence: Synthetic oligonucleotide
aaaguucccaaauuaaauc

SEQ ID NO: 1222217 - RNA, 19 nt, Artificial Sequence
  Description of Artificial Sequence: Synthetic oligonucleotide
aaaccacccagccauaacc

SEQ ID NO: 1222218 - RNA, 19 nt, Artificial Sequence
  Description of Artificial Sequence: Synthetic oligonucleotide
aauacuucuugcuuuuggg

SEQ ID NO: 1222219 - RNA, 19 nt, Artificial Sequence
  Description of Artificial Sequence: Synthetic oligonucleotide
aauuaaaucuuucugcuaa

SEQ ID NO: 1222220 - RNA, 19 nt, Artificial Sequence
  Description of Artificial Sequence: Synthetic oligonucleotide
uuuaccucgcuuaagaucu

SEQ ID NO: 1222221 - RNA, 19 nt, Artificial Sequence
  Description of Artificial Sequence: Synthetic oligonucleotide
uuuacgacgcucaauauca

SEQ ID NO: 1222222 - RNA, 19 nt, Artificial Sequence
  Description of Artificial Sequence: Synthetic oligonucleotide
ucuugcucgaaauugaaag

SEQ ID NO: 1222223 - RNA, 19 nt, Artificial Sequence
  Description of Artificial Sequence: Synthetic oligonucleotide
aauaucaaggcggagauca

SEQ ID NO: 1222224 - RNA, 19 nt, Artificial Sequence
  Description of Artificial Sequence: Synthetic oligonucleotide
aaagcguucaugcaauguc

SEQ ID NO: 1222225 - RNA, 19 nt, Artificial Sequence
  Description of Artificial Sequence: Synthetic oligonucleotide
uccuuaaucgaucauagga

SEQ ID NO: 1222226 - RNA, 19 nt, Artificial Sequence
  Description of Artificial Sequence: Synthetic oligonucleotide
gauccaagcaguuuggucc

SEQ ID NO: 1222227 - RNA, 19 nt, Artificial Sequence
  Description of Artificial Sequence: Synthetic oligonucleotide
aacuccacgugacacaugg

SEQ ID NO: 1222228 - RNA, 19 nt, Artificial Sequence
  Description of Artificial Sequence: Synthetic oligonucleotide
auaaccgccauccuuaauc

SEQ ID NO: 1222229 - RNA, 19 nt, Artificial Sequence
  Description of Artificial Sequence: Synthetic oligonucleotide
aacaggaucaucuuuguau

SEQ ID NO: 1222230 - RNA, 19 nt, Artificial Sequence
  Description of Artificial Sequence: Synthetic oligonucleotide
ugcaaugucauuccagagg

SEQ ID NO: 1222231 - RNA, 19 nt, Artificial Sequence
  Description of Artificial Sequence: Synthetic oligonucleotide
aaguucccaaauuaaaucu

SEQ ID NO: 1222232 - RNA, 19 nt, Artificial Sequence
  Description of Artificial Sequence: Synthetic oligonucleotide
agagcuacaaaguuuagga

SEQ ID NO: 1222233 - RNA, 19 nt, Artificial Sequence
  Description of Artificial Sequence: Synthetic oligonucleotide
uguaaagauaauagaauuc

SEQ ID NO: 1222234 - RNA, 19 nt, Artificial Sequence
  Description of Artificial Sequence: Synthetic oligonucleotide
aauugaaagguuccccgag

SEQ ID NO: 1222235 - RNA, 19 nt, Artificial Sequence
  Description of Artificial Sequence: Synthetic oligonucleotide
agaauaguuuccucugccc

SEQ ID NO: 1222236 - RNA, 19 nt, Artificial Sequence
  Description of Artificial Sequence: Synthetic oligonucleotide
gauuugucaaaacccgugg

SEQ ID NO: 1222237 - RNA, 19 nt, Artificial Sequence
  Description of Artificial Sequence: Synthetic oligonucleotide
acuggggaaaugucuaucc

SEQ ID NO: 1222238 - RNA, 19 nt, Artificial Sequence
  Description of Artificial Sequence: Synthetic oligonucleotide
auuuccggaacaugaaacg

SEQ ID NO: 1222239 - RNA, 19 nt, Artificial Sequence
  Description of Artificial Sequence: Synthetic oligonucleotide
ucugcuaauauuacuacau

SEQ ID NO: 1222240 - RNA, 19 nt, Artificial Sequence
  Description of Artificial Sequence: Synthetic oligonucleotide
ugacauacaaaacaaguuu

SEQ ID NO: 1222241 - RNA, 19 nt, Artificial Sequence
  Description of Artificial Sequence: Synthetic oligonucleotide
uagguauuuaguaaagcgu

SEQ ID NO: 1222242 - RNA, 19 nt, Artificial Sequence
  Description of Artificial Sequence: Synthetic oligonucleotide
uacuacauauccauuaaaa

SEQ ID NO: 1222243 - RNA, 19 nt, Artificial Sequence
  Description of Artificial Sequence: Synthetic oligonucleotide
ucaagaaucaaaguuccca

SEQ ID NO: 1222244 - RNA, 19 nt, Artificial Sequence
  Description of Artificial Sequence: Synthetic oligonucleotide
auugaaagguuccccgagc

SEQ ID NO: 1222245 - RNA, 19 nt, Artificial Sequence
  Description of Artificial Sequence: Synthetic oligonucleotide
uucuacaaagauccaagca

SEQ ID NO: 1222246 - RNA, 19 nt, Artificial Sequence
  Description of Artificial Sequence: Synthetic oligonucleotide
uuccucgugagucaaacca

SEQ ID NO: 1222247 - RNA, 19 nt, Artificial Sequence
  Description of Artificial Sequence: Synthetic oligonucleotide
guaaagauaauagaauuca

SEQ ID NO: 1222248 - RNA, 19 nt, Artificial Sequence
  Description of Artificial Sequence: Synthetic oligonucleotide
agcuuuguaggagugagac

SEQ ID NO: 1222249 - RNA, 19 nt, Artificial Sequence
  Description of Artificial Sequence: Synthetic oligonucleotide
accuagaccggucucuugc

SEQ ID NO: 1222250 - RNA, 19 nt, Artificial Sequence
  Description of Artificial Sequence: Synthetic oligonucleotide
acaugaaacggccccgacc

SEQ ID NO: 1222251 - RNA, 19 nt, Artificial Sequence
  Description of Artificial Sequence: Synthetic oligonucleotide
guuauuguugccagaauag

SEQ ID NO: 1222252 - RNA, 19 nt, Artificial Sequence
  Description of Artificial Sequence: Synthetic oligonucleotide
aaauugaaagguuccccga

SEQ ID NO: 1222253 - RNA, 19 nt, Artificial Sequence
  Description of Artificial Sequence: Synthetic oligonucleotide
ucaauaucaaggcggagau

SEQ ID NO: 1222254 - RNA, 19 nt, Artificial Sequence
  Description of Artificial Sequence: Synthetic oligonucleotide
uuuuacgacgcucaauauc

SEQ ID NO: 1222255 - RNA, 19 nt, Artificial Sequence
  Description of Artificial Sequence: Synthetic oligonucleotide
ugaccuuucucucgagugg

SEQ ID NO: 1222256 - RNA, 19 nt, Artificial Sequence
  Description of Artificial Sequence: Synthetic oligonucleotide
cuugcucgaaauugaaagg

SEQ ID NO: 1222257 - RNA, 19 nt, Artificial Sequence
  Description of Artificial Sequence: Synthetic oligonucleotide
ucaucaugcaaguaauacu

SEQ ID NO: 1222258 - RNA, 19 nt, Artificial Sequence
  Description of Artificial Sequence: Synthetic oligonucleotide
uccuccgugacauacaaaa

SEQ ID NO: 1222259 - RNA, 19 nt, Artificial Sequence
  Description of Artificial Sequence: Synthetic oligonucleotide
cauccuuaaucgaucauag

SEQ ID NO: 1222260 - RNA, 19 nt, Artificial Sequence
  Description of Artificial Sequence: Synthetic oligonucleotide
ucaguugaccuuucucucg

SEQ ID NO: 1222261 - RNA, 19 nt, Artificial Sequence
  Description of Artificial Sequence: Synthetic oligonucleotide
uucccggucaucaugcaag

SEQ ID NO: 1222262 - RNA, 19 nt, Artificial Sequence
  Description of Artificial Sequence: Synthetic oligonucleotide
uugucgugggcccauuugg

SEQ ID NO: 1222263 - RNA, 19 nt, Artificial Sequence
  Description of Artificial Sequence: Synthetic oligonucleotide
cucgaaauugaaagguucc

SEQ ID NO: 1222264 - RNA, 19 nt, Artificial Sequence
  Description of Artificial Sequence: Synthetic oligonucleotide
agaggauccaaagugaugu

SEQ ID NO: 1222265 - RNA, 19 nt, Artificial Sequence
  Description of Artificial Sequence: Synthetic oligonucleotide
acugccuucgccuucccgg

SEQ ID NO: 1222266 - RNA, 19 nt, Artificial Sequence
  Description of Artificial Sequence: Synthetic oligonucleotide
uuucauuuccucgugaguc

SEQ ID NO: 1222267 - RNA, 19 nt, Artificial Sequence
  Description of Artificial Sequence: Synthetic oligonucleotide
ugcaaguaauacuucuugc

SEQ ID NO: 1222268 - RNA, 19 nt, Artificial Sequence
  Description of Artificial Sequence: Synthetic oligonucleotide
uuucuacaaagauccaagc

SEQ ID NO: 1222269 - RNA, 19 nt, Artificial Sequence
  Description of Artificial Sequence: Synthetic oligonucleotide
uguacucuggaucccauuc

SEQ ID NO: 1222270 - RNA, 19 nt, Artificial Sequence
  Description of Artificial Sequence: Synthetic oligonucleotide
ucuugauuuaccucgcuua

SEQ ID NO: 1222271 - RNA, 19 nt, Artificial Sequence
  Description of Artificial Sequence: Synthetic oligonucleotide
aauccaccgacucucuuga

SEQ ID NO: 1222272 - RNA, 19 nt, Artificial Sequence
  Description of Artificial Sequence: Synthetic oligonucleotide
augcaaguaauacuucuug

SEQ ID NO: 1222273 - RNA, 19 nt, Artificial Sequence
  Description of Artificial Sequence: Synthetic oligonucleotide
uccgugacauacaaaacaa

SEQ ID NO: 1222274 - RNA, 19 nt, Artificial Sequence
  Description of Artificial Sequence: Synthetic oligonucleotide
ucgcuuaagaucucucucc

SEQ ID NO: 1222275 - RNA, 19 nt, Artificial Sequence
  Description of Artificial Sequence: Synthetic oligonucleotide
ugccuuucagccuuguagc

SEQ ID NO: 1222276 - RNA, 19 nt, Artificial Sequence
  Description of Artificial Sequence: Synthetic oligonucleotide
auccaagcaguuugguccc

SEQ ID NO: 1222277 - RNA, 19 nt, Artificial Sequence
  Description of Artificial Sequence: Synthetic oligonucleotide
uccggaacaugaaacggcc

SEQ ID NO: 1222278 - RNA, 19 nt, Artificial Sequence
  Description of Artificial Sequence: Synthetic oligonucleotide
gacgcucaauaucaaggcg

SEQ ID NO: 1222279 - RNA, 19 nt, Artificial Sequence
  Description of Artificial Sequence: Synthetic oligonucleotide
gagaaaucagacaagcgca

SEQ ID NO: 1222280 - RNA, 19 nt, Artificial Sequence
  Description of Artificial Sequence: Synthetic oligonucleotide
uuugucaaaacccguggua

SEQ ID NO: 1222281 - RNA, 19 nt, Artificial Sequence
  Description of Artificial Sequence: Synthetic oligonucleotide
ucuccacugaauuugucgu

SEQ ID NO: 1222282 - RNA, 19 nt, Artificial Sequence
  Description of Artificial Sequence: Synthetic oligonucleotide
gauuuccggaacaugaaac

SEQ ID NO: 1222283 - RNA, 19 nt, Artificial Sequence
  Description of Artificial Sequence: Synthetic oligonucleotide
uuccggaacaugaaacggc

SEQ ID NO: 1222284 - RNA, 19 nt, Artificial Sequence
  Description of Artificial Sequence: Synthetic oligonucleotide
gaauccaccgacucucuug

SEQ ID NO: 1222285 - RNA, 19 nt, Artificial Sequence
  Description of Artificial Sequence: Synthetic oligonucleotide
ucuuucauuuggacccacg

SEQ ID NO: 1222286 - RNA, 19 nt, Artificial Sequence
  Description of Artificial Sequence: Synthetic oligonucleotide
aaugucuauccuccugugu

SEQ ID NO: 1222287 - RNA, 19 nt, Artificial Sequence
  Description of Artificial Sequence: Synthetic oligonucleotide
aacaugaaacggccccgac

SEQ ID NO: 1222288 - RNA, 19 nt, Artificial Sequence
  Description of Artificial Sequence: Synthetic oligonucleotide
aaaugucuauccuccugug

SEQ ID NO: 1222289 - RNA, 19 nt, Artificial Sequence
  Description of Artificial Sequence: Synthetic oligonucleotide
gaagucucuuagaaaacag

SEQ ID NO: 1222290 - RNA, 19 nt, Artificial Sequence
  Description of Artificial Sequence: Synthetic oligonucleotide
uuauucacaugcuuuguuu

SEQ ID NO: 1222291 - RNA, 19 nt, Artificial Sequence
  Description of Artificial Sequence: Synthetic oligonucleotide
uugaaagguuccccgagcu

SEQ ID NO: 1222292 - RNA, 19 nt, Artificial Sequence
  Description of Artificial Sequence: Synthetic oligonucleotide
auuuaguaaagcguucaug

SEQ ID NO: 1222293 - RNA, 19 nt, Artificial Sequence
  Description of Artificial Sequence: Synthetic oligonucleotide
acgacgcucaauaucaagg

SEQ ID NO: 1222294 - RNA, 19 nt, Artificial Sequence
  Description of Artificial Sequence: Synthetic oligonucleotide
acccgugguacucuccucc

SEQ ID NO: 1222295 - RNA, 19 nt, Artificial Sequence
  Description of Artificial Sequence: Synthetic oligonucleotide
uuugucgugggcccauuug

SEQ ID NO: 1222296 - RNA, 19 nt, Artificial Sequence
  Description of Artificial Sequence: Synthetic oligonucleotide
ucuuugauccuuugugagu

SEQ ID NO: 1222297 - RNA, 19 nt, Artificial Sequence
  Description of Artificial Sequence: Synthetic oligonucleotide
guucaugcaaugucauucc

SEQ ID NO: 1222298 - RNA, 19 nt, Artificial Sequence
  Description of Artificial Sequence: Synthetic oligonucleotide
ucucccagugccuuucucc

SEQ ID NO: 1222299 - RNA, 19 nt, Artificial Sequence
  Description of Artificial Sequence: Synthetic oligonucleotide
ccuuaaucgaucauaggag

SEQ ID NO: 1222300 - RNA, 19 nt, Artificial Sequence
  Description of Artificial Sequence: Synthetic oligonucleotide
aguggcuagagucucggga

SEQ ID NO: 1222301 - RNA, 19 nt, Artificial Sequence
  Description of Artificial Sequence: Synthetic oligonucleotide
cacaaccccacaaaccacc

SEQ ID NO: 1222302 - RNA, 19 nt, Artificial Sequence
  Description of Artificial Sequence: Synthetic oligonucleotide
acgcucaauaucaaggcgg

SEQ ID NO: 1222303 - RNA, 19 nt, Artificial Sequence
  Description of Artificial Sequence: Synthetic oligonucleotide
gaaaucagacaagcgcagg

SEQ ID NO: 1222304 - RNA, 19 nt, Artificial Sequence
  Description of Artificial Sequence: Synthetic oligonucleotide
uauuuaguaaagcguucau

SEQ ID NO: 1222305 - RNA, 19 nt, Artificial Sequence
  Description of Artificial Sequence: Synthetic oligonucleotide
acaagcgcagggugcaugg

SEQ ID NO: 1222306 - RNA, 19 nt, Artificial Sequence
  Description of Artificial Sequence: Synthetic oligonucleotide
uugcucgaaauugaaaggu

SEQ ID NO: 1222307 - RNA, 19 nt, Artificial Sequence
  Description of Artificial Sequence: Synthetic oligonucleotide
auuugucaaaacccguggu

SEQ ID NO: 1222308 - RNA, 19 nt, Artificial Sequence
  Description of Artificial Sequence: Synthetic oligonucleotide
gucaucaugcaaguaauac

SEQ ID NO: 1222309 - RNA, 19 nt, Artificial Sequence
  Description of Artificial Sequence: Synthetic oligonucleotide
uucagaagucucuuagaaa

SEQ ID NO: 1222310 - RNA, 19 nt, Artificial Sequence
  Description of Artificial Sequence: Synthetic oligonucleotide
auuccagaggauccaaagu

SEQ ID NO: 1222311 - RNA, 19 nt, Artificial Sequence
  Description of Artificial Sequence: Synthetic oligonucleotide
cacacaaccccacaaacca

SEQ ID NO: 1222312 - RNA, 19 nt, Artificial Sequence
  Description of Artificial Sequence: Synthetic oligonucleotide
acuucaauguuuauucaca

SEQ ID NO: 1222313 - RNA, 19 nt, Artificial Sequence
  Description of Artificial Sequence: Synthetic oligonucleotide
agaagucucuuagaaaaca

SEQ ID NO: 1222314 - RNA, 19 nt, Artificial Sequence
  Description of Artificial Sequence: Synthetic oligonucleotide
aaucagacaagcgcagggu

SEQ ID NO: 1222315 - RNA, 19 nt, Artificial Sequence
  Description of Artificial Sequence: Synthetic oligonucleotide
uguagccagguucccgggg

SEQ ID NO: 1222316 - RNA, 19 nt, Artificial Sequence
  Description of Artificial Sequence: Synthetic oligonucleotide
gagucucgggaauccaccg

SEQ ID NO: 1222317 - RNA, 19 nt, Artificial Sequence
  Description of Artificial Sequence: Synthetic oligonucleotide
gaaaugucuauccuccugu

SEQ ID NO: 1222318 - RNA, 19 nt, Artificial Sequence
  Description of Artificial Sequence: Synthetic oligonucleotide
uacgacgcucaauaucaag

SEQ ID NO: 1222319 - RNA, 19 nt, Artificial Sequence
  Description of Artificial Sequence: Synthetic oligonucleotide
uuuggacccacgaagucuu

SEQ ID NO: 1222320 - RNA, 19 nt, Artificial Sequence
  Description of Artificial Sequence: Synthetic oligonucleotide
gucucuugcucuucggugc

SEQ ID NO: 1222321 - RNA, 19 nt, Artificial Sequence
  Description of Artificial Sequence: Synthetic oligonucleotide
cuuaagaucucucuccuua

SEQ ID NO: 1222322 - RNA, 19 nt, Artificial Sequence
  Description of Artificial Sequence: Synthetic oligonucleotide
auccuuaaucgaucauagg

SEQ ID NO: 1222323 - RNA, 19 nt, Artificial Sequence
  Description of Artificial Sequence: Synthetic oligonucleotide
uggggaaaugucuauccuc

SEQ ID NO: 1222324 - RNA, 19 nt, Artificial Sequence
  Description of Artificial Sequence: Synthetic oligonucleotide
aggauccaaagugauguuc

SEQ ID NO: 1222325 - RNA, 19 nt, Artificial Sequence
  Description of Artificial Sequence: Synthetic oligonucleotide
gucucuuagaaaacagacc

SEQ ID NO: 1222326 - RNA, 19 nt, Artificial Sequence
  Description of Artificial Sequence: Synthetic oligonucleotide
cuccgugacauacaaaaca

SEQ ID NO: 1222327 - RNA, 19 nt, Artificial Sequence
  Description of Artificial Sequence: Synthetic oligonucleotide
aggaucaucuuuguauuug

SEQ ID NO: 1222328 - RNA, 19 nt, Artificial Sequence
  Description of Artificial Sequence: Synthetic oligonucleotide
acgacugggaggaagaaga

SEQ ID NO: 1222329 - RNA, 19 nt, Artificial Sequence
  Description of Artificial Sequence: Synthetic oligonucleotide
gacuuuucauuuccucgug

SEQ ID NO: 1222330 - RNA, 19 nt, Artificial Sequence
  Description of Artificial Sequence: Synthetic oligonucleotide
ggucagaaaggccuuaaac

SEQ ID NO: 1222331 - RNA, 19 nt, Artificial Sequence
  Description of Artificial Sequence: Synthetic oligonucleotide
ucccucuugcucgaaauug

SEQ ID NO: 1222332 - RNA, 19 nt, Artificial Sequence
  Description of Artificial Sequence: Synthetic oligonucleotide
uuaagaucucucuccuuau

SEQ ID NO: 1222333 - RNA, 19 nt, Artificial Sequence
  Description of Artificial Sequence: Synthetic oligonucleotide
ucuauccuccuguguaucu

SEQ ID NO: 1222334 - RNA, 19 nt, Artificial Sequence
  Description of Artificial Sequence: Synthetic oligonucleotide
aagcguucaugcaauguca

SEQ ID NO: 1222335 - RNA, 19 nt, Artificial Sequence
  Description of Artificial Sequence: Synthetic oligonucleotide
ucugaauguacuggggaaa

SEQ ID NO: 1222336 - RNA, 19 nt, Artificial Sequence
  Description of Artificial Sequence: Synthetic oligonucleotide
uaaucgaucauaggaguuu

SEQ ID NO: 1222337 - RNA, 19 nt, Artificial Sequence
  Description of Artificial Sequence: Synthetic oligonucleotide
gcuaauauuacuacauauc

SEQ ID NO: 1222338 - RNA, 19 nt, Artificial Sequence
  Description of Artificial Sequence: Synthetic oligonucleotide
cucgcuuaagaucucucuc

SEQ ID NO: 1222339 - RNA, 19 nt, Artificial Sequence
  Description of Artificial Sequence: Synthetic oligonucleotide
uauccuccuguguaucucu

SEQ ID NO: 1222340 - RNA, 19 nt, Artificial Sequence
  Description of Artificial Sequence: Synthetic oligonucleotide
ugugggcuguaaacugucc

SEQ ID NO: 1222341 - RNA, 19 nt, Artificial Sequence
  Description of Artificial Sequence: Synthetic oligonucleotide
uagaccggucucuugcucu

SEQ ID NO: 1222342 - RNA, 19 nt, Artificial Sequence
  Description of Artificial Sequence: Synthetic oligonucleotide
ucgaguggcuagagucucg

SEQ ID NO: 1222343 - RNA, 19 nt, Artificial Sequence
  Description of Artificial Sequence: Synthetic oligonucleotide
aguaaagcguucaugcaau

SEQ ID NO: 1222344 - RNA, 19 nt, Artificial Sequence
  Description of Artificial Sequence: Synthetic oligonucleotide
auuugggacugguacugga

SEQ ID NO: 1222345 - RNA, 19 nt, Artificial Sequence
  Description of Artificial Sequence: Synthetic oligonucleotide
cuuaaucgaucauaggagu

SEQ ID NO: 1222346 - RNA, 19 nt, Artificial Sequence
  Description of Artificial Sequence: Synthetic oligonucleotide
caucaugcaaguaauacuu

SEQ ID NO: 1222347 - RNA, 19 nt, Artificial Sequence
  Description of Artificial Sequence: Synthetic oligonucleotide
ugcucgaaauugaaagguu

SEQ ID NO: 1222348 - RNA, 19 nt, Artificial Sequence
  Description of Artificial Sequence: Synthetic oligonucleotide
accgacucucuugauuuac

SEQ ID NO: 1222349 - RNA, 19 nt, Artificial Sequence
  Description of Artificial Sequence: Synthetic oligonucleotide
caugaaacggccccgaccu

SEQ ID NO: 1222350 - RNA, 19 nt, Artificial Sequence
  Description of Artificial Sequence: Synthetic oligonucleotide
acaaccccacaaaccaccc

SEQ ID NO: 1222351 - RNA, 19 nt, Artificial Sequence
  Description of Artificial Sequence: Synthetic oligonucleotide
aucaugcaaguaauacuuc

SEQ ID NO: 1222352 - RNA, 19 nt, Artificial Sequence
  Description of Artificial Sequence: Synthetic oligonucleotide
agaucaacaggaucaucuu

SEQ ID NO: 1222353 - RNA, 19 nt, Artificial Sequence
  Description of Artificial Sequence: Synthetic oligonucleotide
uggucccaaacugaggcga

SEQ ID NO: 1222354 - RNA, 19 nt, Artificial Sequence
  Description of Artificial Sequence: Synthetic oligonucleotide
agucuuugguccccagucu

SEQ ID NO: 1222355 - RNA, 19 nt, Artificial Sequence
  Description of Artificial Sequence: Synthetic oligonucleotide
ugaaagguuccccgagcuc

SEQ ID NO: 1222356 - RNA, 19 nt, Artificial Sequence
  Description of Artificial Sequence: Synthetic oligonucleotide
cuuauucagcugugggcug

SEQ ID NO: 1222357 - RNA, 19 nt, Artificial Sequence
  Description of Artificial Sequence: Synthetic oligonucleotide
ucgggaauccaccgacucu

SEQ ID NO: 1222358 - RNA, 19 nt, Artificial Sequence
  Description of Artificial Sequence: Synthetic oligonucleotide
agcagagcuacaaaguuua

SEQ ID NO: 1222359 - RNA, 19 nt, Artificial Sequence
  Description of Artificial Sequence: Synthetic oligonucleotide
ucgugggcccauuugggac

SEQ ID NO: 1222360 - RNA, 19 nt, Artificial Sequence
  Description of Artificial Sequence: Synthetic oligonucleotide
cuacaaagauccaagcagu

SEQ ID NO: 1222361 - RNA, 19 nt, Artificial Sequence
  Description of Artificial Sequence: Synthetic oligonucleotide
accggucucuugcucuucg

SEQ ID NO: 1222362 - RNA, 19 nt, Artificial Sequence
  Description of Artificial Sequence: Synthetic oligonucleotide
ggauuugucaaaacccgug

SEQ ID NO: 1222363 - RNA, 19 nt, Artificial Sequence
  Description of Artificial Sequence: Synthetic oligonucleotide
ucaaaacccgugguacucu

SEQ ID NO: 1222364 - RNA, 19 nt, Artificial Sequence
  Description of Artificial Sequence: Synthetic oligonucleotide
uuauucagcugugggcugu

SEQ ID NO: 1222365 - RNA, 19 nt, Artificial Sequence
  Description of Artificial Sequence: Synthetic oligonucleotide
uccaccgacucucuugauu

SEQ ID NO: 1222366 - RNA, 19 nt, Artificial Sequence
  Description of Artificial Sequence: Synthetic oligonucleotide
gucaaaccauguuuucuga

SEQ ID NO: 1222367 - RNA, 19 nt, Artificial Sequence
  Description of Artificial Sequence: Synthetic oligonucleotide
guaaagcguucaugcaaug

SEQ ID NO: 1222368 - RNA, 19 nt, Artificial Sequence
  Description of Artificial Sequence: Synthetic oligonucleotide
ucgugagucaaaccauguu

SEQ ID NO: 1222369 - RNA, 19 nt, Artificial Sequence
  Description of Artificial Sequence: Synthetic oligonucleotide
agcccgggagaaaucagac

SEQ ID NO: 1222370 - RNA, 19 nt, Artificial Sequence
  Description of Artificial Sequence: Synthetic oligonucleotide
gguacuggauuuccggaac

SEQ ID NO: 1222371 - RNA, 19 nt, Artificial Sequence
  Description of Artificial Sequence: Synthetic oligonucleotide
ggucucuugcucuucggug

SEQ ID NO: 1222372 - RNA, 19 nt, Artificial Sequence
  Description of Artificial Sequence: Synthetic oligonucleotide
ggaacaugaaacggccccg

SEQ ID NO: 1222373 - RNA, 19 nt, Artificial Sequence
  Description of Artificial Sequence: Synthetic oligonucleotide
cuugucacugccuucgccu

SEQ ID NO: 1222374 - RNA, 19 nt, Artificial Sequence
  Description of Artificial Sequence: Synthetic oligonucleotide
ucggugcuucuuuuguuuc

SEQ ID NO: 1222375 - RNA, 19 nt, Artificial Sequence
  Description of Artificial Sequence: Synthetic oligonucleotide
aguugaccuuucucucgag

SEQ ID NO: 1222376 - RNA, 19 nt, Artificial Sequence
  Description of Artificial Sequence: Synthetic oligonucleotide
acacaaccccacaaaccac

SEQ ID NO: 1222377 - RNA, 19 nt, Artificial Sequence
  Description of Artificial Sequence: Synthetic oligonucleotide
aaccgccauccuuaaucga

SEQ ID NO: 1222378 - RNA, 19 nt, Artificial Sequence
  Description of Artificial Sequence: Synthetic oligonucleotide
gcccuuauucagcuguggg

SEQ ID NO: 1222379 - RNA, 19 nt, Artificial Sequence
  Description of Artificial Sequence: Synthetic oligonucleotide
gaguggcuagagucucggg

SEQ ID NO: 1222380 - RNA, 19 nt, Artificial Sequence
  Description of Artificial Sequence: Synthetic oligonucleotide
gggagaaaucagacaagcg

SEQ ID NO: 1222381 - RNA, 19 nt, Artificial Sequence
  Description of Artificial Sequence: Synthetic oligonucleotide
agccauaaccgccauccuu

SEQ ID NO: 1222382 - RNA, 19 nt, Artificial Sequence
  Description of Artificial Sequence: Synthetic oligonucleotide
gauuuaccucgcuuaagau

SEQ ID NO: 1222383 - RNA, 19 nt, Artificial Sequence
  Description of Artificial Sequence: Synthetic oligonucleotide
gucaaaacccgugguacuc

SEQ ID NO: 1222384 - RNA, 19 nt, Artificial Sequence
  Description of Artificial Sequence: Synthetic oligonucleotide
cucuucggugcuucuuuug

SEQ ID NO: 1222385 - RNA, 19 nt, Artificial Sequence
  Description of Artificial Sequence: Synthetic oligonucleotide
caucuucuauuuguaaaga

SEQ ID NO: 1222386 - RNA, 19 nt, Artificial Sequence
  Description of Artificial Sequence: Synthetic oligonucleotide
uuacgacgcucaauaucaa

SEQ ID NO: 1222387 - RNA, 19 nt, Artificial Sequence
  Description of Artificial Sequence: Synthetic oligonucleotide
uucccggggacuuuucauu

SEQ ID NO: 1222388 - RNA, 19 nt, Artificial Sequence
  Description of Artificial Sequence: Synthetic oligonucleotide
cugugggcuguaaacuguc

SEQ ID NO: 1222389 - RNA, 19 nt, Artificial Sequence
  Description of Artificial Sequence: Synthetic oligonucleotide
uacuggggaaaugucuauc

SEQ ID NO: 1222390 - RNA, 19 nt, Artificial Sequence
  Description of Artificial Sequence: Synthetic oligonucleotide
caguuuggucccaaacuga

SEQ ID NO: 1222391 - RNA, 19 nt, Artificial Sequence
  Description of Artificial Sequence: Synthetic oligonucleotide
uggcccuuauucagcugug

SEQ ID NO: 1222392 - RNA, 19 nt, Artificial Sequence
  Description of Artificial Sequence: Synthetic oligonucleotide
aguucccaaauuaaaucuu

SEQ ID NO: 1222393 - RNA, 19 nt, Artificial Sequence
  Description of Artificial Sequence: Synthetic oligonucleotide
guauuugccuuucagccuu

SEQ ID NO: 1222394 - RNA, 19 nt, Artificial Sequence
  Description of Artificial Sequence: Synthetic oligonucleotide
gagucaaaccauguuuucu

SEQ ID NO: 1222395 - RNA, 19 nt, Artificial Sequence
  Description of Artificial Sequence: Synthetic oligonucleotide
guuccccgagcucugccgc

SEQ ID NO: 1222396 - RNA, 19 nt, Artificial Sequence
  Description of Artificial Sequence: Synthetic oligonucleotide
uggacccacgaagucuuug

SEQ ID NO: 1222397 - RNA, 19 nt, Artificial Sequence
  Description of Artificial Sequence: Synthetic oligonucleotide
accgccauccuuaaucgau

SEQ ID NO: 1222398 - RNA, 19 nt, Artificial Sequence
  Description of Artificial Sequence: Synthetic oligonucleotide
gaaggggacacaggugguc

SEQ ID NO: 1222399 - RNA, 19 nt, Artificial Sequence
  Description of Artificial Sequence: Synthetic oligonucleotide
guugccagaauaguuuccu

SEQ ID NO: 1222400 - RNA, 19 nt, Artificial Sequence
  Description of Artificial Sequence: Synthetic oligonucleotide
gaagucuuugguccccagu

SEQ ID NO: 1222401 - RNA, 19 nt, Artificial Sequence
  Description of Artificial Sequence: Synthetic oligonucleotide
cggaacaugaaacggcccc

SEQ ID NO: 1222402 - RNA, 19 nt, Artificial Sequence
  Description of Artificial Sequence: Synthetic oligonucleotide
ggacuuuucauuuccucgu

SEQ ID NO: 1222403 - RNA, 19 nt, Artificial Sequence
  Description of Artificial Sequence: Synthetic oligonucleotide
cuagaccggucucuugcuc

SEQ ID NO: 1222404 - RNA, 19 nt, Artificial Sequence
  Description of Artificial Sequence: Synthetic oligonucleotide
gcucgaaauugaaagguuc

SEQ ID NO: 1222405 - RNA, 19 nt, Artificial Sequence
  Description of Artificial Sequence: Synthetic oligonucleotide
guggcccuuauucagcugu

SEQ ID NO: 1222406 - RNA, 19 nt, Artificial Sequence
  Description of Artificial Sequence: Synthetic oligonucleotide
cacgaagucuuuggucccc

SEQ ID NO: 1222407 - RNA, 19 nt, Artificial Sequence
  Description of Artificial Sequence: Synthetic oligonucleotide
gcuagagucucgggaaucc

SEQ ID NO: 1222408 - RNA, 19 nt, Artificial Sequence
  Description of Artificial Sequence: Synthetic oligonucleotide
uuugguccccagucuggau

SEQ ID NO: 1222409 - RNA, 19 nt, Artificial Sequence
  Description of Artificial Sequence: Synthetic oligonucleotide
ugggaagcccagcccggga

SEQ ID NO: 1222410 - RNA, 19 nt, Artificial Sequence
  Description of Artificial Sequence: Synthetic oligonucleotide
ggauuuccggaacaugaaa

SEQ ID NO: 1222411 - RNA, 19 nt, Artificial Sequence
  Description of Artificial Sequence: Synthetic oligonucleotide
accucgcuuaagaucucuc

SEQ ID NO: 1222412 - RNA, 19 nt, Artificial Sequence
  Description of Artificial Sequence: Synthetic oligonucleotide
uaccucgcuuaagaucucu

SEQ ID NO: 1222413 - RNA, 19 nt, Artificial Sequence
  Description of Artificial Sequence: Synthetic oligonucleotide
acugaggcgaacacuucaa

SEQ ID NO: 1222414 - RNA, 19 nt, Artificial Sequence
  Description of Artificial Sequence: Synthetic oligonucleotide
aggaggaccuagaccgguc

SEQ ID NO: 1222415 - RNA, 19 nt, Artificial Sequence
  Description of Artificial Sequence: Synthetic oligonucleotide
auuugucgugggcccauuu

SEQ ID NO: 1222416 - RNA, 19 nt, Artificial Sequence
  Description of Artificial Sequence: Synthetic oligonucleotide
ugguggguugugggguggg

SEQ ID NO: 1222417 - RNA, 19 nt, Artificial Sequence
  Description of Artificial Sequence: Synthetic oligonucleotide
ccgugacauacaaaacaag

SEQ ID NO: 1222418 - RNA, 19 nt, Artificial Sequence
  Description of Artificial Sequence: Synthetic oligonucleotide
ggggacuuuucauuuccuc

SEQ ID NO: 1222419 - RNA, 19 nt, Artificial Sequence
  Description of Artificial Sequence: Synthetic oligonucleotide
uuaccucgcuuaagaucuc

SEQ ID NO: 1222420 - RNA, 19 nt, Artificial Sequence
  Description of Artificial Sequence: Synthetic oligonucleotide
ccucgugagucaaaccaug

SEQ ID NO: 1222421 - RNA, 19 nt, Artificial Sequence
  Description of Artificial Sequence: Synthetic oligonucleotide
caugcaaguaauacuucuu

SEQ ID NO: 1222422 - RNA, 19 nt, Artificial Sequence
  Description of Artificial Sequence: Synthetic oligonucleotide
ccggggacuuuucauuucc

SEQ ID NO: 1222423 - RNA, 19 nt, Artificial Sequence
  Description of Artificial Sequence: Synthetic oligonucleotide
ggcggagaucaacaggauc

SEQ ID NO: 1222424 - RNA, 19 nt, Artificial Sequence
  Description of Artificial Sequence: Synthetic oligonucleotide
cauaggaguuucuuuucau

SEQ ID NO: 1222425 - RNA, 19 nt, Artificial Sequence
  Description of Artificial Sequence: Synthetic oligonucleotide
caauaucaaggcggagauc

SEQ ID NO: 1222426 - RNA, 19 nt, Artificial Sequence
  Description of Artificial Sequence: Synthetic oligonucleotide
ccgguuucucuuuugaaaa

SEQ ID NO: 1222427 - RNA, 19 nt, Artificial Sequence
  Description of Artificial Sequence: Synthetic oligonucleotide
cagcccgggagaaaucaga

SEQ ID NO: 1222428 - RNA, 19 nt, Artificial Sequence
  Description of Artificial Sequence: Synthetic oligonucleotide
aauuugucgugggcccauu

SEQ ID NO: 1222429 - RNA, 19 nt, Artificial Sequence
  Description of Artificial Sequence: Synthetic oligonucleotide
aucgaucauaggaguuucu

SEQ ID NO: 1222430 - RNA, 19 nt, Artificial Sequence
  Description of Artificial Sequence: Synthetic oligonucleotide
gucuauccuccuguguauc

SEQ ID NO: 1222431 - RNA, 19 nt, Artificial Sequence
  Description of Artificial Sequence: Synthetic oligonucleotide
ccggucaucaugcaaguaa

SEQ ID NO: 1222432 - RNA, 19 nt, Artificial Sequence
  Description of Artificial Sequence: Synthetic oligonucleotide
agaccggucucuugcucuu

SEQ ID NO: 1222433 - RNA, 19 nt, Artificial Sequence
  Description of Artificial Sequence: Synthetic oligonucleotide
gauccaaagugauguucuu

SEQ ID NO: 1222434 - RNA, 19 nt, Artificial Sequence
  Description of Artificial Sequence: Synthetic oligonucleotide
cucgggguacuccucagcu

SEQ ID NO: 1222435 - RNA, 19 nt, Artificial Sequence
  Description of Artificial Sequence: Synthetic oligonucleotide
cucgugagucaaaccaugu

SEQ ID NO: 1222436 - RNA, 19 nt, Artificial Sequence
  Description of Artificial Sequence: Synthetic oligonucleotide
ccuccgugacauacaaaac

SEQ ID NO: 1222437 - RNA, 19 nt, Artificial Sequence
  Description of Artificial Sequence: Synthetic oligonucleotide
ccacgaagucuuugguccc

SEQ ID NO: 1222438 - RNA, 19 nt, Artificial Sequence
  Description of Artificial Sequence: Synthetic oligonucleotide
cucuuucauuuggacccac

SEQ ID NO: 1222439 - RNA, 19 nt, Artificial Sequence
  Description of Artificial Sequence: Synthetic oligonucleotide
acgaagucuuuggucccca

SEQ ID NO: 1222440 - RNA, 19 nt, Artificial Sequence
  Description of Artificial Sequence: Synthetic oligonucleotide
caacuccacgugacacaug

SEQ ID NO: 1222441 - RNA, 19 nt, Artificial Sequence
  Description of Artificial Sequence: Synthetic oligonucleotide
cuagagucucgggaaucca

SEQ ID NO: 1222442 - RNA, 19 nt, Artificial Sequence
  Description of Artificial Sequence: Synthetic oligonucleotide
ggcccuuauucagcugugg

SEQ ID NO: 1222443 - RNA, 19 nt, Artificial Sequence
  Description of Artificial Sequence: Synthetic oligonucleotide
cagcuuuguaggagugaga

SEQ ID NO: 1222444 - RNA, 19 nt, Artificial Sequence
  Description of Artificial Sequence: Synthetic oligonucleotide
cacgugacacauggcugug

SEQ ID NO: 1222445 - RNA, 19 nt, Artificial Sequence
  Description of Artificial Sequence: Synthetic oligonucleotide
ccggaacaugaaacggccc

SEQ ID NO: 1222446 - RNA, 19 nt, Artificial Sequence
  Description of Artificial Sequence: Synthetic oligonucleotide
ggggaaggcuccucggcca

SEQ ID NO: 1222447 - RNA, 19 nt, Artificial Sequence
  Description of Artificial Sequence: Synthetic oligonucleotide
gaagcccagcccgggagaa

SEQ ID NO: 1222448 - RNA, 19 nt, Artificial Sequence
  Description of Artificial Sequence: Synthetic oligonucleotide
cccagucuggauuugucaa

SEQ ID NO: 1222449 - RNA, 19 nt, Artificial Sequence
  Description of Artificial Sequence: Synthetic oligonucleotide
cucuugauuuaccucgcuu

SEQ ID NO: 1222450 - RNA, 19 nt, Artificial Sequence
  Description of Artificial Sequence: Synthetic oligonucleotide
gcgaacacuucaauguuua

SEQ ID NO: 1222451 - RNA, 19 nt, Artificial Sequence
  Description of Artificial Sequence: Synthetic oligonucleotide
caaccccacaaaccaccca

SEQ ID NO: 1222452 - RNA, 19 nt, Artificial Sequence
  Description of Artificial Sequence: Synthetic oligonucleotide
guacuggggaaaugucuau

SEQ ID NO: 1222453 - RNA, 19 nt, Artificial Sequence
  Description of Artificial Sequence: Synthetic oligonucleotide
ucgccuucccggucaucau

SEQ ID NO: 1222454 - RNA, 19 nt, Artificial Sequence
  Description of Artificial Sequence: Synthetic oligonucleotide
guucccggggacuuuucau

SEQ ID NO: 1222455 - RNA, 19 nt, Artificial Sequence
  Description of Artificial Sequence: Synthetic oligonucleotide
gggugggauuugcaggauc

SEQ ID NO: 1222456 - RNA, 19 nt, Artificial Sequence
  Description of Artificial Sequence: Synthetic oligonucleotide
uuggacccacgaagucuuu

SEQ ID NO: 1222457 - RNA, 19 nt, Artificial Sequence
  Description of Artificial Sequence: Synthetic oligonucleotide
ccauccuuaaucgaucaua

SEQ ID NO: 1222458 - RNA, 19 nt, Artificial Sequence
  Description of Artificial Sequence: Synthetic oligonucleotide
gaggauccaaagugauguu

SEQ ID NO: 1222459 - RNA, 19 nt, Artificial Sequence
  Description of Artificial Sequence: Synthetic oligonucleotide
ggaagcccagcccgggaga

SEQ ID NO: 1222460 - RNA, 19 nt, Artificial Sequence
  Description of Artificial Sequence: Synthetic oligonucleotide
ggagaucaacaggaucauc

SEQ ID NO: 1222461 - RNA, 19 nt, Artificial Sequence
  Description of Artificial Sequence: Synthetic oligonucleotide
ccgccauccuuaaucgauc

SEQ ID NO: 1222462 - RNA, 19 nt, Artificial Sequence
  Description of Artificial Sequence: Synthetic oligonucleotide
cgaguggcuagagucucgg

SEQ ID NO: 1222463 - RNA, 19 nt, Artificial Sequence
  Description of Artificial Sequence: Synthetic oligonucleotide
ccagcccgggagaaaucag

SEQ ID NO: 1222464 - RNA, 19 nt, Artificial Sequence
  Description of Artificial Sequence: Synthetic oligonucleotide
cgggaauccaccgacucuc

SEQ ID NO: 1222465 - RNA, 19 nt, Artificial Sequence
  Description of Artificial Sequence: Synthetic oligonucleotide
ccgccucuuucauuuggac

SEQ ID NO: 1222466 - RNA, 19 nt, Artificial Sequence
  Description of Artificial Sequence: Synthetic oligonucleotide
ggaggaccuagaccggucu

SEQ ID NO: 1222467 - RNA, 19 nt, Artificial Sequence
  Description of Artificial Sequence: Synthetic oligonucleotide
gguuguggggugggauuug

SEQ ID NO: 1222468 - RNA, 19 nt, Artificial Sequence
  Description of Artificial Sequence: Synthetic oligonucleotide
ccggucucuugcucuucgg

SEQ ID NO: 1222469 - RNA, 19 nt, Artificial Sequence
  Description of Artificial Sequence: Synthetic oligonucleotide
cgugacacauggcugugca

SEQ ID NO: 1222470 - RNA, 19 nt, Artificial Sequence
  Description of Artificial Sequence: Synthetic oligonucleotide
cgcucaauaucaaggcgga

SEQ ID NO: 1222471 - RNA, 19 nt, Artificial Sequence
  Description of Artificial Sequence: Synthetic oligonucleotide
ccagucuggauuugucaaa

SEQ ID NO: 1222472 - RNA, 19 nt, Artificial Sequence
  Description of Artificial Sequence: Synthetic oligonucleotide
auccaccgacucucuugau

SEQ ID NO: 1222473 - RNA, 19 nt, Artificial Sequence
  Description of Artificial Sequence: Synthetic oligonucleotide
ugggcccauuugggacugg

SEQ ID NO: 1222474 - RNA, 19 nt, Artificial Sequence
  Description of Artificial Sequence: Synthetic oligonucleotide
gcccgggagaaaucagaca

SEQ ID NO: 1222475 - RNA, 19 nt, Artificial Sequence
  Description of Artificial Sequence: Synthetic oligonucleotide
cgugagucaaaccauguuu

SEQ ID NO: 1222476 - RNA, 19 nt, Artificial Sequence
  Description of Artificial Sequence: Synthetic oligonucleotide
gaccggucucuugcucuuc

SEQ ID NO: 1222477 - RNA, 19 nt, Artificial Sequence
  Description of Artificial Sequence: Synthetic oligonucleotide
cugaggcgaacacuucaau

SEQ ID NO: 1222478 - RNA, 19 nt, Artificial Sequence
  Description of Artificial Sequence: Synthetic oligonucleotide
ccucgcuuaagaucucucu

SEQ ID NO: 1222479 - RNA, 19 nt, Artificial Sequence
  Description of Artificial Sequence: Synthetic oligonucleotide
ccaccgacucucuugauuu

SEQ ID NO: 1222480 - RNA, 19 nt, Artificial Sequence
  Description of Artificial Sequence: Synthetic oligonucleotide
agacaagcgcagggugcau

SEQ ID NO: 1222481 - RNA, 19 nt, Artificial Sequence
  Description of Artificial Sequence: Synthetic oligonucleotide
cacggccacggcucaucca

SEQ ID NO: 1222482 - RNA, 19 nt, Artificial Sequence
  Description of Artificial Sequence: Synthetic oligonucleotide
cugccuucgccuucccggu

SEQ ID NO: 1222483 - RNA, 19 nt, Artificial Sequence
  Description of Artificial Sequence: Synthetic oligonucleotide
gggguacuccucagcuuug

SEQ ID NO: 1222484 - RNA, 19 nt, Artificial Sequence
  Description of Artificial Sequence: Synthetic oligonucleotide
ccacggccacggcucaucc

SEQ ID NO: 1222485 - RNA, 19 nt, Artificial Sequence
  Description of Artificial Sequence: Synthetic oligonucleotide
aggcggagaucaacaggau

SEQ ID NO: 1222486 - RNA, 19 nt, Artificial Sequence
  Description of Artificial Sequence: Synthetic oligonucleotide
guguacucuggaucccauu

SEQ ID NO: 1222487 - RNA, 19 nt, Artificial Sequence
  Description of Artificial Sequence: Synthetic oligonucleotide
caccgacucucuugauuua

SEQ ID NO: 1222488 - RNA, 19 nt, Artificial Sequence
  Description of Artificial Sequence: Synthetic oligonucleotide
cccggggacuuuucauuuc

SEQ ID NO: 1222489 - RNA, 19 nt, Artificial Sequence
  Description of Artificial Sequence: Synthetic oligonucleotide
gugguacucuccucccuuu

SEQ ID NO: 1222490 - RNA, 19 nt, Artificial Sequence
  Description of Artificial Sequence: Synthetic oligonucleotide
ccagaggauccaaagugau

SEQ ID NO: 1222491 - RNA, 19 nt, Artificial Sequence
  Description of Artificial Sequence: Synthetic oligonucleotide
cauaaccgccauccuuaau

SEQ ID NO: 1222492 - RNA, 19 nt, Artificial Sequence
  Description of Artificial Sequence: Synthetic oligonucleotide
cccagcccgggagaaauca

SEQ ID NO: 1222493 - RNA, 19 nt, Artificial Sequence
  Description of Artificial Sequence: Synthetic oligonucleotide
cgccauccuuaaucgauca

SEQ ID NO: 1222494 - RNA, 19 nt, Artificial Sequence
  Description of Artificial Sequence: Synthetic oligonucleotide
ccauaaccgccauccuuaa

SEQ ID NO: 1222495 - RNA, 19 nt, Artificial Sequence
  Description of Artificial Sequence: Synthetic oligonucleotide
ggcgaacacuucaauguuu

SEQ ID NO: 1222496 - RNA, 19 nt, Artificial Sequence
  Description of Artificial Sequence: Synthetic oligonucleotide
cuucgccuucccggucauc

SEQ ID NO: 1222497 - RNA, 19 nt, Artificial Sequence
  Description of Artificial Sequence: Synthetic oligonucleotide
ccuagaccggucucuugcu

SEQ ID NO: 1222498 - RNA, 19 nt, Artificial Sequence
  Description of Artificial Sequence: Synthetic oligonucleotide
cagccauaaccgccauccu

SEQ ID NO: 1222499 - RNA, 19 nt, Artificial Sequence
  Description of Artificial Sequence: Synthetic oligonucleotide
gugggauuugcaggaucuu

SEQ ID NO: 1222500 - RNA, 19 nt, Artificial Sequence
  Description of Artificial Sequence: Synthetic oligonucleotide
cccagccauaaccgccauc

SEQ ID NO: 1222501 - RNA, 19 nt, Artificial Sequence
  Description of Artificial Sequence: Synthetic oligonucleotide
gccauccuuaaucgaucau

SEQ ID NO: 1222502 - RNA, 19 nt, Artificial Sequence
  Description of Artificial Sequence: Synthetic oligonucleotide
gcguucaugcaaugucauu

SEQ ID NO: 1222503 - RNA, 19 nt, Artificial Sequence
  Description of Artificial Sequence: Synthetic oligonucleotide
ggguuguggggugggauuu

SEQ ID NO: 1222504 - RNA, 19 nt, Artificial Sequence
  Description of Artificial Sequence: Synthetic oligonucleotide
caucaacaguggcccuuau

SEQ ID NO: 1222505 - RNA, 19 nt, Artificial Sequence
  Description of Artificial Sequence: Synthetic oligonucleotide
ggcccauuugggacuggua

SEQ ID NO: 1222506 - RNA, 19 nt, Artificial Sequence
  Description of Artificial Sequence: Synthetic oligonucleotide
gcucuucggugcuucuuuu

SEQ ID NO: 1222507 - RNA, 19 nt, Artificial Sequence
  Description of Artificial Sequence: Synthetic oligonucleotide
gggaauccaccgacucucu

SEQ ID NO: 1222508 - RNA, 19 nt, Artificial Sequence
  Description of Artificial Sequence: Synthetic oligonucleotide
cucugccgccucuuucauu

SEQ ID NO: 1222509 - RNA, 19 nt, Artificial Sequence
  Description of Artificial Sequence: Synthetic oligonucleotide
cgugggcccauuugggacu

SEQ ID NO: 1222510 - RNA, 19 nt, Artificial Sequence
  Description of Artificial Sequence: Synthetic oligonucleotide
ccaagcaguuuggucccaa

SEQ ID NO: 1222511 - RNA, 19 nt, Artificial Sequence
  Description of Artificial Sequence: Synthetic oligonucleotide
gugagacgacugggaggaa

SEQ ID NO: 1222512 - RNA, 19 nt, Artificial Sequence
  Description of Artificial Sequence: Synthetic oligonucleotide
ggccacggcucauccacuu

SEQ ID NO: 1222513 - RNA, 19 nt, Artificial Sequence
  Description of Artificial Sequence: Synthetic oligonucleotide
gcucugccgccucuuucau

SEQ ID NO: 1222514 - RNA, 19 nt, Artificial Sequence
  Description of Artificial Sequence: Synthetic oligonucleotide
ggccacggccacggcucau

SEQ ID NO: 1222515 - RNA, 19 nt, Artificial Sequence
  Description of Artificial Sequence: Synthetic oligonucleotide
acuaggacaacccugacgc

SEQ ID NO: 1222516 - RNA, 19 nt, Artificial Sequence
  Description of Artificial Sequence: Synthetic oligonucleotide
acaaaguaaauuaaggucc

SEQ ID NO: 1222517 - RNA, 19 nt, Artificial Sequence
  Description of Artificial Sequence: Synthetic oligonucleotide
aguaaauuaagguccaugg

SEQ ID NO: 1222518 - RNA, 19 nt, Artificial Sequence
  Description of Artificial Sequence: Synthetic oligonucleotide
cauaguuauaugcagacgc

SEQ ID NO: 1222519 - RNA, 19 nt, Artificial Sequence
  Description of Artificial Sequence: Synthetic oligonucleotide
cguaauaugaaguagaagc

SEQ ID NO: 1222520 - RNA, 19 nt, Artificial Sequence
  Description of Artificial Sequence: Synthetic oligonucleotide
uaacucaugguguaaggcg

SEQ ID NO: 1222521 - RNA, 19 nt, Artificial Sequence
  Description of Artificial Sequence: Synthetic oligonucleotide
aagucgaggaccgaggucg

SEQ ID NO: 1222522 - RNA, 19 nt, Artificial Sequence
  Description of Artificial Sequence: Synthetic oligonucleotide
auugauguucacuccgugc

SEQ ID NO: 1222523 - RNA, 19 nt, Artificial Sequence
  Description of Artificial Sequence: Synthetic oligonucleotide
agucaagucagccacgcgg

SEQ ID NO: 1222524 - RNA, 19 nt, Artificial Sequence
  Description of Artificial Sequence: Synthetic oligonucleotide
aaggcauaaucuuucacga

SEQ ID NO: 1222525 - RNA, 19 nt, Artificial Sequence
  Description of Artificial Sequence: Synthetic oligonucleotide
cauucguuugccuugaaac

SEQ ID NO: 1222526 - RNA, 19 nt, Artificial Sequence
  Description of Artificial Sequence: Synthetic oligonucleotide
ucuuaaugaugucacauuc

SEQ ID NO: 1222527 - RNA, 19 nt, Artificial Sequence
  Description of Artificial Sequence: Synthetic oligonucleotide
uccaauacgcacuauaguc

SEQ ID NO: 1222528 - RNA, 19 nt, Artificial Sequence
  Description of Artificial Sequence: Synthetic oligonucleotide
aacgaauccccauaacuca

SEQ ID NO: 1222529 - RNA, 19 nt, Artificial Sequence
  Description of Artificial Sequence: Synthetic oligonucleotide
ugucguacagggaauuccg

SEQ ID NO: 1222530 - RNA, 19 nt, Artificial Sequence
  Description of Artificial Sequence: Synthetic oligonucleotide
ucuauuguagggaucgaga

SEQ ID NO: 1222531 - RNA, 19 nt, Artificial Sequence
  Description of Artificial Sequence: Synthetic oligonucleotide
aauacaacgaauccccaua

SEQ ID NO: 1222532 - RNA, 19 nt, Artificial Sequence
  Description of Artificial Sequence: Synthetic oligonucleotide
ucaucauacuuuaaacaca

SEQ ID NO: 1222533 - RNA, 19 nt, Artificial Sequence
  Description of Artificial Sequence: Synthetic oligonucleotide
aauccaauacgcacuauag

SEQ ID NO: 1222534 - RNA, 19 nt, Artificial Sequence
  Description of Artificial Sequence: Synthetic oligonucleotide
uaaggucauccccaaaucc

SEQ ID NO: 1222535 - RNA, 19 nt, Artificial Sequence
  Description of Artificial Sequence: Synthetic oligonucleotide
uguacaaaggcauaaucuu

SEQ ID NO: 1222536 - RNA, 19 nt, Artificial Sequence
  Description of Artificial Sequence: Synthetic oligonucleotide
caccucaaacuuuaaaagg

SEQ ID NO: 1222537 - RNA, 19 nt, Artificial Sequence
  Description of Artificial Sequence: Synthetic oligonucleotide
agcuaaguuuaacagaaca

SEQ ID NO: 1222538 - RNA, 19 nt, Artificial Sequence
  Description of Artificial Sequence: Synthetic oligonucleotide
acaacgaauccccauaacu

SEQ ID NO: 1222539 - RNA, 19 nt, Artificial Sequence
  Description of Artificial Sequence: Synthetic oligonucleotide
acaaugaacacaguaggag

SEQ ID NO: 1222540 - RNA, 19 nt, Artificial Sequence
  Description of Artificial Sequence: Synthetic oligonucleotide
augucuauuguagggaucg

SEQ ID NO: 1222541 - RNA, 19 nt, Artificial Sequence
  Description of Artificial Sequence: Synthetic oligonucleotide
uucacgaugucacauucga

SEQ ID NO: 1222542 - RNA, 19 nt, Artificial Sequence
  Description of Artificial Sequence: Synthetic oligonucleotide
uccucuaugugcacaaagc

SEQ ID NO: 1222543 - RNA, 19 nt, Artificial Sequence
  Description of Artificial Sequence: Synthetic oligonucleotide
cacgaugucacauucgaug

SEQ ID NO: 1222544 - RNA, 19 nt, Artificial Sequence
  Description of Artificial Sequence: Synthetic oligonucleotide
agaagaauaaacaggagaa

SEQ ID NO: 1222545 - RNA, 19 nt, Artificial Sequence
  Description of Artificial Sequence: Synthetic oligonucleotide
gaauccccauaacucaugg

SEQ ID NO: 1222546 - RNA, 19 nt, Artificial Sequence
  Description of Artificial Sequence: Synthetic oligonucleotide
aguuauaugcagacgcagc

SEQ ID NO: 1222547 - RNA, 19 nt, Artificial Sequence
  Description of Artificial Sequence: Synthetic oligonucleotide
acgcacuauagucaggagg

SEQ ID NO: 1222548 - RNA, 19 nt, Artificial Sequence
  Description of Artificial Sequence: Synthetic oligonucleotide
acugucaugcccguaaccg

SEQ ID NO: 1222549 - RNA, 19 nt, Artificial Sequence
  Description of Artificial Sequence: Synthetic oligonucleotide
uuaacagaacaaugaacac

SEQ ID NO: 1222550 - RNA, 19 nt, Artificial Sequence
  Description of Artificial Sequence: Synthetic oligonucleotide
uguguacaaaggcauaauc

SEQ ID NO: 1222551 - RNA, 19 nt, Artificial Sequence
  Description of Artificial Sequence: Synthetic oligonucleotide
agaauaaacaggagaacag

SEQ ID NO: 1222552 - RNA, 19 nt, Artificial Sequence
  Description of Artificial Sequence: Synthetic oligonucleotide
cauaggaccgggcagcacg

SEQ ID NO: 1222553 - RNA, 19 nt, Artificial Sequence
  Description of Artificial Sequence: Synthetic oligonucleotide
cacauugauguucacuccg

SEQ ID NO: 1222554 - RNA, 19 nt, Artificial Sequence
  Description of Artificial Sequence: Synthetic oligonucleotide
uuucacgaugucacauucg

SEQ ID NO: 1222555 - RNA, 19 nt, Artificial Sequence
  Description of Artificial Sequence: Synthetic oligonucleotide
uucucaugcacaaccgcag

SEQ ID NO: 1222556 - RNA, 19 nt, Artificial Sequence
  Description of Artificial Sequence: Synthetic oligonucleotide
aaagucgaggaccgagguc

SEQ ID NO: 1222557 - RNA, 19 nt, Artificial Sequence
  Description of Artificial Sequence: Synthetic oligonucleotide
uauucucaugcacaaccgc

SEQ ID NO: 1222558 - RNA, 19 nt, Artificial Sequence
  Description of Artificial Sequence: Synthetic oligonucleotide
cauaacucaugguguaagg

SEQ ID NO: 1222559 - RNA, 19 nt, Artificial Sequence
  Description of Artificial Sequence: Synthetic oligonucleotide
guuguuguaauacaacgaa

SEQ ID NO: 1222560 - RNA, 19 nt, Artificial Sequence
  Description of Artificial Sequence: Synthetic oligonucleotide
uauuguagggaucgagaga

SEQ ID NO: 1222561 - RNA, 19 nt, Artificial Sequence
  Description of Artificial Sequence: Synthetic oligonucleotide
auacugcucauuauacugc

SEQ ID NO: 1222562 - RNA, 19 nt, Artificial Sequence
  Description of Artificial Sequence: Synthetic oligonucleotide
caacgaauccccauaacuc

SEQ ID NO: 1222563 - RNA, 19 nt, Artificial Sequence
  Description of Artificial Sequence: Synthetic oligonucleotide
uuaggagcagugauucuca

SEQ ID NO: 1222564 - RNA, 19 nt, Artificial Sequence
  Description of Artificial Sequence: Synthetic oligonucleotide
cagaagaauaaacaggaga

SEQ ID NO: 1222565 - RNA, 19 nt, Artificial Sequence
  Description of Artificial Sequence: Synthetic oligonucleotide
gaugggguaccacgaaggg

SEQ ID NO: 1222566 - RNA, 19 nt, Artificial Sequence
  Description of Artificial Sequence: Synthetic oligonucleotide
augucguacagggaauucc

SEQ ID NO: 1222567 - RNA, 19 nt, Artificial Sequence
  Description of Artificial Sequence: Synthetic oligonucleotide
ugggccauacuccucaaac

SEQ ID NO: 1222568 - RNA, 19 nt, Artificial Sequence
  Description of Artificial Sequence: Synthetic oligonucleotide
auagucaggaggcagggaa

SEQ ID NO: 1222569 - RNA, 19 nt, Artificial Sequence
  Description of Artificial Sequence: Synthetic oligonucleotide
acauucuagcaccuucccg

SEQ ID NO: 1222570 - RNA, 19 nt, Artificial Sequence
  Description of Artificial Sequence: Synthetic oligonucleotide
gugauucucaguaagguca

SEQ ID NO: 1222571 - RNA, 19 nt, Artificial Sequence
  Description of Artificial Sequence: Synthetic oligonucleotide
aggguguauucucaugcac

SEQ ID NO: 1222572 - RNA, 19 nt, Artificial Sequence
  Description of Artificial Sequence: Synthetic oligonucleotide
aacgcacagagccgagaac

SEQ ID NO: 1222573 - RNA, 19 nt, Artificial Sequence
  Description of Artificial Sequence: Synthetic oligonucleotide
aauuccgcauggcugcuga

SEQ ID NO: 1222574 - RNA, 19 nt, Artificial Sequence
  Description of Artificial Sequence: Synthetic oligonucleotide
uccaaugaacagcuucacc

SEQ ID NO: 1222575 - RNA, 19 nt, Artificial Sequence
  Description of Artificial Sequence: Synthetic oligonucleotide
ucuguguugucaaggcccc

SEQ ID NO: 1222576 - RNA, 19 nt, Artificial Sequence
  Description of Artificial Sequence: Synthetic oligonucleotide
ugagggacugaacgcacag

SEQ ID NO: 1222577 - RNA, 19 nt, Artificial Sequence
  Description of Artificial Sequence: Synthetic oligonucleotide
uaguuauaugcagacgcag

SEQ ID NO: 1222578 - RNA, 19 nt, Artificial Sequence
  Description of Artificial Sequence: Synthetic oligonucleotide
auaaucuuucacgauguca

SEQ ID NO: 1222579 - RNA, 19 nt, Artificial Sequence
  Description of Artificial Sequence: Synthetic oligonucleotide
acuauagucaggaggcagg

SEQ ID NO: 1222580 - RNA, 19 nt, Artificial Sequence
  Description of Artificial Sequence: Synthetic oligonucleotide
gaagaauaaacaggagaac

SEQ ID NO: 1222581 - RNA, 19 nt, Artificial Sequence
  Description of Artificial Sequence: Synthetic oligonucleotide
gauguugcccacauguaac

SEQ ID NO: 1222582 - RNA, 19 nt, Artificial Sequence
  Description of Artificial Sequence: Synthetic oligonucleotide
uuguuguaauacaacgaau

SEQ ID NO: 1222583 - RNA, 19 nt, Artificial Sequence
  Description of Artificial Sequence: Synthetic oligonucleotide
gcguauggcauccucagcg

SEQ ID NO: 1222584 - RNA, 19 nt, Artificial Sequence
  Description of Artificial Sequence: Synthetic oligonucleotide
ucgaagagugagcggaucu

SEQ ID NO: 1222585 - RNA, 19 nt, Artificial Sequence
  Description of Artificial Sequence: Synthetic oligonucleotide
uccccauaacucauggugu

SEQ ID NO: 1222586 - RNA, 19 nt, Artificial Sequence
  Description of Artificial Sequence: Synthetic oligonucleotide
aacucaugguguaaggcgu

SEQ ID NO: 1222587 - RNA, 19 nt, Artificial Sequence
  Description of Artificial Sequence: Synthetic oligonucleotide
uaauacaacgaauccccau

SEQ ID NO: 1222588 - RNA, 19 nt, Artificial Sequence
  Description of Artificial Sequence: Synthetic oligonucleotide
accgggcacucuuuggacc

SEQ ID NO: 1222589 - RNA, 19 nt, Artificial Sequence
  Description of Artificial Sequence: Synthetic oligonucleotide
uugccuugaaacucugugu

SEQ ID NO: 1222590 - RNA, 19 nt, Artificial Sequence
  Description of Artificial Sequence: Synthetic oligonucleotide
caguacaagcagcagcugc

SEQ ID NO: 1222591 - RNA, 19 nt, Artificial Sequence
  Description of Artificial Sequence: Synthetic oligonucleotide
uuauaugcagacgcagcug

SEQ ID NO: 1222592 - RNA, 19 nt, Artificial Sequence
  Description of Artificial Sequence: Synthetic oligonucleotide
ucguacagggaauuccgca

SEQ ID NO: 1222593 - RNA, 19 nt, Artificial Sequence
  Description of Artificial Sequence: Synthetic oligonucleotide
ucucaugcacaaccgcagc

SEQ ID NO: 1222594 - RNA, 19 nt, Artificial Sequence
  Description of Artificial Sequence: Synthetic oligonucleotide
aguaccgcgcccgauccgc

SEQ ID NO: 1222595 - RNA, 19 nt, Artificial Sequence
  Description of Artificial Sequence: Synthetic oligonucleotide
cucuuucccgcaccgauag

SEQ ID NO: 1222596 - RNA, 19 nt, Artificial Sequence
  Description of Artificial Sequence: Synthetic oligonucleotide
gucagcuaaguuuaacaga

SEQ ID NO: 1222597 - RNA, 19 nt, Artificial Sequence
  Description of Artificial Sequence: Synthetic oligonucleotide
cucuaugugcacaaagcca

SEQ ID NO: 1222598 - RNA, 19 nt, Artificial Sequence
  Description of Artificial Sequence: Synthetic oligonucleotide
agaugucuauuguagggau

SEQ ID NO: 1222599 - RNA, 19 nt, Artificial Sequence
  Description of Artificial Sequence: Synthetic oligonucleotide
auccaauacgcacuauagu

SEQ ID NO: 1222600 - RNA, 19 nt, Artificial Sequence
  Description of Artificial Sequence: Synthetic oligonucleotide
guacguguuguuguaauac

SEQ ID NO: 1222601 - RNA, 19 nt, Artificial Sequence
  Description of Artificial Sequence: Synthetic oligonucleotide
auacgcacuauagucagga

SEQ ID NO: 1222602 - RNA, 19 nt, Artificial Sequence
  Description of Artificial Sequence: Synthetic oligonucleotide
uuccugagggacugaacgc

SEQ ID NO: 1222603 - RNA, 19 nt, Artificial Sequence
  Description of Artificial Sequence: Synthetic oligonucleotide
agagugagcggaucucuug

SEQ ID NO: 1222604 - RNA, 19 nt, Artificial Sequence
  Description of Artificial Sequence: Synthetic oligonucleotide
gaggucggcucagugacgg

SEQ ID NO: 1222605 - RNA, 19 nt, Artificial Sequence
  Description of Artificial Sequence: Synthetic oligonucleotide
agagagagcacagccacca

SEQ ID NO: 1222606 - RNA, 19 nt, Artificial Sequence
  Description of Artificial Sequence: Synthetic oligonucleotide
cucuugguugguacaagug

SEQ ID NO: 1222607 - RNA, 19 nt, Artificial Sequence
  Description of Artificial Sequence: Synthetic oligonucleotide
aauccccauaacucauggu

SEQ ID NO: 1222608 - RNA, 19 nt, Artificial Sequence
  Description of Artificial Sequence: Synthetic oligonucleotide
gucacauucuagcaccuuc

SEQ ID NO: 1222609 - RNA, 19 nt, Artificial Sequence
  Description of Artificial Sequence: Synthetic oligonucleotide
uccccaaauccaauacgca

SEQ ID NO: 1222610 - RNA, 19 nt, Artificial Sequence
  Description of Artificial Sequence: Synthetic oligonucleotide
agagccgagaacgucccgg

SEQ ID NO: 1222611 - RNA, 19 nt, Artificial Sequence
  Description of Artificial Sequence: Synthetic oligonucleotide
guuauaugcagacgcagcu

SEQ ID NO: 1222612 - RNA, 19 nt, Artificial Sequence
  Description of Artificial Sequence: Synthetic oligonucleotide
uccaacaguggggacuggg

SEQ ID NO: 1222613 - RNA, 19 nt, Artificial Sequence
  Description of Artificial Sequence: Synthetic oligonucleotide
ugauucucaguaaggucau

SEQ ID NO: 1222614 - RNA, 19 nt, Artificial Sequence
  Description of Artificial Sequence: Synthetic oligonucleotide
ccaccucaaacuuuaaaag

SEQ ID NO: 1222615 - RNA, 19 nt, Artificial Sequence
  Description of Artificial Sequence: Synthetic oligonucleotide
uucccguacugcucgaaga

SEQ ID NO: 1222616 - RNA, 19 nt, Artificial Sequence
  Description of Artificial Sequence: Synthetic oligonucleotide
guccuaagccggcuggugg

SEQ ID NO: 1222617 - RNA, 19 nt, Artificial Sequence
  Description of Artificial Sequence: Synthetic oligonucleotide
uacugcucgaagagugagc

SEQ ID NO: 1222618 - RNA, 19 nt, Artificial Sequence
  Description of Artificial Sequence: Synthetic oligonucleotide
auacaacgaauccccauaa

SEQ ID NO: 1222619 - RNA, 19 nt, Artificial Sequence
  Description of Artificial Sequence: Synthetic oligonucleotide
cgcacuauagucaggaggc

SEQ ID NO: 1222620 - RNA, 19 nt, Artificial Sequence
  Description of Artificial Sequence: Synthetic oligonucleotide
uacaacgaauccccauaac

SEQ ID NO: 1222621 - RNA, 19 nt, Artificial Sequence
  Description of Artificial Sequence: Synthetic oligonucleotide
gugacgggugcgcaggccg

SEQ ID NO: 1222622 - RNA, 19 nt, Artificial Sequence
  Description of Artificial Sequence: Synthetic oligonucleotide
guaggcaucgagcgcuccg

SEQ ID NO: 1222623 - RNA, 19 nt, Artificial Sequence
  Description of Artificial Sequence: Synthetic oligonucleotide
acaacugcacgugcauucg

SEQ ID NO: 1222624 - RNA, 19 nt, Artificial Sequence
  Description of Artificial Sequence: Synthetic oligonucleotide
cccacauguaacuugguug

SEQ ID NO: 1222625 - RNA, 19 nt, Artificial Sequence
  Description of Artificial Sequence: Synthetic oligonucleotide
cacaaagucgaggaccgag

SEQ ID NO: 1222626 - RNA, 19 nt, Artificial Sequence
  Description of Artificial Sequence: Synthetic oligonucleotide
cagaacaaugaacacagua

SEQ ID NO: 1222627 - RNA, 19 nt, Artificial Sequence
  Description of Artificial Sequence: Synthetic oligonucleotide
guaaggucauccccaaauc

SEQ ID NO: 1222628 - RNA, 19 nt, Artificial Sequence
  Description of Artificial Sequence: Synthetic oligonucleotide
guagcccucuccaacagug

SEQ ID NO: 1222629 - RNA, 19 nt, Artificial Sequence
  Description of Artificial Sequence: Synthetic oligonucleotide
gcuuguaguaggcaucgag

SEQ ID NO: 1222630 - RNA, 19 nt, Artificial Sequence
  Description of Artificial Sequence: Synthetic oligonucleotide
auaguuauaugcagacgca

SEQ ID NO: 1222631 - RNA, 19 nt, Artificial Sequence
  Description of Artificial Sequence: Synthetic oligonucleotide
ucuuucacgaugucacauu

SEQ ID NO: 1222632 - RNA, 19 nt, Artificial Sequence
  Description of Artificial Sequence: Synthetic oligonucleotide
guaauaugaaguagaagcu

SEQ ID NO: 1222633 - RNA, 19 nt, Artificial Sequence
  Description of Artificial Sequence: Synthetic oligonucleotide
gaucccgcccguaauauga

SEQ ID NO: 1222634 - RNA, 19 nt, Artificial Sequence
  Description of Artificial Sequence: Synthetic oligonucleotide
gauagcagccgcucugguc

SEQ ID NO: 1222635 - RNA, 19 nt, Artificial Sequence
  Description of Artificial Sequence: Synthetic oligonucleotide
gaagcucuugguugguaca

SEQ ID NO: 1222636 - RNA, 19 nt, Artificial Sequence
  Description of Artificial Sequence: Synthetic oligonucleotide
guacaaguggggcugaugu

SEQ ID NO: 1222637 - RNA, 19 nt, Artificial Sequence
  Description of Artificial Sequence: Synthetic oligonucleotide
acauucgaugacugggcca

SEQ ID NO: 1222638 - RNA, 19 nt, Artificial Sequence
  Description of Artificial Sequence: Synthetic oligonucleotide
auguugcccacauguaacu

SEQ ID NO: 1222639 - RNA, 19 nt, Artificial Sequence
  Description of Artificial Sequence: Synthetic oligonucleotide
gucuauuguagggaucgag

SEQ ID NO: 1222640 - RNA, 19 nt, Artificial Sequence
  Description of Artificial Sequence: Synthetic oligonucleotide
accgauagcagccgcucug

SEQ ID NO: 1222641 - RNA, 19 nt, Artificial Sequence
  Description of Artificial Sequence: Synthetic oligonucleotide
agggaauuccgcauggcug

SEQ ID NO: 1222642 - RNA, 19 nt, Artificial Sequence
  Description of Artificial Sequence: Synthetic oligonucleotide
guacagggaauuccgcaug

SEQ ID NO: 1222643 - RNA, 19 nt, Artificial Sequence
  Description of Artificial Sequence: Synthetic oligonucleotide
acagagccgagaacguccc

SEQ ID NO: 1222644 - RNA, 19 nt, Artificial Sequence
  Description of Artificial Sequence: Synthetic oligonucleotide
cacuauagucaggaggcag

SEQ ID NO: 1222645 - RNA, 19 nt, Artificial Sequence
  Description of Artificial Sequence: Synthetic oligonucleotide
uccuaagccggcuggugga

SEQ ID NO: 1222646 - RNA, 19 nt, Artificial Sequence
  Description of Artificial Sequence: Synthetic oligonucleotide
gaacgucccggagaugggg

SEQ ID NO: 1222647 - RNA, 19 nt, Artificial Sequence
  Description of Artificial Sequence: Synthetic oligonucleotide
uuguccucuaugugcacaa

SEQ ID NO: 1222648 - RNA, 19 nt, Artificial Sequence
  Description of Artificial Sequence: Synthetic oligonucleotide
ucaagucagccacgcggcc

SEQ ID NO: 1222649 - RNA, 19 nt, Artificial Sequence
  Description of Artificial Sequence: Synthetic oligonucleotide
aaccgcagcuuggaauuuc

SEQ ID NO: 1222650 - RNA, 19 nt, Artificial Sequence
  Description of Artificial Sequence: Synthetic oligonucleotide
guaaauuaagguccauggu

SEQ ID NO: 1222651 - RNA, 19 nt, Artificial Sequence
  Description of Artificial Sequence: Synthetic oligonucleotide
caugcacaaccgcagcuug

SEQ ID NO: 1222652 - RNA, 19 nt, Artificial Sequence
  Description of Artificial Sequence: Synthetic oligonucleotide
cuccgugcagcuuguagug

SEQ ID NO: 1222653 - RNA, 19 nt, Artificial Sequence
  Description of Artificial Sequence: Synthetic oligonucleotide
uaacuugguugaagcuuug

SEQ ID NO: 1222654 - RNA, 19 nt, Artificial Sequence
  Description of Artificial Sequence: Synthetic oligonucleotide
guguacaaaggcauaaucu

SEQ ID NO: 1222655 - RNA, 19 nt, Artificial Sequence
  Description of Artificial Sequence: Synthetic oligonucleotide
cugaaggcggcaacagaug

SEQ ID NO: 1222656 - RNA, 19 nt, Artificial Sequence
  Description of Artificial Sequence: Synthetic oligonucleotide
uacgcacuauagucaggag

SEQ ID NO: 1222657 - RNA, 19 nt, Artificial Sequence
  Description of Artificial Sequence: Synthetic oligonucleotide
ugcguauggcauccucagc

SEQ ID NO: 1222658 - RNA, 19 nt, Artificial Sequence
  Description of Artificial Sequence: Synthetic oligonucleotide
gcaucgagcgcuccguacg

SEQ ID NO: 1222659 - RNA, 19 nt, Artificial Sequence
  Description of Artificial Sequence: Synthetic oligonucleotide
cucuggucucccaucccgg

SEQ ID NO: 1222660 - RNA, 19 nt, Artificial Sequence
  Description of Artificial Sequence: Synthetic oligonucleotide
gaucgagagagguggaggu

SEQ ID NO: 1222661 - RNA, 19 nt, Artificial Sequence
  Description of Artificial Sequence: Synthetic oligonucleotide
caugcccguaaccguagcc

SEQ ID NO: 1222662 - RNA, 19 nt, Artificial Sequence
  Description of Artificial Sequence: Synthetic oligonucleotide
acugccucauaggaccggg

SEQ ID NO: 1222663 - RNA, 19 nt, Artificial Sequence
  Description of Artificial Sequence: Synthetic oligonucleotide
auuucagcccacacacauc

SEQ ID NO: 1222664 - RNA, 19 nt, Artificial Sequence
  Description of Artificial Sequence: Synthetic oligonucleotide
guacugcucgaagagugag

SEQ ID NO: 1222665 - RNA, 19 nt, Artificial Sequence
  Description of Artificial Sequence: Synthetic oligonucleotide
ucacugucaugcccguaac

SEQ ID NO: 1222666 - RNA, 19 nt, Artificial Sequence
  Description of Artificial Sequence: Synthetic oligonucleotide
ggaucgagagagguggagg

SEQ ID NO: 1222667 - RNA, 19 nt, Artificial Sequence
  Description of Artificial Sequence: Synthetic oligonucleotide
gaccccacuaggacaaccc

SEQ ID NO: 1222668 - RNA, 19 nt, Artificial Sequence
  Description of Artificial Sequence: Synthetic oligonucleotide
auaugaaguagaagcugca

SEQ ID NO: 1222669 - RNA, 19 nt, Artificial Sequence
  Description of Artificial Sequence: Synthetic oligonucleotide
cuucccguacugcucgaag

SEQ ID NO: 1222670 - RNA, 19 nt, Artificial Sequence
  Description of Artificial Sequence: Synthetic oligonucleotide
agcgcuuguaguaggcauc

SEQ ID NO: 1222671 - RNA, 19 nt, Artificial Sequence
  Description of Artificial Sequence: Synthetic oligonucleotide
ugccacugccucauaggac

SEQ ID NO: 1222672 - RNA, 19 nt, Artificial Sequence
  Description of Artificial Sequence: Synthetic oligonucleotide
agccacgcggcccgaacgg

SEQ ID NO: 1222673 - RNA, 19 nt, Artificial Sequence
  Description of Artificial Sequence: Synthetic oligonucleotide
caacccugacgcccaaggg

SEQ ID NO: 1222674 - RNA, 19 nt, Artificial Sequence
  Description of Artificial Sequence: Synthetic oligonucleotide
auuaagguccaugguuccu

SEQ ID NO: 1222675 - RNA, 19 nt, Artificial Sequence
  Description of Artificial Sequence: Synthetic oligonucleotide
aucuuucacgaugucacau

SEQ ID NO: 1222676 - RNA, 19 nt, Artificial Sequence
  Description of Artificial Sequence: Synthetic oligonucleotide
cacuccgugcagcuuguag

SEQ ID NO: 1222677 - RNA, 19 nt, Artificial Sequence
  Description of Artificial Sequence: Synthetic oligonucleotide
acacagccgcacaaagucg

SEQ ID NO: 1222678 - RNA, 19 nt, Artificial Sequence
  Description of Artificial Sequence: Synthetic oligonucleotide
ucgagcgcuccguacgugu

SEQ ID NO: 1222679 - RNA, 19 nt, Artificial Sequence
  Description of Artificial Sequence: Synthetic oligonucleotide
cagguugcguauggcaucc

SEQ ID NO: 1222680 - RNA, 19 nt, Artificial Sequence
  Description of Artificial Sequence: Synthetic oligonucleotide
ucacgaugucacauucgau

SEQ ID NO: 1222681 - RNA, 19 nt, Artificial Sequence
  Description of Artificial Sequence: Synthetic oligonucleotide
agugacgggugcgcaggcc

SEQ ID NO: 1222682 - RNA, 19 nt, Artificial Sequence
  Description of Artificial Sequence: Synthetic oligonucleotide
cacugucaugcccguaacc

SEQ ID NO: 1222683 - RNA, 19 nt, Artificial Sequence
  Description of Artificial Sequence: Synthetic oligonucleotide
uaagccggcugguggacaa

SEQ ID NO: 1222684 - RNA, 19 nt, Artificial Sequence
  Description of Artificial Sequence: Synthetic oligonucleotide
gcauaguuauaugcagacg

SEQ ID NO: 1222685 - RNA, 19 nt, Artificial Sequence
  Description of Artificial Sequence: Synthetic oligonucleotide
uaccacgaaggguguauuc

SEQ ID NO: 1222686 - RNA, 19 nt, Artificial Sequence
  Description of Artificial Sequence: Synthetic oligonucleotide
cauguguacaaaggcauaa

SEQ ID NO: 1222687 - RNA, 19 nt, Artificial Sequence
  Description of Artificial Sequence: Synthetic oligonucleotide
guugcguauggcauccuca

SEQ ID NO: 1222688 - RNA, 19 nt, Artificial Sequence
  Description of Artificial Sequence: Synthetic oligonucleotide
ccggagaugggguaccacg

SEQ ID NO: 1222689 - RNA, 19 nt, Artificial Sequence
  Description of Artificial Sequence: Synthetic oligonucleotide
acgugcauucguuugccuu

SEQ ID NO: 1222690 - RNA, 19 nt, Artificial Sequence
  Description of Artificial Sequence: Synthetic oligonucleotide
auaggaccgggcagcacgg

SEQ ID NO: 1222691 - RNA, 19 nt, Artificial Sequence
  Description of Artificial Sequence: Synthetic oligonucleotide
ucaugcacaaccgcagcuu

SEQ ID NO: 1222692 - RNA, 19 nt, Artificial Sequence
  Description of Artificial Sequence: Synthetic oligonucleotide
caagucagccacgcggccc

SEQ ID NO: 1222693 - RNA, 19 nt, Artificial Sequence
  Description of Artificial Sequence: Synthetic oligonucleotide
cacagccgcacaaagucga

SEQ ID NO: 1222694 - RNA, 19 nt, Artificial Sequence
  Description of Artificial Sequence: Synthetic oligonucleotide
gauccgcauacugcucccg

SEQ ID NO: 1222695 - RNA, 19 nt, Artificial Sequence
  Description of Artificial Sequence: Synthetic oligonucleotide
uucacuccgugcagcuugu

SEQ ID NO: 1222696 - RNA, 19 nt, Artificial Sequence
  Description of Artificial Sequence: Synthetic oligonucleotide
ucggcucagugacgggugc

SEQ ID NO: 1222697 - RNA, 19 nt, Artificial Sequence
  Description of Artificial Sequence: Synthetic oligonucleotide
ccacauguaacuugguuga

SEQ ID NO: 1222698 - RNA, 19 nt, Artificial Sequence
  Description of Artificial Sequence: Synthetic oligonucleotide
uccucagcggccgucuugu

SEQ ID NO: 1222699 - RNA, 19 nt, Artificial Sequence
  Description of Artificial Sequence: Synthetic oligonucleotide
uccgaucccgcccguaaua

SEQ ID NO: 1222700 - RNA, 19 nt, Artificial Sequence
  Description of Artificial Sequence: Synthetic oligonucleotide
ugggagaacagagcaugaa

SEQ ID NO: 1222701 - RNA, 19 nt, Artificial Sequence
  Description of Artificial Sequence: Synthetic oligonucleotide
acgaaggguguauucucau

SEQ ID NO: 1222702 - RNA, 19 nt, Artificial Sequence
  Description of Artificial Sequence: Synthetic oligonucleotide
uaccgggcacucuuuggac

SEQ ID NO: 1222703 - RNA, 19 nt, Artificial Sequence
  Description of Artificial Sequence: Synthetic oligonucleotide
acugcacgugcauucguuu

SEQ ID NO: 1222704 - RNA, 19 nt, Artificial Sequence
  Description of Artificial Sequence: Synthetic oligonucleotide
ugacgcccaagggagucag

SEQ ID NO: 1222705 - RNA, 19 nt, Artificial Sequence
  Description of Artificial Sequence: Synthetic oligonucleotide
ucccgcccguaauaugaag

SEQ ID NO: 1222706 - RNA, 19 nt, Artificial Sequence
  Description of Artificial Sequence: Synthetic oligonucleotide
aggcauaaucuuucacgau

SEQ ID NO: 1222707 - RNA, 19 nt, Artificial Sequence
  Description of Artificial Sequence: Synthetic oligonucleotide
ucgaggaccgaggucggcu

SEQ ID NO: 1222708 - RNA, 19 nt, Artificial Sequence
  Description of Artificial Sequence: Synthetic oligonucleotide
cgcacaaagucgaggaccg

SEQ ID NO: 1222709 - RNA, 19 nt, Artificial Sequence
  Description of Artificial Sequence: Synthetic oligonucleotide
cuuuggaccagugccccuc

SEQ ID NO: 1222710 - RNA, 19 nt, Artificial Sequence
  Description of Artificial Sequence: Synthetic oligonucleotide
cuaccgggcacucuuugga

SEQ ID NO: 1222711 - RNA, 19 nt, Artificial Sequence
  Description of Artificial Sequence: Synthetic oligonucleotide
cucaugguguaaggcgugc

SEQ ID NO: 1222712 - RNA, 19 nt, Artificial Sequence
  Description of Artificial Sequence: Synthetic oligonucleotide
cagcuaaguuuaacagaac

SEQ ID NO: 1222713 - RNA, 19 nt, Artificial Sequence
  Description of Artificial Sequence: Synthetic oligonucleotide
ccccugauggccuccacgg

SEQ ID NO: 1222714 - RNA, 19 nt, Artificial Sequence
  Description of Artificial Sequence: Synthetic oligonucleotide
aacgucccggagauggggu

SEQ ID NO: 1222715 - RNA, 19 nt, Artificial Sequence
  Description of Artificial Sequence: Synthetic oligonucleotide
uacaaguggggcugauguu

SEQ ID NO: 1222716 - RNA, 19 nt, Artificial Sequence
  Description of Artificial Sequence: Synthetic oligonucleotide
ccguacugcucgaagagug

SEQ ID NO: 1222717 - RNA, 19 nt, Artificial Sequence
  Description of Artificial Sequence: Synthetic oligonucleotide
cuagcaccuucccguacug

SEQ ID NO: 1222718 - RNA, 19 nt, Artificial Sequence
  Description of Artificial Sequence: Synthetic oligonucleotide
guaauacaacgaaucccca

SEQ ID NO: 1222719 - RNA, 19 nt, Artificial Sequence
  Description of Artificial Sequence: Synthetic oligonucleotide
gaguaccgcgcccgauccg

SEQ ID NO: 1222720 - RNA, 19 nt, Artificial Sequence
  Description of Artificial Sequence: Synthetic oligonucleotide
ggacuuggagucucucacc

SEQ ID NO: 1222721 - RNA, 19 nt, Artificial Sequence
  Description of Artificial Sequence: Synthetic oligonucleotide
gcaacagaugucuauugua

SEQ ID NO: 1222722 - RNA, 19 nt, Artificial Sequence
  Description of Artificial Sequence: Synthetic oligonucleotide
aacugcacgugcauucguu

SEQ ID NO: 1222723 - RNA, 19 nt, Artificial Sequence
  Description of Artificial Sequence: Synthetic oligonucleotide
uaggcaucgagcgcuccgu

SEQ ID NO: 1222724 - RNA, 19 nt, Artificial Sequence
  Description of Artificial Sequence: Synthetic oligonucleotide
auguguacaaaggcauaau

SEQ ID NO: 1222725 - RNA, 19 nt, Artificial Sequence
  Description of Artificial Sequence: Synthetic oligonucleotide
gagcgcuccguacguguug

SEQ ID NO: 1222726 - RNA, 19 nt, Artificial Sequence
  Description of Artificial Sequence: Synthetic oligonucleotide
uaggaggacuuggagucuc

SEQ ID NO: 1222727 - RNA, 19 nt, Artificial Sequence
  Description of Artificial Sequence: Synthetic oligonucleotide
acgcccaagggagucagcu

SEQ ID NO: 1222728 - RNA, 19 nt, Artificial Sequence
  Description of Artificial Sequence: Synthetic oligonucleotide
agcucuugguugguacaag

SEQ ID NO: 1222729 - RNA, 19 nt, Artificial Sequence
  Description of Artificial Sequence: Synthetic oligonucleotide
caugucguacagggaauuc

SEQ ID NO: 1222730 - RNA, 19 nt, Artificial Sequence
  Description of Artificial Sequence: Synthetic oligonucleotide
cagccacgcggcccgaacg

SEQ ID NO: 1222731 - RNA, 19 nt, Artificial Sequence
  Description of Artificial Sequence: Synthetic oligonucleotide
gaccgaggucggcucagug

SEQ ID NO: 1222732 - RNA, 19 nt, Artificial Sequence
  Description of Artificial Sequence: Synthetic oligonucleotide
ugucuauuguagggaucga

SEQ ID NO: 1222733 - RNA, 19 nt, Artificial Sequence
  Description of Artificial Sequence: Synthetic oligonucleotide
aucgagagagguggaggug

SEQ ID NO: 1222734 - RNA, 19 nt, Artificial Sequence
  Description of Artificial Sequence: Synthetic oligonucleotide
agaacgucccggagauggg

SEQ ID NO: 1222735 - RNA, 19 nt, Artificial Sequence
  Description of Artificial Sequence: Synthetic oligonucleotide
augggguaccacgaagggu

SEQ ID NO: 1222736 - RNA, 19 nt, Artificial Sequence
  Description of Artificial Sequence: Synthetic oligonucleotide
aggaccgggcagcacggca

SEQ ID NO: 1222737 - RNA, 19 nt, Artificial Sequence
  Description of Artificial Sequence: Synthetic oligonucleotide
cuuguccucuaugugcaca

SEQ ID NO: 1222738 - RNA, 19 nt, Artificial Sequence
  Description of Artificial Sequence: Synthetic oligonucleotide
gagccgagaacgucccgga

SEQ ID NO: 1222739 - RNA, 19 nt, Artificial Sequence
  Description of Artificial Sequence: Synthetic oligonucleotide
gucaugcccguaaccguag

SEQ ID NO: 1222740 - RNA, 19 nt, Artificial Sequence
  Description of Artificial Sequence: Synthetic oligonucleotide
gucguacagggaauuccgc

SEQ ID NO: 1222741 - RNA, 19 nt, Artificial Sequence
  Description of Artificial Sequence: Synthetic oligonucleotide
acucaugguguaaggcgug

SEQ ID NO: 1222742 - RNA, 19 nt, Artificial Sequence
  Description of Artificial Sequence: Synthetic oligonucleotide
cagugccccucuuucccgc

SEQ ID NO: 1222743 - RNA, 19 nt, Artificial Sequence
  Description of Artificial Sequence: Synthetic oligonucleotide
gcgcuuguaguaggcaucg

SEQ ID NO: 1222744 - RNA, 19 nt, Artificial Sequence
  Description of Artificial Sequence: Synthetic oligonucleotide
aagccggcugguggacaac

SEQ ID NO: 1222745 - RNA, 19 nt, Artificial Sequence
  Description of Artificial Sequence: Synthetic oligonucleotide
ccgaggucggcucagugac

SEQ ID NO: 1222746 - RNA, 19 nt, Artificial Sequence
  Description of Artificial Sequence: Synthetic oligonucleotide
gaauuccgcauggcugcug

SEQ ID NO: 1222747 - RNA, 19 nt, Artificial Sequence
  Description of Artificial Sequence: Synthetic oligonucleotide
ccgcacaaagucgaggacc

SEQ ID NO: 1222748 - RNA, 19 nt, Artificial Sequence
  Description of Artificial Sequence: Synthetic oligonucleotide
guggacaacugcacgugca

SEQ ID NO: 1222749 - RNA, 19 nt, Artificial Sequence
  Description of Artificial Sequence: Synthetic oligonucleotide
ccgauccgcauacugcucc

SEQ ID NO: 1222750 - RNA, 19 nt, Artificial Sequence
  Description of Artificial Sequence: Synthetic oligonucleotide
cgugcauucguuugccuug

SEQ ID NO: 1222751 - RNA, 19 nt, Artificial Sequence
  Description of Artificial Sequence: Synthetic oligonucleotide
aggacaacccugacgccca

SEQ ID NO: 1222752 - RNA, 19 nt, Artificial Sequence
  Description of Artificial Sequence: Synthetic oligonucleotide
cugccucauaggaccgggc

SEQ ID NO: 1222753 - RNA, 19 nt, Artificial Sequence
  Description of Artificial Sequence: Synthetic oligonucleotide
ggaccagugccccucuuuc

SEQ ID NO: 1222754 - RNA, 19 nt, Artificial Sequence
  Description of Artificial Sequence: Synthetic oligonucleotide
gcacucuuuggaccagugc

SEQ ID NO: 1222755 - RNA, 19 nt, Artificial Sequence
  Description of Artificial Sequence: Synthetic oligonucleotide
cugggagaacagagcauga

SEQ ID NO: 1222756 - RNA, 19 nt, Artificial Sequence
  Description of Artificial Sequence: Synthetic oligonucleotide
cugguggacaacugcacgu

SEQ ID NO: 1222757 - RNA, 19 nt, Artificial Sequence
  Description of Artificial Sequence: Synthetic oligonucleotide
uccguacguguuguuguaa

SEQ ID NO: 1222758 - RNA, 19 nt, Artificial Sequence
  Description of Artificial Sequence: Synthetic oligonucleotide
acgaauccccauaacucau

SEQ ID NO: 1222759 - RNA, 19 nt, Artificial Sequence
  Description of Artificial Sequence: Synthetic oligonucleotide
cugagggacugaacgcaca

SEQ ID NO: 1222760 - RNA, 19 nt, Artificial Sequence
  Description of Artificial Sequence: Synthetic oligonucleotide
ggagucagcuaaguuuaac

SEQ ID NO: 1222761 - RNA, 19 nt, Artificial Sequence
  Description of Artificial Sequence: Synthetic oligonucleotide
cucgaagagugagcggauc

SEQ ID NO: 1222762 - RNA, 19 nt, Artificial Sequence
  Description of Artificial Sequence: Synthetic oligonucleotide
gcccguaauaugaaguaga

SEQ ID NO: 1222763 - RNA, 19 nt, Artificial Sequence
  Description of Artificial Sequence: Synthetic oligonucleotide
ccguaauaugaaguagaag

SEQ ID NO: 1222764 - RNA, 19 nt, Artificial Sequence
  Description of Artificial Sequence: Synthetic oligonucleotide
agcgcuccguacguguugu

SEQ ID NO: 1222765 - RNA, 19 nt, Artificial Sequence
  Description of Artificial Sequence: Synthetic oligonucleotide
aggucggcucagugacggg

SEQ ID NO: 1222766 - RNA, 19 nt, Artificial Sequence
  Description of Artificial Sequence: Synthetic oligonucleotide
auaugcagacgcagcugca

SEQ ID NO: 1222767 - RNA, 19 nt, Artificial Sequence
  Description of Artificial Sequence: Synthetic oligonucleotide
gucggcucagugacgggug

SEQ ID NO: 1222768 - RNA, 19 nt, Artificial Sequence
  Description of Artificial Sequence: Synthetic oligonucleotide
gguugguacaaguggggcu

SEQ ID NO: 1222769 - RNA, 19 nt, Artificial Sequence
  Description of Artificial Sequence: Synthetic oligonucleotide
ccgggcgcaguccuaagcc

SEQ ID NO: 1222770 - RNA, 19 nt, Artificial Sequence
  Description of Artificial Sequence: Synthetic oligonucleotide
gguugcguauggcauccuc

SEQ ID NO: 1222771 - RNA, 19 nt, Artificial Sequence
  Description of Artificial Sequence: Synthetic oligonucleotide
gccccugauggccuccacg

SEQ ID NO: 1222772 - RNA, 19 nt, Artificial Sequence
  Description of Artificial Sequence: Synthetic oligonucleotide
gguacaaguggggcugaug

SEQ ID NO: 1222773 - RNA, 19 nt, Artificial Sequence
  Description of Artificial Sequence: Synthetic oligonucleotide
cacaaccgcagcuuggaau

SEQ ID NO: 1222774 - RNA, 19 nt, Artificial Sequence
  Description of Artificial Sequence: Synthetic oligonucleotide
agugccccucuuucccgca

SEQ ID NO: 1222775 - RNA, 19 nt, Artificial Sequence
  Description of Artificial Sequence: Synthetic oligonucleotide
cauucgaugacugggccau

SEQ ID NO: 1222776 - RNA, 19 nt, Artificial Sequence
  Description of Artificial Sequence: Synthetic oligonucleotide
agucgaggaccgaggucgg

SEQ ID NO: 1222777 - RNA, 19 nt, Artificial Sequence
  Description of Artificial Sequence: Synthetic oligonucleotide
gggcgcaguccuaagccgg

SEQ ID NO: 1222778 - RNA, 19 nt, Artificial Sequence
  Description of Artificial Sequence: Synthetic oligonucleotide
gaggaccgaggucggcuca

SEQ ID NO: 1222779 - RNA, 19 nt, Artificial Sequence
  Description of Artificial Sequence: Synthetic oligonucleotide
ucauaggaccgggcagcac

SEQ ID NO: 1222780 - RNA, 19 nt, Artificial Sequence
  Description of Artificial Sequence: Synthetic oligonucleotide
cucaugcacaaccgcagcu

SEQ ID NO: 1222781 - RNA, 19 nt, Artificial Sequence
  Description of Artificial Sequence: Synthetic oligonucleotide
aggaccgaggucggcucag

SEQ ID NO: 1222782 - RNA, 19 nt, Artificial Sequence
  Description of Artificial Sequence: Synthetic oligonucleotide
gggaucgagagagguggag

SEQ ID NO: 1222783 - RNA, 19 nt, Artificial Sequence
  Description of Artificial Sequence: Synthetic oligonucleotide
ggcaucgagcgcuccguac

SEQ ID NO: 1222784 - RNA, 19 nt, Artificial Sequence
  Description of Artificial Sequence: Synthetic oligonucleotide
ggcagcacggcagcgcuug

SEQ ID NO: 1222785 - RNA, 19 nt, Artificial Sequence
  Description of Artificial Sequence: Synthetic oligonucleotide
gggagaacagagcaugaau

SEQ ID NO: 1222786 - RNA, 19 nt, Artificial Sequence
  Description of Artificial Sequence: Synthetic oligonucleotide
ccccacuaggacaacccug

SEQ ID NO: 1222787 - RNA, 19 nt, Artificial Sequence
  Description of Artificial Sequence: Synthetic oligonucleotide
ccagugccccucuuucccg

SEQ ID NO: 1222788 - RNA, 19 nt, Artificial Sequence
  Description of Artificial Sequence: Synthetic oligonucleotide
ggugcgcaggccgcgaccc

SEQ ID NO: 1222789 - RNA, 19 nt, Artificial Sequence
  Description of Artificial Sequence: Synthetic oligonucleotide
gccgcgaccccacuaggac

SEQ ID NO: 1222790 - RNA, 19 nt, Artificial Sequence
  Description of Artificial Sequence: Synthetic oligonucleotide
gcauucguuugccuugaaa

SEQ ID NO: 1222791 - RNA, 19 nt, Artificial Sequence
  Description of Artificial Sequence: Synthetic oligonucleotide
cccguaauaugaaguagaa

SEQ ID NO: 1222792 - RNA, 19 nt, Artificial Sequence
  Description of Artificial Sequence: Synthetic oligonucleotide
cugucaugcccguaaccgu

SEQ ID NO: 1222793 - RNA, 19 nt, Artificial Sequence
  Description of Artificial Sequence: Synthetic oligonucleotide
aucgagcgcuccguacgug

SEQ ID NO: 1222794 - RNA, 19 nt, Artificial Sequence
  Description of Artificial Sequence: Synthetic oligonucleotide
ccgauagcagccgcucugg

SEQ ID NO: 1222795 - RNA, 19 nt, Artificial Sequence
  Description of Artificial Sequence: Synthetic oligonucleotide
auuccgcauggcugcugaa

SEQ ID NO: 1222796 - RNA, 19 nt, Artificial Sequence
  Description of Artificial Sequence: Synthetic oligonucleotide
cgaaggguguauucucaug

SEQ ID NO: 1222797 - RNA, 19 nt, Artificial Sequence
  Description of Artificial Sequence: Synthetic oligonucleotide
acggcauccucugcccgcu

SEQ ID NO: 1222798 - RNA, 19 nt, Artificial Sequence
  Description of Artificial Sequence: Synthetic oligonucleotide
gucccggagaugggguacc

SEQ ID NO: 1222799 - RNA, 19 nt, Artificial Sequence
  Description of Artificial Sequence: Synthetic oligonucleotide
ccugaaggcggcaacagau

SEQ ID NO: 1222800 - RNA, 19 nt, Artificial Sequence
  Description of Artificial Sequence: Synthetic oligonucleotide
gcuccguacguguuguugu

SEQ ID NO: 1222801 - RNA, 19 nt, Artificial Sequence
  Description of Artificial Sequence: Synthetic oligonucleotide
cugcagcacgacgcagggg

SEQ ID NO: 1222802 - RNA, 19 nt, Artificial Sequence
  Description of Artificial Sequence: Synthetic oligonucleotide
ccggggcagauuuccaaug

SEQ ID NO: 1222803 - RNA, 19 nt, Artificial Sequence
  Description of Artificial Sequence: Synthetic oligonucleotide
ggcacucuuuggaccagug

SEQ ID NO: 1222804 - RNA, 19 nt, Artificial Sequence
  Description of Artificial Sequence: Synthetic oligonucleotide
acgucccggagauggggua

SEQ ID NO: 1222805 - RNA, 19 nt, Artificial Sequence
  Description of Artificial Sequence: Synthetic oligonucleotide
ccgcuccauguguacaaag

SEQ ID NO: 1222806 - RNA, 19 nt, Artificial Sequence
  Description of Artificial Sequence: Synthetic oligonucleotide
cgcccgauccgcauacugc

SEQ ID NO: 1222807 - RNA, 19 nt, Artificial Sequence
  Description of Artificial Sequence: Synthetic oligonucleotide
uaggaccgggcagcacggc

SEQ ID NO: 1222808 - RNA, 19 nt, Artificial Sequence
  Description of Artificial Sequence: Synthetic oligonucleotide
cuccguacguguuguugua

SEQ ID NO: 1222809 - RNA, 19 nt, Artificial Sequence
  Description of Artificial Sequence: Synthetic oligonucleotide
ucccggagaugggguacca

SEQ ID NO: 1222810 - RNA, 19 nt, Artificial Sequence
  Description of Artificial Sequence: Synthetic oligonucleotide
cgaacggucuaccgggcac

SEQ ID NO: 1222811 - RNA, 19 nt, Artificial Sequence
  Description of Artificial Sequence: Synthetic oligonucleotide
uuggaccagugccccucuu

SEQ ID NO: 1222812 - RNA, 19 nt, Artificial Sequence
  Description of Artificial Sequence: Synthetic oligonucleotide
cagcgcuuguaguaggcau

SEQ ID NO: 1222813 - RNA, 19 nt, Artificial Sequence
  Description of Artificial Sequence: Synthetic oligonucleotide
uaccgcgcccgauccgcau

SEQ ID NO: 1222814 - RNA, 19 nt, Artificial Sequence
  Description of Artificial Sequence: Synthetic oligonucleotide
cuaagccggcugguggaca

SEQ ID NO: 1222815 - RNA, 19 nt, Artificial Sequence
  Description of Artificial Sequence: Synthetic oligonucleotide
gcgcccgauccgcauacug

SEQ ID NO: 1222816 - RNA, 19 nt, Artificial Sequence
  Description of Artificial Sequence: Synthetic oligonucleotide
aggcaucgagcgcuccgua

SEQ ID NO: 1222817 - RNA, 19 nt, Artificial Sequence
  Description of Artificial Sequence: Synthetic oligonucleotide
gacgcccaagggagucagc

SEQ ID NO: 1222818 - RNA, 19 nt, Artificial Sequence
  Description of Artificial Sequence: Synthetic oligonucleotide
cgggcgcaguccuaagccg

SEQ ID NO: 1222819 - RNA, 19 nt, Artificial Sequence
  Description of Artificial Sequence: Synthetic oligonucleotide
gucgaggaccgaggucggc

SEQ ID NO: 1222820 - RNA, 19 nt, Artificial Sequence
  Description of Artificial Sequence: Synthetic oligonucleotide
accgcgcccgauccgcaua

SEQ ID NO: 1222821 - RNA, 19 nt, Artificial Sequence
  Description of Artificial Sequence: Synthetic oligonucleotide
ccacggcauccucugcccg

SEQ ID NO: 1222822 - RNA, 19 nt, Artificial Sequence
  Description of Artificial Sequence: Synthetic oligonucleotide
gcccgauccgcauacugcu

SEQ ID NO: 1222823 - RNA, 19 nt, Artificial Sequence
  Description of Artificial Sequence: Synthetic oligonucleotide
gcucauuauacugcucagu

SEQ ID NO: 1222824 - RNA, 19 nt, Artificial Sequence
  Description of Artificial Sequence: Synthetic oligonucleotide
cgauccgcauacugcuccc

SEQ ID NO: 1222825 - RNA, 19 nt, Artificial Sequence
  Description of Artificial Sequence: Synthetic oligonucleotide
ccguagcccucuccaacag

SEQ ID NO: 1222826 - RNA, 19 nt, Artificial Sequence
  Description of Artificial Sequence: Synthetic oligonucleotide
gguaccacgaaggguguau

SEQ ID NO: 1222827 - RNA, 19 nt, Artificial Sequence
  Description of Artificial Sequence: Synthetic oligonucleotide
ccgggcacucuuuggacca

SEQ ID NO: 1222828 - RNA, 19 nt, Artificial Sequence
  Description of Artificial Sequence: Synthetic oligonucleotide
caucgagcgcuccguacgu

SEQ ID NO: 1222829 - RNA, 19 nt, Artificial Sequence
  Description of Artificial Sequence: Synthetic oligonucleotide
ccugacgcccaagggaguc

SEQ ID NO: 1222830 - RNA, 19 nt, Artificial Sequence
  Description of Artificial Sequence: Synthetic oligonucleotide
gcaccgauagcagccgcuc

SEQ ID NO: 1222831 - RNA, 19 nt, Artificial Sequence
  Description of Artificial Sequence: Synthetic oligonucleotide
guaggaggacuuggagucu

SEQ ID NO: 1222832 - RNA, 19 nt, Artificial Sequence
  Description of Artificial Sequence: Synthetic oligonucleotide
ggaggacuuggagucucuc

SEQ ID NO: 1222833 - RNA, 19 nt, Artificial Sequence
  Description of Artificial Sequence: Synthetic oligonucleotide
aucccgcccguaauaugaa

SEQ ID NO: 1222834 - RNA, 19 nt, Artificial Sequence
  Description of Artificial Sequence: Synthetic oligonucleotide
cccgggcgcaguccuaagc

SEQ ID NO: 1222835 - RNA, 19 nt, Artificial Sequence
  Description of Artificial Sequence: Synthetic oligonucleotide
cgcccguaauaugaaguag

SEQ ID NO: 1222836 - RNA, 19 nt, Artificial Sequence
  Description of Artificial Sequence: Synthetic oligonucleotide
cgugcagcuuguaguggug

SEQ ID NO: 1222837 - RNA, 19 nt, Artificial Sequence
  Description of Artificial Sequence: Synthetic oligonucleotide
cugacgcccaagggaguca

SEQ ID NO: 1222838 - RNA, 19 nt, Artificial Sequence
  Description of Artificial Sequence: Synthetic oligonucleotide
cguuugccuugaaacucug

SEQ ID NO: 1222839 - RNA, 19 nt, Artificial Sequence
  Description of Artificial Sequence: Synthetic oligonucleotide
cccgaacggucuaccgggc

SEQ ID NO: 1222840 - RNA, 19 nt, Artificial Sequence
  Description of Artificial Sequence: Synthetic oligonucleotide
cccugauggccuccacggc

SEQ ID NO: 1222841 - RNA, 19 nt, Artificial Sequence
  Description of Artificial Sequence: Synthetic oligonucleotide
gcuccgaucccgcccguaa

SEQ ID NO: 1222842 - RNA, 19 nt, Artificial Sequence
  Description of Artificial Sequence: Synthetic oligonucleotide
gcacuauagucaggaggca

SEQ ID NO: 1222843 - RNA, 19 nt, Artificial Sequence
  Description of Artificial Sequence: Synthetic oligonucleotide
ccccauaacucauggugua

SEQ ID NO: 1222844 - RNA, 19 nt, Artificial Sequence
  Description of Artificial Sequence: Synthetic oligonucleotide
cccgcaccgauagcagccg

SEQ ID NO: 1222845 - RNA, 19 nt, Artificial Sequence
  Description of Artificial Sequence: Synthetic oligonucleotide
cccgcccguaauaugaagu

SEQ ID NO: 1222846 - RNA, 19 nt, Artificial Sequence
  Description of Artificial Sequence: Synthetic oligonucleotide
ccgcccguaauaugaagua

SEQ ID NO: 1222847 - RNA, 19 nt, Artificial Sequence
  Description of Artificial Sequence: Synthetic oligonucleotide
ccuaagccggcugguggac

SEQ ID NO: 1222848 - RNA, 19 nt, Artificial Sequence
  Description of Artificial Sequence: Synthetic oligonucleotide
aggcggcaugcugggagaa

SEQ ID NO: 1222849 - RNA, 19 nt, Artificial Sequence
  Description of Artificial Sequence: Synthetic oligonucleotide
cacgugcauucguuugccu

SEQ ID NO: 1222850 - RNA, 19 nt, Artificial Sequence
  Description of Artificial Sequence: Synthetic oligonucleotide
agguugcguauggcauccu

SEQ ID NO: 1222851 - RNA, 19 nt, Artificial Sequence
  Description of Artificial Sequence: Synthetic oligonucleotide
cccgauccgcauacugcuc

SEQ ID NO: 1222852 - RNA, 19 nt, Artificial Sequence
  Description of Artificial Sequence: Synthetic oligonucleotide
auucgaugacugggccaua

SEQ ID NO: 1222853 - RNA, 19 nt, Artificial Sequence
  Description of Artificial Sequence: Synthetic oligonucleotide
cccauuaggagcagugauu

SEQ ID NO: 1222854 - RNA, 19 nt, Artificial Sequence
  Description of Artificial Sequence: Synthetic oligonucleotide
gcccacauguaacuugguu

SEQ ID NO: 1222855 - RNA, 19 nt, Artificial Sequence
  Description of Artificial Sequence: Synthetic oligonucleotide
ucacuccgugcagcuugua

SEQ ID NO: 1222856 - RNA, 19 nt, Artificial Sequence
  Description of Artificial Sequence: Synthetic oligonucleotide
cgcuccguacguguuguug

SEQ ID NO: 1222857 - RNA, 19 nt, Artificial Sequence
  Description of Artificial Sequence: Synthetic oligonucleotide
cguacagggaauuccgcau

SEQ ID NO: 1222858 - RNA, 19 nt, Artificial Sequence
  Description of Artificial Sequence: Synthetic oligonucleotide
caccgauagcagccgcucu

SEQ ID NO: 1222859 - RNA, 19 nt, Artificial Sequence
  Description of Artificial Sequence: Synthetic oligonucleotide
cgaucccgcccguaauaug

SEQ ID NO: 1222860 - RNA, 19 nt, Artificial Sequence
  Description of Artificial Sequence: Synthetic oligonucleotide
cguacguguuguuguaaua

SEQ ID NO: 1222861 - RNA, 19 nt, Artificial Sequence
  Description of Artificial Sequence: Synthetic oligonucleotide
ccacgcggcccgaacgguc

SEQ ID NO: 1222862 - RNA, 19 nt, Artificial Sequence
  Description of Artificial Sequence: Synthetic oligonucleotide
aucccaccucaaacuuuaa

SEQ ID NO: 1222863 - RNA, 19 nt, Artificial Sequence
  Description of Artificial Sequence: Synthetic oligonucleotide
acgggugcgcaggccgcga

SEQ ID NO: 1222864 - RNA, 19 nt, Artificial Sequence
  Description of Artificial Sequence: Synthetic oligonucleotide
ccgcgaccccacuaggaca

SEQ ID NO: 1222865 - RNA, 19 nt, Artificial Sequence
  Description of Artificial Sequence: Synthetic oligonucleotide
guaccacgaaggguguauu

SEQ ID NO: 1222866 - RNA, 19 nt, Artificial Sequence
  Description of Artificial Sequence: Synthetic oligonucleotide
cgcgaccccacuaggacaa

SEQ ID NO: 1222867 - RNA, 19 nt, Artificial Sequence
  Description of Artificial Sequence: Synthetic oligonucleotide
cggggcagauuuccaauga

SEQ ID NO: 1222868 - RNA, 19 nt, Artificial Sequence
  Description of Artificial Sequence: Synthetic oligonucleotide
guaccgcgcccgauccgca

SEQ ID NO: 1222869 - RNA, 19 nt, Artificial Sequence
  Description of Artificial Sequence: Synthetic oligonucleotide
ccucuuucccgcaccgaua

SEQ ID NO: 1222870 - RNA, 19 nt, Artificial Sequence
  Description of Artificial Sequence: Synthetic oligonucleotide
cccauaacucaugguguaa

SEQ ID NO: 1222871 - RNA, 19 nt, Artificial Sequence
  Description of Artificial Sequence: Synthetic oligonucleotide
ccaucuccacacagccgca

SEQ ID NO: 1222872 - RNA, 19 nt, Artificial Sequence
  Description of Artificial Sequence: Synthetic oligonucleotide
ccgcgcccgauccgcauac

SEQ ID NO: 1222873 - RNA, 19 nt, Artificial Sequence
  Description of Artificial Sequence: Synthetic oligonucleotide
cccaucccgggcgcagucc

SEQ ID NO: 1222874 - RNA, 19 nt, Artificial Sequence
  Description of Artificial Sequence: Synthetic oligonucleotide
agucagccacgcggcccga

SEQ ID NO: 1222875 - RNA, 19 nt, Artificial Sequence
  Description of Artificial Sequence: Synthetic oligonucleotide
ccgaacggucuaccgggca

SEQ ID NO: 1222876 - RNA, 19 nt, Artificial Sequence
  Description of Artificial Sequence: Synthetic oligonucleotide
acgcggcccgaacggucua

SEQ ID NO: 1222877 - RNA, 19 nt, Artificial Sequence
  Description of Artificial Sequence: Synthetic oligonucleotide
cuccgaucccgcccguaau

SEQ ID NO: 1222878 - RNA, 19 nt, Artificial Sequence
  Description of Artificial Sequence: Synthetic oligonucleotide
gcggcaacagaugucuauu

SEQ ID NO: 1222879 - RNA, 19 nt, Artificial Sequence
  Description of Artificial Sequence: Synthetic oligonucleotide
gggagucagcuaaguuuaa

SEQ ID NO: 1222880 - RNA, 19 nt, Artificial Sequence
  Description of Artificial Sequence: Synthetic oligonucleotide
ccguacguguuguuguaau

SEQ ID NO: 1222881 - RNA, 19 nt, Artificial Sequence
  Description of Artificial Sequence: Synthetic oligonucleotide
ggaauuccgcauggcugcu

SEQ ID NO: 1222882 - RNA, 19 nt, Artificial Sequence
  Description of Artificial Sequence: Synthetic oligonucleotide
cgucccggagaugggguac

SEQ ID NO: 1222883 - RNA, 19 nt, Artificial Sequence
  Description of Artificial Sequence: Synthetic oligonucleotide
ggccucccggggcagauuu

SEQ ID NO: 1222884 - RNA, 19 nt, Artificial Sequence
  Description of Artificial Sequence: Synthetic oligonucleotide
cccucuuucccgcaccgau

SEQ ID NO: 1222885 - RNA, 19 nt, Artificial Sequence
  Description of Artificial Sequence: Synthetic oligonucleotide
cccggagaugggguaccac

SEQ ID NO: 1222886 - RNA, 19 nt, Artificial Sequence
  Description of Artificial Sequence: Synthetic oligonucleotide
aggcggcaacagaugucua

SEQ ID NO: 1222887 - RNA, 19 nt, Artificial Sequence
  Description of Artificial Sequence: Synthetic oligonucleotide
ggacaacccugacgcccaa

SEQ ID NO: 1222888 - RNA, 19 nt, Artificial Sequence
  Description of Artificial Sequence: Synthetic oligonucleotide
uggccucccggggcagauu

SEQ ID NO: 1222889 - RNA, 19 nt, Artificial Sequence
  Description of Artificial Sequence: Synthetic oligonucleotide
gcggccgucuuguccucua

SEQ ID NO: 1222890 - RNA, 19 nt, Artificial Sequence
  Description of Artificial Sequence: Synthetic oligonucleotide
gcucgaagagugagcggau

SEQ ID NO: 1222891 - RNA, 19 nt, Artificial Sequence
  Description of Artificial Sequence: Synthetic oligonucleotide
caaccgcagcuuggaauuu

SEQ ID NO: 1222892 - RNA, 19 nt, Artificial Sequence
  Description of Artificial Sequence: Synthetic oligonucleotide
cccguacugcucgaagagu

SEQ ID NO: 1222893 - RNA, 19 nt, Artificial Sequence
  Description of Artificial Sequence: Synthetic oligonucleotide
cgcaccgauagcagccgcu

SEQ ID NO: 1222894 - RNA, 19 nt, Artificial Sequence
  Description of Artificial Sequence: Synthetic oligonucleotide
ggucuaccgggcacucuuu

SEQ ID NO: 1222895 - RNA, 19 nt, Artificial Sequence
  Description of Artificial Sequence: Synthetic oligonucleotide
gccucccggggcagauuuc

SEQ ID NO: 1222896 - RNA, 19 nt, Artificial Sequence
  Description of Artificial Sequence: Synthetic oligonucleotide
cguagcccucuccaacagu

SEQ ID NO: 1222897 - RNA, 19 nt, Artificial Sequence
  Description of Artificial Sequence: Synthetic oligonucleotide
ggaccgaggucggcucagu

SEQ ID NO: 1222898 - RNA, 19 nt, Artificial Sequence
  Description of Artificial Sequence: Synthetic oligonucleotide
ccgaucccgcccguaauau

SEQ ID NO: 1222899 - RNA, 19 nt, Artificial Sequence
  Description of Artificial Sequence: Synthetic oligonucleotide
gcagcacggcagcgcuugu

SEQ ID NO: 1222900 - RNA, 19 nt, Artificial Sequence
  Description of Artificial Sequence: Synthetic oligonucleotide
ggcuccgaucccgcccgua

SEQ ID NO: 1222901 - RNA, 19 nt, Artificial Sequence
  Description of Artificial Sequence: Synthetic oligonucleotide
ccccucuuucccgcaccga

SEQ ID NO: 1222902 - RNA, 19 nt, Artificial Sequence
  Description of Artificial Sequence: Synthetic oligonucleotide
gccacgcggcccgaacggu

SEQ ID NO: 1222903 - RNA, 19 nt, Artificial Sequence
  Description of Artificial Sequence: Synthetic oligonucleotide
cccugacgcccaagggagu

SEQ ID NO: 1222904 - RNA, 19 nt, Artificial Sequence
  Description of Artificial Sequence: Synthetic oligonucleotide
gggcuccgaucccgcccgu

SEQ ID NO: 1222905 - RNA, 19 nt, Artificial Sequence
  Description of Artificial Sequence: Synthetic oligonucleotide
gcgcuccguacguguuguu

SEQ ID NO: 1222906 - RNA, 19 nt, Artificial Sequence
  Description of Artificial Sequence: Synthetic oligonucleotide
cgcgcccgauccgcauacu

SEQ ID NO: 1222907 - RNA, 19 nt, Artificial Sequence
  Description of Artificial Sequence: Synthetic oligonucleotide
aggauuucgauauagacca

SEQ ID NO: 1222908 - RNA, 19 nt, Artificial Sequence
  Description of Artificial Sequence: Synthetic oligonucleotide
aauguagcggcgcugggac

SEQ ID NO: 1222909 - RNA, 19 nt, Artificial Sequence
  Description of Artificial Sequence: Synthetic oligonucleotide
aauuguacuggcuccgggg

SEQ ID NO: 1222910 - RNA, 19 nt, Artificial Sequence
  Description of Artificial Sequence: Synthetic oligonucleotide
gauaacuuuauggaugagg

SEQ ID NO: 1222911 - RNA, 19 nt, Artificial Sequence
  Description of Artificial Sequence: Synthetic oligonucleotide
accauuuucucuccaaugg

SEQ ID NO: 1222912 - RNA, 19 nt, Artificial Sequence
  Description of Artificial Sequence: Synthetic oligonucleotide
cuguaguucaacaaggaug

SEQ ID NO: 1222913 - RNA, 19 nt, Artificial Sequence
  Description of Artificial Sequence: Synthetic oligonucleotide
ugagaaagggugccgaucc

SEQ ID NO: 1222914 - RNA, 19 nt, Artificial Sequence
  Description of Artificial Sequence: Synthetic oligonucleotide
ugcuaguccagucauucgg

SEQ ID NO: 1222915 - RNA, 19 nt, Artificial Sequence
  Description of Artificial Sequence: Synthetic oligonucleotide
acaacaaacuccccuugcc

SEQ ID NO: 1222916 - RNA, 19 nt, Artificial Sequence
  Description of Artificial Sequence: Synthetic oligonucleotide
ugugauuggguucgaacag

SEQ ID NO: 1222917 - RNA, 19 nt, Artificial Sequence
  Description of Artificial Sequence: Synthetic oligonucleotide
aguucaacaaggaugcugg

SEQ ID NO: 1222918 - RNA, 19 nt, Artificial Sequence
  Description of Artificial Sequence: Synthetic oligonucleotide
cucaacguggcaauguccg

SEQ ID NO: 1222919 - RNA, 19 nt, Artificial Sequence
  Description of Artificial Sequence: Synthetic oligonucleotide
ucauucggugaccucaggg

SEQ ID NO: 1222920 - RNA, 19 nt, Artificial Sequence
  Description of Artificial Sequence: Synthetic oligonucleotide
agaggcggugcccugaagc

SEQ ID NO: 1222921 - RNA, 19 nt, Artificial Sequence
  Description of Artificial Sequence: Synthetic oligonucleotide
uauaaggucaguguuucug

SEQ ID NO: 1222922 - RNA, 19 nt, Artificial Sequence
  Description of Artificial Sequence: Synthetic oligonucleotide
agcugcaucggucugaaug

SEQ ID NO: 1222923 - RNA, 19 nt, Artificial Sequence
  Description of Artificial Sequence: Synthetic oligonucleotide
uuuugucuagguauaauuu

SEQ ID NO: 1222924 - RNA, 19 nt, Artificial Sequence
  Description of Artificial Sequence: Synthetic oligonucleotide
gauuucgauauagaccacg

SEQ ID NO: 1222925 - RNA, 19 nt, Artificial Sequence
  Description of Artificial Sequence: Synthetic oligonucleotide
aguccagucauucggugac

SEQ ID NO: 1222926 - RNA, 19 nt, Artificial Sequence
  Description of Artificial Sequence: Synthetic oligonucleotide
aagcccgaaggcuccagcc

SEQ ID NO: 1222927 - RNA, 19 nt, Artificial Sequence
  Description of Artificial Sequence: Synthetic oligonucleotide
ucgaacagccucauaaaca

SEQ ID NO: 1222928 - RNA, 19 nt, Artificial Sequence
  Description of Artificial Sequence: Synthetic oligonucleotide
auaacuuuauggaugagga

SEQ ID NO: 1222929 - RNA, 19 nt, Artificial Sequence
  Description of Artificial Sequence: Synthetic oligonucleotide
uugagauggggacuucgcg

SEQ ID NO: 1222930 - RNA, 19 nt, Artificial Sequence
  Description of Artificial Sequence: Synthetic oligonucleotide
ucugaauccucaacguggc

SEQ ID NO: 1222931 - RNA, 19 nt, Artificial Sequence
  Description of Artificial Sequence: Synthetic oligonucleotide
cauucggugaccucagggg

SEQ ID NO: 1222932 - RNA, 19 nt, Artificial Sequence
  Description of Artificial Sequence: Synthetic oligonucleotide
uauuccacguuguuuugag

SEQ ID NO: 1222933 - RNA, 19 nt, Artificial Sequence
  Description of Artificial Sequence: Synthetic oligonucleotide
agaaccuaggcuaggaagg

SEQ ID NO: 1222934 - RNA, 19 nt, Artificial Sequence
  Description of Artificial Sequence: Synthetic oligonucleotide
aauguccgcuacaggaucc

SEQ ID NO: 1222935 - RNA, 19 nt, Artificial Sequence
  Description of Artificial Sequence: Synthetic oligonucleotide
ucaucacuccaauguagcg

SEQ ID NO: 1222936 - RNA, 19 nt, Artificial Sequence
  Description of Artificial Sequence: Synthetic oligonucleotide
uucagcgcagccaucagcu

SEQ ID NO: 1222937 - RNA, 19 nt, Artificial Sequence
  Description of Artificial Sequence: Synthetic oligonucleotide
uccgcuacaggauccacag

SEQ ID NO: 1222938 - RNA, 19 nt, Artificial Sequence
  Description of Artificial Sequence: Synthetic oligonucleotide
uucugcagugcaaagggac

SEQ ID NO: 1222939 - RNA, 19 nt, Artificial Sequence
  Description of Artificial Sequence: Synthetic oligonucleotide
aucggucugaauguauucc

SEQ ID NO: 1222940 - RNA, 19 nt, Artificial Sequence
  Description of Artificial Sequence: Synthetic oligonucleotide
ugggcguugguaacgauga

SEQ ID NO: 1222941 - RNA, 19 nt, Artificial Sequence
  Description of Artificial Sequence: Synthetic oligonucleotide
cagacgucagacaugcccg

SEQ ID NO: 1222942 - RNA, 19 nt, Artificial Sequence
  Description of Artificial Sequence: Synthetic oligonucleotide
ugauuggguucgaacagcc

SEQ ID NO: 1222943 - RNA, 19 nt, Artificial Sequence
  Description of Artificial Sequence: Synthetic oligonucleotide
uucgaacagccucauaaac

SEQ ID NO: 1222944 - RNA, 19 nt, Artificial Sequence
  Description of Artificial Sequence: Synthetic oligonucleotide
guaacgaugagcccaucug

SEQ ID NO: 1222945 - RNA, 19 nt, Artificial Sequence
  Description of Artificial Sequence: Synthetic oligonucleotide
uugucuagguauaauuuua

SEQ ID NO: 1222946 - RNA, 19 nt, Artificial Sequence
  Description of Artificial Sequence: Synthetic oligonucleotide
ugaauguauuccacguugu

SEQ ID NO: 1222947 - RNA, 19 nt, Artificial Sequence
  Description of Artificial Sequence: Synthetic oligonucleotide
cagaaccuaggcuaggaag

SEQ ID NO: 1222948 - RNA, 19 nt, Artificial Sequence
  Description of Artificial Sequence: Synthetic oligonucleotide
auuucgauauagaccacgg

SEQ ID NO: 1222949 - RNA, 19 nt, Artificial Sequence
  Description of Artificial Sequence: Synthetic oligonucleotide
guaaccacggccucguaug

SEQ ID NO: 1222950 - RNA, 19 nt, Artificial Sequence
  Description of Artificial Sequence: Synthetic oligonucleotide
uggccaaaaucacaucacc

SEQ ID NO: 1222951 - RNA, 19 nt, Artificial Sequence
  Description of Artificial Sequence: Synthetic oligonucleotide
caucaucacuccaauguag

SEQ ID NO: 1222952 - RNA, 19 nt, Artificial Sequence
  Description of Artificial Sequence: Synthetic oligonucleotide
agcagagcggccgaggggc

SEQ ID NO: 1222953 - RNA, 19 nt, Artificial Sequence
  Description of Artificial Sequence: Synthetic oligonucleotide
uaugugucuccacuaggca

SEQ ID NO: 1222954 - RNA, 19 nt, Artificial Sequence
  Description of Artificial Sequence: Synthetic oligonucleotide
gagcuguaguucaacaagg

SEQ ID NO: 1222955 - RNA, 19 nt, Artificial Sequence
  Description of Artificial Sequence: Synthetic oligonucleotide
ucguaugugucuccacuag

SEQ ID NO: 1222956 - RNA, 19 nt, Artificial Sequence
  Description of Artificial Sequence: Synthetic oligonucleotide
agugcaaagggacuuccca

SEQ ID NO: 1222957 - RNA, 19 nt, Artificial Sequence
  Description of Artificial Sequence: Synthetic oligonucleotide
uuucgauauagaccacggc

SEQ ID NO: 1222958 - RNA, 19 nt, Artificial Sequence
  Description of Artificial Sequence: Synthetic oligonucleotide
augcccgugaugcaaggac

SEQ ID NO: 1222959 - RNA, 19 nt, Artificial Sequence
  Description of Artificial Sequence: Synthetic oligonucleotide
aaggcgaucagaagggaug

SEQ ID NO: 1222960 - RNA, 19 nt, Artificial Sequence
  Description of Artificial Sequence: Synthetic oligonucleotide
ucugauccccgccggaucc

SEQ ID NO: 1222961 - RNA, 19 nt, Artificial Sequence
  Description of Artificial Sequence: Synthetic oligonucleotide
auauagaccacggcugggg

SEQ ID NO: 1222962 - RNA, 19 nt, Artificial Sequence
  Description of Artificial Sequence: Synthetic oligonucleotide
gccaaaaucacaucaccag

SEQ ID NO: 1222963 - RNA, 19 nt, Artificial Sequence
  Description of Artificial Sequence: Synthetic oligonucleotide
aaaucagagcagaggguuc

SEQ ID NO: 1222964 - RNA, 19 nt, Artificial Sequence
  Description of Artificial Sequence: Synthetic oligonucleotide
cauauaaggucaguguuuc

SEQ ID NO: 1222965 - RNA, 19 nt, Artificial Sequence
  Description of Artificial Sequence: Synthetic oligonucleotide
ugucuagguauaauuuuau

SEQ ID NO: 1222966 - RNA, 19 nt, Artificial Sequence
  Description of Artificial Sequence: Synthetic oligonucleotide
uguuuugagggaguccgag

SEQ ID NO: 1222967 - RNA, 19 nt, Artificial Sequence
  Description of Artificial Sequence: Synthetic oligonucleotide
guugguaacgaugagccca

SEQ ID NO: 1222968 - RNA, 19 nt, Artificial Sequence
  Description of Artificial Sequence: Synthetic oligonucleotide
agcugacaauaccagaugu

SEQ ID NO: 1222969 - RNA, 19 nt, Artificial Sequence
  Description of Artificial Sequence: Synthetic oligonucleotide
uauagaccacggcuggggc

SEQ ID NO: 1222970 - RNA, 19 nt, Artificial Sequence
  Description of Artificial Sequence: Synthetic oligonucleotide
guuuugagggaguccgagg

SEQ ID NO: 1222971 - RNA, 19 nt, Artificial Sequence
  Description of Artificial Sequence: Synthetic oligonucleotide
gucacauauaaggucagug

SEQ ID NO: 1222972 - RNA, 19 nt, Artificial Sequence
  Description of Artificial Sequence: Synthetic oligonucleotide
cacaucugcgaugaaauug

SEQ ID NO: 1222973 - RNA, 19 nt, Artificial Sequence
  Description of Artificial Sequence: Synthetic oligonucleotide
aaagggugccgauccagga

SEQ ID NO: 1222974 - RNA, 19 nt, Artificial Sequence
  Description of Artificial Sequence: Synthetic oligonucleotide
agaugugaucguguucugc

SEQ ID NO: 1222975 - RNA, 19 nt, Artificial Sequence
  Description of Artificial Sequence: Synthetic oligonucleotide
ugaauccucaacguggcaa

SEQ ID NO: 1222976 - RNA, 19 nt, Artificial Sequence
  Description of Artificial Sequence: Synthetic oligonucleotide
ggaagcuugguucucggag

SEQ ID NO: 1222977 - RNA, 19 nt, Artificial Sequence
  Description of Artificial Sequence: Synthetic oligonucleotide
uugagggaguccgaggucc

SEQ ID NO: 1222978 - RNA, 19 nt, Artificial Sequence
  Description of Artificial Sequence: Synthetic oligonucleotide
guaugugucuccacuaggc

SEQ ID NO: 1222979 - RNA, 19 nt, Artificial Sequence
  Description of Artificial Sequence: Synthetic oligonucleotide
ucggucugaauguauucca

SEQ ID NO: 1222980 - RNA, 19 nt, Artificial Sequence
  Description of Artificial Sequence: Synthetic oligonucleotide
uccuaacgucagcagagcc

SEQ ID NO: 1222981 - RNA, 19 nt, Artificial Sequence
  Description of Artificial Sequence: Synthetic oligonucleotide
agggacuucccauggcaac

SEQ ID NO: 1222982 - RNA, 19 nt, Artificial Sequence
  Description of Artificial Sequence: Synthetic oligonucleotide
cuaacgucagcagagccug

SEQ ID NO: 1222983 - RNA, 19 nt, Artificial Sequence
  Description of Artificial Sequence: Synthetic oligonucleotide
ugagccguuugagaugggg

SEQ ID NO: 1222984 - RNA, 19 nt, Artificial Sequence
  Description of Artificial Sequence: Synthetic oligonucleotide
uucgcggccugagaaaggg

SEQ ID NO: 1222985 - RNA, 19 nt, Artificial Sequence
  Description of Artificial Sequence: Synthetic oligonucleotide
uaggcuaggaaggcgagga

SEQ ID NO: 1222986 - RNA, 19 nt, Artificial Sequence
  Description of Artificial Sequence: Synthetic oligonucleotide
ggucugaauguauuccacg

SEQ ID NO: 1222987 - RNA, 19 nt, Artificial Sequence
  Description of Artificial Sequence: Synthetic oligonucleotide
uguaaccacggccucguau

SEQ ID NO: 1222988 - RNA, 19 nt, Artificial Sequence
  Description of Artificial Sequence: Synthetic oligonucleotide
ugguguucacuccaaucac

SEQ ID NO: 1222989 - RNA, 19 nt, Artificial Sequence
  Description of Artificial Sequence: Synthetic oligonucleotide
uaacuuuauggaugaggac

SEQ ID NO: 1222990 - RNA, 19 nt, Artificial Sequence
  Description of Artificial Sequence: Synthetic oligonucleotide
cuugcuaguccagucauuc

SEQ ID NO: 1222991 - RNA, 19 nt, Artificial Sequence
  Description of Artificial Sequence: Synthetic oligonucleotide
uucaacaaggaugcuggga

SEQ ID NO: 1222992 - RNA, 19 nt, Artificial Sequence
  Description of Artificial Sequence: Synthetic oligonucleotide
ccaaaaucacaucaccagg

SEQ ID NO: 1222993 - RNA, 19 nt, Artificial Sequence
  Description of Artificial Sequence: Synthetic oligonucleotide
cccuaaggcgaucagaagg

SEQ ID NO: 1222994 - RNA, 19 nt, Artificial Sequence
  Description of Artificial Sequence: Synthetic oligonucleotide
auucggugaccucaggggu

SEQ ID NO: 1222995 - RNA, 19 nt, Artificial Sequence
  Description of Artificial Sequence: Synthetic oligonucleotide
auuccacguuguuuugagg

SEQ ID NO: 1222996 - RNA, 19 nt, Artificial Sequence
  Description of Artificial Sequence: Synthetic oligonucleotide
ugcugaacaucagggaagc

SEQ ID NO: 1222997 - RNA, 19 nt, Artificial Sequence
  Description of Artificial Sequence: Synthetic oligonucleotide
acaucugcgaugaaauugu

SEQ ID NO: 1222998 - RNA, 19 nt, Artificial Sequence
  Description of Artificial Sequence: Synthetic oligonucleotide
agggucgggacuuccuaac

SEQ ID NO: 1222999 - RNA, 19 nt, Artificial Sequence
  Description of Artificial Sequence: Synthetic oligonucleotide
acuacgaauccugagccgu

SEQ ID NO: 1223000 - RNA, 19 nt, Artificial Sequence
  Description of Artificial Sequence: Synthetic oligonucleotide
guuugagauggggacuucg

SEQ ID NO: 1223001 - RNA, 19 nt, Artificial Sequence
  Description of Artificial Sequence: Synthetic oligonucleotide
acuaggcagccgcacucgc

SEQ ID NO: 1223002 - RNA, 19 nt, Artificial Sequence
  Description of Artificial Sequence: Synthetic oligonucleotide
gacuuccuaacgucagcag

SEQ ID NO: 1223003 - RNA, 19 nt, Artificial Sequence
  Description of Artificial Sequence: Synthetic oligonucleotide
agagcugacaauaccagau

SEQ ID NO: 1223004 - RNA, 19 nt, Artificial Sequence
  Description of Artificial Sequence: Synthetic oligonucleotide
uccggggagagcugggcgg

SEQ ID NO: 1223005 - RNA, 19 nt, Artificial Sequence
  Description of Artificial Sequence: Synthetic oligonucleotide
aguccgaggucccuggcug

SEQ ID NO: 1223006 - RNA, 19 nt, Artificial Sequence
  Description of Artificial Sequence: Synthetic oligonucleotide
aaccuaggcuaggaaggcg

SEQ ID NO: 1223007 - RNA, 19 nt, Artificial Sequence
  Description of Artificial Sequence: Synthetic oligonucleotide
gaucguguucugcagugca

SEQ ID NO: 1223008 - RNA, 19 nt, Artificial Sequence
  Description of Artificial Sequence: Synthetic oligonucleotide
cagaaacucccuaaggcga

SEQ ID NO: 1223009 - RNA, 19 nt, Artificial Sequence
  Description of Artificial Sequence: Synthetic oligonucleotide
ucgggacuuccuaacguca

SEQ ID NO: 1223010 - RNA, 19 nt, Artificial Sequence
  Description of Artificial Sequence: Synthetic oligonucleotide
gugaucguguucugcagug

SEQ ID NO: 1223011 - RNA, 19 nt, Artificial Sequence
  Description of Artificial Sequence: Synthetic oligonucleotide
guguucugcagugcaaagg

SEQ ID NO: 1223012 - RNA, 19 nt, Artificial Sequence
  Description of Artificial Sequence: Synthetic oligonucleotide
uccccauccagguuaacua

SEQ ID NO: 1223013 - RNA, 19 nt, Artificial Sequence
  Description of Artificial Sequence: Synthetic oligonucleotide
acgaugagcccaucugaag

SEQ ID NO: 1223014 - RNA, 19 nt, Artificial Sequence
  Description of Artificial Sequence: Synthetic oligonucleotide
ggguucacacucuugcuag

SEQ ID NO: 1223015 - RNA, 19 nt, Artificial Sequence
  Description of Artificial Sequence: Synthetic oligonucleotide
gaggcggugcccugaagcc

SEQ ID NO: 1223016 - RNA, 19 nt, Artificial Sequence
  Description of Artificial Sequence: Synthetic oligonucleotide
agauggggacuucgcggcc

SEQ ID NO: 1223017 - RNA, 19 nt, Artificial Sequence
  Description of Artificial Sequence: Synthetic oligonucleotide
cauccagguuaacuagggg

SEQ ID NO: 1223018 - RNA, 19 nt, Artificial Sequence
  Description of Artificial Sequence: Synthetic oligonucleotide
acccacugauuccaaacca

SEQ ID NO: 1223019 - RNA, 19 nt, Artificial Sequence
  Description of Artificial Sequence: Synthetic oligonucleotide
gccacuacgaauccugagc

SEQ ID NO: 1223020 - RNA, 19 nt, Artificial Sequence
  Description of Artificial Sequence: Synthetic oligonucleotide
gucaguguuucugaucccc

SEQ ID NO: 1223021 - RNA, 19 nt, Artificial Sequence
  Description of Artificial Sequence: Synthetic oligonucleotide
ccaggauuucgauauagac

SEQ ID NO: 1223022 - RNA, 19 nt, Artificial Sequence
  Description of Artificial Sequence: Synthetic oligonucleotide
aacucccuaaggcgaucag

SEQ ID NO: 1223023 - RNA, 19 nt, Artificial Sequence
  Description of Artificial Sequence: Synthetic oligonucleotide
uccucaacguggcaauguc

SEQ ID NO: 1223024 - RNA, 19 nt, Artificial Sequence
  Description of Artificial Sequence: Synthetic oligonucleotide
cacuacgaauccugagccg

SEQ ID NO: 1223025 - RNA, 19 nt, Artificial Sequence
  Description of Artificial Sequence: Synthetic oligonucleotide
uugguaacgaugagcccau

SEQ ID NO: 1223026 - RNA, 19 nt, Artificial Sequence
  Description of Artificial Sequence: Synthetic oligonucleotide
aaacucccuaaggcgauca

SEQ ID NO: 1223027 - RNA, 19 nt, Artificial Sequence
  Description of Artificial Sequence: Synthetic oligonucleotide
auggcaaaggagauuccag

SEQ ID NO: 1223028 - RNA, 19 nt, Artificial Sequence
  Description of Artificial Sequence: Synthetic oligonucleotide
aggcgaucagaagggaugg

SEQ ID NO: 1223029 - RNA, 19 nt, Artificial Sequence
  Description of Artificial Sequence: Synthetic oligonucleotide
gaaccuaggcuaggaaggc

SEQ ID NO: 1223030 - RNA, 19 nt, Artificial Sequence
  Description of Artificial Sequence: Synthetic oligonucleotide
uucaugguguucacuccaa

SEQ ID NO: 1223031 - RNA, 19 nt, Artificial Sequence
  Description of Artificial Sequence: Synthetic oligonucleotide
gaucagaagggauggcaaa

SEQ ID NO: 1223032 - RNA, 19 nt, Artificial Sequence
  Description of Artificial Sequence: Synthetic oligonucleotide
ucaacguggcaauguccgc

SEQ ID NO: 1223033 - RNA, 19 nt, Artificial Sequence
  Description of Artificial Sequence: Synthetic oligonucleotide
uagaccacggcuggggcug

SEQ ID NO: 1223034 - RNA, 19 nt, Artificial Sequence
  Description of Artificial Sequence: Synthetic oligonucleotide
cuaguccagucauucggug

SEQ ID NO: 1223035 - RNA, 19 nt, Artificial Sequence
  Description of Artificial Sequence: Synthetic oligonucleotide
aacgaugagcccaucugaa

SEQ ID NO: 1223036 - RNA, 19 nt, Artificial Sequence
  Description of Artificial Sequence: Synthetic oligonucleotide
caguguuucugauccccgc

SEQ ID NO: 1223037 - RNA, 19 nt, Artificial Sequence
  Description of Artificial Sequence: Synthetic oligonucleotide
guuagagggaccugcccuc

SEQ ID NO: 1223038 - RNA, 19 nt, Artificial Sequence
  Description of Artificial Sequence: Synthetic oligonucleotide
agcccgccaagcccgaagg

SEQ ID NO: 1223039 - RNA, 19 nt, Artificial Sequence
  Description of Artificial Sequence: Synthetic oligonucleotide
ucccuaaggcgaucagaag

SEQ ID NO: 1223040 - RNA, 19 nt, Artificial Sequence
  Description of Artificial Sequence: Synthetic oligonucleotide
caucggucugaauguauuc

SEQ ID NO: 1223041 - RNA, 19 nt, Artificial Sequence
  Description of Artificial Sequence: Synthetic oligonucleotide
auagaccacggcuggggcu

SEQ ID NO: 1223042 - RNA, 19 nt, Artificial Sequence
  Description of Artificial Sequence: Synthetic oligonucleotide
ucacuccaauguagcggcg

SEQ ID NO: 1223043 - RNA, 19 nt, Artificial Sequence
  Description of Artificial Sequence: Synthetic oligonucleotide
gccucauaaacaucuucag

SEQ ID NO: 1223044 - RNA, 19 nt, Artificial Sequence
  Description of Artificial Sequence: Synthetic oligonucleotide
aacguggcaauguccgcua

SEQ ID NO: 1223045 - RNA, 19 nt, Artificial Sequence
  Description of Artificial Sequence: Synthetic oligonucleotide
acauauaaggucaguguuu

SEQ ID NO: 1223046 - RNA, 19 nt, Artificial Sequence
  Description of Artificial Sequence: Synthetic oligonucleotide
aauccucaacguggcaaug

SEQ ID NO: 1223047 - RNA, 19 nt, Artificial Sequence
  Description of Artificial Sequence: Synthetic oligonucleotide
ccacuacgaauccugagcc

SEQ ID NO: 1223048 - RNA, 19 nt, Artificial Sequence
  Description of Artificial Sequence: Synthetic oligonucleotide
agggaccugcccucuacag

SEQ ID NO: 1223049 - RNA, 19 nt, Artificial Sequence
  Description of Artificial Sequence: Synthetic oligonucleotide
auauaaggucaguguuucu

SEQ ID NO: 1223050 - RNA, 19 nt, Artificial Sequence
  Description of Artificial Sequence: Synthetic oligonucleotide
gacaugcccgugaugcaag

SEQ ID NO: 1223051 - RNA, 19 nt, Artificial Sequence
  Description of Artificial Sequence: Synthetic oligonucleotide
ugcaucggucugaauguau

SEQ ID NO: 1223052 - RNA, 19 nt, Artificial Sequence
  Description of Artificial Sequence: Synthetic oligonucleotide
gugccgauccaggauuucg

SEQ ID NO: 1223053 - RNA, 19 nt, Artificial Sequence
  Description of Artificial Sequence: Synthetic oligonucleotide
ggauccacagcuguaacca

SEQ ID NO: 1223054 - RNA, 19 nt, Artificial Sequence
  Description of Artificial Sequence: Synthetic oligonucleotide
gugauuggguucgaacagc

SEQ ID NO: 1223055 - RNA, 19 nt, Artificial Sequence
  Description of Artificial Sequence: Synthetic oligonucleotide
gcgaugaaauuguacuggc

SEQ ID NO: 1223056 - RNA, 19 nt, Artificial Sequence
  Description of Artificial Sequence: Synthetic oligonucleotide
acguuguuuugagggaguc

SEQ ID NO: 1223057 - RNA, 19 nt, Artificial Sequence
  Description of Artificial Sequence: Synthetic oligonucleotide
agcuguaaccacggccucg

SEQ ID NO: 1223058 - RNA, 19 nt, Artificial Sequence
  Description of Artificial Sequence: Synthetic oligonucleotide
uuccuaacgucagcagagc

SEQ ID NO: 1223059 - RNA, 19 nt, Artificial Sequence
  Description of Artificial Sequence: Synthetic oligonucleotide
cacucuugcuaguccaguc

SEQ ID NO: 1223060 - RNA, 19 nt, Artificial Sequence
  Description of Artificial Sequence: Synthetic oligonucleotide
uucugauccccgccggauc

SEQ ID NO: 1223061 - RNA, 19 nt, Artificial Sequence
  Description of Artificial Sequence: Synthetic oligonucleotide
ucaugguguucacuccaau

SEQ ID NO: 1223062 - RNA, 19 nt, Artificial Sequence
  Description of Artificial Sequence: Synthetic oligonucleotide
ugaucguguucugcagugc

SEQ ID NO: 1223063 - RNA, 19 nt, Artificial Sequence
  Description of Artificial Sequence: Synthetic oligonucleotide
uccagucauucggugaccu

SEQ ID NO: 1223064 - RNA, 19 nt, Artificial Sequence
  Description of Artificial Sequence: Synthetic oligonucleotide
ucguguucugcagugcaaa

SEQ ID NO: 1223065 - RNA, 19 nt, Artificial Sequence
  Description of Artificial Sequence: Synthetic oligonucleotide
cuugccggacaucagcaga

SEQ ID NO: 1223066 - RNA, 19 nt, Artificial Sequence
  Description of Artificial Sequence: Synthetic oligonucleotide
gucgggacuuccuaacguc

SEQ ID NO: 1223067 - RNA, 19 nt, Artificial Sequence
  Description of Artificial Sequence: Synthetic oligonucleotide
acaggauccacagcuguaa

SEQ ID NO: 1223068 - RNA, 19 nt, Artificial Sequence
  Description of Artificial Sequence: Synthetic oligonucleotide
acgaauccugagccguuug

SEQ ID NO: 1223069 - RNA, 19 nt, Artificial Sequence
  Description of Artificial Sequence: Synthetic oligonucleotide
cagucauucggugaccuca

SEQ ID NO: 1223070 - RNA, 19 nt, Artificial Sequence
  Description of Artificial Sequence: Synthetic oligonucleotide
agagaucuggggucccaga

SEQ ID NO: 1223071 - RNA, 19 nt, Artificial Sequence
  Description of Artificial Sequence: Synthetic oligonucleotide
ccggacaucagcagagcgg

SEQ ID NO: 1223072 - RNA, 19 nt, Artificial Sequence
  Description of Artificial Sequence: Synthetic oligonucleotide
gcacucagaaccuaggcua

SEQ ID NO: 1223073 - RNA, 19 nt, Artificial Sequence
  Description of Artificial Sequence: Synthetic oligonucleotide
gguguucacuccaaucacc

SEQ ID NO: 1223074 - RNA, 19 nt, Artificial Sequence
  Description of Artificial Sequence: Synthetic oligonucleotide
cgaugagcccaucugaagc

SEQ ID NO: 1223075 - RNA, 19 nt, Artificial Sequence
  Description of Artificial Sequence: Synthetic oligonucleotide
agggugccgauccaggauu

SEQ ID NO: 1223076 - RNA, 19 nt, Artificial Sequence
  Description of Artificial Sequence: Synthetic oligonucleotide
cuucgcggccugagaaagg

SEQ ID NO: 1223077 - RNA, 19 nt, Artificial Sequence
  Description of Artificial Sequence: Synthetic oligonucleotide
acggccucguaugugucuc

SEQ ID NO: 1223078 - RNA, 19 nt, Artificial Sequence
  Description of Artificial Sequence: Synthetic oligonucleotide
ggugcacucagaaccuagg

SEQ ID NO: 1223079 - RNA, 19 nt, Artificial Sequence
  Description of Artificial Sequence: Synthetic oligonucleotide
gugggcguugguaacgaug

SEQ ID NO: 1223080 - RNA, 19 nt, Artificial Sequence
  Description of Artificial Sequence: Synthetic oligonucleotide
cacuccaauguagcggcgc

SEQ ID NO: 1223081 - RNA, 19 nt, Artificial Sequence
  Description of Artificial Sequence: Synthetic oligonucleotide
agucauucggugaccucag

SEQ ID NO: 1223082 - RNA, 19 nt, Artificial Sequence
  Description of Artificial Sequence: Synthetic oligonucleotide
agccauucgcgccgacggg

SEQ ID NO: 1223083 - RNA, 19 nt, Artificial Sequence
  Description of Artificial Sequence: Synthetic oligonucleotide
uuucugauccccgccggau

SEQ ID NO: 1223084 - RNA, 19 nt, Artificial Sequence
  Description of Artificial Sequence: Synthetic oligonucleotide
agcuguaguucaacaagga

SEQ ID NO: 1223085 - RNA, 19 nt, Artificial Sequence
  Description of Artificial Sequence: Synthetic oligonucleotide
ugacuccuccacccaggug

SEQ ID NO: 1223086 - RNA, 19 nt, Artificial Sequence
  Description of Artificial Sequence: Synthetic oligonucleotide
cagaagggauggcaaagga

SEQ ID NO: 1223087 - RNA, 19 nt, Artificial Sequence
  Description of Artificial Sequence: Synthetic oligonucleotide
ucuugcuaguccagucauu

SEQ ID NO: 1223088 - RNA, 19 nt, Artificial Sequence
  Description of Artificial Sequence: Synthetic oligonucleotide
gucauucggugaccucagg

SEQ ID NO: 1223089 - RNA, 19 nt, Artificial Sequence
  Description of Artificial Sequence: Synthetic oligonucleotide
cacgugggcguugguaacg

SEQ ID NO: 1223090 - RNA, 19 nt, Artificial Sequence
  Description of Artificial Sequence: Synthetic oligonucleotide
agacgucagacaugcccgu

SEQ ID NO: 1223091 - RNA, 19 nt, Artificial Sequence
  Description of Artificial Sequence: Synthetic oligonucleotide
gggacagcggccagcaccg

SEQ ID NO: 1223092 - RNA, 19 nt, Artificial Sequence
  Description of Artificial Sequence: Synthetic oligonucleotide
cacuaggcagccgcacucg

SEQ ID NO: 1223093 - RNA, 19 nt, Artificial Sequence
  Description of Artificial Sequence: Synthetic oligonucleotide
gcugacaauaccagaugug

SEQ ID NO: 1223094 - RNA, 19 nt, Artificial Sequence
  Description of Artificial Sequence: Synthetic oligonucleotide
uuagagggaccugcccucu

SEQ ID NO: 1223095 - RNA, 19 nt, Artificial Sequence
  Description of Artificial Sequence: Synthetic oligonucleotide
gagccguuugagaugggga

SEQ ID NO: 1223096 - RNA, 19 nt, Artificial Sequence
  Description of Artificial Sequence: Synthetic oligonucleotide
cgauauagaccacggcugg

SEQ ID NO: 1223097 - RNA, 19 nt, Artificial Sequence
  Description of Artificial Sequence: Synthetic oligonucleotide
aaccacggccucguaugug

SEQ ID NO: 1223098 - RNA, 19 nt, Artificial Sequence
  Description of Artificial Sequence: Synthetic oligonucleotide
aggugcacucagaaccuag

SEQ ID NO: 1223099 - RNA, 19 nt, Artificial Sequence
  Description of Artificial Sequence: Synthetic oligonucleotide
agagggucgggacuuccua

SEQ ID NO: 1223100 - RNA, 19 nt, Artificial Sequence
  Description of Artificial Sequence: Synthetic oligonucleotide
gugguuagagggaccugcc

SEQ ID NO: 1223101 - RNA, 19 nt, Artificial Sequence
  Description of Artificial Sequence: Synthetic oligonucleotide
gccgcacucgcacucggcg

SEQ ID NO: 1223102 - RNA, 19 nt, Artificial Sequence
  Description of Artificial Sequence: Synthetic oligonucleotide
gggucgggacuuccuaacg

SEQ ID NO: 1223103 - RNA, 19 nt, Artificial Sequence
  Description of Artificial Sequence: Synthetic oligonucleotide
uggggucccagacgucaga

SEQ ID NO: 1223104 - RNA, 19 nt, Artificial Sequence
  Description of Artificial Sequence: Synthetic oligonucleotide
ccucaacguggcaaugucc

SEQ ID NO: 1223105 - RNA, 19 nt, Artificial Sequence
  Description of Artificial Sequence: Synthetic oligonucleotide
gacuucgcggccugagaaa

SEQ ID NO: 1223106 - RNA, 19 nt, Artificial Sequence
  Description of Artificial Sequence: Synthetic oligonucleotide
agcggggacagcggccagc

SEQ ID NO: 1223107 - RNA, 19 nt, Artificial Sequence
  Description of Artificial Sequence: Synthetic oligonucleotide
gagggucgggacuuccuaa

SEQ ID NO: 1223108 - RNA, 19 nt, Artificial Sequence
  Description of Artificial Sequence: Synthetic oligonucleotide
cucguaugugucuccacua

SEQ ID NO: 1223109 - RNA, 19 nt, Artificial Sequence
  Description of Artificial Sequence: Synthetic oligonucleotide
gaauguauuccacguuguu

SEQ ID NO: 1223110 - RNA, 19 nt, Artificial Sequence
  Description of Artificial Sequence: Synthetic oligonucleotide
agcaccgcgggaggacccc

SEQ ID NO: 1223111 - RNA, 19 nt, Artificial Sequence
  Description of Artificial Sequence: Synthetic oligonucleotide
guuucugauccccgccgga

SEQ ID NO: 1223112 - RNA, 19 nt, Artificial Sequence
  Description of Artificial Sequence: Synthetic oligonucleotide
gcccucuacagguccauug

SEQ ID NO: 1223113 - RNA, 19 nt, Artificial Sequence
  Description of Artificial Sequence: Synthetic oligonucleotide
cguaugugucuccacuagg

SEQ ID NO: 1223114 - RNA, 19 nt, Artificial Sequence
  Description of Artificial Sequence: Synthetic oligonucleotide
gcccgcccuacucagaggc

SEQ ID NO: 1223115 - RNA, 19 nt, Artificial Sequence
  Description of Artificial Sequence: Synthetic oligonucleotide
ugcccgcccuacucagagg

SEQ ID NO: 1223116 - RNA, 19 nt, Artificial Sequence
  Description of Artificial Sequence: Synthetic oligonucleotide
ccggucagccaccacgugg

SEQ ID NO: 1223117 - RNA, 19 nt, Artificial Sequence
  Description of Artificial Sequence: Synthetic oligonucleotide
agccugcaguccccacggc

SEQ ID NO: 1223118 - RNA, 19 nt, Artificial Sequence
  Description of Artificial Sequence: Synthetic oligonucleotide
gaaacucccuaaggcgauc

SEQ ID NO: 1223119 - RNA, 19 nt, Artificial Sequence
  Description of Artificial Sequence: Synthetic oligonucleotide
cacucggcgccggucagcc

SEQ ID NO: 1223120 - RNA, 19 nt, Artificial Sequence
  Description of Artificial Sequence: Synthetic oligonucleotide
caaacuccccuugccggac

SEQ ID NO: 1223121 - RNA, 19 nt, Artificial Sequence
  Description of Artificial Sequence: Synthetic oligonucleotide
uacgaauccugagccguuu

SEQ ID NO: 1223122 - RNA, 19 nt, Artificial Sequence
  Description of Artificial Sequence: Synthetic oligonucleotide
caauguagcggcgcuggga

SEQ ID NO: 1223123 - RNA, 19 nt, Artificial Sequence
  Description of Artificial Sequence: Synthetic oligonucleotide
gcugcaucggucugaaugu

SEQ ID NO: 1223124 - RNA, 19 nt, Artificial Sequence
  Description of Artificial Sequence: Synthetic oligonucleotide
accccgccccgccuucagc

SEQ ID NO: 1223125 - RNA, 19 nt, Artificial Sequence
  Description of Artificial Sequence: Synthetic oligonucleotide
cugaaggucagggguaaaa

SEQ ID NO: 1223126 - RNA, 19 nt, Artificial Sequence
  Description of Artificial Sequence: Synthetic oligonucleotide
ggacuucgcggccugagaa

SEQ ID NO: 1223127 - RNA, 19 nt, Artificial Sequence
  Description of Artificial Sequence: Synthetic oligonucleotide
gccauucgcgccgacgggg

SEQ ID NO: 1223128 - RNA, 19 nt, Artificial Sequence
  Description of Artificial Sequence: Synthetic oligonucleotide
cuaggcagccgcacucgca

SEQ ID NO: 1223129 - RNA, 19 nt, Artificial Sequence
  Description of Artificial Sequence: Synthetic oligonucleotide
gucuagguauaauuuuauu

SEQ ID NO: 1223130 - RNA, 19 nt, Artificial Sequence
  Description of Artificial Sequence: Synthetic oligonucleotide
ggucccagacgucagacau

SEQ ID NO: 1223131 - RNA, 19 nt, Artificial Sequence
  Description of Artificial Sequence: Synthetic oligonucleotide
ccacguuguuuugagggag

SEQ ID NO: 1223132 - RNA, 19 nt, Artificial Sequence
  Description of Artificial Sequence: Synthetic oligonucleotide
uggugguuagagggaccug

SEQ ID NO: 1223133 - RNA, 19 nt, Artificial Sequence
  Description of Artificial Sequence: Synthetic oligonucleotide
caccuccccauccagguua

SEQ ID NO: 1223134 - RNA, 19 nt, Artificial Sequence
  Description of Artificial Sequence: Synthetic oligonucleotide
guucugcagugcaaaggga

SEQ ID NO: 1223135 - RNA, 19 nt, Artificial Sequence
  Description of Artificial Sequence: Synthetic oligonucleotide
ccuaggcuaggaaggcgag

SEQ ID NO: 1223136 - RNA, 19 nt, Artificial Sequence
  Description of Artificial Sequence: Synthetic oligonucleotide
uguccgcuacaggauccac

SEQ ID NO: 1223137 - RNA, 19 nt, Artificial Sequence
  Description of Artificial Sequence: Synthetic oligonucleotide
uccgaggucccuggcugga

SEQ ID NO: 1223138 - RNA, 19 nt, Artificial Sequence
  Description of Artificial Sequence: Synthetic oligonucleotide
gcgaucagaagggauggca

SEQ ID NO: 1223139 - RNA, 19 nt, Artificial Sequence
  Description of Artificial Sequence: Synthetic oligonucleotide
uccgcacugccagcuguga

SEQ ID NO: 1223140 - RNA, 19 nt, Artificial Sequence
  Description of Artificial Sequence: Synthetic oligonucleotide
ucgcggccugagaaagggu

SEQ ID NO: 1223141 - RNA, 19 nt, Artificial Sequence
  Description of Artificial Sequence: Synthetic oligonucleotide
ggauaacuuuauggaugag

SEQ ID NO: 1223142 - RNA, 19 nt, Artificial Sequence
  Description of Artificial Sequence: Synthetic oligonucleotide
cagccugcaccccgccccg

SEQ ID NO: 1223143 - RNA, 19 nt, Artificial Sequence
  Description of Artificial Sequence: Synthetic oligonucleotide
cacugccagcugugauugg

SEQ ID NO: 1223144 - RNA, 19 nt, Artificial Sequence
  Description of Artificial Sequence: Synthetic oligonucleotide
cagacaugcccgugaugca

SEQ ID NO: 1223145 - RNA, 19 nt, Artificial Sequence
  Description of Artificial Sequence: Synthetic oligonucleotide
auguccgcuacaggaucca

SEQ ID NO: 1223146 - RNA, 19 nt, Artificial Sequence
  Description of Artificial Sequence: Synthetic oligonucleotide
cugauccccgccggauccg

SEQ ID NO: 1223147 - RNA, 19 nt, Artificial Sequence
  Description of Artificial Sequence: Synthetic oligonucleotide
guccgcuacaggauccaca

SEQ ID NO: 1223148 - RNA, 19 nt, Artificial Sequence
  Description of Artificial Sequence: Synthetic oligonucleotide
gccgugcccagagaucugg

SEQ ID NO: 1223149 - RNA, 19 nt, Artificial Sequence
  Description of Artificial Sequence: Synthetic oligonucleotide
caggccgaagaccagcccu

SEQ ID NO: 1223150 - RNA, 19 nt, Artificial Sequence
  Description of Artificial Sequence: Synthetic oligonucleotide
aucguguucugcagugcaa

SEQ ID NO: 1223151 - RNA, 19 nt, Artificial Sequence
  Description of Artificial Sequence: Synthetic oligonucleotide
gggacuucccauggcaaca

SEQ ID NO: 1223152 - RNA, 19 nt, Artificial Sequence
  Description of Artificial Sequence: Synthetic oligonucleotide
guccagucauucggugacc

SEQ ID NO: 1223153 - RNA, 19 nt, Artificial Sequence
  Description of Artificial Sequence: Synthetic oligonucleotide
gcuguaguucaacaaggau

SEQ ID NO: 1223154 - RNA, 19 nt, Artificial Sequence
  Description of Artificial Sequence: Synthetic oligonucleotide
caucagcagagcggccgag

SEQ ID NO: 1223155 - RNA, 19 nt, Artificial Sequence
  Description of Artificial Sequence: Synthetic oligonucleotide
cucuugcuaguccagucau

SEQ ID NO: 1223156 - RNA, 19 nt, Artificial Sequence
  Description of Artificial Sequence: Synthetic oligonucleotide
caggcacccgggccgggag

SEQ ID NO: 1223157 - RNA, 19 nt, Artificial Sequence
  Description of Artificial Sequence: Synthetic oligonucleotide
gauuggguucgaacagccu

SEQ ID NO: 1223158 - RNA, 19 nt, Artificial Sequence
  Description of Artificial Sequence: Synthetic oligonucleotide
uggguucgaacagccucau

SEQ ID NO: 1223159 - RNA, 19 nt, Artificial Sequence
  Description of Artificial Sequence: Synthetic oligonucleotide
cugagccguuugagauggg

SEQ ID NO: 1223160 - RNA, 19 nt, Artificial Sequence
  Description of Artificial Sequence: Synthetic oligonucleotide
gauggggacuucgcggccu

SEQ ID NO: 1223161 - RNA, 19 nt, Artificial Sequence
  Description of Artificial Sequence: Synthetic oligonucleotide
auccgcacugccagcugug

SEQ ID NO: 1223162 - RNA, 19 nt, Artificial Sequence
  Description of Artificial Sequence: Synthetic oligonucleotide
uccccgcggugcagaaacu

SEQ ID NO: 1223163 - RNA, 19 nt, Artificial Sequence
  Description of Artificial Sequence: Synthetic oligonucleotide
agccugaaggucaggggua

SEQ ID NO: 1223164 - RNA, 19 nt, Artificial Sequence
  Description of Artificial Sequence: Synthetic oligonucleotide
ccccaaagcccgccaagcc

SEQ ID NO: 1223165 - RNA, 19 nt, Artificial Sequence
  Description of Artificial Sequence: Synthetic oligonucleotide
cuggugguuagagggaccu

SEQ ID NO: 1223166 - RNA, 19 nt, Artificial Sequence
  Description of Artificial Sequence: Synthetic oligonucleotide
cggucugaauguauuccac

SEQ ID NO: 1223167 - RNA, 19 nt, Artificial Sequence
  Description of Artificial Sequence: Synthetic oligonucleotide
cacguuguuuugagggagu

SEQ ID NO: 1223168 - RNA, 19 nt, Artificial Sequence
  Description of Artificial Sequence: Synthetic oligonucleotide
ccaauguagcggcgcuggg

SEQ ID NO: 1223169 - RNA, 19 nt, Artificial Sequence
  Description of Artificial Sequence: Synthetic oligonucleotide
cgggacuuccuaacgucag

SEQ ID NO: 1223170 - RNA, 19 nt, Artificial Sequence
  Description of Artificial Sequence: Synthetic oligonucleotide
ggucgggacuuccuaacgu

SEQ ID NO: 1223171 - RNA, 19 nt, Artificial Sequence
  Description of Artificial Sequence: Synthetic oligonucleotide
agcccaucugaagccacua

SEQ ID NO: 1223172 - RNA, 19 nt, Artificial Sequence
  Description of Artificial Sequence: Synthetic oligonucleotide
ccgccagccauucgcgccg

SEQ ID NO: 1223173 - RNA, 19 nt, Artificial Sequence
  Description of Artificial Sequence: Synthetic oligonucleotide
agagcggccgaggggcagu

SEQ ID NO: 1223174 - RNA, 19 nt, Artificial Sequence
  Description of Artificial Sequence: Synthetic oligonucleotide
ccgcccuacucagaggcgg

SEQ ID NO: 1223175 - RNA, 19 nt, Artificial Sequence
  Description of Artificial Sequence: Synthetic oligonucleotide
cgcugggacccacugauuc

SEQ ID NO: 1223176 - RNA, 19 nt, Artificial Sequence
  Description of Artificial Sequence: Synthetic oligonucleotide
caccgcgggaggaccccgc

SEQ ID NO: 1223177 - RNA, 19 nt, Artificial Sequence
  Description of Artificial Sequence: Synthetic oligonucleotide
cagaggcggugcccugaag

SEQ ID NO: 1223178 - RNA, 19 nt, Artificial Sequence
  Description of Artificial Sequence: Synthetic oligonucleotide
ggcgcugggacccacugau

SEQ ID NO: 1223179 - RNA, 19 nt, Artificial Sequence
  Description of Artificial Sequence: Synthetic oligonucleotide
gcggccugagaaagggugc

SEQ ID NO: 1223180 - RNA, 19 nt, Artificial Sequence
  Description of Artificial Sequence: Synthetic oligonucleotide
cagccgugcccagagaucu

SEQ ID NO: 1223181 - RNA, 19 nt, Artificial Sequence
  Description of Artificial Sequence: Synthetic oligonucleotide
gcccaucugaagccacuac

SEQ ID NO: 1223182 - RNA, 19 nt, Artificial Sequence
  Description of Artificial Sequence: Synthetic oligonucleotide
agcugugauuggguucgaa

SEQ ID NO: 1223183 - RNA, 19 nt, Artificial Sequence
  Description of Artificial Sequence: Synthetic oligonucleotide
cucagaggcggugcccuga

SEQ ID NO: 1223184 - RNA, 19 nt, Artificial Sequence
  Description of Artificial Sequence: Synthetic oligonucleotide
gcagccgcacucgcacucg

SEQ ID NO: 1223185 - RNA, 19 nt, Artificial Sequence
  Description of Artificial Sequence: Synthetic oligonucleotide
cuugguucucggagcugua

SEQ ID NO: 1223186 - RNA, 19 nt, Artificial Sequence
  Description of Artificial Sequence: Synthetic oligonucleotide
gcggagcggggacagcggc

SEQ ID NO: 1223187 - RNA, 19 nt, Artificial Sequence
  Description of Artificial Sequence: Synthetic oligonucleotide
acucgcacucggcgccggu

SEQ ID NO: 1223188 - RNA, 19 nt, Artificial Sequence
  Description of Artificial Sequence: Synthetic oligonucleotide
cgaucagaagggauggcaa

SEQ ID NO: 1223189 - RNA, 19 nt, Artificial Sequence
  Description of Artificial Sequence: Synthetic oligonucleotide
ccgcacucgcacucggcgc

SEQ ID NO: 1223190 - RNA, 19 nt, Artificial Sequence
  Description of Artificial Sequence: Synthetic oligonucleotide
gggacuucgcggccugaga

SEQ ID NO: 1223191 - RNA, 19 nt, Artificial Sequence
  Description of Artificial Sequence: Synthetic oligonucleotide
ggcggugcccugaagccca

SEQ ID NO: 1223192 - RNA, 19 nt, Artificial Sequence
  Description of Artificial Sequence: Synthetic oligonucleotide
caaagcccgccaagcccga

SEQ ID NO: 1223193 - RNA, 19 nt, Artificial Sequence
  Description of Artificial Sequence: Synthetic oligonucleotide
ggcgaucagaagggauggc

SEQ ID NO: 1223194 - RNA, 19 nt, Artificial Sequence
  Description of Artificial Sequence: Synthetic oligonucleotide
caucagcuccgccucggcu

SEQ ID NO: 1223195 - RNA, 19 nt, Artificial Sequence
  Description of Artificial Sequence: Synthetic oligonucleotide
cacucgcacucggcgccgg

SEQ ID NO: 1223196 - RNA, 19 nt, Artificial Sequence
  Description of Artificial Sequence: Synthetic oligonucleotide
ccagucauucggugaccuc

SEQ ID NO: 1223197 - RNA, 19 nt, Artificial Sequence
  Description of Artificial Sequence: Synthetic oligonucleotide
ccgugcccagagaucuggg

SEQ ID NO: 1223198 - RNA, 19 nt, Artificial Sequence
  Description of Artificial Sequence: Synthetic oligonucleotide
gccucguaugugucuccac

SEQ ID NO: 1223199 - RNA, 19 nt, Artificial Sequence
  Description of Artificial Sequence: Synthetic oligonucleotide
gcuaguccagucauucggu

SEQ ID NO: 1223200 - RNA, 19 nt, Artificial Sequence
  Description of Artificial Sequence: Synthetic oligonucleotide
ccucguaugugucuccacu

SEQ ID NO: 1223201 - RNA, 19 nt, Artificial Sequence
  Description of Artificial Sequence: Synthetic oligonucleotide
ugguaacgaugagcccauc

SEQ ID NO: 1223202 - RNA, 19 nt, Artificial Sequence
  Description of Artificial Sequence: Synthetic oligonucleotide
cccgcccuacucagaggcg

SEQ ID NO: 1223203 - RNA, 19 nt, Artificial Sequence
  Description of Artificial Sequence: Synthetic oligonucleotide
ccagcaccgcgggaggacc

SEQ ID NO: 1223204 - RNA, 19 nt, Artificial Sequence
  Description of Artificial Sequence: Synthetic oligonucleotide
caccacgugggcguuggua

SEQ ID NO: 1223205 - RNA, 19 nt, Artificial Sequence
  Description of Artificial Sequence: Synthetic oligonucleotide
cacggccucguaugugucu

SEQ ID NO: 1223206 - RNA, 19 nt, Artificial Sequence
  Description of Artificial Sequence: Synthetic oligonucleotide
guaguucaacaaggaugcu

SEQ ID NO: 1223207 - RNA, 19 nt, Artificial Sequence
  Description of Artificial Sequence: Synthetic oligonucleotide
cuacgaauccugagccguu

SEQ ID NO: 1223208 - RNA, 19 nt, Artificial Sequence
  Description of Artificial Sequence: Synthetic oligonucleotide
uagcugcaucggucugaau

SEQ ID NO: 1223209 - RNA, 19 nt, Artificial Sequence
  Description of Artificial Sequence: Synthetic oligonucleotide
cacggccagccgugcccag

SEQ ID NO: 1223210 - RNA, 19 nt, Artificial Sequence
  Description of Artificial Sequence: Synthetic oligonucleotide
gcacucgcacucggcgccg

SEQ ID NO: 1223211 - RNA, 19 nt, Artificial Sequence
  Description of Artificial Sequence: Synthetic oligonucleotide
ggccucguaugugucucca

SEQ ID NO: 1223212 - RNA, 19 nt, Artificial Sequence
  Description of Artificial Sequence: Synthetic oligonucleotide
ggucacauauaaggucagu

SEQ ID NO: 1223213 - RNA, 19 nt, Artificial Sequence
  Description of Artificial Sequence: Synthetic oligonucleotide
agccgugcccagagaucug

SEQ ID NO: 1223214 - RNA, 19 nt, Artificial Sequence
  Description of Artificial Sequence: Synthetic oligonucleotide
gcccgccaagcccgaaggc

SEQ ID NO: 1223215 - RNA, 19 nt, Artificial Sequence
  Description of Artificial Sequence: Synthetic oligonucleotide
ccgauccaggauuucgaua

SEQ ID NO: 1223216 - RNA, 19 nt, Artificial Sequence
  Description of Artificial Sequence: Synthetic oligonucleotide
cugcaucggucugaaugua

SEQ ID NO: 1223217 - RNA, 19 nt, Artificial Sequence
  Description of Artificial Sequence: Synthetic oligonucleotide
ccgcuacaggauccacagc

SEQ ID NO: 1223218 - RNA, 19 nt, Artificial Sequence
  Description of Artificial Sequence: Synthetic oligonucleotide
gcaucggucugaauguauu

SEQ ID NO: 1223219 - RNA, 19 nt, Artificial Sequence
  Description of Artificial Sequence: Synthetic oligonucleotide
gccgauccaggauuucgau

SEQ ID NO: 1223220 - RNA, 19 nt, Artificial Sequence
  Description of Artificial Sequence: Synthetic oligonucleotide
gcggugcagaaacucccua

SEQ ID NO: 1223221 - RNA, 19 nt, Artificial Sequence
  Description of Artificial Sequence: Synthetic oligonucleotide
gccguuugagauggggacu

SEQ ID NO: 1223222 - RNA, 19 nt, Artificial Sequence
  Description of Artificial Sequence: Synthetic oligonucleotide
gggagcccaggauaacuuu

SEQ ID NO: 1223223 - RNA, 19 nt, Artificial Sequence
  Description of Artificial Sequence: Synthetic oligonucleotide
gccggucagccaccacgug

SEQ ID NO: 1223224 - RNA, 19 nt, Artificial Sequence
  Description of Artificial Sequence: Synthetic oligonucleotide
ccgaggggcagugugggaa

SEQ ID NO: 1223225 - RNA, 19 nt, Artificial Sequence
  Description of Artificial Sequence: Synthetic oligonucleotide
gcaccgcgggaggaccccg

SEQ ID NO: 1223226 - RNA, 19 nt, Artificial Sequence
  Description of Artificial Sequence: Synthetic oligonucleotide
guagcggcgcugggaccca

SEQ ID NO: 1223227 - RNA, 19 nt, Artificial Sequence
  Description of Artificial Sequence: Synthetic oligonucleotide
caggugcacucagaaccua

SEQ ID NO: 1223228 - RNA, 19 nt, Artificial Sequence
  Description of Artificial Sequence: Synthetic oligonucleotide
cguggcaauguccgcuaca

SEQ ID NO: 1223229 - RNA, 19 nt, Artificial Sequence
  Description of Artificial Sequence: Synthetic oligonucleotide
ccccgcggugcagaaacuc

SEQ ID NO: 1223230 - RNA, 19 nt, Artificial Sequence
  Description of Artificial Sequence: Synthetic oligonucleotide
cuguaaccacggccucgua

SEQ ID NO: 1223231 - RNA, 19 nt, Artificial Sequence
  Description of Artificial Sequence: Synthetic oligonucleotide
gaccacggcuggggcuguc

SEQ ID NO: 1223232 - RNA, 19 nt, Artificial Sequence
  Description of Artificial Sequence: Synthetic oligonucleotide
cggccucguaugugucucc

SEQ ID NO: 1223233 - RNA, 19 nt, Artificial Sequence
  Description of Artificial Sequence: Synthetic oligonucleotide
ggguucgaacagccucaua

SEQ ID NO: 1223234 - RNA, 19 nt, Artificial Sequence
  Description of Artificial Sequence: Synthetic oligonucleotide
cgcacucggcgccggucag

SEQ ID NO: 1223235 - RNA, 19 nt, Artificial Sequence
  Description of Artificial Sequence: Synthetic oligonucleotide
cagcugugauuggguucga

SEQ ID NO: 1223236 - RNA, 19 nt, Artificial Sequence
  Description of Artificial Sequence: Synthetic oligonucleotide
ggccagccgugcccagaga

SEQ ID NO: 1223237 - RNA, 19 nt, Artificial Sequence
  Description of Artificial Sequence: Synthetic oligonucleotide
ccacaucugcgaugaaauu

SEQ ID NO: 1223238 - RNA, 19 nt, Artificial Sequence
  Description of Artificial Sequence: Synthetic oligonucleotide
cgccccgccuucagcgcag

SEQ ID NO: 1223239 - RNA, 19 nt, Artificial Sequence
  Description of Artificial Sequence: Synthetic oligonucleotide
ccguuugagauggggacuu

SEQ ID NO: 1223240 - RNA, 19 nt, Artificial Sequence
  Description of Artificial Sequence: Synthetic oligonucleotide
gcgggccuccugggcacug

SEQ ID NO: 1223241 - RNA, 19 nt, Artificial Sequence
  Description of Artificial Sequence: Synthetic oligonucleotide
cugcaccccgccccgccuu

SEQ ID NO: 1223242 - RNA, 19 nt, Artificial Sequence
  Description of Artificial Sequence: Synthetic oligonucleotide
cagcuccgccucggcucuc

SEQ ID NO: 1223243 - RNA, 19 nt, Artificial Sequence
  Description of Artificial Sequence: Synthetic oligonucleotide
gggugccgauccaggauuu

SEQ ID NO: 1223244 - RNA, 19 nt, Artificial Sequence
  Description of Artificial Sequence: Synthetic oligonucleotide
gccccgccuucagcgcagc

SEQ ID NO: 1223245 - RNA, 19 nt, Artificial Sequence
  Description of Artificial Sequence: Synthetic oligonucleotide
ccuccccauccagguuaac

SEQ ID NO: 1223246 - RNA, 19 nt, Artificial Sequence
  Description of Artificial Sequence: Synthetic oligonucleotide
ccccugcgcccaccgccac

SEQ ID NO: 1223247 - RNA, 19 nt, Artificial Sequence
  Description of Artificial Sequence: Synthetic oligonucleotide
gcggcggagcggggacagc

SEQ ID NO: 1223248 - RNA, 19 nt, Artificial Sequence
  Description of Artificial Sequence: Synthetic oligonucleotide
cgcccuacucagaggcggu

SEQ ID NO: 1223249 - RNA, 19 nt, Artificial Sequence
  Description of Artificial Sequence: Synthetic oligonucleotide
cgugggcguugguaacgau

SEQ ID NO: 1223250 - RNA, 19 nt, Artificial Sequence
  Description of Artificial Sequence: Synthetic oligonucleotide
gcgcugggacccacugauu

SEQ ID NO: 1223251 - RNA, 19 nt, Artificial Sequence
  Description of Artificial Sequence: Synthetic oligonucleotide
ccgggccgggagagagggu

SEQ ID NO: 1223252 - RNA, 19 nt, Artificial Sequence
  Description of Artificial Sequence: Synthetic oligonucleotide
ccgccucggcucucuccuu

SEQ ID NO: 1223253 - RNA, 19 nt, Artificial Sequence
  Description of Artificial Sequence: Synthetic oligonucleotide
aaugcuacaaaccagaucu

SEQ ID NO: 1223254 - RNA, 19 nt, Artificial Sequence
  Description of Artificial Sequence: Synthetic oligonucleotide
aaggugguaagauaguacg

SEQ ID NO: 1223255 - RNA, 19 nt, Artificial Sequence
  Description of Artificial Sequence: Synthetic oligonucleotide
aaggcgaccagacagcagc

SEQ ID NO: 1223256 - RNA, 19 nt, Artificial Sequence
  Description of Artificial Sequence: Synthetic oligonucleotide
auugugggcagccugagcc

SEQ ID NO: 1223257 - RNA, 19 nt, Artificial Sequence
  Description of Artificial Sequence: Synthetic oligonucleotide
aacaacagcgaccuguuag

SEQ ID NO: 1223258 - RNA, 19 nt, Artificial Sequence
  Description of Artificial Sequence: Synthetic oligonucleotide
acaggaguagguuugcacc

SEQ ID NO: 1223259 - RNA, 19 nt, Artificial Sequence
  Description of Artificial Sequence: Synthetic oligonucleotide
auauuguaggccccaaagc

SEQ ID NO: 1223260 - RNA, 19 nt, Artificial Sequence
  Description of Artificial Sequence: Synthetic oligonucleotide
ucguguuccacaauaaggc

SEQ ID NO: 1223261 - RNA, 19 nt, Artificial Sequence
  Description of Artificial Sequence: Synthetic oligonucleotide
auggccauauuguaggccc

SEQ ID NO: 1223262 - RNA, 19 nt, Artificial Sequence
  Description of Artificial Sequence: Synthetic oligonucleotide
cacaauaaggccaagagga

SEQ ID NO: 1223263 - RNA, 19 nt, Artificial Sequence
  Description of Artificial Sequence: Synthetic oligonucleotide
aaucagcgagcccagcugc

SEQ ID NO: 1223264 - RNA, 19 nt, Artificial Sequence
  Description of Artificial Sequence: Synthetic oligonucleotide
uauaaagaaaggugguaag

SEQ ID NO: 1223265 - RNA, 19 nt, Artificial Sequence
  Description of Artificial Sequence: Synthetic oligonucleotide
aaccagugggaacaugagc

SEQ ID NO: 1223266 - RNA, 19 nt, Artificial Sequence
  Description of Artificial Sequence: Synthetic oligonucleotide
cagaagucaaagaacaaag

SEQ ID NO: 1223267 - RNA, 19 nt, Artificial Sequence
  Description of Artificial Sequence: Synthetic oligonucleotide
agcuuaaucucccagccuc

SEQ ID NO: 1223268 - RNA, 19 nt, Artificial Sequence
  Description of Artificial Sequence: Synthetic oligonucleotide
ucaccgguaccucagacag

SEQ ID NO: 1223269 - RNA, 19 nt, Artificial Sequence
  Description of Artificial Sequence: Synthetic oligonucleotide
cacaggauaaggaagauca

SEQ ID NO: 1223270 - RNA, 19 nt, Artificial Sequence
  Description of Artificial Sequence: Synthetic oligonucleotide
uuggaagcgaugcaacagg

SEQ ID NO: 1223271 - RNA, 19 nt, Artificial Sequence
  Description of Artificial Sequence: Synthetic oligonucleotide
ugguaagauaguacguagg

SEQ ID NO: 1223272 - RNA, 19 nt, Artificial Sequence
  Description of Artificial Sequence: Synthetic oligonucleotide
ugcaguaguccgcagauga

SEQ ID NO: 1223273 - RNA, 19 nt, Artificial Sequence
  Description of Artificial Sequence: Synthetic oligonucleotide
cauauuguaggccccaaag

SEQ ID NO: 1223274 - RNA, 19 nt, Artificial Sequence
  Description of Artificial Sequence: Synthetic oligonucleotide
aggcccauaaggcagacag

SEQ ID NO: 1223275 - RNA, 19 nt, Artificial Sequence
  Description of Artificial Sequence: Synthetic oligonucleotide
aggauaaggaagaucaccg

SEQ ID NO: 1223276 - RNA, 19 nt, Artificial Sequence
  Description of Artificial Sequence: Synthetic oligonucleotide
uccgcagaugagaagagcc

SEQ ID NO: 1223277 - RNA, 19 nt, Artificial Sequence
  Description of Artificial Sequence: Synthetic oligonucleotide
gauaccugagccuugggca

SEQ ID NO: 1223278 - RNA, 19 nt, Artificial Sequence
  Description of Artificial Sequence: Synthetic oligonucleotide
acaacagcgaccuguuagg

SEQ ID NO: 1223279 - RNA, 19 nt, Artificial Sequence
  Description of Artificial Sequence: Synthetic oligonucleotide
aagauaguacguaggcagc

SEQ ID NO: 1223280 - RNA, 19 nt, Artificial Sequence
  Description of Artificial Sequence: Synthetic oligonucleotide
ucuccgaggugccucaagg

SEQ ID NO: 1223281 - RNA, 19 nt, Artificial Sequence
  Description of Artificial Sequence: Synthetic oligonucleotide
gaagcgaugcaacaggguc

SEQ ID NO: 1223282 - RNA, 19 nt, Artificial Sequence
  Description of Artificial Sequence: Synthetic oligonucleotide
ugauaccugagccuugggc

SEQ ID NO: 1223283 - RNA, 19 nt, Artificial Sequence
  Description of Artificial Sequence: Synthetic oligonucleotide
auaguacguaggcagcugg

SEQ ID NO: 1223284 - RNA, 19 nt, Artificial Sequence
  Description of Artificial Sequence: Synthetic oligonucleotide
gaugaaggccacacuaugg

SEQ ID NO: 1223285 - RNA, 19 nt, Artificial Sequence
  Description of Artificial Sequence: Synthetic oligonucleotide
accgguaccucagacaggc

SEQ ID NO: 1223286 - RNA, 19 nt, Artificial Sequence
  Description of Artificial Sequence: Synthetic oligonucleotide
uaaucucccagccucuccc

SEQ ID NO: 1223287 - RNA, 19 nt, Artificial Sequence
  Description of Artificial Sequence: Synthetic oligonucleotide
gaugcaacagggucacuag

SEQ ID NO: 1223288 - RNA, 19 nt, Artificial Sequence
  Description of Artificial Sequence: Synthetic oligonucleotide
agugcguugacaaaggcca

SEQ ID NO: 1223289 - RNA, 19 nt, Artificial Sequence
  Description of Artificial Sequence: Synthetic oligonucleotide
gucguguuccacaauaagg

SEQ ID NO: 1223290 - RNA, 19 nt, Artificial Sequence
  Description of Artificial Sequence: Synthetic oligonucleotide
gguaagauaguacguaggc

SEQ ID NO: 1223291 - RNA, 19 nt, Artificial Sequence
  Description of Artificial Sequence: Synthetic oligonucleotide
uaaacggcaagaaggugac

SEQ ID NO: 1223292 - RNA, 19 nt, Artificial Sequence
  Description of Artificial Sequence: Synthetic oligonucleotide
auaaacggcaagaagguga

SEQ ID NO: 1223293 - RNA, 19 nt, Artificial Sequence
  Description of Artificial Sequence: Synthetic oligonucleotide
cuagacagaacaguccagg

SEQ ID NO: 1223294 - RNA, 19 nt, Artificial Sequence
  Description of Artificial Sequence: Synthetic oligonucleotide
aagagggcuggccacggag

SEQ ID NO: 1223295 - RNA, 19 nt, Artificial Sequence
  Description of Artificial Sequence: Synthetic oligonucleotide
ugggaacaugagcagggcg

SEQ ID NO: 1223296 - RNA, 19 nt, Artificial Sequence
  Description of Artificial Sequence: Synthetic oligonucleotide
guugcagacaggugguagg

SEQ ID NO: 1223297 - RNA, 19 nt, Artificial Sequence
  Description of Artificial Sequence: Synthetic oligonucleotide
gugguaagauaguacguag

SEQ ID NO: 1223298 - RNA, 19 nt, Artificial Sequence
  Description of Artificial Sequence: Synthetic oligonucleotide
cagcacguuaaccaguggg

SEQ ID NO: 1223299 - RNA, 19 nt, Artificial Sequence
  Description of Artificial Sequence: Synthetic oligonucleotide
cacacuaugguguccgccc

SEQ ID NO: 1223300 - RNA, 19 nt, Artificial Sequence
  Description of Artificial Sequence: Synthetic oligonucleotide
uccccuaauguccuugggc

SEQ ID NO: 1223301 - RNA, 19 nt, Artificial Sequence
  Description of Artificial Sequence: Synthetic oligonucleotide
caauaaggccaagaggacg

SEQ ID NO: 1223302 - RNA, 19 nt, Artificial Sequence
  Description of Artificial Sequence: Synthetic oligonucleotide
uaaccagugggaacaugag

SEQ ID NO: 1223303 - RNA, 19 nt, Artificial Sequence
  Description of Artificial Sequence: Synthetic oligonucleotide
caggaguagguuugcaccg

SEQ ID NO: 1223304 - RNA, 19 nt, Artificial Sequence
  Description of Artificial Sequence: Synthetic oligonucleotide
agucguguuccacaauaag

SEQ ID NO: 1223305 - RNA, 19 nt, Artificial Sequence
  Description of Artificial Sequence: Synthetic oligonucleotide
guagguuugcaccgaaggc

SEQ ID NO: 1223306 - RNA, 19 nt, Artificial Sequence
  Description of Artificial Sequence: Synthetic oligonucleotide
cugaaugcuacaaaccaga

SEQ ID NO: 1223307 - RNA, 19 nt, Artificial Sequence
  Description of Artificial Sequence: Synthetic oligonucleotide
caggauaaggaagaucacc

SEQ ID NO: 1223308 - RNA, 19 nt, Artificial Sequence
  Description of Artificial Sequence: Synthetic oligonucleotide
gccaagugaggcuagacag

SEQ ID NO: 1223309 - RNA, 19 nt, Artificial Sequence
  Description of Artificial Sequence: Synthetic oligonucleotide
cauagcugagacaggcugc

SEQ ID NO: 1223310 - RNA, 19 nt, Artificial Sequence
  Description of Artificial Sequence: Synthetic oligonucleotide
ugucaggagggccauugug

SEQ ID NO: 1223311 - RNA, 19 nt, Artificial Sequence
  Description of Artificial Sequence: Synthetic oligonucleotide
gucacgcaagaucacaccc

SEQ ID NO: 1223312 - RNA, 19 nt, Artificial Sequence
  Description of Artificial Sequence: Synthetic oligonucleotide
guuacaggggcacccagug

SEQ ID NO: 1223313 - RNA, 19 nt, Artificial Sequence
  Description of Artificial Sequence: Synthetic oligonucleotide
ugauagccacccaggagcc

SEQ ID NO: 1223314 - RNA, 19 nt, Artificial Sequence
  Description of Artificial Sequence: Synthetic oligonucleotide
gauaaggaagaucaccggu

SEQ ID NO: 1223315 - RNA, 19 nt, Artificial Sequence
  Description of Artificial Sequence: Synthetic oligonucleotide
gaaugcuacaaaccagauc

SEQ ID NO: 1223316 - RNA, 19 nt, Artificial Sequence
  Description of Artificial Sequence: Synthetic oligonucleotide
gaagucguguuccacaaua

SEQ ID NO: 1223317 - RNA, 19 nt, Artificial Sequence
  Description of Artificial Sequence: Synthetic oligonucleotide
uugauacagguggugauac

SEQ ID NO: 1223318 - RNA, 19 nt, Artificial Sequence
  Description of Artificial Sequence: Synthetic oligonucleotide
ucacgcaagaucacaccca

SEQ ID NO: 1223319 - RNA, 19 nt, Artificial Sequence
  Description of Artificial Sequence: Synthetic oligonucleotide
cagcugaaugcuacaaacc

SEQ ID NO: 1223320 - RNA, 19 nt, Artificial Sequence
  Description of Artificial Sequence: Synthetic oligonucleotide
ucaagguggugccuggcgu

SEQ ID NO: 1223321 - RNA, 19 nt, Artificial Sequence
  Description of Artificial Sequence: Synthetic oligonucleotide
ucagggugucuuguggugg

SEQ ID NO: 1223322 - RNA, 19 nt, Artificial Sequence
  Description of Artificial Sequence: Synthetic oligonucleotide
agcccguugauagccaccc

SEQ ID NO: 1223323 - RNA, 19 nt, Artificial Sequence
  Description of Artificial Sequence: Synthetic oligonucleotide
cuauaaagaaaggugguaa

SEQ ID NO: 1223324 - RNA, 19 nt, Artificial Sequence
  Description of Artificial Sequence: Synthetic oligonucleotide
uacagguggugauaccuga

SEQ ID NO: 1223325 - RNA, 19 nt, Artificial Sequence
  Description of Artificial Sequence: Synthetic oligonucleotide
acguuaaccagugggaaca

SEQ ID NO: 1223326 - RNA, 19 nt, Artificial Sequence
  Description of Artificial Sequence: Synthetic oligonucleotide
aaaaggcgaccagacagca

SEQ ID NO: 1223327 - RNA, 19 nt, Artificial Sequence
  Description of Artificial Sequence: Synthetic oligonucleotide
accacggaguagaugaagg

SEQ ID NO: 1223328 - RNA, 19 nt, Artificial Sequence
  Description of Artificial Sequence: Synthetic oligonucleotide
cagggcgccaaucagcgag

SEQ ID NO: 1223329 - RNA, 19 nt, Artificial Sequence
  Description of Artificial Sequence: Synthetic oligonucleotide
gagugcguugacaaaggcc

SEQ ID NO: 1223330 - RNA, 19 nt, Artificial Sequence
  Description of Artificial Sequence: Synthetic oligonucleotide
aggcuagacagaacagucc

SEQ ID NO: 1223331 - RNA, 19 nt, Artificial Sequence
  Description of Artificial Sequence: Synthetic oligonucleotide
cacugacuuccacugaccc

SEQ ID NO: 1223332 - RNA, 19 nt, Artificial Sequence
  Description of Artificial Sequence: Synthetic oligonucleotide
cacgaggccacugagcccc

SEQ ID NO: 1223333 - RNA, 19 nt, Artificial Sequence
  Description of Artificial Sequence: Synthetic oligonucleotide
gaaguggugagaagcggug

SEQ ID NO: 1223334 - RNA, 19 nt, Artificial Sequence
  Description of Artificial Sequence: Synthetic oligonucleotide
uaguacguaggcagcuggc

SEQ ID NO: 1223335 - RNA, 19 nt, Artificial Sequence
  Description of Artificial Sequence: Synthetic oligonucleotide
gacuucuccaccccaguga

SEQ ID NO: 1223336 - RNA, 19 nt, Artificial Sequence
  Description of Artificial Sequence: Synthetic oligonucleotide
gaggcuagacagaacaguc

SEQ ID NO: 1223337 - RNA, 19 nt, Artificial Sequence
  Description of Artificial Sequence: Synthetic oligonucleotide
gaagaucaccgguaccuca

SEQ ID NO: 1223338 - RNA, 19 nt, Artificial Sequence
  Description of Artificial Sequence: Synthetic oligonucleotide
cacgcaagaucacacccag

SEQ ID NO: 1223339 - RNA, 19 nt, Artificial Sequence
  Description of Artificial Sequence: Synthetic oligonucleotide
augagcagggcgccaauca

SEQ ID NO: 1223340 - RNA, 19 nt, Artificial Sequence
  Description of Artificial Sequence: Synthetic oligonucleotide
agagccgcagcacguuaac

SEQ ID NO: 1223341 - RNA, 19 nt, Artificial Sequence
  Description of Artificial Sequence: Synthetic oligonucleotide
gauaguacguaggcagcug

SEQ ID NO: 1223342 - RNA, 19 nt, Artificial Sequence
  Description of Artificial Sequence: Synthetic oligonucleotide
uggcucauaaacggcaaga

SEQ ID NO: 1223343 - RNA, 19 nt, Artificial Sequence
  Description of Artificial Sequence: Synthetic oligonucleotide
ggcacgaggccacugagcc

SEQ ID NO: 1223344 - RNA, 19 nt, Artificial Sequence
  Description of Artificial Sequence: Synthetic oligonucleotide
caccgaaggcagcacaccg

SEQ ID NO: 1223345 - RNA, 19 nt, Artificial Sequence
  Description of Artificial Sequence: Synthetic oligonucleotide
ugcaccgaaggcagcacac

SEQ ID NO: 1223346 - RNA, 19 nt, Artificial Sequence
  Description of Artificial Sequence: Synthetic oligonucleotide
gauacagguggugauaccu

SEQ ID NO: 1223347 - RNA, 19 nt, Artificial Sequence
  Description of Artificial Sequence: Synthetic oligonucleotide
aucaccgguaccucagaca

SEQ ID NO: 1223348 - RNA, 19 nt, Artificial Sequence
  Description of Artificial Sequence: Synthetic oligonucleotide
cacguuaaccagugggaac

SEQ ID NO: 1223349 - RNA, 19 nt, Artificial Sequence
  Description of Artificial Sequence: Synthetic oligonucleotide
ugauacagguggugauacc

SEQ ID NO: 1223350 - RNA, 19 nt, Artificial Sequence
  Description of Artificial Sequence: Synthetic oligonucleotide
cauaaggcagacaggagua

SEQ ID NO: 1223351 - RNA, 19 nt, Artificial Sequence
  Description of Artificial Sequence: Synthetic oligonucleotide
ugacaaaggccaccacgga

SEQ ID NO: 1223352 - RNA, 19 nt, Artificial Sequence
  Description of Artificial Sequence: Synthetic oligonucleotide
cagguggugauaccugagc

SEQ ID NO: 1223353 - RNA, 19 nt, Artificial Sequence
  Description of Artificial Sequence: Synthetic oligonucleotide
guaagauaguacguaggca

SEQ ID NO: 1223354 - RNA, 19 nt, Artificial Sequence
  Description of Artificial Sequence: Synthetic oligonucleotide
ucucguggccugauggagu

SEQ ID NO: 1223355 - RNA, 19 nt, Artificial Sequence
  Description of Artificial Sequence: Synthetic oligonucleotide
caaagcugguucccaacac

SEQ ID NO: 1223356 - RNA, 19 nt, Artificial Sequence
  Description of Artificial Sequence: Synthetic oligonucleotide
guaggcaacaggcccauaa

SEQ ID NO: 1223357 - RNA, 19 nt, Artificial Sequence
  Description of Artificial Sequence: Synthetic oligonucleotide
agcacgaugaggacuucuc

SEQ ID NO: 1223358 - RNA, 19 nt, Artificial Sequence
  Description of Artificial Sequence: Synthetic oligonucleotide
uccucugcgucucguggcc

SEQ ID NO: 1223359 - RNA, 19 nt, Artificial Sequence
  Description of Artificial Sequence: Synthetic oligonucleotide
ucgggcaacucagucacca

SEQ ID NO: 1223360 - RNA, 19 nt, Artificial Sequence
  Description of Artificial Sequence: Synthetic oligonucleotide
caucaccuugacauagcug

SEQ ID NO: 1223361 - RNA, 19 nt, Artificial Sequence
  Description of Artificial Sequence: Synthetic oligonucleotide
agauaguacguaggcagcu

SEQ ID NO: 1223362 - RNA, 19 nt, Artificial Sequence
  Description of Artificial Sequence: Synthetic oligonucleotide
agguuggaagcgaugcaac

SEQ ID NO: 1223363 - RNA, 19 nt, Artificial Sequence
  Description of Artificial Sequence: Synthetic oligonucleotide
agguuugcaccgaaggcag

SEQ ID NO: 1223364 - RNA, 19 nt, Artificial Sequence
  Description of Artificial Sequence: Synthetic oligonucleotide
gaucaccgguaccucagac

SEQ ID NO: 1223365 - RNA, 19 nt, Artificial Sequence
  Description of Artificial Sequence: Synthetic oligonucleotide
aggaagucguguuccacaa

SEQ ID NO: 1223366 - RNA, 19 nt, Artificial Sequence
  Description of Artificial Sequence: Synthetic oligonucleotide
cuccggucacgcaagauca

SEQ ID NO: 1223367 - RNA, 19 nt, Artificial Sequence
  Description of Artificial Sequence: Synthetic oligonucleotide
auaaggaagaucaccggua

SEQ ID NO: 1223368 - RNA, 19 nt, Artificial Sequence
  Description of Artificial Sequence: Synthetic oligonucleotide
cagcacccaggaaagcacg

SEQ ID NO: 1223369 - RNA, 19 nt, Artificial Sequence
  Description of Artificial Sequence: Synthetic oligonucleotide
ggcagcuuaaucucccagc

SEQ ID NO: 1223370 - RNA, 19 nt, Artificial Sequence
  Description of Artificial Sequence: Synthetic oligonucleotide
agaaguggugagaagcggu

SEQ ID NO: 1223371 - RNA, 19 nt, Artificial Sequence
  Description of Artificial Sequence: Synthetic oligonucleotide
acugcggcuccggucacgc

SEQ ID NO: 1223372 - RNA, 19 nt, Artificial Sequence
  Description of Artificial Sequence: Synthetic oligonucleotide
uggccugauggagugcagg

SEQ ID NO: 1223373 - RNA, 19 nt, Artificial Sequence
  Description of Artificial Sequence: Synthetic oligonucleotide
agcuggaugaccacaguga

SEQ ID NO: 1223374 - RNA, 19 nt, Artificial Sequence
  Description of Artificial Sequence: Synthetic oligonucleotide
uugcaccgaaggcagcaca

SEQ ID NO: 1223375 - RNA, 19 nt, Artificial Sequence
  Description of Artificial Sequence: Synthetic oligonucleotide
ugcguugacaaaggccacc

SEQ ID NO: 1223376 - RNA, 19 nt, Artificial Sequence
  Description of Artificial Sequence: Synthetic oligonucleotide
auaccugagccuugggcaa

SEQ ID NO: 1223377 - RNA, 19 nt, Artificial Sequence
  Description of Artificial Sequence: Synthetic oligonucleotide
ucuauggagccuugccguc

SEQ ID NO: 1223378 - RNA, 19 nt, Artificial Sequence
  Description of Artificial Sequence: Synthetic oligonucleotide
uagcgacucuccgaggugc

SEQ ID NO: 1223379 - RNA, 19 nt, Artificial Sequence
  Description of Artificial Sequence: Synthetic oligonucleotide
agcaaccccaggaacaaca

SEQ ID NO: 1223380 - RNA, 19 nt, Artificial Sequence
  Description of Artificial Sequence: Synthetic oligonucleotide
agaggacgcaggcagccgu

SEQ ID NO: 1223381 - RNA, 19 nt, Artificial Sequence
  Description of Artificial Sequence: Synthetic oligonucleotide
aguggagaagguccucuau

SEQ ID NO: 1223382 - RNA, 19 nt, Artificial Sequence
  Description of Artificial Sequence: Synthetic oligonucleotide
ugaccugggaguggagaag

SEQ ID NO: 1223383 - RNA, 19 nt, Artificial Sequence
  Description of Artificial Sequence: Synthetic oligonucleotide
auugauacagguggugaua

SEQ ID NO: 1223384 - RNA, 19 nt, Artificial Sequence
  Description of Artificial Sequence: Synthetic oligonucleotide
guaguccgcagaugagaag

SEQ ID NO: 1223385 - RNA, 19 nt, Artificial Sequence
  Description of Artificial Sequence: Synthetic oligonucleotide
auagccacccaggagccca

SEQ ID NO: 1223386 - RNA, 19 nt, Artificial Sequence
  Description of Artificial Sequence: Synthetic oligonucleotide
uggccauauuguaggcccc

SEQ ID NO: 1223387 - RNA, 19 nt, Artificial Sequence
  Description of Artificial Sequence: Synthetic oligonucleotide
cagugggaacaugagcagg

SEQ ID NO: 1223388 - RNA, 19 nt, Artificial Sequence
  Description of Artificial Sequence: Synthetic oligonucleotide
ugcaccgcugccccacacc

SEQ ID NO: 1223389 - RNA, 19 nt, Artificial Sequence
  Description of Artificial Sequence: Synthetic oligonucleotide
gucaaagaacaaagucugc

SEQ ID NO: 1223390 - RNA, 19 nt, Artificial Sequence
  Description of Artificial Sequence: Synthetic oligonucleotide
ggcagcuggcucauaaacg

SEQ ID NO: 1223391 - RNA, 19 nt, Artificial Sequence
  Description of Artificial Sequence: Synthetic oligonucleotide
gaacaguccaggcugcagu

SEQ ID NO: 1223392 - RNA, 19 nt, Artificial Sequence
  Description of Artificial Sequence: Synthetic oligonucleotide
cccuccccuauaaagaaag

SEQ ID NO: 1223393 - RNA, 19 nt, Artificial Sequence
  Description of Artificial Sequence: Synthetic oligonucleotide
agaaaggugguaagauagu

SEQ ID NO: 1223394 - RNA, 19 nt, Artificial Sequence
  Description of Artificial Sequence: Synthetic oligonucleotide
aguaguccgcagaugagaa

SEQ ID NO: 1223395 - RNA, 19 nt, Artificial Sequence
  Description of Artificial Sequence: Synthetic oligonucleotide
cuauggagccuugccgucc

SEQ ID NO: 1223396 - RNA, 19 nt, Artificial Sequence
  Description of Artificial Sequence: Synthetic oligonucleotide
cuggcucauaaacggcaag

SEQ ID NO: 1223397 - RNA, 19 nt, Artificial Sequence
  Description of Artificial Sequence: Synthetic oligonucleotide
aaagcacgaugaggacuuc

SEQ ID NO: 1223398 - RNA, 19 nt, Artificial Sequence
  Description of Artificial Sequence: Synthetic oligonucleotide
ugccuaugcacaggauaag

SEQ ID NO: 1223399 - RNA, 19 nt, Artificial Sequence
  Description of Artificial Sequence: Synthetic oligonucleotide
aggcuacacugacuuccac

SEQ ID NO: 1223400 - RNA, 19 nt, Artificial Sequence
  Description of Artificial Sequence: Synthetic oligonucleotide
gcgucucguggccugaugg

SEQ ID NO: 1223401 - RNA, 19 nt, Artificial Sequence
  Description of Artificial Sequence: Synthetic oligonucleotide
caccagugcgggcacgagg

SEQ ID NO: 1223402 - RNA, 19 nt, Artificial Sequence
  Description of Artificial Sequence: Synthetic oligonucleotide
gacuuccccagguucccac

SEQ ID NO: 1223403 - RNA, 19 nt, Artificial Sequence
  Description of Artificial Sequence: Synthetic oligonucleotide
agcgguggggccagguagc

SEQ ID NO: 1223404 - RNA, 19 nt, Artificial Sequence
  Description of Artificial Sequence: Synthetic oligonucleotide
cacccagugagcuggcguc

SEQ ID NO: 1223405 - RNA, 19 nt, Artificial Sequence
  Description of Artificial Sequence: Synthetic oligonucleotide
uccuaauacagggcacagu

SEQ ID NO: 1223406 - RNA, 19 nt, Artificial Sequence
  Description of Artificial Sequence: Synthetic oligonucleotide
ggucacgcaagaucacacc

SEQ ID NO: 1223407 - RNA, 19 nt, Artificial Sequence
  Description of Artificial Sequence: Synthetic oligonucleotide
guagcgacucuccgaggug

SEQ ID NO: 1223408 - RNA, 19 nt, Artificial Sequence
  Description of Artificial Sequence: Synthetic oligonucleotide
gugaggcuagacagaacag

SEQ ID NO: 1223409 - RNA, 19 nt, Artificial Sequence
  Description of Artificial Sequence: Synthetic oligonucleotide
gugccuaugcacaggauaa

SEQ ID NO: 1223410 - RNA, 19 nt, Artificial Sequence
  Description of Artificial Sequence: Synthetic oligonucleotide
cuccuaauacagggcacag

SEQ ID NO: 1223411 - RNA, 19 nt, Artificial Sequence
  Description of Artificial Sequence: Synthetic oligonucleotide
cauugugggcagccugagc

SEQ ID NO: 1223412 - RNA, 19 nt, Artificial Sequence
  Description of Artificial Sequence: Synthetic oligonucleotide
gguaccucagacaggcagc

SEQ ID NO: 1223413 - RNA, 19 nt, Artificial Sequence
  Description of Artificial Sequence: Synthetic oligonucleotide
uuugcaccgaaggcagcac

SEQ ID NO: 1223414 - RNA, 19 nt, Artificial Sequence
  Description of Artificial Sequence: Synthetic oligonucleotide
gugauaccugagccuuggg

SEQ ID NO: 1223415 - RNA, 19 nt, Artificial Sequence
  Description of Artificial Sequence: Synthetic oligonucleotide
gguugcagacaggugguag

SEQ ID NO: 1223416 - RNA, 19 nt, Artificial Sequence
  Description of Artificial Sequence: Synthetic oligonucleotide
caacagcgaccuguuaggc

SEQ ID NO: 1223417 - RNA, 19 nt, Artificial Sequence
  Description of Artificial Sequence: Synthetic oligonucleotide
ccguugauagccacccagg

SEQ ID NO: 1223418 - RNA, 19 nt, Artificial Sequence
  Description of Artificial Sequence: Synthetic oligonucleotide
gguuggaagcgaugcaaca

SEQ ID NO: 1223419 - RNA, 19 nt, Artificial Sequence
  Description of Artificial Sequence: Synthetic oligonucleotide
agaucacacccagcaucac

SEQ ID NO: 1223420 - RNA, 19 nt, Artificial Sequence
  Description of Artificial Sequence: Synthetic oligonucleotide
aggugguaagauaguacgu

SEQ ID NO: 1223421 - RNA, 19 nt, Artificial Sequence
  Description of Artificial Sequence: Synthetic oligonucleotide
ccgcagaugagaagagccg

SEQ ID NO: 1223422 - RNA, 19 nt, Artificial Sequence
  Description of Artificial Sequence: Synthetic oligonucleotide
guuaaccagugggaacaug

SEQ ID NO: 1223423 - RNA, 19 nt, Artificial Sequence
  Description of Artificial Sequence: Synthetic oligonucleotide
agcgacucuccgaggugcc

SEQ ID NO: 1223424 - RNA, 19 nt, Artificial Sequence
  Description of Artificial Sequence: Synthetic oligonucleotide
uugcaacuccaggugggga

SEQ ID NO: 1223425 - RNA, 19 nt, Artificial Sequence
  Description of Artificial Sequence: Synthetic oligonucleotide
cguguuccacaauaaggcc

SEQ ID NO: 1223426 - RNA, 19 nt, Artificial Sequence
  Description of Artificial Sequence: Synthetic oligonucleotide
aagagccgcagcacguuaa

SEQ ID NO: 1223427 - RNA, 19 nt, Artificial Sequence
  Description of Artificial Sequence: Synthetic oligonucleotide
cccguugauagccacccag

SEQ ID NO: 1223428 - RNA, 19 nt, Artificial Sequence
  Description of Artificial Sequence: Synthetic oligonucleotide
ugagccccuccccuauaaa

SEQ ID NO: 1223429 - RNA, 19 nt, Artificial Sequence
  Description of Artificial Sequence: Synthetic oligonucleotide
uccggucacgcaagaucac

SEQ ID NO: 1223430 - RNA, 19 nt, Artificial Sequence
  Description of Artificial Sequence: Synthetic oligonucleotide
guccuauccuccaggucag

SEQ ID NO: 1223431 - RNA, 19 nt, Artificial Sequence
  Description of Artificial Sequence: Synthetic oligonucleotide
caguaguccgcagaugaga

SEQ ID NO: 1223432 - RNA, 19 nt, Artificial Sequence
  Description of Artificial Sequence: Synthetic oligonucleotide
agcuggcguccucugcguc

SEQ ID NO: 1223433 - RNA, 19 nt, Artificial Sequence
  Description of Artificial Sequence: Synthetic oligonucleotide
agaugcagaccagcaggug

SEQ ID NO: 1223434 - RNA, 19 nt, Artificial Sequence
  Description of Artificial Sequence: Synthetic oligonucleotide
agggcgccaaucagcgagc

SEQ ID NO: 1223435 - RNA, 19 nt, Artificial Sequence
  Description of Artificial Sequence: Synthetic oligonucleotide
aggauagcaggaggaagaa

SEQ ID NO: 1223436 - RNA, 19 nt, Artificial Sequence
  Description of Artificial Sequence: Synthetic oligonucleotide
gggcuccuaauacagggca

SEQ ID NO: 1223437 - RNA, 19 nt, Artificial Sequence
  Description of Artificial Sequence: Synthetic oligonucleotide
gcuccggucacgcaagauc

SEQ ID NO: 1223438 - RNA, 19 nt, Artificial Sequence
  Description of Artificial Sequence: Synthetic oligonucleotide
gcauugauacaggugguga

SEQ ID NO: 1223439 - RNA, 19 nt, Artificial Sequence
  Description of Artificial Sequence: Synthetic oligonucleotide
ggcauugauacagguggug

SEQ ID NO: 1223440 - RNA, 19 nt, Artificial Sequence
  Description of Artificial Sequence: Synthetic oligonucleotide
agaucucucagaagucaaa

SEQ ID NO: 1223441 - RNA, 19 nt, Artificial Sequence
  Description of Artificial Sequence: Synthetic oligonucleotide
ggccaagugaggcuagaca

SEQ ID NO: 1223442 - RNA, 19 nt, Artificial Sequence
  Description of Artificial Sequence: Synthetic oligonucleotide
acgcaagaucacacccagc

SEQ ID NO: 1223443 - RNA, 19 nt, Artificial Sequence
  Description of Artificial Sequence: Synthetic oligonucleotide
cagccgugccuaugcacag

SEQ ID NO: 1223444 - RNA, 19 nt, Artificial Sequence
  Description of Artificial Sequence: Synthetic oligonucleotide
gugagcuggcguccucugc

SEQ ID NO: 1223445 - RNA, 19 nt, Artificial Sequence
  Description of Artificial Sequence: Synthetic oligonucleotide
gcuacaaaccagaucucuc

SEQ ID NO: 1223446 - RNA, 19 nt, Artificial Sequence
  Description of Artificial Sequence: Synthetic oligonucleotide
gauagccacccaggagccc

SEQ ID NO: 1223447 - RNA, 19 nt, Artificial Sequence
  Description of Artificial Sequence: Synthetic oligonucleotide
cauugauacagguggugau

SEQ ID NO: 1223448 - RNA, 19 nt, Artificial Sequence
  Description of Artificial Sequence: Synthetic oligonucleotide
cucugcgucucguggccug

SEQ ID NO: 1223449 - RNA, 19 nt, Artificial Sequence
  Description of Artificial Sequence: Synthetic oligonucleotide
cuauccuccaggucaggcu

SEQ ID NO: 1223450 - RNA, 19 nt, Artificial Sequence
  Description of Artificial Sequence: Synthetic oligonucleotide
caccgguaccucagacagg

SEQ ID NO: 1223451 - RNA, 19 nt, Artificial Sequence
  Description of Artificial Sequence: Synthetic oligonucleotide
gagccgcagcacguuaacc

SEQ ID NO: 1223452 - RNA, 19 nt, Artificial Sequence
  Description of Artificial Sequence: Synthetic oligonucleotide
cuugggcugccuccagcug

SEQ ID NO: 1223453 - RNA, 19 nt, Artificial Sequence
  Description of Artificial Sequence: Synthetic oligonucleotide
guccgcagaugagaagagc

SEQ ID NO: 1223454 - RNA, 19 nt, Artificial Sequence
  Description of Artificial Sequence: Synthetic oligonucleotide
uggccaagugaggcuagac

SEQ ID NO: 1223455 - RNA, 19 nt, Artificial Sequence
  Description of Artificial Sequence: Synthetic oligonucleotide
gguagcgacucuccgaggu

SEQ ID NO: 1223456 - RNA, 19 nt, Artificial Sequence
  Description of Artificial Sequence: Synthetic oligonucleotide
caggcaacaggcagcuuaa

SEQ ID NO: 1223457 - RNA, 19 nt, Artificial Sequence
  Description of Artificial Sequence: Synthetic oligonucleotide
aggggcacccagugagcug

SEQ ID NO: 1223458 - RNA, 19 nt, Artificial Sequence
  Description of Artificial Sequence: Synthetic oligonucleotide
auaaggccaagaggacgca

SEQ ID NO: 1223459 - RNA, 19 nt, Artificial Sequence
  Description of Artificial Sequence: Synthetic oligonucleotide
gcgccaaucagcgagccca

SEQ ID NO: 1223460 - RNA, 19 nt, Artificial Sequence
  Description of Artificial Sequence: Synthetic oligonucleotide
gcaacuggggcuccuaaua

SEQ ID NO: 1223461 - RNA, 19 nt, Artificial Sequence
  Description of Artificial Sequence: Synthetic oligonucleotide
gcuagacagaacaguccag

SEQ ID NO: 1223462 - RNA, 19 nt, Artificial Sequence
  Description of Artificial Sequence: Synthetic oligonucleotide
uccgcccuguauccaggaa

SEQ ID NO: 1223463 - RNA, 19 nt, Artificial Sequence
  Description of Artificial Sequence: Synthetic oligonucleotide
cuccccuauaaagaaaggu

SEQ ID NO: 1223464 - RNA, 19 nt, Artificial Sequence
  Description of Artificial Sequence: Synthetic oligonucleotide
ccgcccuguauccaggaag

SEQ ID NO: 1223465 - RNA, 19 nt, Artificial Sequence
  Description of Artificial Sequence: Synthetic oligonucleotide
gaagcgguggggccaggua

SEQ ID NO: 1223466 - RNA, 19 nt, Artificial Sequence
  Description of Artificial Sequence: Synthetic oligonucleotide
gguaggagggcagguacca

SEQ ID NO: 1223467 - RNA, 19 nt, Artificial Sequence
  Description of Artificial Sequence: Synthetic oligonucleotide
cugggcggagugaggcuac

SEQ ID NO: 1223468 - RNA, 19 nt, Artificial Sequence
  Description of Artificial Sequence: Synthetic oligonucleotide
cccauaaggcagacaggag

SEQ ID NO: 1223469 - RNA, 19 nt, Artificial Sequence
  Description of Artificial Sequence: Synthetic oligonucleotide
cagcuccacccagagcccg

SEQ ID NO: 1223470 - RNA, 19 nt, Artificial Sequence
  Description of Artificial Sequence: Synthetic oligonucleotide
ccuauguuggccagcugga

SEQ ID NO: 1223471 - RNA, 19 nt, Artificial Sequence
  Description of Artificial Sequence: Synthetic oligonucleotide
ccaagaggacgcaggcagc

SEQ ID NO: 1223472 - RNA, 19 nt, Artificial Sequence
  Description of Artificial Sequence: Synthetic oligonucleotide
cuccaccccagugacccug

SEQ ID NO: 1223473 - RNA, 19 nt, Artificial Sequence
  Description of Artificial Sequence: Synthetic oligonucleotide
gaacaacagcgaccuguua

SEQ ID NO: 1223474 - RNA, 19 nt, Artificial Sequence
  Description of Artificial Sequence: Synthetic oligonucleotide
gacgcaggcagccgugccu

SEQ ID NO: 1223475 - RNA, 19 nt, Artificial Sequence
  Description of Artificial Sequence: Synthetic oligonucleotide
ggaaggauagcaggaggaa

SEQ ID NO: 1223476 - RNA, 19 nt, Artificial Sequence
  Description of Artificial Sequence: Synthetic oligonucleotide
cagggugaccugggagugg

SEQ ID NO: 1223477 - RNA, 19 nt, Artificial Sequence
  Description of Artificial Sequence: Synthetic oligonucleotide
cucgggcaacucagucacc

SEQ ID NO: 1223478 - RNA, 19 nt, Artificial Sequence
  Description of Artificial Sequence: Synthetic oligonucleotide
agcacccaggaaagcacga

SEQ ID NO: 1223479 - RNA, 19 nt, Artificial Sequence
  Description of Artificial Sequence: Synthetic oligonucleotide
ggcucauaaacggcaagaa

SEQ ID NO: 1223480 - RNA, 19 nt, Artificial Sequence
  Description of Artificial Sequence: Synthetic oligonucleotide
cccuaauguccuugggcug

SEQ ID NO: 1223481 - RNA, 19 nt, Artificial Sequence
  Description of Artificial Sequence: Synthetic oligonucleotide
guggugauaccugagccuu

SEQ ID NO: 1223482 - RNA, 19 nt, Artificial Sequence
  Description of Artificial Sequence: Synthetic oligonucleotide
caggcagcuuaaucuccca

SEQ ID NO: 1223483 - RNA, 19 nt, Artificial Sequence
  Description of Artificial Sequence: Synthetic oligonucleotide
ggggcuccuaauacagggc

SEQ ID NO: 1223484 - RNA, 19 nt, Artificial Sequence
  Description of Artificial Sequence: Synthetic oligonucleotide
gcagaugagaagagccgca

SEQ ID NO: 1223485 - RNA, 19 nt, Artificial Sequence
  Description of Artificial Sequence: Synthetic oligonucleotide
agcgaccuguuaggcagga

SEQ ID NO: 1223486 - RNA, 19 nt, Artificial Sequence
  Description of Artificial Sequence: Synthetic oligonucleotide
ccacacuaugguguccgcc

SEQ ID NO: 1223487 - RNA, 19 nt, Artificial Sequence
  Description of Artificial Sequence: Synthetic oligonucleotide
ccccuaauguccuugggcu

SEQ ID NO: 1223488 - RNA, 19 nt, Artificial Sequence
  Description of Artificial Sequence: Synthetic oligonucleotide
cugagccccuccccuauaa

SEQ ID NO: 1223489 - RNA, 19 nt, Artificial Sequence
  Description of Artificial Sequence: Synthetic oligonucleotide
ucguggccugauggagugc

SEQ ID NO: 1223490 - RNA, 19 nt, Artificial Sequence
  Description of Artificial Sequence: Synthetic oligonucleotide
ugcgggcacgaggccacug

SEQ ID NO: 1223491 - RNA, 19 nt, Artificial Sequence
  Description of Artificial Sequence: Synthetic oligonucleotide
gugcguugacaaaggccac

SEQ ID NO: 1223492 - RNA, 19 nt, Artificial Sequence
  Description of Artificial Sequence: Synthetic oligonucleotide
cggucacgcaagaucacac

SEQ ID NO: 1223493 - RNA, 19 nt, Artificial Sequence
  Description of Artificial Sequence: Synthetic oligonucleotide
ggacgcaggcagccgugcc

SEQ ID NO: 1223494 - RNA, 19 nt, Artificial Sequence
  Description of Artificial Sequence: Synthetic oligonucleotide
gcacguuaaccagugggaa

SEQ ID NO: 1223495 - RNA, 19 nt, Artificial Sequence
  Description of Artificial Sequence: Synthetic oligonucleotide
guccgcccuguauccagga

SEQ ID NO: 1223496 - RNA, 19 nt, Artificial Sequence
  Description of Artificial Sequence: Synthetic oligonucleotide
gcaccgaaggcagcacacc

SEQ ID NO: 1223497 - RNA, 19 nt, Artificial Sequence
  Description of Artificial Sequence: Synthetic oligonucleotide
cuccgaggugccucaaggu

SEQ ID NO: 1223498 - RNA, 19 nt, Artificial Sequence
  Description of Artificial Sequence: Synthetic oligonucleotide
cagugcgggcacgaggcca

SEQ ID NO: 1223499 - RNA, 19 nt, Artificial Sequence
  Description of Artificial Sequence: Synthetic oligonucleotide
ggcgccaaucagcgagccc

SEQ ID NO: 1223500 - RNA, 19 nt, Artificial Sequence
  Description of Artificial Sequence: Synthetic oligonucleotide
cugcaccgcugccccacac

SEQ ID NO: 1223501 - RNA, 19 nt, Artificial Sequence
  Description of Artificial Sequence: Synthetic oligonucleotide
gagccagaugcuguccuau

SEQ ID NO: 1223502 - RNA, 19 nt, Artificial Sequence
  Description of Artificial Sequence: Synthetic oligonucleotide
ccuugacauagcugagaca

SEQ ID NO: 1223503 - RNA, 19 nt, Artificial Sequence
  Description of Artificial Sequence: Synthetic oligonucleotide
gguuugcaccgaaggcagc

SEQ ID NO: 1223504 - RNA, 19 nt, Artificial Sequence
  Description of Artificial Sequence: Synthetic oligonucleotide
ugggcggagugaggcuaca

SEQ ID NO: 1223505 - RNA, 19 nt, Artificial Sequence
  Description of Artificial Sequence: Synthetic oligonucleotide
acgcaggcagccgugccua

SEQ ID NO: 1223506 - RNA, 19 nt, Artificial Sequence
  Description of Artificial Sequence: Synthetic oligonucleotide
cagcuuaaucucccagccu

SEQ ID NO: 1223507 - RNA, 19 nt, Artificial Sequence
  Description of Artificial Sequence: Synthetic oligonucleotide
ggccauauuguaggcccca

SEQ ID NO: 1223508 - RNA, 19 nt, Artificial Sequence
  Description of Artificial Sequence: Synthetic oligonucleotide
cccucgggcaacucaguca

SEQ ID NO: 1223509 - RNA, 19 nt, Artificial Sequence
  Description of Artificial Sequence: Synthetic oligonucleotide
aggagggcuuuuggguaaa

SEQ ID NO: 1223510 - RNA, 19 nt, Artificial Sequence
  Description of Artificial Sequence: Synthetic oligonucleotide
gccacacuaugguguccgc

SEQ ID NO: 1223511 - RNA, 19 nt, Artificial Sequence
  Description of Artificial Sequence: Synthetic oligonucleotide
ccaaucagcgagcccagcu

SEQ ID NO: 1223512 - RNA, 19 nt, Artificial Sequence
  Description of Artificial Sequence: Synthetic oligonucleotide
ggcacccagugagcuggcg

SEQ ID NO: 1223513 - RNA, 19 nt, Artificial Sequence
  Description of Artificial Sequence: Synthetic oligonucleotide
gugucaggagggccauugu

SEQ ID NO: 1223514 - RNA, 19 nt, Artificial Sequence
  Description of Artificial Sequence: Synthetic oligonucleotide
gcggcuccggucacgcaag

SEQ ID NO: 1223515 - RNA, 19 nt, Artificial Sequence
  Description of Artificial Sequence: Synthetic oligonucleotide
ggaacaacagcgaccuguu

SEQ ID NO: 1223516 - RNA, 19 nt, Artificial Sequence
  Description of Artificial Sequence: Synthetic oligonucleotide
gccacggagcugaggguug

SEQ ID NO: 1223517 - RNA, 19 nt, Artificial Sequence
  Description of Artificial Sequence: Synthetic oligonucleotide
ggaagcgaugcaacagggu

SEQ ID NO: 1223518 - RNA, 19 nt, Artificial Sequence
  Description of Artificial Sequence: Synthetic oligonucleotide
gcgggcacgaggccacuga

SEQ ID NO: 1223519 - RNA, 19 nt, Artificial Sequence
  Description of Artificial Sequence: Synthetic oligonucleotide
ccguuggugagugcguuga

SEQ ID NO: 1223520 - RNA, 19 nt, Artificial Sequence
  Description of Artificial Sequence: Synthetic oligonucleotide
gcuggcguccucugcgucu

SEQ ID NO: 1223521 - RNA, 19 nt, Artificial Sequence
  Description of Artificial Sequence: Synthetic oligonucleotide
gcacccagugagcuggcgu

SEQ ID NO: 1223522 - RNA, 19 nt, Artificial Sequence
  Description of Artificial Sequence: Synthetic oligonucleotide
ggacgaugaaggccacacu

SEQ ID NO: 1223523 - RNA, 19 nt, Artificial Sequence
  Description of Artificial Sequence: Synthetic oligonucleotide
ggccuauguuggccagcug

SEQ ID NO: 1223524 - RNA, 19 nt, Artificial Sequence
  Description of Artificial Sequence: Synthetic oligonucleotide
cuauguuggccagcuggau

SEQ ID NO: 1223525 - RNA, 19 nt, Artificial Sequence
  Description of Artificial Sequence: Synthetic oligonucleotide
gggcgccaaucagcgagcc

SEQ ID NO: 1223526 - RNA, 19 nt, Artificial Sequence
  Description of Artificial Sequence: Synthetic oligonucleotide
cagugagcuggcguccucu

SEQ ID NO: 1223527 - RNA, 19 nt, Artificial Sequence
  Description of Artificial Sequence: Synthetic oligonucleotide
cuaugguguccgcccugua

SEQ ID NO: 1223528 - RNA, 19 nt, Artificial Sequence
  Description of Artificial Sequence: Synthetic oligonucleotide
ccacggagcugaggguugc

SEQ ID NO: 1223529 - RNA, 19 nt, Artificial Sequence
  Description of Artificial Sequence: Synthetic oligonucleotide
gcugggcggagugaggcua

SEQ ID NO: 1223530 - RNA, 19 nt, Artificial Sequence
  Description of Artificial Sequence: Synthetic oligonucleotide
gccaaucagcgagcccagc

SEQ ID NO: 1223531 - RNA, 19 nt, Artificial Sequence
  Description of Artificial Sequence: Synthetic oligonucleotide
gggccuauguuggccagcu

SEQ ID NO: 1223532 - RNA, 19 nt, Artificial Sequence
  Description of Artificial Sequence: Synthetic oligonucleotide
cgggcacgaggccacugag

SEQ ID NO: 1223533 - RNA, 19 nt, Artificial Sequence
  Description of Artificial Sequence: Synthetic oligonucleotide
ccggucacgcaagaucaca

SEQ ID NO: 1223534 - RNA, 19 nt, Artificial Sequence
  Description of Artificial Sequence: Synthetic oligonucleotide
caggcccauaaggcagaca

SEQ ID NO: 1223535 - RNA, 19 nt, Artificial Sequence
  Description of Artificial Sequence: Synthetic oligonucleotide
cacugagccccuccccuau

SEQ ID NO: 1223536 - RNA, 19 nt, Artificial Sequence
  Description of Artificial Sequence: Synthetic oligonucleotide
acucuccgaggugccucaa

SEQ ID NO: 1223537 - RNA, 19 nt, Artificial Sequence
  Description of Artificial Sequence: Synthetic oligonucleotide
cgucucguggccugaugga

SEQ ID NO: 1223538 - RNA, 19 nt, Artificial Sequence
  Description of Artificial Sequence: Synthetic oligonucleotide
cacggagcugaggguugca

SEQ ID NO: 1223539 - RNA, 19 nt, Artificial Sequence
  Description of Artificial Sequence: Synthetic oligonucleotide
ggcgucucuguggcauuga

SEQ ID NO: 1223540 - RNA, 19 nt, Artificial Sequence
  Description of Artificial Sequence: Synthetic oligonucleotide
cugcggcuccggucacgca

SEQ ID NO: 1223541 - RNA, 19 nt, Artificial Sequence
  Description of Artificial Sequence: Synthetic oligonucleotide
gcccguugauagccaccca

SEQ ID NO: 1223542 - RNA, 19 nt, Artificial Sequence
  Description of Artificial Sequence: Synthetic oligonucleotide
gcgucucuguggcauugau

SEQ ID NO: 1223543 - RNA, 19 nt, Artificial Sequence
  Description of Artificial Sequence: Synthetic oligonucleotide
acgaggccacugagccccu

SEQ ID NO: 1223544 - RNA, 19 nt, Artificial Sequence
  Description of Artificial Sequence: Synthetic oligonucleotide
ggguugcagacagguggua

SEQ ID NO: 1223545 - RNA, 19 nt, Artificial Sequence
  Description of Artificial Sequence: Synthetic oligonucleotide
ccgguaccucagacaggca

SEQ ID NO: 1223546 - RNA, 19 nt, Artificial Sequence
  Description of Artificial Sequence: Synthetic oligonucleotide
gcgaccuguuaggcaggaa

SEQ ID NO: 1223547 - RNA, 19 nt, Artificial Sequence
  Description of Artificial Sequence: Synthetic oligonucleotide
gcgacucuccgaggugccu

SEQ ID NO: 1223548 - RNA, 19 nt, Artificial Sequence
  Description of Artificial Sequence: Synthetic oligonucleotide
ccaccccagugacccugca

SEQ ID NO: 1223549 - RNA, 19 nt, Artificial Sequence
  Description of Artificial Sequence: Synthetic oligonucleotide
cugcgucucguggccugau

SEQ ID NO: 1223550 - RNA, 19 nt, Artificial Sequence
  Description of Artificial Sequence: Synthetic oligonucleotide
gcuccacccagagcccguu

SEQ ID NO: 1223551 - RNA, 19 nt, Artificial Sequence
  Description of Artificial Sequence: Synthetic oligonucleotide
ccucugcgucucguggccu

SEQ ID NO: 1223552 - RNA, 19 nt, Artificial Sequence
  Description of Artificial Sequence: Synthetic oligonucleotide
cgaggccacugagccccuc

SEQ ID NO: 1223553 - RNA, 19 nt, Artificial Sequence
  Description of Artificial Sequence: Synthetic oligonucleotide
gcgaugcaacagggucacu

SEQ ID NO: 1223554 - RNA, 19 nt, Artificial Sequence
  Description of Artificial Sequence: Synthetic oligonucleotide
cggcuccggucacgcaaga

SEQ ID NO: 1223555 - RNA, 19 nt, Artificial Sequence
  Description of Artificial Sequence: Synthetic oligonucleotide
ccccuugccugggcugguu

SEQ ID NO: 1223556 - RNA, 19 nt, Artificial Sequence
  Description of Artificial Sequence: Synthetic oligonucleotide
aaaguuacauucuucaguc

SEQ ID NO: 1223557 - RNA, 19 nt, Artificial Sequence
  Description of Artificial Sequence: Synthetic oligonucleotide
uuuaauuccuaaaagguga

SEQ ID NO: 1223558 - RNA, 19 nt, Artificial Sequence
  Description of Artificial Sequence: Synthetic oligonucleotide
gauagaauaauccacacga

SEQ ID NO: 1223559 - RNA, 19 nt, Artificial Sequence
  Description of Artificial Sequence: Synthetic oligonucleotide
cauaguaagaaucucgucg

SEQ ID NO: 1223560 - RNA, 19 nt, Artificial Sequence
  Description of Artificial Sequence: Synthetic oligonucleotide
aguuuauaagguuuaacac

SEQ ID NO: 1223561 - RNA, 19 nt, Artificial Sequence
  Description of Artificial Sequence: Synthetic oligonucleotide
ucuccuaugagaaugagac

SEQ ID NO: 1223562 - RNA, 19 nt, Artificial Sequence
  Description of Artificial Sequence: Synthetic oligonucleotide
uguuggacgacuuaaauga

SEQ ID NO: 1223563 - RNA, 19 nt, Artificial Sequence
  Description of Artificial Sequence: Synthetic oligonucleotide
uaucauaguaagaaucucg

SEQ ID NO: 1223564 - RNA, 19 nt, Artificial Sequence
  Description of Artificial Sequence: Synthetic oligonucleotide
agcucauaaauccagaauc

SEQ ID NO: 1223565 - RNA, 19 nt, Artificial Sequence
  Description of Artificial Sequence: Synthetic oligonucleotide
uguaauacggagaaggcga

SEQ ID NO: 1223566 - RNA, 19 nt, Artificial Sequence
  Description of Artificial Sequence: Synthetic oligonucleotide
uuaagaguauaacaaagga

SEQ ID NO: 1223567 - RNA, 19 nt, Artificial Sequence
  Description of Artificial Sequence: Synthetic oligonucleotide
ucuauacuauacaauaacc

SEQ ID NO: 1223568 - RNA, 19 nt, Artificial Sequence
  Description of Artificial Sequence: Synthetic oligonucleotide
cacucaaugguccauaucg

SEQ ID NO: 1223569 - RNA, 19 nt, Artificial Sequence
  Description of Artificial Sequence: Synthetic oligonucleotide
uguagcgacuguaauacgg

SEQ ID NO: 1223570 - RNA, 19 nt, Artificial Sequence
  Description of Artificial Sequence: Synthetic oligonucleotide
aaagcuuucaaaagacggc

SEQ ID NO: 1223571 - RNA, 19 nt, Artificial Sequence
  Description of Artificial Sequence: Synthetic oligonucleotide
aagcuuucaaaagacggcc

SEQ ID NO: 1223572 - RNA, 19 nt, Artificial Sequence
  Description of Artificial Sequence: Synthetic oligonucleotide
agguuuaacacguaacuuc

SEQ ID NO: 1223573 - RNA, 19 nt, Artificial Sequence
  Description of Artificial Sequence: Synthetic oligonucleotide
ucuacaucgcucaugucgg

SEQ ID NO: 1223574 - RNA, 19 nt, Artificial Sequence
  Description of Artificial Sequence: Synthetic oligonucleotide
ugauagaauaauccacacg

SEQ ID NO: 1223575 - RNA, 19 nt, Artificial Sequence
  Description of Artificial Sequence: Synthetic oligonucleotide
uguaccgauaaucauaguc

SEQ ID NO: 1223576 - RNA, 19 nt, Artificial Sequence
  Description of Artificial Sequence: Synthetic oligonucleotide
uucuauacuauacaauaac

SEQ ID NO: 1223577 - RNA, 19 nt, Artificial Sequence
  Description of Artificial Sequence: Synthetic oligonucleotide
uuaucaauagcgucuuggg

SEQ ID NO: 1223578 - RNA, 19 nt, Artificial Sequence
  Description of Artificial Sequence: Synthetic oligonucleotide
aagggaauacuuaaguuuc

SEQ ID NO: 1223579 - RNA, 19 nt, Artificial Sequence
  Description of Artificial Sequence: Synthetic oligonucleotide
cacacuuuaaguuuauaag

SEQ ID NO: 1223580 - RNA, 19 nt, Artificial Sequence
  Description of Artificial Sequence: Synthetic oligonucleotide
ugagaaugagaccuggacc

SEQ ID NO: 1223581 - RNA, 19 nt, Artificial Sequence
  Description of Artificial Sequence: Synthetic oligonucleotide
auuaagggaauacuuaagu

SEQ ID NO: 1223582 - RNA, 19 nt, Artificial Sequence
  Description of Artificial Sequence: Synthetic oligonucleotide
gauucuauacuauacaaua

SEQ ID NO: 1223583 - RNA, 19 nt, Artificial Sequence
  Description of Artificial Sequence: Synthetic oligonucleotide
cuaguagggaguuaguccc

SEQ ID NO: 1223584 - RNA, 19 nt, Artificial Sequence
  Description of Artificial Sequence: Synthetic oligonucleotide
augagaaugagaccuggac

SEQ ID NO: 1223585 - RNA, 19 nt, Artificial Sequence
  Description of Artificial Sequence: Synthetic oligonucleotide
ucuggauuugcccugcugc

SEQ ID NO: 1223586 - RNA, 19 nt, Artificial Sequence
  Description of Artificial Sequence: Synthetic oligonucleotide
aauuacaccuuuaagagua

SEQ ID NO: 1223587 - RNA, 19 nt, Artificial Sequence
  Description of Artificial Sequence: Synthetic oligonucleotide
aaacauaacauguuuuaua

SEQ ID NO: 1223588 - RNA, 19 nt, Artificial Sequence
  Description of Artificial Sequence: Synthetic oligonucleotide
uaacacguaacuucaaaca

SEQ ID NO: 1223589 - RNA, 19 nt, Artificial Sequence
  Description of Artificial Sequence: Synthetic oligonucleotide
ucugcgauuagacauugga

SEQ ID NO: 1223590 - RNA, 19 nt, Artificial Sequence
  Description of Artificial Sequence: Synthetic oligonucleotide
aagaaucucgucgucugcc

SEQ ID NO: 1223591 - RNA, 19 nt, Artificial Sequence
  Description of Artificial Sequence: Synthetic oligonucleotide
uacuacacuaccaucacaa

SEQ ID NO: 1223592 - RNA, 19 nt, Artificial Sequence
  Description of Artificial Sequence: Synthetic oligonucleotide
uuaacacguaacuucaaac

SEQ ID NO: 1223593 - RNA, 19 nt, Artificial Sequence
  Description of Artificial Sequence: Synthetic oligonucleotide
guauuuuaggauucuauac

SEQ ID NO: 1223594 - RNA, 19 nt, Artificial Sequence
  Description of Artificial Sequence: Synthetic oligonucleotide
auaucgagaaaacacuuca

SEQ ID NO: 1223595 - RNA, 19 nt, Artificial Sequence
  Description of Artificial Sequence: Synthetic oligonucleotide
cuaagcaagagagaagacg

SEQ ID NO: 1223596 - RNA, 19 nt, Artificial Sequence
  Description of Artificial Sequence: Synthetic oligonucleotide
uguagcgucuaugagaaug

SEQ ID NO: 1223597 - RNA, 19 nt, Artificial Sequence
  Description of Artificial Sequence: Synthetic oligonucleotide
aacacguaacuucaaacau

SEQ ID NO: 1223598 - RNA, 19 nt, Artificial Sequence
  Description of Artificial Sequence: Synthetic oligonucleotide
uccauaucgagaaaacacu

SEQ ID NO: 1223599 - RNA, 19 nt, Artificial Sequence
  Description of Artificial Sequence: Synthetic oligonucleotide
uauaagguuuaacacguaa

SEQ ID NO: 1223600 - RNA, 19 nt, Artificial Sequence
  Description of Artificial Sequence: Synthetic oligonucleotide
auucacaccacucaauggu

SEQ ID NO: 1223601 - RNA, 19 nt, Artificial Sequence
  Description of Artificial Sequence: Synthetic oligonucleotide
uuggugauagaauaaucca

SEQ ID NO: 1223602 - RNA, 19 nt, Artificial Sequence
  Description of Artificial Sequence: Synthetic oligonucleotide
uguauuuuaggauucuaua

SEQ ID NO: 1223603 - RNA, 19 nt, Artificial Sequence
  Description of Artificial Sequence: Synthetic oligonucleotide
uuuuguuuugaggacuagg

SEQ ID NO: 1223604 - RNA, 19 nt, Artificial Sequence
  Description of Artificial Sequence: Synthetic oligonucleotide
aaacccuugauggacuacg

SEQ ID NO: 1223605 - RNA, 19 nt, Artificial Sequence
  Description of Artificial Sequence: Synthetic oligonucleotide
ucgagaaugggauucagaa

SEQ ID NO: 1223606 - RNA, 19 nt, Artificial Sequence
  Description of Artificial Sequence: Synthetic oligonucleotide
aguuauacaguuguucuag

SEQ ID NO: 1223607 - RNA, 19 nt, Artificial Sequence
  Description of Artificial Sequence: Synthetic oligonucleotide
auaguaagaaucucgucgu

SEQ ID NO: 1223608 - RNA, 19 nt, Artificial Sequence
  Description of Artificial Sequence: Synthetic oligonucleotide
aacccaauaccaaaauuuc

SEQ ID NO: 1223609 - RNA, 19 nt, Artificial Sequence
  Description of Artificial Sequence: Synthetic oligonucleotide
uaggauucuauacuauaca

SEQ ID NO: 1223610 - RNA, 19 nt, Artificial Sequence
  Description of Artificial Sequence: Synthetic oligonucleotide
uguaggaacgagaucuuga

SEQ ID NO: 1223611 - RNA, 19 nt, Artificial Sequence
  Description of Artificial Sequence: Synthetic oligonucleotide
uggugauagaauaauccac

SEQ ID NO: 1223612 - RNA, 19 nt, Artificial Sequence
  Description of Artificial Sequence: Synthetic oligonucleotide
uaucaauagcgucuugggc

SEQ ID NO: 1223613 - RNA, 19 nt, Artificial Sequence
  Description of Artificial Sequence: Synthetic oligonucleotide
ugaggacuaggaagcaucg

SEQ ID NO: 1223614 - RNA, 19 nt, Artificial Sequence
  Description of Artificial Sequence: Synthetic oligonucleotide
ucaaugguccauaucgaga

SEQ ID NO: 1223615 - RNA, 19 nt, Artificial Sequence
  Description of Artificial Sequence: Synthetic oligonucleotide
uuuuacucgagcaggaguu

SEQ ID NO: 1223616 - RNA, 19 nt, Artificial Sequence
  Description of Artificial Sequence: Synthetic oligonucleotide
aaggaaaguccuuagccau

SEQ ID NO: 1223617 - RNA, 19 nt, Artificial Sequence
  Description of Artificial Sequence: Synthetic oligonucleotide
acaauaacccacaaaacca

SEQ ID NO: 1223618 - RNA, 19 nt, Artificial Sequence
  Description of Artificial Sequence: Synthetic oligonucleotide
uuuagggucaaaguuacau

SEQ ID NO: 1223619 - RNA, 19 nt, Artificial Sequence
  Description of Artificial Sequence: Synthetic oligonucleotide
ucaucuauccucucaaaau

SEQ ID NO: 1223620 - RNA, 19 nt, Artificial Sequence
  Description of Artificial Sequence: Synthetic oligonucleotide
ucgcugaucauaaaccaca

SEQ ID NO: 1223621 - RNA, 19 nt, Artificial Sequence
  Description of Artificial Sequence: Synthetic oligonucleotide
aaguauugggaucuggauu

SEQ ID NO: 1223622 - RNA, 19 nt, Artificial Sequence
  Description of Artificial Sequence: Synthetic oligonucleotide
uagggucaaaguuacauuc

SEQ ID NO: 1223623 - RNA, 19 nt, Artificial Sequence
  Description of Artificial Sequence: Synthetic oligonucleotide
uuagacauuggagagugac

SEQ ID NO: 1223624 - RNA, 19 nt, Artificial Sequence
  Description of Artificial Sequence: Synthetic oligonucleotide
cacaaagcauaacagcggg

SEQ ID NO: 1223625 - RNA, 19 nt, Artificial Sequence
  Description of Artificial Sequence: Synthetic oligonucleotide
uucacgaagaucucucucu

SEQ ID NO: 1223626 - RNA, 19 nt, Artificial Sequence
  Description of Artificial Sequence: Synthetic oligonucleotide
gagaagacgucucggcucg

SEQ ID NO: 1223627 - RNA, 19 nt, Artificial Sequence
  Description of Artificial Sequence: Synthetic oligonucleotide
aauacggagaaggcgaccu

SEQ ID NO: 1223628 - RNA, 19 nt, Artificial Sequence
  Description of Artificial Sequence: Synthetic oligonucleotide
uuaauuccuaaaaggugac

SEQ ID NO: 1223629 - RNA, 19 nt, Artificial Sequence
  Description of Artificial Sequence: Synthetic oligonucleotide
gauuuugacugagagcgag

SEQ ID NO: 1223630 - RNA, 19 nt, Artificial Sequence
  Description of Artificial Sequence: Synthetic oligonucleotide
auguuggacgacuuaaaug

SEQ ID NO: 1223631 - RNA, 19 nt, Artificial Sequence
  Description of Artificial Sequence: Synthetic oligonucleotide
aauaauccacacgaauucu

SEQ ID NO: 1223632 - RNA, 19 nt, Artificial Sequence
  Description of Artificial Sequence: Synthetic oligonucleotide
ucuucgucgacgauacucu

SEQ ID NO: 1223633 - RNA, 19 nt, Artificial Sequence
  Description of Artificial Sequence: Synthetic oligonucleotide
uggacgacuuaaaugacaa

SEQ ID NO: 1223634 - RNA, 19 nt, Artificial Sequence
  Description of Artificial Sequence: Synthetic oligonucleotide
aauuucuaacagcaaguua

SEQ ID NO: 1223635 - RNA, 19 nt, Artificial Sequence
  Description of Artificial Sequence: Synthetic oligonucleotide
uaugagaaugccuccuuga

SEQ ID NO: 1223636 - RNA, 19 nt, Artificial Sequence
  Description of Artificial Sequence: Synthetic oligonucleotide
aaccaauaacccaauacca

SEQ ID NO: 1223637 - RNA, 19 nt, Artificial Sequence
  Description of Artificial Sequence: Synthetic oligonucleotide
cuauccucucaaaauacac

SEQ ID NO: 1223638 - RNA, 19 nt, Artificial Sequence
  Description of Artificial Sequence: Synthetic oligonucleotide
auuuuacucgagcaggagu

SEQ ID NO: 1223639 - RNA, 19 nt, Artificial Sequence
  Description of Artificial Sequence: Synthetic oligonucleotide
gauuaagggaauacuuaag

SEQ ID NO: 1223640 - RNA, 19 nt, Artificial Sequence
  Description of Artificial Sequence: Synthetic oligonucleotide
aaagcauaacagcgggucu

SEQ ID NO: 1223641 - RNA, 19 nt, Artificial Sequence
  Description of Artificial Sequence: Synthetic oligonucleotide
uucagaauguuuggaaacc

SEQ ID NO: 1223642 - RNA, 19 nt, Artificial Sequence
  Description of Artificial Sequence: Synthetic oligonucleotide
ugauuuuacucgagcagga

SEQ ID NO: 1223643 - RNA, 19 nt, Artificial Sequence
  Description of Artificial Sequence: Synthetic oligonucleotide
aaagguuguccuucaguga

SEQ ID NO: 1223644 - RNA, 19 nt, Artificial Sequence
  Description of Artificial Sequence: Synthetic oligonucleotide
uccuuagagucaucuaucc

SEQ ID NO: 1223645 - RNA, 19 nt, Artificial Sequence
  Description of Artificial Sequence: Synthetic oligonucleotide
uuaagggaauacuuaaguu

SEQ ID NO: 1223646 - RNA, 19 nt, Artificial Sequence
  Description of Artificial Sequence: Synthetic oligonucleotide
uucagucuacuacacuacc

SEQ ID NO: 1223647 - RNA, 19 nt, Artificial Sequence
  Description of Artificial Sequence: Synthetic oligonucleotide
aagcauaacagcgggucuc

SEQ ID NO: 1223648 - RNA, 19 nt, Artificial Sequence
  Description of Artificial Sequence: Synthetic oligonucleotide
ucaauagcgucuugggcug

SEQ ID NO: 1223649 - RNA, 19 nt, Artificial Sequence
  Description of Artificial Sequence: Synthetic oligonucleotide
auucgcccuuuccauagcc

SEQ ID NO: 1223650 - RNA, 19 nt, Artificial Sequence
  Description of Artificial Sequence: Synthetic oligonucleotide
uggagagugacuccgacuu

SEQ ID NO: 1223651 - RNA, 19 nt, Artificial Sequence
  Description of Artificial Sequence: Synthetic oligonucleotide
auuggagagugacuccgac

SEQ ID NO: 1223652 - RNA, 19 nt, Artificial Sequence
  Description of Artificial Sequence: Synthetic oligonucleotide
ucuacuacacuaccaucac

SEQ ID NO: 1223653 - RNA, 19 nt, Artificial Sequence
  Description of Artificial Sequence: Synthetic oligonucleotide
acuucuucgucgacgauac

SEQ ID NO: 1223654 - RNA, 19 nt, Artificial Sequence
  Description of Artificial Sequence: Synthetic oligonucleotide
uuguucuagguaauaaaua

SEQ ID NO: 1223655 - RNA, 19 nt, Artificial Sequence
  Description of Artificial Sequence: Synthetic oligonucleotide
agagcgagacucucugccc

SEQ ID NO: 1223656 - RNA, 19 nt, Artificial Sequence
  Description of Artificial Sequence: Synthetic oligonucleotide
aacacucccaggcaaguau

SEQ ID NO: 1223657 - RNA, 19 nt, Artificial Sequence
  Description of Artificial Sequence: Synthetic oligonucleotide
uucgucgacgauacucugg

SEQ ID NO: 1223658 - RNA, 19 nt, Artificial Sequence
  Description of Artificial Sequence: Synthetic oligonucleotide
gagagcgagacucucugcc

SEQ ID NO: 1223659 - RNA, 19 nt, Artificial Sequence
  Description of Artificial Sequence: Synthetic oligonucleotide
gaguguagcgucuaugaga

SEQ ID NO: 1223660 - RNA, 19 nt, Artificial Sequence
  Description of Artificial Sequence: Synthetic oligonucleotide
cauucacaccacucaaugg

SEQ ID NO: 1223661 - RNA, 19 nt, Artificial Sequence
  Description of Artificial Sequence: Synthetic oligonucleotide
agacgucucggcucgaggg

SEQ ID NO: 1223662 - RNA, 19 nt, Artificial Sequence
  Description of Artificial Sequence: Synthetic oligonucleotide
gagaaugccuccuugaccu

SEQ ID NO: 1223663 - RNA, 19 nt, Artificial Sequence
  Description of Artificial Sequence: Synthetic oligonucleotide
aggauucuauacuauacaa

SEQ ID NO: 1223664 - RNA, 19 nt, Artificial Sequence
  Description of Artificial Sequence: Synthetic oligonucleotide
uuggacgacuuaaaugaca

SEQ ID NO: 1223665 - RNA, 19 nt, Artificial Sequence
  Description of Artificial Sequence: Synthetic oligonucleotide
aguuaguccccuguaaaag

SEQ ID NO: 1223666 - RNA, 19 nt, Artificial Sequence
  Description of Artificial Sequence: Synthetic oligonucleotide
aggacuaggaagcaucgga

SEQ ID NO: 1223667 - RNA, 19 nt, Artificial Sequence
  Description of Artificial Sequence: Synthetic oligonucleotide
ucgagaucgucuccuauga

SEQ ID NO: 1223668 - RNA, 19 nt, Artificial Sequence
  Description of Artificial Sequence: Synthetic oligonucleotide
uggacuacgagauccugac

SEQ ID NO: 1223669 - RNA, 19 nt, Artificial Sequence
  Description of Artificial Sequence: Synthetic oligonucleotide
uauaggaaucuacaagcuu

SEQ ID NO: 1223670 - RNA, 19 nt, Artificial Sequence
  Description of Artificial Sequence: Synthetic oligonucleotide
aaauuucuaacagcaaguu

SEQ ID NO: 1223671 - RNA, 19 nt, Artificial Sequence
  Description of Artificial Sequence: Synthetic oligonucleotide
cuguaauacggagaaggcg

SEQ ID NO: 1223672 - RNA, 19 nt, Artificial Sequence
  Description of Artificial Sequence: Synthetic oligonucleotide
gagaucgucuccuaugaga

SEQ ID NO: 1223673 - RNA, 19 nt, Artificial Sequence
  Description of Artificial Sequence: Synthetic oligonucleotide
accuuuaagaguauaacaa

SEQ ID NO: 1223674 - RNA, 19 nt, Artificial Sequence
  Description of Artificial Sequence: Synthetic oligonucleotide
agucuacuacacuaccauc

SEQ ID NO: 1223675 - RNA, 19 nt, Artificial Sequence
  Description of Artificial Sequence: Synthetic oligonucleotide
aagacgucucggcucgagg

SEQ ID NO: 1223676 - RNA, 19 nt, Artificial Sequence
  Description of Artificial Sequence: Synthetic oligonucleotide
uguauaggaucuacuucga

SEQ ID NO: 1223677 - RNA, 19 nt, Artificial Sequence
  Description of Artificial Sequence: Synthetic oligonucleotide
uacucugguguauaggauc

SEQ ID NO: 1223678 - RNA, 19 nt, Artificial Sequence
  Description of Artificial Sequence: Synthetic oligonucleotide
uuuugacugagagcgagac

SEQ ID NO: 1223679 - RNA, 19 nt, Artificial Sequence
  Description of Artificial Sequence: Synthetic oligonucleotide
uaucgagaaaacacuucac

SEQ ID NO: 1223680 - RNA, 19 nt, Artificial Sequence
  Description of Artificial Sequence: Synthetic oligonucleotide
ucacaccacucaauggucc

SEQ ID NO: 1223681 - RNA, 19 nt, Artificial Sequence
  Description of Artificial Sequence: Synthetic oligonucleotide
aaguuauacaguuguucua

SEQ ID NO: 1223682 - RNA, 19 nt, Artificial Sequence
  Description of Artificial Sequence: Synthetic oligonucleotide
acuauguguuggucugccc

SEQ ID NO: 1223683 - RNA, 19 nt, Artificial Sequence
  Description of Artificial Sequence: Synthetic oligonucleotide
agaauaauccacacgaauu

SEQ ID NO: 1223684 - RNA, 19 nt, Artificial Sequence
  Description of Artificial Sequence: Synthetic oligonucleotide
gacuacgagauccugaccu

SEQ ID NO: 1223685 - RNA, 19 nt, Artificial Sequence
  Description of Artificial Sequence: Synthetic oligonucleotide
uccacacgaauucuucuac

SEQ ID NO: 1223686 - RNA, 19 nt, Artificial Sequence
  Description of Artificial Sequence: Synthetic oligonucleotide
cacgaauucuucuaccauc

SEQ ID NO: 1223687 - RNA, 19 nt, Artificial Sequence
  Description of Artificial Sequence: Synthetic oligonucleotide
aucgucuccuaugagaaug

SEQ ID NO: 1223688 - RNA, 19 nt, Artificial Sequence
  Description of Artificial Sequence: Synthetic oligonucleotide
uugaucgagaaugggauuc

SEQ ID NO: 1223689 - RNA, 19 nt, Artificial Sequence
  Description of Artificial Sequence: Synthetic oligonucleotide
ucgucgacgauacucuggu

SEQ ID NO: 1223690 - RNA, 19 nt, Artificial Sequence
  Description of Artificial Sequence: Synthetic oligonucleotide
guaggaacgagaucuugac

SEQ ID NO: 1223691 - RNA, 19 nt, Artificial Sequence
  Description of Artificial Sequence: Synthetic oligonucleotide
ugggcuguaggaacgagau

SEQ ID NO: 1223692 - RNA, 19 nt, Artificial Sequence
  Description of Artificial Sequence: Synthetic oligonucleotide
auaggaaucuacaagcuuu

SEQ ID NO: 1223693 - RNA, 19 nt, Artificial Sequence
  Description of Artificial Sequence: Synthetic oligonucleotide
agccauaacugcuucauua

SEQ ID NO: 1223694 - RNA, 19 nt, Artificial Sequence
  Description of Artificial Sequence: Synthetic oligonucleotide
uccgacuucuucgucgacg

SEQ ID NO: 1223695 - RNA, 19 nt, Artificial Sequence
  Description of Artificial Sequence: Synthetic oligonucleotide
aagcaucggaagcucauaa

SEQ ID NO: 1223696 - RNA, 19 nt, Artificial Sequence
  Description of Artificial Sequence: Synthetic oligonucleotide
uucuucgucgacgauacuc

SEQ ID NO: 1223697 - RNA, 19 nt, Artificial Sequence
  Description of Artificial Sequence: Synthetic oligonucleotide
ugguguauaggaucuacuu

SEQ ID NO: 1223698 - RNA, 19 nt, Artificial Sequence
  Description of Artificial Sequence: Synthetic oligonucleotide
caccuuuaagaguauaaca

SEQ ID NO: 1223699 - RNA, 19 nt, Artificial Sequence
  Description of Artificial Sequence: Synthetic oligonucleotide
accuggaccgaguguagcg

SEQ ID NO: 1223700 - RNA, 19 nt, Artificial Sequence
  Description of Artificial Sequence: Synthetic oligonucleotide
aguaagaaucucgucgucu

SEQ ID NO: 1223701 - RNA, 19 nt, Artificial Sequence
  Description of Artificial Sequence: Synthetic oligonucleotide
agcauaacagcgggucucc

SEQ ID NO: 1223702 - RNA, 19 nt, Artificial Sequence
  Description of Artificial Sequence: Synthetic oligonucleotide
cacguaacuucaaacauaa

SEQ ID NO: 1223703 - RNA, 19 nt, Artificial Sequence
  Description of Artificial Sequence: Synthetic oligonucleotide
uuucuaacagcaaguuaua

SEQ ID NO: 1223704 - RNA, 19 nt, Artificial Sequence
  Description of Artificial Sequence: Synthetic oligonucleotide
ccuaguagggaguuagucc

SEQ ID NO: 1223705 - RNA, 19 nt, Artificial Sequence
  Description of Artificial Sequence: Synthetic oligonucleotide
aguguagcgucuaugagaa

SEQ ID NO: 1223706 - RNA, 19 nt, Artificial Sequence
  Description of Artificial Sequence: Synthetic oligonucleotide
ucauaguaagaaucucguc

SEQ ID NO: 1223707 - RNA, 19 nt, Artificial Sequence
  Description of Artificial Sequence: Synthetic oligonucleotide
ccgauaaucauagucuucg

SEQ ID NO: 1223708 - RNA, 19 nt, Artificial Sequence
  Description of Artificial Sequence: Synthetic oligonucleotide
caaugguccauaucgagaa

SEQ ID NO: 1223709 - RNA, 19 nt, Artificial Sequence
  Description of Artificial Sequence: Synthetic oligonucleotide
aguaacacaacuggccaca

SEQ ID NO: 1223710 - RNA, 19 nt, Artificial Sequence
  Description of Artificial Sequence: Synthetic oligonucleotide
auaacagcgggucuccuuu

SEQ ID NO: 1223711 - RNA, 19 nt, Artificial Sequence
  Description of Artificial Sequence: Synthetic oligonucleotide
gcgauuagacauuggagag

SEQ ID NO: 1223712 - RNA, 19 nt, Artificial Sequence
  Description of Artificial Sequence: Synthetic oligonucleotide
gucuacuacacuaccauca

SEQ ID NO: 1223713 - RNA, 19 nt, Artificial Sequence
  Description of Artificial Sequence: Synthetic oligonucleotide
ugguccauaucgagaaaac

SEQ ID NO: 1223714 - RNA, 19 nt, Artificial Sequence
  Description of Artificial Sequence: Synthetic oligonucleotide
uuagggucaaaguuacauu

SEQ ID NO: 1223715 - RNA, 19 nt, Artificial Sequence
  Description of Artificial Sequence: Synthetic oligonucleotide
uucacaccacucaaugguc

SEQ ID NO: 1223716 - RNA, 19 nt, Artificial Sequence
  Description of Artificial Sequence: Synthetic oligonucleotide
agcaagagagaagacgucu

SEQ ID NO: 1223717 - RNA, 19 nt, Artificial Sequence
  Description of Artificial Sequence: Synthetic oligonucleotide
guucgcugaucauaaacca

SEQ ID NO: 1223718 - RNA, 19 nt, Artificial Sequence
  Description of Artificial Sequence: Synthetic oligonucleotide
auuuugaucuugaucgaga

SEQ ID NO: 1223719 - RNA, 19 nt, Artificial Sequence
  Description of Artificial Sequence: Synthetic oligonucleotide
ucuucugcgauuagacauu

SEQ ID NO: 1223720 - RNA, 19 nt, Artificial Sequence
  Description of Artificial Sequence: Synthetic oligonucleotide
guauaggaucuacuucgag

SEQ ID NO: 1223721 - RNA, 19 nt, Artificial Sequence
  Description of Artificial Sequence: Synthetic oligonucleotide
ugaccucccaguucgcuga

SEQ ID NO: 1223722 - RNA, 19 nt, Artificial Sequence
  Description of Artificial Sequence: Synthetic oligonucleotide
uagcgacuguaauacggag

SEQ ID NO: 1223723 - RNA, 19 nt, Artificial Sequence
  Description of Artificial Sequence: Synthetic oligonucleotide
uuggagauuuugacugaga

SEQ ID NO: 1223724 - RNA, 19 nt, Artificial Sequence
  Description of Artificial Sequence: Synthetic oligonucleotide
cuaugagaaugccuccuug

SEQ ID NO: 1223725 - RNA, 19 nt, Artificial Sequence
  Description of Artificial Sequence: Synthetic oligonucleotide
uaggaaucuacaagcuuua

SEQ ID NO: 1223726 - RNA, 19 nt, Artificial Sequence
  Description of Artificial Sequence: Synthetic oligonucleotide
ugauggacuacgagauccu

SEQ ID NO: 1223727 - RNA, 19 nt, Artificial Sequence
  Description of Artificial Sequence: Synthetic oligonucleotide
ucgucgucugccaccgccg

SEQ ID NO: 1223728 - RNA, 19 nt, Artificial Sequence
  Description of Artificial Sequence: Synthetic oligonucleotide
cuccuuagagucaucuauc

SEQ ID NO: 1223729 - RNA, 19 nt, Artificial Sequence
  Description of Artificial Sequence: Synthetic oligonucleotide
uucuaacagcaaguuauac

SEQ ID NO: 1223730 - RNA, 19 nt, Artificial Sequence
  Description of Artificial Sequence: Synthetic oligonucleotide
acgaagaucucucucuguu

SEQ ID NO: 1223731 - RNA, 19 nt, Artificial Sequence
  Description of Artificial Sequence: Synthetic oligonucleotide
cugcucucugauuuuacuc

SEQ ID NO: 1223732 - RNA, 19 nt, Artificial Sequence
  Description of Artificial Sequence: Synthetic oligonucleotide
acgauacucugguguauag

SEQ ID NO: 1223733 - RNA, 19 nt, Artificial Sequence
  Description of Artificial Sequence: Synthetic oligonucleotide
agaaaacacuucacgaaga

SEQ ID NO: 1223734 - RNA, 19 nt, Artificial Sequence
  Description of Artificial Sequence: Synthetic oligonucleotide
guagcgucuaugagaaugc

SEQ ID NO: 1223735 - RNA, 19 nt, Artificial Sequence
  Description of Artificial Sequence: Synthetic oligonucleotide
uagcgucuugggcuguagg

SEQ ID NO: 1223736 - RNA, 19 nt, Artificial Sequence
  Description of Artificial Sequence: Synthetic oligonucleotide
uacucgagcaggaguuccc

SEQ ID NO: 1223737 - RNA, 19 nt, Artificial Sequence
  Description of Artificial Sequence: Synthetic oligonucleotide
ucucagauguuggacgacu

SEQ ID NO: 1223738 - RNA, 19 nt, Artificial Sequence
  Description of Artificial Sequence: Synthetic oligonucleotide
uuacucgagcaggaguucc

SEQ ID NO: 1223739 - RNA, 19 nt, Artificial Sequence
  Description of Artificial Sequence: Synthetic oligonucleotide
uaccgauaaucauagucuu

SEQ ID NO: 1223740 - RNA, 19 nt, Artificial Sequence
  Description of Artificial Sequence: Synthetic oligonucleotide
uucaaaagacggccauuuc

SEQ ID NO: 1223741 - RNA, 19 nt, Artificial Sequence
  Description of Artificial Sequence: Synthetic oligonucleotide
acuaagcaagagagaagac

SEQ ID NO: 1223742 - RNA, 19 nt, Artificial Sequence
  Description of Artificial Sequence: Synthetic oligonucleotide
auucuauacuauacaauaa

SEQ ID NO: 1223743 - RNA, 19 nt, Artificial Sequence
  Description of Artificial Sequence: Synthetic oligonucleotide
ucgucuccuaugagaauga

SEQ ID NO: 1223744 - RNA, 19 nt, Artificial Sequence
  Description of Artificial Sequence: Synthetic oligonucleotide
uucugcgauuagacauugg

SEQ ID NO: 1223745 - RNA, 19 nt, Artificial Sequence
  Description of Artificial Sequence: Synthetic oligonucleotide
uuggagagugacuccgacu

SEQ ID NO: 1223746 - RNA, 19 nt, Artificial Sequence
  Description of Artificial Sequence: Synthetic oligonucleotide
gacgacuuaaaugacaauu

SEQ ID NO: 1223747 - RNA, 19 nt, Artificial Sequence
  Description of Artificial Sequence: Synthetic oligonucleotide
guaccgauaaucauagucu

SEQ ID NO: 1223748 - RNA, 19 nt, Artificial Sequence
  Description of Artificial Sequence: Synthetic oligonucleotide
caucuauccucucaaaaua

SEQ ID NO: 1223749 - RNA, 19 nt, Artificial Sequence
  Description of Artificial Sequence: Synthetic oligonucleotide
gaaugagaccuggaccgag

SEQ ID NO: 1223750 - RNA, 19 nt, Artificial Sequence
  Description of Artificial Sequence: Synthetic oligonucleotide
uccuaguagggaguuaguc

SEQ ID NO: 1223751 - RNA, 19 nt, Artificial Sequence
  Description of Artificial Sequence: Synthetic oligonucleotide
agaaucucgucgucugcca

SEQ ID NO: 1223752 - RNA, 19 nt, Artificial Sequence
  Description of Artificial Sequence: Synthetic oligonucleotide
agaucgucuccuaugagaa

SEQ ID NO: 1223753 - RNA, 19 nt, Artificial Sequence
  Description of Artificial Sequence: Synthetic oligonucleotide
ccacaaagcauaacagcgg

SEQ ID NO: 1223754 - RNA, 19 nt, Artificial Sequence
  Description of Artificial Sequence: Synthetic oligonucleotide
ccuguagcgacuguaauac

SEQ ID NO: 1223755 - RNA, 19 nt, Artificial Sequence
  Description of Artificial Sequence: Synthetic oligonucleotide
cucgucgucugccaccgcc

SEQ ID NO: 1223756 - RNA, 19 nt, Artificial Sequence
  Description of Artificial Sequence: Synthetic oligonucleotide
gcgaccuucuucuguaccg

SEQ ID NO: 1223757 - RNA, 19 nt, Artificial Sequence
  Description of Artificial Sequence: Synthetic oligonucleotide
acacgaauucuucuaccau

SEQ ID NO: 1223758 - RNA, 19 nt, Artificial Sequence
  Description of Artificial Sequence: Synthetic oligonucleotide
ucgacgauacucuggugua

SEQ ID NO: 1223759 - RNA, 19 nt, Artificial Sequence
  Description of Artificial Sequence: Synthetic oligonucleotide
uaauuccuaaaaggugacu

SEQ ID NO: 1223760 - RNA, 19 nt, Artificial Sequence
  Description of Artificial Sequence: Synthetic oligonucleotide
uuauaagguuuaacacgua

SEQ ID NO: 1223761 - RNA, 19 nt, Artificial Sequence
  Description of Artificial Sequence: Synthetic oligonucleotide
ugagagcgagacucucugc

SEQ ID NO: 1223762 - RNA, 19 nt, Artificial Sequence
  Description of Artificial Sequence: Synthetic oligonucleotide
gacgucucggcucgagggc

SEQ ID NO: 1223763 - RNA, 19 nt, Artificial Sequence
  Description of Artificial Sequence: Synthetic oligonucleotide
uuacucuuccccacaugua

SEQ ID NO: 1223764 - RNA, 19 nt, Artificial Sequence
  Description of Artificial Sequence: Synthetic oligonucleotide
ugaucgagaaugggauuca

SEQ ID NO: 1223765 - RNA, 19 nt, Artificial Sequence
  Description of Artificial Sequence: Synthetic oligonucleotide
ucgagggccgacagccuag

SEQ ID NO: 1223766 - RNA, 19 nt, Artificial Sequence
  Description of Artificial Sequence: Synthetic oligonucleotide
acgacuuaaaugacaauua

SEQ ID NO: 1223767 - RNA, 19 nt, Artificial Sequence
  Description of Artificial Sequence: Synthetic oligonucleotide
gaaucucgucgucugccac

SEQ ID NO: 1223768 - RNA, 19 nt, Artificial Sequence
  Description of Artificial Sequence: Synthetic oligonucleotide
gaacgagaucuugaccuug

SEQ ID NO: 1223769 - RNA, 19 nt, Artificial Sequence
  Description of Artificial Sequence: Synthetic oligonucleotide
accgauaaucauagucuuc

SEQ ID NO: 1223770 - RNA, 19 nt, Artificial Sequence
  Description of Artificial Sequence: Synthetic oligonucleotide
gucgacgauacucuggugu

SEQ ID NO: 1223771 - RNA, 19 nt, Artificial Sequence
  Description of Artificial Sequence: Synthetic oligonucleotide
uucgcccuuuccauagccu

SEQ ID NO: 1223772 - RNA, 19 nt, Artificial Sequence
  Description of Artificial Sequence: Synthetic oligonucleotide
uaauacggagaaggcgacc

SEQ ID NO: 1223773 - RNA, 19 nt, Artificial Sequence
  Description of Artificial Sequence: Synthetic oligonucleotide
acuccgacuucuucgucga

SEQ ID NO: 1223774 - RNA, 19 nt, Artificial Sequence
  Description of Artificial Sequence: Synthetic oligonucleotide
gaucgagaaugggauucag

SEQ ID NO: 1223775 - RNA, 19 nt, Artificial Sequence
  Description of Artificial Sequence: Synthetic oligonucleotide
acagcaaguuauacaguug

SEQ ID NO: 1223776 - RNA, 19 nt, Artificial Sequence
  Description of Artificial Sequence: Synthetic oligonucleotide
gauggacuacgagauccug

SEQ ID NO: 1223777 - RNA, 19 nt, Artificial Sequence
  Description of Artificial Sequence: Synthetic oligonucleotide
agaauguuuggaaacccuu

SEQ ID NO: 1223778 - RNA, 19 nt, Artificial Sequence
  Description of Artificial Sequence: Synthetic oligonucleotide
uguacaaacugaggccaaa

SEQ ID NO: 1223779 - RNA, 19 nt, Artificial Sequence
  Description of Artificial Sequence: Synthetic oligonucleotide
cuguagcgacuguaauacg

SEQ ID NO: 1223780 - RNA, 19 nt, Artificial Sequence
  Description of Artificial Sequence: Synthetic oligonucleotide
acuacacuaccaucacaaa

SEQ ID NO: 1223781 - RNA, 19 nt, Artificial Sequence
  Description of Artificial Sequence: Synthetic oligonucleotide
gagauccugaccugcucuc

SEQ ID NO: 1223782 - RNA, 19 nt, Artificial Sequence
  Description of Artificial Sequence: Synthetic oligonucleotide
gugaccucccaguucgcug

SEQ ID NO: 1223783 - RNA, 19 nt, Artificial Sequence
  Description of Artificial Sequence: Synthetic oligonucleotide
cuacgagauccugaccugc

SEQ ID NO: 1223784 - RNA, 19 nt, Artificial Sequence
  Description of Artificial Sequence: Synthetic oligonucleotide
caaauccacgugaccuccc

SEQ ID NO: 1223785 - RNA, 19 nt, Artificial Sequence
  Description of Artificial Sequence: Synthetic oligonucleotide
ucggcucgagggccgacag

SEQ ID NO: 1223786 - RNA, 19 nt, Artificial Sequence
  Description of Artificial Sequence: Synthetic oligonucleotide
acucgagcaggaguucccg

SEQ ID NO: 1223787 - RNA, 19 nt, Artificial Sequence
  Description of Artificial Sequence: Synthetic oligonucleotide
auagccuccuuagagucau

SEQ ID NO: 1223788 - RNA, 19 nt, Artificial Sequence
  Description of Artificial Sequence: Synthetic oligonucleotide
ucccauucgcccuuuccau

SEQ ID NO: 1223789 - RNA, 19 nt, Artificial Sequence
  Description of Artificial Sequence: Synthetic oligonucleotide
ggcuguaggaacgagaucu

SEQ ID NO: 1223790 - RNA, 19 nt, Artificial Sequence
  Description of Artificial Sequence: Synthetic oligonucleotide
gagaccuggaccgagugua

SEQ ID NO: 1223791 - RNA, 19 nt, Artificial Sequence
  Description of Artificial Sequence: Synthetic oligonucleotide
uggaccgaguguagcgucu

SEQ ID NO: 1223792 - RNA, 19 nt, Artificial Sequence
  Description of Artificial Sequence: Synthetic oligonucleotide
agcgagacucucugcccuc

SEQ ID NO: 1223793 - RNA, 19 nt, Artificial Sequence
  Description of Artificial Sequence: Synthetic oligonucleotide
agcaucggaagcucauaaa

SEQ ID NO: 1223794 - RNA, 19 nt, Artificial Sequence
  Description of Artificial Sequence: Synthetic oligonucleotide
auagaauaauccacacgaa

SEQ ID NO: 1223795 - RNA, 19 nt, Artificial Sequence
  Description of Artificial Sequence: Synthetic oligonucleotide
guagcgacuguaauacgga

SEQ ID NO: 1223796 - RNA, 19 nt, Artificial Sequence
  Description of Artificial Sequence: Synthetic oligonucleotide
cuacuucgagaucgucucc

SEQ ID NO: 1223797 - RNA, 19 nt, Artificial Sequence
  Description of Artificial Sequence: Synthetic oligonucleotide
cuuagccauaacugcuuca

SEQ ID NO: 1223798 - RNA, 19 nt, Artificial Sequence
  Description of Artificial Sequence: Synthetic oligonucleotide
uccacgugaccucccaguu

SEQ ID NO: 1223799 - RNA, 19 nt, Artificial Sequence
  Description of Artificial Sequence: Synthetic oligonucleotide
gacuucuucgucgacgaua

SEQ ID NO: 1223800 - RNA, 19 nt, Artificial Sequence
  Description of Artificial Sequence: Synthetic oligonucleotide
gacagccuaggccgccccg

SEQ ID NO: 1223801 - RNA, 19 nt, Artificial Sequence
  Description of Artificial Sequence: Synthetic oligonucleotide
gaagacgucucggcucgag

SEQ ID NO: 1223802 - RNA, 19 nt, Artificial Sequence
  Description of Artificial Sequence: Synthetic oligonucleotide
cucggucauauccucuauc

SEQ ID NO: 1223803 - RNA, 19 nt, Artificial Sequence
  Description of Artificial Sequence: Synthetic oligonucleotide
cacucccaggcaaguauug

SEQ ID NO: 1223804 - RNA, 19 nt, Artificial Sequence
  Description of Artificial Sequence: Synthetic oligonucleotide
agcgacuguaauacggaga

SEQ ID NO: 1223805 - RNA, 19 nt, Artificial Sequence
  Description of Artificial Sequence: Synthetic oligonucleotide
cuucugcgauuagacauug

SEQ ID NO: 1223806 - RNA, 19 nt, Artificial Sequence
  Description of Artificial Sequence: Synthetic oligonucleotide
cuucgucgacgauacucug

SEQ ID NO: 1223807 - RNA, 19 nt, Artificial Sequence
  Description of Artificial Sequence: Synthetic oligonucleotide
agacggccauuucuuccuc

SEQ ID NO: 1223808 - RNA, 19 nt, Artificial Sequence
  Description of Artificial Sequence: Synthetic oligonucleotide
auccugaccugcucucuga

SEQ ID NO: 1223809 - RNA, 19 nt, Artificial Sequence
  Description of Artificial Sequence: Synthetic oligonucleotide
ccauucgcccuuuccauag

SEQ ID NO: 1223810 - RNA, 19 nt, Artificial Sequence
  Description of Artificial Sequence: Synthetic oligonucleotide
gggaauacuuaaguuucug

SEQ ID NO: 1223811 - RNA, 19 nt, Artificial Sequence
  Description of Artificial Sequence: Synthetic oligonucleotide
ucuugggcuguaggaacga

SEQ ID NO: 1223812 - RNA, 19 nt, Artificial Sequence
  Description of Artificial Sequence: Synthetic oligonucleotide
auggacuacgagauccuga

SEQ ID NO: 1223813 - RNA, 19 nt, Artificial Sequence
  Description of Artificial Sequence: Synthetic oligonucleotide
uagcgucuaugagaaugcc

SEQ ID NO: 1223814 - RNA, 19 nt, Artificial Sequence
  Description of Artificial Sequence: Synthetic oligonucleotide
acacguaacuucaaacaua

SEQ ID NO: 1223815 - RNA, 19 nt, Artificial Sequence
  Description of Artificial Sequence: Synthetic oligonucleotide
cuacaucgcucaugucggc

SEQ ID NO: 1223816 - RNA, 19 nt, Artificial Sequence
  Description of Artificial Sequence: Synthetic oligonucleotide
ggaguuaguccccuguaaa

SEQ ID NO: 1223817 - RNA, 19 nt, Artificial Sequence
  Description of Artificial Sequence: Synthetic oligonucleotide
accacucaaugguccauau

SEQ ID NO: 1223818 - RNA, 19 nt, Artificial Sequence
  Description of Artificial Sequence: Synthetic oligonucleotide
aggcgaccuucuucuguac

SEQ ID NO: 1223819 - RNA, 19 nt, Artificial Sequence
  Description of Artificial Sequence: Synthetic oligonucleotide
gaaaguccuuagccauaac

SEQ ID NO: 1223820 - RNA, 19 nt, Artificial Sequence
  Description of Artificial Sequence: Synthetic oligonucleotide
aacccuugauggacuacga

SEQ ID NO: 1223821 - RNA, 19 nt, Artificial Sequence
  Description of Artificial Sequence: Synthetic oligonucleotide
ccauagccuccuuagaguc

SEQ ID NO: 1223822 - RNA, 19 nt, Artificial Sequence
  Description of Artificial Sequence: Synthetic oligonucleotide
aguagggaguuaguccccu

SEQ ID NO: 1223823 - RNA, 19 nt, Artificial Sequence
  Description of Artificial Sequence: Synthetic oligonucleotide
aggcgugugugcucucuug

SEQ ID NO: 1223824 - RNA, 19 nt, Artificial Sequence
  Description of Artificial Sequence: Synthetic oligonucleotide
ggaauacuuaaguuucugu

SEQ ID NO: 1223825 - RNA, 19 nt, Artificial Sequence
  Description of Artificial Sequence: Synthetic oligonucleotide
uuacaccuuuaagaguaua

SEQ ID NO: 1223826 - RNA, 19 nt, Artificial Sequence
  Description of Artificial Sequence: Synthetic oligonucleotide
auuuugacugagagcgaga

SEQ ID NO: 1223827 - RNA, 19 nt, Artificial Sequence
  Description of Artificial Sequence: Synthetic oligonucleotide
cuguaggaacgagaucuug

SEQ ID NO: 1223828 - RNA, 19 nt, Artificial Sequence
  Description of Artificial Sequence: Synthetic oligonucleotide
ccaauaacccaauaccaaa

SEQ ID NO: 1223829 - RNA, 19 nt, Artificial Sequence
  Description of Artificial Sequence: Synthetic oligonucleotide
guuggacgacuuaaaugac

SEQ ID NO: 1223830 - RNA, 19 nt, Artificial Sequence
  Description of Artificial Sequence: Synthetic oligonucleotide
guaugucuucugcgauuag

SEQ ID NO: 1223831 - RNA, 19 nt, Artificial Sequence
  Description of Artificial Sequence: Synthetic oligonucleotide
aucgagaaugggauucaga

SEQ ID NO: 1223832 - RNA, 19 nt, Artificial Sequence
  Description of Artificial Sequence: Synthetic oligonucleotide
agcgucuaugagaaugccu

SEQ ID NO: 1223833 - RNA, 19 nt, Artificial Sequence
  Description of Artificial Sequence: Synthetic oligonucleotide
ccuccuaguagggaguuag

SEQ ID NO: 1223834 - RNA, 19 nt, Artificial Sequence
  Description of Artificial Sequence: Synthetic oligonucleotide
cauagccuccuuagaguca

SEQ ID NO: 1223835 - RNA, 19 nt, Artificial Sequence
  Description of Artificial Sequence: Synthetic oligonucleotide
cuacuacacuaccaucaca

SEQ ID NO: 1223836 - RNA, 19 nt, Artificial Sequence
  Description of Artificial Sequence: Synthetic oligonucleotide
accgaguguagcgucuaug

SEQ ID NO: 1223837 - RNA, 19 nt, Artificial Sequence
  Description of Artificial Sequence: Synthetic oligonucleotide
agcuuucaaaagacggcca

SEQ ID NO: 1223838 - RNA, 19 nt, Artificial Sequence
  Description of Artificial Sequence: Synthetic oligonucleotide
aaacacucccaggcaagua

SEQ ID NO: 1223839 - RNA, 19 nt, Artificial Sequence
  Description of Artificial Sequence: Synthetic oligonucleotide
acugagagcgagacucucu

SEQ ID NO: 1223840 - RNA, 19 nt, Artificial Sequence
  Description of Artificial Sequence: Synthetic oligonucleotide
cgacuuaaaugacaauuac

SEQ ID NO: 1223841 - RNA, 19 nt, Artificial Sequence
  Description of Artificial Sequence: Synthetic oligonucleotide
cuggaccgaguguagcguc

SEQ ID NO: 1223842 - RNA, 19 nt, Artificial Sequence
  Description of Artificial Sequence: Synthetic oligonucleotide
cauucgcccuuuccauagc

SEQ ID NO: 1223843 - RNA, 19 nt, Artificial Sequence
  Description of Artificial Sequence: Synthetic oligonucleotide
acaaagcauaacagcgggu

SEQ ID NO: 1223844 - RNA, 19 nt, Artificial Sequence
  Description of Artificial Sequence: Synthetic oligonucleotide
ccacacgaauucuucuacc

SEQ ID NO: 1223845 - RNA, 19 nt, Artificial Sequence
  Description of Artificial Sequence: Synthetic oligonucleotide
agggaauacuuaaguuucu

SEQ ID NO: 1223846 - RNA, 19 nt, Artificial Sequence
  Description of Artificial Sequence: Synthetic oligonucleotide
cagaauguuuggaaacccu

SEQ ID NO: 1223847 - RNA, 19 nt, Artificial Sequence
  Description of Artificial Sequence: Synthetic oligonucleotide
acguaacuucaaacauaac

SEQ ID NO: 1223848 - RNA, 19 nt, Artificial Sequence
  Description of Artificial Sequence: Synthetic oligonucleotide
gacgauacucugguguaua

SEQ ID NO: 1223849 - RNA, 19 nt, Artificial Sequence
  Description of Artificial Sequence: Synthetic oligonucleotide
ucgcucaugucggccagga

SEQ ID NO: 1223850 - RNA, 19 nt, Artificial Sequence
  Description of Artificial Sequence: Synthetic oligonucleotide
gguccauaucgagaaaaca

SEQ ID NO: 1223851 - RNA, 19 nt, Artificial Sequence
  Description of Artificial Sequence: Synthetic oligonucleotide
aauagcgucuugggcugua

SEQ ID NO: 1223852 - RNA, 19 nt, Artificial Sequence
  Description of Artificial Sequence: Synthetic oligonucleotide
auacucugguguauaggau

SEQ ID NO: 1223853 - RNA, 19 nt, Artificial Sequence
  Description of Artificial Sequence: Synthetic oligonucleotide
caguuguucuagguaauaa

SEQ ID NO: 1223854 - RNA, 19 nt, Artificial Sequence
  Description of Artificial Sequence: Synthetic oligonucleotide
gacugagagcgagacucuc

SEQ ID NO: 1223855 - RNA, 19 nt, Artificial Sequence
  Description of Artificial Sequence: Synthetic oligonucleotide
ggcgaccuucuucuguacc

SEQ ID NO: 1223856 - RNA, 19 nt, Artificial Sequence
  Description of Artificial Sequence: Synthetic oligonucleotide
agauuuugacugagagcga

SEQ ID NO: 1223857 - RNA, 19 nt, Artificial Sequence
  Description of Artificial Sequence: Synthetic oligonucleotide
agauccugaccugcucucu

SEQ ID NO: 1223858 - RNA, 19 nt, Artificial Sequence
  Description of Artificial Sequence: Synthetic oligonucleotide
cugcccucgaaguuguucu

SEQ ID NO: 1223859 - RNA, 19 nt, Artificial Sequence
  Description of Artificial Sequence: Synthetic oligonucleotide
gcaucggaagcucauaaau

SEQ ID NO: 1223860 - RNA, 19 nt, Artificial Sequence
  Description of Artificial Sequence: Synthetic oligonucleotide
gagcgagacucucugcccu

SEQ ID NO: 1223861 - RNA, 19 nt, Artificial Sequence
  Description of Artificial Sequence: Synthetic oligonucleotide
gaagcaucggaagcucaua

SEQ ID NO: 1223862 - RNA, 19 nt, Artificial Sequence
  Description of Artificial Sequence: Synthetic oligonucleotide
ggaaaguccuuagccauaa

SEQ ID NO: 1223863 - RNA, 19 nt, Artificial Sequence
  Description of Artificial Sequence: Synthetic oligonucleotide
ccgaguguagcgucuauga

SEQ ID NO: 1223864 - RNA, 19 nt, Artificial Sequence
  Description of Artificial Sequence: Synthetic oligonucleotide
uaggcgugugugcucucuu

SEQ ID NO: 1223865 - RNA, 19 nt, Artificial Sequence
  Description of Artificial Sequence: Synthetic oligonucleotide
cccgcuguccgcaccgugg

SEQ ID NO: 1223866 - RNA, 19 nt, Artificial Sequence
  Description of Artificial Sequence: Synthetic oligonucleotide
auacggagaaggcgaccuu

SEQ ID NO: 1223867 - RNA, 19 nt, Artificial Sequence
  Description of Artificial Sequence: Synthetic oligonucleotide
uaacagcgggucuccuuuu

SEQ ID NO: 1223868 - RNA, 19 nt, Artificial Sequence
  Description of Artificial Sequence: Synthetic oligonucleotide
gccuccuccuccuccuccg

SEQ ID NO: 1223869 - RNA, 19 nt, Artificial Sequence
  Description of Artificial Sequence: Synthetic oligonucleotide
ggaucuggauuugcccugc

SEQ ID NO: 1223870 - RNA, 19 nt, Artificial Sequence
  Description of Artificial Sequence: Synthetic oligonucleotide
gggaguuaguccccuguaa

SEQ ID NO: 1223871 - RNA, 19 nt, Artificial Sequence
  Description of Artificial Sequence: Synthetic oligonucleotide
uuccuccuaguagggaguu

SEQ ID NO: 1223872 - RNA, 19 nt, Artificial Sequence
  Description of Artificial Sequence: Synthetic oligonucleotide
ggacuaggaagcaucggaa

SEQ ID NO: 1223873 - RNA, 19 nt, Artificial Sequence
  Description of Artificial Sequence: Synthetic oligonucleotide
aggaaaguccuuagccaua

SEQ ID NO: 1223874 - RNA, 19 nt, Artificial Sequence
  Description of Artificial Sequence: Synthetic oligonucleotide
gagggccgacagccuaggc

SEQ ID NO: 1223875 - RNA, 19 nt, Artificial Sequence
  Description of Artificial Sequence: Synthetic oligonucleotide
ggccacacuauagaugaaa

SEQ ID NO: 1223876 - RNA, 19 nt, Artificial Sequence
  Description of Artificial Sequence: Synthetic oligonucleotide
cgaguguagcgucuaugag

SEQ ID NO: 1223877 - RNA, 19 nt, Artificial Sequence
  Description of Artificial Sequence: Synthetic oligonucleotide
ccucccaguucgcugauca

SEQ ID NO: 1223878 - RNA, 19 nt, Artificial Sequence
  Description of Artificial Sequence: Synthetic oligonucleotide
ggccaaacacucccaggca

SEQ ID NO: 1223879 - RNA, 19 nt, Artificial Sequence
  Description of Artificial Sequence: Synthetic oligonucleotide
uguaggcgugugugcucuc

SEQ ID NO: 1223880 - RNA, 19 nt, Artificial Sequence
  Description of Artificial Sequence: Synthetic oligonucleotide
cgugugugcucucuuggug

SEQ ID NO: 1223881 - RNA, 19 nt, Artificial Sequence
  Description of Artificial Sequence: Synthetic oligonucleotide
cuugaucgagaaugggauu

SEQ ID NO: 1223882 - RNA, 19 nt, Artificial Sequence
  Description of Artificial Sequence: Synthetic oligonucleotide
gcuuucaaaagacggccau

SEQ ID NO: 1223883 - RNA, 19 nt, Artificial Sequence
  Description of Artificial Sequence: Synthetic oligonucleotide
acacucccaggcaaguauu

SEQ ID NO: 1223884 - RNA, 19 nt, Artificial Sequence
  Description of Artificial Sequence: Synthetic oligonucleotide
acgugaccucccaguucgc

SEQ ID NO: 1223885 - RNA, 19 nt, Artificial Sequence
  Description of Artificial Sequence: Synthetic oligonucleotide
guuguccuucagugauuaa

SEQ ID NO: 1223886 - RNA, 19 nt, Artificial Sequence
  Description of Artificial Sequence: Synthetic oligonucleotide
gaaugggauucagaauguu

SEQ ID NO: 1223887 - RNA, 19 nt, Artificial Sequence
  Description of Artificial Sequence: Synthetic oligonucleotide
cucgagggccgacagccua

SEQ ID NO: 1223888 - RNA, 19 nt, Artificial Sequence
  Description of Artificial Sequence: Synthetic oligonucleotide
guccgcaccguggggagga

SEQ ID NO: 1223889 - RNA, 19 nt, Artificial Sequence
  Description of Artificial Sequence: Synthetic oligonucleotide
uccuccuaguagggaguua

SEQ ID NO: 1223890 - RNA, 19 nt, Artificial Sequence
  Description of Artificial Sequence: Synthetic oligonucleotide
ccgcuguccgcaccguggg

SEQ ID NO: 1223891 - RNA, 19 nt, Artificial Sequence
  Description of Artificial Sequence: Synthetic oligonucleotide
ccacucaaugguccauauc

SEQ ID NO: 1223892 - RNA, 19 nt, Artificial Sequence
  Description of Artificial Sequence: Synthetic oligonucleotide
cuccgacuucuucgucgac

SEQ ID NO: 1223893 - RNA, 19 nt, Artificial Sequence
  Description of Artificial Sequence: Synthetic oligonucleotide
ucaugucggccaggagcuc

SEQ ID NO: 1223894 - RNA, 19 nt, Artificial Sequence
  Description of Artificial Sequence: Synthetic oligonucleotide
cuucgagaucgucuccuau

SEQ ID NO: 1223895 - RNA, 19 nt, Artificial Sequence
  Description of Artificial Sequence: Synthetic oligonucleotide
ccauaucgagaaaacacuu

SEQ ID NO: 1223896 - RNA, 19 nt, Artificial Sequence
  Description of Artificial Sequence: Synthetic oligonucleotide
cgagaucgucuccuaugag

SEQ ID NO: 1223897 - RNA, 19 nt, Artificial Sequence
  Description of Artificial Sequence: Synthetic oligonucleotide
uccgcaccguggggaggag

SEQ ID NO: 1223898 - RNA, 19 nt, Artificial Sequence
  Description of Artificial Sequence: Synthetic oligonucleotide
guaggcgugugugcucucu

SEQ ID NO: 1223899 - RNA, 19 nt, Artificial Sequence
  Description of Artificial Sequence: Synthetic oligonucleotide
ccacgugaccucccaguuc

SEQ ID NO: 1223900 - RNA, 19 nt, Artificial Sequence
  Description of Artificial Sequence: Synthetic oligonucleotide
cuccuaguagggaguuagu

SEQ ID NO: 1223901 - RNA, 19 nt, Artificial Sequence
  Description of Artificial Sequence: Synthetic oligonucleotide
agaagacgucucggcucga

SEQ ID NO: 1223902 - RNA, 19 nt, Artificial Sequence
  Description of Artificial Sequence: Synthetic oligonucleotide
gccacacuauagaugaaau

SEQ ID NO: 1223903 - RNA, 19 nt, Artificial Sequence
  Description of Artificial Sequence: Synthetic oligonucleotide
uccaucccauucgcccuuu

SEQ ID NO: 1223904 - RNA, 19 nt, Artificial Sequence
  Description of Artificial Sequence: Synthetic oligonucleotide
cucggcucgagggccgaca

SEQ ID NO: 1223905 - RNA, 19 nt, Artificial Sequence
  Description of Artificial Sequence: Synthetic oligonucleotide
ccugcucucugauuuuacu

SEQ ID NO: 1223906 - RNA, 19 nt, Artificial Sequence
  Description of Artificial Sequence: Synthetic oligonucleotide
cguuggagauuuugacuga

SEQ ID NO: 1223907 - RNA, 19 nt, Artificial Sequence
  Description of Artificial Sequence: Synthetic oligonucleotide
gaccgaguguagcgucuau

SEQ ID NO: 1223908 - RNA, 19 nt, Artificial Sequence
  Description of Artificial Sequence: Synthetic oligonucleotide
ggaucuacuucgagaucgu

SEQ ID NO: 1223909 - RNA, 19 nt, Artificial Sequence
  Description of Artificial Sequence: Synthetic oligonucleotide
gcugaucauaaaccacauu

SEQ ID NO: 1223910 - RNA, 19 nt, Artificial Sequence
  Description of Artificial Sequence: Synthetic oligonucleotide
ggacgacuuaaaugacaau

SEQ ID NO: 1223911 - RNA, 19 nt, Artificial Sequence
  Description of Artificial Sequence: Synthetic oligonucleotide
cuguaccgauaaucauagu

SEQ ID NO: 1223912 - RNA, 19 nt, Artificial Sequence
  Description of Artificial Sequence: Synthetic oligonucleotide
ccuccuccuccuccuccgc

SEQ ID NO: 1223913 - RNA, 19 nt, Artificial Sequence
  Description of Artificial Sequence: Synthetic oligonucleotide
gccgacagccuaggccgcc

SEQ ID NO: 1223914 - RNA, 19 nt, Artificial Sequence
  Description of Artificial Sequence: Synthetic oligonucleotide
cgagauccugaccugcucu

SEQ ID NO: 1223915 - RNA, 19 nt, Artificial Sequence
  Description of Artificial Sequence: Synthetic oligonucleotide
ccgacagccuaggccgccc

SEQ ID NO: 1223916 - RNA, 19 nt, Artificial Sequence
  Description of Artificial Sequence: Synthetic oligonucleotide
cgccuccuccuccuccucc

SEQ ID NO: 1223917 - RNA, 19 nt, Artificial Sequence
  Description of Artificial Sequence: Synthetic oligonucleotide
cgucgacgauacucuggug

SEQ ID NO: 1223918 - RNA, 19 nt, Artificial Sequence
  Description of Artificial Sequence: Synthetic oligonucleotide
ccgccaccaccacuaugug

SEQ ID NO: 1223919 - RNA, 19 nt, Artificial Sequence
  Description of Artificial Sequence: Synthetic oligonucleotide
cucccaguucgcugaucau

SEQ ID NO: 1223920 - RNA, 19 nt, Artificial Sequence
  Description of Artificial Sequence: Synthetic oligonucleotide
ggaccgaguguagcgucua

SEQ ID NO: 1223921 - RNA, 19 nt, Artificial Sequence
  Description of Artificial Sequence: Synthetic oligonucleotide
ggccgacagccuaggccgc

SEQ ID NO: 1223922 - RNA, 19 nt, Artificial Sequence
  Description of Artificial Sequence: Synthetic oligonucleotide
cgauaaucauagucuucgu

SEQ ID NO: 1223923 - RNA, 19 nt, Artificial Sequence
  Description of Artificial Sequence: Synthetic oligonucleotide
cgagggccgacagccuagg

SEQ ID NO: 1223924 - RNA, 19 nt, Artificial Sequence
  Description of Artificial Sequence: Synthetic oligonucleotide
cuucuucgucgacgauacu

SEQ ID NO: 1223925 - RNA, 19 nt, Artificial Sequence
  Description of Artificial Sequence: Synthetic oligonucleotide
cgauuagacauuggagagu

SEQ ID NO: 1223926 - RNA, 19 nt, Artificial Sequence
  Description of Artificial Sequence: Synthetic oligonucleotide
caauagcgucuugggcugu

SEQ ID NO: 1223927 - RNA, 19 nt, Artificial Sequence
  Description of Artificial Sequence: Synthetic oligonucleotide
guguagcgucuaugagaau

SEQ ID NO: 1223928 - RNA, 19 nt, Artificial Sequence
  Description of Artificial Sequence: Synthetic oligonucleotide
gcuguaggaacgagaucuu

SEQ ID NO: 1223929 - RNA, 19 nt, Artificial Sequence
  Description of Artificial Sequence: Synthetic oligonucleotide
ccuggaccgaguguagcgu

SEQ ID NO: 1223930 - RNA, 19 nt, Artificial Sequence
  Description of Artificial Sequence: Synthetic oligonucleotide
gcauaacagcgggucuccu

SEQ ID NO: 1223931 - RNA, 19 nt, Artificial Sequence
  Description of Artificial Sequence: Synthetic oligonucleotide
ucuugcacgauucugaucc

SEQ ID NO: 1223932 - RNA, 19 nt, Artificial Sequence
  Description of Artificial Sequence: Synthetic oligonucleotide
aaguuggugccauagaugg

SEQ ID NO: 1223933 - RNA, 19 nt, Artificial Sequence
  Description of Artificial Sequence: Synthetic oligonucleotide
ugugcgaucauauaggagc

SEQ ID NO: 1223934 - RNA, 19 nt, Artificial Sequence
  Description of Artificial Sequence: Synthetic oligonucleotide
aaugcaaacuggcaucggc

SEQ ID NO: 1223935 - RNA, 19 nt, Artificial Sequence
  Description of Artificial Sequence: Synthetic oligonucleotide
aauuuaauaaacuucucua

SEQ ID NO: 1223936 - RNA, 19 nt, Artificial Sequence
  Description of Artificial Sequence: Synthetic oligonucleotide
acugaaagcucucaagugc

SEQ ID NO: 1223937 - RNA, 19 nt, Artificial Sequence
  Description of Artificial Sequence: Synthetic oligonucleotide
auagccaaguaccaggacc

SEQ ID NO: 1223938 - RNA, 19 nt, Artificial Sequence
  Description of Artificial Sequence: Synthetic oligonucleotide
gaugauaaccacuucuagg

SEQ ID NO: 1223939 - RNA, 19 nt, Artificial Sequence
  Description of Artificial Sequence: Synthetic oligonucleotide
aguucaaugagcuggggac

SEQ ID NO: 1223940 - RNA, 19 nt, Artificial Sequence
  Description of Artificial Sequence: Synthetic oligonucleotide
gaaaugggaacucaaggag

SEQ ID NO: 1223941 - RNA, 19 nt, Artificial Sequence
  Description of Artificial Sequence: Synthetic oligonucleotide
uugaguacuccauauaaca

SEQ ID NO: 1223942 - RNA, 19 nt, Artificial Sequence
  Description of Artificial Sequence: Synthetic oligonucleotide
aguauuggaacccaguagu

SEQ ID NO: 1223943 - RNA, 19 nt, Artificial Sequence
  Description of Artificial Sequence: Synthetic oligonucleotide
ugugacuuuaggcaguuca

SEQ ID NO: 1223944 - RNA, 19 nt, Artificial Sequence
  Description of Artificial Sequence: Synthetic oligonucleotide
aagacaaguuacuucacca

SEQ ID NO: 1223945 - RNA, 19 nt, Artificial Sequence
  Description of Artificial Sequence: Synthetic oligonucleotide
uuaaaaugaucaugaaggc

SEQ ID NO: 1223946 - RNA, 19 nt, Artificial Sequence
  Description of Artificial Sequence: Synthetic oligonucleotide
aagucggugacuuugucca

SEQ ID NO: 1223947 - RNA, 19 nt, Artificial Sequence
  Description of Artificial Sequence: Synthetic oligonucleotide
aguuacuucaccauauugg

SEQ ID NO: 1223948 - RNA, 19 nt, Artificial Sequence
  Description of Artificial Sequence: Synthetic oligonucleotide
uugagacagaccaugagga

SEQ ID NO: 1223949 - RNA, 19 nt, Artificial Sequence
  Description of Artificial Sequence: Synthetic oligonucleotide
uugguuuuauucaagaguu

SEQ ID NO: 1223950 - RNA, 19 nt, Artificial Sequence
  Description of Artificial Sequence: Synthetic oligonucleotide
aaggaaacaucagagcccg

SEQ ID NO: 1223951 - RNA, 19 nt, Artificial Sequence
  Description of Artificial Sequence: Synthetic oligonucleotide
ugaaccgucauuucuuucc

SEQ ID NO: 1223952 - RNA, 19 nt, Artificial Sequence
  Description of Artificial Sequence: Synthetic oligonucleotide
uucuaggaugcuuaaaaug

SEQ ID NO: 1223953 - RNA, 19 nt, Artificial Sequence
  Description of Artificial Sequence: Synthetic oligonucleotide
ucuugaguacuccauauaa

SEQ ID NO: 1223954 - RNA, 19 nt, Artificial Sequence
  Description of Artificial Sequence: Synthetic oligonucleotide
ugaguacuccauauaacag

SEQ ID NO: 1223955 - RNA, 19 nt, Artificial Sequence
  Description of Artificial Sequence: Synthetic oligonucleotide
guuacuucaccauauuggc

SEQ ID NO: 1223956 - RNA, 19 nt, Artificial Sequence
  Description of Artificial Sequence: Synthetic oligonucleotide
uacuucaccauauuggcac

SEQ ID NO: 1223957 - RNA, 19 nt, Artificial Sequence
  Description of Artificial Sequence: Synthetic oligonucleotide
ucauauaggagccaaugau

SEQ ID NO: 1223958 - RNA, 19 nt, Artificial Sequence
  Description of Artificial Sequence: Synthetic oligonucleotide
uugcccaacaggaagagga

SEQ ID NO: 1223959 - RNA, 19 nt, Artificial Sequence
  Description of Artificial Sequence: Synthetic oligonucleotide
cuuagcaagcaccggaucg

SEQ ID NO: 1223960 - RNA, 19 nt, Artificial Sequence
  Description of Artificial Sequence: Synthetic oligonucleotide
uuaggcaguucaaugagcu

SEQ ID NO: 1223961 - RNA, 19 nt, Artificial Sequence
  Description of Artificial Sequence: Synthetic oligonucleotide
augaauacauugaagaucu

SEQ ID NO: 1223962 - RNA, 19 nt, Artificial Sequence
  Description of Artificial Sequence: Synthetic oligonucleotide
aaacacuuagcaagcaccg

SEQ ID NO: 1223963 - RNA, 19 nt, Artificial Sequence
  Description of Artificial Sequence: Synthetic oligonucleotide
auaaacuucucuaggcacc

SEQ ID NO: 1223964 - RNA, 19 nt, Artificial Sequence
  Description of Artificial Sequence: Synthetic oligonucleotide
acuggcaucggccauuggg

SEQ ID NO: 1223965 - RNA, 19 nt, Artificial Sequence
  Description of Artificial Sequence: Synthetic oligonucleotide
gaauacauugaagaucugc

SEQ ID NO: 1223966 - RNA, 19 nt, Artificial Sequence
  Description of Artificial Sequence: Synthetic oligonucleotide
aaauaugccauagccaagu

SEQ ID NO: 1223967 - RNA, 19 nt, Artificial Sequence
  Description of Artificial Sequence: Synthetic oligonucleotide
agaaguacaaagaaacuug

SEQ ID NO: 1223968 - RNA, 19 nt, Artificial Sequence
  Description of Artificial Sequence: Synthetic oligonucleotide
uaguaauugagaggcaggg

SEQ ID NO: 1223969 - RNA, 19 nt, Artificial Sequence
  Description of Artificial Sequence: Synthetic oligonucleotide
aagaaggcauuccuggcug

SEQ ID NO: 1223970 - RNA, 19 nt, Artificial Sequence
  Description of Artificial Sequence: Synthetic oligonucleotide
auaugccauagccaaguac

SEQ ID NO: 1223971 - RNA, 19 nt, Artificial Sequence
  Description of Artificial Sequence: Synthetic oligonucleotide
gaagacaaguuacuucacc

SEQ ID NO: 1223972 - RNA, 19 nt, Artificial Sequence
  Description of Artificial Sequence: Synthetic oligonucleotide
agaaacuugcugcagacau

SEQ ID NO: 1223973 - RNA, 19 nt, Artificial Sequence
  Description of Artificial Sequence: Synthetic oligonucleotide
acuuuaggcaguucaauga

SEQ ID NO: 1223974 - RNA, 19 nt, Artificial Sequence
  Description of Artificial Sequence: Synthetic oligonucleotide
gauaagugagccgaaggcc

SEQ ID NO: 1223975 - RNA, 19 nt, Artificial Sequence
  Description of Artificial Sequence: Synthetic oligonucleotide
uuccucauaagcagaaaga

SEQ ID NO: 1223976 - RNA, 19 nt, Artificial Sequence
  Description of Artificial Sequence: Synthetic oligonucleotide
caaggaaacaucagagccc

SEQ ID NO: 1223977 - RNA, 19 nt, Artificial Sequence
  Description of Artificial Sequence: Synthetic oligonucleotide
agaagcaacacuugagaca

SEQ ID NO: 1223978 - RNA, 19 nt, Artificial Sequence
  Description of Artificial Sequence: Synthetic oligonucleotide
aggauaagugagccgaagg

SEQ ID NO: 1223979 - RNA, 19 nt, Artificial Sequence
  Description of Artificial Sequence: Synthetic oligonucleotide
gaacaauguguccacacac

SEQ ID NO: 1223980 - RNA, 19 nt, Artificial Sequence
  Description of Artificial Sequence: Synthetic oligonucleotide
gauccuccaagaaacagag

SEQ ID NO: 1223981 - RNA, 19 nt, Artificial Sequence
  Description of Artificial Sequence: Synthetic oligonucleotide
auagcccaguaauaggagg

SEQ ID NO: 1223982 - RNA, 19 nt, Artificial Sequence
  Description of Artificial Sequence: Synthetic oligonucleotide
gacuuuaggcaguucaaug

SEQ ID NO: 1223983 - RNA, 19 nt, Artificial Sequence
  Description of Artificial Sequence: Synthetic oligonucleotide
uacuccauauaacagugaa

SEQ ID NO: 1223984 - RNA, 19 nt, Artificial Sequence
  Description of Artificial Sequence: Synthetic oligonucleotide
ucagcgcucggcuaaaagc

SEQ ID NO: 1223985 - RNA, 19 nt, Artificial Sequence
  Description of Artificial Sequence: Synthetic oligonucleotide
agaaguuugcccaacagga

SEQ ID NO: 1223986 - RNA, 19 nt, Artificial Sequence
  Description of Artificial Sequence: Synthetic oligonucleotide
uugugcauagcccaguaau

SEQ ID NO: 1223987 - RNA, 19 nt, Artificial Sequence
  Description of Artificial Sequence: Synthetic oligonucleotide
uuccuauucaggaauuuaa

SEQ ID NO: 1223988 - RNA, 19 nt, Artificial Sequence
  Description of Artificial Sequence: Synthetic oligonucleotide
gaucauauaggagccaaug

SEQ ID NO: 1223989 - RNA, 19 nt, Artificial Sequence
  Description of Artificial Sequence: Synthetic oligonucleotide
aucaguauucuuuugcgaa

SEQ ID NO: 1223990 - RNA, 19 nt, Artificial Sequence
  Description of Artificial Sequence: Synthetic oligonucleotide
uuuaggcaguucaaugagc

SEQ ID NO: 1223991 - RNA, 19 nt, Artificial Sequence
  Description of Artificial Sequence: Synthetic oligonucleotide
aggagcauggagcacauga

SEQ ID NO: 1223992 - RNA, 19 nt, Artificial Sequence
  Description of Artificial Sequence: Synthetic oligonucleotide
ugacaugucccacagcccu

SEQ ID NO: 1223993 - RNA, 19 nt, Artificial Sequence
  Description of Artificial Sequence: Synthetic oligonucleotide
uaacagugaaauaugccau

SEQ ID NO: 1223994 - RNA, 19 nt, Artificial Sequence
  Description of Artificial Sequence: Synthetic oligonucleotide
ugaguaacaagaugauaac

SEQ ID NO: 1223995 - RNA, 19 nt, Artificial Sequence
  Description of Artificial Sequence: Synthetic oligonucleotide
gcuuaaaaugaucaugaag

SEQ ID NO: 1223996 - RNA, 19 nt, Artificial Sequence
  Description of Artificial Sequence: Synthetic oligonucleotide
cuuuaggcaguucaaugag

SEQ ID NO: 1223997 - RNA, 19 nt, Artificial Sequence
  Description of Artificial Sequence: Synthetic oligonucleotide
caccaaggaaacaucagag

SEQ ID NO: 1223998 - RNA, 19 nt, Artificial Sequence
  Description of Artificial Sequence: Synthetic oligonucleotide
uugcgaagaaagaugagua

SEQ ID NO: 1223999 - RNA, 19 nt, Artificial Sequence
  Description of Artificial Sequence: Synthetic oligonucleotide
acccaguaguaauugagag

SEQ ID NO: 1224000 - RNA, 19 nt, Artificial Sequence
  Description of Artificial Sequence: Synthetic oligonucleotide
agucuuucccucuuggcug

SEQ ID NO: 1224001 - RNA, 19 nt, Artificial Sequence
  Description of Artificial Sequence: Synthetic oligonucleotide
acacuggcggcucucauuc

SEQ ID NO: 1224002 - RNA, 19 nt, Artificial Sequence
  Description of Artificial Sequence: Synthetic oligonucleotide
cuuuugcgaagaaagauga

SEQ ID NO: 1224003 - RNA, 19 nt, Artificial Sequence
  Description of Artificial Sequence: Synthetic oligonucleotide
uccagggcgccacugaaag

SEQ ID NO: 1224004 - RNA, 19 nt, Artificial Sequence
  Description of Artificial Sequence: Synthetic oligonucleotide
uagcccaguaauaggaggc

SEQ ID NO: 1224005 - RNA, 19 nt, Artificial Sequence
  Description of Artificial Sequence: Synthetic oligonucleotide
aggacggccacccugauaa

SEQ ID NO: 1224006 - RNA, 19 nt, Artificial Sequence
  Description of Artificial Sequence: Synthetic oligonucleotide
aaucgcagcaggaugauaa

SEQ ID NO: 1224007 - RNA, 19 nt, Artificial Sequence
  Description of Artificial Sequence: Synthetic oligonucleotide
ucaguauuggaacccagua

SEQ ID NO: 1224008 - RNA, 19 nt, Artificial Sequence
  Description of Artificial Sequence: Synthetic oligonucleotide
aguaauugagaggcagggc

SEQ ID NO: 1224009 - RNA, 19 nt, Artificial Sequence
  Description of Artificial Sequence: Synthetic oligonucleotide
agcaccggaucgcagcucc

SEQ ID NO: 1224010 - RNA, 19 nt, Artificial Sequence
  Description of Artificial Sequence: Synthetic oligonucleotide
agaaugcaaacuggcaucg

SEQ ID NO: 1224011 - RNA, 19 nt, Artificial Sequence
  Description of Artificial Sequence: Synthetic oligonucleotide
cuugaguacuccauauaac

SEQ ID NO: 1224012 - RNA, 19 nt, Artificial Sequence
  Description of Artificial Sequence: Synthetic oligonucleotide
aucauauaggagccaauga

SEQ ID NO: 1224013 - RNA, 19 nt, Artificial Sequence
  Description of Artificial Sequence: Synthetic oligonucleotide
auuggaacccaguaguaau

SEQ ID NO: 1224014 - RNA, 19 nt, Artificial Sequence
  Description of Artificial Sequence: Synthetic oligonucleotide
uuuugcgaagaaagaugag

SEQ ID NO: 1224015 - RNA, 19 nt, Artificial Sequence
  Description of Artificial Sequence: Synthetic oligonucleotide
acuggagggacccauucug

SEQ ID NO: 1224016 - RNA, 19 nt, Artificial Sequence
  Description of Artificial Sequence: Synthetic oligonucleotide
aggaagaacgucaccaggg

SEQ ID NO: 1224017 - RNA, 19 nt, Artificial Sequence
  Description of Artificial Sequence: Synthetic oligonucleotide
agaggaagaacgucaccag

SEQ ID NO: 1224018 - RNA, 19 nt, Artificial Sequence
  Description of Artificial Sequence: Synthetic oligonucleotide
ucaugauguaggcauuccu

SEQ ID NO: 1224019 - RNA, 19 nt, Artificial Sequence
  Description of Artificial Sequence: Synthetic oligonucleotide
acucggaugaucugcacga

SEQ ID NO: 1224020 - RNA, 19 nt, Artificial Sequence
  Description of Artificial Sequence: Synthetic oligonucleotide
acacuuagcaagcaccgga

SEQ ID NO: 1224021 - RNA, 19 nt, Artificial Sequence
  Description of Artificial Sequence: Synthetic oligonucleotide
uucuuuugcgaagaaagau

SEQ ID NO: 1224022 - RNA, 19 nt, Artificial Sequence
  Description of Artificial Sequence: Synthetic oligonucleotide
guaauugagaggcagggcu

SEQ ID NO: 1224023 - RNA, 19 nt, Artificial Sequence
  Description of Artificial Sequence: Synthetic oligonucleotide
acaagaugauaaccacuuc

SEQ ID NO: 1224024 - RNA, 19 nt, Artificial Sequence
  Description of Artificial Sequence: Synthetic oligonucleotide
caccguagaaugcaaacug

SEQ ID NO: 1224025 - RNA, 19 nt, Artificial Sequence
  Description of Artificial Sequence: Synthetic oligonucleotide
ggauaagugagccgaaggc

SEQ ID NO: 1224026 - RNA, 19 nt, Artificial Sequence
  Description of Artificial Sequence: Synthetic oligonucleotide
aacacuuagcaagcaccgg

SEQ ID NO: 1224027 - RNA, 19 nt, Artificial Sequence
  Description of Artificial Sequence: Synthetic oligonucleotide
caguauuggaacccaguag

SEQ ID NO: 1224028 - RNA, 19 nt, Artificial Sequence
  Description of Artificial Sequence: Synthetic oligonucleotide
gaaguaaggccucucagcu

SEQ ID NO: 1224029 - RNA, 19 nt, Artificial Sequence
  Description of Artificial Sequence: Synthetic oligonucleotide
uccuauucaggaauuuaau

SEQ ID NO: 1224030 - RNA, 19 nt, Artificial Sequence
  Description of Artificial Sequence: Synthetic oligonucleotide
ugaucacugucaguauugg

SEQ ID NO: 1224031 - RNA, 19 nt, Artificial Sequence
  Description of Artificial Sequence: Synthetic oligonucleotide
acagugaaauaugccauag

SEQ ID NO: 1224032 - RNA, 19 nt, Artificial Sequence
  Description of Artificial Sequence: Synthetic oligonucleotide
caaaugcagguacacucgg

SEQ ID NO: 1224033 - RNA, 19 nt, Artificial Sequence
  Description of Artificial Sequence: Synthetic oligonucleotide
caaacuuguucugugcagc

SEQ ID NO: 1224034 - RNA, 19 nt, Artificial Sequence
  Description of Artificial Sequence: Synthetic oligonucleotide
acccugauaauguuccuca

SEQ ID NO: 1224035 - RNA, 19 nt, Artificial Sequence
  Description of Artificial Sequence: Synthetic oligonucleotide
ggaaaugggaacucaagga

SEQ ID NO: 1224036 - RNA, 19 nt, Artificial Sequence
  Description of Artificial Sequence: Synthetic oligonucleotide
cucucaagugcccuugggc

SEQ ID NO: 1224037 - RNA, 19 nt, Artificial Sequence
  Description of Artificial Sequence: Synthetic oligonucleotide
uuagcaagcaccggaucgc

SEQ ID NO: 1224038 - RNA, 19 nt, Artificial Sequence
  Description of Artificial Sequence: Synthetic oligonucleotide
aggccucucagcugaaccg

SEQ ID NO: 1224039 - RNA, 19 nt, Artificial Sequence
  Description of Artificial Sequence: Synthetic oligonucleotide
gagccgaaggccaaggagc

SEQ ID NO: 1224040 - RNA, 19 nt, Artificial Sequence
  Description of Artificial Sequence: Synthetic oligonucleotide
cauagcccaguaauaggag

SEQ ID NO: 1224041 - RNA, 19 nt, Artificial Sequence
  Description of Artificial Sequence: Synthetic oligonucleotide
augucgucaggcuugugca

SEQ ID NO: 1224042 - RNA, 19 nt, Artificial Sequence
  Description of Artificial Sequence: Synthetic oligonucleotide
acuuagcaagcaccggauc

SEQ ID NO: 1224043 - RNA, 19 nt, Artificial Sequence
  Description of Artificial Sequence: Synthetic oligonucleotide
cacugaaagcucucaagug

SEQ ID NO: 1224044 - RNA, 19 nt, Artificial Sequence
  Description of Artificial Sequence: Synthetic oligonucleotide
ugugcauagcccaguaaua

SEQ ID NO: 1224045 - RNA, 19 nt, Artificial Sequence
  Description of Artificial Sequence: Synthetic oligonucleotide
uauuggcaccaucuaugcc

SEQ ID NO: 1224046 - RNA, 19 nt, Artificial Sequence
  Description of Artificial Sequence: Synthetic oligonucleotide
gaucgcagcuccugagagg

SEQ ID NO: 1224047 - RNA, 19 nt, Artificial Sequence
  Description of Artificial Sequence: Synthetic oligonucleotide
gaaauaugccauagccaag

SEQ ID NO: 1224048 - RNA, 19 nt, Artificial Sequence
  Description of Artificial Sequence: Synthetic oligonucleotide
gaagaagccaugugcgauc

SEQ ID NO: 1224049 - RNA, 19 nt, Artificial Sequence
  Description of Artificial Sequence: Synthetic oligonucleotide
agaaugcccacacuaccca

SEQ ID NO: 1224050 - RNA, 19 nt, Artificial Sequence
  Description of Artificial Sequence: Synthetic oligonucleotide
uaaacuucucuaggcacca

SEQ ID NO: 1224051 - RNA, 19 nt, Artificial Sequence
  Description of Artificial Sequence: Synthetic oligonucleotide
auaagugagccgaaggcca

SEQ ID NO: 1224052 - RNA, 19 nt, Artificial Sequence
  Description of Artificial Sequence: Synthetic oligonucleotide
cucugacccaaacacuuag

SEQ ID NO: 1224053 - RNA, 19 nt, Artificial Sequence
  Description of Artificial Sequence: Synthetic oligonucleotide
guagguagacucgccaccg

SEQ ID NO: 1224054 - RNA, 19 nt, Artificial Sequence
  Description of Artificial Sequence: Synthetic oligonucleotide
gacucgccaccguagaaug

SEQ ID NO: 1224055 - RNA, 19 nt, Artificial Sequence
  Description of Artificial Sequence: Synthetic oligonucleotide
agcaaugccccaaauccuc

SEQ ID NO: 1224056 - RNA, 19 nt, Artificial Sequence
  Description of Artificial Sequence: Synthetic oligonucleotide
aacccaguaguaauugaga

SEQ ID NO: 1224057 - RNA, 19 nt, Artificial Sequence
  Description of Artificial Sequence: Synthetic oligonucleotide
uauuggaacccaguaguaa

SEQ ID NO: 1224058 - RNA, 19 nt, Artificial Sequence
  Description of Artificial Sequence: Synthetic oligonucleotide
uccgaugugugaagaagaa

SEQ ID NO: 1224059 - RNA, 19 nt, Artificial Sequence
  Description of Artificial Sequence: Synthetic oligonucleotide
gugcauagcccaguaauag

SEQ ID NO: 1224060 - RNA, 19 nt, Artificial Sequence
  Description of Artificial Sequence: Synthetic oligonucleotide
uggcaaucaugauguaggc

SEQ ID NO: 1224061 - RNA, 19 nt, Artificial Sequence
  Description of Artificial Sequence: Synthetic oligonucleotide
ugaagaagccaugugcgau

SEQ ID NO: 1224062 - RNA, 19 nt, Artificial Sequence
  Description of Artificial Sequence: Synthetic oligonucleotide
auggccaggauaagugagc

SEQ ID NO: 1224063 - RNA, 19 nt, Artificial Sequence
  Description of Artificial Sequence: Synthetic oligonucleotide
aaccgucauuucuuuccag

SEQ ID NO: 1224064 - RNA, 19 nt, Artificial Sequence
  Description of Artificial Sequence: Synthetic oligonucleotide
gacaaguuacuucaccaua

SEQ ID NO: 1224065 - RNA, 19 nt, Artificial Sequence
  Description of Artificial Sequence: Synthetic oligonucleotide
uggaacccaguaguaauug

SEQ ID NO: 1224066 - RNA, 19 nt, Artificial Sequence
  Description of Artificial Sequence: Synthetic oligonucleotide
ugauaaccacuucuaggau

SEQ ID NO: 1224067 - RNA, 19 nt, Artificial Sequence
  Description of Artificial Sequence: Synthetic oligonucleotide
auaaugccugccaggaauc

SEQ ID NO: 1224068 - RNA, 19 nt, Artificial Sequence
  Description of Artificial Sequence: Synthetic oligonucleotide
aggggcagaugucuuuagg

SEQ ID NO: 1224069 - RNA, 19 nt, Artificial Sequence
  Description of Artificial Sequence: Synthetic oligonucleotide
guaucuugcacgauucuga

SEQ ID NO: 1224070 - RNA, 19 nt, Artificial Sequence
  Description of Artificial Sequence: Synthetic oligonucleotide
aggcauuccuggcugaggu

SEQ ID NO: 1224071 - RNA, 19 nt, Artificial Sequence
  Description of Artificial Sequence: Synthetic oligonucleotide
accguagaaugcaaacugg

SEQ ID NO: 1224072 - RNA, 19 nt, Artificial Sequence
  Description of Artificial Sequence: Synthetic oligonucleotide
uucuugagaguggaagaca

SEQ ID NO: 1224073 - RNA, 19 nt, Artificial Sequence
  Description of Artificial Sequence: Synthetic oligonucleotide
cucggcuaaaagcagagaa

SEQ ID NO: 1224074 - RNA, 19 nt, Artificial Sequence
  Description of Artificial Sequence: Synthetic oligonucleotide
uaaugccugccaggaaucg

SEQ ID NO: 1224075 - RNA, 19 nt, Artificial Sequence
  Description of Artificial Sequence: Synthetic oligonucleotide
guagaaugcaaacuggcau

SEQ ID NO: 1224076 - RNA, 19 nt, Artificial Sequence
  Description of Artificial Sequence: Synthetic oligonucleotide
ugguagguagacucgccac

SEQ ID NO: 1224077 - RNA, 19 nt, Artificial Sequence
  Description of Artificial Sequence: Synthetic oligonucleotide
gcagugaugugacuuuagg

SEQ ID NO: 1224078 - RNA, 19 nt, Artificial Sequence
  Description of Artificial Sequence: Synthetic oligonucleotide
ugagaggcagggcuguauc

SEQ ID NO: 1224079 - RNA, 19 nt, Artificial Sequence
  Description of Artificial Sequence: Synthetic oligonucleotide
aaagcucucaagugcccuu

SEQ ID NO: 1224080 - RNA, 19 nt, Artificial Sequence
  Description of Artificial Sequence: Synthetic oligonucleotide
aacgucaccagggguagga

SEQ ID NO: 1224081 - RNA, 19 nt, Artificial Sequence
  Description of Artificial Sequence: Synthetic oligonucleotide
ugagaguggaagacaugaa

SEQ ID NO: 1224082 - RNA, 19 nt, Artificial Sequence
  Description of Artificial Sequence: Synthetic oligonucleotide
ugcuuaaaaugaucaugaa

SEQ ID NO: 1224083 - RNA, 19 nt, Artificial Sequence
  Description of Artificial Sequence: Synthetic oligonucleotide
aucuugcacgauucugauc

SEQ ID NO: 1224084 - RNA, 19 nt, Artificial Sequence
  Description of Artificial Sequence: Synthetic oligonucleotide
auguaggcauuccuauuca

SEQ ID NO: 1224085 - RNA, 19 nt, Artificial Sequence
  Description of Artificial Sequence: Synthetic oligonucleotide
aagaaacuugcugcagaca

SEQ ID NO: 1224086 - RNA, 19 nt, Artificial Sequence
  Description of Artificial Sequence: Synthetic oligonucleotide
acgauucugauccgaugug

SEQ ID NO: 1224087 - RNA, 19 nt, Artificial Sequence
  Description of Artificial Sequence: Synthetic oligonucleotide
augacaugucccacagccc

SEQ ID NO: 1224088 - RNA, 19 nt, Artificial Sequence
  Description of Artificial Sequence: Synthetic oligonucleotide
cagugaaauaugccauagc

SEQ ID NO: 1224089 - RNA, 19 nt, Artificial Sequence
  Description of Artificial Sequence: Synthetic oligonucleotide
agauccuccaagaaacaga

SEQ ID NO: 1224090 - RNA, 19 nt, Artificial Sequence
  Description of Artificial Sequence: Synthetic oligonucleotide
uuggaacccaguaguaauu

SEQ ID NO: 1224091 - RNA, 19 nt, Artificial Sequence
  Description of Artificial Sequence: Synthetic oligonucleotide
gaugugugaagaagaagaa

SEQ ID NO: 1224092 - RNA, 19 nt, Artificial Sequence
  Description of Artificial Sequence: Synthetic oligonucleotide
agagacacaagaggaagaa

SEQ ID NO: 1224093 - RNA, 19 nt, Artificial Sequence
  Description of Artificial Sequence: Synthetic oligonucleotide
gcaaaugcagguacacucg

SEQ ID NO: 1224094 - RNA, 19 nt, Artificial Sequence
  Description of Artificial Sequence: Synthetic oligonucleotide
caagguccaccaaggaaac

SEQ ID NO: 1224095 - RNA, 19 nt, Artificial Sequence
  Description of Artificial Sequence: Synthetic oligonucleotide
caugaaguaaggccucuca

SEQ ID NO: 1224096 - RNA, 19 nt, Artificial Sequence
  Description of Artificial Sequence: Synthetic oligonucleotide
ugaauacauugaagaucug

SEQ ID NO: 1224097 - RNA, 19 nt, Artificial Sequence
  Description of Artificial Sequence: Synthetic oligonucleotide
agacaugaaguaaggccuc

SEQ ID NO: 1224098 - RNA, 19 nt, Artificial Sequence
  Description of Artificial Sequence: Synthetic oligonucleotide
acccagaccauaaugccug

SEQ ID NO: 1224099 - RNA, 19 nt, Artificial Sequence
  Description of Artificial Sequence: Synthetic oligonucleotide
gaaccgucauuucuuucca

SEQ ID NO: 1224100 - RNA, 19 nt, Artificial Sequence
  Description of Artificial Sequence: Synthetic oligonucleotide
ugcacgauucugauccgau

SEQ ID NO: 1224101 - RNA, 19 nt, Artificial Sequence
  Description of Artificial Sequence: Synthetic oligonucleotide
agaacgucaccagggguag

SEQ ID NO: 1224102 - RNA, 19 nt, Artificial Sequence
  Description of Artificial Sequence: Synthetic oligonucleotide
gggcauaggaagcaaugcc

SEQ ID NO: 1224103 - RNA, 19 nt, Artificial Sequence
  Description of Artificial Sequence: Synthetic oligonucleotide
gcaaucaugauguaggcau

SEQ ID NO: 1224104 - RNA, 19 nt, Artificial Sequence
  Description of Artificial Sequence: Synthetic oligonucleotide
agguccaccaaggaaacau

SEQ ID NO: 1224105 - RNA, 19 nt, Artificial Sequence
  Description of Artificial Sequence: Synthetic oligonucleotide
caugugcgaucauauagga

SEQ ID NO: 1224106 - RNA, 19 nt, Artificial Sequence
  Description of Artificial Sequence: Synthetic oligonucleotide
gguagguagacucgccacc

SEQ ID NO: 1224107 - RNA, 19 nt, Artificial Sequence
  Description of Artificial Sequence: Synthetic oligonucleotide
uaagugagccgaaggccaa

SEQ ID NO: 1224108 - RNA, 19 nt, Artificial Sequence
  Description of Artificial Sequence: Synthetic oligonucleotide
gcaaacuuguucugugcag

SEQ ID NO: 1224109 - RNA, 19 nt, Artificial Sequence
  Description of Artificial Sequence: Synthetic oligonucleotide
cagauccuccaagaaacag

SEQ ID NO: 1224110 - RNA, 19 nt, Artificial Sequence
  Description of Artificial Sequence: Synthetic oligonucleotide
aaacuggcaucggccauug

SEQ ID NO: 1224111 - RNA, 19 nt, Artificial Sequence
  Description of Artificial Sequence: Synthetic oligonucleotide
ugacuuuaggcaguucaau

SEQ ID NO: 1224112 - RNA, 19 nt, Artificial Sequence
  Description of Artificial Sequence: Synthetic oligonucleotide
gaaugcaaacuggcaucgg

SEQ ID NO: 1224113 - RNA, 19 nt, Artificial Sequence
  Description of Artificial Sequence: Synthetic oligonucleotide
uacacucggagguccgucu

SEQ ID NO: 1224114 - RNA, 19 nt, Artificial Sequence
  Description of Artificial Sequence: Synthetic oligonucleotide
aagcucucaagugcccuug

SEQ ID NO: 1224115 - RNA, 19 nt, Artificial Sequence
  Description of Artificial Sequence: Synthetic oligonucleotide
ugauguaggcauuccuauu

SEQ ID NO: 1224116 - RNA, 19 nt, Artificial Sequence
  Description of Artificial Sequence: Synthetic oligonucleotide
cuugcacgauucugauccg

SEQ ID NO: 1224117 - RNA, 19 nt, Artificial Sequence
  Description of Artificial Sequence: Synthetic oligonucleotide
aagccaugugcgaucauau

SEQ ID NO: 1224118 - RNA, 19 nt, Artificial Sequence
  Description of Artificial Sequence: Synthetic oligonucleotide
cagcgcucggcuaaaagca

SEQ ID NO: 1224119 - RNA, 19 nt, Artificial Sequence
  Description of Artificial Sequence: Synthetic oligonucleotide
cuggcaucggccauuggga

SEQ ID NO: 1224120 - RNA, 19 nt, Artificial Sequence
  Description of Artificial Sequence: Synthetic oligonucleotide
agggcuauggcgaucagua

SEQ ID NO: 1224121 - RNA, 19 nt, Artificial Sequence
  Description of Artificial Sequence: Synthetic oligonucleotide
agggcacggugguagguag

SEQ ID NO: 1224122 - RNA, 19 nt, Artificial Sequence
  Description of Artificial Sequence: Synthetic oligonucleotide
ggaucgcagcuccugagag

SEQ ID NO: 1224123 - RNA, 19 nt, Artificial Sequence
  Description of Artificial Sequence: Synthetic oligonucleotide
acaugaaguaaggccucuc

SEQ ID NO: 1224124 - RNA, 19 nt, Artificial Sequence
  Description of Artificial Sequence: Synthetic oligonucleotide
uaccucagcgcucggcuaa

SEQ ID NO: 1224125 - RNA, 19 nt, Artificial Sequence
  Description of Artificial Sequence: Synthetic oligonucleotide
ggagccaaugaucacuguc

SEQ ID NO: 1224126 - RNA, 19 nt, Artificial Sequence
  Description of Artificial Sequence: Synthetic oligonucleotide
accaucuaugccagugagg

SEQ ID NO: 1224127 - RNA, 19 nt, Artificial Sequence
  Description of Artificial Sequence: Synthetic oligonucleotide
agcauggagcacaugacau

SEQ ID NO: 1224128 - RNA, 19 nt, Artificial Sequence
  Description of Artificial Sequence: Synthetic oligonucleotide
gugcgaucauauaggagcc

SEQ ID NO: 1224129 - RNA, 19 nt, Artificial Sequence
  Description of Artificial Sequence: Synthetic oligonucleotide
gcgaagaaagaugaguaac

SEQ ID NO: 1224130 - RNA, 19 nt, Artificial Sequence
  Description of Artificial Sequence: Synthetic oligonucleotide
guccccucagucuugagua

SEQ ID NO: 1224131 - RNA, 19 nt, Artificial Sequence
  Description of Artificial Sequence: Synthetic oligonucleotide
ccguagaaugcaaacuggc

SEQ ID NO: 1224132 - RNA, 19 nt, Artificial Sequence
  Description of Artificial Sequence: Synthetic oligonucleotide
auuccuauucaggaauuua

SEQ ID NO: 1224133 - RNA, 19 nt, Artificial Sequence
  Description of Artificial Sequence: Synthetic oligonucleotide
cucagcgcucggcuaaaag

SEQ ID NO: 1224134 - RNA, 19 nt, Artificial Sequence
  Description of Artificial Sequence: Synthetic oligonucleotide
caugccguagacgcugaag

SEQ ID NO: 1224135 - RNA, 19 nt, Artificial Sequence
  Description of Artificial Sequence: Synthetic oligonucleotide
cuuguucugugcagcuuuc

SEQ ID NO: 1224136 - RNA, 19 nt, Artificial Sequence
  Description of Artificial Sequence: Synthetic oligonucleotide
auaggaagcaaugccccaa

SEQ ID NO: 1224137 - RNA, 19 nt, Artificial Sequence
  Description of Artificial Sequence: Synthetic oligonucleotide
ugcccaacaggaagaggaa

SEQ ID NO: 1224138 - RNA, 19 nt, Artificial Sequence
  Description of Artificial Sequence: Synthetic oligonucleotide
uggcgaucaguauucuuuu

SEQ ID NO: 1224139 - RNA, 19 nt, Artificial Sequence
  Description of Artificial Sequence: Synthetic oligonucleotide
ugccgcaaaugcagguaca

SEQ ID NO: 1224140 - RNA, 19 nt, Artificial Sequence
  Description of Artificial Sequence: Synthetic oligonucleotide
guagcagagaggcagugau

SEQ ID NO: 1224141 - RNA, 19 nt, Artificial Sequence
  Description of Artificial Sequence: Synthetic oligonucleotide
uagacucgccaccguagaa

SEQ ID NO: 1224142 - RNA, 19 nt, Artificial Sequence
  Description of Artificial Sequence: Synthetic oligonucleotide
cacgauucugauccgaugu

SEQ ID NO: 1224143 - RNA, 19 nt, Artificial Sequence
  Description of Artificial Sequence: Synthetic oligonucleotide
caguucaaugagcugggga

SEQ ID NO: 1224144 - RNA, 19 nt, Artificial Sequence
  Description of Artificial Sequence: Synthetic oligonucleotide
cgcaaaugcagguacacuc

SEQ ID NO: 1224145 - RNA, 19 nt, Artificial Sequence
  Description of Artificial Sequence: Synthetic oligonucleotide
uauggcgaucaguauucuu

SEQ ID NO: 1224146 - RNA, 19 nt, Artificial Sequence
  Description of Artificial Sequence: Synthetic oligonucleotide
gacggccacccugauaaug

SEQ ID NO: 1224147 - RNA, 19 nt, Artificial Sequence
  Description of Artificial Sequence: Synthetic oligonucleotide
uggcaucggccauugggac

SEQ ID NO: 1224148 - RNA, 19 nt, Artificial Sequence
  Description of Artificial Sequence: Synthetic oligonucleotide
acgcugaagaagccaugug

SEQ ID NO: 1224149 - RNA, 19 nt, Artificial Sequence
  Description of Artificial Sequence: Synthetic oligonucleotide
cauaggaagcaaugcccca

SEQ ID NO: 1224150 - RNA, 19 nt, Artificial Sequence
  Description of Artificial Sequence: Synthetic oligonucleotide
caggauaagugagccgaag

SEQ ID NO: 1224151 - RNA, 19 nt, Artificial Sequence
  Description of Artificial Sequence: Synthetic oligonucleotide
ccaaugaucacugucagua

SEQ ID NO: 1224152 - RNA, 19 nt, Artificial Sequence
  Description of Artificial Sequence: Synthetic oligonucleotide
guagacucgccaccguaga

SEQ ID NO: 1224153 - RNA, 19 nt, Artificial Sequence
  Description of Artificial Sequence: Synthetic oligonucleotide
ccccaaauccucugggucc

SEQ ID NO: 1224154 - RNA, 19 nt, Artificial Sequence
  Description of Artificial Sequence: Synthetic oligonucleotide
gguagacucgccaccguag

SEQ ID NO: 1224155 - RNA, 19 nt, Artificial Sequence
  Description of Artificial Sequence: Synthetic oligonucleotide
ccaguaauaggaggcaaag

SEQ ID NO: 1224156 - RNA, 19 nt, Artificial Sequence
  Description of Artificial Sequence: Synthetic oligonucleotide
augugcgaucauauaggag

SEQ ID NO: 1224157 - RNA, 19 nt, Artificial Sequence
  Description of Artificial Sequence: Synthetic oligonucleotide
acggugguagguagacucg

SEQ ID NO: 1224158 - RNA, 19 nt, Artificial Sequence
  Description of Artificial Sequence: Synthetic oligonucleotide
aacuggcaucggccauugg

SEQ ID NO: 1224159 - RNA, 19 nt, Artificial Sequence
  Description of Artificial Sequence: Synthetic oligonucleotide
ggcaguucaaugagcuggg

SEQ ID NO: 1224160 - RNA, 19 nt, Artificial Sequence
  Description of Artificial Sequence: Synthetic oligonucleotide
gccaggauaagugagccga

SEQ ID NO: 1224161 - RNA, 19 nt, Artificial Sequence
  Description of Artificial Sequence: Synthetic oligonucleotide
uggcggcucucauucgcag

SEQ ID NO: 1224162 - RNA, 19 nt, Artificial Sequence
  Description of Artificial Sequence: Synthetic oligonucleotide
gcuauggcgaucaguauuc

SEQ ID NO: 1224163 - RNA, 19 nt, Artificial Sequence
  Description of Artificial Sequence: Synthetic oligonucleotide
caucuaugccagugaggac

SEQ ID NO: 1224164 - RNA, 19 nt, Artificial Sequence
  Description of Artificial Sequence: Synthetic oligonucleotide
acacucggagguccgucug

SEQ ID NO: 1224165 - RNA, 19 nt, Artificial Sequence
  Description of Artificial Sequence: Synthetic oligonucleotide
gcggcucucauucgcagag

SEQ ID NO: 1224166 - RNA, 19 nt, Artificial Sequence
  Description of Artificial Sequence: Synthetic oligonucleotide
acucgccaccguagaaugc

SEQ ID NO: 1224167 - RNA, 19 nt, Artificial Sequence
  Description of Artificial Sequence: Synthetic oligonucleotide
cugaaccgucauuucuuuc

SEQ ID NO: 1224168 - RNA, 19 nt, Artificial Sequence
  Description of Artificial Sequence: Synthetic oligonucleotide
acggccacccugauaaugu

SEQ ID NO: 1224169 - RNA, 19 nt, Artificial Sequence
  Description of Artificial Sequence: Synthetic oligonucleotide
agacucgccaccguagaau

SEQ ID NO: 1224170 - RNA, 19 nt, Artificial Sequence
  Description of Artificial Sequence: Synthetic oligonucleotide
uagguagacucgccaccgu

SEQ ID NO: 1224171 - RNA, 19 nt, Artificial Sequence
  Description of Artificial Sequence: Synthetic oligonucleotide
uugcacgauucugauccga

SEQ ID NO: 1224172 - RNA, 19 nt, Artificial Sequence
  Description of Artificial Sequence: Synthetic oligonucleotide
ugcgaucauauaggagcca

SEQ ID NO: 1224173 - RNA, 19 nt, Artificial Sequence
  Description of Artificial Sequence: Synthetic oligonucleotide
ggagcacaugacauguccc

SEQ ID NO: 1224174 - RNA, 19 nt, Artificial Sequence
  Description of Artificial Sequence: Synthetic oligonucleotide
cagucuuucccucuuggcu

SEQ ID NO: 1224175 - RNA, 19 nt, Artificial Sequence
  Description of Artificial Sequence: Synthetic oligonucleotide
cacuacccacaaucagaag

SEQ ID NO: 1224176 - RNA, 19 nt, Artificial Sequence
  Description of Artificial Sequence: Synthetic oligonucleotide
gcauuccuggcugagguac

SEQ ID NO: 1224177 - RNA, 19 nt, Artificial Sequence
  Description of Artificial Sequence: Synthetic oligonucleotide
cuucuaggaugcuuaaaau

SEQ ID NO: 1224178 - RNA, 19 nt, Artificial Sequence
  Description of Artificial Sequence: Synthetic oligonucleotide
ucaagugcccuugggcaua

SEQ ID NO: 1224179 - RNA, 19 nt, Artificial Sequence
  Description of Artificial Sequence: Synthetic oligonucleotide
ccuauucaggaauuuaaua

SEQ ID NO: 1224180 - RNA, 19 nt, Artificial Sequence
  Description of Artificial Sequence: Synthetic oligonucleotide
cccgugugguaccucagcg

SEQ ID NO: 1224181 - RNA, 19 nt, Artificial Sequence
  Description of Artificial Sequence: Synthetic oligonucleotide
ugguaccucagcgcucggc

SEQ ID NO: 1224182 - RNA, 19 nt, Artificial Sequence
  Description of Artificial Sequence: Synthetic oligonucleotide
uccccucagucuugaguac

SEQ ID NO: 1224183 - RNA, 19 nt, Artificial Sequence
  Description of Artificial Sequence: Synthetic oligonucleotide
agcccaguaauaggaggca

SEQ ID NO: 1224184 - RNA, 19 nt, Artificial Sequence
  Description of Artificial Sequence: Synthetic oligonucleotide
ugagggcuauggcgaucag

SEQ ID NO: 1224185 - RNA, 19 nt, Artificial Sequence
  Description of Artificial Sequence: Synthetic oligonucleotide
cuaggaugcuuaaaaugau

SEQ ID NO: 1224186 - RNA, 19 nt, Artificial Sequence
  Description of Artificial Sequence: Synthetic oligonucleotide
aagguccaccaaggaaaca

SEQ ID NO: 1224187 - RNA, 19 nt, Artificial Sequence
  Description of Artificial Sequence: Synthetic oligonucleotide
cuacccacaaucagaaguu

SEQ ID NO: 1224188 - RNA, 19 nt, Artificial Sequence
  Description of Artificial Sequence: Synthetic oligonucleotide
caggggcagaugucuuuag

SEQ ID NO: 1224189 - RNA, 19 nt, Artificial Sequence
  Description of Artificial Sequence: Synthetic oligonucleotide
gucuugaguacuccauaua

SEQ ID NO: 1224190 - RNA, 19 nt, Artificial Sequence
  Description of Artificial Sequence: Synthetic oligonucleotide
gcucucaagugcccuuggg

SEQ ID NO: 1224191 - RNA, 19 nt, Artificial Sequence
  Description of Artificial Sequence: Synthetic oligonucleotide
auggagcacaugacauguc

SEQ ID NO: 1224192 - RNA, 19 nt, Artificial Sequence
  Description of Artificial Sequence: Synthetic oligonucleotide
ggaacccaguaguaauuga

SEQ ID NO: 1224193 - RNA, 19 nt, Artificial Sequence
  Description of Artificial Sequence: Synthetic oligonucleotide
ccacacuacccacaaucag

SEQ ID NO: 1224194 - RNA, 19 nt, Artificial Sequence
  Description of Artificial Sequence: Synthetic oligonucleotide
ggccaggauaagugagccg

SEQ ID NO: 1224195 - RNA, 19 nt, Artificial Sequence
  Description of Artificial Sequence: Synthetic oligonucleotide
agcgcucggcuaaaagcag

SEQ ID NO: 1224196 - RNA, 19 nt, Artificial Sequence
  Description of Artificial Sequence: Synthetic oligonucleotide
agguacacucggagguccg

SEQ ID NO: 1224197 - RNA, 19 nt, Artificial Sequence
  Description of Artificial Sequence: Synthetic oligonucleotide
gcacgauucugauccgaug

SEQ ID NO: 1224198 - RNA, 19 nt, Artificial Sequence
  Description of Artificial Sequence: Synthetic oligonucleotide
gcaucggccauugggacac

SEQ ID NO: 1224199 - RNA, 19 nt, Artificial Sequence
  Description of Artificial Sequence: Synthetic oligonucleotide
caaaguuggccagccagaa

SEQ ID NO: 1224200 - RNA, 19 nt, Artificial Sequence
  Description of Artificial Sequence: Synthetic oligonucleotide
cagugaggacuggagggac

SEQ ID NO: 1224201 - RNA, 19 nt, Artificial Sequence
  Description of Artificial Sequence: Synthetic oligonucleotide
gaacgucaccagggguagg

SEQ ID NO: 1224202 - RNA, 19 nt, Artificial Sequence
  Description of Artificial Sequence: Synthetic oligonucleotide
gaugagggcuauggcgauc

SEQ ID NO: 1224203 - RNA, 19 nt, Artificial Sequence
  Description of Artificial Sequence: Synthetic oligonucleotide
ucgccaccguagaaugcaa

SEQ ID NO: 1224204 - RNA, 19 nt, Artificial Sequence
  Description of Artificial Sequence: Synthetic oligonucleotide
guauuggaacccaguagua

SEQ ID NO: 1224205 - RNA, 19 nt, Artificial Sequence
  Description of Artificial Sequence: Synthetic oligonucleotide
ccgucuggaagccaagguc

SEQ ID NO: 1224206 - RNA, 19 nt, Artificial Sequence
  Description of Artificial Sequence: Synthetic oligonucleotide
aggaaacaucagagcccgc

SEQ ID NO: 1224207 - RNA, 19 nt, Artificial Sequence
  Description of Artificial Sequence: Synthetic oligonucleotide
cacuggcggcucucauucg

SEQ ID NO: 1224208 - RNA, 19 nt, Artificial Sequence
  Description of Artificial Sequence: Synthetic oligonucleotide
gucaguauuggaacccagu

SEQ ID NO: 1224209 - RNA, 19 nt, Artificial Sequence
  Description of Artificial Sequence: Synthetic oligonucleotide
augugacuuuaggcaguuc

SEQ ID NO: 1224210 - RNA, 19 nt, Artificial Sequence
  Description of Artificial Sequence: Synthetic oligonucleotide
ggcagugaugugacuuuag

SEQ ID NO: 1224211 - RNA, 19 nt, Artificial Sequence
  Description of Artificial Sequence: Synthetic oligonucleotide
cagggcgccacugaaagcu

SEQ ID NO: 1224212 - RNA, 19 nt, Artificial Sequence
  Description of Artificial Sequence: Synthetic oligonucleotide
ggugguagguagacucgcc

SEQ ID NO: 1224213 - RNA, 19 nt, Artificial Sequence
  Description of Artificial Sequence: Synthetic oligonucleotide
gguaccucagcgcucggcu

SEQ ID NO: 1224214 - RNA, 19 nt, Artificial Sequence
  Description of Artificial Sequence: Synthetic oligonucleotide
guucaaugagcuggggacu

SEQ ID NO: 1224215 - RNA, 19 nt, Artificial Sequence
  Description of Artificial Sequence: Synthetic oligonucleotide
gccagaaugcccacacuac

SEQ ID NO: 1224216 - RNA, 19 nt, Artificial Sequence
  Description of Artificial Sequence: Synthetic oligonucleotide
aggcuugugcauagcccag

SEQ ID NO: 1224217 - RNA, 19 nt, Artificial Sequence
  Description of Artificial Sequence: Synthetic oligonucleotide
ggcaaucaugauguaggca

SEQ ID NO: 1224218 - RNA, 19 nt, Artificial Sequence
  Description of Artificial Sequence: Synthetic oligonucleotide
ccgugugguaccucagcgc

SEQ ID NO: 1224219 - RNA, 19 nt, Artificial Sequence
  Description of Artificial Sequence: Synthetic oligonucleotide
gacauccuugggccaucuc

SEQ ID NO: 1224220 - RNA, 19 nt, Artificial Sequence
  Description of Artificial Sequence: Synthetic oligonucleotide
gugagccgaaggccaagga

SEQ ID NO: 1224221 - RNA, 19 nt, Artificial Sequence
  Description of Artificial Sequence: Synthetic oligonucleotide
gacaugaaguaaggccucu

SEQ ID NO: 1224222 - RNA, 19 nt, Artificial Sequence
  Description of Artificial Sequence: Synthetic oligonucleotide
acgucaccagggguaggag

SEQ ID NO: 1224223 - RNA, 19 nt, Artificial Sequence
  Description of Artificial Sequence: Synthetic oligonucleotide
caagugcccuugggcauag

SEQ ID NO: 1224224 - RNA, 19 nt, Artificial Sequence
  Description of Artificial Sequence: Synthetic oligonucleotide
guacacucggagguccguc

SEQ ID NO: 1224225 - RNA, 19 nt, Artificial Sequence
  Description of Artificial Sequence: Synthetic oligonucleotide
agguccgucuggaagccaa

SEQ ID NO: 1224226 - RNA, 19 nt, Artificial Sequence
  Description of Artificial Sequence: Synthetic oligonucleotide
agagcccgccuguccccuc

SEQ ID NO: 1224227 - RNA, 19 nt, Artificial Sequence
  Description of Artificial Sequence: Synthetic oligonucleotide
cacuuagcaagcaccggau

SEQ ID NO: 1224228 - RNA, 19 nt, Artificial Sequence
  Description of Artificial Sequence: Synthetic oligonucleotide
gccaaguaccaggaccacc

SEQ ID NO: 1224229 - RNA, 19 nt, Artificial Sequence
  Description of Artificial Sequence: Synthetic oligonucleotide
uaaccacuucuaggaugcu

SEQ ID NO: 1224230 - RNA, 19 nt, Artificial Sequence
  Description of Artificial Sequence: Synthetic oligonucleotide
ggcaucggccauugggaca

SEQ ID NO: 1224231 - RNA, 19 nt, Artificial Sequence
  Description of Artificial Sequence: Synthetic oligonucleotide
gacacuggcggcucucauu

SEQ ID NO: 1224232 - RNA, 19 nt, Artificial Sequence
  Description of Artificial Sequence: Synthetic oligonucleotide
ccauugggacacuggcggc

SEQ ID NO: 1224233 - RNA, 19 nt, Artificial Sequence
  Description of Artificial Sequence: Synthetic oligonucleotide
ggcuauggcgaucaguauu

SEQ ID NO: 1224234 - RNA, 19 nt, Artificial Sequence
  Description of Artificial Sequence: Synthetic oligonucleotide
agggcgccacugaaagcuc

SEQ ID NO: 1224235 - RNA, 19 nt, Artificial Sequence
  Description of Artificial Sequence: Synthetic oligonucleotide
ccggccaaggucaccuggc

SEQ ID NO: 1224236 - RNA, 19 nt, Artificial Sequence
  Description of Artificial Sequence: Synthetic oligonucleotide
cccacacuacccacaauca

SEQ ID NO: 1224237 - RNA, 19 nt, Artificial Sequence
  Description of Artificial Sequence: Synthetic oligonucleotide
gccgcaaaugcagguacac

SEQ ID NO: 1224238 - RNA, 19 nt, Artificial Sequence
  Description of Artificial Sequence: Synthetic oligonucleotide
gcgaucauauaggagccaa

SEQ ID NO: 1224239 - RNA, 19 nt, Artificial Sequence
  Description of Artificial Sequence: Synthetic oligonucleotide
cgcucggcuaaaagcagag

SEQ ID NO: 1224240 - RNA, 19 nt, Artificial Sequence
  Description of Artificial Sequence: Synthetic oligonucleotide
gucgucaggcuugugcaua

SEQ ID NO: 1224241 - RNA, 19 nt, Artificial Sequence
  Description of Artificial Sequence: Synthetic oligonucleotide
cuggagggacccauucugu

SEQ ID NO: 1224242 - RNA, 19 nt, Artificial Sequence
  Description of Artificial Sequence: Synthetic oligonucleotide
gagggcuauggcgaucagu

SEQ ID NO: 1224243 - RNA, 19 nt, Artificial Sequence
  Description of Artificial Sequence: Synthetic oligonucleotide
caaguuacuucaccauauu

SEQ ID NO: 1224244 - RNA, 19 nt, Artificial Sequence
  Description of Artificial Sequence: Synthetic oligonucleotide
gagcccgccuguccccuca

SEQ ID NO: 1224245 - RNA, 19 nt, Artificial Sequence
  Description of Artificial Sequence: Synthetic oligonucleotide
cccaguaauaggaggcaaa

SEQ ID NO: 1224246 - RNA, 19 nt, Artificial Sequence
  Description of Artificial Sequence: Synthetic oligonucleotide
ggacccauucugucccauc

SEQ ID NO: 1224247 - RNA, 19 nt, Artificial Sequence
  Description of Artificial Sequence: Synthetic oligonucleotide
auugagaggcagggcugua

SEQ ID NO: 1224248 - RNA, 19 nt, Artificial Sequence
  Description of Artificial Sequence: Synthetic oligonucleotide
cccagaccauaaugccugc

SEQ ID NO: 1224249 - RNA, 19 nt, Artificial Sequence
  Description of Artificial Sequence: Synthetic oligonucleotide
gugugguaccucagcgcuc

SEQ ID NO: 1224250 - RNA, 19 nt, Artificial Sequence
  Description of Artificial Sequence: Synthetic oligonucleotide
ggcggcucucauucgcaga

SEQ ID NO: 1224251 - RNA, 19 nt, Artificial Sequence
  Description of Artificial Sequence: Synthetic oligonucleotide
gguccgucuggaagccaag

SEQ ID NO: 1224252 - RNA, 19 nt, Artificial Sequence
  Description of Artificial Sequence: Synthetic oligonucleotide
ccagggcgccacugaaagc

SEQ ID NO: 1224253 - RNA, 19 nt, Artificial Sequence
  Description of Artificial Sequence: Synthetic oligonucleotide
caggcaugucgucaggcuu

SEQ ID NO: 1224254 - RNA, 19 nt, Artificial Sequence
  Description of Artificial Sequence: Synthetic oligonucleotide
caaacuggcaucggccauu

SEQ ID NO: 1224255 - RNA, 19 nt, Artificial Sequence
  Description of Artificial Sequence: Synthetic oligonucleotide
gcugaaccgucauuucuuu

SEQ ID NO: 1224256 - RNA, 19 nt, Artificial Sequence
  Description of Artificial Sequence: Synthetic oligonucleotide
gccaaugaucacugucagu

SEQ ID NO: 1224257 - RNA, 19 nt, Artificial Sequence
  Description of Artificial Sequence: Synthetic oligonucleotide
guaggagcauggagcacau

SEQ ID NO: 1224258 - RNA, 19 nt, Artificial Sequence
  Description of Artificial Sequence: Synthetic oligonucleotide
cagggcacggugguaggua

SEQ ID NO: 1224259 - RNA, 19 nt, Artificial Sequence
  Description of Artificial Sequence: Synthetic oligonucleotide
gccaucucccacccuugaa

SEQ ID NO: 1224260 - RNA, 19 nt, Artificial Sequence
  Description of Artificial Sequence: Synthetic oligonucleotide
accucagcgcucggcuaaa

SEQ ID NO: 1224261 - RNA, 19 nt, Artificial Sequence
  Description of Artificial Sequence: Synthetic oligonucleotide
cuauggcgaucaguauucu

SEQ ID NO: 1224262 - RNA, 19 nt, Artificial Sequence
  Description of Artificial Sequence: Synthetic oligonucleotide
gcaaacuggcaucggccau

SEQ ID NO: 1224263 - RNA, 19 nt, Artificial Sequence
  Description of Artificial Sequence: Synthetic oligonucleotide
ccaggauaagugagccgaa

SEQ ID NO: 1224264 - RNA, 19 nt, Artificial Sequence
  Description of Artificial Sequence: Synthetic oligonucleotide
gcccaguaauaggaggcaa

SEQ ID NO: 1224265 - RNA, 19 nt, Artificial Sequence
  Description of Artificial Sequence: Synthetic oligonucleotide
ggguaggagcauggagcac

SEQ ID NO: 1224266 - RNA, 19 nt, Artificial Sequence
  Description of Artificial Sequence: Synthetic oligonucleotide
ccgucauuucuuuccagau

SEQ ID NO: 1224267 - RNA, 19 nt, Artificial Sequence
  Description of Artificial Sequence: Synthetic oligonucleotide
ccacuucuaggaugcuuaa

SEQ ID NO: 1224268 - RNA, 19 nt, Artificial Sequence
  Description of Artificial Sequence: Synthetic oligonucleotide
gcgcucggcuaaaagcaga

SEQ ID NO: 1224269 - RNA, 19 nt, Artificial Sequence
  Description of Artificial Sequence: Synthetic oligonucleotide
gcucggcuaaaagcagaga

SEQ ID NO: 1224270 - RNA, 19 nt, Artificial Sequence
  Description of Artificial Sequence: Synthetic oligonucleotide
gcaaugccccaaauccucu

SEQ ID NO: 1224271 - RNA, 19 nt, Artificial Sequence
  Description of Artificial Sequence: Synthetic oligonucleotide
ccauaaugccugccaggaa

SEQ ID NO: 1224272 - RNA, 19 nt, Artificial Sequence
  Description of Artificial Sequence: Synthetic oligonucleotide
ccuugaagacaaguuacuu

SEQ ID NO: 1224273 - RNA, 19 nt, Artificial Sequence
  Description of Artificial Sequence: Synthetic oligonucleotide
gccucucagcugaaccguc

SEQ ID NO: 1224274 - RNA, 19 nt, Artificial Sequence
  Description of Artificial Sequence: Synthetic oligonucleotide
gcgccacugaaagcucuca

SEQ ID NO: 1224275 - RNA, 19 nt, Artificial Sequence
  Description of Artificial Sequence: Synthetic oligonucleotide
gguacacucggagguccgu

SEQ ID NO: 1224276 - RNA, 19 nt, Artificial Sequence
  Description of Artificial Sequence: Synthetic oligonucleotide
ccaaggagcccguguggua

SEQ ID NO: 1224277 - RNA, 19 nt, Artificial Sequence
  Description of Artificial Sequence: Synthetic oligonucleotide
gggcacggugguagguaga

SEQ ID NO: 1224278 - RNA, 19 nt, Artificial Sequence
  Description of Artificial Sequence: Synthetic oligonucleotide
ggagcccgugugguaccuc

SEQ ID NO: 1224279 - RNA, 19 nt, Artificial Sequence
  Description of Artificial Sequence: Synthetic oligonucleotide
ggacacuggcggcucucau

SEQ ID NO: 1224280 - RNA, 19 nt, Artificial Sequence
  Description of Artificial Sequence: Synthetic oligonucleotide
cccugauaauguuccucau

SEQ ID NO: 1224281 - RNA, 19 nt, Artificial Sequence
  Description of Artificial Sequence: Synthetic oligonucleotide
cgaucauauaggagccaau

SEQ ID NO: 1224282 - RNA, 19 nt, Artificial Sequence
  Description of Artificial Sequence: Synthetic oligonucleotide
ccgcaaaugcagguacacu

SEQ ID NO: 1224283 - RNA, 19 nt, Artificial Sequence
  Description of Artificial Sequence: Synthetic oligonucleotide
cgccaccguagaaugcaaa

SEQ ID NO: 1224284 - RNA, 19 nt, Artificial Sequence
  Description of Artificial Sequence: Synthetic oligonucleotide
ggacggccacccugauaau

SEQ ID NO: 1224285 - RNA, 19 nt, Artificial Sequence
  Description of Artificial Sequence: Synthetic oligonucleotide
caucggccauugggacacu

SEQ ID NO: 1224286 - RNA, 19 nt, Artificial Sequence
  Description of Artificial Sequence: Synthetic oligonucleotide
acuaaguugacuuagaggc

SEQ ID NO: 1224287 - RNA, 19 nt, Artificial Sequence
  Description of Artificial Sequence: Synthetic oligonucleotide
aaagacgagccucagaugc

SEQ ID NO: 1224288 - RNA, 19 nt, Artificial Sequence
  Description of Artificial Sequence: Synthetic oligonucleotide
aauauaaauagaugcacuc

SEQ ID NO: 1224289 - RNA, 19 nt, Artificial Sequence
  Description of Artificial Sequence: Synthetic oligonucleotide
aaacaaucugcuuagcucg

SEQ ID NO: 1224290 - RNA, 19 nt, Artificial Sequence
  Description of Artificial Sequence: Synthetic oligonucleotide
uuuugaagcgugcagaacg

SEQ ID NO: 1224291 - RNA, 19 nt, Artificial Sequence
  Description of Artificial Sequence: Synthetic oligonucleotide
aaagcaucgauuuuggcug

SEQ ID NO: 1224292 - RNA, 19 nt, Artificial Sequence
  Description of Artificial Sequence: Synthetic oligonucleotide
ucagcuuuaaucuuguugc

SEQ ID NO: 1224293 - RNA, 19 nt, Artificial Sequence
  Description of Artificial Sequence: Synthetic oligonucleotide
gauagugaggcucugaaag

SEQ ID NO: 1224294 - RNA, 19 nt, Artificial Sequence
  Description of Artificial Sequence: Synthetic oligonucleotide
uuagaaagcgacauuuugg

SEQ ID NO: 1224295 - RNA, 19 nt, Artificial Sequence
  Description of Artificial Sequence: Synthetic oligonucleotide
agaacuaagcuuuuauagc

SEQ ID NO: 1224296 - RNA, 19 nt, Artificial Sequence
  Description of Artificial Sequence: Synthetic oligonucleotide
ucagaugugaggaagagga

SEQ ID NO: 1224297 - RNA, 19 nt, Artificial Sequence
  Description of Artificial Sequence: Synthetic oligonucleotide
aguaccacaguccaagccc

SEQ ID NO: 1224298 - RNA, 19 nt, Artificial Sequence
  Description of Artificial Sequence: Synthetic oligonucleotide
uuaaaaugggaucuugaag

SEQ ID NO: 1224299 - RNA, 19 nt, Artificial Sequence
  Description of Artificial Sequence: Synthetic oligonucleotide
aaggacuuuaccuuccagg

SEQ ID NO: 1224300 - RNA, 19 nt, Artificial Sequence
  Description of Artificial Sequence: Synthetic oligonucleotide
cacuaagggauuaaaaugg

SEQ ID NO: 1224301 - RNA, 19 nt, Artificial Sequence
  Description of Artificial Sequence: Synthetic oligonucleotide
auagaugcacucuagaaug

SEQ ID NO: 1224302 - RNA, 19 nt, Artificial Sequence
  Description of Artificial Sequence: Synthetic oligonucleotide
aagggauuaaaaugggauc

SEQ ID NO: 1224303 - RNA, 19 nt, Artificial Sequence
  Description of Artificial Sequence: Synthetic oligonucleotide
uucauaggaacauugaagu

SEQ ID NO: 1224304 - RNA, 19 nt, Artificial Sequence
  Description of Artificial Sequence: Synthetic oligonucleotide
aagauagccaggaaggggc

SEQ ID NO: 1224305 - RNA, 19 nt, Artificial Sequence
  Description of Artificial Sequence: Synthetic oligonucleotide
augauagugaugcaacccc

SEQ ID NO: 1224306 - RNA, 19 nt, Artificial Sequence
  Description of Artificial Sequence: Synthetic oligonucleotide
aacauugaaguccacccuc

SEQ ID NO: 1224307 - RNA, 19 nt, Artificial Sequence
  Description of Artificial Sequence: Synthetic oligonucleotide
uacuaaacauugcugagag

SEQ ID NO: 1224308 - RNA, 19 nt, Artificial Sequence
  Description of Artificial Sequence: Synthetic oligonucleotide
cacgguaggaucaagaggc

SEQ ID NO: 1224309 - RNA, 19 nt, Artificial Sequence
  Description of Artificial Sequence: Synthetic oligonucleotide
uccagcauauuauugauca

SEQ ID NO: 1224310 - RNA, 19 nt, Artificial Sequence
  Description of Artificial Sequence: Synthetic oligonucleotide
ugcacuuagccacuaaggg

SEQ ID NO: 1224311 - RNA, 19 nt, Artificial Sequence
  Description of Artificial Sequence: Synthetic oligonucleotide
caugggaacaccaucaggc

SEQ ID NO: 1224312 - RNA, 19 nt, Artificial Sequence
  Description of Artificial Sequence: Synthetic oligonucleotide
uccaaaagcaucauugaca

SEQ ID NO: 1224313 - RNA, 19 nt, Artificial Sequence
  Description of Artificial Sequence: Synthetic oligonucleotide
cuagaaugcacuuagccac

SEQ ID NO: 1224314 - RNA, 19 nt, Artificial Sequence
  Description of Artificial Sequence: Synthetic oligonucleotide
auaaggacaacugacuugg

SEQ ID NO: 1224315 - RNA, 19 nt, Artificial Sequence
  Description of Artificial Sequence: Synthetic oligonucleotide
uuagcuccucccaagauag

SEQ ID NO: 1224316 - RNA, 19 nt, Artificial Sequence
  Description of Artificial Sequence: Synthetic oligonucleotide
aaagcgacauuuuggcaac

SEQ ID NO: 1224317 - RNA, 19 nt, Artificial Sequence
  Description of Artificial Sequence: Synthetic oligonucleotide
caucauacagagaaguucc

SEQ ID NO: 1224318 - RNA, 19 nt, Artificial Sequence
  Description of Artificial Sequence: Synthetic oligonucleotide
cuuagcucgagccacagcc

SEQ ID NO: 1224319 - RNA, 19 nt, Artificial Sequence
  Description of Artificial Sequence: Synthetic oligonucleotide
acuagcugacaccaaaugg

SEQ ID NO: 1224320 - RNA, 19 nt, Artificial Sequence
  Description of Artificial Sequence: Synthetic oligonucleotide
agaucuuugacaaucuugg

SEQ ID NO: 1224321 - RNA, 19 nt, Artificial Sequence
  Description of Artificial Sequence: Synthetic oligonucleotide
ucuagaaugcacuuagcca

SEQ ID NO: 1224322 - RNA, 19 nt, Artificial Sequence
  Description of Artificial Sequence: Synthetic oligonucleotide
aaacacacuaaguugacuu

SEQ ID NO: 1224323 - RNA, 19 nt, Artificial Sequence
  Description of Artificial Sequence: Synthetic oligonucleotide
cauaggaacauugaagucc

SEQ ID NO: 1224324 - RNA, 19 nt, Artificial Sequence
  Description of Artificial Sequence: Synthetic oligonucleotide
aacacgguaggaucaagag

SEQ ID NO: 1224325 - RNA, 19 nt, Artificial Sequence
  Description of Artificial Sequence: Synthetic oligonucleotide
gaugcaguaaagacgagcc

SEQ ID NO: 1224326 - RNA, 19 nt, Artificial Sequence
  Description of Artificial Sequence: Synthetic oligonucleotide
ucuaaggaguacuugucag

SEQ ID NO: 1224327 - RNA, 19 nt, Artificial Sequence
  Description of Artificial Sequence: Synthetic oligonucleotide
agaauguagacaaaucccg

SEQ ID NO: 1224328 - RNA, 19 nt, Artificial Sequence
  Description of Artificial Sequence: Synthetic oligonucleotide
caaguuuggauagugaggc

SEQ ID NO: 1224329 - RNA, 19 nt, Artificial Sequence
  Description of Artificial Sequence: Synthetic oligonucleotide
aaagagagaacuaagcuuu

SEQ ID NO: 1224330 - RNA, 19 nt, Artificial Sequence
  Description of Artificial Sequence: Synthetic oligonucleotide
acuguuuaaggguuccugg

SEQ ID NO: 1224331 - RNA, 19 nt, Artificial Sequence
  Description of Artificial Sequence: Synthetic oligonucleotide
ucuacaugaaagcggaggu

SEQ ID NO: 1224332 - RNA, 19 nt, Artificial Sequence
  Description of Artificial Sequence: Synthetic oligonucleotide
cuaaacauugcugagagca

SEQ ID NO: 1224333 - RNA, 19 nt, Artificial Sequence
  Description of Artificial Sequence: Synthetic oligonucleotide
caaagcuuuggcaaaguag

SEQ ID NO: 1224334 - RNA, 19 nt, Artificial Sequence
  Description of Artificial Sequence: Synthetic oligonucleotide
cauuuuggcaacacgguag

SEQ ID NO: 1224335 - RNA, 19 nt, Artificial Sequence
  Description of Artificial Sequence: Synthetic oligonucleotide
aagcaucauugacauagac

SEQ ID NO: 1224336 - RNA, 19 nt, Artificial Sequence
  Description of Artificial Sequence: Synthetic oligonucleotide
uuuacaggcagaauauaaa

SEQ ID NO: 1224337 - RNA, 19 nt, Artificial Sequence
  Description of Artificial Sequence: Synthetic oligonucleotide
aguccaagcccauccagcc

SEQ ID NO: 1224338 - RNA, 19 nt, Artificial Sequence
  Description of Artificial Sequence: Synthetic oligonucleotide
uaaauagaugcacucuaga

SEQ ID NO: 1224339 - RNA, 19 nt, Artificial Sequence
  Description of Artificial Sequence: Synthetic oligonucleotide
ucggcuuuggccaugagau

SEQ ID NO: 1224340 - RNA, 19 nt, Artificial Sequence
  Description of Artificial Sequence: Synthetic oligonucleotide
uuauuuguuaucugauugu

SEQ ID NO: 1224341 - RNA, 19 nt, Artificial Sequence
  Description of Artificial Sequence: Synthetic oligonucleotide
ugaagcgugcagaacgccg

SEQ ID NO: 1224342 - RNA, 19 nt, Artificial Sequence
  Description of Artificial Sequence: Synthetic oligonucleotide
cucuagaaugcacuuagcc

SEQ ID NO: 1224343 - RNA, 19 nt, Artificial Sequence
  Description of Artificial Sequence: Synthetic oligonucleotide
auuuuggcaacacgguagg

SEQ ID NO: 1224344 - RNA, 19 nt, Artificial Sequence
  Description of Artificial Sequence: Synthetic oligonucleotide
aauguagacaaaucccgau

SEQ ID NO: 1224345 - RNA, 19 nt, Artificial Sequence
  Description of Artificial Sequence: Synthetic oligonucleotide
cacuaaguugacuuagagg

SEQ ID NO: 1224346 - RNA, 19 nt, Artificial Sequence
  Description of Artificial Sequence: Synthetic oligonucleotide
gaaagcgacauuuuggcaa

SEQ ID NO: 1224347 - RNA, 19 nt, Artificial Sequence
  Description of Artificial Sequence: Synthetic oligonucleotide
uaugauagugaugcaaccc

SEQ ID NO: 1224348 - RNA, 19 nt, Artificial Sequence
  Description of Artificial Sequence: Synthetic oligonucleotide
gaggagaucgcugcgaccg

SEQ ID NO: 1224349 - RNA, 19 nt, Artificial Sequence
  Description of Artificial Sequence: Synthetic oligonucleotide
aaacauugcugagagcauc

SEQ ID NO: 1224350 - RNA, 19 nt, Artificial Sequence
  Description of Artificial Sequence: Synthetic oligonucleotide
ugauccuuugguuauuugu

SEQ ID NO: 1224351 - RNA, 19 nt, Artificial Sequence
  Description of Artificial Sequence: Synthetic oligonucleotide
auucucuacuucugggccc

SEQ ID NO: 1224352 - RNA, 19 nt, Artificial Sequence
  Description of Artificial Sequence: Synthetic oligonucleotide
ugaagaauguagacaaauc

SEQ ID NO: 1224353 - RNA, 19 nt, Artificial Sequence
  Description of Artificial Sequence: Synthetic oligonucleotide
accaaugaucaucucauug

SEQ ID NO: 1224354 - RNA, 19 nt, Artificial Sequence
  Description of Artificial Sequence: Synthetic oligonucleotide
uguuuaaggguuccuggug

SEQ ID NO: 1224355 - RNA, 19 nt, Artificial Sequence
  Description of Artificial Sequence: Synthetic oligonucleotide
auagcucacuuucuuuuac

SEQ ID NO: 1224356 - RNA, 19 nt, Artificial Sequence
  Description of Artificial Sequence: Synthetic oligonucleotide
aggagcucuagacuggcac

SEQ ID NO: 1224357 - RNA, 19 nt, Artificial Sequence
  Description of Artificial Sequence: Synthetic oligonucleotide
uccacccucaucacgaccc

SEQ ID NO: 1224358 - RNA, 19 nt, Artificial Sequence
  Description of Artificial Sequence: Synthetic oligonucleotide
cuaaggaguacuugucagg

SEQ ID NO: 1224359 - RNA, 19 nt, Artificial Sequence
  Description of Artificial Sequence: Synthetic oligonucleotide
aaauuugucagcagugaca

SEQ ID NO: 1224360 - RNA, 19 nt, Artificial Sequence
  Description of Artificial Sequence: Synthetic oligonucleotide
gaaagcaucgauuuuggcu

SEQ ID NO: 1224361 - RNA, 19 nt, Artificial Sequence
  Description of Artificial Sequence: Synthetic oligonucleotide
uuugaagcgugcagaacgc

SEQ ID NO: 1224362 - RNA, 19 nt, Artificial Sequence
  Description of Artificial Sequence: Synthetic oligonucleotide
aagaggcucagaugugagg

SEQ ID NO: 1224363 - RNA, 19 nt, Artificial Sequence
  Description of Artificial Sequence: Synthetic oligonucleotide
uaaguugacuuagaggcug

SEQ ID NO: 1224364 - RNA, 19 nt, Artificial Sequence
  Description of Artificial Sequence: Synthetic oligonucleotide
aguuuggauagugaggcuc

SEQ ID NO: 1224365 - RNA, 19 nt, Artificial Sequence
  Description of Artificial Sequence: Synthetic oligonucleotide
guuuaaggguuccuggugc

SEQ ID NO: 1224366 - RNA, 19 nt, Artificial Sequence
  Description of Artificial Sequence: Synthetic oligonucleotide
agugaugcaaccccuagaa

SEQ ID NO: 1224367 - RNA, 19 nt, Artificial Sequence
  Description of Artificial Sequence: Synthetic oligonucleotide
uuuuauagcucacuuucuu

SEQ ID NO: 1224368 - RNA, 19 nt, Artificial Sequence
  Description of Artificial Sequence: Synthetic oligonucleotide
aucgcugcgaccgucgugc

SEQ ID NO: 1224369 - RNA, 19 nt, Artificial Sequence
  Description of Artificial Sequence: Synthetic oligonucleotide
cacucuagaaugcacuuag

SEQ ID NO: 1224370 - RNA, 19 nt, Artificial Sequence
  Description of Artificial Sequence: Synthetic oligonucleotide
accuuaaggaaggugaaag

SEQ ID NO: 1224371 - RNA, 19 nt, Artificial Sequence
  Description of Artificial Sequence: Synthetic oligonucleotide
uagacauccccaaguuugg

SEQ ID NO: 1224372 - RNA, 19 nt, Artificial Sequence
  Description of Artificial Sequence: Synthetic oligonucleotide
acuaagcuuuuauagcuca

SEQ ID NO: 1224373 - RNA, 19 nt, Artificial Sequence
  Description of Artificial Sequence: Synthetic oligonucleotide
aggacuuuaccuuccagga

SEQ ID NO: 1224374 - RNA, 19 nt, Artificial Sequence
  Description of Artificial Sequence: Synthetic oligonucleotide
gaacuaagcuuuuauagcu

SEQ ID NO: 1224375 - RNA, 19 nt, Artificial Sequence
  Description of Artificial Sequence: Synthetic oligonucleotide
acacgguaggaucaagagg

SEQ ID NO: 1224376 - RNA, 19 nt, Artificial Sequence
  Description of Artificial Sequence: Synthetic oligonucleotide
uguuguugagcaccuuaag

SEQ ID NO: 1224377 - RNA, 19 nt, Artificial Sequence
  Description of Artificial Sequence: Synthetic oligonucleotide
cauaaggacaacugacuug

SEQ ID NO: 1224378 - RNA, 19 nt, Artificial Sequence
  Description of Artificial Sequence: Synthetic oligonucleotide
uuauagcucacuuucuuuu

SEQ ID NO: 1224379 - RNA, 19 nt, Artificial Sequence
  Description of Artificial Sequence: Synthetic oligonucleotide
cuaugauagugaugcaacc

SEQ ID NO: 1224380 - RNA, 19 nt, Artificial Sequence
  Description of Artificial Sequence: Synthetic oligonucleotide
cucuacaugaaagcggagg

SEQ ID NO: 1224381 - RNA, 19 nt, Artificial Sequence
  Description of Artificial Sequence: Synthetic oligonucleotide
uuuaccuuccaggagcucu

SEQ ID NO: 1224382 - RNA, 19 nt, Artificial Sequence
  Description of Artificial Sequence: Synthetic oligonucleotide
gaauuugaugcuugggaca

SEQ ID NO: 1224383 - RNA, 19 nt, Artificial Sequence
  Description of Artificial Sequence: Synthetic oligonucleotide
aacugacuuggcuccauug

SEQ ID NO: 1224384 - RNA, 19 nt, Artificial Sequence
  Description of Artificial Sequence: Synthetic oligonucleotide
aacuaagcuuuuauagcuc

SEQ ID NO: 1224385 - RNA, 19 nt, Artificial Sequence
  Description of Artificial Sequence: Synthetic oligonucleotide
ucauaaggacaacugacuu

SEQ ID NO: 1224386 - RNA, 19 nt, Artificial Sequence
  Description of Artificial Sequence: Synthetic oligonucleotide
auguagacaaaucccgaug

SEQ ID NO: 1224387 - RNA, 19 nt, Artificial Sequence
  Description of Artificial Sequence: Synthetic oligonucleotide
ggcaagguaaucuucacac

SEQ ID NO: 1224388 - RNA, 19 nt, Artificial Sequence
  Description of Artificial Sequence: Synthetic oligonucleotide
agggauuaaaaugggaucu

SEQ ID NO: 1224389 - RNA, 19 nt, Artificial Sequence
  Description of Artificial Sequence: Synthetic oligonucleotide
gaugcaaccccuagaagug

SEQ ID NO: 1224390 - RNA, 19 nt, Artificial Sequence
  Description of Artificial Sequence: Synthetic oligonucleotide
auagugaugcaaccccuag

SEQ ID NO: 1224391 - RNA, 19 nt, Artificial Sequence
  Description of Artificial Sequence: Synthetic oligonucleotide
gaaguccacccucaucacg

SEQ ID NO: 1224392 - RNA, 19 nt, Artificial Sequence
  Description of Artificial Sequence: Synthetic oligonucleotide
cagcuuguuagaaagcgac

SEQ ID NO: 1224393 - RNA, 19 nt, Artificial Sequence
  Description of Artificial Sequence: Synthetic oligonucleotide
augaaagcggagguucucc

SEQ ID NO: 1224394 - RNA, 19 nt, Artificial Sequence
  Description of Artificial Sequence: Synthetic oligonucleotide
uggcucauaaggacaacug

SEQ ID NO: 1224395 - RNA, 19 nt, Artificial Sequence
  Description of Artificial Sequence: Synthetic oligonucleotide
uccuucaagaacagaacau

SEQ ID NO: 1224396 - RNA, 19 nt, Artificial Sequence
  Description of Artificial Sequence: Synthetic oligonucleotide
ccaccuaugauagugaugc

SEQ ID NO: 1224397 - RNA, 19 nt, Artificial Sequence
  Description of Artificial Sequence: Synthetic oligonucleotide
uuguuagaaagcgacauuu

SEQ ID NO: 1224398 - RNA, 19 nt, Artificial Sequence
  Description of Artificial Sequence: Synthetic oligonucleotide
caagguaaucuucacacca

SEQ ID NO: 1224399 - RNA, 19 nt, Artificial Sequence
  Description of Artificial Sequence: Synthetic oligonucleotide
ugacauagacauccccaag

SEQ ID NO: 1224400 - RNA, 19 nt, Artificial Sequence
  Description of Artificial Sequence: Synthetic oligonucleotide
ucagcuuguuagaaagcga

SEQ ID NO: 1224401 - RNA, 19 nt, Artificial Sequence
  Description of Artificial Sequence: Synthetic oligonucleotide
aucgauuuuggcuggcuca

SEQ ID NO: 1224402 - RNA, 19 nt, Artificial Sequence
  Description of Artificial Sequence: Synthetic oligonucleotide
ugcaguaaagacgagccuc

SEQ ID NO: 1224403 - RNA, 19 nt, Artificial Sequence
  Description of Artificial Sequence: Synthetic oligonucleotide
ugauagugaugcaaccccu

SEQ ID NO: 1224404 - RNA, 19 nt, Artificial Sequence
  Description of Artificial Sequence: Synthetic oligonucleotide
ugguuauuuguuaucugau

SEQ ID NO: 1224405 - RNA, 19 nt, Artificial Sequence
  Description of Artificial Sequence: Synthetic oligonucleotide
uuuaaucuuguugccagaa

SEQ ID NO: 1224406 - RNA, 19 nt, Artificial Sequence
  Description of Artificial Sequence: Synthetic oligonucleotide
acuaagggauuaaaauggg

SEQ ID NO: 1224407 - RNA, 19 nt, Artificial Sequence
  Description of Artificial Sequence: Synthetic oligonucleotide
uggauagugaggcucugaa

SEQ ID NO: 1224408 - RNA, 19 nt, Artificial Sequence
  Description of Artificial Sequence: Synthetic oligonucleotide
guaaagacgagccucagau

SEQ ID NO: 1224409 - RNA, 19 nt, Artificial Sequence
  Description of Artificial Sequence: Synthetic oligonucleotide
caagauagccaggaagggg

SEQ ID NO: 1224410 - RNA, 19 nt, Artificial Sequence
  Description of Artificial Sequence: Synthetic oligonucleotide
cucuagacuggcaccaccc

SEQ ID NO: 1224411 - RNA, 19 nt, Artificial Sequence
  Description of Artificial Sequence: Synthetic oligonucleotide
uagaugcacucuagaaugc

SEQ ID NO: 1224412 - RNA, 19 nt, Artificial Sequence
  Description of Artificial Sequence: Synthetic oligonucleotide
aaaacacacuaaguugacu

SEQ ID NO: 1224413 - RNA, 19 nt, Artificial Sequence
  Description of Artificial Sequence: Synthetic oligonucleotide
gaguacuugucaggcaugg

SEQ ID NO: 1224414 - RNA, 19 nt, Artificial Sequence
  Description of Artificial Sequence: Synthetic oligonucleotide
aucaggccggcccaagugg

SEQ ID NO: 1224415 - RNA, 19 nt, Artificial Sequence
  Description of Artificial Sequence: Synthetic oligonucleotide
gaagcgugcagaacgccgg

SEQ ID NO: 1224416 - RNA, 19 nt, Artificial Sequence
  Description of Artificial Sequence: Synthetic oligonucleotide
aggaguacuugucaggcau

SEQ ID NO: 1224417 - RNA, 19 nt, Artificial Sequence
  Description of Artificial Sequence: Synthetic oligonucleotide
aaucccgaugcaguaaaga

SEQ ID NO: 1224418 - RNA, 19 nt, Artificial Sequence
  Description of Artificial Sequence: Synthetic oligonucleotide
uggcauucucaucaaauuu

SEQ ID NO: 1224419 - RNA, 19 nt, Artificial Sequence
  Description of Artificial Sequence: Synthetic oligonucleotide
ugacuuagaggcuggcugu

SEQ ID NO: 1224420 - RNA, 19 nt, Artificial Sequence
  Description of Artificial Sequence: Synthetic oligonucleotide
gaugcugugcaacuguuua

SEQ ID NO: 1224421 - RNA, 19 nt, Artificial Sequence
  Description of Artificial Sequence: Synthetic oligonucleotide
agagaacuaagcuuuuaua

SEQ ID NO: 1224422 - RNA, 19 nt, Artificial Sequence
  Description of Artificial Sequence: Synthetic oligonucleotide
uggcucagcuuuaaucuug

SEQ ID NO: 1224423 - RNA, 19 nt, Artificial Sequence
  Description of Artificial Sequence: Synthetic oligonucleotide
agcauauuauugaucagcu

SEQ ID NO: 1224424 - RNA, 19 nt, Artificial Sequence
  Description of Artificial Sequence: Synthetic oligonucleotide
guacuugucaggcauggga

SEQ ID NO: 1224425 - RNA, 19 nt, Artificial Sequence
  Description of Artificial Sequence: Synthetic oligonucleotide
ucugcuuagcucgagccac

SEQ ID NO: 1224426 - RNA, 19 nt, Artificial Sequence
  Description of Artificial Sequence: Synthetic oligonucleotide
ucauaggaacauugaaguc

SEQ ID NO: 1224427 - RNA, 19 nt, Artificial Sequence
  Description of Artificial Sequence: Synthetic oligonucleotide
acacacuaaguugacuuag

SEQ ID NO: 1224428 - RNA, 19 nt, Artificial Sequence
  Description of Artificial Sequence: Synthetic oligonucleotide
acuugguuccccuugcaaa

SEQ ID NO: 1224429 - RNA, 19 nt, Artificial Sequence
  Description of Artificial Sequence: Synthetic oligonucleotide
auacuaaacauugcugaga

SEQ ID NO: 1224430 - RNA, 19 nt, Artificial Sequence
  Description of Artificial Sequence: Synthetic oligonucleotide
uaaagacgagccucagaug

SEQ ID NO: 1224431 - RNA, 19 nt, Artificial Sequence
  Description of Artificial Sequence: Synthetic oligonucleotide
augcacuuagccacuaagg

SEQ ID NO: 1224432 - RNA, 19 nt, Artificial Sequence
  Description of Artificial Sequence: Synthetic oligonucleotide
ccacuaagggauuaaaaug

SEQ ID NO: 1224433 - RNA, 19 nt, Artificial Sequence
  Description of Artificial Sequence: Synthetic oligonucleotide
uguuagaaagcgacauuuu

SEQ ID NO: 1224434 - RNA, 19 nt, Artificial Sequence
  Description of Artificial Sequence: Synthetic oligonucleotide
uaaacauugcugagagcau

SEQ ID NO: 1224435 - RNA, 19 nt, Artificial Sequence
  Description of Artificial Sequence: Synthetic oligonucleotide
ugaaagcaucgauuuuggc

SEQ ID NO: 1224436 - RNA, 19 nt, Artificial Sequence
  Description of Artificial Sequence: Synthetic oligonucleotide
agcaucauugacauagaca

SEQ ID NO: 1224437 - RNA, 19 nt, Artificial Sequence
  Description of Artificial Sequence: Synthetic oligonucleotide
ccuaugauagugaugcaac

SEQ ID NO: 1224438 - RNA, 19 nt, Artificial Sequence
  Description of Artificial Sequence: Synthetic oligonucleotide
cuucacguccagcuugucc

SEQ ID NO: 1224439 - RNA, 19 nt, Artificial Sequence
  Description of Artificial Sequence: Synthetic oligonucleotide
caacagguccauuccaaac

SEQ ID NO: 1224440 - RNA, 19 nt, Artificial Sequence
  Description of Artificial Sequence: Synthetic oligonucleotide
uagugaugcaaccccuaga

SEQ ID NO: 1224441 - RNA, 19 nt, Artificial Sequence
  Description of Artificial Sequence: Synthetic oligonucleotide
agcaaguggcagugucucc

SEQ ID NO: 1224442 - RNA, 19 nt, Artificial Sequence
  Description of Artificial Sequence: Synthetic oligonucleotide
aaggaguacuugucaggca

SEQ ID NO: 1224443 - RNA, 19 nt, Artificial Sequence
  Description of Artificial Sequence: Synthetic oligonucleotide
ccaaguuuggauagugagg

SEQ ID NO: 1224444 - RNA, 19 nt, Artificial Sequence
  Description of Artificial Sequence: Synthetic oligonucleotide
ucgauuuuggcuggcucag

SEQ ID NO: 1224445 - RNA, 19 nt, Artificial Sequence
  Description of Artificial Sequence: Synthetic oligonucleotide
uagaaugcacuuagccacu

SEQ ID NO: 1224446 - RNA, 19 nt, Artificial Sequence
  Description of Artificial Sequence: Synthetic oligonucleotide
ugaaagcggagguucucca

SEQ ID NO: 1224447 - RNA, 19 nt, Artificial Sequence
  Description of Artificial Sequence: Synthetic oligonucleotide
gagagcauccaccccagga

SEQ ID NO: 1224448 - RNA, 19 nt, Artificial Sequence
  Description of Artificial Sequence: Synthetic oligonucleotide
uauagcucacuuucuuuua

SEQ ID NO: 1224449 - RNA, 19 nt, Artificial Sequence
  Description of Artificial Sequence: Synthetic oligonucleotide
uggcaacacgguaggauca

SEQ ID NO: 1224450 - RNA, 19 nt, Artificial Sequence
  Description of Artificial Sequence: Synthetic oligonucleotide
aaguugacuuagaggcugg

SEQ ID NO: 1224451 - RNA, 19 nt, Artificial Sequence
  Description of Artificial Sequence: Synthetic oligonucleotide
uuauccucuguauuccauu

SEQ ID NO: 1224452 - RNA, 19 nt, Artificial Sequence
  Description of Artificial Sequence: Synthetic oligonucleotide
gaauguagacaaaucccga

SEQ ID NO: 1224453 - RNA, 19 nt, Artificial Sequence
  Description of Artificial Sequence: Synthetic oligonucleotide
caagaggcucagaugugag

SEQ ID NO: 1224454 - RNA, 19 nt, Artificial Sequence
  Description of Artificial Sequence: Synthetic oligonucleotide
cccaaguuuggauagugag

SEQ ID NO: 1224455 - RNA, 19 nt, Artificial Sequence
  Description of Artificial Sequence: Synthetic oligonucleotide
uuagcucgagccacagccu

SEQ ID NO: 1224456 - RNA, 19 nt, Artificial Sequence
  Description of Artificial Sequence: Synthetic oligonucleotide
ugguuccccuugcaaaagc

SEQ ID NO: 1224457 - RNA, 19 nt, Artificial Sequence
  Description of Artificial Sequence: Synthetic oligonucleotide
caaguggcucauaaggaca

SEQ ID NO: 1224458 - RNA, 19 nt, Artificial Sequence
  Description of Artificial Sequence: Synthetic oligonucleotide
cucagaugugaggaagagg

SEQ ID NO: 1224459 - RNA, 19 nt, Artificial Sequence
  Description of Artificial Sequence: Synthetic oligonucleotide
uccgccacuagcugacacc

SEQ ID NO: 1224460 - RNA, 19 nt, Artificial Sequence
  Description of Artificial Sequence: Synthetic oligonucleotide
gaugcacucuagaaugcac

SEQ ID NO: 1224461 - RNA, 19 nt, Artificial Sequence
  Description of Artificial Sequence: Synthetic oligonucleotide
aaaugggaucuugaagaau

SEQ ID NO: 1224462 - RNA, 19 nt, Artificial Sequence
  Description of Artificial Sequence: Synthetic oligonucleotide
uugauccuuugguuauuug

SEQ ID NO: 1224463 - RNA, 19 nt, Artificial Sequence
  Description of Artificial Sequence: Synthetic oligonucleotide
agggacuugguuccccuug

SEQ ID NO: 1224464 - RNA, 19 nt, Artificial Sequence
  Description of Artificial Sequence: Synthetic oligonucleotide
aguugacuuagaggcuggc

SEQ ID NO: 1224465 - RNA, 19 nt, Artificial Sequence
  Description of Artificial Sequence: Synthetic oligonucleotide
cugacuuggcuccauuguc

SEQ ID NO: 1224466 - RNA, 19 nt, Artificial Sequence
  Description of Artificial Sequence: Synthetic oligonucleotide
aggcaagguaaucuucaca

SEQ ID NO: 1224467 - RNA, 19 nt, Artificial Sequence
  Description of Artificial Sequence: Synthetic oligonucleotide
ucaggccggcccaaguggc

SEQ ID NO: 1224468 - RNA, 19 nt, Artificial Sequence
  Description of Artificial Sequence: Synthetic oligonucleotide
gacaaaucccgaugcagua

SEQ ID NO: 1224469 - RNA, 19 nt, Artificial Sequence
  Description of Artificial Sequence: Synthetic oligonucleotide
acucuagaaugcacuuagc

SEQ ID NO: 1224470 - RNA, 19 nt, Artificial Sequence
  Description of Artificial Sequence: Synthetic oligonucleotide
aguagcuuggccagucuug

SEQ ID NO: 1224471 - RNA, 19 nt, Artificial Sequence
  Description of Artificial Sequence: Synthetic oligonucleotide
uguugccagaagcaucuuu

SEQ ID NO: 1224472 - RNA, 19 nt, Artificial Sequence
  Description of Artificial Sequence: Synthetic oligonucleotide
aaccccuagaaguggcuuu

SEQ ID NO: 1224473 - RNA, 19 nt, Artificial Sequence
  Description of Artificial Sequence: Synthetic oligonucleotide
caaagagagaacuaagcuu

SEQ ID NO: 1224474 - RNA, 19 nt, Artificial Sequence
  Description of Artificial Sequence: Synthetic oligonucleotide
cucuaaggaguacuuguca

SEQ ID NO: 1224475 - RNA, 19 nt, Artificial Sequence
  Description of Artificial Sequence: Synthetic oligonucleotide
accuaugauagugaugcaa

SEQ ID NO: 1224476 - RNA, 19 nt, Artificial Sequence
  Description of Artificial Sequence: Synthetic oligonucleotide
aaagcaucauugacauaga

SEQ ID NO: 1224477 - RNA, 19 nt, Artificial Sequence
  Description of Artificial Sequence: Synthetic oligonucleotide
ugcgcuuuugaagcgugca

SEQ ID NO: 1224478 - RNA, 19 nt, Artificial Sequence
  Description of Artificial Sequence: Synthetic oligonucleotide
cacuuagccacuaagggau

SEQ ID NO: 1224479 - RNA, 19 nt, Artificial Sequence
  Description of Artificial Sequence: Synthetic oligonucleotide
gagagaacuaagcuuuuau

SEQ ID NO: 1224480 - RNA, 19 nt, Artificial Sequence
  Description of Artificial Sequence: Synthetic oligonucleotide
cuugguuccccuugcaaaa

SEQ ID NO: 1224481 - RNA, 19 nt, Artificial Sequence
  Description of Artificial Sequence: Synthetic oligonucleotide
agagaaguuccaaucucca

SEQ ID NO: 1224482 - RNA, 19 nt, Artificial Sequence
  Description of Artificial Sequence: Synthetic oligonucleotide
ccuuaaggaaggugaaagc

SEQ ID NO: 1224483 - RNA, 19 nt, Artificial Sequence
  Description of Artificial Sequence: Synthetic oligonucleotide
agccuugauccuuugguua

SEQ ID NO: 1224484 - RNA, 19 nt, Artificial Sequence
  Description of Artificial Sequence: Synthetic oligonucleotide
aaaucccgaugcaguaaag

SEQ ID NO: 1224485 - RNA, 19 nt, Artificial Sequence
  Description of Artificial Sequence: Synthetic oligonucleotide
cucauaaggacaacugacu

SEQ ID NO: 1224486 - RNA, 19 nt, Artificial Sequence
  Description of Artificial Sequence: Synthetic oligonucleotide
cagaugugaggaagaggag

SEQ ID NO: 1224487 - RNA, 19 nt, Artificial Sequence
  Description of Artificial Sequence: Synthetic oligonucleotide
uuaccuuccaggagcucua

SEQ ID NO: 1224488 - RNA, 19 nt, Artificial Sequence
  Description of Artificial Sequence: Synthetic oligonucleotide
guagacaaaucccgaugca

SEQ ID NO: 1224489 - RNA, 19 nt, Artificial Sequence
  Description of Artificial Sequence: Synthetic oligonucleotide
gcucauaaggacaacugac

SEQ ID NO: 1224490 - RNA, 19 nt, Artificial Sequence
  Description of Artificial Sequence: Synthetic oligonucleotide
ugagagcauccaccccagg

SEQ ID NO: 1224491 - RNA, 19 nt, Artificial Sequence
  Description of Artificial Sequence: Synthetic oligonucleotide
ggaagaggagaucgcugcg

SEQ ID NO: 1224492 - RNA, 19 nt, Artificial Sequence
  Description of Artificial Sequence: Synthetic oligonucleotide
gugaugcaaccccuagaag

SEQ ID NO: 1224493 - RNA, 19 nt, Artificial Sequence
  Description of Artificial Sequence: Synthetic oligonucleotide
aucuccgccacuagcugac

SEQ ID NO: 1224494 - RNA, 19 nt, Artificial Sequence
  Description of Artificial Sequence: Synthetic oligonucleotide
gaacauugaaguccacccu

SEQ ID NO: 1224495 - RNA, 19 nt, Artificial Sequence
  Description of Artificial Sequence: Synthetic oligonucleotide
gcgacauuuuggcaacacg

SEQ ID NO: 1224496 - RNA, 19 nt, Artificial Sequence
  Description of Artificial Sequence: Synthetic oligonucleotide
augcaguaaagacgagccu

SEQ ID NO: 1224497 - RNA, 19 nt, Artificial Sequence
  Description of Artificial Sequence: Synthetic oligonucleotide
uaaggacaacugacuuggc

SEQ ID NO: 1224498 - RNA, 19 nt, Artificial Sequence
  Description of Artificial Sequence: Synthetic oligonucleotide
caucgauuuuggcuggcuc

SEQ ID NO: 1224499 - RNA, 19 nt, Artificial Sequence
  Description of Artificial Sequence: Synthetic oligonucleotide
gcugugcaacuguuuaagg

SEQ ID NO: 1224500 - RNA, 19 nt, Artificial Sequence
  Description of Artificial Sequence: Synthetic oligonucleotide
caacacgguaggaucaaga

SEQ ID NO: 1224501 - RNA, 19 nt, Artificial Sequence
  Description of Artificial Sequence: Synthetic oligonucleotide
aacaaucugcuuagcucga

SEQ ID NO: 1224502 - RNA, 19 nt, Artificial Sequence
  Description of Artificial Sequence: Synthetic oligonucleotide
gucgugcgcuuuugaagcg

SEQ ID NO: 1224503 - RNA, 19 nt, Artificial Sequence
  Description of Artificial Sequence: Synthetic oligonucleotide
gguaggaucaagaggcuca

SEQ ID NO: 1224504 - RNA, 19 nt, Artificial Sequence
  Description of Artificial Sequence: Synthetic oligonucleotide
cuuuugaagcgugcagaac

SEQ ID NO: 1224505 - RNA, 19 nt, Artificial Sequence
  Description of Artificial Sequence: Synthetic oligonucleotide
uuagccacuaagggauuaa

SEQ ID NO: 1224506 - RNA, 19 nt, Artificial Sequence
  Description of Artificial Sequence: Synthetic oligonucleotide
ggagcucuagacuggcacc

SEQ ID NO: 1224507 - RNA, 19 nt, Artificial Sequence
  Description of Artificial Sequence: Synthetic oligonucleotide
uugaagcgugcagaacgcc

SEQ ID NO: 1224508 - RNA, 19 nt, Artificial Sequence
  Description of Artificial Sequence: Synthetic oligonucleotide
gaugugaggaagaggagau

SEQ ID NO: 1224509 - RNA, 19 nt, Artificial Sequence
  Description of Artificial Sequence: Synthetic oligonucleotide
caaaucccgaugcaguaaa

SEQ ID NO: 1224510 - RNA, 19 nt, Artificial Sequence
  Description of Artificial Sequence: Synthetic oligonucleotide
uuuggauagugaggcucug

SEQ ID NO: 1224511 - RNA, 19 nt, Artificial Sequence
  Description of Artificial Sequence: Synthetic oligonucleotide
agguauaccagaggccaca

SEQ ID NO: 1224512 - RNA, 19 nt, Artificial Sequence
  Description of Artificial Sequence: Synthetic oligonucleotide
ggcucauaaggacaacuga

SEQ ID NO: 1224513 - RNA, 19 nt, Artificial Sequence
  Description of Artificial Sequence: Synthetic oligonucleotide
agcaucgauuuuggcuggc

SEQ ID NO: 1224514 - RNA, 19 nt, Artificial Sequence
  Description of Artificial Sequence: Synthetic oligonucleotide
cgucgugcgcuuuugaagc

SEQ ID NO: 1224515 - RNA, 19 nt, Artificial Sequence
  Description of Artificial Sequence: Synthetic oligonucleotide
cacacuaaguugacuuaga

SEQ ID NO: 1224516 - RNA, 19 nt, Artificial Sequence
  Description of Artificial Sequence: Synthetic oligonucleotide
aaaaccccaacagguccau

SEQ ID NO: 1224517 - RNA, 19 nt, Artificial Sequence
  Description of Artificial Sequence: Synthetic oligonucleotide
ugugggcucggugugcagu

SEQ ID NO: 1224518 - RNA, 19 nt, Artificial Sequence
  Description of Artificial Sequence: Synthetic oligonucleotide
gaaggggcguucaggacuc

SEQ ID NO: 1224519 - RNA, 19 nt, Artificial Sequence
  Description of Artificial Sequence: Synthetic oligonucleotide
ggcuggcucagcuuuaauc

SEQ ID NO: 1224520 - RNA, 19 nt, Artificial Sequence
  Description of Artificial Sequence: Synthetic oligonucleotide
auguuguugagcaccuuaa

SEQ ID NO: 1224521 - RNA, 19 nt, Artificial Sequence
  Description of Artificial Sequence: Synthetic oligonucleotide
acgagccucagaugcugug

SEQ ID NO: 1224522 - RNA, 19 nt, Artificial Sequence
  Description of Artificial Sequence: Synthetic oligonucleotide
acaaaucccgaugcaguaa

SEQ ID NO: 1224523 - RNA, 19 nt, Artificial Sequence
  Description of Artificial Sequence: Synthetic oligonucleotide
aggcucugaaagcaucgau

SEQ ID NO: 1224524 - RNA, 19 nt, Artificial Sequence
  Description of Artificial Sequence: Synthetic oligonucleotide
gccacuaagggauuaaaau

SEQ ID NO: 1224525 - RNA, 19 nt, Artificial Sequence
  Description of Artificial Sequence: Synthetic oligonucleotide
gaucgcugcgaccgucgug

SEQ ID NO: 1224526 - RNA, 19 nt, Artificial Sequence
  Description of Artificial Sequence: Synthetic oligonucleotide
accacaguccaagcccauc

SEQ ID NO: 1224527 - RNA, 19 nt, Artificial Sequence
  Description of Artificial Sequence: Synthetic oligonucleotide
cagguauaccagaggccac

SEQ ID NO: 1224528 - RNA, 19 nt, Artificial Sequence
  Description of Artificial Sequence: Synthetic oligonucleotide
gauagugaugcaaccccua

SEQ ID NO: 1224529 - RNA, 19 nt, Artificial Sequence
  Description of Artificial Sequence: Synthetic oligonucleotide
accgucgugcgcuuuugaa

SEQ ID NO: 1224530 - RNA, 19 nt, Artificial Sequence
  Description of Artificial Sequence: Synthetic oligonucleotide
agcuuguuagaaagcgaca

SEQ ID NO: 1224531 - RNA, 19 nt, Artificial Sequence
  Description of Artificial Sequence: Synthetic oligonucleotide
acaugaaagcggagguucu

SEQ ID NO: 1224532 - RNA, 19 nt, Artificial Sequence
  Description of Artificial Sequence: Synthetic oligonucleotide
caugaaagcggagguucuc

SEQ ID NO: 1224533 - RNA, 19 nt, Artificial Sequence
  Description of Artificial Sequence: Synthetic oligonucleotide
accaccuaugauagugaug

SEQ ID NO: 1224534 - RNA, 19 nt, Artificial Sequence
  Description of Artificial Sequence: Synthetic oligonucleotide
ggcucuaaggaguacuugu

SEQ ID NO: 1224535 - RNA, 19 nt, Artificial Sequence
  Description of Artificial Sequence: Synthetic oligonucleotide
gaaugcacuuagccacuaa

SEQ ID NO: 1224536 - RNA, 19 nt, Artificial Sequence
  Description of Artificial Sequence: Synthetic oligonucleotide
cuguuuaaggguuccuggu

SEQ ID NO: 1224537 - RNA, 19 nt, Artificial Sequence
  Description of Artificial Sequence: Synthetic oligonucleotide
ccuuugguuauuuguuauc

SEQ ID NO: 1224538 - RNA, 19 nt, Artificial Sequence
  Description of Artificial Sequence: Synthetic oligonucleotide
uagccacuaagggauuaaa

SEQ ID NO: 1224539 - RNA, 19 nt, Artificial Sequence
  Description of Artificial Sequence: Synthetic oligonucleotide
caacuuuagcuccucccaa

SEQ ID NO: 1224540 - RNA, 19 nt, Artificial Sequence
  Description of Artificial Sequence: Synthetic oligonucleotide
guaccacaguccaagccca

SEQ ID NO: 1224541 - RNA, 19 nt, Artificial Sequence
  Description of Artificial Sequence: Synthetic oligonucleotide
gcuuuugaagcgugcagaa

SEQ ID NO: 1224542 - RNA, 19 nt, Artificial Sequence
  Description of Artificial Sequence: Synthetic oligonucleotide
agagagaacuaagcuuuua

SEQ ID NO: 1224543 - RNA, 19 nt, Artificial Sequence
  Description of Artificial Sequence: Synthetic oligonucleotide
agccacuaagggauuaaaa

SEQ ID NO: 1224544 - RNA, 19 nt, Artificial Sequence
  Description of Artificial Sequence: Synthetic oligonucleotide
gguauaccagaggccacag

SEQ ID NO: 1224545 - RNA, 19 nt, Artificial Sequence
  Description of Artificial Sequence: Synthetic oligonucleotide
guuuggauagugaggcucu

SEQ ID NO: 1224546 - RNA, 19 nt, Artificial Sequence
  Description of Artificial Sequence: Synthetic oligonucleotide
ccgucgugcgcuuuugaag

SEQ ID NO: 1224547 - RNA, 19 nt, Artificial Sequence
  Description of Artificial Sequence: Synthetic oligonucleotide
guccacccucaucacgacc

SEQ ID NO: 1224548 - RNA, 19 nt, Artificial Sequence
  Description of Artificial Sequence: Synthetic oligonucleotide
agaucgcugcgaccgucgu

SEQ ID NO: 1224549 - RNA, 19 nt, Artificial Sequence
  Description of Artificial Sequence: Synthetic oligonucleotide
gcucagaugugaggaagag

SEQ ID NO: 1224550 - RNA, 19 nt, Artificial Sequence
  Description of Artificial Sequence: Synthetic oligonucleotide
caguaaagacgagccucag

SEQ ID NO: 1224551 - RNA, 19 nt, Artificial Sequence
  Description of Artificial Sequence: Synthetic oligonucleotide
gaaguggcuuuuaccaccu

SEQ ID NO: 1224552 - RNA, 19 nt, Artificial Sequence
  Description of Artificial Sequence: Synthetic oligonucleotide
ucgugcgcuuuugaagcgu

SEQ ID NO: 1224553 - RNA, 19 nt, Artificial Sequence
  Description of Artificial Sequence: Synthetic oligonucleotide
gcgcuuuugaagcgugcag

SEQ ID NO: 1224554 - RNA, 19 nt, Artificial Sequence
  Description of Artificial Sequence: Synthetic oligonucleotide
gcucuagacuggcaccacc

SEQ ID NO: 1224555 - RNA, 19 nt, Artificial Sequence
  Description of Artificial Sequence: Synthetic oligonucleotide
gcaguaaagacgagccuca

SEQ ID NO: 1224556 - RNA, 19 nt, Artificial Sequence
  Description of Artificial Sequence: Synthetic oligonucleotide
cuuuuacaggcagaauaua

SEQ ID NO: 1224557 - RNA, 19 nt, Artificial Sequence
  Description of Artificial Sequence: Synthetic oligonucleotide
cgaugcaguaaagacgagc

SEQ ID NO: 1224558 - RNA, 19 nt, Artificial Sequence
  Description of Artificial Sequence: Synthetic oligonucleotide
gguuauuuguuaucugauu

SEQ ID NO: 1224559 - RNA, 19 nt, Artificial Sequence
  Description of Artificial Sequence: Synthetic oligonucleotide
ucaucacgacccgcuuccc

SEQ ID NO: 1224560 - RNA, 19 nt, Artificial Sequence
  Description of Artificial Sequence: Synthetic oligonucleotide
uaggaucaagaggcucaga

SEQ ID NO: 1224561 - RNA, 19 nt, Artificial Sequence
  Description of Artificial Sequence: Synthetic oligonucleotide
aggggcguucaggacucuc

SEQ ID NO: 1224562 - RNA, 19 nt, Artificial Sequence
  Description of Artificial Sequence: Synthetic oligonucleotide
uaccacaguccaagcccau

SEQ ID NO: 1224563 - RNA, 19 nt, Artificial Sequence
  Description of Artificial Sequence: Synthetic oligonucleotide
aggagaucgcugcgaccgu

SEQ ID NO: 1224564 - RNA, 19 nt, Artificial Sequence
  Description of Artificial Sequence: Synthetic oligonucleotide
ucgcugcgaccgucgugcg

SEQ ID NO: 1224565 - RNA, 19 nt, Artificial Sequence
  Description of Artificial Sequence: Synthetic oligonucleotide
ggaguacuugucaggcaug

SEQ ID NO: 1224566 - RNA, 19 nt, Artificial Sequence
  Description of Artificial Sequence: Synthetic oligonucleotide
guggcucauaaggacaacu

SEQ ID NO: 1224567 - RNA, 19 nt, Artificial Sequence
  Description of Artificial Sequence: Synthetic oligonucleotide
gcucuaaggaguacuuguc

SEQ ID NO: 1224568 - RNA, 19 nt, Artificial Sequence
  Description of Artificial Sequence: Synthetic oligonucleotide
acaacugacuuggcuccau

SEQ ID NO: 1224569 - RNA, 19 nt, Artificial Sequence
  Description of Artificial Sequence: Synthetic oligonucleotide
ggggcguucaggacucucc

SEQ ID NO: 1224570 - RNA, 19 nt, Artificial Sequence
  Description of Artificial Sequence: Synthetic oligonucleotide
gggcucggugugcaguucc

SEQ ID NO: 1224571 - RNA, 19 nt, Artificial Sequence
  Description of Artificial Sequence: Synthetic oligonucleotide
agaaugcacuuagccacua

SEQ ID NO: 1224572 - RNA, 19 nt, Artificial Sequence
  Description of Artificial Sequence: Synthetic oligonucleotide
agccucagaugcugugcaa

SEQ ID NO: 1224573 - RNA, 19 nt, Artificial Sequence
  Description of Artificial Sequence: Synthetic oligonucleotide
gaccgucgugcgcuuuuga

SEQ ID NO: 1224574 - RNA, 19 nt, Artificial Sequence
  Description of Artificial Sequence: Synthetic oligonucleotide
cuuagccacuaagggauua

SEQ ID NO: 1224575 - RNA, 19 nt, Artificial Sequence
  Description of Artificial Sequence: Synthetic oligonucleotide
ucacgacccgcuuccccuu

SEQ ID NO: 1224576 - RNA, 19 nt, Artificial Sequence
  Description of Artificial Sequence: Synthetic oligonucleotide
ccaaacaaucugcuuagcu

SEQ ID NO: 1224577 - RNA, 19 nt, Artificial Sequence
  Description of Artificial Sequence: Synthetic oligonucleotide
gccucagaugcugugcaac

SEQ ID NO: 1224578 - RNA, 19 nt, Artificial Sequence
  Description of Artificial Sequence: Synthetic oligonucleotide
cugcuuagcucgagccaca

SEQ ID NO: 1224579 - RNA, 19 nt, Artificial Sequence
  Description of Artificial Sequence: Synthetic oligonucleotide
acgguaggaucaagaggcu

SEQ ID NO: 1224580 - RNA, 19 nt, Artificial Sequence
  Description of Artificial Sequence: Synthetic oligonucleotide
acgacccgcuuccccuuca

SEQ ID NO: 1224581 - RNA, 19 nt, Artificial Sequence
  Description of Artificial Sequence: Synthetic oligonucleotide
gugcugacauggcugacuu

SEQ ID NO: 1224582 - RNA, 19 nt, Artificial Sequence
  Description of Artificial Sequence: Synthetic oligonucleotide
ggcucagaugugaggaaga

SEQ ID NO: 1224583 - RNA, 19 nt, Artificial Sequence
  Description of Artificial Sequence: Synthetic oligonucleotide
uugggacagcagccuugau

SEQ ID NO: 1224584 - RNA, 19 nt, Artificial Sequence
  Description of Artificial Sequence: Synthetic oligonucleotide
cugugggcucggugugcag

SEQ ID NO: 1224585 - RNA, 19 nt, Artificial Sequence
  Description of Artificial Sequence: Synthetic oligonucleotide
caccuaugauagugaugca

SEQ ID NO: 1224586 - RNA, 19 nt, Artificial Sequence
  Description of Artificial Sequence: Synthetic oligonucleotide
gcaacacgguaggaucaag

SEQ ID NO: 1224587 - RNA, 19 nt, Artificial Sequence
  Description of Artificial Sequence: Synthetic oligonucleotide
ccgcuuccccuucacgucc

SEQ ID NO: 1224588 - RNA, 19 nt, Artificial Sequence
  Description of Artificial Sequence: Synthetic oligonucleotide
ccaagcagaauuugaugcu

SEQ ID NO: 1224589 - RNA, 19 nt, Artificial Sequence
  Description of Artificial Sequence: Synthetic oligonucleotide
caccuuaaggaaggugaaa

SEQ ID NO: 1224590 - RNA, 19 nt, Artificial Sequence
  Description of Artificial Sequence: Synthetic oligonucleotide
guauaccagaggccacagu

SEQ ID NO: 1224591 - RNA, 19 nt, Artificial Sequence
  Description of Artificial Sequence: Synthetic oligonucleotide
ccucaucacgacccgcuuc

SEQ ID NO: 1224592 - RNA, 19 nt, Artificial Sequence
  Description of Artificial Sequence: Synthetic oligonucleotide
ccucuacaugaaagcggag

SEQ ID NO: 1224593 - RNA, 19 nt, Artificial Sequence
  Description of Artificial Sequence: Synthetic oligonucleotide
acuuagccacuaagggauu

SEQ ID NO: 1224594 - RNA, 19 nt, Artificial Sequence
  Description of Artificial Sequence: Synthetic oligonucleotide
caccaccuaugauagugau

SEQ ID NO: 1224595 - RNA, 19 nt, Artificial Sequence
  Description of Artificial Sequence: Synthetic oligonucleotide
cgugcgcuuuugaagcgug

SEQ ID NO: 1224596 - RNA, 19 nt, Artificial Sequence
  Description of Artificial Sequence: Synthetic oligonucleotide
ccacccucaucacgacccg

SEQ ID NO: 1224597 - RNA, 19 nt, Artificial Sequence
  Description of Artificial Sequence: Synthetic oligonucleotide
cacgacccgcuuccccuuc

SEQ ID NO: 1224598 - RNA, 19 nt, Artificial Sequence
  Description of Artificial Sequence: Synthetic oligonucleotide
ggcucugaaagcaucgauu

SEQ ID NO: 1224599 - RNA, 19 nt, Artificial Sequence
  Description of Artificial Sequence: Synthetic oligonucleotide
gcugcgaccgucgugcgcu

SEQ ID NO: 1224600 - RNA, 19 nt, Artificial Sequence
  Description of Artificial Sequence: Synthetic oligonucleotide
ggagaucgcugcgaccguc

SEQ ID NO: 1224601 - RNA, 19 nt, Artificial Sequence
  Description of Artificial Sequence: Synthetic oligonucleotide
gcaccuuaaggaaggugaa

SEQ ID NO: 1224602 - RNA, 19 nt, Artificial Sequence
  Description of Artificial Sequence: Synthetic oligonucleotide
cuacaugaaagcggagguu

SEQ ID NO: 1224603 - RNA, 19 nt, Artificial Sequence
  Description of Artificial Sequence: Synthetic oligonucleotide
ggccagucuuggcauucuc

SEQ ID NO: 1224604 - RNA, 19 nt, Artificial Sequence
  Description of Artificial Sequence: Synthetic oligonucleotide
ggcguucaggacucuccaa

SEQ ID NO: 1224605 - RNA, 19 nt, Artificial Sequence
  Description of Artificial Sequence: Synthetic oligonucleotide
ggcaacacgguaggaucaa

SEQ ID NO: 1224606 - RNA, 19 nt, Artificial Sequence
  Description of Artificial Sequence: Synthetic oligonucleotide
caguuccaaaagcaucauu

SEQ ID NO: 1224607 - RNA, 19 nt, Artificial Sequence
  Description of Artificial Sequence: Synthetic oligonucleotide
gcacucuagaaugcacuua

SEQ ID NO: 1224608 - RNA, 19 nt, Artificial Sequence
  Description of Artificial Sequence: Synthetic oligonucleotide
caacuguuuaaggguuccu

SEQ ID NO: 1224609 - RNA, 19 nt, Artificial Sequence
  Description of Artificial Sequence: Synthetic oligonucleotide
gugggcucggugugcaguu

SEQ ID NO: 1224610 - RNA, 19 nt, Artificial Sequence
  Description of Artificial Sequence: Synthetic oligonucleotide
ccgccacuagcugacacca

SEQ ID NO: 1224611 - RNA, 19 nt, Artificial Sequence
  Description of Artificial Sequence: Synthetic oligonucleotide
caccaaugaucaucucauu

SEQ ID NO: 1224612 - RNA, 19 nt, Artificial Sequence
  Description of Artificial Sequence: Synthetic oligonucleotide
caaccccuagaaguggcuu

SEQ ID NO: 1224613 - RNA, 19 nt, Artificial Sequence
  Description of Artificial Sequence: Synthetic oligonucleotide
ggccggcccaaguggcuca

SEQ ID NO: 1224614 - RNA, 19 nt, Artificial Sequence
  Description of Artificial Sequence: Synthetic oligonucleotide
ugcgaccgucgugcgcuuu

SEQ ID NO: 1224615 - RNA, 19 nt, Artificial Sequence
  Description of Artificial Sequence: Synthetic oligonucleotide
gcaucgauuuuggcuggcu

SEQ ID NO: 1224616 - RNA, 19 nt, Artificial Sequence
  Description of Artificial Sequence: Synthetic oligonucleotide
gcaaccccuagaaguggcu

SEQ ID NO: 1224617 - RNA, 19 nt, Artificial Sequence
  Description of Artificial Sequence: Synthetic oligonucleotide
cgcugcgaccgucgugcgc

SEQ ID NO: 1224618 - RNA, 19 nt, Artificial Sequence
  Description of Artificial Sequence: Synthetic oligonucleotide
gcccauccagccagcaggu

SEQ ID NO: 1224619 - RNA, 19 nt, Artificial Sequence
  Description of Artificial Sequence: Synthetic oligonucleotide
cgacccgcuuccccuucac

SEQ ID NO: 1224620 - RNA, 19 nt, Artificial Sequence
  Description of Artificial Sequence: Synthetic oligonucleotide
cgaccgucgugcgcuuuug

SEQ ID NO: 1224621 - RNA, 19 nt, Artificial Sequence
  Description of Artificial Sequence: Synthetic oligonucleotide
gcgaccgucgugcgcuuuu

SEQ ID NO: 1224622 - RNA, 19 nt, Artificial Sequence
  Description of Artificial Sequence: Synthetic oligonucleotide
cugggcccacacaguccuu

SEQ ID NO: 1224623 - RNA, 19 nt, Artificial Sequence
  Description of Artificial Sequence: Synthetic oligonucleotide
cccucaucacgacccgcuu

SEQ ID NO: 1224624 - RNA, 19 nt, Artificial Sequence
  Description of Artificial Sequence: Synthetic oligonucleotide
cgccacuagcugacaccaa

SEQ ID NO: 1224625 - RNA, 19 nt, Artificial Sequence
  Description of Artificial Sequence: Synthetic oligonucleotide
cugcgaccgucgugcgcuu

SEQ ID NO: 1224626 - RNA, 19 nt, Artificial Sequence
  Description of Artificial Sequence: Synthetic oligonucleotide
ccggcccaaguggcucaua

SEQ ID NO: 1224627 - RNA, 19 nt, Artificial Sequence
  Description of Artificial Sequence: Synthetic oligonucleotide
uauacuaagacucacacau

SEQ ID NO: 1224628 - RNA, 19 nt, Artificial Sequence
  Description of Artificial Sequence: Synthetic oligonucleotide
aaaguauagaauuauugga

SEQ ID NO: 1224629 - RNA, 19 nt, Artificial Sequence
  Description of Artificial Sequence: Synthetic oligonucleotide
aaaauugauuaauaaguug

SEQ ID NO: 1224630 - RNA, 19 nt, Artificial Sequence
  Description of Artificial Sequence: Synthetic oligonucleotide
uguauuauguucguuaagg

SEQ ID NO: 1224631 - RNA, 19 nt, Artificial Sequence
  Description of Artificial Sequence: Synthetic oligonucleotide
augaaguuaagccaaacuc

SEQ ID NO: 1224632 - RNA, 19 nt, Artificial Sequence
  Description of Artificial Sequence: Synthetic oligonucleotide
uaaguuauucucuuaauug

SEQ ID NO: 1224633 - RNA, 19 nt, Artificial Sequence
  Description of Artificial Sequence: Synthetic oligonucleotide
uauaaaugaaugauuggag

SEQ ID NO: 1224634 - RNA, 19 nt, Artificial Sequence
  Description of Artificial Sequence: Synthetic oligonucleotide
uuaagguccaagcaaacag

SEQ ID NO: 1224635 - RNA, 19 nt, Artificial Sequence
  Description of Artificial Sequence: Synthetic oligonucleotide
ucagagugagucaugaagg

SEQ ID NO: 1224636 - RNA, 19 nt, Artificial Sequence
  Description of Artificial Sequence: Synthetic oligonucleotide
ucuuauaacauuuuagaaa

SEQ ID NO: 1224637 - RNA, 19 nt, Artificial Sequence
  Description of Artificial Sequence: Synthetic oligonucleotide
uaucuuauaacauuuuaga

SEQ ID NO: 1224638 - RNA, 19 nt, Artificial Sequence
  Description of Artificial Sequence: Synthetic oligonucleotide
ugaauaggcagacuguggg

SEQ ID NO: 1224639 - RNA, 19 nt, Artificial Sequence
  Description of Artificial Sequence: Synthetic oligonucleotide
uugauuaauaaguuggucu

SEQ ID NO: 1224640 - RNA, 19 nt, Artificial Sequence
  Description of Artificial Sequence: Synthetic oligonucleotide
uugacuguaagauaccugc

SEQ ID NO: 1224641 - RNA, 19 nt, Artificial Sequence
  Description of Artificial Sequence: Synthetic oligonucleotide
cauuacacgaguauugggg

SEQ ID NO: 1224642 - RNA, 19 nt, Artificial Sequence
  Description of Artificial Sequence: Synthetic oligonucleotide
ucguauagaaacuugccag

SEQ ID NO: 1224643 - RNA, 19 nt, Artificial Sequence
  Description of Artificial Sequence: Synthetic oligonucleotide
uauaccaagcacauuagac

SEQ ID NO: 1224644 - RNA, 19 nt, Artificial Sequence
  Description of Artificial Sequence: Synthetic oligonucleotide
agguguaugucauauaaag

SEQ ID NO: 1224645 - RNA, 19 nt, Artificial Sequence
  Description of Artificial Sequence: Synthetic oligonucleotide
uacuuauuaauuccaaaga

SEQ ID NO: 1224646 - RNA, 19 nt, Artificial Sequence
  Description of Artificial Sequence: Synthetic oligonucleotide
aacuacuugaaauaaguua

SEQ ID NO: 1224647 - RNA, 19 nt, Artificial Sequence
  Description of Artificial Sequence: Synthetic oligonucleotide
uauagguaccauuugaggu

SEQ ID NO: 1224648 - RNA, 19 nt, Artificial Sequence
  Description of Artificial Sequence: Synthetic oligonucleotide
cacaguaguaauuucauac

SEQ ID NO: 1224649 - RNA, 19 nt, Artificial Sequence
  Description of Artificial Sequence: Synthetic oligonucleotide
ucuauacuaagacucacac

SEQ ID NO: 1224650 - RNA, 19 nt, Artificial Sequence
  Description of Artificial Sequence: Synthetic oligonucleotide
acuaagagcagauaaggcu

SEQ ID NO: 1224651 - RNA, 19 nt, Artificial Sequence
  Description of Artificial Sequence: Synthetic oligonucleotide
aacucaguacuuuugaaau

SEQ ID NO: 1224652 - RNA, 19 nt, Artificial Sequence
  Description of Artificial Sequence: Synthetic oligonucleotide
uuuaaaggacacaugaaua

SEQ ID NO: 1224653 - RNA, 19 nt, Artificial Sequence
  Description of Artificial Sequence: Synthetic oligonucleotide
auuuaaaggacacaugaau

SEQ ID NO: 1224654 - RNA, 19 nt, Artificial Sequence
  Description of Artificial Sequence: Synthetic oligonucleotide
aaagauccgaacaccaugg

SEQ ID NO: 1224655 - RNA, 19 nt, Artificial Sequence
  Description of Artificial Sequence: Synthetic oligonucleotide
aacguaguagcucuaagaa

SEQ ID NO: 1224656 - RNA, 19 nt, Artificial Sequence
  Description of Artificial Sequence: Synthetic oligonucleotide
uguaugucauauaaaggga

SEQ ID NO: 1224657 - RNA, 19 nt, Artificial Sequence
  Description of Artificial Sequence: Synthetic oligonucleotide
ugaguugggucauacuucg

SEQ ID NO: 1224658 - RNA, 19 nt, Artificial Sequence
  Description of Artificial Sequence: Synthetic oligonucleotide
uuauguauuauguucguua

SEQ ID NO: 1224659 - RNA, 19 nt, Artificial Sequence
  Description of Artificial Sequence: Synthetic oligonucleotide
aaacguaguagcucuaaga

SEQ ID NO: 1224660 - RNA, 19 nt, Artificial Sequence
  Description of Artificial Sequence: Synthetic oligonucleotide
aacuaagagcagauaaggc

SEQ ID NO: 1224661 - RNA, 19 nt, Artificial Sequence
  Description of Artificial Sequence: Synthetic oligonucleotide
aaggaccaguacuuggccc

SEQ ID NO: 1224662 - RNA, 19 nt, Artificial Sequence
  Description of Artificial Sequence: Synthetic oligonucleotide
agguugucuauacuaagac

SEQ ID NO: 1224663 - RNA, 19 nt, Artificial Sequence
  Description of Artificial Sequence: Synthetic oligonucleotide
uucguauagaaacuugcca

SEQ ID NO: 1224664 - RNA, 19 nt, Artificial Sequence
  Description of Artificial Sequence: Synthetic oligonucleotide
aacuguacuccauagucga

SEQ ID NO: 1224665 - RNA, 19 nt, Artificial Sequence
  Description of Artificial Sequence: Synthetic oligonucleotide
uggauuuaguuacuguacc

SEQ ID NO: 1224666 - RNA, 19 nt, Artificial Sequence
  Description of Artificial Sequence: Synthetic oligonucleotide
auucauguuugcucuaccg

SEQ ID NO: 1224667 - RNA, 19 nt, Artificial Sequence
  Description of Artificial Sequence: Synthetic oligonucleotide
agaaaguauagaauuauug

SEQ ID NO: 1224668 - RNA, 19 nt, Artificial Sequence
  Description of Artificial Sequence: Synthetic oligonucleotide
ugcaauuauaggcagcuuc

SEQ ID NO: 1224669 - RNA, 19 nt, Artificial Sequence
  Description of Artificial Sequence: Synthetic oligonucleotide
uuauuggagaaauugugaa

SEQ ID NO: 1224670 - RNA, 19 nt, Artificial Sequence
  Description of Artificial Sequence: Synthetic oligonucleotide
uguucguuaagguccaagc

SEQ ID NO: 1224671 - RNA, 19 nt, Artificial Sequence
  Description of Artificial Sequence: Synthetic oligonucleotide
cuauagguaccauuugagg

SEQ ID NO: 1224672 - RNA, 19 nt, Artificial Sequence
  Description of Artificial Sequence: Synthetic oligonucleotide
uauagaagucuguuuaaac

SEQ ID NO: 1224673 - RNA, 19 nt, Artificial Sequence
  Description of Artificial Sequence: Synthetic oligonucleotide
uugggaauaaguacacuca

SEQ ID NO: 1224674 - RNA, 19 nt, Artificial Sequence
  Description of Artificial Sequence: Synthetic oligonucleotide
auaccaagcacauuagaca

SEQ ID NO: 1224675 - RNA, 19 nt, Artificial Sequence
  Description of Artificial Sequence: Synthetic oligonucleotide
uuggauuuaguuacuguac

SEQ ID NO: 1224676 - RNA, 19 nt, Artificial Sequence
  Description of Artificial Sequence: Synthetic oligonucleotide
acuucguauagaaacuugc

SEQ ID NO: 1224677 - RNA, 19 nt, Artificial Sequence
  Description of Artificial Sequence: Synthetic oligonucleotide
aaagggaauguguacagua

SEQ ID NO: 1224678 - RNA, 19 nt, Artificial Sequence
  Description of Artificial Sequence: Synthetic oligonucleotide
acuugaaauaaguuauucu

SEQ ID NO: 1224679 - RNA, 19 nt, Artificial Sequence
  Description of Artificial Sequence: Synthetic oligonucleotide
ugauuaauaaguuggucua

SEQ ID NO: 1224680 - RNA, 19 nt, Artificial Sequence
  Description of Artificial Sequence: Synthetic oligonucleotide
aaacuguacuccauagucg

SEQ ID NO: 1224681 - RNA, 19 nt, Artificial Sequence
  Description of Artificial Sequence: Synthetic oligonucleotide
auuauaggcagcuucccca

SEQ ID NO: 1224682 - RNA, 19 nt, Artificial Sequence
  Description of Artificial Sequence: Synthetic oligonucleotide
acauuagacagaggcaucc

SEQ ID NO: 1224683 - RNA, 19 nt, Artificial Sequence
  Description of Artificial Sequence: Synthetic oligonucleotide
ugggaauaaguacacucag

SEQ ID NO: 1224684 - RNA, 19 nt, Artificial Sequence
  Description of Artificial Sequence: Synthetic oligonucleotide
uaauaaguuggucuacaac

SEQ ID NO: 1224685 - RNA, 19 nt, Artificial Sequence
  Description of Artificial Sequence: Synthetic oligonucleotide
ucucagaaauauaccaagc

SEQ ID NO: 1224686 - RNA, 19 nt, Artificial Sequence
  Description of Artificial Sequence: Synthetic oligonucleotide
auaaagggaauguguacag

SEQ ID NO: 1224687 - RNA, 19 nt, Artificial Sequence
  Description of Artificial Sequence: Synthetic oligonucleotide
cacaugaauaggcagacug

SEQ ID NO: 1224688 - RNA, 19 nt, Artificial Sequence
  Description of Artificial Sequence: Synthetic oligonucleotide
uucauguuugcucuaccgc

SEQ ID NO: 1224689 - RNA, 19 nt, Artificial Sequence
  Description of Artificial Sequence: Synthetic oligonucleotide
ugauucugcuuuauagaag

SEQ ID NO: 1224690 - RNA, 19 nt, Artificial Sequence
  Description of Artificial Sequence: Synthetic oligonucleotide
gacucacacauuuaaagga

SEQ ID NO: 1224691 - RNA, 19 nt, Artificial Sequence
  Description of Artificial Sequence: Synthetic oligonucleotide
ugcccauucacuauaggcu

SEQ ID NO: 1224692 - RNA, 19 nt, Artificial Sequence
  Description of Artificial Sequence: Synthetic oligonucleotide
aucaggaguuucaaaaggc

SEQ ID NO: 1224693 - RNA, 19 nt, Artificial Sequence
  Description of Artificial Sequence: Synthetic oligonucleotide
gcauaugucagccacauac

SEQ ID NO: 1224694 - RNA, 19 nt, Artificial Sequence
  Description of Artificial Sequence: Synthetic oligonucleotide
uauguauuauguucguuaa

SEQ ID NO: 1224695 - RNA, 19 nt, Artificial Sequence
  Description of Artificial Sequence: Synthetic oligonucleotide
agaggcaucccuuagugga

SEQ ID NO: 1224696 - RNA, 19 nt, Artificial Sequence
  Description of Artificial Sequence: Synthetic oligonucleotide
auugauuaauaaguugguc

SEQ ID NO: 1224697 - RNA, 19 nt, Artificial Sequence
  Description of Artificial Sequence: Synthetic oligonucleotide
ugggucauacuucguauag

SEQ ID NO: 1224698 - RNA, 19 nt, Artificial Sequence
  Description of Artificial Sequence: Synthetic oligonucleotide
aauauaccaagcacauuag

SEQ ID NO: 1224699 - RNA, 19 nt, Artificial Sequence
  Description of Artificial Sequence: Synthetic oligonucleotide
cuucguauagaaacuugcc

SEQ ID NO: 1224700 - RNA, 19 nt, Artificial Sequence
  Description of Artificial Sequence: Synthetic oligonucleotide
ugucauauaaagggaaugu

SEQ ID NO: 1224701 - RNA, 19 nt, Artificial Sequence
  Description of Artificial Sequence: Synthetic oligonucleotide
ugcugagcaauacaauaug

SEQ ID NO: 1224702 - RNA, 19 nt, Artificial Sequence
  Description of Artificial Sequence: Synthetic oligonucleotide
uguguagagccucucucag

SEQ ID NO: 1224703 - RNA, 19 nt, Artificial Sequence
  Description of Artificial Sequence: Synthetic oligonucleotide
aauugauuaauaaguuggu

SEQ ID NO: 1224704 - RNA, 19 nt, Artificial Sequence
  Description of Artificial Sequence: Synthetic oligonucleotide
agccuugacuguaagauac

SEQ ID NO: 1224705 - RNA, 19 nt, Artificial Sequence
  Description of Artificial Sequence: Synthetic oligonucleotide
uucacaaacuuuguaauau

SEQ ID NO: 1224706 - RNA, 19 nt, Artificial Sequence
  Description of Artificial Sequence: Synthetic oligonucleotide
agugaguugggucauacuu

SEQ ID NO: 1224707 - RNA, 19 nt, Artificial Sequence
  Description of Artificial Sequence: Synthetic oligonucleotide
gauucugcuuuauagaagu

SEQ ID NO: 1224708 - RNA, 19 nt, Artificial Sequence
  Description of Artificial Sequence: Synthetic oligonucleotide
uggcauuuugggaauaagu

SEQ ID NO: 1224709 - RNA, 19 nt, Artificial Sequence
  Description of Artificial Sequence: Synthetic oligonucleotide
uaagauaccugccugucuu

SEQ ID NO: 1224710 - RNA, 19 nt, Artificial Sequence
  Description of Artificial Sequence: Synthetic oligonucleotide
auuacacgaguauuggggu

SEQ ID NO: 1224711 - RNA, 19 nt, Artificial Sequence
  Description of Artificial Sequence: Synthetic oligonucleotide
aaugcccauucacuauagg

SEQ ID NO: 1224712 - RNA, 19 nt, Artificial Sequence
  Description of Artificial Sequence: Synthetic oligonucleotide
auacaauuaaugcuugcaa

SEQ ID NO: 1224713 - RNA, 19 nt, Artificial Sequence
  Description of Artificial Sequence: Synthetic oligonucleotide
guguuuaggaugaagugag

SEQ ID NO: 1224714 - RNA, 19 nt, Artificial Sequence
  Description of Artificial Sequence: Synthetic oligonucleotide
uauagaauuauuggagaaa

SEQ ID NO: 1224715 - RNA, 19 nt, Artificial Sequence
  Description of Artificial Sequence: Synthetic oligonucleotide
auaaguacacucagaagag

SEQ ID NO: 1224716 - RNA, 19 nt, Artificial Sequence
  Description of Artificial Sequence: Synthetic oligonucleotide
cauaugucagccacauacc

SEQ ID NO: 1224717 - RNA, 19 nt, Artificial Sequence
  Description of Artificial Sequence: Synthetic oligonucleotide
uugucuauacuaagacuca

SEQ ID NO: 1224718 - RNA, 19 nt, Artificial Sequence
  Description of Artificial Sequence: Synthetic oligonucleotide
acucacacauuuaaaggac

SEQ ID NO: 1224719 - RNA, 19 nt, Artificial Sequence
  Description of Artificial Sequence: Synthetic oligonucleotide
accucauuuaucaaggugu

SEQ ID NO: 1224720 - RNA, 19 nt, Artificial Sequence
  Description of Artificial Sequence: Synthetic oligonucleotide
uaccucuuauuucacauua

SEQ ID NO: 1224721 - RNA, 19 nt, Artificial Sequence
  Description of Artificial Sequence: Synthetic oligonucleotide
cuaacuacucuuucccuac

SEQ ID NO: 1224722 - RNA, 19 nt, Artificial Sequence
  Description of Artificial Sequence: Synthetic oligonucleotide
gaaacguaguagcucuaag

SEQ ID NO: 1224723 - RNA, 19 nt, Artificial Sequence
  Description of Artificial Sequence: Synthetic oligonucleotide
aacuacucuuucccuacug

SEQ ID NO: 1224724 - RNA, 19 nt, Artificial Sequence
  Description of Artificial Sequence: Synthetic oligonucleotide
ucuaagcugggccugccca

SEQ ID NO: 1224725 - RNA, 19 nt, Artificial Sequence
  Description of Artificial Sequence: Synthetic oligonucleotide
auuauuggagaaauuguga

SEQ ID NO: 1224726 - RNA, 19 nt, Artificial Sequence
  Description of Artificial Sequence: Synthetic oligonucleotide
uuauguucguuaaggucca

SEQ ID NO: 1224727 - RNA, 19 nt, Artificial Sequence
  Description of Artificial Sequence: Synthetic oligonucleotide
uguacccucauuguacugc

SEQ ID NO: 1224728 - RNA, 19 nt, Artificial Sequence
  Description of Artificial Sequence: Synthetic oligonucleotide
uuaauaaguuggucuacaa

SEQ ID NO: 1224729 - RNA, 19 nt, Artificial Sequence
  Description of Artificial Sequence: Synthetic oligonucleotide
auaugucagccacauacca

SEQ ID NO: 1224730 - RNA, 19 nt, Artificial Sequence
  Description of Artificial Sequence: Synthetic oligonucleotide
uaugucagccacauaccac

SEQ ID NO: 1224731 - RNA, 19 nt, Artificial Sequence
  Description of Artificial Sequence: Synthetic oligonucleotide
ucguuaagguccaagcaaa

SEQ ID NO: 1224732 - RNA, 19 nt, Artificial Sequence
  Description of Artificial Sequence: Synthetic oligonucleotide
uguguguagagccucucuc

SEQ ID NO: 1224733 - RNA, 19 nt, Artificial Sequence
  Description of Artificial Sequence: Synthetic oligonucleotide
aaacuugccagaaaguaua

SEQ ID NO: 1224734 - RNA, 19 nt, Artificial Sequence
  Description of Artificial Sequence: Synthetic oligonucleotide
agauccgaacaccauggag

SEQ ID NO: 1224735 - RNA, 19 nt, Artificial Sequence
  Description of Artificial Sequence: Synthetic oligonucleotide
gaccucauuuaucaaggug

SEQ ID NO: 1224736 - RNA, 19 nt, Artificial Sequence
  Description of Artificial Sequence: Synthetic oligonucleotide
uguauacaagaugauucug

SEQ ID NO: 1224737 - RNA, 19 nt, Artificial Sequence
  Description of Artificial Sequence: Synthetic oligonucleotide
ucauacaauuaaugcuugc

SEQ ID NO: 1224738 - RNA, 19 nt, Artificial Sequence
  Description of Artificial Sequence: Synthetic oligonucleotide
aguuaagccaaacucccaa

SEQ ID NO: 1224739 - RNA, 19 nt, Artificial Sequence
  Description of Artificial Sequence: Synthetic oligonucleotide
auagguaccauuugagguu

SEQ ID NO: 1224740 - RNA, 19 nt, Artificial Sequence
  Description of Artificial Sequence: Synthetic oligonucleotide
gaagcuguguuuaggauga

SEQ ID NO: 1224741 - RNA, 19 nt, Artificial Sequence
  Description of Artificial Sequence: Synthetic oligonucleotide
ucuacccugaucaggaguu

SEQ ID NO: 1224742 - RNA, 19 nt, Artificial Sequence
  Description of Artificial Sequence: Synthetic oligonucleotide
auuaauaaguuggucuaca

SEQ ID NO: 1224743 - RNA, 19 nt, Artificial Sequence
  Description of Artificial Sequence: Synthetic oligonucleotide
cuuccgagaagauguaaac

SEQ ID NO: 1224744 - RNA, 19 nt, Artificial Sequence
  Description of Artificial Sequence: Synthetic oligonucleotide
uaccauuugagguugucua

SEQ ID NO: 1224745 - RNA, 19 nt, Artificial Sequence
  Description of Artificial Sequence: Synthetic oligonucleotide
uaaugcccauucacuauag

SEQ ID NO: 1224746 - RNA, 19 nt, Artificial Sequence
  Description of Artificial Sequence: Synthetic oligonucleotide
uguacuccauagucgagcu

SEQ ID NO: 1224747 - RNA, 19 nt, Artificial Sequence
  Description of Artificial Sequence: Synthetic oligonucleotide
agagccuugacuguaagau

SEQ ID NO: 1224748 - RNA, 19 nt, Artificial Sequence
  Description of Artificial Sequence: Synthetic oligonucleotide
ggaauaaguacacucagaa

SEQ ID NO: 1224749 - RNA, 19 nt, Artificial Sequence
  Description of Artificial Sequence: Synthetic oligonucleotide
auaugaaguuaagccaaac

SEQ ID NO: 1224750 - RNA, 19 nt, Artificial Sequence
  Description of Artificial Sequence: Synthetic oligonucleotide
uugcucuaccgccagcucc

SEQ ID NO: 1224751 - RNA, 19 nt, Artificial Sequence
  Description of Artificial Sequence: Synthetic oligonucleotide
aaguacacucagaagagaa

SEQ ID NO: 1224752 - RNA, 19 nt, Artificial Sequence
  Description of Artificial Sequence: Synthetic oligonucleotide
uaagucuguuuauugcuaa

SEQ ID NO: 1224753 - RNA, 19 nt, Artificial Sequence
  Description of Artificial Sequence: Synthetic oligonucleotide
uacuugaaauaaguuauuc

SEQ ID NO: 1224754 - RNA, 19 nt, Artificial Sequence
  Description of Artificial Sequence: Synthetic oligonucleotide
acauaaugcccauucacua

SEQ ID NO: 1224755 - RNA, 19 nt, Artificial Sequence
  Description of Artificial Sequence: Synthetic oligonucleotide
ugacuguaagauaccugcc

SEQ ID NO: 1224756 - RNA, 19 nt, Artificial Sequence
  Description of Artificial Sequence: Synthetic oligonucleotide
auguauuauguucguuaag

SEQ ID NO: 1224757 - RNA, 19 nt, Artificial Sequence
  Description of Artificial Sequence: Synthetic oligonucleotide
ucuaucagagugagucaug

SEQ ID NO: 1224758 - RNA, 19 nt, Artificial Sequence
  Description of Artificial Sequence: Synthetic oligonucleotide
cuaagagcagauaaggcua

SEQ ID NO: 1224759 - RNA, 19 nt, Artificial Sequence
  Description of Artificial Sequence: Synthetic oligonucleotide
uuaguuacuguacccucau

SEQ ID NO: 1224760 - RNA, 19 nt, Artificial Sequence
  Description of Artificial Sequence: Synthetic oligonucleotide
gcucuaagaauuuuguuca

SEQ ID NO: 1224761 - RNA, 19 nt, Artificial Sequence
  Description of Artificial Sequence: Synthetic oligonucleotide
caagguguaugucauauaa

SEQ ID NO: 1224762 - RNA, 19 nt, Artificial Sequence
  Description of Artificial Sequence: Synthetic oligonucleotide
uuauagaagucuguuuaaa

SEQ ID NO: 1224763 - RNA, 19 nt, Artificial Sequence
  Description of Artificial Sequence: Synthetic oligonucleotide
ucaguacuuuugaaauaug

SEQ ID NO: 1224764 - RNA, 19 nt, Artificial Sequence
  Description of Artificial Sequence: Synthetic oligonucleotide
cuuauuucacauuaucacu

SEQ ID NO: 1224765 - RNA, 19 nt, Artificial Sequence
  Description of Artificial Sequence: Synthetic oligonucleotide
gguguaugucauauaaagg

SEQ ID NO: 1224766 - RNA, 19 nt, Artificial Sequence
  Description of Artificial Sequence: Synthetic oligonucleotide
gccauaacuucuaagcugg

SEQ ID NO: 1224767 - RNA, 19 nt, Artificial Sequence
  Description of Artificial Sequence: Synthetic oligonucleotide
ugguccuaguuucuuacaa

SEQ ID NO: 1224768 - RNA, 19 nt, Artificial Sequence
  Description of Artificial Sequence: Synthetic oligonucleotide
agacagccuaugaaggacc

SEQ ID NO: 1224769 - RNA, 19 nt, Artificial Sequence
  Description of Artificial Sequence: Synthetic oligonucleotide
acuaacuacucuuucccua

SEQ ID NO: 1224770 - RNA, 19 nt, Artificial Sequence
  Description of Artificial Sequence: Synthetic oligonucleotide
ccugucuucuaucagagug

SEQ ID NO: 1224771 - RNA, 19 nt, Artificial Sequence
  Description of Artificial Sequence: Synthetic oligonucleotide
uguucauuacacgaguauu

SEQ ID NO: 1224772 - RNA, 19 nt, Artificial Sequence
  Description of Artificial Sequence: Synthetic oligonucleotide
ugaucaccaccccuaaguc

SEQ ID NO: 1224773 - RNA, 19 nt, Artificial Sequence
  Description of Artificial Sequence: Synthetic oligonucleotide
auaaugcccauucacuaua

SEQ ID NO: 1224774 - RNA, 19 nt, Artificial Sequence
  Description of Artificial Sequence: Synthetic oligonucleotide
aaaaggcguuccuuucacu

SEQ ID NO: 1224775 - RNA, 19 nt, Artificial Sequence
  Description of Artificial Sequence: Synthetic oligonucleotide
aagaugauucugcuuuaua

SEQ ID NO: 1224776 - RNA, 19 nt, Artificial Sequence
  Description of Artificial Sequence: Synthetic oligonucleotide
ggauuuaguuacuguaccc

SEQ ID NO: 1224777 - RNA, 19 nt, Artificial Sequence
  Description of Artificial Sequence: Synthetic oligonucleotide
ccaaccuguguguagagcc

SEQ ID NO: 1224778 - RNA, 19 nt, Artificial Sequence
  Description of Artificial Sequence: Synthetic oligonucleotide
augaaacaaugaucaccac

SEQ ID NO: 1224779 - RNA, 19 nt, Artificial Sequence
  Description of Artificial Sequence: Synthetic oligonucleotide
uaauuccaaagauccgaac

SEQ ID NO: 1224780 - RNA, 19 nt, Artificial Sequence
  Description of Artificial Sequence: Synthetic oligonucleotide
cauaacuucuaagcugggc

SEQ ID NO: 1224781 - RNA, 19 nt, Artificial Sequence
  Description of Artificial Sequence: Synthetic oligonucleotide
uaaggcuaucuuuuccuuc

SEQ ID NO: 1224782 - RNA, 19 nt, Artificial Sequence
  Description of Artificial Sequence: Synthetic oligonucleotide
acuguacccucauuguacu

SEQ ID NO: 1224783 - RNA, 19 nt, Artificial Sequence
  Description of Artificial Sequence: Synthetic oligonucleotide
aguuucaaaaggcguuccu

SEQ ID NO: 1224784 - RNA, 19 nt, Artificial Sequence
  Description of Artificial Sequence: Synthetic oligonucleotide
aaccuguguguagagccuc

SEQ ID NO: 1224785 - RNA, 19 nt, Artificial Sequence
  Description of Artificial Sequence: Synthetic oligonucleotide
guuuaccucacugugggca

SEQ ID NO: 1224786 - RNA, 19 nt, Artificial Sequence
  Description of Artificial Sequence: Synthetic oligonucleotide
cuguacuccauagucgagc

SEQ ID NO: 1224787 - RNA, 19 nt, Artificial Sequence
  Description of Artificial Sequence: Synthetic oligonucleotide
uucuaucagagugagucau

SEQ ID NO: 1224788 - RNA, 19 nt, Artificial Sequence
  Description of Artificial Sequence: Synthetic oligonucleotide
aguugggucauacuucgua

SEQ ID NO: 1224789 - RNA, 19 nt, Artificial Sequence
  Description of Artificial Sequence: Synthetic oligonucleotide
guucguuaagguccaagca

SEQ ID NO: 1224790 - RNA, 19 nt, Artificial Sequence
  Description of Artificial Sequence: Synthetic oligonucleotide
aagcauaugucagccacau

SEQ ID NO: 1224791 - RNA, 19 nt, Artificial Sequence
  Description of Artificial Sequence: Synthetic oligonucleotide
aagucuguuuauugcuaaa

SEQ ID NO: 1224792 - RNA, 19 nt, Artificial Sequence
  Description of Artificial Sequence: Synthetic oligonucleotide
caaaaggcguuccuuucac

SEQ ID NO: 1224793 - RNA, 19 nt, Artificial Sequence
  Description of Artificial Sequence: Synthetic oligonucleotide
gauuuaguuacuguacccu

SEQ ID NO: 1224794 - RNA, 19 nt, Artificial Sequence
  Description of Artificial Sequence: Synthetic oligonucleotide
uagguaccauuugagguug

SEQ ID NO: 1224795 - RNA, 19 nt, Artificial Sequence
  Description of Artificial Sequence: Synthetic oligonucleotide
aauaugaaguuaagccaaa

SEQ ID NO: 1224796 - RNA, 19 nt, Artificial Sequence
  Description of Artificial Sequence: Synthetic oligonucleotide
aacuucuaagcugggccug

SEQ ID NO: 1224797 - RNA, 19 nt, Artificial Sequence
  Description of Artificial Sequence: Synthetic oligonucleotide
gagguugucuauacuaaga

SEQ ID NO: 1224798 - RNA, 19 nt, Artificial Sequence
  Description of Artificial Sequence: Synthetic oligonucleotide
ugcuguggcuauagguacc

SEQ ID NO: 1224799 - RNA, 19 nt, Artificial Sequence
  Description of Artificial Sequence: Synthetic oligonucleotide
uggcuauagguaccauuug

SEQ ID NO: 1224800 - RNA, 19 nt, Artificial Sequence
  Description of Artificial Sequence: Synthetic oligonucleotide
cugagcaauacaauaugaa

SEQ ID NO: 1224801 - RNA, 19 nt, Artificial Sequence
  Description of Artificial Sequence: Synthetic oligonucleotide
guuguugcuguggcuauag

SEQ ID NO: 1224802 - RNA, 19 nt, Artificial Sequence
  Description of Artificial Sequence: Synthetic oligonucleotide
cuauacuaagacucacaca

SEQ ID NO: 1224803 - RNA, 19 nt, Artificial Sequence
  Description of Artificial Sequence: Synthetic oligonucleotide
guacccucauuguacugcc

SEQ ID NO: 1224804 - RNA, 19 nt, Artificial Sequence
  Description of Artificial Sequence: Synthetic oligonucleotide
caauuauaggcagcuuccc

SEQ ID NO: 1224805 - RNA, 19 nt, Artificial Sequence
  Description of Artificial Sequence: Synthetic oligonucleotide
gaagugaguugggucauac

SEQ ID NO: 1224806 - RNA, 19 nt, Artificial Sequence
  Description of Artificial Sequence: Synthetic oligonucleotide
gcuauagguaccauuugag

SEQ ID NO: 1224807 - RNA, 19 nt, Artificial Sequence
  Description of Artificial Sequence: Synthetic oligonucleotide
aaacacugaagaaggggau

SEQ ID NO: 1224808 - RNA, 19 nt, Artificial Sequence
  Description of Artificial Sequence: Synthetic oligonucleotide
agagcagauaaggcuaucu

SEQ ID NO: 1224809 - RNA, 19 nt, Artificial Sequence
  Description of Artificial Sequence: Synthetic oligonucleotide
acguaguagcucuaagaau

SEQ ID NO: 1224810 - RNA, 19 nt, Artificial Sequence
  Description of Artificial Sequence: Synthetic oligonucleotide
cauuuaucaagguguaugu

SEQ ID NO: 1224811 - RNA, 19 nt, Artificial Sequence
  Description of Artificial Sequence: Synthetic oligonucleotide
gcuaucuuuuccuucagaa

SEQ ID NO: 1224812 - RNA, 19 nt, Artificial Sequence
  Description of Artificial Sequence: Synthetic oligonucleotide
uaaagggaauguguacagu

SEQ ID NO: 1224813 - RNA, 19 nt, Artificial Sequence
  Description of Artificial Sequence: Synthetic oligonucleotide
acaacuguuuucaaucuua

SEQ ID NO: 1224814 - RNA, 19 nt, Artificial Sequence
  Description of Artificial Sequence: Synthetic oligonucleotide
aagagcagauaaggcuauc

SEQ ID NO: 1224815 - RNA, 19 nt, Artificial Sequence
  Description of Artificial Sequence: Synthetic oligonucleotide
gaguuucaaaaggcguucc

SEQ ID NO: 1224816 - RNA, 19 nt, Artificial Sequence
  Description of Artificial Sequence: Synthetic oligonucleotide
auaaggcuaucuuuuccuu

SEQ ID NO: 1224817 - RNA, 19 nt, Artificial Sequence
  Description of Artificial Sequence: Synthetic oligonucleotide
guuacuguacccucauugu

SEQ ID NO: 1224818 - RNA, 19 nt, Artificial Sequence
  Description of Artificial Sequence: Synthetic oligonucleotide
uuucccuacuggaaacgua

SEQ ID NO: 1224819 - RNA, 19 nt, Artificial Sequence
  Description of Artificial Sequence: Synthetic oligonucleotide
cugacuauaaaugaaugau

SEQ ID NO: 1224820 - RNA, 19 nt, Artificial Sequence
  Description of Artificial Sequence: Synthetic oligonucleotide
uuaguggaguucugcacuu

SEQ ID NO: 1224821 - RNA, 19 nt, Artificial Sequence
  Description of Artificial Sequence: Synthetic oligonucleotide
cuucaagacagccuaugaa

SEQ ID NO: 1224822 - RNA, 19 nt, Artificial Sequence
  Description of Artificial Sequence: Synthetic oligonucleotide
acaaugaucaccaccccua

SEQ ID NO: 1224823 - RNA, 19 nt, Artificial Sequence
  Description of Artificial Sequence: Synthetic oligonucleotide
cauuguacugccauaacuu

SEQ ID NO: 1224824 - RNA, 19 nt, Artificial Sequence
  Description of Artificial Sequence: Synthetic oligonucleotide
acaugaauaggcagacugu

SEQ ID NO: 1224825 - RNA, 19 nt, Artificial Sequence
  Description of Artificial Sequence: Synthetic oligonucleotide
auguucguuaagguccaag

SEQ ID NO: 1224826 - RNA, 19 nt, Artificial Sequence
  Description of Artificial Sequence: Synthetic oligonucleotide
guguguagagccucucuca

SEQ ID NO: 1224827 - RNA, 19 nt, Artificial Sequence
  Description of Artificial Sequence: Synthetic oligonucleotide
aggcguuccuuucacugca

SEQ ID NO: 1224828 - RNA, 19 nt, Artificial Sequence
  Description of Artificial Sequence: Synthetic oligonucleotide
cuaucagagugagucauga

SEQ ID NO: 1224829 - RNA, 19 nt, Artificial Sequence
  Description of Artificial Sequence: Synthetic oligonucleotide
gaucaagagcagaaaacua

SEQ ID NO: 1224830 - RNA, 19 nt, Artificial Sequence
  Description of Artificial Sequence: Synthetic oligonucleotide
aaguuaagccaaacuccca

SEQ ID NO: 1224831 - RNA, 19 nt, Artificial Sequence
  Description of Artificial Sequence: Synthetic oligonucleotide
cauuagacagaggcauccc

SEQ ID NO: 1224832 - RNA, 19 nt, Artificial Sequence
  Description of Artificial Sequence: Synthetic oligonucleotide
cccuaagucuguuuauugc

SEQ ID NO: 1224833 - RNA, 19 nt, Artificial Sequence
  Description of Artificial Sequence: Synthetic oligonucleotide
ucccuuaguggaguucugc

SEQ ID NO: 1224834 - RNA, 19 nt, Artificial Sequence
  Description of Artificial Sequence: Synthetic oligonucleotide
acccucauuguacugccau

SEQ ID NO: 1224835 - RNA, 19 nt, Artificial Sequence
  Description of Artificial Sequence: Synthetic oligonucleotide
uguggggaucaagagcaga

SEQ ID NO: 1224836 - RNA, 19 nt, Artificial Sequence
  Description of Artificial Sequence: Synthetic oligonucleotide
ggcuauagguaccauuuga

SEQ ID NO: 1224837 - RNA, 19 nt, Artificial Sequence
  Description of Artificial Sequence: Synthetic oligonucleotide
uacuuggcccuccaaugua

SEQ ID NO: 1224838 - RNA, 19 nt, Artificial Sequence
  Description of Artificial Sequence: Synthetic oligonucleotide
cuggaaacguaguagcucu

SEQ ID NO: 1224839 - RNA, 19 nt, Artificial Sequence
  Description of Artificial Sequence: Synthetic oligonucleotide
uuacacgaguauugggguu

SEQ ID NO: 1224840 - RNA, 19 nt, Artificial Sequence
  Description of Artificial Sequence: Synthetic oligonucleotide
ggcccuccaauguaaauac

SEQ ID NO: 1224841 - RNA, 19 nt, Artificial Sequence
  Description of Artificial Sequence: Synthetic oligonucleotide
ugcccaaccuguguguaga

SEQ ID NO: 1224842 - RNA, 19 nt, Artificial Sequence
  Description of Artificial Sequence: Synthetic oligonucleotide
uggcccuccaauguaaaua

SEQ ID NO: 1224843 - RNA, 19 nt, Artificial Sequence
  Description of Artificial Sequence: Synthetic oligonucleotide
cuucuaucagagugaguca

SEQ ID NO: 1224844 - RNA, 19 nt, Artificial Sequence
  Description of Artificial Sequence: Synthetic oligonucleotide
augcugagcaauacaauau

SEQ ID NO: 1224845 - RNA, 19 nt, Artificial Sequence
  Description of Artificial Sequence: Synthetic oligonucleotide
acuuccgagaagauguaaa

SEQ ID NO: 1224846 - RNA, 19 nt, Artificial Sequence
  Description of Artificial Sequence: Synthetic oligonucleotide
auuauguauuauguucguu

SEQ ID NO: 1224847 - RNA, 19 nt, Artificial Sequence
  Description of Artificial Sequence: Synthetic oligonucleotide
gggaucaagagcagaaaac

SEQ ID NO: 1224848 - RNA, 19 nt, Artificial Sequence
  Description of Artificial Sequence: Synthetic oligonucleotide
caagcacauuagacagagg

SEQ ID NO: 1224849 - RNA, 19 nt, Artificial Sequence
  Description of Artificial Sequence: Synthetic oligonucleotide
aggugaaccuucacaaacu

SEQ ID NO: 1224850 - RNA, 19 nt, Artificial Sequence
  Description of Artificial Sequence: Synthetic oligonucleotide
aggaguuucaaaaggcguu

SEQ ID NO: 1224851 - RNA, 19 nt, Artificial Sequence
  Description of Artificial Sequence: Synthetic oligonucleotide
gucuauacuaagacucaca

SEQ ID NO: 1224852 - RNA, 19 nt, Artificial Sequence
  Description of Artificial Sequence: Synthetic oligonucleotide
auucugcuuuauagaaguc

SEQ ID NO: 1224853 - RNA, 19 nt, Artificial Sequence
  Description of Artificial Sequence: Synthetic oligonucleotide
gucgagcuguucccagugg

SEQ ID NO: 1224854 - RNA, 19 nt, Artificial Sequence
  Description of Artificial Sequence: Synthetic oligonucleotide
cuccaauguaaauaccucu

SEQ ID NO: 1224855 - RNA, 19 nt, Artificial Sequence
  Description of Artificial Sequence: Synthetic oligonucleotide
guagcucuaagaauuuugu

SEQ ID NO: 1224856 - RNA, 19 nt, Artificial Sequence
  Description of Artificial Sequence: Synthetic oligonucleotide
aguucacuaacuacucuuu

SEQ ID NO: 1224857 - RNA, 19 nt, Artificial Sequence
  Description of Artificial Sequence: Synthetic oligonucleotide
agcuuccccaugucacaag

SEQ ID NO: 1224858 - RNA, 19 nt, Artificial Sequence
  Description of Artificial Sequence: Synthetic oligonucleotide
gucagccacauaccacggc

SEQ ID NO: 1224859 - RNA, 19 nt, Artificial Sequence
  Description of Artificial Sequence: Synthetic oligonucleotide
uuaauugguuuagcagcuu

SEQ ID NO: 1224860 - RNA, 19 nt, Artificial Sequence
  Description of Artificial Sequence: Synthetic oligonucleotide
caggaguuucaaaaggcgu

SEQ ID NO: 1224861 - RNA, 19 nt, Artificial Sequence
  Description of Artificial Sequence: Synthetic oligonucleotide
auaccacggcuguucauua

SEQ ID NO: 1224862 - RNA, 19 nt, Artificial Sequence
  Description of Artificial Sequence: Synthetic oligonucleotide
cauaaugcccauucacuau

SEQ ID NO: 1224863 - RNA, 19 nt, Artificial Sequence
  Description of Artificial Sequence: Synthetic oligonucleotide
ggaguuucaaaaggcguuc

SEQ ID NO: 1224864 - RNA, 19 nt, Artificial Sequence
  Description of Artificial Sequence: Synthetic oligonucleotide
cugcccaaccuguguguag

SEQ ID NO: 1224865 - RNA, 19 nt, Artificial Sequence
  Description of Artificial Sequence: Synthetic oligonucleotide
aguuggucuacaacuguuu

SEQ ID NO: 1224866 - RNA, 19 nt, Artificial Sequence
  Description of Artificial Sequence: Synthetic oligonucleotide
uuggcccuccaauguaaau

SEQ ID NO: 1224867 - RNA, 19 nt, Artificial Sequence
  Description of Artificial Sequence: Synthetic oligonucleotide
gacagccuaugaaggacca

SEQ ID NO: 1224868 - RNA, 19 nt, Artificial Sequence
  Description of Artificial Sequence: Synthetic oligonucleotide
acuguacuccauagucgag

SEQ ID NO: 1224869 - RNA, 19 nt, Artificial Sequence
  Description of Artificial Sequence: Synthetic oligonucleotide
uaccacggcuguucauuac

SEQ ID NO: 1224870 - RNA, 19 nt, Artificial Sequence
  Description of Artificial Sequence: Synthetic oligonucleotide
uacccugaucaggaguuuc

SEQ ID NO: 1224871 - RNA, 19 nt, Artificial Sequence
  Description of Artificial Sequence: Synthetic oligonucleotide
uacccucauuguacugcca

SEQ ID NO: 1224872 - RNA, 19 nt, Artificial Sequence
  Description of Artificial Sequence: Synthetic oligonucleotide
gucuacaacuguuuucaau

SEQ ID NO: 1224873 - RNA, 19 nt, Artificial Sequence
  Description of Artificial Sequence: Synthetic oligonucleotide
guaagauaccugccugucu

SEQ ID NO: 1224874 - RNA, 19 nt, Artificial Sequence
  Description of Artificial Sequence: Synthetic oligonucleotide
cuguacccucauuguacug

SEQ ID NO: 1224875 - RNA, 19 nt, Artificial Sequence
  Description of Artificial Sequence: Synthetic oligonucleotide
acuaagacucacacauuua

SEQ ID NO: 1224876 - RNA, 19 nt, Artificial Sequence
  Description of Artificial Sequence: Synthetic oligonucleotide
agcuguucccaguggguua

SEQ ID NO: 1224877 - RNA, 19 nt, Artificial Sequence
  Description of Artificial Sequence: Synthetic oligonucleotide
gcugagcaauacaauauga

SEQ ID NO: 1224878 - RNA, 19 nt, Artificial Sequence
  Description of Artificial Sequence: Synthetic oligonucleotide
guacuuggcccuccaaugu

SEQ ID NO: 1224879 - RNA, 19 nt, Artificial Sequence
  Description of Artificial Sequence: Synthetic oligonucleotide
guggcuauagguaccauuu

SEQ ID NO: 1224880 - RNA, 19 nt, Artificial Sequence
  Description of Artificial Sequence: Synthetic oligonucleotide
uaguagcucuaagaauuuu

SEQ ID NO: 1224881 - RNA, 19 nt, Artificial Sequence
  Description of Artificial Sequence: Synthetic oligonucleotide
aaacuuccgagaagaugua

SEQ ID NO: 1224882 - RNA, 19 nt, Artificial Sequence
  Description of Artificial Sequence: Synthetic oligonucleotide
guguagagccucucucaga

SEQ ID NO: 1224883 - RNA, 19 nt, Artificial Sequence
  Description of Artificial Sequence: Synthetic oligonucleotide
cugacucagagccuugacu

SEQ ID NO: 1224884 - RNA, 19 nt, Artificial Sequence
  Description of Artificial Sequence: Synthetic oligonucleotide
gagcagauaaggcuaucuu

SEQ ID NO: 1224885 - RNA, 19 nt, Artificial Sequence
  Description of Artificial Sequence: Synthetic oligonucleotide
caguucacuaacuacucuu

SEQ ID NO: 1224886 - RNA, 19 nt, Artificial Sequence
  Description of Artificial Sequence: Synthetic oligonucleotide
gguccuaguuucuuacaaa

SEQ ID NO: 1224887 - RNA, 19 nt, Artificial Sequence
  Description of Artificial Sequence: Synthetic oligonucleotide
ccuaaacuacuugaaauaa

SEQ ID NO: 1224888 - RNA, 19 nt, Artificial Sequence
  Description of Artificial Sequence: Synthetic oligonucleotide
cagagccuugacuguaaga

SEQ ID NO: 1224889 - RNA, 19 nt, Artificial Sequence
  Description of Artificial Sequence: Synthetic oligonucleotide
gccuaugaaggaccaguac

SEQ ID NO: 1224890 - RNA, 19 nt, Artificial Sequence
  Description of Artificial Sequence: Synthetic oligonucleotide
cccagauuauguauuaugu

SEQ ID NO: 1224891 - RNA, 19 nt, Artificial Sequence
  Description of Artificial Sequence: Synthetic oligonucleotide
uaccucacugugggcaacu

SEQ ID NO: 1224892 - RNA, 19 nt, Artificial Sequence
  Description of Artificial Sequence: Synthetic oligonucleotide
gggaauaaguacacucaga

SEQ ID NO: 1224893 - RNA, 19 nt, Artificial Sequence
  Description of Artificial Sequence: Synthetic oligonucleotide
acauaccacggcuguucau

SEQ ID NO: 1224894 - RNA, 19 nt, Artificial Sequence
  Description of Artificial Sequence: Synthetic oligonucleotide
ccuaagucuguuuauugcu

SEQ ID NO: 1224895 - RNA, 19 nt, Artificial Sequence
  Description of Artificial Sequence: Synthetic oligonucleotide
cugguccuaguuucuuaca

SEQ ID NO: 1224896 - RNA, 19 nt, Artificial Sequence
  Description of Artificial Sequence: Synthetic oligonucleotide
caaugaucaccaccccuaa

SEQ ID NO: 1224897 - RNA, 19 nt, Artificial Sequence
  Description of Artificial Sequence: Synthetic oligonucleotide
cuguucauuacacgaguau

SEQ ID NO: 1224898 - RNA, 19 nt, Artificial Sequence
  Description of Artificial Sequence: Synthetic oligonucleotide
guaccauuugagguugucu

SEQ ID NO: 1224899 - RNA, 19 nt, Artificial Sequence
  Description of Artificial Sequence: Synthetic oligonucleotide
acacaugaauaggcagacu

SEQ ID NO: 1224900 - RNA, 19 nt, Artificial Sequence
  Description of Artificial Sequence: Synthetic oligonucleotide
cguaguagcucuaagaauu

SEQ ID NO: 1224901 - RNA, 19 nt, Artificial Sequence
  Description of Artificial Sequence: Synthetic oligonucleotide
gcuugcaauuauaggcagc

SEQ ID NO: 1224902 - RNA, 19 nt, Artificial Sequence
  Description of Artificial Sequence: Synthetic oligonucleotide
ggguuaggagccuugcucu

SEQ ID NO: 1224903 - RNA, 19 nt, Artificial Sequence
  Description of Artificial Sequence: Synthetic oligonucleotide
caucccuuaguggaguucu

SEQ ID NO: 1224904 - RNA, 19 nt, Artificial Sequence
  Description of Artificial Sequence: Synthetic oligonucleotide
ccauaacuucuaagcuggg

SEQ ID NO: 1224905 - RNA, 19 nt, Artificial Sequence
  Description of Artificial Sequence: Synthetic oligonucleotide
cagugcaguucacuaacua

SEQ ID NO: 1224906 - RNA, 19 nt, Artificial Sequence
  Description of Artificial Sequence: Synthetic oligonucleotide
gcuuuaucuuauaacauuu

SEQ ID NO: 1224907 - RNA, 19 nt, Artificial Sequence
  Description of Artificial Sequence: Synthetic oligonucleotide
accucuuauuucacauuau

SEQ ID NO: 1224908 - RNA, 19 nt, Artificial Sequence
  Description of Artificial Sequence: Synthetic oligonucleotide
aggcaucccuuaguggagu

SEQ ID NO: 1224909 - RNA, 19 nt, Artificial Sequence
  Description of Artificial Sequence: Synthetic oligonucleotide
cacuaacuacucuuucccu

SEQ ID NO: 1224910 - RNA, 19 nt, Artificial Sequence
  Description of Artificial Sequence: Synthetic oligonucleotide
cuuggcccuccaauguaaa

SEQ ID NO: 1224911 - RNA, 19 nt, Artificial Sequence
  Description of Artificial Sequence: Synthetic oligonucleotide
uccgaacaccauggagcug

SEQ ID NO: 1224912 - RNA, 19 nt, Artificial Sequence
  Description of Artificial Sequence: Synthetic oligonucleotide
ggaaacguaguagcucuaa

SEQ ID NO: 1224913 - RNA, 19 nt, Artificial Sequence
  Description of Artificial Sequence: Synthetic oligonucleotide
agccuaugaaggaccagua

SEQ ID NO: 1224914 - RNA, 19 nt, Artificial Sequence
  Description of Artificial Sequence: Synthetic oligonucleotide
cccuccaauguaaauaccu

SEQ ID NO: 1224915 - RNA, 19 nt, Artificial Sequence
  Description of Artificial Sequence: Synthetic oligonucleotide
agcauaugucagccacaua

SEQ ID NO: 1224916 - RNA, 19 nt, Artificial Sequence
  Description of Artificial Sequence: Synthetic oligonucleotide
cguuaagguccaagcaaac

SEQ ID NO: 1224917 - RNA, 19 nt, Artificial Sequence
  Description of Artificial Sequence: Synthetic oligonucleotide
cauaccacggcuguucauu

SEQ ID NO: 1224918 - RNA, 19 nt, Artificial Sequence
  Description of Artificial Sequence: Synthetic oligonucleotide
caaccuguguguagagccu

SEQ ID NO: 1224919 - RNA, 19 nt, Artificial Sequence
  Description of Artificial Sequence: Synthetic oligonucleotide
cuauaggcugguccuaguu

SEQ ID NO: 1224920 - RNA, 19 nt, Artificial Sequence
  Description of Artificial Sequence: Synthetic oligonucleotide
cuuucccuacuggaaacgu

SEQ ID NO: 1224921 - RNA, 19 nt, Artificial Sequence
  Description of Artificial Sequence: Synthetic oligonucleotide
ggugaaccuucacaaacuu

SEQ ID NO: 1224922 - RNA, 19 nt, Artificial Sequence
  Description of Artificial Sequence: Synthetic oligonucleotide
aucccuuaguggaguucug

SEQ ID NO: 1224923 - RNA, 19 nt, Artificial Sequence
  Description of Artificial Sequence: Synthetic oligonucleotide
ccucauuuaucaaggugua

SEQ ID NO: 1224924 - RNA, 19 nt, Artificial Sequence
  Description of Artificial Sequence: Synthetic oligonucleotide
gcccaaccuguguguagag

SEQ ID NO: 1224925 - RNA, 19 nt, Artificial Sequence
  Description of Artificial Sequence: Synthetic oligonucleotide
acacgaguauugggguuua

SEQ ID NO: 1224926 - RNA, 19 nt, Artificial Sequence
  Description of Artificial Sequence: Synthetic oligonucleotide
cccaaccuguguguagagc

SEQ ID NO: 1224927 - RNA, 19 nt, Artificial Sequence
  Description of Artificial Sequence: Synthetic oligonucleotide
gguuaggagccuugcucua

SEQ ID NO: 1224928 - RNA, 19 nt, Artificial Sequence
  Description of Artificial Sequence: Synthetic oligonucleotide
cacgaguauugggguuuac

SEQ ID NO: 1224929 - RNA, 19 nt, Artificial Sequence
  Description of Artificial Sequence: Synthetic oligonucleotide
ccgaacaccauggagcugu

SEQ ID NO: 1224930 - RNA, 19 nt, Artificial Sequence
  Description of Artificial Sequence: Synthetic oligonucleotide
gugaaccuucacaaacuuu

SEQ ID NO: 1224931 - RNA, 19 nt, Artificial Sequence
  Description of Artificial Sequence: Synthetic oligonucleotide
cucauuuaucaagguguau

SEQ ID NO: 1224932 - RNA, 19 nt, Artificial Sequence
  Description of Artificial Sequence: Synthetic oligonucleotide
gcaucccuuaguggaguuc

SEQ ID NO: 1224933 - RNA, 19 nt, Artificial Sequence
  Description of Artificial Sequence: Synthetic oligonucleotide
cccuacuggaaacguagua

SEQ ID NO: 1224934 - RNA, 19 nt, Artificial Sequence
  Description of Artificial Sequence: Synthetic oligonucleotide
caccccuaagucuguuuau

SEQ ID NO: 1224935 - RNA, 19 nt, Artificial Sequence
  Description of Artificial Sequence: Synthetic oligonucleotide
ccaaagauccgaacaccau

SEQ ID NO: 1224936 - RNA, 19 nt, Artificial Sequence
  Description of Artificial Sequence: Synthetic oligonucleotide
ggcaucccuuaguggaguu

SEQ ID NO: 1224937 - RNA, 19 nt, Artificial Sequence
  Description of Artificial Sequence: Synthetic oligonucleotide
cuacccugaucaggaguuu

SEQ ID NO: 1224938 - RNA, 19 nt, Artificial Sequence
  Description of Artificial Sequence: Synthetic oligonucleotide
ccugcccaaccugugugua

SEQ ID NO: 1224939 - RNA, 19 nt, Artificial Sequence
  Description of Artificial Sequence: Synthetic oligonucleotide
caccaccccuaagucuguu

SEQ ID NO: 1224940 - RNA, 19 nt, Artificial Sequence
  Description of Artificial Sequence: Synthetic oligonucleotide
uauuuugcuaaauucaacg

SEQ ID NO: 1224941 - RNA, 19 nt, Artificial Sequence
  Description of Artificial Sequence: Synthetic oligonucleotide
aauugaaagaaucaguuau

SEQ ID NO: 1224942 - RNA, 19 nt, Artificial Sequence
  Description of Artificial Sequence: Synthetic oligonucleotide
uaaaauugacaaaagaagu

SEQ ID NO: 1224943 - RNA, 19 nt, Artificial Sequence
  Description of Artificial Sequence: Synthetic oligonucleotide
uuucagaucaaucacuugc

SEQ ID NO: 1224944 - RNA, 19 nt, Artificial Sequence
  Description of Artificial Sequence: Synthetic oligonucleotide
uauagaaccacuuguaccc

SEQ ID NO: 1224945 - RNA, 19 nt, Artificial Sequence
  Description of Artificial Sequence: Synthetic oligonucleotide
uuuaucuugcacuuuacag

SEQ ID NO: 1224946 - RNA, 19 nt, Artificial Sequence
  Description of Artificial Sequence: Synthetic oligonucleotide
gaaagaaucaguuauaaua

SEQ ID NO: 1224947 - RNA, 19 nt, Artificial Sequence
  Description of Artificial Sequence: Synthetic oligonucleotide
uugacaguuguuaaagugg

SEQ ID NO: 1224948 - RNA, 19 nt, Artificial Sequence
  Description of Artificial Sequence: Synthetic oligonucleotide
guuauuaccaucuauagaa

SEQ ID NO: 1224949 - RNA, 19 nt, Artificial Sequence
  Description of Artificial Sequence: Synthetic oligonucleotide
aaucuuaagauccuuuaca

SEQ ID NO: 1224950 - RNA, 19 nt, Artificial Sequence
  Description of Artificial Sequence: Synthetic oligonucleotide
gguacguccacucugaugg

SEQ ID NO: 1224951 - RNA, 19 nt, Artificial Sequence
  Description of Artificial Sequence: Synthetic oligonucleotide
aaggguuucagaucaauca

SEQ ID NO: 1224952 - RNA, 19 nt, Artificial Sequence
  Description of Artificial Sequence: Synthetic oligonucleotide
acuuuaauuuaucuugcac

SEQ ID NO: 1224953 - RNA, 19 nt, Artificial Sequence
  Description of Artificial Sequence: Synthetic oligonucleotide
uaauaguuuacagauaucu

SEQ ID NO: 1224954 - RNA, 19 nt, Artificial Sequence
  Description of Artificial Sequence: Synthetic oligonucleotide
auaguuuacagauaucugu

SEQ ID NO: 1224955 - RNA, 19 nt, Artificial Sequence
  Description of Artificial Sequence: Synthetic oligonucleotide
gauuaaagaaguucaaguc

SEQ ID NO: 1224956 - RNA, 19 nt, Artificial Sequence
  Description of Artificial Sequence: Synthetic oligonucleotide
uuugauuacaagcugguua

SEQ ID NO: 1224957 - RNA, 19 nt, Artificial Sequence
  Description of Artificial Sequence: Synthetic oligonucleotide
aaugcgaggagauguuugg

SEQ ID NO: 1224958 - RNA, 19 nt, Artificial Sequence
  Description of Artificial Sequence: Synthetic oligonucleotide
aaaaucaucucguccccgg

SEQ ID NO: 1224959 - RNA, 19 nt, Artificial Sequence
  Description of Artificial Sequence: Synthetic oligonucleotide
ugauauaucuucucaagac

SEQ ID NO: 1224960 - RNA, 19 nt, Artificial Sequence
  Description of Artificial Sequence: Synthetic oligonucleotide
ugacaguuguuaaaguggg

SEQ ID NO: 1224961 - RNA, 19 nt, Artificial Sequence
  Description of Artificial Sequence: Synthetic oligonucleotide
aagaaauagagucgggugu

SEQ ID NO: 1224962 - RNA, 19 nt, Artificial Sequence
  Description of Artificial Sequence: Synthetic oligonucleotide
uuaucuugcacuuuacaga

SEQ ID NO: 1224963 - RNA, 19 nt, Artificial Sequence
  Description of Artificial Sequence: Synthetic oligonucleotide
aagggaacgacaccccgcc

SEQ ID NO: 1224964 - RNA, 19 nt, Artificial Sequence
  Description of Artificial Sequence: Synthetic oligonucleotide
uaagaaauagagucgggug

SEQ ID NO: 1224965 - RNA, 19 nt, Artificial Sequence
  Description of Artificial Sequence: Synthetic oligonucleotide
aacaaauuuccucuucucu

SEQ ID NO: 1224966 - RNA, 19 nt, Artificial Sequence
  Description of Artificial Sequence: Synthetic oligonucleotide
cauaauauccaggucaucc

SEQ ID NO: 1224967 - RNA, 19 nt, Artificial Sequence
  Description of Artificial Sequence: Synthetic oligonucleotide
uuaaagaaguucaagucau

SEQ ID NO: 1224968 - RNA, 19 nt, Artificial Sequence
  Description of Artificial Sequence: Synthetic oligonucleotide
agaccggucagcuucagac

SEQ ID NO: 1224969 - RNA, 19 nt, Artificial Sequence
  Description of Artificial Sequence: Synthetic oligonucleotide
uccuuugauuacaagcugg

SEQ ID NO: 1224970 - RNA, 19 nt, Artificial Sequence
  Description of Artificial Sequence: Synthetic oligonucleotide
ucuccagcaaccauauccg

SEQ ID NO: 1224971 - RNA, 19 nt, Artificial Sequence
  Description of Artificial Sequence: Synthetic oligonucleotide
auuaguuagcuuuggcacg

SEQ ID NO: 1224972 - RNA, 19 nt, Artificial Sequence
  Description of Artificial Sequence: Synthetic oligonucleotide
cuauagaaccacuuguacc

SEQ ID NO: 1224973 - RNA, 19 nt, Artificial Sequence
  Description of Artificial Sequence: Synthetic oligonucleotide
uauuaccaucuauagaacc

SEQ ID NO: 1224974 - RNA, 19 nt, Artificial Sequence
  Description of Artificial Sequence: Synthetic oligonucleotide
agaucaaauugaaagaauc

SEQ ID NO: 1224975 - RNA, 19 nt, Artificial Sequence
  Description of Artificial Sequence: Synthetic oligonucleotide
ucacuuucaaucuuaagau

SEQ ID NO: 1224976 - RNA, 19 nt, Artificial Sequence
  Description of Artificial Sequence: Synthetic oligonucleotide
uauguauagucucuuucug

SEQ ID NO: 1224977 - RNA, 19 nt, Artificial Sequence
  Description of Artificial Sequence: Synthetic oligonucleotide
uguuaaagugggcaaugag

SEQ ID NO: 1224978 - RNA, 19 nt, Artificial Sequence
  Description of Artificial Sequence: Synthetic oligonucleotide
auauguauagucucuuucu

SEQ ID NO: 1224979 - RNA, 19 nt, Artificial Sequence
  Description of Artificial Sequence: Synthetic oligonucleotide
gauauaucuucucaagaca

SEQ ID NO: 1224980 - RNA, 19 nt, Artificial Sequence
  Description of Artificial Sequence: Synthetic oligonucleotide
aagggugggacgucagacc

SEQ ID NO: 1224981 - RNA, 19 nt, Artificial Sequence
  Description of Artificial Sequence: Synthetic oligonucleotide
uugagugucggcaucuugc

SEQ ID NO: 1224982 - RNA, 19 nt, Artificial Sequence
  Description of Artificial Sequence: Synthetic oligonucleotide
uucagaucaaucacuugcc

SEQ ID NO: 1224983 - RNA, 19 nt, Artificial Sequence
  Description of Artificial Sequence: Synthetic oligonucleotide
uagcaaauuaguuagcuuu

SEQ ID NO: 1224984 - RNA, 19 nt, Artificial Sequence
  Description of Artificial Sequence: Synthetic oligonucleotide
aaagugggcaaugaguaug

SEQ ID NO: 1224985 - RNA, 19 nt, Artificial Sequence
  Description of Artificial Sequence: Synthetic oligonucleotide
uacaagcugguuauuacca

SEQ ID NO: 1224986 - RNA, 19 nt, Artificial Sequence
  Description of Artificial Sequence: Synthetic oligonucleotide
aagaaguucaagucaucca

SEQ ID NO: 1224987 - RNA, 19 nt, Artificial Sequence
  Description of Artificial Sequence: Synthetic oligonucleotide
uugauuacaagcugguuau

SEQ ID NO: 1224988 - RNA, 19 nt, Artificial Sequence
  Description of Artificial Sequence: Synthetic oligonucleotide
uccaguauuugccaguuuc

SEQ ID NO: 1224989 - RNA, 19 nt, Artificial Sequence
  Description of Artificial Sequence: Synthetic oligonucleotide
uuacaagcugguuauuacc

SEQ ID NO: 1224990 - RNA, 19 nt, Artificial Sequence
  Description of Artificial Sequence: Synthetic oligonucleotide
gguuucauaacaaauuucc

SEQ ID NO: 1224991 - RNA, 19 nt, Artificial Sequence
  Description of Artificial Sequence: Synthetic oligonucleotide
gaugguaaccuguccagcc

SEQ ID NO: 1224992 - RNA, 19 nt, Artificial Sequence
  Description of Artificial Sequence: Synthetic oligonucleotide
aagucuaugaacgauuuua

SEQ ID NO: 1224993 - RNA, 19 nt, Artificial Sequence
  Description of Artificial Sequence: Synthetic oligonucleotide
uugacgauguaauaguuua

SEQ ID NO: 1224994 - RNA, 19 nt, Artificial Sequence
  Description of Artificial Sequence: Synthetic oligonucleotide
aauaguuuacagauaucug

SEQ ID NO: 1224995 - RNA, 19 nt, Artificial Sequence
  Description of Artificial Sequence: Synthetic oligonucleotide
uuuggguugacgauguaau

SEQ ID NO: 1224996 - RNA, 19 nt, Artificial Sequence
  Description of Artificial Sequence: Synthetic oligonucleotide
ucuuaagauccuuuacacc

SEQ ID NO: 1224997 - RNA, 19 nt, Artificial Sequence
  Description of Artificial Sequence: Synthetic oligonucleotide
auuuugcuaaauucaacga

SEQ ID NO: 1224998 - RNA, 19 nt, Artificial Sequence
  Description of Artificial Sequence: Synthetic oligonucleotide
uuaguuagcuuuggcacgg

SEQ ID NO: 1224999 - RNA, 19 nt, Artificial Sequence
  Description of Artificial Sequence: Synthetic oligonucleotide
cuuaagauccuuuacaccu

SEQ ID NO: 1225000 - RNA, 19 nt, Artificial Sequence
  Description of Artificial Sequence: Synthetic oligonucleotide
ucggguguccuucuguagg

SEQ ID NO: 1225001 - RNA, 19 nt, Artificial Sequence
  Description of Artificial Sequence: Synthetic oligonucleotide
aaaucuccaccacacauuu

SEQ ID NO: 1225002 - RNA, 19 nt, Artificial Sequence
  Description of Artificial Sequence: Synthetic oligonucleotide
uggguugacgauguaauag

SEQ ID NO: 1225003 - RNA, 19 nt, Artificial Sequence
  Description of Artificial Sequence: Synthetic oligonucleotide
uggugauuagcaaauuagu

SEQ ID NO: 1225004 - RNA, 19 nt, Artificial Sequence
  Description of Artificial Sequence: Synthetic oligonucleotide
auuguguccggugaucggc

SEQ ID NO: 1225005 - RNA, 19 nt, Artificial Sequence
  Description of Artificial Sequence: Synthetic oligonucleotide
aaagggaacgacaccccgc

SEQ ID NO: 1225006 - RNA, 19 nt, Artificial Sequence
  Description of Artificial Sequence: Synthetic oligonucleotide
cucaugauguugaacacuc

SEQ ID NO: 1225007 - RNA, 19 nt, Artificial Sequence
  Description of Artificial Sequence: Synthetic oligonucleotide
ucagcgaaagggaacgaca

SEQ ID NO: 1225008 - RNA, 19 nt, Artificial Sequence
  Description of Artificial Sequence: Synthetic oligonucleotide
gaaagggaacgacaccccg

SEQ ID NO: 1225009 - RNA, 19 nt, Artificial Sequence
  Description of Artificial Sequence: Synthetic oligonucleotide
acgauguaauaguuuacag

SEQ ID NO: 1225010 - RNA, 19 nt, Artificial Sequence
  Description of Artificial Sequence: Synthetic oligonucleotide
agaucaaucacuugccaaa

SEQ ID NO: 1225011 - RNA, 19 nt, Artificial Sequence
  Description of Artificial Sequence: Synthetic oligonucleotide
cuaggcucuugcaucagcg

SEQ ID NO: 1225012 - RNA, 19 nt, Artificial Sequence
  Description of Artificial Sequence: Synthetic oligonucleotide
auuagcaaauuaguuagcu

SEQ ID NO: 1225013 - RNA, 19 nt, Artificial Sequence
  Description of Artificial Sequence: Synthetic oligonucleotide
auggugauuagcaaauuag

SEQ ID NO: 1225014 - RNA, 19 nt, Artificial Sequence
  Description of Artificial Sequence: Synthetic oligonucleotide
auaauauccaggucauccu

SEQ ID NO: 1225015 - RNA, 19 nt, Artificial Sequence
  Description of Artificial Sequence: Synthetic oligonucleotide
uaccccaucacguuugaca

SEQ ID NO: 1225016 - RNA, 19 nt, Artificial Sequence
  Description of Artificial Sequence: Synthetic oligonucleotide
gauguuuggguugacgaug

SEQ ID NO: 1225017 - RNA, 19 nt, Artificial Sequence
  Description of Artificial Sequence: Synthetic oligonucleotide
uguuucaacucagugguac

SEQ ID NO: 1225018 - RNA, 19 nt, Artificial Sequence
  Description of Artificial Sequence: Synthetic oligonucleotide
uuauuaccaucuauagaac

SEQ ID NO: 1225019 - RNA, 19 nt, Artificial Sequence
  Description of Artificial Sequence: Synthetic oligonucleotide
agcaaccauauccggauuc

SEQ ID NO: 1225020 - RNA, 19 nt, Artificial Sequence
  Description of Artificial Sequence: Synthetic oligonucleotide
gaacacucgguucagcaac

SEQ ID NO: 1225021 - RNA, 19 nt, Artificial Sequence
  Description of Artificial Sequence: Synthetic oligonucleotide
aaucaauggugauuagcaa

SEQ ID NO: 1225022 - RNA, 19 nt, Artificial Sequence
  Description of Artificial Sequence: Synthetic oligonucleotide
uuuugcucauaguaggauc

SEQ ID NO: 1225023 - RNA, 19 nt, Artificial Sequence
  Description of Artificial Sequence: Synthetic oligonucleotide
agaaucaguuauaauaacu

SEQ ID NO: 1225024 - RNA, 19 nt, Artificial Sequence
  Description of Artificial Sequence: Synthetic oligonucleotide
ucaacucagugguacgucc

SEQ ID NO: 1225025 - RNA, 19 nt, Artificial Sequence
  Description of Artificial Sequence: Synthetic oligonucleotide
auguugaacacucgguuca

SEQ ID NO: 1225026 - RNA, 19 nt, Artificial Sequence
  Description of Artificial Sequence: Synthetic oligonucleotide
ugugugacaagugacguau

SEQ ID NO: 1225027 - RNA, 19 nt, Artificial Sequence
  Description of Artificial Sequence: Synthetic oligonucleotide
auuuaucuugcacuuuaca

SEQ ID NO: 1225028 - RNA, 19 nt, Artificial Sequence
  Description of Artificial Sequence: Synthetic oligonucleotide
uuacagauaucuguaaaau

SEQ ID NO: 1225029 - RNA, 19 nt, Artificial Sequence
  Description of Artificial Sequence: Synthetic oligonucleotide
uugaaagaaucaguuauaa

SEQ ID NO: 1225030 - RNA, 19 nt, Artificial Sequence
  Description of Artificial Sequence: Synthetic oligonucleotide
agggugggacgucagaccg

SEQ ID NO: 1225031 - RNA, 19 nt, Artificial Sequence
  Description of Artificial Sequence: Synthetic oligonucleotide
uuccuuugauuacaagcug

SEQ ID NO: 1225032 - RNA, 19 nt, Artificial Sequence
  Description of Artificial Sequence: Synthetic oligonucleotide
ugugacaagugacguauuc

SEQ ID NO: 1225033 - RNA, 19 nt, Artificial Sequence
  Description of Artificial Sequence: Synthetic oligonucleotide
auuaccaucuauagaacca

SEQ ID NO: 1225034 - RNA, 19 nt, Artificial Sequence
  Description of Artificial Sequence: Synthetic oligonucleotide
uccucauauguauagucuc

SEQ ID NO: 1225035 - RNA, 19 nt, Artificial Sequence
  Description of Artificial Sequence: Synthetic oligonucleotide
agcgaaagggaacgacacc

SEQ ID NO: 1225036 - RNA, 19 nt, Artificial Sequence
  Description of Artificial Sequence: Synthetic oligonucleotide
cuaucuuguguuucaacuc

SEQ ID NO: 1225037 - RNA, 19 nt, Artificial Sequence
  Description of Artificial Sequence: Synthetic oligonucleotide
ucagaucaaucacuugcca

SEQ ID NO: 1225038 - RNA, 19 nt, Artificial Sequence
  Description of Artificial Sequence: Synthetic oligonucleotide
auauccggauucuuuucuc

SEQ ID NO: 1225039 - RNA, 19 nt, Artificial Sequence
  Description of Artificial Sequence: Synthetic oligonucleotide
ucucaagacauuuucuauu

SEQ ID NO: 1225040 - RNA, 19 nt, Artificial Sequence
  Description of Artificial Sequence: Synthetic oligonucleotide
ugggacgucagaccgguca

SEQ ID NO: 1225041 - RNA, 19 nt, Artificial Sequence
  Description of Artificial Sequence: Synthetic oligonucleotide
ucuugguuccuacucggac

SEQ ID NO: 1225042 - RNA, 19 nt, Artificial Sequence
  Description of Artificial Sequence: Synthetic oligonucleotide
uccuacucggacaaccugu

SEQ ID NO: 1225043 - RNA, 19 nt, Artificial Sequence
  Description of Artificial Sequence: Synthetic oligonucleotide
agcaucgagaaugacaagu

SEQ ID NO: 1225044 - RNA, 19 nt, Artificial Sequence
  Description of Artificial Sequence: Synthetic oligonucleotide
caaucuuaagauccuuuac

SEQ ID NO: 1225045 - RNA, 19 nt, Artificial Sequence
  Description of Artificial Sequence: Synthetic oligonucleotide
aaaugcgaggagauguuug

SEQ ID NO: 1225046 - RNA, 19 nt, Artificial Sequence
  Description of Artificial Sequence: Synthetic oligonucleotide
ucagaccccggacucggcg

SEQ ID NO: 1225047 - RNA, 19 nt, Artificial Sequence
  Description of Artificial Sequence: Synthetic oligonucleotide
uguggagguuucauaacaa

SEQ ID NO: 1225048 - RNA, 19 nt, Artificial Sequence
  Description of Artificial Sequence: Synthetic oligonucleotide
acucggacaaccuguggag

SEQ ID NO: 1225049 - RNA, 19 nt, Artificial Sequence
  Description of Artificial Sequence: Synthetic oligonucleotide
gaucaaucacuugccaaag

SEQ ID NO: 1225050 - RNA, 19 nt, Artificial Sequence
  Description of Artificial Sequence: Synthetic oligonucleotide
gacgauguaauaguuuaca

SEQ ID NO: 1225051 - RNA, 19 nt, Artificial Sequence
  Description of Artificial Sequence: Synthetic oligonucleotide
cugaugguaaccuguccag

SEQ ID NO: 1225052 - RNA, 19 nt, Artificial Sequence
  Description of Artificial Sequence: Synthetic oligonucleotide
uacagauaucuguaaaauu

SEQ ID NO: 1225053 - RNA, 19 nt, Artificial Sequence
  Description of Artificial Sequence: Synthetic oligonucleotide
gauuguguccggugaucgg

SEQ ID NO: 1225054 - RNA, 19 nt, Artificial Sequence
  Description of Artificial Sequence: Synthetic oligonucleotide
ugaaagaaucaguuauaau

SEQ ID NO: 1225055 - RNA, 19 nt, Artificial Sequence
  Description of Artificial Sequence: Synthetic oligonucleotide
ucuauuuguuucuguugga

SEQ ID NO: 1225056 - RNA, 19 nt, Artificial Sequence
  Description of Artificial Sequence: Synthetic oligonucleotide
ugcaucagcgaaagggaac

SEQ ID NO: 1225057 - RNA, 19 nt, Artificial Sequence
  Description of Artificial Sequence: Synthetic oligonucleotide
aguggguucggcaagggug

SEQ ID NO: 1225058 - RNA, 19 nt, Artificial Sequence
  Description of Artificial Sequence: Synthetic oligonucleotide
agccaaaucuccaccacac

SEQ ID NO: 1225059 - RNA, 19 nt, Artificial Sequence
  Description of Artificial Sequence: Synthetic oligonucleotide
uaucuguaaaauugacaaa

SEQ ID NO: 1225060 - RNA, 19 nt, Artificial Sequence
  Description of Artificial Sequence: Synthetic oligonucleotide
auagagucggguguccuuc

SEQ ID NO: 1225061 - RNA, 19 nt, Artificial Sequence
  Description of Artificial Sequence: Synthetic oligonucleotide
uaacucaagagaaguugaa

SEQ ID NO: 1225062 - RNA, 19 nt, Artificial Sequence
  Description of Artificial Sequence: Synthetic oligonucleotide
ucacguuugacaguuguua

SEQ ID NO: 1225063 - RNA, 19 nt, Artificial Sequence
  Description of Artificial Sequence: Synthetic oligonucleotide
ugcgguucuaguggguucg

SEQ ID NO: 1225064 - RNA, 19 nt, Artificial Sequence
  Description of Artificial Sequence: Synthetic oligonucleotide
uugguuccuacucggacaa

SEQ ID NO: 1225065 - RNA, 19 nt, Artificial Sequence
  Description of Artificial Sequence: Synthetic oligonucleotide
cacuugccaaagaacuugg

SEQ ID NO: 1225066 - RNA, 19 nt, Artificial Sequence
  Description of Artificial Sequence: Synthetic oligonucleotide
cacuuguacccaauucugc

SEQ ID NO: 1225067 - RNA, 19 nt, Artificial Sequence
  Description of Artificial Sequence: Synthetic oligonucleotide
agguuucauaacaaauuuc

SEQ ID NO: 1225068 - RNA, 19 nt, Artificial Sequence
  Description of Artificial Sequence: Synthetic oligonucleotide
cuggcaacagagcaucgag

SEQ ID NO: 1225069 - RNA, 19 nt, Artificial Sequence
  Description of Artificial Sequence: Synthetic oligonucleotide
aguuuacagauaucuguaa

SEQ ID NO: 1225070 - RNA, 19 nt, Artificial Sequence
  Description of Artificial Sequence: Synthetic oligonucleotide
uaaagaaguucaagucauc

SEQ ID NO: 1225071 - RNA, 19 nt, Artificial Sequence
  Description of Artificial Sequence: Synthetic oligonucleotide
uccggauucuuuucucuca

SEQ ID NO: 1225072 - RNA, 19 nt, Artificial Sequence
  Description of Artificial Sequence: Synthetic oligonucleotide
ugacaaguuucacacugua

SEQ ID NO: 1225073 - RNA, 19 nt, Artificial Sequence
  Description of Artificial Sequence: Synthetic oligonucleotide
cugguuauuaccaucuaua

SEQ ID NO: 1225074 - RNA, 19 nt, Artificial Sequence
  Description of Artificial Sequence: Synthetic oligonucleotide
ugagugucggcaucuugca

SEQ ID NO: 1225075 - RNA, 19 nt, Artificial Sequence
  Description of Artificial Sequence: Synthetic oligonucleotide
cuaccgacagcucucccag

SEQ ID NO: 1225076 - RNA, 19 nt, Artificial Sequence
  Description of Artificial Sequence: Synthetic oligonucleotide
uuaagauccuuuacaccuu

SEQ ID NO: 1225077 - RNA, 19 nt, Artificial Sequence
  Description of Artificial Sequence: Synthetic oligonucleotide
aucucguccccggacaugg

SEQ ID NO: 1225078 - RNA, 19 nt, Artificial Sequence
  Description of Artificial Sequence: Synthetic oligonucleotide
gauuagcaaauuaguuagc

SEQ ID NO: 1225079 - RNA, 19 nt, Artificial Sequence
  Description of Artificial Sequence: Synthetic oligonucleotide
gaaugaaaugccaucgucu

SEQ ID NO: 1225080 - RNA, 19 nt, Artificial Sequence
  Description of Artificial Sequence: Synthetic oligonucleotide
caaggguuucagaucaauc

SEQ ID NO: 1225081 - RNA, 19 nt, Artificial Sequence
  Description of Artificial Sequence: Synthetic oligonucleotide
uaaccuguccagccaaauc

SEQ ID NO: 1225082 - RNA, 19 nt, Artificial Sequence
  Description of Artificial Sequence: Synthetic oligonucleotide
ugccaguuucugaggacag

SEQ ID NO: 1225083 - RNA, 19 nt, Artificial Sequence
  Description of Artificial Sequence: Synthetic oligonucleotide
cagcgaaagggaacgacac

SEQ ID NO: 1225084 - RNA, 19 nt, Artificial Sequence
  Description of Artificial Sequence: Synthetic oligonucleotide
caagcugguuauuaccauc

SEQ ID NO: 1225085 - RNA, 19 nt, Artificial Sequence
  Description of Artificial Sequence: Synthetic oligonucleotide
cucggcgaagcuccuaccg

SEQ ID NO: 1225086 - RNA, 19 nt, Artificial Sequence
  Description of Artificial Sequence: Synthetic oligonucleotide
aucggcaugugugacaagu

SEQ ID NO: 1225087 - RNA, 19 nt, Artificial Sequence
  Description of Artificial Sequence: Synthetic oligonucleotide
gugacaagugacguauucc

SEQ ID NO: 1225088 - RNA, 19 nt, Artificial Sequence
  Description of Artificial Sequence: Synthetic oligonucleotide
aaauagagucggguguccu

SEQ ID NO: 1225089 - RNA, 19 nt, Artificial Sequence
  Description of Artificial Sequence: Synthetic oligonucleotide
agauguuuggguugacgau

SEQ ID NO: 1225090 - RNA, 19 nt, Artificial Sequence
  Description of Artificial Sequence: Synthetic oligonucleotide
guaggauuguguccgguga

SEQ ID NO: 1225091 - RNA, 19 nt, Artificial Sequence
  Description of Artificial Sequence: Synthetic oligonucleotide
cuugguuccuacucggaca

SEQ ID NO: 1225092 - RNA, 19 nt, Artificial Sequence
  Description of Artificial Sequence: Synthetic oligonucleotide
agcuccuaccgacagcucu

SEQ ID NO: 1225093 - RNA, 19 nt, Artificial Sequence
  Description of Artificial Sequence: Synthetic oligonucleotide
uuugccaguuucugaggac

SEQ ID NO: 1225094 - RNA, 19 nt, Artificial Sequence
  Description of Artificial Sequence: Synthetic oligonucleotide
guauuuugcuaaauucaac

SEQ ID NO: 1225095 - RNA, 19 nt, Artificial Sequence
  Description of Artificial Sequence: Synthetic oligonucleotide
uacccaauucugccaauaa

SEQ ID NO: 1225096 - RNA, 19 nt, Artificial Sequence
  Description of Artificial Sequence: Synthetic oligonucleotide
agugacguauuccuugaua

SEQ ID NO: 1225097 - RNA, 19 nt, Artificial Sequence
  Description of Artificial Sequence: Synthetic oligonucleotide
ucggacaaccuguggaggu

SEQ ID NO: 1225098 - RNA, 19 nt, Artificial Sequence
  Description of Artificial Sequence: Synthetic oligonucleotide
ugaucggcaugugugacaa

SEQ ID NO: 1225099 - RNA, 19 nt, Artificial Sequence
  Description of Artificial Sequence: Synthetic oligonucleotide
gaaauagagucgggugucc

SEQ ID NO: 1225100 - RNA, 19 nt, Artificial Sequence
  Description of Artificial Sequence: Synthetic oligonucleotide
aguuuugaugcuggcaaca

SEQ ID NO: 1225101 - RNA, 19 nt, Artificial Sequence
  Description of Artificial Sequence: Synthetic oligonucleotide
gauuacaagcugguuauua

SEQ ID NO: 1225102 - RNA, 19 nt, Artificial Sequence
  Description of Artificial Sequence: Synthetic oligonucleotide
uaaagugggcaaugaguau

SEQ ID NO: 1225103 - RNA, 19 nt, Artificial Sequence
  Description of Artificial Sequence: Synthetic oligonucleotide
ucggcaugugugacaagug

SEQ ID NO: 1225104 - RNA, 19 nt, Artificial Sequence
  Description of Artificial Sequence: Synthetic oligonucleotide
gagguuucauaacaaauuu

SEQ ID NO: 1225105 - RNA, 19 nt, Artificial Sequence
  Description of Artificial Sequence: Synthetic oligonucleotide
cuaaauucaacgagcauuu

SEQ ID NO: 1225106 - RNA, 19 nt, Artificial Sequence
  Description of Artificial Sequence: Synthetic oligonucleotide
uaccaucuauagaaccacu

SEQ ID NO: 1225107 - RNA, 19 nt, Artificial Sequence
  Description of Artificial Sequence: Synthetic oligonucleotide
uugcaucagcgaaagggaa

SEQ ID NO: 1225108 - RNA, 19 nt, Artificial Sequence
  Description of Artificial Sequence: Synthetic oligonucleotide
gguuauuaccaucuauaga

SEQ ID NO: 1225109 - RNA, 19 nt, Artificial Sequence
  Description of Artificial Sequence: Synthetic oligonucleotide
agccaguuuugaugcuggc

SEQ ID NO: 1225110 - RNA, 19 nt, Artificial Sequence
  Description of Artificial Sequence: Synthetic oligonucleotide
ugaugguaaccuguccagc

SEQ ID NO: 1225111 - RNA, 19 nt, Artificial Sequence
  Description of Artificial Sequence: Synthetic oligonucleotide
gcaucagcgaaagggaacg

SEQ ID NO: 1225112 - RNA, 19 nt, Artificial Sequence
  Description of Artificial Sequence: Synthetic oligonucleotide
guggguucggcaagggugg

SEQ ID NO: 1225113 - RNA, 19 nt, Artificial Sequence
  Description of Artificial Sequence: Synthetic oligonucleotide
ugguacguccacucugaug

SEQ ID NO: 1225114 - RNA, 19 nt, Artificial Sequence
  Description of Artificial Sequence: Synthetic oligonucleotide
ucggcaucuugcaaggguu

SEQ ID NO: 1225115 - RNA, 19 nt, Artificial Sequence
  Description of Artificial Sequence: Synthetic oligonucleotide
aucaaucacuugccaaaga

SEQ ID NO: 1225116 - RNA, 19 nt, Artificial Sequence
  Description of Artificial Sequence: Synthetic oligonucleotide
augguaaccuguccagcca

SEQ ID NO: 1225117 - RNA, 19 nt, Artificial Sequence
  Description of Artificial Sequence: Synthetic oligonucleotide
gacucggcgaagcuccuac

SEQ ID NO: 1225118 - RNA, 19 nt, Artificial Sequence
  Description of Artificial Sequence: Synthetic oligonucleotide
uucuugguuccuacucgga

SEQ ID NO: 1225119 - RNA, 19 nt, Artificial Sequence
  Description of Artificial Sequence: Synthetic oligonucleotide
caucuauagaaccacuugu

SEQ ID NO: 1225120 - RNA, 19 nt, Artificial Sequence
  Description of Artificial Sequence: Synthetic oligonucleotide
aaaaugcgaggagauguuu

SEQ ID NO: 1225121 - RNA, 19 nt, Artificial Sequence
  Description of Artificial Sequence: Synthetic oligonucleotide
gacguauuccuugauauau

SEQ ID NO: 1225122 - RNA, 19 nt, Artificial Sequence
  Description of Artificial Sequence: Synthetic oligonucleotide
gcgaaagggaacgacaccc

SEQ ID NO: 1225123 - RNA, 19 nt, Artificial Sequence
  Description of Artificial Sequence: Synthetic oligonucleotide
ucggcgaagcuccuaccga

SEQ ID NO: 1225124 - RNA, 19 nt, Artificial Sequence
  Description of Artificial Sequence: Synthetic oligonucleotide
uuguguccggugaucggca

SEQ ID NO: 1225125 - RNA, 19 nt, Artificial Sequence
  Description of Artificial Sequence: Synthetic oligonucleotide
acuugccaaagaacuuggc

SEQ ID NO: 1225126 - RNA, 19 nt, Artificial Sequence
  Description of Artificial Sequence: Synthetic oligonucleotide
auugaaagaaucaguuaua

SEQ ID NO: 1225127 - RNA, 19 nt, Artificial Sequence
  Description of Artificial Sequence: Synthetic oligonucleotide
ggauuguguccggugaucg

SEQ ID NO: 1225128 - RNA, 19 nt, Artificial Sequence
  Description of Artificial Sequence: Synthetic oligonucleotide
acccaauucugccaauaaa

SEQ ID NO: 1225129 - RNA, 19 nt, Artificial Sequence
  Description of Artificial Sequence: Synthetic oligonucleotide
acguuugacaguuguuaaa

SEQ ID NO: 1225130 - RNA, 19 nt, Artificial Sequence
  Description of Artificial Sequence: Synthetic oligonucleotide
gaagcuccuaccgacagcu

SEQ ID NO: 1225131 - RNA, 19 nt, Artificial Sequence
  Description of Artificial Sequence: Synthetic oligonucleotide
uaggauuguguccggugau

SEQ ID NO: 1225132 - RNA, 19 nt, Artificial Sequence
  Description of Artificial Sequence: Synthetic oligonucleotide
acaagcugguuauuaccau

SEQ ID NO: 1225133 - RNA, 19 nt, Artificial Sequence
  Description of Artificial Sequence: Synthetic oligonucleotide
agcucucccaggcccgcgc

SEQ ID NO: 1225134 - RNA, 19 nt, Artificial Sequence
  Description of Artificial Sequence: Synthetic oligonucleotide
agucugguuacugaaugaa

SEQ ID NO: 1225135 - RNA, 19 nt, Artificial Sequence
  Description of Artificial Sequence: Synthetic oligonucleotide
aaccuguggagguuucaua

SEQ ID NO: 1225136 - RNA, 19 nt, Artificial Sequence
  Description of Artificial Sequence: Synthetic oligonucleotide
ugcuggcaacagagcaucg

SEQ ID NO: 1225137 - RNA, 19 nt, Artificial Sequence
  Description of Artificial Sequence: Synthetic oligonucleotide
cucugaugguaaccugucc

SEQ ID NO: 1225138 - RNA, 19 nt, Artificial Sequence
  Description of Artificial Sequence: Synthetic oligonucleotide
ugcccaagcaggcccaguc

SEQ ID NO: 1225139 - RNA, 19 nt, Artificial Sequence
  Description of Artificial Sequence: Synthetic oligonucleotide
agucuaugaacgauuuuaa

SEQ ID NO: 1225140 - RNA, 19 nt, Artificial Sequence
  Description of Artificial Sequence: Synthetic oligonucleotide
caagugacguauuccuuga

SEQ ID NO: 1225141 - RNA, 19 nt, Artificial Sequence
  Description of Artificial Sequence: Synthetic oligonucleotide
cagugguacguccacucug

SEQ ID NO: 1225142 - RNA, 19 nt, Artificial Sequence
  Description of Artificial Sequence: Synthetic oligonucleotide
agcauaauauccaggucau

SEQ ID NO: 1225143 - RNA, 19 nt, Artificial Sequence
  Description of Artificial Sequence: Synthetic oligonucleotide
caguuuugaugcuggcaac

SEQ ID NO: 1225144 - RNA, 19 nt, Artificial Sequence
  Description of Artificial Sequence: Synthetic oligonucleotide
gacaguuguuaaagugggc

SEQ ID NO: 1225145 - RNA, 19 nt, Artificial Sequence
  Description of Artificial Sequence: Synthetic oligonucleotide
aucuauagaaccacuugua

SEQ ID NO: 1225146 - RNA, 19 nt, Artificial Sequence
  Description of Artificial Sequence: Synthetic oligonucleotide
ccaucuauagaaccacuug

SEQ ID NO: 1225147 - RNA, 19 nt, Artificial Sequence
  Description of Artificial Sequence: Synthetic oligonucleotide
uucaacucagugguacguc

SEQ ID NO: 1225148 - RNA, 19 nt, Artificial Sequence
  Description of Artificial Sequence: Synthetic oligonucleotide
cagaucaaucacuugccaa

SEQ ID NO: 1225149 - RNA, 19 nt, Artificial Sequence
  Description of Artificial Sequence: Synthetic oligonucleotide
agaagucuaugaacgauuu

SEQ ID NO: 1225150 - RNA, 19 nt, Artificial Sequence
  Description of Artificial Sequence: Synthetic oligonucleotide
ggagauguuuggguugacg

SEQ ID NO: 1225151 - RNA, 19 nt, Artificial Sequence
  Description of Artificial Sequence: Synthetic oligonucleotide
uuggguugacgauguaaua

SEQ ID NO: 1225152 - RNA, 19 nt, Artificial Sequence
  Description of Artificial Sequence: Synthetic oligonucleotide
agugguacguccacucuga

SEQ ID NO: 1225153 - RNA, 19 nt, Artificial Sequence
  Description of Artificial Sequence: Synthetic oligonucleotide
uccuuaccccaucacguuu

SEQ ID NO: 1225154 - RNA, 19 nt, Artificial Sequence
  Description of Artificial Sequence: Synthetic oligonucleotide
uaguggguucggcaagggu

SEQ ID NO: 1225155 - RNA, 19 nt, Artificial Sequence
  Description of Artificial Sequence: Synthetic oligonucleotide
gguucuaguggguucggca

SEQ ID NO: 1225156 - RNA, 19 nt, Artificial Sequence
  Description of Artificial Sequence: Synthetic oligonucleotide
agggaacgacaccccgccc

SEQ ID NO: 1225157 - RNA, 19 nt, Artificial Sequence
  Description of Artificial Sequence: Synthetic oligonucleotide
ugucaacagcuugaguguc

SEQ ID NO: 1225158 - RNA, 19 nt, Artificial Sequence
  Description of Artificial Sequence: Synthetic oligonucleotide
gcucuagccauguaacuca

SEQ ID NO: 1225159 - RNA, 19 nt, Artificial Sequence
  Description of Artificial Sequence: Synthetic oligonucleotide
cucggacaaccuguggagg

SEQ ID NO: 1225160 - RNA, 19 nt, Artificial Sequence
  Description of Artificial Sequence: Synthetic oligonucleotide
cguuugacaguuguuaaag

SEQ ID NO: 1225161 - RNA, 19 nt, Artificial Sequence
  Description of Artificial Sequence: Synthetic oligonucleotide
gacaaguuucacacuguaa

SEQ ID NO: 1225162 - RNA, 19 nt, Artificial Sequence
  Description of Artificial Sequence: Synthetic oligonucleotide
auguuuggguugacgaugu

SEQ ID NO: 1225163 - RNA, 19 nt, Artificial Sequence
  Description of Artificial Sequence: Synthetic oligonucleotide
caguuguuaaagugggcaa

SEQ ID NO: 1225164 - RNA, 19 nt, Artificial Sequence
  Description of Artificial Sequence: Synthetic oligonucleotide
gcccgugacagccuggaag

SEQ ID NO: 1225165 - RNA, 19 nt, Artificial Sequence
  Description of Artificial Sequence: Synthetic oligonucleotide
guggagguuucauaacaaa

SEQ ID NO: 1225166 - RNA, 19 nt, Artificial Sequence
  Description of Artificial Sequence: Synthetic oligonucleotide
ccacuuguacccaauucug

SEQ ID NO: 1225167 - RNA, 19 nt, Artificial Sequence
  Description of Artificial Sequence: Synthetic oligonucleotide
cacguuugacaguuguuaa

SEQ ID NO: 1225168 - RNA, 19 nt, Artificial Sequence
  Description of Artificial Sequence: Synthetic oligonucleotide
gagcugugcucgcuugccc

SEQ ID NO: 1225169 - RNA, 19 nt, Artificial Sequence
  Description of Artificial Sequence: Synthetic oligonucleotide
auagaaccacuuguaccca

SEQ ID NO: 1225170 - RNA, 19 nt, Artificial Sequence
  Description of Artificial Sequence: Synthetic oligonucleotide
cuccucauauguauagucu

SEQ ID NO: 1225171 - RNA, 19 nt, Artificial Sequence
  Description of Artificial Sequence: Synthetic oligonucleotide
ccggugaucggcaugugug

SEQ ID NO: 1225172 - RNA, 19 nt, Artificial Sequence
  Description of Artificial Sequence: Synthetic oligonucleotide
ugcucauaguaggaucaaa

SEQ ID NO: 1225173 - RNA, 19 nt, Artificial Sequence
  Description of Artificial Sequence: Synthetic oligonucleotide
ugugcucgcuugcccguga

SEQ ID NO: 1225174 - RNA, 19 nt, Artificial Sequence
  Description of Artificial Sequence: Synthetic oligonucleotide
uguccuucuguaggauugu

SEQ ID NO: 1225175 - RNA, 19 nt, Artificial Sequence
  Description of Artificial Sequence: Synthetic oligonucleotide
guucggcaagggugggacg

SEQ ID NO: 1225176 - RNA, 19 nt, Artificial Sequence
  Description of Artificial Sequence: Synthetic oligonucleotide
augugugacaagugacgua

SEQ ID NO: 1225177 - RNA, 19 nt, Artificial Sequence
  Description of Artificial Sequence: Synthetic oligonucleotide
ccggacucggcgaagcucc

SEQ ID NO: 1225178 - RNA, 19 nt, Artificial Sequence
  Description of Artificial Sequence: Synthetic oligonucleotide
cauauccggauucuuuucu

SEQ ID NO: 1225179 - RNA, 19 nt, Artificial Sequence
  Description of Artificial Sequence: Synthetic oligonucleotide
caacucagugguacgucca

SEQ ID NO: 1225180 - RNA, 19 nt, Artificial Sequence
  Description of Artificial Sequence: Synthetic oligonucleotide
accaucuauagaaccacuu

SEQ ID NO: 1225181 - RNA, 19 nt, Artificial Sequence
  Description of Artificial Sequence: Synthetic oligonucleotide
uccaggaaccaaguugguu

SEQ ID NO: 1225182 - RNA, 19 nt, Artificial Sequence
  Description of Artificial Sequence: Synthetic oligonucleotide
gugaucggcaugugugaca

SEQ ID NO: 1225183 - RNA, 19 nt, Artificial Sequence
  Description of Artificial Sequence: Synthetic oligonucleotide
uaccgacagcucucccagg

SEQ ID NO: 1225184 - RNA, 19 nt, Artificial Sequence
  Description of Artificial Sequence: Synthetic oligonucleotide
gcucgcuugcccgugacag

SEQ ID NO: 1225185 - RNA, 19 nt, Artificial Sequence
  Description of Artificial Sequence: Synthetic oligonucleotide
cucgcuugcccgugacagc

SEQ ID NO: 1225186 - RNA, 19 nt, Artificial Sequence
  Description of Artificial Sequence: Synthetic oligonucleotide
guccacucugaugguaacc

SEQ ID NO: 1225187 - RNA, 19 nt, Artificial Sequence
  Description of Artificial Sequence: Synthetic oligonucleotide
ugcucgcuugcccgugaca

SEQ ID NO: 1225188 - RNA, 19 nt, Artificial Sequence
  Description of Artificial Sequence: Synthetic oligonucleotide
ccuuaccccaucacguuug

SEQ ID NO: 1225189 - RNA, 19 nt, Artificial Sequence
  Description of Artificial Sequence: Synthetic oligonucleotide
uucagaccccggacucggc

SEQ ID NO: 1225190 - RNA, 19 nt, Artificial Sequence
  Description of Artificial Sequence: Synthetic oligonucleotide
gggacgucagaccggucag

SEQ ID NO: 1225191 - RNA, 19 nt, Artificial Sequence
  Description of Artificial Sequence: Synthetic oligonucleotide
cugaaggacagaucaaauu

SEQ ID NO: 1225192 - RNA, 19 nt, Artificial Sequence
  Description of Artificial Sequence: Synthetic oligonucleotide
ugcaaggguuucagaucaa

SEQ ID NO: 1225193 - RNA, 19 nt, Artificial Sequence
  Description of Artificial Sequence: Synthetic oligonucleotide
gaaccaaguugguuguuuu

SEQ ID NO: 1225194 - RNA, 19 nt, Artificial Sequence
  Description of Artificial Sequence: Synthetic oligonucleotide
uccuaccgacagcucuccc

SEQ ID NO: 1225195 - RNA, 19 nt, Artificial Sequence
  Description of Artificial Sequence: Synthetic oligonucleotide
ccuugauauaucuucucaa

SEQ ID NO: 1225196 - RNA, 19 nt, Artificial Sequence
  Description of Artificial Sequence: Synthetic oligonucleotide
caucacguuugacaguugu

SEQ ID NO: 1225197 - RNA, 19 nt, Artificial Sequence
  Description of Artificial Sequence: Synthetic oligonucleotide
uuggcacggagcugugcuc

SEQ ID NO: 1225198 - RNA, 19 nt, Artificial Sequence
  Description of Artificial Sequence: Synthetic oligonucleotide
aaauggcugcccaguucca

SEQ ID NO: 1225199 - RNA, 19 nt, Artificial Sequence
  Description of Artificial Sequence: Synthetic oligonucleotide
uugcucauaguaggaucaa

SEQ ID NO: 1225200 - RNA, 19 nt, Artificial Sequence
  Description of Artificial Sequence: Synthetic oligonucleotide
uccccggacauggcugcgg

SEQ ID NO: 1225201 - RNA, 19 nt, Artificial Sequence
  Description of Artificial Sequence: Synthetic oligonucleotide
acauggcugcgguucuagu

SEQ ID NO: 1225202 - RNA, 19 nt, Artificial Sequence
  Description of Artificial Sequence: Synthetic oligonucleotide
cugcgguucuaguggguuc

SEQ ID NO: 1225203 - RNA, 19 nt, Artificial Sequence
  Description of Artificial Sequence: Synthetic oligonucleotide
cuuuggcacggagcugugc

SEQ ID NO: 1225204 - RNA, 19 nt, Artificial Sequence
  Description of Artificial Sequence: Synthetic oligonucleotide
gaucggcaugugugacaag

SEQ ID NO: 1225205 - RNA, 19 nt, Artificial Sequence
  Description of Artificial Sequence: Synthetic oligonucleotide
gucggcaucuugcaagggu

SEQ ID NO: 1225206 - RNA, 19 nt, Artificial Sequence
  Description of Artificial Sequence: Synthetic oligonucleotide
uguguccggugaucggcau

SEQ ID NO: 1225207 - RNA, 19 nt, Artificial Sequence
  Description of Artificial Sequence: Synthetic oligonucleotide
gcuaggcucuugcaucagc

SEQ ID NO: 1225208 - RNA, 19 nt, Artificial Sequence
  Description of Artificial Sequence: Synthetic oligonucleotide
caugugugacaagugacgu

SEQ ID NO: 1225209 - RNA, 19 nt, Artificial Sequence
  Description of Artificial Sequence: Synthetic oligonucleotide
aucuugcacuuuacagaag

SEQ ID NO: 1225210 - RNA, 19 nt, Artificial Sequence
  Description of Artificial Sequence: Synthetic oligonucleotide
ccuacucggacaaccugug

SEQ ID NO: 1225211 - RNA, 19 nt, Artificial Sequence
  Description of Artificial Sequence: Synthetic oligonucleotide
acaaccuguggagguuuca

SEQ ID NO: 1225212 - RNA, 19 nt, Artificial Sequence
  Description of Artificial Sequence: Synthetic oligonucleotide
ggugauuagcaaauuaguu

SEQ ID NO: 1225213 - RNA, 19 nt, Artificial Sequence
  Description of Artificial Sequence: Synthetic oligonucleotide
ucucguccccggacauggc

SEQ ID NO: 1225214 - RNA, 19 nt, Artificial Sequence
  Description of Artificial Sequence: Synthetic oligonucleotide
guguccggugaucggcaug

SEQ ID NO: 1225215 - RNA, 19 nt, Artificial Sequence
  Description of Artificial Sequence: Synthetic oligonucleotide
aagcuccuaccgacagcuc

SEQ ID NO: 1225216 - RNA, 19 nt, Artificial Sequence
  Description of Artificial Sequence: Synthetic oligonucleotide
agcugguuauuaccaucua

SEQ ID NO: 1225217 - RNA, 19 nt, Artificial Sequence
  Description of Artificial Sequence: Synthetic oligonucleotide
uggguucggcaaggguggg

SEQ ID NO: 1225218 - RNA, 19 nt, Artificial Sequence
  Description of Artificial Sequence: Synthetic oligonucleotide
gagugucggcaucuugcaa

SEQ ID NO: 1225219 - RNA, 19 nt, Artificial Sequence
  Description of Artificial Sequence: Synthetic oligonucleotide
acguccacucugaugguaa

SEQ ID NO: 1225220 - RNA, 19 nt, Artificial Sequence
  Description of Artificial Sequence: Synthetic oligonucleotide
ugauuacaagcugguuauu

SEQ ID NO: 1225221 - RNA, 19 nt, Artificial Sequence
  Description of Artificial Sequence: Synthetic oligonucleotide
ccauauccggauucuuuuc

SEQ ID NO: 1225222 - RNA, 19 nt, Artificial Sequence
  Description of Artificial Sequence: Synthetic oligonucleotide
cgaaagggaacgacacccc

SEQ ID NO: 1225223 - RNA, 19 nt, Artificial Sequence
  Description of Artificial Sequence: Synthetic oligonucleotide
gagccugcccaagcaggcc

SEQ ID NO: 1225224 - RNA, 19 nt, Artificial Sequence
  Description of Artificial Sequence: Synthetic oligonucleotide
guugacgauguaauaguuu

SEQ ID NO: 1225225 - RNA, 19 nt, Artificial Sequence
  Description of Artificial Sequence: Synthetic oligonucleotide
gacgucagaccggucagcu

SEQ ID NO: 1225226 - RNA, 19 nt, Artificial Sequence
  Description of Artificial Sequence: Synthetic oligonucleotide
aucacguuugacaguuguu

SEQ ID NO: 1225227 - RNA, 19 nt, Artificial Sequence
  Description of Artificial Sequence: Synthetic oligonucleotide
cgaggagauguuuggguug

SEQ ID NO: 1225228 - RNA, 19 nt, Artificial Sequence
  Description of Artificial Sequence: Synthetic oligonucleotide
gcuucagaccccggacucg

SEQ ID NO: 1225229 - RNA, 19 nt, Artificial Sequence
  Description of Artificial Sequence: Synthetic oligonucleotide
caggaaccaaguugguugu

SEQ ID NO: 1225230 - RNA, 19 nt, Artificial Sequence
  Description of Artificial Sequence: Synthetic oligonucleotide
gagucggguguccuucugu

SEQ ID NO: 1225231 - RNA, 19 nt, Artificial Sequence
  Description of Artificial Sequence: Synthetic oligonucleotide
ggugaucggcaugugugac

SEQ ID NO: 1225232 - RNA, 19 nt, Artificial Sequence
  Description of Artificial Sequence: Synthetic oligonucleotide
aggcccagucugguuacug

SEQ ID NO: 1225233 - RNA, 19 nt, Artificial Sequence
  Description of Artificial Sequence: Synthetic oligonucleotide
uaguuagcuuuggcacgga

SEQ ID NO: 1225234 - RNA, 19 nt, Artificial Sequence
  Description of Artificial Sequence: Synthetic oligonucleotide
caguuauaauaacuuuaau

SEQ ID NO: 1225235 - RNA, 19 nt, Artificial Sequence
  Description of Artificial Sequence: Synthetic oligonucleotide
ccuaccgacagcucuccca

SEQ ID NO: 1225236 - RNA, 19 nt, Artificial Sequence
  Description of Artificial Sequence: Synthetic oligonucleotide
cagaccccggacucggcga

SEQ ID NO: 1225237 - RNA, 19 nt, Artificial Sequence
  Description of Artificial Sequence: Synthetic oligonucleotide
gcugguuauuaccaucuau

SEQ ID NO: 1225238 - RNA, 19 nt, Artificial Sequence
  Description of Artificial Sequence: Synthetic oligonucleotide
caucgagaaugacaaguuu

SEQ ID NO: 1225239 - RNA, 19 nt, Artificial Sequence
  Description of Artificial Sequence: Synthetic oligonucleotide
cguauuccuugauauaucu

SEQ ID NO: 1225240 - RNA, 19 nt, Artificial Sequence
  Description of Artificial Sequence: Synthetic oligonucleotide
ggcccagucugguuacuga

SEQ ID NO: 1225241 - RNA, 19 nt, Artificial Sequence
  Description of Artificial Sequence: Synthetic oligonucleotide
ccggacauggcugcgguuc

SEQ ID NO: 1225242 - RNA, 19 nt, Artificial Sequence
  Description of Artificial Sequence: Synthetic oligonucleotide
cgcgcuaggcucuugcauc

SEQ ID NO: 1225243 - RNA, 19 nt, Artificial Sequence
  Description of Artificial Sequence: Synthetic oligonucleotide
ccuuugauuacaagcuggu

SEQ ID NO: 1225244 - RNA, 19 nt, Artificial Sequence
  Description of Artificial Sequence: Synthetic oligonucleotide
ccuccuuaccccaucacgu

SEQ ID NO: 1225245 - RNA, 19 nt, Artificial Sequence
  Description of Artificial Sequence: Synthetic oligonucleotide
cugcucuagccauguaacu

SEQ ID NO: 1225246 - RNA, 19 nt, Artificial Sequence
  Description of Artificial Sequence: Synthetic oligonucleotide
ccucauauguauagucucu

SEQ ID NO: 1225247 - RNA, 19 nt, Artificial Sequence
  Description of Artificial Sequence: Synthetic oligonucleotide
acgucagaccggucagcuu

SEQ ID NO: 1225248 - RNA, 19 nt, Artificial Sequence
  Description of Artificial Sequence: Synthetic oligonucleotide
gucagaccggucagcuuca

SEQ ID NO: 1225249 - RNA, 19 nt, Artificial Sequence
  Description of Artificial Sequence: Synthetic oligonucleotide
cucauauguauagucucuu

SEQ ID NO: 1225250 - RNA, 19 nt, Artificial Sequence
  Description of Artificial Sequence: Synthetic oligonucleotide
cucccaggcccgcgcuagg

SEQ ID NO: 1225251 - RNA, 19 nt, Artificial Sequence
  Description of Artificial Sequence: Synthetic oligonucleotide
gcuggcaacagagcaucga

SEQ ID NO: 1225252 - RNA, 19 nt, Artificial Sequence
  Description of Artificial Sequence: Synthetic oligonucleotide
gugcucgcuugcccgugac

SEQ ID NO: 1225253 - RNA, 19 nt, Artificial Sequence
  Description of Artificial Sequence: Synthetic oligonucleotide
gcccagucugguuacugaa

SEQ ID NO: 1225254 - RNA, 19 nt, Artificial Sequence
  Description of Artificial Sequence: Synthetic oligonucleotide
gcuccuaccgacagcucuc

SEQ ID NO: 1225255 - RNA, 19 nt, Artificial Sequence
  Description of Artificial Sequence: Synthetic oligonucleotide
ggcaagggugggacgucag

SEQ ID NO: 1225256 - RNA, 19 nt, Artificial Sequence
  Description of Artificial Sequence: Synthetic oligonucleotide
caucagcgaaagggaacga

SEQ ID NO: 1225257 - RNA, 19 nt, Artificial Sequence
  Description of Artificial Sequence: Synthetic oligonucleotide
ccggucagcuucagacccc

SEQ ID NO: 1225258 - RNA, 19 nt, Artificial Sequence
  Description of Artificial Sequence: Synthetic oligonucleotide
cuuugauuacaagcugguu

SEQ ID NO: 1225259 - RNA, 19 nt, Artificial Sequence
  Description of Artificial Sequence: Synthetic oligonucleotide
cggcgaagcuccuaccgac

SEQ ID NO: 1225260 - RNA, 19 nt, Artificial Sequence
  Description of Artificial Sequence: Synthetic oligonucleotide
gcaaccauauccggauucu

SEQ ID NO: 1225261 - RNA, 19 nt, Artificial Sequence
  Description of Artificial Sequence: Synthetic oligonucleotide
cgaagcuccuaccgacagc

SEQ ID NO: 1225262 - RNA, 19 nt, Artificial Sequence
  Description of Artificial Sequence: Synthetic oligonucleotide
cucguccccggacauggcu

SEQ ID NO: 1225263 - RNA, 19 nt, Artificial Sequence
  Description of Artificial Sequence: Synthetic oligonucleotide
guccccggacauggcugcg

SEQ ID NO: 1225264 - RNA, 19 nt, Artificial Sequence
  Description of Artificial Sequence: Synthetic oligonucleotide
gcccgcgcuaggcucuugc

SEQ ID NO: 1225265 - RNA, 19 nt, Artificial Sequence
  Description of Artificial Sequence: Synthetic oligonucleotide
cuccuuaccccaucacguu

SEQ ID NO: 1225266 - RNA, 19 nt, Artificial Sequence
  Description of Artificial Sequence: Synthetic oligonucleotide
ggcgaagcuccuaccgaca

SEQ ID NO: 1225267 - RNA, 19 nt, Artificial Sequence
  Description of Artificial Sequence: Synthetic oligonucleotide
ggugggacgucagaccggu

SEQ ID NO: 1225268 - RNA, 19 nt, Artificial Sequence
  Description of Artificial Sequence: Synthetic oligonucleotide
gguugacgauguaauaguu

SEQ ID NO: 1225269 - RNA, 19 nt, Artificial Sequence
  Description of Artificial Sequence: Synthetic oligonucleotide
gcaucgagaaugacaaguu

SEQ ID NO: 1225270 - RNA, 19 nt, Artificial Sequence
  Description of Artificial Sequence: Synthetic oligonucleotide
ccaucacguuugacaguug

SEQ ID NO: 1225271 - RNA, 19 nt, Artificial Sequence
  Description of Artificial Sequence: Synthetic oligonucleotide
guacguccacucugauggu

SEQ ID NO: 1225272 - RNA, 19 nt, Artificial Sequence
  Description of Artificial Sequence: Synthetic oligonucleotide
guccggugaucggcaugug

SEQ ID NO: 1225273 - RNA, 19 nt, Artificial Sequence
  Description of Artificial Sequence: Synthetic oligonucleotide
ccgugacagccuggaagcc

SEQ ID NO: 1225274 - RNA, 19 nt, Artificial Sequence
  Description of Artificial Sequence: Synthetic oligonucleotide
gugguacguccacucugau

SEQ ID NO: 1225275 - RNA, 19 nt, Artificial Sequence
  Description of Artificial Sequence: Synthetic oligonucleotide
cccggacucggcgaagcuc

SEQ ID NO: 1225276 - RNA, 19 nt, Artificial Sequence
  Description of Artificial Sequence: Synthetic oligonucleotide
caggcccgcgcuaggcucu

SEQ ID NO: 1225277 - RNA, 19 nt, Artificial Sequence
  Description of Artificial Sequence: Synthetic oligonucleotide
caaccauauccggauucuu

SEQ ID NO: 1225278 - RNA, 19 nt, Artificial Sequence
  Description of Artificial Sequence: Synthetic oligonucleotide
cacggagcugugcucgcuu

SEQ ID NO: 1225279 - RNA, 19 nt, Artificial Sequence
  Description of Artificial Sequence: Synthetic oligonucleotide
ggacaaccuguggagguuu

SEQ ID NO: 1225280 - RNA, 19 nt, Artificial Sequence
  Description of Artificial Sequence: Synthetic oligonucleotide
gcugcgguucuaguggguu

SEQ ID NO: 1225281 - RNA, 19 nt, Artificial Sequence
  Description of Artificial Sequence: Synthetic oligonucleotide
cagcaaccauauccggauu

SEQ ID NO: 1225282 - RNA, 19 nt, Artificial Sequence
  Description of Artificial Sequence: Synthetic oligonucleotide
ccggauucuuuucucucau

SEQ ID NO: 1225283 - RNA, 19 nt, Artificial Sequence
  Description of Artificial Sequence: Synthetic oligonucleotide
cccgcgcuaggcucuugca

SEQ ID NO: 1225284 - RNA, 19 nt, Artificial Sequence
  Description of Artificial Sequence: Synthetic oligonucleotide
gugggacgucagaccgguc

SEQ ID NO: 1225285 - RNA, 19 nt, Artificial Sequence
  Description of Artificial Sequence: Synthetic oligonucleotide
ggacucggcgaagcuccua

SEQ ID NO: 1225286 - RNA, 19 nt, Artificial Sequence
  Description of Artificial Sequence: Synthetic oligonucleotide
ccccaucacguuugacagu

SEQ ID NO: 1225287 - RNA, 19 nt, Artificial Sequence
  Description of Artificial Sequence: Synthetic oligonucleotide
ccgcgcuaggcucuugcau

SEQ ID NO: 1225288 - RNA, 19 nt, Artificial Sequence
  Description of Artificial Sequence: Synthetic oligonucleotide
ggcugcgguucuagugggu

SEQ ID NO: 1225289 - RNA, 19 nt, Artificial Sequence
  Description of Artificial Sequence: Synthetic oligonucleotide
gcacggagcugugcucgcu

SEQ ID NO: 1225290 - RNA, 19 nt, Artificial Sequence
  Description of Artificial Sequence: Synthetic oligonucleotide
ccccggacauggcugcggu

SEQ ID NO: 1225291 - RNA, 19 nt, Artificial Sequence
  Description of Artificial Sequence: Synthetic oligonucleotide
ggcccgcgcuaggcucuug

SEQ ID NO: 1225292 - RNA, 19 nt, Artificial Sequence
  Description of Artificial Sequence: Synthetic oligonucleotide
ccccggacucggcgaagcu

SEQ ID NO: 1225293 - RNA, 19 nt, Artificial Sequence
  Description of Artificial Sequence: Synthetic oligonucleotide
cggacaaccuguggagguu

SEQ ID NO: 1225294 - RNA, 19 nt, Artificial Sequence
  Description of Artificial Sequence: Synthetic oligonucleotide
cccggacauggcugcgguu

SEQ ID NO: 1225295 - RNA, 19 nt, Artificial Sequence
  Description of Artificial Sequence: Synthetic oligonucleotide
ucacuuaagaggaagaaag

SEQ ID NO: 1225296 - RNA, 19 nt, Artificial Sequence
  Description of Artificial Sequence: Synthetic oligonucleotide
aaagcagaagccuaaacug

SEQ ID NO: 1225297 - RNA, 19 nt, Artificial Sequence
  Description of Artificial Sequence: Synthetic oligonucleotide
acuaagagggcuuucaaac

SEQ ID NO: 1225298 - RNA, 19 nt, Artificial Sequence
  Description of Artificial Sequence: Synthetic oligonucleotide
aaauauauacucguccagc

SEQ ID NO: 1225299 - RNA, 19 nt, Artificial Sequence
  Description of Artificial Sequence: Synthetic oligonucleotide
aguaccaaguaacaguccc

SEQ ID NO: 1225300 - RNA, 19 nt, Artificial Sequence
  Description of Artificial Sequence: Synthetic oligonucleotide
auuagugacaucuggcagc

SEQ ID NO: 1225301 - RNA, 19 nt, Artificial Sequence
  Description of Artificial Sequence: Synthetic oligonucleotide
aggacuugaagcuaccucc

SEQ ID NO: 1225302 - RNA, 19 nt, Artificial Sequence
  Description of Artificial Sequence: Synthetic oligonucleotide
gaggcggugaaguagauag

SEQ ID NO: 1225303 - RNA, 19 nt, Artificial Sequence
  Description of Artificial Sequence: Synthetic oligonucleotide
aacugcauaaccuggccuc

SEQ ID NO: 1225304 - RNA, 19 nt, Artificial Sequence
  Description of Artificial Sequence: Synthetic oligonucleotide
uucuauaugagaucggacu

SEQ ID NO: 1225305 - RNA, 19 nt, Artificial Sequence
  Description of Artificial Sequence: Synthetic oligonucleotide
agugccauaagacugguca

SEQ ID NO: 1225306 - RNA, 19 nt, Artificial Sequence
  Description of Artificial Sequence: Synthetic oligonucleotide
uaugagaucggacuucccc

SEQ ID NO: 1225307 - RNA, 19 nt, Artificial Sequence
  Description of Artificial Sequence: Synthetic oligonucleotide
uguggcuucggccauggcg

SEQ ID NO: 1225308 - RNA, 19 nt, Artificial Sequence
  Description of Artificial Sequence: Synthetic oligonucleotide
uuuucaggaauucacuuaa

SEQ ID NO: 1225309 - RNA, 19 nt, Artificial Sequence
  Description of Artificial Sequence: Synthetic oligonucleotide
aaagcugaauccucauuag

SEQ ID NO: 1225310 - RNA, 19 nt, Artificial Sequence
  Description of Artificial Sequence: Synthetic oligonucleotide
cuagacaugaugcacccgg

SEQ ID NO: 1225311 - RNA, 19 nt, Artificial Sequence
  Description of Artificial Sequence: Synthetic oligonucleotide
gaaauauauacucguccag

SEQ ID NO: 1225312 - RNA, 19 nt, Artificial Sequence
  Description of Artificial Sequence: Synthetic oligonucleotide
acaguacgcacagaaaucc

SEQ ID NO: 1225313 - RNA, 19 nt, Artificial Sequence
  Description of Artificial Sequence: Synthetic oligonucleotide
agcuuuugaaaauccuggc

SEQ ID NO: 1225314 - RNA, 19 nt, Artificial Sequence
  Description of Artificial Sequence: Synthetic oligonucleotide
gaagaaagugacuccuagg

SEQ ID NO: 1225315 - RNA, 19 nt, Artificial Sequence
  Description of Artificial Sequence: Synthetic oligonucleotide
cagcuuuugaaaauccugg

SEQ ID NO: 1225316 - RNA, 19 nt, Artificial Sequence
  Description of Artificial Sequence: Synthetic oligonucleotide
ucauuagugacaucuggca

SEQ ID NO: 1225317 - RNA, 19 nt, Artificial Sequence
  Description of Artificial Sequence: Synthetic oligonucleotide
uuuugugcugccuccacag

SEQ ID NO: 1225318 - RNA, 19 nt, Artificial Sequence
  Description of Artificial Sequence: Synthetic oligonucleotide
cacgucaagguccagagag

SEQ ID NO: 1225319 - RNA, 19 nt, Artificial Sequence
  Description of Artificial Sequence: Synthetic oligonucleotide
agaagaaagugacuccuag

SEQ ID NO: 1225320 - RNA, 19 nt, Artificial Sequence
  Description of Artificial Sequence: Synthetic oligonucleotide
gagggcuaggacuugaagc

SEQ ID NO: 1225321 - RNA, 19 nt, Artificial Sequence
  Description of Artificial Sequence: Synthetic oligonucleotide
acgcacagaaauccaaggc

SEQ ID NO: 1225322 - RNA, 19 nt, Artificial Sequence
  Description of Artificial Sequence: Synthetic oligonucleotide
agucagauuccgcauuggc

SEQ ID NO: 1225323 - RNA, 19 nt, Artificial Sequence
  Description of Artificial Sequence: Synthetic oligonucleotide
aaguaacagucccaacccg

SEQ ID NO: 1225324 - RNA, 19 nt, Artificial Sequence
  Description of Artificial Sequence: Synthetic oligonucleotide
uuccuaacucucuauagca

SEQ ID NO: 1225325 - RNA, 19 nt, Artificial Sequence
  Description of Artificial Sequence: Synthetic oligonucleotide
uggaaaacgggaagcggcg

SEQ ID NO: 1225326 - RNA, 19 nt, Artificial Sequence
  Description of Artificial Sequence: Synthetic oligonucleotide
ugaagcuaccuccacguca

SEQ ID NO: 1225327 - RNA, 19 nt, Artificial Sequence
  Description of Artificial Sequence: Synthetic oligonucleotide
agaaagcagaagccuaaac

SEQ ID NO: 1225328 - RNA, 19 nt, Artificial Sequence
  Description of Artificial Sequence: Synthetic oligonucleotide
ugagagaccugguagcacc

SEQ ID NO: 1225329 - RNA, 19 nt, Artificial Sequence
  Description of Artificial Sequence: Synthetic oligonucleotide
uacgcacagaaauccaagg

SEQ ID NO: 1225330 - RNA, 19 nt, Artificial Sequence
  Description of Artificial Sequence: Synthetic oligonucleotide
agucuagacaugaugcacc

SEQ ID NO: 1225331 - RNA, 19 nt, Artificial Sequence
  Description of Artificial Sequence: Synthetic oligonucleotide
cuggaaaacgggaagcggc

SEQ ID NO: 1225332 - RNA, 19 nt, Artificial Sequence
  Description of Artificial Sequence: Synthetic oligonucleotide
aacucucuauagcacuuag

SEQ ID NO: 1225333 - RNA, 19 nt, Artificial Sequence
  Description of Artificial Sequence: Synthetic oligonucleotide
uccauuuagggcauaugac

SEQ ID NO: 1225334 - RNA, 19 nt, Artificial Sequence
  Description of Artificial Sequence: Synthetic oligonucleotide
ucuauaugagaucggacuu

SEQ ID NO: 1225335 - RNA, 19 nt, Artificial Sequence
  Description of Artificial Sequence: Synthetic oligonucleotide
aagccuaaacugcaagucu

SEQ ID NO: 1225336 - RNA, 19 nt, Artificial Sequence
  Description of Artificial Sequence: Synthetic oligonucleotide
gaaagcagaagccuaaacu

SEQ ID NO: 1225337 - RNA, 19 nt, Artificial Sequence
  Description of Artificial Sequence: Synthetic oligonucleotide
ucuucuauaugagaucgga

SEQ ID NO: 1225338 - RNA, 19 nt, Artificial Sequence
  Description of Artificial Sequence: Synthetic oligonucleotide
agaaauccaaggccggcgg

SEQ ID NO: 1225339 - RNA, 19 nt, Artificial Sequence
  Description of Artificial Sequence: Synthetic oligonucleotide
gacuguacaguacgcacag

SEQ ID NO: 1225340 - RNA, 19 nt, Artificial Sequence
  Description of Artificial Sequence: Synthetic oligonucleotide
aaagugacuccuaggaucu

SEQ ID NO: 1225341 - RNA, 19 nt, Artificial Sequence
  Description of Artificial Sequence: Synthetic oligonucleotide
ucgccgacuguacaguacg

SEQ ID NO: 1225342 - RNA, 19 nt, Artificial Sequence
  Description of Artificial Sequence: Synthetic oligonucleotide
aacucaguggggucacagg

SEQ ID NO: 1225343 - RNA, 19 nt, Artificial Sequence
  Description of Artificial Sequence: Synthetic oligonucleotide
uauaugagaucggacuucc

SEQ ID NO: 1225344 - RNA, 19 nt, Artificial Sequence
  Description of Artificial Sequence: Synthetic oligonucleotide
aaauuacuuccaauucuuc

SEQ ID NO: 1225345 - RNA, 19 nt, Artificial Sequence
  Description of Artificial Sequence: Synthetic oligonucleotide
ucggacuuccccaacaauc

SEQ ID NO: 1225346 - RNA, 19 nt, Artificial Sequence
  Description of Artificial Sequence: Synthetic oligonucleotide
agggcuaggacuugaagcu

SEQ ID NO: 1225347 - RNA, 19 nt, Artificial Sequence
  Description of Artificial Sequence: Synthetic oligonucleotide
uccacgucaagguccagag

SEQ ID NO: 1225348 - RNA, 19 nt, Artificial Sequence
  Description of Artificial Sequence: Synthetic oligonucleotide
uccaaccagcuuaagugag

SEQ ID NO: 1225349 - RNA, 19 nt, Artificial Sequence
  Description of Artificial Sequence: Synthetic oligonucleotide
cauuagugacaucuggcag

SEQ ID NO: 1225350 - RNA, 19 nt, Artificial Sequence
  Description of Artificial Sequence: Synthetic oligonucleotide
cauaagacuggucagcaca

SEQ ID NO: 1225351 - RNA, 19 nt, Artificial Sequence
  Description of Artificial Sequence: Synthetic oligonucleotide
auagucagauuccgcauug

SEQ ID NO: 1225352 - RNA, 19 nt, Artificial Sequence
  Description of Artificial Sequence: Synthetic oligonucleotide
cacuuaagaggaagaaagc

SEQ ID NO: 1225353 - RNA, 19 nt, Artificial Sequence
  Description of Artificial Sequence: Synthetic oligonucleotide
uccacuuucuagcuucaga

SEQ ID NO: 1225354 - RNA, 19 nt, Artificial Sequence
  Description of Artificial Sequence: Synthetic oligonucleotide
uauaaccuccuucacucuc

SEQ ID NO: 1225355 - RNA, 19 nt, Artificial Sequence
  Description of Artificial Sequence: Synthetic oligonucleotide
uacaguacgcacagaaauc

SEQ ID NO: 1225356 - RNA, 19 nt, Artificial Sequence
  Description of Artificial Sequence: Synthetic oligonucleotide
uccgcaucugugaaugcag

SEQ ID NO: 1225357 - RNA, 19 nt, Artificial Sequence
  Description of Artificial Sequence: Synthetic oligonucleotide
ccaaguaacagucccaacc

SEQ ID NO: 1225358 - RNA, 19 nt, Artificial Sequence
  Description of Artificial Sequence: Synthetic oligonucleotide
gccacagaaagucuugucg

SEQ ID NO: 1225359 - RNA, 19 nt, Artificial Sequence
  Description of Artificial Sequence: Synthetic oligonucleotide
uccucaguaagcucagaca

SEQ ID NO: 1225360 - RNA, 19 nt, Artificial Sequence
  Description of Artificial Sequence: Synthetic oligonucleotide
uacgccagcuuauuguuga

SEQ ID NO: 1225361 - RNA, 19 nt, Artificial Sequence
  Description of Artificial Sequence: Synthetic oligonucleotide
cuugucgguuuccauacgc

SEQ ID NO: 1225362 - RNA, 19 nt, Artificial Sequence
  Description of Artificial Sequence: Synthetic oligonucleotide
aaaacgggaagcggcgccg

SEQ ID NO: 1225363 - RNA, 19 nt, Artificial Sequence
  Description of Artificial Sequence: Synthetic oligonucleotide
accugguagcaccaccugc

SEQ ID NO: 1225364 - RNA, 19 nt, Artificial Sequence
  Description of Artificial Sequence: Synthetic oligonucleotide
aagcuaaagccacucugga

SEQ ID NO: 1225365 - RNA, 19 nt, Artificial Sequence
  Description of Artificial Sequence: Synthetic oligonucleotide
agaagccuaaacugcaagu

SEQ ID NO: 1225366 - RNA, 19 nt, Artificial Sequence
  Description of Artificial Sequence: Synthetic oligonucleotide
aguaacagucccaacccgg

SEQ ID NO: 1225367 - RNA, 19 nt, Artificial Sequence
  Description of Artificial Sequence: Synthetic oligonucleotide
uuccaaccagcuuaaguga

SEQ ID NO: 1225368 - RNA, 19 nt, Artificial Sequence
  Description of Artificial Sequence: Synthetic oligonucleotide
caucugugaaugcagcccc

SEQ ID NO: 1225369 - RNA, 19 nt, Artificial Sequence
  Description of Artificial Sequence: Synthetic oligonucleotide
caguuaacccuauggcugg

SEQ ID NO: 1225370 - RNA, 19 nt, Artificial Sequence
  Description of Artificial Sequence: Synthetic oligonucleotide
uaacagucccaacccggcg

SEQ ID NO: 1225371 - RNA, 19 nt, Artificial Sequence
  Description of Artificial Sequence: Synthetic oligonucleotide
uauagcacuuagaaauaua

SEQ ID NO: 1225372 - RNA, 19 nt, Artificial Sequence
  Description of Artificial Sequence: Synthetic oligonucleotide
uugaagugauuauuuuccu

SEQ ID NO: 1225373 - RNA, 19 nt, Artificial Sequence
  Description of Artificial Sequence: Synthetic oligonucleotide
auagcacuuagaaauauau

SEQ ID NO: 1225374 - RNA, 19 nt, Artificial Sequence
  Description of Artificial Sequence: Synthetic oligonucleotide
cagcuuauuguugagcagc

SEQ ID NO: 1225375 - RNA, 19 nt, Artificial Sequence
  Description of Artificial Sequence: Synthetic oligonucleotide
gaagcucuggagcgcaucc

SEQ ID NO: 1225376 - RNA, 19 nt, Artificial Sequence
  Description of Artificial Sequence: Synthetic oligonucleotide
gcuuaagugagagaccugg

SEQ ID NO: 1225377 - RNA, 19 nt, Artificial Sequence
  Description of Artificial Sequence: Synthetic oligonucleotide
uugucgguuuccauacgcc

SEQ ID NO: 1225378 - RNA, 19 nt, Artificial Sequence
  Description of Artificial Sequence: Synthetic oligonucleotide
cuucuauaugagaucggac

SEQ ID NO: 1225379 - RNA, 19 nt, Artificial Sequence
  Description of Artificial Sequence: Synthetic oligonucleotide
ucuaccucccgccgcagug

SEQ ID NO: 1225380 - RNA, 19 nt, Artificial Sequence
  Description of Artificial Sequence: Synthetic oligonucleotide
ugucgguuuccauacgcca

SEQ ID NO: 1225381 - RNA, 19 nt, Artificial Sequence
  Description of Artificial Sequence: Synthetic oligonucleotide
uucacuuaagaggaagaaa

SEQ ID NO: 1225382 - RNA, 19 nt, Artificial Sequence
  Description of Artificial Sequence: Synthetic oligonucleotide
ucgguuuccauacgccagc

SEQ ID NO: 1225383 - RNA, 19 nt, Artificial Sequence
  Description of Artificial Sequence: Synthetic oligonucleotide
gaaccaguggagucacucc

SEQ ID NO: 1225384 - RNA, 19 nt, Artificial Sequence
  Description of Artificial Sequence: Synthetic oligonucleotide
uccuaaaauuacuuccaau

SEQ ID NO: 1225385 - RNA, 19 nt, Artificial Sequence
  Description of Artificial Sequence: Synthetic oligonucleotide
uuccuaaaauuacuuccaa

SEQ ID NO: 1225386 - RNA, 19 nt, Artificial Sequence
  Description of Artificial Sequence: Synthetic oligonucleotide
ugaaguagauagagcugga

SEQ ID NO: 1225387 - RNA, 19 nt, Artificial Sequence
  Description of Artificial Sequence: Synthetic oligonucleotide
uccauacgccagcuuauug

SEQ ID NO: 1225388 - RNA, 19 nt, Artificial Sequence
  Description of Artificial Sequence: Synthetic oligonucleotide
uuagugacaucuggcagcu

SEQ ID NO: 1225389 - RNA, 19 nt, Artificial Sequence
  Description of Artificial Sequence: Synthetic oligonucleotide
acugcauaaccuggccucc

SEQ ID NO: 1225390 - RNA, 19 nt, Artificial Sequence
  Description of Artificial Sequence: Synthetic oligonucleotide
ugaagccugcgcacggucc

SEQ ID NO: 1225391 - RNA, 19 nt, Artificial Sequence
  Description of Artificial Sequence: Synthetic oligonucleotide
agcacugcauaccacuggu

SEQ ID NO: 1225392 - RNA, 19 nt, Artificial Sequence
  Description of Artificial Sequence: Synthetic oligonucleotide
guuuccauacgccagcuua

SEQ ID NO: 1225393 - RNA, 19 nt, Artificial Sequence
  Description of Artificial Sequence: Synthetic oligonucleotide
uagggcauaugacuucuuc

SEQ ID NO: 1225394 - RNA, 19 nt, Artificial Sequence
  Description of Artificial Sequence: Synthetic oligonucleotide
ucuugucgguuuccauacg

SEQ ID NO: 1225395 - RNA, 19 nt, Artificial Sequence
  Description of Artificial Sequence: Synthetic oligonucleotide
agaaagugacuccuaggau

SEQ ID NO: 1225396 - RNA, 19 nt, Artificial Sequence
  Description of Artificial Sequence: Synthetic oligonucleotide
uggcucaagugcaauggcu

SEQ ID NO: 1225397 - RNA, 19 nt, Artificial Sequence
  Description of Artificial Sequence: Synthetic oligonucleotide
uugaagcuaaagccacucu

SEQ ID NO: 1225398 - RNA, 19 nt, Artificial Sequence
  Description of Artificial Sequence: Synthetic oligonucleotide
ccacagaaagucuugucgg

SEQ ID NO: 1225399 - RNA, 19 nt, Artificial Sequence
  Description of Artificial Sequence: Synthetic oligonucleotide
aaauccaaggccggcggca

SEQ ID NO: 1225400 - RNA, 19 nt, Artificial Sequence
  Description of Artificial Sequence: Synthetic oligonucleotide
ucacucuccgcaucuguga

SEQ ID NO: 1225401 - RNA, 19 nt, Artificial Sequence
  Description of Artificial Sequence: Synthetic oligonucleotide
accaaguaacagucccaac

SEQ ID NO: 1225402 - RNA, 19 nt, Artificial Sequence
  Description of Artificial Sequence: Synthetic oligonucleotide
uagacaugaugcacccggc

SEQ ID NO: 1225403 - RNA, 19 nt, Artificial Sequence
  Description of Artificial Sequence: Synthetic oligonucleotide
aacgggaagcggcgccgcc

SEQ ID NO: 1225404 - RNA, 19 nt, Artificial Sequence
  Description of Artificial Sequence: Synthetic oligonucleotide
acagucccaacccggcgcg

SEQ ID NO: 1225405 - RNA, 19 nt, Artificial Sequence
  Description of Artificial Sequence: Synthetic oligonucleotide
uauggcuggcuauacuguc

SEQ ID NO: 1225406 - RNA, 19 nt, Artificial Sequence
  Description of Artificial Sequence: Synthetic oligonucleotide
guagauagagcuggaacca

SEQ ID NO: 1225407 - RNA, 19 nt, Artificial Sequence
  Description of Artificial Sequence: Synthetic oligonucleotide
ggccagacgccacagaaag

SEQ ID NO: 1225408 - RNA, 19 nt, Artificial Sequence
  Description of Artificial Sequence: Synthetic oligonucleotide
ugccauaagacuggucagc

SEQ ID NO: 1225409 - RNA, 19 nt, Artificial Sequence
  Description of Artificial Sequence: Synthetic oligonucleotide
guuguauaaccuccuucac

SEQ ID NO: 1225410 - RNA, 19 nt, Artificial Sequence
  Description of Artificial Sequence: Synthetic oligonucleotide
uuuccaucgccgacuguac

SEQ ID NO: 1225411 - RNA, 19 nt, Artificial Sequence
  Description of Artificial Sequence: Synthetic oligonucleotide
uggagcgcauccugcacag

SEQ ID NO: 1225412 - RNA, 19 nt, Artificial Sequence
  Description of Artificial Sequence: Synthetic oligonucleotide
uccuucacucuccgcaucu

SEQ ID NO: 1225413 - RNA, 19 nt, Artificial Sequence
  Description of Artificial Sequence: Synthetic oligonucleotide
cuaagagggcuuucaaaca

SEQ ID NO: 1225414 - RNA, 19 nt, Artificial Sequence
  Description of Artificial Sequence: Synthetic oligonucleotide
uggauacgccuggagaugc

SEQ ID NO: 1225415 - RNA, 19 nt, Artificial Sequence
  Description of Artificial Sequence: Synthetic oligonucleotide
aaacgggaagcggcgccgc

SEQ ID NO: 1225416 - RNA, 19 nt, Artificial Sequence
  Description of Artificial Sequence: Synthetic oligonucleotide
agucccacucuccuuguca

SEQ ID NO: 1225417 - RNA, 19 nt, Artificial Sequence
  Description of Artificial Sequence: Synthetic oligonucleotide
auaaccuggccuccgcgcu

SEQ ID NO: 1225418 - RNA, 19 nt, Artificial Sequence
  Description of Artificial Sequence: Synthetic oligonucleotide
gugacuuucagcacucuca

SEQ ID NO: 1225419 - RNA, 19 nt, Artificial Sequence
  Description of Artificial Sequence: Synthetic oligonucleotide
ugcauaaccuggccuccgc

SEQ ID NO: 1225420 - RNA, 19 nt, Artificial Sequence
  Description of Artificial Sequence: Synthetic oligonucleotide
gcuaaagccacucuggaua

SEQ ID NO: 1225421 - RNA, 19 nt, Artificial Sequence
  Description of Artificial Sequence: Synthetic oligonucleotide
uuaacccuauggcuggcua

SEQ ID NO: 1225422 - RNA, 19 nt, Artificial Sequence
  Description of Artificial Sequence: Synthetic oligonucleotide
cacaaaguccaggcggucg

SEQ ID NO: 1225423 - RNA, 19 nt, Artificial Sequence
  Description of Artificial Sequence: Synthetic oligonucleotide
agaucggacuuccccaaca

SEQ ID NO: 1225424 - RNA, 19 nt, Artificial Sequence
  Description of Artificial Sequence: Synthetic oligonucleotide
uccgcauuggcuguuguau

SEQ ID NO: 1225425 - RNA, 19 nt, Artificial Sequence
  Description of Artificial Sequence: Synthetic oligonucleotide
gagucccgcucauagucag

SEQ ID NO: 1225426 - RNA, 19 nt, Artificial Sequence
  Description of Artificial Sequence: Synthetic oligonucleotide
auauauacucguccagcuu

SEQ ID NO: 1225427 - RNA, 19 nt, Artificial Sequence
  Description of Artificial Sequence: Synthetic oligonucleotide
aauccaaggccggcggcag

SEQ ID NO: 1225428 - RNA, 19 nt, Artificial Sequence
  Description of Artificial Sequence: Synthetic oligonucleotide
uccuaggaucuucuggcuc

SEQ ID NO: 1225429 - RNA, 19 nt, Artificial Sequence
  Description of Artificial Sequence: Synthetic oligonucleotide
uaccaaguaacagucccaa

SEQ ID NO: 1225430 - RNA, 19 nt, Artificial Sequence
  Description of Artificial Sequence: Synthetic oligonucleotide
ucuagacaugaugcacccg

SEQ ID NO: 1225431 - RNA, 19 nt, Artificial Sequence
  Description of Artificial Sequence: Synthetic oligonucleotide
cuauaugagaucggacuuc

SEQ ID NO: 1225432 - RNA, 19 nt, Artificial Sequence
  Description of Artificial Sequence: Synthetic oligonucleotide
ccuauggcuggcuauacug

SEQ ID NO: 1225433 - RNA, 19 nt, Artificial Sequence
  Description of Artificial Sequence: Synthetic oligonucleotide
uuaggaagcucuggagcgc

SEQ ID NO: 1225434 - RNA, 19 nt, Artificial Sequence
  Description of Artificial Sequence: Synthetic oligonucleotide
agagggcuuucaaacaaag

SEQ ID NO: 1225435 - RNA, 19 nt, Artificial Sequence
  Description of Artificial Sequence: Synthetic oligonucleotide
cuguacaguacgcacagaa

SEQ ID NO: 1225436 - RNA, 19 nt, Artificial Sequence
  Description of Artificial Sequence: Synthetic oligonucleotide
ugagaucggacuuccccaa

SEQ ID NO: 1225437 - RNA, 19 nt, Artificial Sequence
  Description of Artificial Sequence: Synthetic oligonucleotide
ccagcuuuugaaaauccug

SEQ ID NO: 1225438 - RNA, 19 nt, Artificial Sequence
  Description of Artificial Sequence: Synthetic oligonucleotide
gugccauaagacuggucag

SEQ ID NO: 1225439 - RNA, 19 nt, Artificial Sequence
  Description of Artificial Sequence: Synthetic oligonucleotide
cuugaagcuaccuccacgu

SEQ ID NO: 1225440 - RNA, 19 nt, Artificial Sequence
  Description of Artificial Sequence: Synthetic oligonucleotide
ucccuggaaaacgggaagc

SEQ ID NO: 1225441 - RNA, 19 nt, Artificial Sequence
  Description of Artificial Sequence: Synthetic oligonucleotide
gauacgccuggagaugccc

SEQ ID NO: 1225442 - RNA, 19 nt, Artificial Sequence
  Description of Artificial Sequence: Synthetic oligonucleotide
uguaggcccgggccagacg

SEQ ID NO: 1225443 - RNA, 19 nt, Artificial Sequence
  Description of Artificial Sequence: Synthetic oligonucleotide
agcuaccuccacgucaagg

SEQ ID NO: 1225444 - RNA, 19 nt, Artificial Sequence
  Description of Artificial Sequence: Synthetic oligonucleotide
guaacagucccaacccggc

SEQ ID NO: 1225445 - RNA, 19 nt, Artificial Sequence
  Description of Artificial Sequence: Synthetic oligonucleotide
gaagcuaccuccacgucaa

SEQ ID NO: 1225446 - RNA, 19 nt, Artificial Sequence
  Description of Artificial Sequence: Synthetic oligonucleotide
ucuggagcgcauccugcac

SEQ ID NO: 1225447 - RNA, 19 nt, Artificial Sequence
  Description of Artificial Sequence: Synthetic oligonucleotide
ggcggugaaguagauagag

SEQ ID NO: 1225448 - RNA, 19 nt, Artificial Sequence
  Description of Artificial Sequence: Synthetic oligonucleotide
gucgguuuccauacgccag

SEQ ID NO: 1225449 - RNA, 19 nt, Artificial Sequence
  Description of Artificial Sequence: Synthetic oligonucleotide
aguuaacccuauggcuggc

SEQ ID NO: 1225450 - RNA, 19 nt, Artificial Sequence
  Description of Artificial Sequence: Synthetic oligonucleotide
aagaaagcagaagccuaaa

SEQ ID NO: 1225451 - RNA, 19 nt, Artificial Sequence
  Description of Artificial Sequence: Synthetic oligonucleotide
gggcauaugacuucuucuc

SEQ ID NO: 1225452 - RNA, 19 nt, Artificial Sequence
  Description of Artificial Sequence: Synthetic oligonucleotide
agcuaaagccacucuggau

SEQ ID NO: 1225453 - RNA, 19 nt, Artificial Sequence
  Description of Artificial Sequence: Synthetic oligonucleotide
acucguccagcuuuugaaa

SEQ ID NO: 1225454 - RNA, 19 nt, Artificial Sequence
  Description of Artificial Sequence: Synthetic oligonucleotide
cuggcucaagugcaauggc

SEQ ID NO: 1225455 - RNA, 19 nt, Artificial Sequence
  Description of Artificial Sequence: Synthetic oligonucleotide
uuccaucgccgacuguaca

SEQ ID NO: 1225456 - RNA, 19 nt, Artificial Sequence
  Description of Artificial Sequence: Synthetic oligonucleotide
ggcuauacugucuugauuu

SEQ ID NO: 1225457 - RNA, 19 nt, Artificial Sequence
  Description of Artificial Sequence: Synthetic oligonucleotide
gccagcuuauuguugagca

SEQ ID NO: 1225458 - RNA, 19 nt, Artificial Sequence
  Description of Artificial Sequence: Synthetic oligonucleotide
auaugagaucggacuuccc

SEQ ID NO: 1225459 - RNA, 19 nt, Artificial Sequence
  Description of Artificial Sequence: Synthetic oligonucleotide
uaacccuauggcuggcuau

SEQ ID NO: 1225460 - RNA, 19 nt, Artificial Sequence
  Description of Artificial Sequence: Synthetic oligonucleotide
gacgccacagaaagucuug

SEQ ID NO: 1225461 - RNA, 19 nt, Artificial Sequence
  Description of Artificial Sequence: Synthetic oligonucleotide
uggcuauacugucuugauu

SEQ ID NO: 1225462 - RNA, 19 nt, Artificial Sequence
  Description of Artificial Sequence: Synthetic oligonucleotide
caggccgcuccgaagcucc

SEQ ID NO: 1225463 - RNA, 19 nt, Artificial Sequence
  Description of Artificial Sequence: Synthetic oligonucleotide
aguacgcacagaaauccaa

SEQ ID NO: 1225464 - RNA, 19 nt, Artificial Sequence
  Description of Artificial Sequence: Synthetic oligonucleotide
cuggugacuuucagcacuc

SEQ ID NO: 1225465 - RNA, 19 nt, Artificial Sequence
  Description of Artificial Sequence: Synthetic oligonucleotide
ugacuccuaggaucuucug

SEQ ID NO: 1225466 - RNA, 19 nt, Artificial Sequence
  Description of Artificial Sequence: Synthetic oligonucleotide
ggcaguaccaaguaacagu

SEQ ID NO: 1225467 - RNA, 19 nt, Artificial Sequence
  Description of Artificial Sequence: Synthetic oligonucleotide
gcaguaccaaguaacaguc

SEQ ID NO: 1225468 - RNA, 19 nt, Artificial Sequence
  Description of Artificial Sequence: Synthetic oligonucleotide
agcgcauccugcacagugg

SEQ ID NO: 1225469 - RNA, 19 nt, Artificial Sequence
  Description of Artificial Sequence: Synthetic oligonucleotide
ugugcucgcugcccuggug

SEQ ID NO: 1225470 - RNA, 19 nt, Artificial Sequence
  Description of Artificial Sequence: Synthetic oligonucleotide
aucgccgacuguacaguac

SEQ ID NO: 1225471 - RNA, 19 nt, Artificial Sequence
  Description of Artificial Sequence: Synthetic oligonucleotide
gaaguagauagagcuggaa

SEQ ID NO: 1225472 - RNA, 19 nt, Artificial Sequence
  Description of Artificial Sequence: Synthetic oligonucleotide
agcacaaaguccaggcggu

SEQ ID NO: 1225473 - RNA, 19 nt, Artificial Sequence
  Description of Artificial Sequence: Synthetic oligonucleotide
gcagacuguggcuucggcc

SEQ ID NO: 1225474 - RNA, 19 nt, Artificial Sequence
  Description of Artificial Sequence: Synthetic oligonucleotide
cacuaagagggcuuucaaa

SEQ ID NO: 1225475 - RNA, 19 nt, Artificial Sequence
  Description of Artificial Sequence: Synthetic oligonucleotide
aacccuauggcuggcuaua

SEQ ID NO: 1225476 - RNA, 19 nt, Artificial Sequence
  Description of Artificial Sequence: Synthetic oligonucleotide
uccugaacucagugggguc

SEQ ID NO: 1225477 - RNA, 19 nt, Artificial Sequence
  Description of Artificial Sequence: Synthetic oligonucleotide
aaacaaagcuguagcuguu

SEQ ID NO: 1225478 - RNA, 19 nt, Artificial Sequence
  Description of Artificial Sequence: Synthetic oligonucleotide
gaaaauccuggcuguaguu

SEQ ID NO: 1225479 - RNA, 19 nt, Artificial Sequence
  Description of Artificial Sequence: Synthetic oligonucleotide
ucgaggucugaggagccac

SEQ ID NO: 1225480 - RNA, 19 nt, Artificial Sequence
  Description of Artificial Sequence: Synthetic oligonucleotide
auggcccgcaacugcauaa

SEQ ID NO: 1225481 - RNA, 19 nt, Artificial Sequence
  Description of Artificial Sequence: Synthetic oligonucleotide
ggcggcaguaccaaguaac

SEQ ID NO: 1225482 - RNA, 19 nt, Artificial Sequence
  Description of Artificial Sequence: Synthetic oligonucleotide
cuggauacgccuggagaug

SEQ ID NO: 1225483 - RNA, 19 nt, Artificial Sequence
  Description of Artificial Sequence: Synthetic oligonucleotide
gagaucggacuuccccaac

SEQ ID NO: 1225484 - RNA, 19 nt, Artificial Sequence
  Description of Artificial Sequence: Synthetic oligonucleotide
uucaaccuuuaggaagcuc

SEQ ID NO: 1225485 - RNA, 19 nt, Artificial Sequence
  Description of Artificial Sequence: Synthetic oligonucleotide
ccgacuguacaguacgcac

SEQ ID NO: 1225486 - RNA, 19 nt, Artificial Sequence
  Description of Artificial Sequence: Synthetic oligonucleotide
uucaccugggauggcccgc

SEQ ID NO: 1225487 - RNA, 19 nt, Artificial Sequence
  Description of Artificial Sequence: Synthetic oligonucleotide
agguccagagagucccacu

SEQ ID NO: 1225488 - RNA, 19 nt, Artificial Sequence
  Description of Artificial Sequence: Synthetic oligonucleotide
agucccaacccggcgcggg

SEQ ID NO: 1225489 - RNA, 19 nt, Artificial Sequence
  Description of Artificial Sequence: Synthetic oligonucleotide
auuccgcauuggcuguugu

SEQ ID NO: 1225490 - RNA, 19 nt, Artificial Sequence
  Description of Artificial Sequence: Synthetic oligonucleotide
acucucuauagcacuuaga

SEQ ID NO: 1225491 - RNA, 19 nt, Artificial Sequence
  Description of Artificial Sequence: Synthetic oligonucleotide
ccgcagugccauaagacug

SEQ ID NO: 1225492 - RNA, 19 nt, Artificial Sequence
  Description of Artificial Sequence: Synthetic oligonucleotide
uaaccuggccuccgcgcuc

SEQ ID NO: 1225493 - RNA, 19 nt, Artificial Sequence
  Description of Artificial Sequence: Synthetic oligonucleotide
ccuaggaucuucuggcuca

SEQ ID NO: 1225494 - RNA, 19 nt, Artificial Sequence
  Description of Artificial Sequence: Synthetic oligonucleotide
uuccgcauuggcuguugua

SEQ ID NO: 1225495 - RNA, 19 nt, Artificial Sequence
  Description of Artificial Sequence: Synthetic oligonucleotide
cagcuuaagugagagaccu

SEQ ID NO: 1225496 - RNA, 19 nt, Artificial Sequence
  Description of Artificial Sequence: Synthetic oligonucleotide
gucagauuccgcauuggcu

SEQ ID NO: 1225497 - RNA, 19 nt, Artificial Sequence
  Description of Artificial Sequence: Synthetic oligonucleotide
ccuaaacugcaagucuugc

SEQ ID NO: 1225498 - RNA, 19 nt, Artificial Sequence
  Description of Artificial Sequence: Synthetic oligonucleotide
cugcgcacgguccagggaa

SEQ ID NO: 1225499 - RNA, 19 nt, Artificial Sequence
  Description of Artificial Sequence: Synthetic oligonucleotide
auacgccagcuuauuguug

SEQ ID NO: 1225500 - RNA, 19 nt, Artificial Sequence
  Description of Artificial Sequence: Synthetic oligonucleotide
cuggagcgcauccugcaca

SEQ ID NO: 1225501 - RNA, 19 nt, Artificial Sequence
  Description of Artificial Sequence: Synthetic oligonucleotide
cuauggcuggcuauacugu

SEQ ID NO: 1225502 - RNA, 19 nt, Artificial Sequence
  Description of Artificial Sequence: Synthetic oligonucleotide
uuagggcauaugacuucuu

SEQ ID NO: 1225503 - RNA, 19 nt, Artificial Sequence
  Description of Artificial Sequence: Synthetic oligonucleotide
auggcgccgggcccuuuuc

SEQ ID NO: 1225504 - RNA, 19 nt, Artificial Sequence
  Description of Artificial Sequence: Synthetic oligonucleotide
ccaacaaucuccccagcca

SEQ ID NO: 1225505 - RNA, 19 nt, Artificial Sequence
  Description of Artificial Sequence: Synthetic oligonucleotide
cuaccucccgccgcagugc

SEQ ID NO: 1225506 - RNA, 19 nt, Artificial Sequence
  Description of Artificial Sequence: Synthetic oligonucleotide
uccgcgcucugaagccugc

SEQ ID NO: 1225507 - RNA, 19 nt, Artificial Sequence
  Description of Artificial Sequence: Synthetic oligonucleotide
caaggccggcggcaguacc

SEQ ID NO: 1225508 - RNA, 19 nt, Artificial Sequence
  Description of Artificial Sequence: Synthetic oligonucleotide
cuuaagugagagaccuggu

SEQ ID NO: 1225509 - RNA, 19 nt, Artificial Sequence
  Description of Artificial Sequence: Synthetic oligonucleotide
ggaaucgggcagacugugg

SEQ ID NO: 1225510 - RNA, 19 nt, Artificial Sequence
  Description of Artificial Sequence: Synthetic oligonucleotide
aguggcacuaagagggcuu

SEQ ID NO: 1225511 - RNA, 19 nt, Artificial Sequence
  Description of Artificial Sequence: Synthetic oligonucleotide
aagccugcgcacgguccag

SEQ ID NO: 1225512 - RNA, 19 nt, Artificial Sequence
  Description of Artificial Sequence: Synthetic oligonucleotide
acucuccgcaucugugaau

SEQ ID NO: 1225513 - RNA, 19 nt, Artificial Sequence
  Description of Artificial Sequence: Synthetic oligonucleotide
auauacucguccagcuuuu

SEQ ID NO: 1225514 - RNA, 19 nt, Artificial Sequence
  Description of Artificial Sequence: Synthetic oligonucleotide
guaaagcugaauccucauu

SEQ ID NO: 1225515 - RNA, 19 nt, Artificial Sequence
  Description of Artificial Sequence: Synthetic oligonucleotide
ggcacuaagagggcuuuca

SEQ ID NO: 1225516 - RNA, 19 nt, Artificial Sequence
  Description of Artificial Sequence: Synthetic oligonucleotide
cacagaaagucuugucggu

SEQ ID NO: 1225517 - RNA, 19 nt, Artificial Sequence
  Description of Artificial Sequence: Synthetic oligonucleotide
gggcccuuuuccaucgccg

SEQ ID NO: 1225518 - RNA, 19 nt, Artificial Sequence
  Description of Artificial Sequence: Synthetic oligonucleotide
uugugcucgcugcccuggu

SEQ ID NO: 1225519 - RNA, 19 nt, Artificial Sequence
  Description of Artificial Sequence: Synthetic oligonucleotide
gugagagaccugguagcac

SEQ ID NO: 1225520 - RNA, 19 nt, Artificial Sequence
  Description of Artificial Sequence: Synthetic oligonucleotide
cccuggaaaacgggaagcg

SEQ ID NO: 1225521 - RNA, 19 nt, Artificial Sequence
  Description of Artificial Sequence: Synthetic oligonucleotide
gauggcccgcaacugcaua

SEQ ID NO: 1225522 - RNA, 19 nt, Artificial Sequence
  Description of Artificial Sequence: Synthetic oligonucleotide
cauacgccagcuuauuguu

SEQ ID NO: 1225523 - RNA, 19 nt, Artificial Sequence
  Description of Artificial Sequence: Synthetic oligonucleotide
uuccauacgccagcuuauu

SEQ ID NO: 1225524 - RNA, 19 nt, Artificial Sequence
  Description of Artificial Sequence: Synthetic oligonucleotide
cuccgcgcucugaagccug

SEQ ID NO: 1225525 - RNA, 19 nt, Artificial Sequence
  Description of Artificial Sequence: Synthetic oligonucleotide
auacgccuggagaugcccu

SEQ ID NO: 1225526 - RNA, 19 nt, Artificial Sequence
  Description of Artificial Sequence: Synthetic oligonucleotide
gcaccagagggcuaggacu

SEQ ID NO: 1225527 - RNA, 19 nt, Artificial Sequence
  Description of Artificial Sequence: Synthetic oligonucleotide
agcuuaagugagagaccug

SEQ ID NO: 1225528 - RNA, 19 nt, Artificial Sequence
  Description of Artificial Sequence: Synthetic oligonucleotide
acgccacagaaagucuugu

SEQ ID NO: 1225529 - RNA, 19 nt, Artificial Sequence
  Description of Artificial Sequence: Synthetic oligonucleotide
ucccaacccggcgcgggag

SEQ ID NO: 1225530 - RNA, 19 nt, Artificial Sequence
  Description of Artificial Sequence: Synthetic oligonucleotide
uggcccgcaacugcauaac

SEQ ID NO: 1225531 - RNA, 19 nt, Artificial Sequence
  Description of Artificial Sequence: Synthetic oligonucleotide
ugaacucaguggggucaca

SEQ ID NO: 1225532 - RNA, 19 nt, Artificial Sequence
  Description of Artificial Sequence: Synthetic oligonucleotide
gccuaaacugcaagucuug

SEQ ID NO: 1225533 - RNA, 19 nt, Artificial Sequence
  Description of Artificial Sequence: Synthetic oligonucleotide
ccccagucuagacaugaug

SEQ ID NO: 1225534 - RNA, 19 nt, Artificial Sequence
  Description of Artificial Sequence: Synthetic oligonucleotide
ccuaacucucuauagcacu

SEQ ID NO: 1225535 - RNA, 19 nt, Artificial Sequence
  Description of Artificial Sequence: Synthetic oligonucleotide
ugcgcacgguccagggaau

SEQ ID NO: 1225536 - RNA, 19 nt, Artificial Sequence
  Description of Artificial Sequence: Synthetic oligonucleotide
gcgcauccugcacaguggc

SEQ ID NO: 1225537 - RNA, 19 nt, Artificial Sequence
  Description of Artificial Sequence: Synthetic oligonucleotide
cgcaucugugaaugcagcc

SEQ ID NO: 1225538 - RNA, 19 nt, Artificial Sequence
  Description of Artificial Sequence: Synthetic oligonucleotide
guagcaccaccugccaaga

SEQ ID NO: 1225539 - RNA, 19 nt, Artificial Sequence
  Description of Artificial Sequence: Synthetic oligonucleotide
acgucaagguccagagagu

SEQ ID NO: 1225540 - RNA, 19 nt, Artificial Sequence
  Description of Artificial Sequence: Synthetic oligonucleotide
cauagucagauuccgcauu

SEQ ID NO: 1225541 - RNA, 19 nt, Artificial Sequence
  Description of Artificial Sequence: Synthetic oligonucleotide
cuauagcacuuagaaauau

SEQ ID NO: 1225542 - RNA, 19 nt, Artificial Sequence
  Description of Artificial Sequence: Synthetic oligonucleotide
cggugaaguagauagagcu

SEQ ID NO: 1225543 - RNA, 19 nt, Artificial Sequence
  Description of Artificial Sequence: Synthetic oligonucleotide
ccauaagacuggucagcac

SEQ ID NO: 1225544 - RNA, 19 nt, Artificial Sequence
  Description of Artificial Sequence: Synthetic oligonucleotide
gggaaucgggcagacugug

SEQ ID NO: 1225545 - RNA, 19 nt, Artificial Sequence
  Description of Artificial Sequence: Synthetic oligonucleotide
ccucaguaagcucagacau

SEQ ID NO: 1225546 - RNA, 19 nt, Artificial Sequence
  Description of Artificial Sequence: Synthetic oligonucleotide
uccgcuuguugugcucgcu

SEQ ID NO: 1225547 - RNA, 19 nt, Artificial Sequence
  Description of Artificial Sequence: Synthetic oligonucleotide
gcggucgagcaccuucucc

SEQ ID NO: 1225548 - RNA, 19 nt, Artificial Sequence
  Description of Artificial Sequence: Synthetic oligonucleotide
gcggugaaguagauagagc

SEQ ID NO: 1225549 - RNA, 19 nt, Artificial Sequence
  Description of Artificial Sequence: Synthetic oligonucleotide
cacucuccgcaucugugaa

SEQ ID NO: 1225550 - RNA, 19 nt, Artificial Sequence
  Description of Artificial Sequence: Synthetic oligonucleotide
acuguacaguacgcacaga

SEQ ID NO: 1225551 - RNA, 19 nt, Artificial Sequence
  Description of Artificial Sequence: Synthetic oligonucleotide
ggcagacuguggcuucggc

SEQ ID NO: 1225552 - RNA, 19 nt, Artificial Sequence
  Description of Artificial Sequence: Synthetic oligonucleotide
uuccugugggaggccgggc

SEQ ID NO: 1225553 - RNA, 19 nt, Artificial Sequence
  Description of Artificial Sequence: Synthetic oligonucleotide
ggcccgcaacugcauaacc

SEQ ID NO: 1225554 - RNA, 19 nt, Artificial Sequence
  Description of Artificial Sequence: Synthetic oligonucleotide
uggugacuuucagcacucu

SEQ ID NO: 1225555 - RNA, 19 nt, Artificial Sequence
  Description of Artificial Sequence: Synthetic oligonucleotide
ccauacgccagcuuauugu

SEQ ID NO: 1225556 - RNA, 19 nt, Artificial Sequence
  Description of Artificial Sequence: Synthetic oligonucleotide
ggcccuuuuccaucgccga

SEQ ID NO: 1225557 - RNA, 19 nt, Artificial Sequence
  Description of Artificial Sequence: Synthetic oligonucleotide
gccgcagugccauaagacu

SEQ ID NO: 1225558 - RNA, 19 nt, Artificial Sequence
  Description of Artificial Sequence: Synthetic oligonucleotide
gugacuccuaggaucuucu

SEQ ID NO: 1225559 - RNA, 19 nt, Artificial Sequence
  Description of Artificial Sequence: Synthetic oligonucleotide
aggcggucgagcaccuucu

SEQ ID NO: 1225560 - RNA, 19 nt, Artificial Sequence
  Description of Artificial Sequence: Synthetic oligonucleotide
cgccgcagugccauaagac

SEQ ID NO: 1225561 - RNA, 19 nt, Artificial Sequence
  Description of Artificial Sequence: Synthetic oligonucleotide
caccagagggcuaggacuu

SEQ ID NO: 1225562 - RNA, 19 nt, Artificial Sequence
  Description of Artificial Sequence: Synthetic oligonucleotide
uggcacuaagagggcuuuc

SEQ ID NO: 1225563 - RNA, 19 nt, Artificial Sequence
  Description of Artificial Sequence: Synthetic oligonucleotide
caucgccgacuguacagua

SEQ ID NO: 1225564 - RNA, 19 nt, Artificial Sequence
  Description of Artificial Sequence: Synthetic oligonucleotide
ucccgccgcagugccauaa

SEQ ID NO: 1225565 - RNA, 19 nt, Artificial Sequence
  Description of Artificial Sequence: Synthetic oligonucleotide
caacccggcgcgggagccg

SEQ ID NO: 1225566 - RNA, 19 nt, Artificial Sequence
  Description of Artificial Sequence: Synthetic oligonucleotide
cgacuguacaguacgcaca

SEQ ID NO: 1225567 - RNA, 19 nt, Artificial Sequence
  Description of Artificial Sequence: Synthetic oligonucleotide
ggaauucacuuaagaggaa

SEQ ID NO: 1225568 - RNA, 19 nt, Artificial Sequence
  Description of Artificial Sequence: Synthetic oligonucleotide
cuccuaggaucuucuggcu

SEQ ID NO: 1225569 - RNA, 19 nt, Artificial Sequence
  Description of Artificial Sequence: Synthetic oligonucleotide
gcggcaguaccaaguaaca

SEQ ID NO: 1225570 - RNA, 19 nt, Artificial Sequence
  Description of Artificial Sequence: Synthetic oligonucleotide
guuaacccuauggcuggcu

SEQ ID NO: 1225571 - RNA, 19 nt, Artificial Sequence
  Description of Artificial Sequence: Synthetic oligonucleotide
ggauacgccuggagaugcc

SEQ ID NO: 1225572 - RNA, 19 nt, Artificial Sequence
  Description of Artificial Sequence: Synthetic oligonucleotide
gccgacuguacaguacgca

SEQ ID NO: 1225573 - RNA, 19 nt, Artificial Sequence
  Description of Artificial Sequence: Synthetic oligonucleotide
ccgccgagccacucucugg

SEQ ID NO: 1225574 - RNA, 19 nt, Artificial Sequence
  Description of Artificial Sequence: Synthetic oligonucleotide
gucccaacccggcgcggga

SEQ ID NO: 1225575 - RNA, 19 nt, Artificial Sequence
  Description of Artificial Sequence: Synthetic oligonucleotide
caccugccaagaagaaagu

SEQ ID NO: 1225576 - RNA, 19 nt, Artificial Sequence
  Description of Artificial Sequence: Synthetic oligonucleotide
augaugcacccggccgcca

SEQ ID NO: 1225577 - RNA, 19 nt, Artificial Sequence
  Description of Artificial Sequence: Synthetic oligonucleotide
cggcaguaccaaguaacag

SEQ ID NO: 1225578 - RNA, 19 nt, Artificial Sequence
  Description of Artificial Sequence: Synthetic oligonucleotide
cugcaagucuugcuugguu

SEQ ID NO: 1225579 - RNA, 19 nt, Artificial Sequence
  Description of Artificial Sequence: Synthetic oligonucleotide
aggccggcggcaguaccaa

SEQ ID NO: 1225580 - RNA, 19 nt, Artificial Sequence
  Description of Artificial Sequence: Synthetic oligonucleotide
ccugaggaggcggugaagu

SEQ ID NO: 1225581 - RNA, 19 nt, Artificial Sequence
  Description of Artificial Sequence: Synthetic oligonucleotide
cuucaaccuuuaggaagcu

SEQ ID NO: 1225582 - RNA, 19 nt, Artificial Sequence
  Description of Artificial Sequence: Synthetic oligonucleotide
gcgcgggagccgcccaggg

SEQ ID NO: 1225583 - RNA, 19 nt, Artificial Sequence
  Description of Artificial Sequence: Synthetic oligonucleotide
cgcuccgaagcuccucuac

SEQ ID NO: 1225584 - RNA, 19 nt, Artificial Sequence
  Description of Artificial Sequence: Synthetic oligonucleotide
cccaacccggcgcgggagc

SEQ ID NO: 1225585 - RNA, 19 nt, Artificial Sequence
  Description of Artificial Sequence: Synthetic oligonucleotide
caguggcacuaagagggcu

SEQ ID NO: 1225586 - RNA, 19 nt, Artificial Sequence
  Description of Artificial Sequence: Synthetic oligonucleotide
cgccgacuguacaguacgc

SEQ ID NO: 1225587 - RNA, 19 nt, Artificial Sequence
  Description of Artificial Sequence: Synthetic oligonucleotide
ccaacccggcgcgggagcc

SEQ ID NO: 1225588 - RNA, 19 nt, Artificial Sequence
  Description of Artificial Sequence: Synthetic oligonucleotide
gcccgcaacugcauaaccu

SEQ ID NO: 1225589 - RNA, 19 nt, Artificial Sequence
  Description of Artificial Sequence: Synthetic oligonucleotide
cgggcccuuuuccaucgcc

SEQ ID NO: 1225590 - RNA, 19 nt, Artificial Sequence
  Description of Artificial Sequence: Synthetic oligonucleotide
gccgcuccgaagcuccucu

SEQ ID NO: 1225591 - RNA, 19 nt, Artificial Sequence
  Description of Artificial Sequence: Synthetic oligonucleotide
gcacaaaguccaggcgguc

SEQ ID NO: 1225592 - RNA, 19 nt, Artificial Sequence
  Description of Artificial Sequence: Synthetic oligonucleotide
cucuaccucccgccgcagu

SEQ ID NO: 1225593 - RNA, 19 nt, Artificial Sequence
  Description of Artificial Sequence: Synthetic oligonucleotide
ccgcauuggcuguuguaua

SEQ ID NO: 1225594 - RNA, 19 nt, Artificial Sequence
  Description of Artificial Sequence: Synthetic oligonucleotide
ccacgucaagguccagaga

SEQ ID NO: 1225595 - RNA, 19 nt, Artificial Sequence
  Description of Artificial Sequence: Synthetic oligonucleotide
gguuuccauacgccagcuu

SEQ ID NO: 1225596 - RNA, 19 nt, Artificial Sequence
  Description of Artificial Sequence: Synthetic oligonucleotide
cagcacucucaucucccuu

SEQ ID NO: 1225597 - RNA, 19 nt, Artificial Sequence
  Description of Artificial Sequence: Synthetic oligonucleotide
gccggcggcaguaccaagu

SEQ ID NO: 1225598 - RNA, 19 nt, Artificial Sequence
  Description of Artificial Sequence: Synthetic oligonucleotide
ccugcgcacgguccaggga

SEQ ID NO: 1225599 - RNA, 19 nt, Artificial Sequence
  Description of Artificial Sequence: Synthetic oligonucleotide
ccaaggccggcggcaguac

SEQ ID NO: 1225600 - RNA, 19 nt, Artificial Sequence
  Description of Artificial Sequence: Synthetic oligonucleotide
ccgcgcucugaagccugcg

SEQ ID NO: 1225601 - RNA, 19 nt, Artificial Sequence
  Description of Artificial Sequence: Synthetic oligonucleotide
aggccgcuccgaagcuccu

SEQ ID NO: 1225602 - RNA, 19 nt, Artificial Sequence
  Description of Artificial Sequence: Synthetic oligonucleotide
ccggcggcaguaccaagua

SEQ ID NO: 1225603 - RNA, 19 nt, Artificial Sequence
  Description of Artificial Sequence: Synthetic oligonucleotide
cgccgggcccuuuuccauc

SEQ ID NO: 1225604 - RNA, 19 nt, Artificial Sequence
  Description of Artificial Sequence: Synthetic oligonucleotide
ccucuaccucccgccgcag

SEQ ID NO: 1225605 - RNA, 19 nt, Artificial Sequence
  Description of Artificial Sequence: Synthetic oligonucleotide
cccuauggcuggcuauacu

SEQ ID NO: 1225606 - RNA, 19 nt, Artificial Sequence
  Description of Artificial Sequence: Synthetic oligonucleotide
ccaucgccgacuguacagu

SEQ ID NO: 1225607 - RNA, 19 nt, Artificial Sequence
  Description of Artificial Sequence: Synthetic oligonucleotide
ccgggcccuuuuccaucgc

SEQ ID NO: 1225608 - RNA, 19 nt, Artificial Sequence
  Description of Artificial Sequence: Synthetic oligonucleotide
ccccugaggaggcggugaa

SEQ ID NO: 1225609 - RNA, 19 nt, Artificial Sequence
  Description of Artificial Sequence: Synthetic oligonucleotide
cgccgagccacucucuggu

SEQ ID NO: 1225610 - RNA, 19 nt, Artificial Sequence
  Description of Artificial Sequence: Synthetic oligonucleotide
ccaaggcaccagagggcua

SEQ ID NO: 1225611 - RNA, 19 nt, Artificial Sequence
  Description of Artificial Sequence: Synthetic oligonucleotide
cucccgccgcagugccaua

SEQ ID NO: 1225612 - RNA, 19 nt, Artificial Sequence
  Description of Artificial Sequence: Synthetic oligonucleotide
ggagcgcauccugcacagu

SEQ ID NO: 1225613 - RNA, 19 nt, Artificial Sequence
  Description of Artificial Sequence: Synthetic oligonucleotide
cggcggcaguaccaaguaa

SEQ ID NO: 1225614 - RNA, 19 nt, Artificial Sequence
  Description of Artificial Sequence: Synthetic oligonucleotide
cgguuuccauacgccagcu

SEQ ID NO: 1225615 - RNA, 19 nt, Artificial Sequence
  Description of Artificial Sequence: Synthetic oligonucleotide
cgccuggagaugcccucau

SEQ ID NO: 1225616 - RNA, 19 nt, Artificial Sequence
  Description of Artificial Sequence: Synthetic oligonucleotide
cccggccgccagccaccau

SEQ ID NO: 1225617 - RNA, 19 nt, Artificial Sequence
  Description of Artificial Sequence: Synthetic oligonucleotide
auagaaauuacauuuaggc

SEQ ID NO: 1225618 - RNA, 19 nt, Artificial Sequence
  Description of Artificial Sequence: Synthetic oligonucleotide
agaaauuacauuuaggcuc

SEQ ID NO: 1225619 - RNA, 19 nt, Artificial Sequence
  Description of Artificial Sequence: Synthetic oligonucleotide
aaauucgucagucacacag

SEQ ID NO: 1225620 - RNA, 19 nt, Artificial Sequence
  Description of Artificial Sequence: Synthetic oligonucleotide
ugugcuauaaugauauucg

SEQ ID NO: 1225621 - RNA, 19 nt, Artificial Sequence
  Description of Artificial Sequence: Synthetic oligonucleotide
uauaguucuuaucaguucg

SEQ ID NO: 1225622 - RNA, 19 nt, Artificial Sequence
  Description of Artificial Sequence: Synthetic oligonucleotide
aaacgagaggacuucaccc

SEQ ID NO: 1225623 - RNA, 19 nt, Artificial Sequence
  Description of Artificial Sequence: Synthetic oligonucleotide
gaucuuuucuuucacaagg

SEQ ID NO: 1225624 - RNA, 19 nt, Artificial Sequence
  Description of Artificial Sequence: Synthetic oligonucleotide
gaagccuacuaauagaagg

SEQ ID NO: 1225625 - RNA, 19 nt, Artificial Sequence
  Description of Artificial Sequence: Synthetic oligonucleotide
aucauaaauacugagauug

SEQ ID NO: 1225626 - RNA, 19 nt, Artificial Sequence
  Description of Artificial Sequence: Synthetic oligonucleotide
aaguuguuucgucagaauc

SEQ ID NO: 1225627 - RNA, 19 nt, Artificial Sequence
  Description of Artificial Sequence: Synthetic oligonucleotide
acugagauugaauaugcac

SEQ ID NO: 1225628 - RNA, 19 nt, Artificial Sequence
  Description of Artificial Sequence: Synthetic oligonucleotide
agauugaauaugcacauag

SEQ ID NO: 1225629 - RNA, 19 nt, Artificial Sequence
  Description of Artificial Sequence: Synthetic oligonucleotide
uaaagcaucuagaucagcc

SEQ ID NO: 1225630 - RNA, 19 nt, Artificial Sequence
  Description of Artificial Sequence: Synthetic oligonucleotide
ucuugcacggcacagaucu

SEQ ID NO: 1225631 - RNA, 19 nt, Artificial Sequence
  Description of Artificial Sequence: Synthetic oligonucleotide
agaagugcgaucaaagugc

SEQ ID NO: 1225632 - RNA, 19 nt, Artificial Sequence
  Description of Artificial Sequence: Synthetic oligonucleotide
aaugauauucguuuugcaa

SEQ ID NO: 1225633 - RNA, 19 nt, Artificial Sequence
  Description of Artificial Sequence: Synthetic oligonucleotide
gaagccaaccacuugaggc

SEQ ID NO: 1225634 - RNA, 19 nt, Artificial Sequence
  Description of Artificial Sequence: Synthetic oligonucleotide
uauuucaguaguuuguuga

SEQ ID NO: 1225635 - RNA, 19 nt, Artificial Sequence
  Description of Artificial Sequence: Synthetic oligonucleotide
aaaucuagguauuucagua

SEQ ID NO: 1225636 - RNA, 19 nt, Artificial Sequence
  Description of Artificial Sequence: Synthetic oligonucleotide
acggauauaguucuuauca

SEQ ID NO: 1225637 - RNA, 19 nt, Artificial Sequence
  Description of Artificial Sequence: Synthetic oligonucleotide
uauaaugauauucguuuug

SEQ ID NO: 1225638 - RNA, 19 nt, Artificial Sequence
  Description of Artificial Sequence: Synthetic oligonucleotide
uuuaacaugcgucagccuc

SEQ ID NO: 1225639 - RNA, 19 nt, Artificial Sequence
  Description of Artificial Sequence: Synthetic oligonucleotide
agugcgaucaaagugcccc

SEQ ID NO: 1225640 - RNA, 19 nt, Artificial Sequence
  Description of Artificial Sequence: Synthetic oligonucleotide
ucaaucacggcucuucucc

SEQ ID NO: 1225641 - RNA, 19 nt, Artificial Sequence
  Description of Artificial Sequence: Synthetic oligonucleotide
acuaauagaaggguguugg

SEQ ID NO: 1225642 - RNA, 19 nt, Artificial Sequence
  Description of Artificial Sequence: Synthetic oligonucleotide
ugugccuccuuaaagaugu

SEQ ID NO: 1225643 - RNA, 19 nt, Artificial Sequence
  Description of Artificial Sequence: Synthetic oligonucleotide
uuacauuuaggcuccauga

SEQ ID NO: 1225644 - RNA, 19 nt, Artificial Sequence
  Description of Artificial Sequence: Synthetic oligonucleotide
aguuguuucgucagaaucc

SEQ ID NO: 1225645 - RNA, 19 nt, Artificial Sequence
  Description of Artificial Sequence: Synthetic oligonucleotide
ucgguuuccaccaaacgag

SEQ ID NO: 1225646 - RNA, 19 nt, Artificial Sequence
  Description of Artificial Sequence: Synthetic oligonucleotide
ucagguacaguucgggagg

SEQ ID NO: 1225647 - RNA, 19 nt, Artificial Sequence
  Description of Artificial Sequence: Synthetic oligonucleotide
accaaauugaucuuggcaa

SEQ ID NO: 1225648 - RNA, 19 nt, Artificial Sequence
  Description of Artificial Sequence: Synthetic oligonucleotide
ucaucuagcuguccgauca

SEQ ID NO: 1225649 - RNA, 19 nt, Artificial Sequence
  Description of Artificial Sequence: Synthetic oligonucleotide
ugauuaaaucauaaauacu

SEQ ID NO: 1225650 - RNA, 19 nt, Artificial Sequence
  Description of Artificial Sequence: Synthetic oligonucleotide
uucgguuuccaccaaacga

SEQ ID NO: 1225651 - RNA, 19 nt, Artificial Sequence
  Description of Artificial Sequence: Synthetic oligonucleotide
uguguucaguuucacaagc

SEQ ID NO: 1225652 - RNA, 19 nt, Artificial Sequence
  Description of Artificial Sequence: Synthetic oligonucleotide
acuguaaaagggcacgauc

SEQ ID NO: 1225653 - RNA, 19 nt, Artificial Sequence
  Description of Artificial Sequence: Synthetic oligonucleotide
gaaauuacauuuaggcucc

SEQ ID NO: 1225654 - RNA, 19 nt, Artificial Sequence
  Description of Artificial Sequence: Synthetic oligonucleotide
gaugccuuccucaaauucg

SEQ ID NO: 1225655 - RNA, 19 nt, Artificial Sequence
  Description of Artificial Sequence: Synthetic oligonucleotide
ugugguaccuugcuuuccg

SEQ ID NO: 1225656 - RNA, 19 nt, Artificial Sequence
  Description of Artificial Sequence: Synthetic oligonucleotide
aagccuacuaauagaaggg

SEQ ID NO: 1225657 - RNA, 19 nt, Artificial Sequence
  Description of Artificial Sequence: Synthetic oligonucleotide
uacauuuaggcuccaugag

SEQ ID NO: 1225658 - RNA, 19 nt, Artificial Sequence
  Description of Artificial Sequence: Synthetic oligonucleotide
ugaaaaguuaaugugcuau

SEQ ID NO: 1225659 - RNA, 19 nt, Artificial Sequence
  Description of Artificial Sequence: Synthetic oligonucleotide
uucagaauggaaugguucu

SEQ ID NO: 1225660 - RNA, 19 nt, Artificial Sequence
  Description of Artificial Sequence: Synthetic oligonucleotide
cuuuggaucuccugaagcc

SEQ ID NO: 1225661 - RNA, 19 nt, Artificial Sequence
  Description of Artificial Sequence: Synthetic oligonucleotide
gacuucaucuagcuguccg

SEQ ID NO: 1225662 - RNA, 19 nt, Artificial Sequence
  Description of Artificial Sequence: Synthetic oligonucleotide
ugauauucguuuugcaaca

SEQ ID NO: 1225663 - RNA, 19 nt, Artificial Sequence
  Description of Artificial Sequence: Synthetic oligonucleotide
acagaucuugguuagggug

SEQ ID NO: 1225664 - RNA, 19 nt, Artificial Sequence
  Description of Artificial Sequence: Synthetic oligonucleotide
uccuguuuuaacaugcguc

SEQ ID NO: 1225665 - RNA, 19 nt, Artificial Sequence
  Description of Artificial Sequence: Synthetic oligonucleotide
ucuaaagcaucuagaucag

SEQ ID NO: 1225666 - RNA, 19 nt, Artificial Sequence
  Description of Artificial Sequence: Synthetic oligonucleotide
ucaaauucgucagucacac

SEQ ID NO: 1225667 - RNA, 19 nt, Artificial Sequence
  Description of Artificial Sequence: Synthetic oligonucleotide
cugagauugaauaugcaca

SEQ ID NO: 1225668 - RNA, 19 nt, Artificial Sequence
  Description of Artificial Sequence: Synthetic oligonucleotide
agauaaagugugaaccagc

SEQ ID NO: 1225669 - RNA, 19 nt, Artificial Sequence
  Description of Artificial Sequence: Synthetic oligonucleotide
agaucaagguagcugagga

SEQ ID NO: 1225670 - RNA, 19 nt, Artificial Sequence
  Description of Artificial Sequence: Synthetic oligonucleotide
cucaguacuguccacgccc

SEQ ID NO: 1225671 - RNA, 19 nt, Artificial Sequence
  Description of Artificial Sequence: Synthetic oligonucleotide
cuagcuguccgaucaagcc

SEQ ID NO: 1225672 - RNA, 19 nt, Artificial Sequence
  Description of Artificial Sequence: Synthetic oligonucleotide
uuucccauauccauacuuc

SEQ ID NO: 1225673 - RNA, 19 nt, Artificial Sequence
  Description of Artificial Sequence: Synthetic oligonucleotide
uccacuguaaaagggcacg

SEQ ID NO: 1225674 - RNA, 19 nt, Artificial Sequence
  Description of Artificial Sequence: Synthetic oligonucleotide
ucuccguacgcccacacac

SEQ ID NO: 1225675 - RNA, 19 nt, Artificial Sequence
  Description of Artificial Sequence: Synthetic oligonucleotide
uucgucagaauccucucca

SEQ ID NO: 1225676 - RNA, 19 nt, Artificial Sequence
  Description of Artificial Sequence: Synthetic oligonucleotide
guuuuaacaugcgucagcc

SEQ ID NO: 1225677 - RNA, 19 nt, Artificial Sequence
  Description of Artificial Sequence: Synthetic oligonucleotide
uuguaauucuugucauccg

SEQ ID NO: 1225678 - RNA, 19 nt, Artificial Sequence
  Description of Artificial Sequence: Synthetic oligonucleotide
uuaacaugcgucagccuca

SEQ ID NO: 1225679 - RNA, 19 nt, Artificial Sequence
  Description of Artificial Sequence: Synthetic oligonucleotide
uccgaucaagcccugaagu

SEQ ID NO: 1225680 - RNA, 19 nt, Artificial Sequence
  Description of Artificial Sequence: Synthetic oligonucleotide
aguuaaugugcuauaauga

SEQ ID NO: 1225681 - RNA, 19 nt, Artificial Sequence
  Description of Artificial Sequence: Synthetic oligonucleotide
cagaagugcgaucaaagug

SEQ ID NO: 1225682 - RNA, 19 nt, Artificial Sequence
  Description of Artificial Sequence: Synthetic oligonucleotide
uuucaauccggugugggug

SEQ ID NO: 1225683 - RNA, 19 nt, Artificial Sequence
  Description of Artificial Sequence: Synthetic oligonucleotide
aucaguucgguuuccacca

SEQ ID NO: 1225684 - RNA, 19 nt, Artificial Sequence
  Description of Artificial Sequence: Synthetic oligonucleotide
ucggacuucagaucaaggu

SEQ ID NO: 1225685 - RNA, 19 nt, Artificial Sequence
  Description of Artificial Sequence: Synthetic oligonucleotide
ugaagccuacuaauagaag

SEQ ID NO: 1225686 - RNA, 19 nt, Artificial Sequence
  Description of Artificial Sequence: Synthetic oligonucleotide
ucaacagcguccaggguca

SEQ ID NO: 1225687 - RNA, 19 nt, Artificial Sequence
  Description of Artificial Sequence: Synthetic oligonucleotide
uucaauccggugugggugg

SEQ ID NO: 1225688 - RNA, 19 nt, Artificial Sequence
  Description of Artificial Sequence: Synthetic oligonucleotide
auagaaggguguugguuuc

SEQ ID NO: 1225689 - RNA, 19 nt, Artificial Sequence
  Description of Artificial Sequence: Synthetic oligonucleotide
gaauggaaugguucugccc

SEQ ID NO: 1225690 - RNA, 19 nt, Artificial Sequence
  Description of Artificial Sequence: Synthetic oligonucleotide
uccagacggauauaguucu

SEQ ID NO: 1225691 - RNA, 19 nt, Artificial Sequence
  Description of Artificial Sequence: Synthetic oligonucleotide
auauucguuuugcaacauc

SEQ ID NO: 1225692 - RNA, 19 nt, Artificial Sequence
  Description of Artificial Sequence: Synthetic oligonucleotide
aaagugugaaccagcagga

SEQ ID NO: 1225693 - RNA, 19 nt, Artificial Sequence
  Description of Artificial Sequence: Synthetic oligonucleotide
uccgcaaagagaucuuccc

SEQ ID NO: 1225694 - RNA, 19 nt, Artificial Sequence
  Description of Artificial Sequence: Synthetic oligonucleotide
cagacuuacacuucucuuc

SEQ ID NO: 1225695 - RNA, 19 nt, Artificial Sequence
  Description of Artificial Sequence: Synthetic oligonucleotide
caaacgagaggacuucacc

SEQ ID NO: 1225696 - RNA, 19 nt, Artificial Sequence
  Description of Artificial Sequence: Synthetic oligonucleotide
uaaugauauucguuuugca

SEQ ID NO: 1225697 - RNA, 19 nt, Artificial Sequence
  Description of Artificial Sequence: Synthetic oligonucleotide
uaauucuugucauccgcca

SEQ ID NO: 1225698 - RNA, 19 nt, Artificial Sequence
  Description of Artificial Sequence: Synthetic oligonucleotide
agacuuacacuucucuucu

SEQ ID NO: 1225699 - RNA, 19 nt, Artificial Sequence
  Description of Artificial Sequence: Synthetic oligonucleotide
ugcuauaaugauauucguu

SEQ ID NO: 1225700 - RNA, 19 nt, Artificial Sequence
  Description of Artificial Sequence: Synthetic oligonucleotide
cuuacacuucucuucuccc

SEQ ID NO: 1225701 - RNA, 19 nt, Artificial Sequence
  Description of Artificial Sequence: Synthetic oligonucleotide
aaagggcacgaucuuuucu

SEQ ID NO: 1225702 - RNA, 19 nt, Artificial Sequence
  Description of Artificial Sequence: Synthetic oligonucleotide
uguugguuucccauaucca

SEQ ID NO: 1225703 - RNA, 19 nt, Artificial Sequence
  Description of Artificial Sequence: Synthetic oligonucleotide
uagaucagccaucaacccu

SEQ ID NO: 1225704 - RNA, 19 nt, Artificial Sequence
  Description of Artificial Sequence: Synthetic oligonucleotide
uuucgucagaauccucucc

SEQ ID NO: 1225705 - RNA, 19 nt, Artificial Sequence
  Description of Artificial Sequence: Synthetic oligonucleotide
auaaagugugaaccagcag

SEQ ID NO: 1225706 - RNA, 19 nt, Artificial Sequence
  Description of Artificial Sequence: Synthetic oligonucleotide
acaugcgucagccucagaa

SEQ ID NO: 1225707 - RNA, 19 nt, Artificial Sequence
  Description of Artificial Sequence: Synthetic oligonucleotide
cuugguuagggugugguac

SEQ ID NO: 1225708 - RNA, 19 nt, Artificial Sequence
  Description of Artificial Sequence: Synthetic oligonucleotide
acacgucuaaagcaucuag

SEQ ID NO: 1225709 - RNA, 19 nt, Artificial Sequence
  Description of Artificial Sequence: Synthetic oligonucleotide
aaaguuguuucgucagaau

SEQ ID NO: 1225710 - RNA, 19 nt, Artificial Sequence
  Description of Artificial Sequence: Synthetic oligonucleotide
augcauguguacugucagc

SEQ ID NO: 1225711 - RNA, 19 nt, Artificial Sequence
  Description of Artificial Sequence: Synthetic oligonucleotide
aaaugcauguguacuguca

SEQ ID NO: 1225712 - RNA, 19 nt, Artificial Sequence
  Description of Artificial Sequence: Synthetic oligonucleotide
cuuggcaacugaagggugc

SEQ ID NO: 1225713 - RNA, 19 nt, Artificial Sequence
  Description of Artificial Sequence: Synthetic oligonucleotide
ugcauguguacugucagcu

SEQ ID NO: 1225714 - RNA, 19 nt, Artificial Sequence
  Description of Artificial Sequence: Synthetic oligonucleotide
aggacuucacccugaaucu

SEQ ID NO: 1225715 - RNA, 19 nt, Artificial Sequence
  Description of Artificial Sequence: Synthetic oligonucleotide
uucacaagcacugggccgc

SEQ ID NO: 1225716 - RNA, 19 nt, Artificial Sequence
  Description of Artificial Sequence: Synthetic oligonucleotide
uugccuccacuguaaaagg

SEQ ID NO: 1225717 - RNA, 19 nt, Artificial Sequence
  Description of Artificial Sequence: Synthetic oligonucleotide
gucaacagcguccaggguc

SEQ ID NO: 1225718 - RNA, 19 nt, Artificial Sequence
  Description of Artificial Sequence: Synthetic oligonucleotide
caguaguuuguugaugucc

SEQ ID NO: 1225719 - RNA, 19 nt, Artificial Sequence
  Description of Artificial Sequence: Synthetic oligonucleotide
agucucuuguaauucuugu

SEQ ID NO: 1225720 - RNA, 19 nt, Artificial Sequence
  Description of Artificial Sequence: Synthetic oligonucleotide
acaagcacugggccgcucg

SEQ ID NO: 1225721 - RNA, 19 nt, Artificial Sequence
  Description of Artificial Sequence: Synthetic oligonucleotide
cacacaguugccuccacug

SEQ ID NO: 1225722 - RNA, 19 nt, Artificial Sequence
  Description of Artificial Sequence: Synthetic oligonucleotide
auuuucagaauggaauggu

SEQ ID NO: 1225723 - RNA, 19 nt, Artificial Sequence
  Description of Artificial Sequence: Synthetic oligonucleotide
aagucucaguacuguccac

SEQ ID NO: 1225724 - RNA, 19 nt, Artificial Sequence
  Description of Artificial Sequence: Synthetic oligonucleotide
uucugaucuccguacgccc

SEQ ID NO: 1225725 - RNA, 19 nt, Artificial Sequence
  Description of Artificial Sequence: Synthetic oligonucleotide
guuagggugugguaccuug

SEQ ID NO: 1225726 - RNA, 19 nt, Artificial Sequence
  Description of Artificial Sequence: Synthetic oligonucleotide
uccuagcagacuuacacuu

SEQ ID NO: 1225727 - RNA, 19 nt, Artificial Sequence
  Description of Artificial Sequence: Synthetic oligonucleotide
agaucagccaucaacccug

SEQ ID NO: 1225728 - RNA, 19 nt, Artificial Sequence
  Description of Artificial Sequence: Synthetic oligonucleotide
guaauucuugucauccgcc

SEQ ID NO: 1225729 - RNA, 19 nt, Artificial Sequence
  Description of Artificial Sequence: Synthetic oligonucleotide
guucgguuuccaccaaacg

SEQ ID NO: 1225730 - RNA, 19 nt, Artificial Sequence
  Description of Artificial Sequence: Synthetic oligonucleotide
cucacuagggaagagcuuc

SEQ ID NO: 1225731 - RNA, 19 nt, Artificial Sequence
  Description of Artificial Sequence: Synthetic oligonucleotide
cuucagaucaagguagcug

SEQ ID NO: 1225732 - RNA, 19 nt, Artificial Sequence
  Description of Artificial Sequence: Synthetic oligonucleotide
agcagacuuacacuucucu

SEQ ID NO: 1225733 - RNA, 19 nt, Artificial Sequence
  Description of Artificial Sequence: Synthetic oligonucleotide
ugcgcugcccucuuccuag

SEQ ID NO: 1225734 - RNA, 19 nt, Artificial Sequence
  Description of Artificial Sequence: Synthetic oligonucleotide
ucugaucuccguacgccca

SEQ ID NO: 1225735 - RNA, 19 nt, Artificial Sequence
  Description of Artificial Sequence: Synthetic oligonucleotide
cacgauaggugccugcaag

SEQ ID NO: 1225736 - RNA, 19 nt, Artificial Sequence
  Description of Artificial Sequence: Synthetic oligonucleotide
uacugcauauaauuugauu

SEQ ID NO: 1225737 - RNA, 19 nt, Artificial Sequence
  Description of Artificial Sequence: Synthetic oligonucleotide
ggugcacauccucagagag

SEQ ID NO: 1225738 - RNA, 19 nt, Artificial Sequence
  Description of Artificial Sequence: Synthetic oligonucleotide
cagauaaagugugaaccag

SEQ ID NO: 1225739 - RNA, 19 nt, Artificial Sequence
  Description of Artificial Sequence: Synthetic oligonucleotide
ucuuggcaacugaagggug

SEQ ID NO: 1225740 - RNA, 19 nt, Artificial Sequence
  Description of Artificial Sequence: Synthetic oligonucleotide
agcacugggccgcucgcgc

SEQ ID NO: 1225741 - RNA, 19 nt, Artificial Sequence
  Description of Artificial Sequence: Synthetic oligonucleotide
uccaacucuuugagaaggc

SEQ ID NO: 1225742 - RNA, 19 nt, Artificial Sequence
  Description of Artificial Sequence: Synthetic oligonucleotide
augcgucagccucagaaug

SEQ ID NO: 1225743 - RNA, 19 nt, Artificial Sequence
  Description of Artificial Sequence: Synthetic oligonucleotide
uuccuagcagacuuacacu

SEQ ID NO: 1225744 - RNA, 19 nt, Artificial Sequence
  Description of Artificial Sequence: Synthetic oligonucleotide
caucaacccugacagcacg

SEQ ID NO: 1225745 - RNA, 19 nt, Artificial Sequence
  Description of Artificial Sequence: Synthetic oligonucleotide
guuaaugugcuauaaugau

SEQ ID NO: 1225746 - RNA, 19 nt, Artificial Sequence
  Description of Artificial Sequence: Synthetic oligonucleotide
uccaccaaacgagaggacu

SEQ ID NO: 1225747 - RNA, 19 nt, Artificial Sequence
  Description of Artificial Sequence: Synthetic oligonucleotide
auaguucuuaucaguucgg

SEQ ID NO: 1225748 - RNA, 19 nt, Artificial Sequence
  Description of Artificial Sequence: Synthetic oligonucleotide
uacuaauagaaggguguug

SEQ ID NO: 1225749 - RNA, 19 nt, Artificial Sequence
  Description of Artificial Sequence: Synthetic oligonucleotide
ggcuccaugagcugaaagc

SEQ ID NO: 1225750 - RNA, 19 nt, Artificial Sequence
  Description of Artificial Sequence: Synthetic oligonucleotide
uccgccugcacuuccgcag

SEQ ID NO: 1225751 - RNA, 19 nt, Artificial Sequence
  Description of Artificial Sequence: Synthetic oligonucleotide
uacgugaucagggucugca

SEQ ID NO: 1225752 - RNA, 19 nt, Artificial Sequence
  Description of Artificial Sequence: Synthetic oligonucleotide
uugguuucccauauccaua

SEQ ID NO: 1225753 - RNA, 19 nt, Artificial Sequence
  Description of Artificial Sequence: Synthetic oligonucleotide
uaauagaaggguguugguu

SEQ ID NO: 1225754 - RNA, 19 nt, Artificial Sequence
  Description of Artificial Sequence: Synthetic oligonucleotide
ugcgucagccucagaauga

SEQ ID NO: 1225755 - RNA, 19 nt, Artificial Sequence
  Description of Artificial Sequence: Synthetic oligonucleotide
ugggugguuugcauucugc

SEQ ID NO: 1225756 - RNA, 19 nt, Artificial Sequence
  Description of Artificial Sequence: Synthetic oligonucleotide
ucacuagggaagagcuucc

SEQ ID NO: 1225757 - RNA, 19 nt, Artificial Sequence
  Description of Artificial Sequence: Synthetic oligonucleotide
ucaguacuguccacgccca

SEQ ID NO: 1225758 - RNA, 19 nt, Artificial Sequence
  Description of Artificial Sequence: Synthetic oligonucleotide
aggcucuauacucuugacu

SEQ ID NO: 1225759 - RNA, 19 nt, Artificial Sequence
  Description of Artificial Sequence: Synthetic oligonucleotide
aaccacuugaggcucuaua

SEQ ID NO: 1225760 - RNA, 19 nt, Artificial Sequence
  Description of Artificial Sequence: Synthetic oligonucleotide
uccucaaauucgucaguca

SEQ ID NO: 1225761 - RNA, 19 nt, Artificial Sequence
  Description of Artificial Sequence: Synthetic oligonucleotide
uaucucucgcauccucuug

SEQ ID NO: 1225762 - RNA, 19 nt, Artificial Sequence
  Description of Artificial Sequence: Synthetic oligonucleotide
gacggauauaguucuuauc

SEQ ID NO: 1225763 - RNA, 19 nt, Artificial Sequence
  Description of Artificial Sequence: Synthetic oligonucleotide
uguccgaucaagcccugaa

SEQ ID NO: 1225764 - RNA, 19 nt, Artificial Sequence
  Description of Artificial Sequence: Synthetic oligonucleotide
acucgucggacuucagauc

SEQ ID NO: 1225765 - RNA, 19 nt, Artificial Sequence
  Description of Artificial Sequence: Synthetic oligonucleotide
aguacucccacucgucgga

SEQ ID NO: 1225766 - RNA, 19 nt, Artificial Sequence
  Description of Artificial Sequence: Synthetic oligonucleotide
cagcacgcacgauaggugc

SEQ ID NO: 1225767 - RNA, 19 nt, Artificial Sequence
  Description of Artificial Sequence: Synthetic oligonucleotide
aauucgucagucacacagu

SEQ ID NO: 1225768 - RNA, 19 nt, Artificial Sequence
  Description of Artificial Sequence: Synthetic oligonucleotide
gaagugcgaucaaagugcc

SEQ ID NO: 1225769 - RNA, 19 nt, Artificial Sequence
  Description of Artificial Sequence: Synthetic oligonucleotide
uuuuaacaugcgucagccu

SEQ ID NO: 1225770 - RNA, 19 nt, Artificial Sequence
  Description of Artificial Sequence: Synthetic oligonucleotide
ucauccgccaggccgcuga

SEQ ID NO: 1225771 - RNA, 19 nt, Artificial Sequence
  Description of Artificial Sequence: Synthetic oligonucleotide
cauuuaggcuccaugagcu

SEQ ID NO: 1225772 - RNA, 19 nt, Artificial Sequence
  Description of Artificial Sequence: Synthetic oligonucleotide
agcugaaagcucucuaaaa

SEQ ID NO: 1225773 - RNA, 19 nt, Artificial Sequence
  Description of Artificial Sequence: Synthetic oligonucleotide
caguacucccacucgucgg

SEQ ID NO: 1225774 - RNA, 19 nt, Artificial Sequence
  Description of Artificial Sequence: Synthetic oligonucleotide
cucgucggacuucagauca

SEQ ID NO: 1225775 - RNA, 19 nt, Artificial Sequence
  Description of Artificial Sequence: Synthetic oligonucleotide
cugaagccaaccacuugag

SEQ ID NO: 1225776 - RNA, 19 nt, Artificial Sequence
  Description of Artificial Sequence: Synthetic oligonucleotide
ucgucagaauccucuccag

SEQ ID NO: 1225777 - RNA, 19 nt, Artificial Sequence
  Description of Artificial Sequence: Synthetic oligonucleotide
acgugaucagggucugcac

SEQ ID NO: 1225778 - RNA, 19 nt, Artificial Sequence
  Description of Artificial Sequence: Synthetic oligonucleotide
caagucucaguacugucca

SEQ ID NO: 1225779 - RNA, 19 nt, Artificial Sequence
  Description of Artificial Sequence: Synthetic oligonucleotide
agacggauauaguucuuau

SEQ ID NO: 1225780 - RNA, 19 nt, Artificial Sequence
  Description of Artificial Sequence: Synthetic oligonucleotide
ucucucgcauccucuugag

SEQ ID NO: 1225781 - RNA, 19 nt, Artificial Sequence
  Description of Artificial Sequence: Synthetic oligonucleotide
uuggaucuccugaagccua

SEQ ID NO: 1225782 - RNA, 19 nt, Artificial Sequence
  Description of Artificial Sequence: Synthetic oligonucleotide
guacuguccacgcccauca

SEQ ID NO: 1225783 - RNA, 19 nt, Artificial Sequence
  Description of Artificial Sequence: Synthetic oligonucleotide
acggcacagaucuugguua

SEQ ID NO: 1225784 - RNA, 19 nt, Artificial Sequence
  Description of Artificial Sequence: Synthetic oligonucleotide
uccucuugagcaccuuuuc

SEQ ID NO: 1225785 - RNA, 19 nt, Artificial Sequence
  Description of Artificial Sequence: Synthetic oligonucleotide
auucgucagucacacaguu

SEQ ID NO: 1225786 - RNA, 19 nt, Artificial Sequence
  Description of Artificial Sequence: Synthetic oligonucleotide
aagugcgaucaaagugccc

SEQ ID NO: 1225787 - RNA, 19 nt, Artificial Sequence
  Description of Artificial Sequence: Synthetic oligonucleotide
aucaacccugacagcacgc

SEQ ID NO: 1225788 - RNA, 19 nt, Artificial Sequence
  Description of Artificial Sequence: Synthetic oligonucleotide
ucaguaguuuguugauguc

SEQ ID NO: 1225789 - RNA, 19 nt, Artificial Sequence
  Description of Artificial Sequence: Synthetic oligonucleotide
uccguacgcccacacacgu

SEQ ID NO: 1225790 - RNA, 19 nt, Artificial Sequence
  Description of Artificial Sequence: Synthetic oligonucleotide
uucaaucacggcucuucuc

SEQ ID NO: 1225791 - RNA, 19 nt, Artificial Sequence
  Description of Artificial Sequence: Synthetic oligonucleotide
ucuauacucuugacuucuc

SEQ ID NO: 1225792 - RNA, 19 nt, Artificial Sequence
  Description of Artificial Sequence: Synthetic oligonucleotide
aguucgggagggcucugag

SEQ ID NO: 1225793 - RNA, 19 nt, Artificial Sequence
  Description of Artificial Sequence: Synthetic oligonucleotide
gcagauaaagugugaacca

SEQ ID NO: 1225794 - RNA, 19 nt, Artificial Sequence
  Description of Artificial Sequence: Synthetic oligonucleotide
acgagaggacuucacccug

SEQ ID NO: 1225795 - RNA, 19 nt, Artificial Sequence
  Description of Artificial Sequence: Synthetic oligonucleotide
cuccguacgcccacacacg

SEQ ID NO: 1225796 - RNA, 19 nt, Artificial Sequence
  Description of Artificial Sequence: Synthetic oligonucleotide
aaugugcuauaaugauauu

SEQ ID NO: 1225797 - RNA, 19 nt, Artificial Sequence
  Description of Artificial Sequence: Synthetic oligonucleotide
aucaguacucccacucguc

SEQ ID NO: 1225798 - RNA, 19 nt, Artificial Sequence
  Description of Artificial Sequence: Synthetic oligonucleotide
gacuucagaucaagguagc

SEQ ID NO: 1225799 - RNA, 19 nt, Artificial Sequence
  Description of Artificial Sequence: Synthetic oligonucleotide
guccgaucaagcccugaag

SEQ ID NO: 1225800 - RNA, 19 nt, Artificial Sequence
  Description of Artificial Sequence: Synthetic oligonucleotide
agguacgugaucagggucu

SEQ ID NO: 1225801 - RNA, 19 nt, Artificial Sequence
  Description of Artificial Sequence: Synthetic oligonucleotide
ccuguuuuaacaugcguca

SEQ ID NO: 1225802 - RNA, 19 nt, Artificial Sequence
  Description of Artificial Sequence: Synthetic oligonucleotide
ucuucccuccuguuuuaac

SEQ ID NO: 1225803 - RNA, 19 nt, Artificial Sequence
  Description of Artificial Sequence: Synthetic oligonucleotide
gagcugaaagcucucuaaa

SEQ ID NO: 1225804 - RNA, 19 nt, Artificial Sequence
  Description of Artificial Sequence: Synthetic oligonucleotide
acgcacgauaggugccugc

SEQ ID NO: 1225805 - RNA, 19 nt, Artificial Sequence
  Description of Artificial Sequence: Synthetic oligonucleotide
guuucgucagaauccucuc

SEQ ID NO: 1225806 - RNA, 19 nt, Artificial Sequence
  Description of Artificial Sequence: Synthetic oligonucleotide
gcacagaucuugguuaggg

SEQ ID NO: 1225807 - RNA, 19 nt, Artificial Sequence
  Description of Artificial Sequence: Synthetic oligonucleotide
cucgcauccucuugagcac

SEQ ID NO: 1225808 - RNA, 19 nt, Artificial Sequence
  Description of Artificial Sequence: Synthetic oligonucleotide
accucccuccgguaauuuc

SEQ ID NO: 1225809 - RNA, 19 nt, Artificial Sequence
  Description of Artificial Sequence: Synthetic oligonucleotide
uuggcaacugaagggugca

SEQ ID NO: 1225810 - RNA, 19 nt, Artificial Sequence
  Description of Artificial Sequence: Synthetic oligonucleotide
cugugccuccuuaaagaug

SEQ ID NO: 1225811 - RNA, 19 nt, Artificial Sequence
  Description of Artificial Sequence: Synthetic oligonucleotide
ccaaauugaucuuggcaac

SEQ ID NO: 1225812 - RNA, 19 nt, Artificial Sequence
  Description of Artificial Sequence: Synthetic oligonucleotide
aggcuccaugagcugaaag

SEQ ID NO: 1225813 - RNA, 19 nt, Artificial Sequence
  Description of Artificial Sequence: Synthetic oligonucleotide
uggaucuccugaagccuac

SEQ ID NO: 1225814 - RNA, 19 nt, Artificial Sequence
  Description of Artificial Sequence: Synthetic oligonucleotide
uaacaugcgucagccucag

SEQ ID NO: 1225815 - RNA, 19 nt, Artificial Sequence
  Description of Artificial Sequence: Synthetic oligonucleotide
agcacgcacgauaggugcc

SEQ ID NO: 1225816 - RNA, 19 nt, Artificial Sequence
  Description of Artificial Sequence: Synthetic oligonucleotide
uucaucuagcuguccgauc

SEQ ID NO: 1225817 - RNA, 19 nt, Artificial Sequence
  Description of Artificial Sequence: Synthetic oligonucleotide
acuugaggcucuauacucu

SEQ ID NO: 1225818 - RNA, 19 nt, Artificial Sequence
  Description of Artificial Sequence: Synthetic oligonucleotide
ugcuuccuagcagacuuac

SEQ ID NO: 1225819 - RNA, 19 nt, Artificial Sequence
  Description of Artificial Sequence: Synthetic oligonucleotide
aucuugguuaggguguggu

SEQ ID NO: 1225820 - RNA, 19 nt, Artificial Sequence
  Description of Artificial Sequence: Synthetic oligonucleotide
cccuccuguuuuaacaugc

SEQ ID NO: 1225821 - RNA, 19 nt, Artificial Sequence
  Description of Artificial Sequence: Synthetic oligonucleotide
ucuugguuaggguguggua

SEQ ID NO: 1225822 - RNA, 19 nt, Artificial Sequence
  Description of Artificial Sequence: Synthetic oligonucleotide
agccuacuaauagaagggu

SEQ ID NO: 1225823 - RNA, 19 nt, Artificial Sequence
  Description of Artificial Sequence: Synthetic oligonucleotide
gucggacuucagaucaagg

SEQ ID NO: 1225824 - RNA, 19 nt, Artificial Sequence
  Description of Artificial Sequence: Synthetic oligonucleotide
agcuguccgaucaagcccu

SEQ ID NO: 1225825 - RNA, 19 nt, Artificial Sequence
  Description of Artificial Sequence: Synthetic oligonucleotide
aaucucugacagguuucca

SEQ ID NO: 1225826 - RNA, 19 nt, Artificial Sequence
  Description of Artificial Sequence: Synthetic oligonucleotide
aucuagcuguccgaucaag

SEQ ID NO: 1225827 - RNA, 19 nt, Artificial Sequence
  Description of Artificial Sequence: Synthetic oligonucleotide
cacgcccaucagaagugcg

SEQ ID NO: 1225828 - RNA, 19 nt, Artificial Sequence
  Description of Artificial Sequence: Synthetic oligonucleotide
uccgguaauuucugaucuc

SEQ ID NO: 1225829 - RNA, 19 nt, Artificial Sequence
  Description of Artificial Sequence: Synthetic oligonucleotide
gacagcacgcacgauaggu

SEQ ID NO: 1225830 - RNA, 19 nt, Artificial Sequence
  Description of Artificial Sequence: Synthetic oligonucleotide
cacacacgucuaaagcauc

SEQ ID NO: 1225831 - RNA, 19 nt, Artificial Sequence
  Description of Artificial Sequence: Synthetic oligonucleotide
ggcucuauacucuugacuu

SEQ ID NO: 1225832 - RNA, 19 nt, Artificial Sequence
  Description of Artificial Sequence: Synthetic oligonucleotide
acccugacagcacgcacga

SEQ ID NO: 1225833 - RNA, 19 nt, Artificial Sequence
  Description of Artificial Sequence: Synthetic oligonucleotide
agccaaccacuugaggcuc

SEQ ID NO: 1225834 - RNA, 19 nt, Artificial Sequence
  Description of Artificial Sequence: Synthetic oligonucleotide
acacacgucuaaagcaucu

SEQ ID NO: 1225835 - RNA, 19 nt, Artificial Sequence
  Description of Artificial Sequence: Synthetic oligonucleotide
agccucagaaugauguccu

SEQ ID NO: 1225836 - RNA, 19 nt, Artificial Sequence
  Description of Artificial Sequence: Synthetic oligonucleotide
cuagcagacuuacacuucu

SEQ ID NO: 1225837 - RNA, 19 nt, Artificial Sequence
  Description of Artificial Sequence: Synthetic oligonucleotide
gcaacuguuuggucagcag

SEQ ID NO: 1225838 - RNA, 19 nt, Artificial Sequence
  Description of Artificial Sequence: Synthetic oligonucleotide
uccggugugggugguuugc

SEQ ID NO: 1225839 - RNA, 19 nt, Artificial Sequence
  Description of Artificial Sequence: Synthetic oligonucleotide
uuccaccaaacgagaggac

SEQ ID NO: 1225840 - RNA, 19 nt, Artificial Sequence
  Description of Artificial Sequence: Synthetic oligonucleotide
acagcacgcacgauaggug

SEQ ID NO: 1225841 - RNA, 19 nt, Artificial Sequence
  Description of Artificial Sequence: Synthetic oligonucleotide
gaaggguguugguuuccca

SEQ ID NO: 1225842 - RNA, 19 nt, Artificial Sequence
  Description of Artificial Sequence: Synthetic oligonucleotide
gaucuccguacgcccacac

SEQ ID NO: 1225843 - RNA, 19 nt, Artificial Sequence
  Description of Artificial Sequence: Synthetic oligonucleotide
ccgguaauuucugaucucc

SEQ ID NO: 1225844 - RNA, 19 nt, Artificial Sequence
  Description of Artificial Sequence: Synthetic oligonucleotide
gcgaucaaagugccccugg

SEQ ID NO: 1225845 - RNA, 19 nt, Artificial Sequence
  Description of Artificial Sequence: Synthetic oligonucleotide
aaauuacauuuaggcucca

SEQ ID NO: 1225846 - RNA, 19 nt, Artificial Sequence
  Description of Artificial Sequence: Synthetic oligonucleotide
uuguuucgucagaauccuc

SEQ ID NO: 1225847 - RNA, 19 nt, Artificial Sequence
  Description of Artificial Sequence: Synthetic oligonucleotide
uacgcccacacacgucuaa

SEQ ID NO: 1225848 - RNA, 19 nt, Artificial Sequence
  Description of Artificial Sequence: Synthetic oligonucleotide
guuguuucgucagaauccu

SEQ ID NO: 1225849 - RNA, 19 nt, Artificial Sequence
  Description of Artificial Sequence: Synthetic oligonucleotide
ccaucaguacucccacucg

SEQ ID NO: 1225850 - RNA, 19 nt, Artificial Sequence
  Description of Artificial Sequence: Synthetic oligonucleotide
ucgcauccucuugagcacc

SEQ ID NO: 1225851 - RNA, 19 nt, Artificial Sequence
  Description of Artificial Sequence: Synthetic oligonucleotide
cucccuccgguaauuucug

SEQ ID NO: 1225852 - RNA, 19 nt, Artificial Sequence
  Description of Artificial Sequence: Synthetic oligonucleotide
ggccuuguucaccucacac

SEQ ID NO: 1225853 - RNA, 19 nt, Artificial Sequence
  Description of Artificial Sequence: Synthetic oligonucleotide
ugcccucuuccuagcuugc

SEQ ID NO: 1225854 - RNA, 19 nt, Artificial Sequence
  Description of Artificial Sequence: Synthetic oligonucleotide
cugcacuuccgcagcguug

SEQ ID NO: 1225855 - RNA, 19 nt, Artificial Sequence
  Description of Artificial Sequence: Synthetic oligonucleotide
cuauaaugauauucguuuu

SEQ ID NO: 1225856 - RNA, 19 nt, Artificial Sequence
  Description of Artificial Sequence: Synthetic oligonucleotide
ucaguucgguuuccaccaa

SEQ ID NO: 1225857 - RNA, 19 nt, Artificial Sequence
  Description of Artificial Sequence: Synthetic oligonucleotide
cuccgguaauuucugaucu

SEQ ID NO: 1225858 - RNA, 19 nt, Artificial Sequence
  Description of Artificial Sequence: Synthetic oligonucleotide
ccuacuaauagaagggugu

SEQ ID NO: 1225859 - RNA, 19 nt, Artificial Sequence
  Description of Artificial Sequence: Synthetic oligonucleotide
gccugugccuccuuaaaga

SEQ ID NO: 1225860 - RNA, 19 nt, Artificial Sequence
  Description of Artificial Sequence: Synthetic oligonucleotide
caagcacugggccgcucgc

SEQ ID NO: 1225861 - RNA, 19 nt, Artificial Sequence
  Description of Artificial Sequence: Synthetic oligonucleotide
ggaaugguucugccccagg

SEQ ID NO: 1225862 - RNA, 19 nt, Artificial Sequence
  Description of Artificial Sequence: Synthetic oligonucleotide
gugguaccuugcuuuccgc

SEQ ID NO: 1225863 - RNA, 19 nt, Artificial Sequence
  Description of Artificial Sequence: Synthetic oligonucleotide
aucuccguacgcccacaca

SEQ ID NO: 1225864 - RNA, 19 nt, Artificial Sequence
  Description of Artificial Sequence: Synthetic oligonucleotide
uggccuuguucaccucaca

SEQ ID NO: 1225865 - RNA, 19 nt, Artificial Sequence
  Description of Artificial Sequence: Synthetic oligonucleotide
uaggugccugcaagucuca

SEQ ID NO: 1225866 - RNA, 19 nt, Artificial Sequence
  Description of Artificial Sequence: Synthetic oligonucleotide
uacucccacucgucggacu

SEQ ID NO: 1225867 - RNA, 19 nt, Artificial Sequence
  Description of Artificial Sequence: Synthetic oligonucleotide
gccuacuaauagaagggug

SEQ ID NO: 1225868 - RNA, 19 nt, Artificial Sequence
  Description of Artificial Sequence: Synthetic oligonucleotide
accaaacgagaggacuuca

SEQ ID NO: 1225869 - RNA, 19 nt, Artificial Sequence
  Description of Artificial Sequence: Synthetic oligonucleotide
guguucaguuucacaagca

SEQ ID NO: 1225870 - RNA, 19 nt, Artificial Sequence
  Description of Artificial Sequence: Synthetic oligonucleotide
ugccugcaagucucaguac

SEQ ID NO: 1225871 - RNA, 19 nt, Artificial Sequence
  Description of Artificial Sequence: Synthetic oligonucleotide
gaucaagguagcugaggau

SEQ ID NO: 1225872 - RNA, 19 nt, Artificial Sequence
  Description of Artificial Sequence: Synthetic oligonucleotide
ccugaagccuacuaauaga

SEQ ID NO: 1225873 - RNA, 19 nt, Artificial Sequence
  Description of Artificial Sequence: Synthetic oligonucleotide
gugcuauaaugauauucgu

SEQ ID NO: 1225874 - RNA, 19 nt, Artificial Sequence
  Description of Artificial Sequence: Synthetic oligonucleotide
ucccacucgucggacuuca

SEQ ID NO: 1225875 - RNA, 19 nt, Artificial Sequence
  Description of Artificial Sequence: Synthetic oligonucleotide
cucuauacucuugacuucu

SEQ ID NO: 1225876 - RNA, 19 nt, Artificial Sequence
  Description of Artificial Sequence: Synthetic oligonucleotide
caucgcgcgcgcuccuccg

SEQ ID NO: 1225877 - RNA, 19 nt, Artificial Sequence
  Description of Artificial Sequence: Synthetic oligonucleotide
ugguuagggugugguaccu

SEQ ID NO: 1225878 - RNA, 19 nt, Artificial Sequence
  Description of Artificial Sequence: Synthetic oligonucleotide
caccaaacgagaggacuuc

SEQ ID NO: 1225879 - RNA, 19 nt, Artificial Sequence
  Description of Artificial Sequence: Synthetic oligonucleotide
ccuccgguaauuucugauc

SEQ ID NO: 1225880 - RNA, 19 nt, Artificial Sequence
  Description of Artificial Sequence: Synthetic oligonucleotide
ccaaacgagaggacuucac

SEQ ID NO: 1225881 - RNA, 19 nt, Artificial Sequence
  Description of Artificial Sequence: Synthetic oligonucleotide
cuaauagaaggguguuggu

SEQ ID NO: 1225882 - RNA, 19 nt, Artificial Sequence
  Description of Artificial Sequence: Synthetic oligonucleotide
ggucaaaugcauguguacu

SEQ ID NO: 1225883 - RNA, 19 nt, Artificial Sequence
  Description of Artificial Sequence: Synthetic oligonucleotide
ucgucggacuucagaucaa

SEQ ID NO: 1225884 - RNA, 19 nt, Artificial Sequence
  Description of Artificial Sequence: Synthetic oligonucleotide
ucccuccgguaauuucuga

SEQ ID NO: 1225885 - RNA, 19 nt, Artificial Sequence
  Description of Artificial Sequence: Synthetic oligonucleotide
agggcacgaucuuuucuuu

SEQ ID NO: 1225886 - RNA, 19 nt, Artificial Sequence
  Description of Artificial Sequence: Synthetic oligonucleotide
gagauugaauaugcacaua

SEQ ID NO: 1225887 - RNA, 19 nt, Artificial Sequence
  Description of Artificial Sequence: Synthetic oligonucleotide
gcucuauacucuugacuuc

SEQ ID NO: 1225888 - RNA, 19 nt, Artificial Sequence
  Description of Artificial Sequence: Synthetic oligonucleotide
ugaucuccguacgcccaca

SEQ ID NO: 1225889 - RNA, 19 nt, Artificial Sequence
  Description of Artificial Sequence: Synthetic oligonucleotide
caucagaagugcgaucaaa

SEQ ID NO: 1225890 - RNA, 19 nt, Artificial Sequence
  Description of Artificial Sequence: Synthetic oligonucleotide
gugugguaccuugcuuucc

SEQ ID NO: 1225891 - RNA, 19 nt, Artificial Sequence
  Description of Artificial Sequence: Synthetic oligonucleotide
caacugaagggugcacauc

SEQ ID NO: 1225892 - RNA, 19 nt, Artificial Sequence
  Description of Artificial Sequence: Synthetic oligonucleotide
aacaugcgucagccucaga

SEQ ID NO: 1225893 - RNA, 19 nt, Artificial Sequence
  Description of Artificial Sequence: Synthetic oligonucleotide
caucaguacucccacucgu

SEQ ID NO: 1225894 - RNA, 19 nt, Artificial Sequence
  Description of Artificial Sequence: Synthetic oligonucleotide
acgcccaucagaagugcga

SEQ ID NO: 1225895 - RNA, 19 nt, Artificial Sequence
  Description of Artificial Sequence: Synthetic oligonucleotide
acugaagggugcacauccu

SEQ ID NO: 1225896 - RNA, 19 nt, Artificial Sequence
  Description of Artificial Sequence: Synthetic oligonucleotide
agcucucuaaaagcagaua

SEQ ID NO: 1225897 - RNA, 19 nt, Artificial Sequence
  Description of Artificial Sequence: Synthetic oligonucleotide
cgucuaaagcaucuagauc

SEQ ID NO: 1225898 - RNA, 19 nt, Artificial Sequence
  Description of Artificial Sequence: Synthetic oligonucleotide
cuucaaucacggcucuucu

SEQ ID NO: 1225899 - RNA, 19 nt, Artificial Sequence
  Description of Artificial Sequence: Synthetic oligonucleotide
ccaucaacccugacagcac

SEQ ID NO: 1225900 - RNA, 19 nt, Artificial Sequence
  Description of Artificial Sequence: Synthetic oligonucleotide
ccucuuccuagcuugcuga

SEQ ID NO: 1225901 - RNA, 19 nt, Artificial Sequence
  Description of Artificial Sequence: Synthetic oligonucleotide
caaauucgucagucacaca

SEQ ID NO: 1225902 - RNA, 19 nt, Artificial Sequence
  Description of Artificial Sequence: Synthetic oligonucleotide
gauauucguuuugcaacau

SEQ ID NO: 1225903 - RNA, 19 nt, Artificial Sequence
  Description of Artificial Sequence: Synthetic oligonucleotide
caugcgucagccucagaau

SEQ ID NO: 1225904 - RNA, 19 nt, Artificial Sequence
  Description of Artificial Sequence: Synthetic oligonucleotide
ucaauccgguguggguggu

SEQ ID NO: 1225905 - RNA, 19 nt, Artificial Sequence
  Description of Artificial Sequence: Synthetic oligonucleotide
gguacgugaucagggucug

SEQ ID NO: 1225906 - RNA, 19 nt, Artificial Sequence
  Description of Artificial Sequence: Synthetic oligonucleotide
cacagaucuugguuagggu

SEQ ID NO: 1225907 - RNA, 19 nt, Artificial Sequence
  Description of Artificial Sequence: Synthetic oligonucleotide
ggccgcucgcgccaucgcg

SEQ ID NO: 1225908 - RNA, 19 nt, Artificial Sequence
  Description of Artificial Sequence: Synthetic oligonucleotide
gcuccaugagcugaaagcu

SEQ ID NO: 1225909 - RNA, 19 nt, Artificial Sequence
  Description of Artificial Sequence: Synthetic oligonucleotide
cagacggauauaguucuua

SEQ ID NO: 1225910 - RNA, 19 nt, Artificial Sequence
  Description of Artificial Sequence: Synthetic oligonucleotide
gaucagccaucaacccuga

SEQ ID NO: 1225911 - RNA, 19 nt, Artificial Sequence
  Description of Artificial Sequence: Synthetic oligonucleotide
gguguugguuucccauauc

SEQ ID NO: 1225912 - RNA, 19 nt, Artificial Sequence
  Description of Artificial Sequence: Synthetic oligonucleotide
cgaucaagcccugaaguuc

SEQ ID NO: 1225913 - RNA, 19 nt, Artificial Sequence
  Description of Artificial Sequence: Synthetic oligonucleotide
cucuuccuagcuugcugaa

SEQ ID NO: 1225914 - RNA, 19 nt, Artificial Sequence
  Description of Artificial Sequence: Synthetic oligonucleotide
cuugaggcucuauacucuu

SEQ ID NO: 1225915 - RNA, 19 nt, Artificial Sequence
  Description of Artificial Sequence: Synthetic oligonucleotide
ggacaucccacacagccuu

SEQ ID NO: 1225916 - RNA, 19 nt, Artificial Sequence
  Description of Artificial Sequence: Synthetic oligonucleotide
cuacuaauagaaggguguu

SEQ ID NO: 1225917 - RNA, 19 nt, Artificial Sequence
  Description of Artificial Sequence: Synthetic oligonucleotide
caucuagcuguccgaucaa

SEQ ID NO: 1225918 - RNA, 19 nt, Artificial Sequence
  Description of Artificial Sequence: Synthetic oligonucleotide
guacgugaucagggucugc

SEQ ID NO: 1225919 - RNA, 19 nt, Artificial Sequence
  Description of Artificial Sequence: Synthetic oligonucleotide
guacucccacucgucggac

SEQ ID NO: 1225920 - RNA, 19 nt, Artificial Sequence
  Description of Artificial Sequence: Synthetic oligonucleotide
ugucauccgccaggccgcu

SEQ ID NO: 1225921 - RNA, 19 nt, Artificial Sequence
  Description of Artificial Sequence: Synthetic oligonucleotide
cagcaacuguuuggucagc

SEQ ID NO: 1225922 - RNA, 19 nt, Artificial Sequence
  Description of Artificial Sequence: Synthetic oligonucleotide
uaggcuccaugagcugaaa

SEQ ID NO: 1225923 - RNA, 19 nt, Artificial Sequence
  Description of Artificial Sequence: Synthetic oligonucleotide
cacggcacagaucuugguu

SEQ ID NO: 1225924 - RNA, 19 nt, Artificial Sequence
  Description of Artificial Sequence: Synthetic oligonucleotide
caguucgguuuccaccaaa

SEQ ID NO: 1225925 - RNA, 19 nt, Artificial Sequence
  Description of Artificial Sequence: Synthetic oligonucleotide
cuucaucuagcuguccgau

SEQ ID NO: 1225926 - RNA, 19 nt, Artificial Sequence
  Description of Artificial Sequence: Synthetic oligonucleotide
gcagacuuacacuucucuu

SEQ ID NO: 1225927 - RNA, 19 nt, Artificial Sequence
  Description of Artificial Sequence: Synthetic oligonucleotide
ggacuucacccugaaucuc

SEQ ID NO: 1225928 - RNA, 19 nt, Artificial Sequence
  Description of Artificial Sequence: Synthetic oligonucleotide
acgcccacacacgucuaaa

SEQ ID NO: 1225929 - RNA, 19 nt, Artificial Sequence
  Description of Artificial Sequence: Synthetic oligonucleotide
ggugccugcaagucucagu

SEQ ID NO: 1225930 - RNA, 19 nt, Artificial Sequence
  Description of Artificial Sequence: Synthetic oligonucleotide
gugcgaucaaagugccccu

SEQ ID NO: 1225931 - RNA, 19 nt, Artificial Sequence
  Description of Artificial Sequence: Synthetic oligonucleotide
cacgcacgauaggugccug

SEQ ID NO: 1225932 - RNA, 19 nt, Artificial Sequence
  Description of Artificial Sequence: Synthetic oligonucleotide
cacacgucuaaagcaucua

SEQ ID NO: 1225933 - RNA, 19 nt, Artificial Sequence
  Description of Artificial Sequence: Synthetic oligonucleotide
cacugggccgcucgcgcca

SEQ ID NO: 1225934 - RNA, 19 nt, Artificial Sequence
  Description of Artificial Sequence: Synthetic oligonucleotide
ggugugggugguuugcauu

SEQ ID NO: 1225935 - RNA, 19 nt, Artificial Sequence
  Description of Artificial Sequence: Synthetic oligonucleotide
gcacugggccgcucgcgcc

SEQ ID NO: 1225936 - RNA, 19 nt, Artificial Sequence
  Description of Artificial Sequence: Synthetic oligonucleotide
ccucccuccgguaauuucu

SEQ ID NO: 1225937 - RNA, 19 nt, Artificial Sequence
  Description of Artificial Sequence: Synthetic oligonucleotide
gcuucccggaugcaggggu

SEQ ID NO: 1225938 - RNA, 19 nt, Artificial Sequence
  Description of Artificial Sequence: Synthetic oligonucleotide
caguugccuccacuguaaa

SEQ ID NO: 1225939 - RNA, 19 nt, Artificial Sequence
  Description of Artificial Sequence: Synthetic oligonucleotide
ggcuucccggaugcagggg

SEQ ID NO: 1225940 - RNA, 19 nt, Artificial Sequence
  Description of Artificial Sequence: Synthetic oligonucleotide
ccaggucaaaugcaugugu

SEQ ID NO: 1225941 - RNA, 19 nt, Artificial Sequence
  Description of Artificial Sequence: Synthetic oligonucleotide
ggguguugguuucccauau

SEQ ID NO: 1225942 - RNA, 19 nt, Artificial Sequence
  Description of Artificial Sequence: Synthetic oligonucleotide
ccaucgcgcgcgcuccucc

SEQ ID NO: 1225943 - RNA, 19 nt, Artificial Sequence
  Description of Artificial Sequence: Synthetic oligonucleotide
ccacucgucggacuucaga

SEQ ID NO: 1225944 - RNA, 19 nt, Artificial Sequence
  Description of Artificial Sequence: Synthetic oligonucleotide
gccgcugaagccaaccacu

SEQ ID NO: 1225945 - RNA, 19 nt, Artificial Sequence
  Description of Artificial Sequence: Synthetic oligonucleotide
ccccaggucaaaugcaugu

SEQ ID NO: 1225946 - RNA, 19 nt, Artificial Sequence
  Description of Artificial Sequence: Synthetic oligonucleotide
gccgcucgcgccaucgcgc

SEQ ID NO: 1225947 - RNA, 19 nt, Artificial Sequence
  Description of Artificial Sequence: Synthetic oligonucleotide
cucgcgccaucgcgcgcgc

SEQ ID NO: 1225948 - RNA, 19 nt, Artificial Sequence
  Description of Artificial Sequence: Synthetic oligonucleotide
ccgcucgcgccaucgcgcg

SEQ ID NO: 1225949 - RNA, 19 nt, Artificial Sequence
  Description of Artificial Sequence: Synthetic oligonucleotide
ccgccugcacuuccgcagc

SEQ ID NO: 1225950 - RNA, 19 nt, Artificial Sequence
  Description of Artificial Sequence: Synthetic oligonucleotide
cgucggacuucagaucaag

SEQ ID NO: 1225951 - RNA, 19 nt, Artificial Sequence
  Description of Artificial Sequence: Synthetic oligonucleotide
caacagcguccagggucag

SEQ ID NO: 1225952 - RNA, 19 nt, Artificial Sequence
  Description of Artificial Sequence: Synthetic oligonucleotide
cguacgcccacacacgucu

SEQ ID NO: 1225953 - RNA, 19 nt, Artificial Sequence
  Description of Artificial Sequence: Synthetic oligonucleotide
gcuuccuagcagacuuaca

SEQ ID NO: 1225954 - RNA, 19 nt, Artificial Sequence
  Description of Artificial Sequence: Synthetic oligonucleotide
caguucgggagggcucuga

SEQ ID NO: 1225955 - RNA, 19 nt, Artificial Sequence
  Description of Artificial Sequence: Synthetic oligonucleotide
gcacauccucagagagcgg

SEQ ID NO: 1225956 - RNA, 19 nt, Artificial Sequence
  Description of Artificial Sequence: Synthetic oligonucleotide
gguuucccauauccauacu

SEQ ID NO: 1225957 - RNA, 19 nt, Artificial Sequence
  Description of Artificial Sequence: Synthetic oligonucleotide
ccggaugcagggguucuuc

SEQ ID NO: 1225958 - RNA, 19 nt, Artificial Sequence
  Description of Artificial Sequence: Synthetic oligonucleotide
cgguuuccaccaaacgaga

SEQ ID NO: 1225959 - RNA, 19 nt, Artificial Sequence
  Description of Artificial Sequence: Synthetic oligonucleotide
cuguccgaucaagcccuga

SEQ ID NO: 1225960 - RNA, 19 nt, Artificial Sequence
  Description of Artificial Sequence: Synthetic oligonucleotide
ccaccaaacgagaggacuu

SEQ ID NO: 1225961 - RNA, 19 nt, Artificial Sequence
  Description of Artificial Sequence: Synthetic oligonucleotide
cacaagcacugggccgcuc

SEQ ID NO: 1225962 - RNA, 19 nt, Artificial Sequence
  Description of Artificial Sequence: Synthetic oligonucleotide
cacuagggaagagcuuccu

SEQ ID NO: 1225963 - RNA, 19 nt, Artificial Sequence
  Description of Artificial Sequence: Synthetic oligonucleotide
cgucagccucagaaugaug

SEQ ID NO: 1225964 - RNA, 19 nt, Artificial Sequence
  Description of Artificial Sequence: Synthetic oligonucleotide
ccgcaaagagaucuucccu

SEQ ID NO: 1225965 - RNA, 19 nt, Artificial Sequence
  Description of Artificial Sequence: Synthetic oligonucleotide
ccguacgcccacacacguc

SEQ ID NO: 1225966 - RNA, 19 nt, Artificial Sequence
  Description of Artificial Sequence: Synthetic oligonucleotide
gcacuucaaucacggcucu

SEQ ID NO: 1225967 - RNA, 19 nt, Artificial Sequence
  Description of Artificial Sequence: Synthetic oligonucleotide
cgugaucagggucugcacu

SEQ ID NO: 1225968 - RNA, 19 nt, Artificial Sequence
  Description of Artificial Sequence: Synthetic oligonucleotide
ggucaacagcguccagggu

SEQ ID NO: 1225969 - RNA, 19 nt, Artificial Sequence
  Description of Artificial Sequence: Synthetic oligonucleotide
ccgaucaagcccugaaguu

SEQ ID NO: 1225970 - RNA, 19 nt, Artificial Sequence
  Description of Artificial Sequence: Synthetic oligonucleotide
cccacucgucggacuucag

SEQ ID NO: 1225971 - RNA, 19 nt, Artificial Sequence
  Description of Artificial Sequence: Synthetic oligonucleotide
guacgcccacacacgucua

SEQ ID NO: 1225972 - RNA, 19 nt, Artificial Sequence
  Description of Artificial Sequence: Synthetic oligonucleotide
gcuguccgaucaagcccug

SEQ ID NO: 1225973 - RNA, 19 nt, Artificial Sequence
  Description of Artificial Sequence: Synthetic oligonucleotide
cccuccgguaauuucugau

SEQ ID NO: 1225974 - RNA, 19 nt, Artificial Sequence
  Description of Artificial Sequence: Synthetic oligonucleotide
gcacgcacgauaggugccu

SEQ ID NO: 1225975 - RNA, 19 nt, Artificial Sequence
  Description of Artificial Sequence: Synthetic oligonucleotide
cuugcacggcacagaucuu

SEQ ID NO: 1225976 - RNA, 19 nt, Artificial Sequence
  Description of Artificial Sequence: Synthetic oligonucleotide
ucgcgccaucgcgcgcgcu

SEQ ID NO: 1225977 - RNA, 19 nt, Artificial Sequence
  Description of Artificial Sequence: Synthetic oligonucleotide
cgcgccaucgcgcgcgcuc

SEQ ID NO: 1225978 - RNA, 19 nt, Artificial Sequence
  Description of Artificial Sequence: Synthetic oligonucleotide
gguuagggugugguaccuu

SEQ ID NO: 1225979 - RNA, 19 nt, Artificial Sequence
  Description of Artificial Sequence: Synthetic oligonucleotide
ccggugugggugguuugca

SEQ ID NO: 1225980 - RNA, 19 nt, Artificial Sequence
  Description of Artificial Sequence: Synthetic oligonucleotide
gccaucgcgcgcgcuccuc

SEQ ID NO: 1225981 - RNA, 19 nt, Artificial Sequence
  Description of Artificial Sequence: Synthetic oligonucleotide
ccucacuagggaagagcuu

SEQ ID NO: 1225982 - RNA, 19 nt, Artificial Sequence
  Description of Artificial Sequence: Synthetic oligonucleotide
ccgcugaagccaaccacuu

SEQ ID NO: 1225983 - RNA, 19 nt, Artificial Sequence
  Description of Artificial Sequence: Synthetic oligonucleotide
ccagacggauauaguucuu

SEQ ID NO: 1225984 - RNA, 19 nt, Artificial Sequence
  Description of Artificial Sequence: Synthetic oligonucleotide
caauccggugugggugguu

SEQ ID NO: 1225985 - RNA, 19 nt, Artificial Sequence
  Description of Artificial Sequence: Synthetic oligonucleotide
cgcucgcgccaucgcgcgc

SEQ ID NO: 1225986 - RNA, 19 nt, Artificial Sequence
  Description of Artificial Sequence: Synthetic oligonucleotide
cgcccaucagaagugcgau

SEQ ID NO: 1225987 - RNA, 19 nt, Artificial Sequence
  Description of Artificial Sequence: Synthetic oligonucleotide
cccggaugcagggguucuu

SEQ ID NO: 1225988 - RNA, 19 nt, Artificial Sequence
  Description of Artificial Sequence: Synthetic oligonucleotide
aguggcuuuauuuagaggc

SEQ ID NO: 1225989 - RNA, 19 nt, Artificial Sequence
  Description of Artificial Sequence: Synthetic oligonucleotide
aauguaguuccuuaggacg

SEQ ID NO: 1225990 - RNA, 19 nt, Artificial Sequence
  Description of Artificial Sequence: Synthetic oligonucleotide
ucacuuauaagcaugagac

SEQ ID NO: 1225991 - RNA, 19 nt, Artificial Sequence
  Description of Artificial Sequence: Synthetic oligonucleotide
uuuaugaggaucauguuac

SEQ ID NO: 1225992 - RNA, 19 nt, Artificial Sequence
  Description of Artificial Sequence: Synthetic oligonucleotide
auaaggagacuccagcagc

SEQ ID NO: 1225993 - RNA, 19 nt, Artificial Sequence
  Description of Artificial Sequence: Synthetic oligonucleotide
uuugcaucacuuauaagca

SEQ ID NO: 1225994 - RNA, 19 nt, Artificial Sequence
  Description of Artificial Sequence: Synthetic oligonucleotide
auagucaauagugagcccc

SEQ ID NO: 1225995 - RNA, 19 nt, Artificial Sequence
  Description of Artificial Sequence: Synthetic oligonucleotide
caugcacagaccaugaggg

SEQ ID NO: 1225996 - RNA, 19 nt, Artificial Sequence
  Description of Artificial Sequence: Synthetic oligonucleotide
ucggauaucauuucguccc

SEQ ID NO: 1225997 - RNA, 19 nt, Artificial Sequence
  Description of Artificial Sequence: Synthetic oligonucleotide
aguccgaugguucagcugg

SEQ ID NO: 1225998 - RNA, 19 nt, Artificial Sequence
  Description of Artificial Sequence: Synthetic oligonucleotide
aaagccaacacacugccau

SEQ ID NO: 1225999 - RNA, 19 nt, Artificial Sequence
  Description of Artificial Sequence: Synthetic oligonucleotide
acugcauuccuacacuggc

SEQ ID NO: 1226000 - RNA, 19 nt, Artificial Sequence
  Description of Artificial Sequence: Synthetic oligonucleotide
ucuuauaaaagugggagcu

SEQ ID NO: 1226001 - RNA, 19 nt, Artificial Sequence
  Description of Artificial Sequence: Synthetic oligonucleotide
gacauagucaagcaucugc

SEQ ID NO: 1226002 - RNA, 19 nt, Artificial Sequence
  Description of Artificial Sequence: Synthetic oligonucleotide
auaucauuucgucccauac

SEQ ID NO: 1226003 - RNA, 19 nt, Artificial Sequence
  Description of Artificial Sequence: Synthetic oligonucleotide
acuuauaagcaugagacug

SEQ ID NO: 1226004 - RNA, 19 nt, Artificial Sequence
  Description of Artificial Sequence: Synthetic oligonucleotide
uguaauaaggagacuccag

SEQ ID NO: 1226005 - RNA, 19 nt, Artificial Sequence
  Description of Artificial Sequence: Synthetic oligonucleotide
uuguuggugugcaugaugc

SEQ ID NO: 1226006 - RNA, 19 nt, Artificial Sequence
  Description of Artificial Sequence: Synthetic oligonucleotide
auugcauacauggucaggg

SEQ ID NO: 1226007 - RNA, 19 nt, Artificial Sequence
  Description of Artificial Sequence: Synthetic oligonucleotide
ugcaauguaguuccuuagg

SEQ ID NO: 1226008 - RNA, 19 nt, Artificial Sequence
  Description of Artificial Sequence: Synthetic oligonucleotide
ugaggaucauguuacacug

SEQ ID NO: 1226009 - RNA, 19 nt, Artificial Sequence
  Description of Artificial Sequence: Synthetic oligonucleotide
uuuauuuagaggccuggga

SEQ ID NO: 1226010 - RNA, 19 nt, Artificial Sequence
  Description of Artificial Sequence: Synthetic oligonucleotide
guaauaaggagacuccagc

SEQ ID NO: 1226011 - RNA, 19 nt, Artificial Sequence
  Description of Artificial Sequence: Synthetic oligonucleotide
cauacuagggccugcacgc

SEQ ID NO: 1226012 - RNA, 19 nt, Artificial Sequence
  Description of Artificial Sequence: Synthetic oligonucleotide
agaugggucauguuuugac

SEQ ID NO: 1226013 - RNA, 19 nt, Artificial Sequence
  Description of Artificial Sequence: Synthetic oligonucleotide
agccaaaucuuauaaaagu

SEQ ID NO: 1226014 - RNA, 19 nt, Artificial Sequence
  Description of Artificial Sequence: Synthetic oligonucleotide
ugcaucacuuauaagcaug

SEQ ID NO: 1226015 - RNA, 19 nt, Artificial Sequence
  Description of Artificial Sequence: Synthetic oligonucleotide
cuuauaagcaugagacugc

SEQ ID NO: 1226016 - RNA, 19 nt, Artificial Sequence
  Description of Artificial Sequence: Synthetic oligonucleotide
uaauaaggagacuccagca

SEQ ID NO: 1226017 - RNA, 19 nt, Artificial Sequence
  Description of Artificial Sequence: Synthetic oligonucleotide
gaagccaaaggguccauag

SEQ ID NO: 1226018 - RNA, 19 nt, Artificial Sequence
  Description of Artificial Sequence: Synthetic oligonucleotide
cuccacucgaauaaggccc

SEQ ID NO: 1226019 - RNA, 19 nt, Artificial Sequence
  Description of Artificial Sequence: Synthetic oligonucleotide
acuguaauaaggagacucc

SEQ ID NO: 1226020 - RNA, 19 nt, Artificial Sequence
  Description of Artificial Sequence: Synthetic oligonucleotide
auagugagccccacgaugc

SEQ ID NO: 1226021 - RNA, 19 nt, Artificial Sequence
  Description of Artificial Sequence: Synthetic oligonucleotide
cauuucgucccauacuagg

SEQ ID NO: 1226022 - RNA, 19 nt, Artificial Sequence
  Description of Artificial Sequence: Synthetic oligonucleotide
ugguuaggaacucugcuga

SEQ ID NO: 1226023 - RNA, 19 nt, Artificial Sequence
  Description of Artificial Sequence: Synthetic oligonucleotide
aucacuuauaagcaugaga

SEQ ID NO: 1226024 - RNA, 19 nt, Artificial Sequence
  Description of Artificial Sequence: Synthetic oligonucleotide
uuacacugagcucugcagc

SEQ ID NO: 1226025 - RNA, 19 nt, Artificial Sequence
  Description of Artificial Sequence: Synthetic oligonucleotide
cuuauuuagcccuguuugc

SEQ ID NO: 1226026 - RNA, 19 nt, Artificial Sequence
  Description of Artificial Sequence: Synthetic oligonucleotide
uguucuacacgcucuagcu

SEQ ID NO: 1226027 - RNA, 19 nt, Artificial Sequence
  Description of Artificial Sequence: Synthetic oligonucleotide
ugagacugcauuccuacac

SEQ ID NO: 1226028 - RNA, 19 nt, Artificial Sequence
  Description of Artificial Sequence: Synthetic oligonucleotide
cuacaaggcuuauuuagcc

SEQ ID NO: 1226029 - RNA, 19 nt, Artificial Sequence
  Description of Artificial Sequence: Synthetic oligonucleotide
aggcauugcauacaugguc

SEQ ID NO: 1226030 - RNA, 19 nt, Artificial Sequence
  Description of Artificial Sequence: Synthetic oligonucleotide
gauuuagcaggugucaggc

SEQ ID NO: 1226031 - RNA, 19 nt, Artificial Sequence
  Description of Artificial Sequence: Synthetic oligonucleotide
agggcaguacugcuaaagc

SEQ ID NO: 1226032 - RNA, 19 nt, Artificial Sequence
  Description of Artificial Sequence: Synthetic oligonucleotide
ucagcaauucagcagcacu

SEQ ID NO: 1226033 - RNA, 19 nt, Artificial Sequence
  Description of Artificial Sequence: Synthetic oligonucleotide
ugcaccaacaggcuacaag

SEQ ID NO: 1226034 - RNA, 19 nt, Artificial Sequence
  Description of Artificial Sequence: Synthetic oligonucleotide
gugacuguuguucuacacg

SEQ ID NO: 1226035 - RNA, 19 nt, Artificial Sequence
  Description of Artificial Sequence: Synthetic oligonucleotide
ugacauuugcuugagugcc

SEQ ID NO: 1226036 - RNA, 19 nt, Artificial Sequence
  Description of Artificial Sequence: Synthetic oligonucleotide
uugguuaggaacucugcug

SEQ ID NO: 1226037 - RNA, 19 nt, Artificial Sequence
  Description of Artificial Sequence: Synthetic oligonucleotide
uacugcuaaagcagaauca

SEQ ID NO: 1226038 - RNA, 19 nt, Artificial Sequence
  Description of Artificial Sequence: Synthetic oligonucleotide
augaggaucauguuacacu

SEQ ID NO: 1226039 - RNA, 19 nt, Artificial Sequence
  Description of Artificial Sequence: Synthetic oligonucleotide
cacacugccauucagccac

SEQ ID NO: 1226040 - RNA, 19 nt, Artificial Sequence
  Description of Artificial Sequence: Synthetic oligonucleotide
uagauagugccuuuggaau

SEQ ID NO: 1226041 - RNA, 19 nt, Artificial Sequence
  Description of Artificial Sequence: Synthetic oligonucleotide
uaucauuucgucccauacu

SEQ ID NO: 1226042 - RNA, 19 nt, Artificial Sequence
  Description of Artificial Sequence: Synthetic oligonucleotide
gagugcaaagagcuguggg

SEQ ID NO: 1226043 - RNA, 19 nt, Artificial Sequence
  Description of Artificial Sequence: Synthetic oligonucleotide
auagucaagcaucugcacu

SEQ ID NO: 1226044 - RNA, 19 nt, Artificial Sequence
  Description of Artificial Sequence: Synthetic oligonucleotide
caaaagccaacacacugcc

SEQ ID NO: 1226045 - RNA, 19 nt, Artificial Sequence
  Description of Artificial Sequence: Synthetic oligonucleotide
uuggaauucggugucaaac

SEQ ID NO: 1226046 - RNA, 19 nt, Artificial Sequence
  Description of Artificial Sequence: Synthetic oligonucleotide
uuguucuacacgcucuagc

SEQ ID NO: 1226047 - RNA, 19 nt, Artificial Sequence
  Description of Artificial Sequence: Synthetic oligonucleotide
uguugagcacaccauggca

SEQ ID NO: 1226048 - RNA, 19 nt, Artificial Sequence
  Description of Artificial Sequence: Synthetic oligonucleotide
agcacaccauggcaaaagc

SEQ ID NO: 1226049 - RNA, 19 nt, Artificial Sequence
  Description of Artificial Sequence: Synthetic oligonucleotide
uuucgucccauacuagggc

SEQ ID NO: 1226050 - RNA, 19 nt, Artificial Sequence
  Description of Artificial Sequence: Synthetic oligonucleotide
acucggauaucauuucguc

SEQ ID NO: 1226051 - RNA, 19 nt, Artificial Sequence
  Description of Artificial Sequence: Synthetic oligonucleotide
cauucagccaccauccgug

SEQ ID NO: 1226052 - RNA, 19 nt, Artificial Sequence
  Description of Artificial Sequence: Synthetic oligonucleotide
aaaucuuauaaaaguggga

SEQ ID NO: 1226053 - RNA, 19 nt, Artificial Sequence
  Description of Artificial Sequence: Synthetic oligonucleotide
aucauuucgucccauacua

SEQ ID NO: 1226054 - RNA, 19 nt, Artificial Sequence
  Description of Artificial Sequence: Synthetic oligonucleotide
uacaaggcuuauuuagccc

SEQ ID NO: 1226055 - RNA, 19 nt, Artificial Sequence
  Description of Artificial Sequence: Synthetic oligonucleotide
uuugcuguauguguagcgc

SEQ ID NO: 1226056 - RNA, 19 nt, Artificial Sequence
  Description of Artificial Sequence: Synthetic oligonucleotide
ucuguacuccuguagccag

SEQ ID NO: 1226057 - RNA, 19 nt, Artificial Sequence
  Description of Artificial Sequence: Synthetic oligonucleotide
aguucaguggggcucagcu

SEQ ID NO: 1226058 - RNA, 19 nt, Artificial Sequence
  Description of Artificial Sequence: Synthetic oligonucleotide
uuauuuagcccuguuugca

SEQ ID NO: 1226059 - RNA, 19 nt, Artificial Sequence
  Description of Artificial Sequence: Synthetic oligonucleotide
uguuacacugagcucugca

SEQ ID NO: 1226060 - RNA, 19 nt, Artificial Sequence
  Description of Artificial Sequence: Synthetic oligonucleotide
uggaauucggugucaaacu

SEQ ID NO: 1226061 - RNA, 19 nt, Artificial Sequence
  Description of Artificial Sequence: Synthetic oligonucleotide
caauguaguuccuuaggac

SEQ ID NO: 1226062 - RNA, 19 nt, Artificial Sequence
  Description of Artificial Sequence: Synthetic oligonucleotide
cuuuggggcaagaugcacc

SEQ ID NO: 1226063 - RNA, 19 nt, Artificial Sequence
  Description of Artificial Sequence: Synthetic oligonucleotide
ucggaaggcaagccgaagc

SEQ ID NO: 1226064 - RNA, 19 nt, Artificial Sequence
  Description of Artificial Sequence: Synthetic oligonucleotide
augggucauguuuugacug

SEQ ID NO: 1226065 - RNA, 19 nt, Artificial Sequence
  Description of Artificial Sequence: Synthetic oligonucleotide
auuucaggguagaaagagc

SEQ ID NO: 1226066 - RNA, 19 nt, Artificial Sequence
  Description of Artificial Sequence: Synthetic oligonucleotide
uuggugugcaugaugcgca

SEQ ID NO: 1226067 - RNA, 19 nt, Artificial Sequence
  Description of Artificial Sequence: Synthetic oligonucleotide
agaugcaccaacaggcuac

SEQ ID NO: 1226068 - RNA, 19 nt, Artificial Sequence
  Description of Artificial Sequence: Synthetic oligonucleotide
gugacauuugcuugagugc

SEQ ID NO: 1226069 - RNA, 19 nt, Artificial Sequence
  Description of Artificial Sequence: Synthetic oligonucleotide
acucgaauaaggcccagcu

SEQ ID NO: 1226070 - RNA, 19 nt, Artificial Sequence
  Description of Artificial Sequence: Synthetic oligonucleotide
aucauguuacacugagcuc

SEQ ID NO: 1226071 - RNA, 19 nt, Artificial Sequence
  Description of Artificial Sequence: Synthetic oligonucleotide
aaaggguccauagucaaua

SEQ ID NO: 1226072 - RNA, 19 nt, Artificial Sequence
  Description of Artificial Sequence: Synthetic oligonucleotide
agcauauagaagguguuug

SEQ ID NO: 1226073 - RNA, 19 nt, Artificial Sequence
  Description of Artificial Sequence: Synthetic oligonucleotide
cucggauaucauuucgucc

SEQ ID NO: 1226074 - RNA, 19 nt, Artificial Sequence
  Description of Artificial Sequence: Synthetic oligonucleotide
aauucggugucaaacuccu

SEQ ID NO: 1226075 - RNA, 19 nt, Artificial Sequence
  Description of Artificial Sequence: Synthetic oligonucleotide
uucccaguggucuauguuc

SEQ ID NO: 1226076 - RNA, 19 nt, Artificial Sequence
  Description of Artificial Sequence: Synthetic oligonucleotide
agaugcauggucuccagaa

SEQ ID NO: 1226077 - RNA, 19 nt, Artificial Sequence
  Description of Artificial Sequence: Synthetic oligonucleotide
ugugcaauguaguuccuua

SEQ ID NO: 1226078 - RNA, 19 nt, Artificial Sequence
  Description of Artificial Sequence: Synthetic oligonucleotide
aggaacacugcucaucagu

SEQ ID NO: 1226079 - RNA, 19 nt, Artificial Sequence
  Description of Artificial Sequence: Synthetic oligonucleotide
ugccuuuggaauucggugu

SEQ ID NO: 1226080 - RNA, 19 nt, Artificial Sequence
  Description of Artificial Sequence: Synthetic oligonucleotide
uugcuugagugccaaugag

SEQ ID NO: 1226081 - RNA, 19 nt, Artificial Sequence
  Description of Artificial Sequence: Synthetic oligonucleotide
uucgucgugucaccucucg

SEQ ID NO: 1226082 - RNA, 19 nt, Artificial Sequence
  Description of Artificial Sequence: Synthetic oligonucleotide
auuucgucccauacuaggg

SEQ ID NO: 1226083 - RNA, 19 nt, Artificial Sequence
  Description of Artificial Sequence: Synthetic oligonucleotide
ucauagagagcugccgggg

SEQ ID NO: 1226084 - RNA, 19 nt, Artificial Sequence
  Description of Artificial Sequence: Synthetic oligonucleotide
uuuagcccuguuugcauca

SEQ ID NO: 1226085 - RNA, 19 nt, Artificial Sequence
  Description of Artificial Sequence: Synthetic oligonucleotide
ggcaagaugcaccaacagg

SEQ ID NO: 1226086 - RNA, 19 nt, Artificial Sequence
  Description of Artificial Sequence: Synthetic oligonucleotide
gaugcgcacacguucugcc

SEQ ID NO: 1226087 - RNA, 19 nt, Artificial Sequence
  Description of Artificial Sequence: Synthetic oligonucleotide
uuauaagcaugagacugca

SEQ ID NO: 1226088 - RNA, 19 nt, Artificial Sequence
  Description of Artificial Sequence: Synthetic oligonucleotide
ucauuucgucccauacuag

SEQ ID NO: 1226089 - RNA, 19 nt, Artificial Sequence
  Description of Artificial Sequence: Synthetic oligonucleotide
ugcagauuccacuugcaua

SEQ ID NO: 1226090 - RNA, 19 nt, Artificial Sequence
  Description of Artificial Sequence: Synthetic oligonucleotide
ucugaggcauugcauacau

SEQ ID NO: 1226091 - RNA, 19 nt, Artificial Sequence
  Description of Artificial Sequence: Synthetic oligonucleotide
uucgacugugcaagcauca

SEQ ID NO: 1226092 - RNA, 19 nt, Artificial Sequence
  Description of Artificial Sequence: Synthetic oligonucleotide
aaguggcagcucuggcucc

SEQ ID NO: 1226093 - RNA, 19 nt, Artificial Sequence
  Description of Artificial Sequence: Synthetic oligonucleotide
uucgucccauacuagggcc

SEQ ID NO: 1226094 - RNA, 19 nt, Artificial Sequence
  Description of Artificial Sequence: Synthetic oligonucleotide
guacugcuaaagcagaauc

SEQ ID NO: 1226095 - RNA, 19 nt, Artificial Sequence
  Description of Artificial Sequence: Synthetic oligonucleotide
aauaaggcccagcuucuua

SEQ ID NO: 1226096 - RNA, 19 nt, Artificial Sequence
  Description of Artificial Sequence: Synthetic oligonucleotide
guaggaacacugcucauca

SEQ ID NO: 1226097 - RNA, 19 nt, Artificial Sequence
  Description of Artificial Sequence: Synthetic oligonucleotide
uuacgcaucuuuuguagau

SEQ ID NO: 1226098 - RNA, 19 nt, Artificial Sequence
  Description of Artificial Sequence: Synthetic oligonucleotide
uugcuguauguguagcgcc

SEQ ID NO: 1226099 - RNA, 19 nt, Artificial Sequence
  Description of Artificial Sequence: Synthetic oligonucleotide
ugcauacauggucaggguc

SEQ ID NO: 1226100 - RNA, 19 nt, Artificial Sequence
  Description of Artificial Sequence: Synthetic oligonucleotide
ugccccuucacuguaauaa

SEQ ID NO: 1226101 - RNA, 19 nt, Artificial Sequence
  Description of Artificial Sequence: Synthetic oligonucleotide
uaugaggaucauguuacac

SEQ ID NO: 1226102 - RNA, 19 nt, Artificial Sequence
  Description of Artificial Sequence: Synthetic oligonucleotide
uacauggucagggucauau

SEQ ID NO: 1226103 - RNA, 19 nt, Artificial Sequence
  Description of Artificial Sequence: Synthetic oligonucleotide
cauauagaagguguuugug

SEQ ID NO: 1226104 - RNA, 19 nt, Artificial Sequence
  Description of Artificial Sequence: Synthetic oligonucleotide
agucagaugcauggucucc

SEQ ID NO: 1226105 - RNA, 19 nt, Artificial Sequence
  Description of Artificial Sequence: Synthetic oligonucleotide
gcaccagucagaugcaugg

SEQ ID NO: 1226106 - RNA, 19 nt, Artificial Sequence
  Description of Artificial Sequence: Synthetic oligonucleotide
aacucugcugaguccgaug

SEQ ID NO: 1226107 - RNA, 19 nt, Artificial Sequence
  Description of Artificial Sequence: Synthetic oligonucleotide
uggggcaagaugcaccaac

SEQ ID NO: 1226108 - RNA, 19 nt, Artificial Sequence
  Description of Artificial Sequence: Synthetic oligonucleotide
gucaauagugagccccacg

SEQ ID NO: 1226109 - RNA, 19 nt, Artificial Sequence
  Description of Artificial Sequence: Synthetic oligonucleotide
uagucaauagugagcccca

SEQ ID NO: 1226110 - RNA, 19 nt, Artificial Sequence
  Description of Artificial Sequence: Synthetic oligonucleotide
auucagccaccauccgugc

SEQ ID NO: 1226111 - RNA, 19 nt, Artificial Sequence
  Description of Artificial Sequence: Synthetic oligonucleotide
ugucugaggcauugcauac

SEQ ID NO: 1226112 - RNA, 19 nt, Artificial Sequence
  Description of Artificial Sequence: Synthetic oligonucleotide
guggguucgacugugcaag

SEQ ID NO: 1226113 - RNA, 19 nt, Artificial Sequence
  Description of Artificial Sequence: Synthetic oligonucleotide
aagagcuguggguucgacu

SEQ ID NO: 1226114 - RNA, 19 nt, Artificial Sequence
  Description of Artificial Sequence: Synthetic oligonucleotide
agcaucauagagagcugcc

SEQ ID NO: 1226115 - RNA, 19 nt, Artificial Sequence
  Description of Artificial Sequence: Synthetic oligonucleotide
uucaggacacgucgcaccu

SEQ ID NO: 1226116 - RNA, 19 nt, Artificial Sequence
  Description of Artificial Sequence: Synthetic oligonucleotide
ugggaaggagcucagcaua

SEQ ID NO: 1226117 - RNA, 19 nt, Artificial Sequence
  Description of Artificial Sequence: Synthetic oligonucleotide
agccccacgaugcucaugu

SEQ ID NO: 1226118 - RNA, 19 nt, Artificial Sequence
  Description of Artificial Sequence: Synthetic oligonucleotide
guuggugugcaugaugcgc

SEQ ID NO: 1226119 - RNA, 19 nt, Artificial Sequence
  Description of Artificial Sequence: Synthetic oligonucleotide
cauaccuggggcuguuugc

SEQ ID NO: 1226120 - RNA, 19 nt, Artificial Sequence
  Description of Artificial Sequence: Synthetic oligonucleotide
ggguccauagucaauagug

SEQ ID NO: 1226121 - RNA, 19 nt, Artificial Sequence
  Description of Artificial Sequence: Synthetic oligonucleotide
cauagucaagcaucugcac

SEQ ID NO: 1226122 - RNA, 19 nt, Artificial Sequence
  Description of Artificial Sequence: Synthetic oligonucleotide
cuaggauggccucacccag

SEQ ID NO: 1226123 - RNA, 19 nt, Artificial Sequence
  Description of Artificial Sequence: Synthetic oligonucleotide
gauagugccuuuggaauuc

SEQ ID NO: 1226124 - RNA, 19 nt, Artificial Sequence
  Description of Artificial Sequence: Synthetic oligonucleotide
uuugugaagucagcaccag

SEQ ID NO: 1226125 - RNA, 19 nt, Artificial Sequence
  Description of Artificial Sequence: Synthetic oligonucleotide
uccuuaggacguacuuggg

SEQ ID NO: 1226126 - RNA, 19 nt, Artificial Sequence
  Description of Artificial Sequence: Synthetic oligonucleotide
caggacacgucgcaccucg

SEQ ID NO: 1226127 - RNA, 19 nt, Artificial Sequence
  Description of Artificial Sequence: Synthetic oligonucleotide
aaagagcuguggguucgac

SEQ ID NO: 1226128 - RNA, 19 nt, Artificial Sequence
  Description of Artificial Sequence: Synthetic oligonucleotide
uguaguucaguggggcuca

SEQ ID NO: 1226129 - RNA, 19 nt, Artificial Sequence
  Description of Artificial Sequence: Synthetic oligonucleotide
ucuguaguucaguggggcu

SEQ ID NO: 1226130 - RNA, 19 nt, Artificial Sequence
  Description of Artificial Sequence: Synthetic oligonucleotide
guauguguagcgcccagca

SEQ ID NO: 1226131 - RNA, 19 nt, Artificial Sequence
  Description of Artificial Sequence: Synthetic oligonucleotide
uccacucgaauaaggccca

SEQ ID NO: 1226132 - RNA, 19 nt, Artificial Sequence
  Description of Artificial Sequence: Synthetic oligonucleotide
uuaugaggaucauguuaca

SEQ ID NO: 1226133 - RNA, 19 nt, Artificial Sequence
  Description of Artificial Sequence: Synthetic oligonucleotide
gugcaauguaguuccuuag

SEQ ID NO: 1226134 - RNA, 19 nt, Artificial Sequence
  Description of Artificial Sequence: Synthetic oligonucleotide
agauagugccuuuggaauu

SEQ ID NO: 1226135 - RNA, 19 nt, Artificial Sequence
  Description of Artificial Sequence: Synthetic oligonucleotide
ucccaauggucucagcaau

SEQ ID NO: 1226136 - RNA, 19 nt, Artificial Sequence
  Description of Artificial Sequence: Synthetic oligonucleotide
ggguagaaagagcugauga

SEQ ID NO: 1226137 - RNA, 19 nt, Artificial Sequence
  Description of Artificial Sequence: Synthetic oligonucleotide
guuccuuaggacguacuug

SEQ ID NO: 1226138 - RNA, 19 nt, Artificial Sequence
  Description of Artificial Sequence: Synthetic oligonucleotide
uccagacgggcucuguacu

SEQ ID NO: 1226139 - RNA, 19 nt, Artificial Sequence
  Description of Artificial Sequence: Synthetic oligonucleotide
aagucagcaccagucagau

SEQ ID NO: 1226140 - RNA, 19 nt, Artificial Sequence
  Description of Artificial Sequence: Synthetic oligonucleotide
agagagcugccggggaucc

SEQ ID NO: 1226141 - RNA, 19 nt, Artificial Sequence
  Description of Artificial Sequence: Synthetic oligonucleotide
cuuaggacguacuuggggu

SEQ ID NO: 1226142 - RNA, 19 nt, Artificial Sequence
  Description of Artificial Sequence: Synthetic oligonucleotide
cugggauuuagcagguguc

SEQ ID NO: 1226143 - RNA, 19 nt, Artificial Sequence
  Description of Artificial Sequence: Synthetic oligonucleotide
acgcccugugugcucaucg

SEQ ID NO: 1226144 - RNA, 19 nt, Artificial Sequence
  Description of Artificial Sequence: Synthetic oligonucleotide
gaaucagacagagaugggu

SEQ ID NO: 1226145 - RNA, 19 nt, Artificial Sequence
  Description of Artificial Sequence: Synthetic oligonucleotide
ucgucgugucaccucucgg

SEQ ID NO: 1226146 - RNA, 19 nt, Artificial Sequence
  Description of Artificial Sequence: Synthetic oligonucleotide
uguauguguagcgcccagc

SEQ ID NO: 1226147 - RNA, 19 nt, Artificial Sequence
  Description of Artificial Sequence: Synthetic oligonucleotide
cauagucaauagugagccc

SEQ ID NO: 1226148 - RNA, 19 nt, Artificial Sequence
  Description of Artificial Sequence: Synthetic oligonucleotide
caccaacaggcuacaaggc

SEQ ID NO: 1226149 - RNA, 19 nt, Artificial Sequence
  Description of Artificial Sequence: Synthetic oligonucleotide
cucacccagcgcaaguggc

SEQ ID NO: 1226150 - RNA, 19 nt, Artificial Sequence
  Description of Artificial Sequence: Synthetic oligonucleotide
cucagcauauagaaggugu

SEQ ID NO: 1226151 - RNA, 19 nt, Artificial Sequence
  Description of Artificial Sequence: Synthetic oligonucleotide
cauugcauacauggucagg

SEQ ID NO: 1226152 - RNA, 19 nt, Artificial Sequence
  Description of Artificial Sequence: Synthetic oligonucleotide
gauaucauuucgucccaua

SEQ ID NO: 1226153 - RNA, 19 nt, Artificial Sequence
  Description of Artificial Sequence: Synthetic oligonucleotide
uguagcgcccagcacuguc

SEQ ID NO: 1226154 - RNA, 19 nt, Artificial Sequence
  Description of Artificial Sequence: Synthetic oligonucleotide
gaugggucauguuuugacu

SEQ ID NO: 1226155 - RNA, 19 nt, Artificial Sequence
  Description of Artificial Sequence: Synthetic oligonucleotide
auguaguuccuuaggacgu

SEQ ID NO: 1226156 - RNA, 19 nt, Artificial Sequence
  Description of Artificial Sequence: Synthetic oligonucleotide
ggcagcauuccucuguaug

SEQ ID NO: 1226157 - RNA, 19 nt, Artificial Sequence
  Description of Artificial Sequence: Synthetic oligonucleotide
ccauacuagggccugcacg

SEQ ID NO: 1226158 - RNA, 19 nt, Artificial Sequence
  Description of Artificial Sequence: Synthetic oligonucleotide
uccguguugagcacaccau

SEQ ID NO: 1226159 - RNA, 19 nt, Artificial Sequence
  Description of Artificial Sequence: Synthetic oligonucleotide
uugcauacauggucagggu

SEQ ID NO: 1226160 - RNA, 19 nt, Artificial Sequence
  Description of Artificial Sequence: Synthetic oligonucleotide
ucacugucgcagguguggg

SEQ ID NO: 1226161 - RNA, 19 nt, Artificial Sequence
  Description of Artificial Sequence: Synthetic oligonucleotide
auuuagaggccugggauuu

SEQ ID NO: 1226162 - RNA, 19 nt, Artificial Sequence
  Description of Artificial Sequence: Synthetic oligonucleotide
gacacgucgcaccucggca

SEQ ID NO: 1226163 - RNA, 19 nt, Artificial Sequence
  Description of Artificial Sequence: Synthetic oligonucleotide
uugcaucacuuauaagcau

SEQ ID NO: 1226164 - RNA, 19 nt, Artificial Sequence
  Description of Artificial Sequence: Synthetic oligonucleotide
agccagguuucccaguggu

SEQ ID NO: 1226165 - RNA, 19 nt, Artificial Sequence
  Description of Artificial Sequence: Synthetic oligonucleotide
ucugcuaggauggccucac

SEQ ID NO: 1226166 - RNA, 19 nt, Artificial Sequence
  Description of Artificial Sequence: Synthetic oligonucleotide
aguacugcuaaagcagaau

SEQ ID NO: 1226167 - RNA, 19 nt, Artificial Sequence
  Description of Artificial Sequence: Synthetic oligonucleotide
auagagagcugccggggau

SEQ ID NO: 1226168 - RNA, 19 nt, Artificial Sequence
  Description of Artificial Sequence: Synthetic oligonucleotide
cagcaucauagagagcugc

SEQ ID NO: 1226169 - RNA, 19 nt, Artificial Sequence
  Description of Artificial Sequence: Synthetic oligonucleotide
cuuacgcaucuuuuguaga

SEQ ID NO: 1226170 - RNA, 19 nt, Artificial Sequence
  Description of Artificial Sequence: Synthetic oligonucleotide
ugaguccgaugguucagcu

SEQ ID NO: 1226171 - RNA, 19 nt, Artificial Sequence
  Description of Artificial Sequence: Synthetic oligonucleotide
aguggucuauguuccugcu

SEQ ID NO: 1226172 - RNA, 19 nt, Artificial Sequence
  Description of Artificial Sequence: Synthetic oligonucleotide
ccuuaggacguacuugggg

SEQ ID NO: 1226173 - RNA, 19 nt, Artificial Sequence
  Description of Artificial Sequence: Synthetic oligonucleotide
agcuucaggacacgucgca

SEQ ID NO: 1226174 - RNA, 19 nt, Artificial Sequence
  Description of Artificial Sequence: Synthetic oligonucleotide
uuaggacguacuugggguu

SEQ ID NO: 1226175 - RNA, 19 nt, Artificial Sequence
  Description of Artificial Sequence: Synthetic oligonucleotide
uaguuccuuaggacguacu

SEQ ID NO: 1226176 - RNA, 19 nt, Artificial Sequence
  Description of Artificial Sequence: Synthetic oligonucleotide
ggaauucggugucaaacuc

SEQ ID NO: 1226177 - RNA, 19 nt, Artificial Sequence
  Description of Artificial Sequence: Synthetic oligonucleotide
uaggaacacugcucaucag

SEQ ID NO: 1226178 - RNA, 19 nt, Artificial Sequence
  Description of Artificial Sequence: Synthetic oligonucleotide
uauaagcaugagacugcau

SEQ ID NO: 1226179 - RNA, 19 nt, Artificial Sequence
  Description of Artificial Sequence: Synthetic oligonucleotide
ugaugcgcacacguucugc

SEQ ID NO: 1226180 - RNA, 19 nt, Artificial Sequence
  Description of Artificial Sequence: Synthetic oligonucleotide
agaaucagacagagauggg

SEQ ID NO: 1226181 - RNA, 19 nt, Artificial Sequence
  Description of Artificial Sequence: Synthetic oligonucleotide
gcuuuauuuagaggccugg

SEQ ID NO: 1226182 - RNA, 19 nt, Artificial Sequence
  Description of Artificial Sequence: Synthetic oligonucleotide
ccuucacuguaauaaggag

SEQ ID NO: 1226183 - RNA, 19 nt, Artificial Sequence
  Description of Artificial Sequence: Synthetic oligonucleotide
auacuagggccugcacgcc

SEQ ID NO: 1226184 - RNA, 19 nt, Artificial Sequence
  Description of Artificial Sequence: Synthetic oligonucleotide
guugagcacaccauggcaa

SEQ ID NO: 1226185 - RNA, 19 nt, Artificial Sequence
  Description of Artificial Sequence: Synthetic oligonucleotide
guagggaucccaauggucu

SEQ ID NO: 1226186 - RNA, 19 nt, Artificial Sequence
  Description of Artificial Sequence: Synthetic oligonucleotide
ucuacacgcucuagcuccu

SEQ ID NO: 1226187 - RNA, 19 nt, Artificial Sequence
  Description of Artificial Sequence: Synthetic oligonucleotide
guucuacacgcucuagcuc

SEQ ID NO: 1226188 - RNA, 19 nt, Artificial Sequence
  Description of Artificial Sequence: Synthetic oligonucleotide
ucgacugugcaagcaucag

SEQ ID NO: 1226189 - RNA, 19 nt, Artificial Sequence
  Description of Artificial Sequence: Synthetic oligonucleotide
aggguccauagucaauagu

SEQ ID NO: 1226190 - RNA, 19 nt, Artificial Sequence
  Description of Artificial Sequence: Synthetic oligonucleotide
ucgucccauacuagggccu

SEQ ID NO: 1226191 - RNA, 19 nt, Artificial Sequence
  Description of Artificial Sequence: Synthetic oligonucleotide
gcacucggauaucauuucg

SEQ ID NO: 1226192 - RNA, 19 nt, Artificial Sequence
  Description of Artificial Sequence: Synthetic oligonucleotide
caucaugcacagaccauga

SEQ ID NO: 1226193 - RNA, 19 nt, Artificial Sequence
  Description of Artificial Sequence: Synthetic oligonucleotide
ugcaugaugcgcacacguu

SEQ ID NO: 1226194 - RNA, 19 nt, Artificial Sequence
  Description of Artificial Sequence: Synthetic oligonucleotide
aaggcuuauuuagcccugu

SEQ ID NO: 1226195 - RNA, 19 nt, Artificial Sequence
  Description of Artificial Sequence: Synthetic oligonucleotide
cguguugagcacaccaugg

SEQ ID NO: 1226196 - RNA, 19 nt, Artificial Sequence
  Description of Artificial Sequence: Synthetic oligonucleotide
gaaggcaagccgaagcucu

SEQ ID NO: 1226197 - RNA, 19 nt, Artificial Sequence
  Description of Artificial Sequence: Synthetic oligonucleotide
agcuugguuaggaacucug

SEQ ID NO: 1226198 - RNA, 19 nt, Artificial Sequence
  Description of Artificial Sequence: Synthetic oligonucleotide
auaccuggggcuguuugcu

SEQ ID NO: 1226199 - RNA, 19 nt, Artificial Sequence
  Description of Artificial Sequence: Synthetic oligonucleotide
aaaagccaacacacugcca

SEQ ID NO: 1226200 - RNA, 19 nt, Artificial Sequence
  Description of Artificial Sequence: Synthetic oligonucleotide
guuguucuacacgcucuag

SEQ ID NO: 1226201 - RNA, 19 nt, Artificial Sequence
  Description of Artificial Sequence: Synthetic oligonucleotide
guccagacgggcucuguac

SEQ ID NO: 1226202 - RNA, 19 nt, Artificial Sequence
  Description of Artificial Sequence: Synthetic oligonucleotide
caucacuuauaagcaugag

SEQ ID NO: 1226203 - RNA, 19 nt, Artificial Sequence
  Description of Artificial Sequence: Synthetic oligonucleotide
uguccagacgggcucugua

SEQ ID NO: 1226204 - RNA, 19 nt, Artificial Sequence
  Description of Artificial Sequence: Synthetic oligonucleotide
gcaugaugcgcacacguuc

SEQ ID NO: 1226205 - RNA, 19 nt, Artificial Sequence
  Description of Artificial Sequence: Synthetic oligonucleotide
cuguaauaaggagacucca

SEQ ID NO: 1226206 - RNA, 19 nt, Artificial Sequence
  Description of Artificial Sequence: Synthetic oligonucleotide
uagggaucccaauggucuc

SEQ ID NO: 1226207 - RNA, 19 nt, Artificial Sequence
  Description of Artificial Sequence: Synthetic oligonucleotide
ggggucggaaggcaagccg

SEQ ID NO: 1226208 - RNA, 19 nt, Artificial Sequence
  Description of Artificial Sequence: Synthetic oligonucleotide
ccauccgugcuguucgucg

SEQ ID NO: 1226209 - RNA, 19 nt, Artificial Sequence
  Description of Artificial Sequence: Synthetic oligonucleotide
auguuacacugagcucugc

SEQ ID NO: 1226210 - RNA, 19 nt, Artificial Sequence
  Description of Artificial Sequence: Synthetic oligonucleotide
gcaaagagcuguggguucg

SEQ ID NO: 1226211 - RNA, 19 nt, Artificial Sequence
  Description of Artificial Sequence: Synthetic oligonucleotide
cugcuaaagcagaaucaga

SEQ ID NO: 1226212 - RNA, 19 nt, Artificial Sequence
  Description of Artificial Sequence: Synthetic oligonucleotide
ugaggguagggaucccaau

SEQ ID NO: 1226213 - RNA, 19 nt, Artificial Sequence
  Description of Artificial Sequence: Synthetic oligonucleotide
gggcaguacugcuaaagca

SEQ ID NO: 1226214 - RNA, 19 nt, Artificial Sequence
  Description of Artificial Sequence: Synthetic oligonucleotide
cuaggccagggcaguacug

SEQ ID NO: 1226215 - RNA, 19 nt, Artificial Sequence
  Description of Artificial Sequence: Synthetic oligonucleotide
augaugcgcacacguucug

SEQ ID NO: 1226216 - RNA, 19 nt, Artificial Sequence
  Description of Artificial Sequence: Synthetic oligonucleotide
gguuaggaacucugcugag

SEQ ID NO: 1226217 - RNA, 19 nt, Artificial Sequence
  Description of Artificial Sequence: Synthetic oligonucleotide
gcauacauggucaggguca

SEQ ID NO: 1226218 - RNA, 19 nt, Artificial Sequence
  Description of Artificial Sequence: Synthetic oligonucleotide
cuguauguguagcgcccag

SEQ ID NO: 1226219 - RNA, 19 nt, Artificial Sequence
  Description of Artificial Sequence: Synthetic oligonucleotide
acacgucgcaccucggcaa

SEQ ID NO: 1226220 - RNA, 19 nt, Artificial Sequence
  Description of Artificial Sequence: Synthetic oligonucleotide
acacugcucaucagugguc

SEQ ID NO: 1226221 - RNA, 19 nt, Artificial Sequence
  Description of Artificial Sequence: Synthetic oligonucleotide
cccugugugcucaucgggg

SEQ ID NO: 1226222 - RNA, 19 nt, Artificial Sequence
  Description of Artificial Sequence: Synthetic oligonucleotide
uagugagccccacgaugcu

SEQ ID NO: 1226223 - RNA, 19 nt, Artificial Sequence
  Description of Artificial Sequence: Synthetic oligonucleotide
cauuccuacacuggcuuga

SEQ ID NO: 1226224 - RNA, 19 nt, Artificial Sequence
  Description of Artificial Sequence: Synthetic oligonucleotide
uguggccucaguggcugcc

SEQ ID NO: 1226225 - RNA, 19 nt, Artificial Sequence
  Description of Artificial Sequence: Synthetic oligonucleotide
augcacagaccaugagggu

SEQ ID NO: 1226226 - RNA, 19 nt, Artificial Sequence
  Description of Artificial Sequence: Synthetic oligonucleotide
uguaguuccuuaggacgua

SEQ ID NO: 1226227 - RNA, 19 nt, Artificial Sequence
  Description of Artificial Sequence: Synthetic oligonucleotide
uggguucgacugugcaagc

SEQ ID NO: 1226228 - RNA, 19 nt, Artificial Sequence
  Description of Artificial Sequence: Synthetic oligonucleotide
caugaugcgcacacguucu

SEQ ID NO: 1226229 - RNA, 19 nt, Artificial Sequence
  Description of Artificial Sequence: Synthetic oligonucleotide
uggugugcaugaugcgcac

SEQ ID NO: 1226230 - RNA, 19 nt, Artificial Sequence
  Description of Artificial Sequence: Synthetic oligonucleotide
ggcaagccgaagcucuucc

SEQ ID NO: 1226231 - RNA, 19 nt, Artificial Sequence
  Description of Artificial Sequence: Synthetic oligonucleotide
ucccauacuagggccugca

SEQ ID NO: 1226232 - RNA, 19 nt, Artificial Sequence
  Description of Artificial Sequence: Synthetic oligonucleotide
acauuugcuugagugccaa

SEQ ID NO: 1226233 - RNA, 19 nt, Artificial Sequence
  Description of Artificial Sequence: Synthetic oligonucleotide
gggcaagaugcaccaacag

SEQ ID NO: 1226234 - RNA, 19 nt, Artificial Sequence
  Description of Artificial Sequence: Synthetic oligonucleotide
agcaccagucagaugcaug

SEQ ID NO: 1226235 - RNA, 19 nt, Artificial Sequence
  Description of Artificial Sequence: Synthetic oligonucleotide
gcauugcauacauggucag

SEQ ID NO: 1226236 - RNA, 19 nt, Artificial Sequence
  Description of Artificial Sequence: Synthetic oligonucleotide
uagcccuguuugcaucacu

SEQ ID NO: 1226237 - RNA, 19 nt, Artificial Sequence
  Description of Artificial Sequence: Synthetic oligonucleotide
cauagagagcugccgggga

SEQ ID NO: 1226238 - RNA, 19 nt, Artificial Sequence
  Description of Artificial Sequence: Synthetic oligonucleotide
ucgugucaccucucggaaa

SEQ ID NO: 1226239 - RNA, 19 nt, Artificial Sequence
  Description of Artificial Sequence: Synthetic oligonucleotide
guucgacugugcaagcauc

SEQ ID NO: 1226240 - RNA, 19 nt, Artificial Sequence
  Description of Artificial Sequence: Synthetic oligonucleotide
guaguuccuuaggacguac

SEQ ID NO: 1226241 - RNA, 19 nt, Artificial Sequence
  Description of Artificial Sequence: Synthetic oligonucleotide
cacucgaauaaggcccagc

SEQ ID NO: 1226242 - RNA, 19 nt, Artificial Sequence
  Description of Artificial Sequence: Synthetic oligonucleotide
gguccauagucaauaguga

SEQ ID NO: 1226243 - RNA, 19 nt, Artificial Sequence
  Description of Artificial Sequence: Synthetic oligonucleotide
cuguucgucgugucaccuc

SEQ ID NO: 1226244 - RNA, 19 nt, Artificial Sequence
  Description of Artificial Sequence: Synthetic oligonucleotide
gucgugucaccucucggaa

SEQ ID NO: 1226245 - RNA, 19 nt, Artificial Sequence
  Description of Artificial Sequence: Synthetic oligonucleotide
uggggucggaaggcaagcc

SEQ ID NO: 1226246 - RNA, 19 nt, Artificial Sequence
  Description of Artificial Sequence: Synthetic oligonucleotide
gcauaccuggggcuguuug

SEQ ID NO: 1226247 - RNA, 19 nt, Artificial Sequence
  Description of Artificial Sequence: Synthetic oligonucleotide
auccgugcuguucgucgug

SEQ ID NO: 1226248 - RNA, 19 nt, Artificial Sequence
  Description of Artificial Sequence: Synthetic oligonucleotide
ugcuaggccagggcaguac

SEQ ID NO: 1226249 - RNA, 19 nt, Artificial Sequence
  Description of Artificial Sequence: Synthetic oligonucleotide
agacgggcucuguacuccu

SEQ ID NO: 1226250 - RNA, 19 nt, Artificial Sequence
  Description of Artificial Sequence: Synthetic oligonucleotide
gccccuucacuguaauaag

SEQ ID NO: 1226251 - RNA, 19 nt, Artificial Sequence
  Description of Artificial Sequence: Synthetic oligonucleotide
aggcuacaaggcuuauuua

SEQ ID NO: 1226252 - RNA, 19 nt, Artificial Sequence
  Description of Artificial Sequence: Synthetic oligonucleotide
agaggcacacugggagguc

SEQ ID NO: 1226253 - RNA, 19 nt, Artificial Sequence
  Description of Artificial Sequence: Synthetic oligonucleotide
ggacacgucgcaccucggc

SEQ ID NO: 1226254 - RNA, 19 nt, Artificial Sequence
  Description of Artificial Sequence: Synthetic oligonucleotide
ccagccgugacuguuguuc

SEQ ID NO: 1226255 - RNA, 19 nt, Artificial Sequence
  Description of Artificial Sequence: Synthetic oligonucleotide
gcccugugugcucaucggg

SEQ ID NO: 1226256 - RNA, 19 nt, Artificial Sequence
  Description of Artificial Sequence: Synthetic oligonucleotide
gguagggaucccaaugguc

SEQ ID NO: 1226257 - RNA, 19 nt, Artificial Sequence
  Description of Artificial Sequence: Synthetic oligonucleotide
cacccagcgcaaguggcag

SEQ ID NO: 1226258 - RNA, 19 nt, Artificial Sequence
  Description of Artificial Sequence: Synthetic oligonucleotide
agggaucccaauggucuca

SEQ ID NO: 1226259 - RNA, 19 nt, Artificial Sequence
  Description of Artificial Sequence: Synthetic oligonucleotide
gcacaccauggcaaaagcc

SEQ ID NO: 1226260 - RNA, 19 nt, Artificial Sequence
  Description of Artificial Sequence: Synthetic oligonucleotide
cagacagagaugggucaug

SEQ ID NO: 1226261 - RNA, 19 nt, Artificial Sequence
  Description of Artificial Sequence: Synthetic oligonucleotide
accucggcaaagucuccau

SEQ ID NO: 1226262 - RNA, 19 nt, Artificial Sequence
  Description of Artificial Sequence: Synthetic oligonucleotide
cugucgcaggugugggcag

SEQ ID NO: 1226263 - RNA, 19 nt, Artificial Sequence
  Description of Artificial Sequence: Synthetic oligonucleotide
uccgaugguucagcuggga

SEQ ID NO: 1226264 - RNA, 19 nt, Artificial Sequence
  Description of Artificial Sequence: Synthetic oligonucleotide
ggcuuuauuuagaggccug

SEQ ID NO: 1226265 - RNA, 19 nt, Artificial Sequence
  Description of Artificial Sequence: Synthetic oligonucleotide
caguacugcuaaagcagaa

SEQ ID NO: 1226266 - RNA, 19 nt, Artificial Sequence
  Description of Artificial Sequence: Synthetic oligonucleotide
cacucggauaucauuucgu

SEQ ID NO: 1226267 - RNA, 19 nt, Artificial Sequence
  Description of Artificial Sequence: Synthetic oligonucleotide
cuuuggaauucggugucaa

SEQ ID NO: 1226268 - RNA, 19 nt, Artificial Sequence
  Description of Artificial Sequence: Synthetic oligonucleotide
gccuuuggaauucgguguc

SEQ ID NO: 1226269 - RNA, 19 nt, Artificial Sequence
  Description of Artificial Sequence: Synthetic oligonucleotide
gucgcaccucggcaaaguc

SEQ ID NO: 1226270 - RNA, 19 nt, Artificial Sequence
  Description of Artificial Sequence: Synthetic oligonucleotide
cucggcaaagucuccauuu

SEQ ID NO: 1226271 - RNA, 19 nt, Artificial Sequence
  Description of Artificial Sequence: Synthetic oligonucleotide
aggcuuauuuagcccuguu

SEQ ID NO: 1226272 - RNA, 19 nt, Artificial Sequence
  Description of Artificial Sequence: Synthetic oligonucleotide
ccguguugagcacaccaug

SEQ ID NO: 1226273 - RNA, 19 nt, Artificial Sequence
  Description of Artificial Sequence: Synthetic oligonucleotide
augaggguagggaucccaa

SEQ ID NO: 1226274 - RNA, 19 nt, Artificial Sequence
  Description of Artificial Sequence: Synthetic oligonucleotide
accuggaaaaguggcuuua

SEQ ID NO: 1226275 - RNA, 19 nt, Artificial Sequence
  Description of Artificial Sequence: Synthetic oligonucleotide
guccgaugguucagcuggg

SEQ ID NO: 1226276 - RNA, 19 nt, Artificial Sequence
  Description of Artificial Sequence: Synthetic oligonucleotide
aggacguacuugggguugu

SEQ ID NO: 1226277 - RNA, 19 nt, Artificial Sequence
  Description of Artificial Sequence: Synthetic oligonucleotide
gccacaagugccccgucuc

SEQ ID NO: 1226278 - RNA, 19 nt, Artificial Sequence
  Description of Artificial Sequence: Synthetic oligonucleotide
agcgcaaguggcagcucug

SEQ ID NO: 1226279 - RNA, 19 nt, Artificial Sequence
  Description of Artificial Sequence: Synthetic oligonucleotide
cgugacuguuguucuacac

SEQ ID NO: 1226280 - RNA, 19 nt, Artificial Sequence
  Description of Artificial Sequence: Synthetic oligonucleotide
ggaaggcaagccgaagcuc

SEQ ID NO: 1226281 - RNA, 19 nt, Artificial Sequence
  Description of Artificial Sequence: Synthetic oligonucleotide
uuguccagacgggcucugu

SEQ ID NO: 1226282 - RNA, 19 nt, Artificial Sequence
  Description of Artificial Sequence: Synthetic oligonucleotide
cugcuaggauggccucacc

SEQ ID NO: 1226283 - RNA, 19 nt, Artificial Sequence
  Description of Artificial Sequence: Synthetic oligonucleotide
gccagggcaguacugcuaa

SEQ ID NO: 1226284 - RNA, 19 nt, Artificial Sequence
  Description of Artificial Sequence: Synthetic oligonucleotide
ggggcaagaugcaccaaca

SEQ ID NO: 1226285 - RNA, 19 nt, Artificial Sequence
  Description of Artificial Sequence: Synthetic oligonucleotide
gggucggaaggcaagccga

SEQ ID NO: 1226286 - RNA, 19 nt, Artificial Sequence
  Description of Artificial Sequence: Synthetic oligonucleotide
gcgcaaguggcagcucugg

SEQ ID NO: 1226287 - RNA, 19 nt, Artificial Sequence
  Description of Artificial Sequence: Synthetic oligonucleotide
guggccucaguggcugccc

SEQ ID NO: 1226288 - RNA, 19 nt, Artificial Sequence
  Description of Artificial Sequence: Synthetic oligonucleotide
gacuguuguucuacacgcu

SEQ ID NO: 1226289 - RNA, 19 nt, Artificial Sequence
  Description of Artificial Sequence: Synthetic oligonucleotide
ggccugcacgcccugugug

SEQ ID NO: 1226290 - RNA, 19 nt, Artificial Sequence
  Description of Artificial Sequence: Synthetic oligonucleotide
cuguggccucaguggcugc

SEQ ID NO: 1226291 - RNA, 19 nt, Artificial Sequence
  Description of Artificial Sequence: Synthetic oligonucleotide
cacuugcauaccuggggcu

SEQ ID NO: 1226292 - RNA, 19 nt, Artificial Sequence
  Description of Artificial Sequence: Synthetic oligonucleotide
gcuucaggacacgucgcac

SEQ ID NO: 1226293 - RNA, 19 nt, Artificial Sequence
  Description of Artificial Sequence: Synthetic oligonucleotide
guaguucaguggggcucag

SEQ ID NO: 1226294 - RNA, 19 nt, Artificial Sequence
  Description of Artificial Sequence: Synthetic oligonucleotide
caaaggguccauagucaau

SEQ ID NO: 1226295 - RNA, 19 nt, Artificial Sequence
  Description of Artificial Sequence: Synthetic oligonucleotide
aggcagcauuccucuguau

SEQ ID NO: 1226296 - RNA, 19 nt, Artificial Sequence
  Description of Artificial Sequence: Synthetic oligonucleotide
ccugcuccacucgaauaag

SEQ ID NO: 1226297 - RNA, 19 nt, Artificial Sequence
  Description of Artificial Sequence: Synthetic oligonucleotide
gucuauguuccugcucugu

SEQ ID NO: 1226298 - RNA, 19 nt, Artificial Sequence
  Description of Artificial Sequence: Synthetic oligonucleotide
acgucgcaccucggcaaag

SEQ ID NO: 1226299 - RNA, 19 nt, Artificial Sequence
  Description of Artificial Sequence: Synthetic oligonucleotide
gcaagccgaagcucuucca

SEQ ID NO: 1226300 - RNA, 19 nt, Artificial Sequence
  Description of Artificial Sequence: Synthetic oligonucleotide
cugcagauuccacuugcau

SEQ ID NO: 1226301 - RNA, 19 nt, Artificial Sequence
  Description of Artificial Sequence: Synthetic oligonucleotide
caccucggcaaagucucca

SEQ ID NO: 1226302 - RNA, 19 nt, Artificial Sequence
  Description of Artificial Sequence: Synthetic oligonucleotide
gucccauacuagggccugc

SEQ ID NO: 1226303 - RNA, 19 nt, Artificial Sequence
  Description of Artificial Sequence: Synthetic oligonucleotide
aggacacgucgcaccucgg

SEQ ID NO: 1226304 - RNA, 19 nt, Artificial Sequence
  Description of Artificial Sequence: Synthetic oligonucleotide
ggaucccaauggucucagc

SEQ ID NO: 1226305 - RNA, 19 nt, Artificial Sequence
  Description of Artificial Sequence: Synthetic oligonucleotide
gggucauguuuugacugga

SEQ ID NO: 1226306 - RNA, 19 nt, Artificial Sequence
  Description of Artificial Sequence: Synthetic oligonucleotide
ugugggcagccuggauuuc

SEQ ID NO: 1226307 - RNA, 19 nt, Artificial Sequence
  Description of Artificial Sequence: Synthetic oligonucleotide
aucuggggucggaaggcaa

SEQ ID NO: 1226308 - RNA, 19 nt, Artificial Sequence
  Description of Artificial Sequence: Synthetic oligonucleotide
uugcauaccuggggcuguu

SEQ ID NO: 1226309 - RNA, 19 nt, Artificial Sequence
  Description of Artificial Sequence: Synthetic oligonucleotide
cauccgugcuguucgucgu

SEQ ID NO: 1226310 - RNA, 19 nt, Artificial Sequence
  Description of Artificial Sequence: Synthetic oligonucleotide
caaagagcuguggguucga

SEQ ID NO: 1226311 - RNA, 19 nt, Artificial Sequence
  Description of Artificial Sequence: Synthetic oligonucleotide
uuggggcaagaugcaccaa

SEQ ID NO: 1226312 - RNA, 19 nt, Artificial Sequence
  Description of Artificial Sequence: Synthetic oligonucleotide
cucgaauaaggcccagcuu

SEQ ID NO: 1226313 - RNA, 19 nt, Artificial Sequence
  Description of Artificial Sequence: Synthetic oligonucleotide
cagcgcaaguggcagcucu

SEQ ID NO: 1226314 - RNA, 19 nt, Artificial Sequence
  Description of Artificial Sequence: Synthetic oligonucleotide
ugcauaccuggggcuguuu

SEQ ID NO: 1226315 - RNA, 19 nt, Artificial Sequence
  Description of Artificial Sequence: Synthetic oligonucleotide
cuugcauaccuggggcugu

SEQ ID NO: 1226316 - RNA, 19 nt, Artificial Sequence
  Description of Artificial Sequence: Synthetic oligonucleotide
caaacuccucugcuaggau

SEQ ID NO: 1226317 - RNA, 19 nt, Artificial Sequence
  Description of Artificial Sequence: Synthetic oligonucleotide
ggguucgacugugcaagca

SEQ ID NO: 1226318 - RNA, 19 nt, Artificial Sequence
  Description of Artificial Sequence: Synthetic oligonucleotide
cacgucgcaccucggcaaa

SEQ ID NO: 1226319 - RNA, 19 nt, Artificial Sequence
  Description of Artificial Sequence: Synthetic oligonucleotide
cauacauggucagggucau

SEQ ID NO: 1226320 - RNA, 19 nt, Artificial Sequence
  Description of Artificial Sequence: Synthetic oligonucleotide
ucgcaggugugggcagccu

SEQ ID NO: 1226321 - RNA, 19 nt, Artificial Sequence
  Description of Artificial Sequence: Synthetic oligonucleotide
gaacucugcugaguccgau

SEQ ID NO: 1226322 - RNA, 19 nt, Artificial Sequence
  Description of Artificial Sequence: Synthetic oligonucleotide
guucgucgugucaccucuc

SEQ ID NO: 1226323 - RNA, 19 nt, Artificial Sequence
  Description of Artificial Sequence: Synthetic oligonucleotide
gcaugagacugcauuccua

SEQ ID NO: 1226324 - RNA, 19 nt, Artificial Sequence
  Description of Artificial Sequence: Synthetic oligonucleotide
ggaacucugcugaguccga

SEQ ID NO: 1226325 - RNA, 19 nt, Artificial Sequence
  Description of Artificial Sequence: Synthetic oligonucleotide
gcccuguuugcaucacuua

SEQ ID NO: 1226326 - RNA, 19 nt, Artificial Sequence
  Description of Artificial Sequence: Synthetic oligonucleotide
cugccccuucacuguaaua

SEQ ID NO: 1226327 - RNA, 19 nt, Artificial Sequence
  Description of Artificial Sequence: Synthetic oligonucleotide
augcaccaacaggcuacaa

SEQ ID NO: 1226328 - RNA, 19 nt, Artificial Sequence
  Description of Artificial Sequence: Synthetic oligonucleotide
cgugcuguucgucguguca

SEQ ID NO: 1226329 - RNA, 19 nt, Artificial Sequence
  Description of Artificial Sequence: Synthetic oligonucleotide
ccgaugguucagcugggaa

SEQ ID NO: 1226330 - RNA, 19 nt, Artificial Sequence
  Description of Artificial Sequence: Synthetic oligonucleotide
ccggggauccaucuggggu

SEQ ID NO: 1226331 - RNA, 19 nt, Artificial Sequence
  Description of Artificial Sequence: Synthetic oligonucleotide
ggccacaagugccccgucu

SEQ ID NO: 1226332 - RNA, 19 nt, Artificial Sequence
  Description of Artificial Sequence: Synthetic oligonucleotide
cugugcaauguaguuccuu

SEQ ID NO: 1226333 - RNA, 19 nt, Artificial Sequence
  Description of Artificial Sequence: Synthetic oligonucleotide
gcaccucggcaaagucucc

SEQ ID NO: 1226334 - RNA, 19 nt, Artificial Sequence
  Description of Artificial Sequence: Synthetic oligonucleotide
cgucccauacuagggccug

SEQ ID NO: 1226335 - RNA, 19 nt, Artificial Sequence
  Description of Artificial Sequence: Synthetic oligonucleotide
ccgugcuguucgucguguc

SEQ ID NO: 1226336 - RNA, 19 nt, Artificial Sequence
  Description of Artificial Sequence: Synthetic oligonucleotide
ccacucgaauaaggcccag

SEQ ID NO: 1226337 - RNA, 19 nt, Artificial Sequence
  Description of Artificial Sequence: Synthetic oligonucleotide
caccauccgugcuguucgu

SEQ ID NO: 1226338 - RNA, 19 nt, Artificial Sequence
  Description of Artificial Sequence: Synthetic oligonucleotide
gugcuaggccagggcagua

SEQ ID NO: 1226339 - RNA, 19 nt, Artificial Sequence
  Description of Artificial Sequence: Synthetic oligonucleotide
cacuggcuugaagcacugu

SEQ ID NO: 1226340 - RNA, 19 nt, Artificial Sequence
  Description of Artificial Sequence: Synthetic oligonucleotide
cuacacgcucuagcuccuu

SEQ ID NO: 1226341 - RNA, 19 nt, Artificial Sequence
  Description of Artificial Sequence: Synthetic oligonucleotide
ccucggcaaagucuccauu

SEQ ID NO: 1226342 - RNA, 19 nt, Artificial Sequence
  Description of Artificial Sequence: Synthetic oligonucleotide
cgucgcaccucggcaaagu

SEQ ID NO: 1226343 - RNA, 19 nt, Artificial Sequence
  Description of Artificial Sequence: Synthetic oligonucleotide
gccccacgaugcucauguu

SEQ ID NO: 1226344 - RNA, 19 nt, Artificial Sequence
  Description of Artificial Sequence: Synthetic oligonucleotide
ucuuauuacauaaauaucc

SEQ ID NO: 1226345 - RNA, 19 nt, Artificial Sequence
  Description of Artificial Sequence: Synthetic oligonucleotide
aaugaagagacugagaagg

SEQ ID NO: 1226346 - RNA, 19 nt, Artificial Sequence
  Description of Artificial Sequence: Synthetic oligonucleotide
aacaacuggccauaaaggc

SEQ ID NO: 1226347 - RNA, 19 nt, Artificial Sequence
  Description of Artificial Sequence: Synthetic oligonucleotide
uaaacaacuggccauaaag

SEQ ID NO: 1226348 - RNA, 19 nt, Artificial Sequence
  Description of Artificial Sequence: Synthetic oligonucleotide
acauaaaugaguuugggca

SEQ ID NO: 1226349 - RNA, 19 nt, Artificial Sequence
  Description of Artificial Sequence: Synthetic oligonucleotide
aguggucaaagucacagcc

SEQ ID NO: 1226350 - RNA, 19 nt, Artificial Sequence
  Description of Artificial Sequence: Synthetic oligonucleotide
caaguuagcauucugacag

SEQ ID NO: 1226351 - RNA, 19 nt, Artificial Sequence
  Description of Artificial Sequence: Synthetic oligonucleotide
aauuccuuagaaugaagag

SEQ ID NO: 1226352 - RNA, 19 nt, Artificial Sequence
  Description of Artificial Sequence: Synthetic oligonucleotide
aaauaauugauccuguaua

SEQ ID NO: 1226353 - RNA, 19 nt, Artificial Sequence
  Description of Artificial Sequence: Synthetic oligonucleotide
aaugggauuagggauacgg

SEQ ID NO: 1226354 - RNA, 19 nt, Artificial Sequence
  Description of Artificial Sequence: Synthetic oligonucleotide
uccgagaucacacagugag

SEQ ID NO: 1226355 - RNA, 19 nt, Artificial Sequence
  Description of Artificial Sequence: Synthetic oligonucleotide
uacauggcaaggaaaaggg

SEQ ID NO: 1226356 - RNA, 19 nt, Artificial Sequence
  Description of Artificial Sequence: Synthetic oligonucleotide
ugaguaacaggaaaauucc

SEQ ID NO: 1226357 - RNA, 19 nt, Artificial Sequence
  Description of Artificial Sequence: Synthetic oligonucleotide
ucucaccuguuuaagaugg

SEQ ID NO: 1226358 - RNA, 19 nt, Artificial Sequence
  Description of Artificial Sequence: Synthetic oligonucleotide
aaaauaauugauccuguau

SEQ ID NO: 1226359 - RNA, 19 nt, Artificial Sequence
  Description of Artificial Sequence: Synthetic oligonucleotide
uaauugauccuguauaucu

SEQ ID NO: 1226360 - RNA, 19 nt, Artificial Sequence
  Description of Artificial Sequence: Synthetic oligonucleotide
aauaauugauccuguauau

SEQ ID NO: 1226361 - RNA, 19 nt, Artificial Sequence
  Description of Artificial Sequence: Synthetic oligonucleotide
uuuaaguaacugcagggug

SEQ ID NO: 1226362 - RNA, 19 nt, Artificial Sequence
  Description of Artificial Sequence: Synthetic oligonucleotide
agagaagcaaacaaagggc

SEQ ID NO: 1226363 - RNA, 19 nt, Artificial Sequence
  Description of Artificial Sequence: Synthetic oligonucleotide
uaagauggugcuaggaucc

SEQ ID NO: 1226364 - RNA, 19 nt, Artificial Sequence
  Description of Artificial Sequence: Synthetic oligonucleotide
aauaacagcucaugauguc

SEQ ID NO: 1226365 - RNA, 19 nt, Artificial Sequence
  Description of Artificial Sequence: Synthetic oligonucleotide
uccuguauaucuaugacaa

SEQ ID NO: 1226366 - RNA, 19 nt, Artificial Sequence
  Description of Artificial Sequence: Synthetic oligonucleotide
agaccugugagaaagcugc

SEQ ID NO: 1226367 - RNA, 19 nt, Artificial Sequence
  Description of Artificial Sequence: Synthetic oligonucleotide
aaugaguuugggcaccaag

SEQ ID NO: 1226368 - RNA, 19 nt, Artificial Sequence
  Description of Artificial Sequence: Synthetic oligonucleotide
uaagcugcuggcuacaucu

SEQ ID NO: 1226369 - RNA, 19 nt, Artificial Sequence
  Description of Artificial Sequence: Synthetic oligonucleotide
uuuaagauggugcuaggau

SEQ ID NO: 1226370 - RNA, 19 nt, Artificial Sequence
  Description of Artificial Sequence: Synthetic oligonucleotide
gagaagcaaacaaagggcg

SEQ ID NO: 1226371 - RNA, 19 nt, Artificial Sequence
  Description of Artificial Sequence: Synthetic oligonucleotide
ggaguuaacaguaaagagg

SEQ ID NO: 1226372 - RNA, 19 nt, Artificial Sequence
  Description of Artificial Sequence: Synthetic oligonucleotide
agguagucuguccugaaac

SEQ ID NO: 1226373 - RNA, 19 nt, Artificial Sequence
  Description of Artificial Sequence: Synthetic oligonucleotide
gacaggcuagaguacaugg

SEQ ID NO: 1226374 - RNA, 19 nt, Artificial Sequence
  Description of Artificial Sequence: Synthetic oligonucleotide
uacagaaccgagaugaaau

SEQ ID NO: 1226375 - RNA, 19 nt, Artificial Sequence
  Description of Artificial Sequence: Synthetic oligonucleotide
aggaguuaacaguaaagag

SEQ ID NO: 1226376 - RNA, 19 nt, Artificial Sequence
  Description of Artificial Sequence: Synthetic oligonucleotide
agguuuaaguaacugcagg

SEQ ID NO: 1226377 - RNA, 19 nt, Artificial Sequence
  Description of Artificial Sequence: Synthetic oligonucleotide
uccaguuaacaccagguac

SEQ ID NO: 1226378 - RNA, 19 nt, Artificial Sequence
  Description of Artificial Sequence: Synthetic oligonucleotide
ucugcuauccagcccagag

SEQ ID NO: 1226379 - RNA, 19 nt, Artificial Sequence
  Description of Artificial Sequence: Synthetic oligonucleotide
ugaggcaguuccuagguag

SEQ ID NO: 1226380 - RNA, 19 nt, Artificial Sequence
  Description of Artificial Sequence: Synthetic oligonucleotide
agcaaucacaccugcuucc

SEQ ID NO: 1226381 - RNA, 19 nt, Artificial Sequence
  Description of Artificial Sequence: Synthetic oligonucleotide
uacaggauaaaucauucuu

SEQ ID NO: 1226382 - RNA, 19 nt, Artificial Sequence
  Description of Artificial Sequence: Synthetic oligonucleotide
cauggcaaggaaaagggac

SEQ ID NO: 1226383 - RNA, 19 nt, Artificial Sequence
  Description of Artificial Sequence: Synthetic oligonucleotide
uuaagauggugcuaggauc

SEQ ID NO: 1226384 - RNA, 19 nt, Artificial Sequence
  Description of Artificial Sequence: Synthetic oligonucleotide
agucaguuuauuucccgac

SEQ ID NO: 1226385 - RNA, 19 nt, Artificial Sequence
  Description of Artificial Sequence: Synthetic oligonucleotide
uuauccuuuuaaacaacug

SEQ ID NO: 1226386 - RNA, 19 nt, Artificial Sequence
  Description of Artificial Sequence: Synthetic oligonucleotide
ucauaagggguacauaaau

SEQ ID NO: 1226387 - RNA, 19 nt, Artificial Sequence
  Description of Artificial Sequence: Synthetic oligonucleotide
aaauaacagcucaugaugu

SEQ ID NO: 1226388 - RNA, 19 nt, Artificial Sequence
  Description of Artificial Sequence: Synthetic oligonucleotide
uucuuauuacauaaauauc

SEQ ID NO: 1226389 - RNA, 19 nt, Artificial Sequence
  Description of Artificial Sequence: Synthetic oligonucleotide
uaggaguuaacaguaaaga

SEQ ID NO: 1226390 - RNA, 19 nt, Artificial Sequence
  Description of Artificial Sequence: Synthetic oligonucleotide
uaugaccucaagugaagag

SEQ ID NO: 1226391 - RNA, 19 nt, Artificial Sequence
  Description of Artificial Sequence: Synthetic oligonucleotide
aagcagucauggaagaugg

SEQ ID NO: 1226392 - RNA, 19 nt, Artificial Sequence
  Description of Artificial Sequence: Synthetic oligonucleotide
cauaaaugaguuugggcac

SEQ ID NO: 1226393 - RNA, 19 nt, Artificial Sequence
  Description of Artificial Sequence: Synthetic oligonucleotide
uaaaggcucuuuugggugg

SEQ ID NO: 1226394 - RNA, 19 nt, Artificial Sequence
  Description of Artificial Sequence: Synthetic oligonucleotide
aaauaugaccucaagugaa

SEQ ID NO: 1226395 - RNA, 19 nt, Artificial Sequence
  Description of Artificial Sequence: Synthetic oligonucleotide
ugacagaagugccuaagcu

SEQ ID NO: 1226396 - RNA, 19 nt, Artificial Sequence
  Description of Artificial Sequence: Synthetic oligonucleotide
cauaagggguacauaaaug

SEQ ID NO: 1226397 - RNA, 19 nt, Artificial Sequence
  Description of Artificial Sequence: Synthetic oligonucleotide
aauaugaccucaagugaag

SEQ ID NO: 1226398 - RNA, 19 nt, Artificial Sequence
  Description of Artificial Sequence: Synthetic oligonucleotide
agcaagacccgacuccgcc

SEQ ID NO: 1226399 - RNA, 19 nt, Artificial Sequence
  Description of Artificial Sequence: Synthetic oligonucleotide
uaccgagugguucaggcug

SEQ ID NO: 1226400 - RNA, 19 nt, Artificial Sequence
  Description of Artificial Sequence: Synthetic oligonucleotide
acaccacugacagaagugc

SEQ ID NO: 1226401 - RNA, 19 nt, Artificial Sequence
  Description of Artificial Sequence: Synthetic oligonucleotide
uguaggaguuaacaguaaa

SEQ ID NO: 1226402 - RNA, 19 nt, Artificial Sequence
  Description of Artificial Sequence: Synthetic oligonucleotide
aaagggacaucauucuuuu

SEQ ID NO: 1226403 - RNA, 19 nt, Artificial Sequence
  Description of Artificial Sequence: Synthetic oligonucleotide
gucaguuuauuucccgacg

SEQ ID NO: 1226404 - RNA, 19 nt, Artificial Sequence
  Description of Artificial Sequence: Synthetic oligonucleotide
aagucaguuuauuucccga

SEQ ID NO: 1226405 - RNA, 19 nt, Artificial Sequence
  Description of Artificial Sequence: Synthetic oligonucleotide
aaguugacaggaacaacuc

SEQ ID NO: 1226406 - RNA, 19 nt, Artificial Sequence
  Description of Artificial Sequence: Synthetic oligonucleotide
cuuuucuggucccugacug

SEQ ID NO: 1226407 - RNA, 19 nt, Artificial Sequence
  Description of Artificial Sequence: Synthetic oligonucleotide
aguaaagagguagaagugu

SEQ ID NO: 1226408 - RNA, 19 nt, Artificial Sequence
  Description of Artificial Sequence: Synthetic oligonucleotide
cuguuuaagauggugcuag

SEQ ID NO: 1226409 - RNA, 19 nt, Artificial Sequence
  Description of Artificial Sequence: Synthetic oligonucleotide
aaccaaauugcagaccugu

SEQ ID NO: 1226410 - RNA, 19 nt, Artificial Sequence
  Description of Artificial Sequence: Synthetic oligonucleotide
aguccgagaucacacagug

SEQ ID NO: 1226411 - RNA, 19 nt, Artificial Sequence
  Description of Artificial Sequence: Synthetic oligonucleotide
aggauaaaucauucuuauc

SEQ ID NO: 1226412 - RNA, 19 nt, Artificial Sequence
  Description of Artificial Sequence: Synthetic oligonucleotide
agaaccgagaugaaauggg

SEQ ID NO: 1226413 - RNA, 19 nt, Artificial Sequence
  Description of Artificial Sequence: Synthetic oligonucleotide
caccuguuuaagauggugc

SEQ ID NO: 1226414 - RNA, 19 nt, Artificial Sequence
  Description of Artificial Sequence: Synthetic oligonucleotide
aggcaaaguuucuuauuac

SEQ ID NO: 1226415 - RNA, 19 nt, Artificial Sequence
  Description of Artificial Sequence: Synthetic oligonucleotide
aagucgggcagagaugcac

SEQ ID NO: 1226416 - RNA, 19 nt, Artificial Sequence
  Description of Artificial Sequence: Synthetic oligonucleotide
ucagcaagacccgacuccg

SEQ ID NO: 1226417 - RNA, 19 nt, Artificial Sequence
  Description of Artificial Sequence: Synthetic oligonucleotide
auaauugauccuguauauc

SEQ ID NO: 1226418 - RNA, 19 nt, Artificial Sequence
  Description of Artificial Sequence: Synthetic oligonucleotide
gccauaaaggcucuuuugg

SEQ ID NO: 1226419 - RNA, 19 nt, Artificial Sequence
  Description of Artificial Sequence: Synthetic oligonucleotide
auccuguauaucuaugaca

SEQ ID NO: 1226420 - RNA, 19 nt, Artificial Sequence
  Description of Artificial Sequence: Synthetic oligonucleotide
gauacggcugcuucugggc

SEQ ID NO: 1226421 - RNA, 19 nt, Artificial Sequence
  Description of Artificial Sequence: Synthetic oligonucleotide
ucuuauccuuuuaaacaac

SEQ ID NO: 1226422 - RNA, 19 nt, Artificial Sequence
  Description of Artificial Sequence: Synthetic oligonucleotide
uagaguacauggcaaggaa

SEQ ID NO: 1226423 - RNA, 19 nt, Artificial Sequence
  Description of Artificial Sequence: Synthetic oligonucleotide
uuagggauacggcugcuuc

SEQ ID NO: 1226424 - RNA, 19 nt, Artificial Sequence
  Description of Artificial Sequence: Synthetic oligonucleotide
ggugcuaggauccucugag

SEQ ID NO: 1226425 - RNA, 19 nt, Artificial Sequence
  Description of Artificial Sequence: Synthetic oligonucleotide
guacauaaaugaguuuggg

SEQ ID NO: 1226426 - RNA, 19 nt, Artificial Sequence
  Description of Artificial Sequence: Synthetic oligonucleotide
aaaagggacaucauucuuu

SEQ ID NO: 1226427 - RNA, 19 nt, Artificial Sequence
  Description of Artificial Sequence: Synthetic oligonucleotide
aagucagcaagacccgacu

SEQ ID NO: 1226428 - RNA, 19 nt, Artificial Sequence
  Description of Artificial Sequence: Synthetic oligonucleotide
acaccauguaaagucgggc

SEQ ID NO: 1226429 - RNA, 19 nt, Artificial Sequence
  Description of Artificial Sequence: Synthetic oligonucleotide
acaguccgagaucacacag

SEQ ID NO: 1226430 - RNA, 19 nt, Artificial Sequence
  Description of Artificial Sequence: Synthetic oligonucleotide
ugcuccaaucuucuugccc

SEQ ID NO: 1226431 - RNA, 19 nt, Artificial Sequence
  Description of Artificial Sequence: Synthetic oligonucleotide
aaacccuaguggagaagcc

SEQ ID NO: 1226432 - RNA, 19 nt, Artificial Sequence
  Description of Artificial Sequence: Synthetic oligonucleotide
ccaaguacaggauaaauca

SEQ ID NO: 1226433 - RNA, 19 nt, Artificial Sequence
  Description of Artificial Sequence: Synthetic oligonucleotide
caguaaagagguagaagug

SEQ ID NO: 1226434 - RNA, 19 nt, Artificial Sequence
  Description of Artificial Sequence: Synthetic oligonucleotide
uccugaaacccuaguggag

SEQ ID NO: 1226435 - RNA, 19 nt, Artificial Sequence
  Description of Artificial Sequence: Synthetic oligonucleotide
gagaugaaaugggauuagg

SEQ ID NO: 1226436 - RNA, 19 nt, Artificial Sequence
  Description of Artificial Sequence: Synthetic oligonucleotide
acagaaccgagaugaaaug

SEQ ID NO: 1226437 - RNA, 19 nt, Artificial Sequence
  Description of Artificial Sequence: Synthetic oligonucleotide
aaaagcccauacagaaccg

SEQ ID NO: 1226438 - RNA, 19 nt, Artificial Sequence
  Description of Artificial Sequence: Synthetic oligonucleotide
ccaguuaacaccagguacc

SEQ ID NO: 1226439 - RNA, 19 nt, Artificial Sequence
  Description of Artificial Sequence: Synthetic oligonucleotide
uuccuagguagucuguccu

SEQ ID NO: 1226440 - RNA, 19 nt, Artificial Sequence
  Description of Artificial Sequence: Synthetic oligonucleotide
guugacaggaacaacucca

SEQ ID NO: 1226441 - RNA, 19 nt, Artificial Sequence
  Description of Artificial Sequence: Synthetic oligonucleotide
auaaaucauucuuauccuu

SEQ ID NO: 1226442 - RNA, 19 nt, Artificial Sequence
  Description of Artificial Sequence: Synthetic oligonucleotide
aguuugggcaccaaguaca

SEQ ID NO: 1226443 - RNA, 19 nt, Artificial Sequence
  Description of Artificial Sequence: Synthetic oligonucleotide
guaacaggaaaauuccuua

SEQ ID NO: 1226444 - RNA, 19 nt, Artificial Sequence
  Description of Artificial Sequence: Synthetic oligonucleotide
cauucugacaguuccauua

SEQ ID NO: 1226445 - RNA, 19 nt, Artificial Sequence
  Description of Artificial Sequence: Synthetic oligonucleotide
agucagcaagacccgacuc

SEQ ID NO: 1226446 - RNA, 19 nt, Artificial Sequence
  Description of Artificial Sequence: Synthetic oligonucleotide
guaacugcagggugguuug

SEQ ID NO: 1226447 - RNA, 19 nt, Artificial Sequence
  Description of Artificial Sequence: Synthetic oligonucleotide
gaagcaaacaaagggcgca

SEQ ID NO: 1226448 - RNA, 19 nt, Artificial Sequence
  Description of Artificial Sequence: Synthetic oligonucleotide
uuaacaccagguaccgagu

SEQ ID NO: 1226449 - RNA, 19 nt, Artificial Sequence
  Description of Artificial Sequence: Synthetic oligonucleotide
cagaaccgagaugaaaugg

SEQ ID NO: 1226450 - RNA, 19 nt, Artificial Sequence
  Description of Artificial Sequence: Synthetic oligonucleotide
aaguacaggauaaaucauu

SEQ ID NO: 1226451 - RNA, 19 nt, Artificial Sequence
  Description of Artificial Sequence: Synthetic oligonucleotide
accucaagugaagagaagu

SEQ ID NO: 1226452 - RNA, 19 nt, Artificial Sequence
  Description of Artificial Sequence: Synthetic oligonucleotide
acaggcuagaguacauggc

SEQ ID NO: 1226453 - RNA, 19 nt, Artificial Sequence
  Description of Artificial Sequence: Synthetic oligonucleotide
gucagcaagacccgacucc

SEQ ID NO: 1226454 - RNA, 19 nt, Artificial Sequence
  Description of Artificial Sequence: Synthetic oligonucleotide
cuguauaucuaugacaaaa

SEQ ID NO: 1226455 - RNA, 19 nt, Artificial Sequence
  Description of Artificial Sequence: Synthetic oligonucleotide
acacaguccgagaucacac

SEQ ID NO: 1226456 - RNA, 19 nt, Artificial Sequence
  Description of Artificial Sequence: Synthetic oligonucleotide
uuuggguggugguugggga

SEQ ID NO: 1226457 - RNA, 19 nt, Artificial Sequence
  Description of Artificial Sequence: Synthetic oligonucleotide
accgagaugaaaugggauu

SEQ ID NO: 1226458 - RNA, 19 nt, Artificial Sequence
  Description of Artificial Sequence: Synthetic oligonucleotide
gggauuggggaaauggugg

SEQ ID NO: 1226459 - RNA, 19 nt, Artificial Sequence
  Description of Artificial Sequence: Synthetic oligonucleotide
aaguuagcauucugacagu

SEQ ID NO: 1226460 - RNA, 19 nt, Artificial Sequence
  Description of Artificial Sequence: Synthetic oligonucleotide
cuccgccuuguaaacaggg

SEQ ID NO: 1226461 - RNA, 19 nt, Artificial Sequence
  Description of Artificial Sequence: Synthetic oligonucleotide
aagcaguccaaagucaguu

SEQ ID NO: 1226462 - RNA, 19 nt, Artificial Sequence
  Description of Artificial Sequence: Synthetic oligonucleotide
aaaagcaaucacaccugcu

SEQ ID NO: 1226463 - RNA, 19 nt, Artificial Sequence
  Description of Artificial Sequence: Synthetic oligonucleotide
gaaggugucaugauguacu

SEQ ID NO: 1226464 - RNA, 19 nt, Artificial Sequence
  Description of Artificial Sequence: Synthetic oligonucleotide
aagcccauacagaaccgag

SEQ ID NO: 1226465 - RNA, 19 nt, Artificial Sequence
  Description of Artificial Sequence: Synthetic oligonucleotide
aguucaggaggacgaaggu

SEQ ID NO: 1226466 - RNA, 19 nt, Artificial Sequence
  Description of Artificial Sequence: Synthetic oligonucleotide
aagggcgcauucccucuuc

SEQ ID NO: 1226467 - RNA, 19 nt, Artificial Sequence
  Description of Artificial Sequence: Synthetic oligonucleotide
uccgccuuguaaacagggc

SEQ ID NO: 1226468 - RNA, 19 nt, Artificial Sequence
  Description of Artificial Sequence: Synthetic oligonucleotide
caguuaacaccagguaccg

SEQ ID NO: 1226469 - RNA, 19 nt, Artificial Sequence
  Description of Artificial Sequence: Synthetic oligonucleotide
cacccuuuccacaccagac

SEQ ID NO: 1226470 - RNA, 19 nt, Artificial Sequence
  Description of Artificial Sequence: Synthetic oligonucleotide
ggaaaauuccuuagaauga

SEQ ID NO: 1226471 - RNA, 19 nt, Artificial Sequence
  Description of Artificial Sequence: Synthetic oligonucleotide
guguuuguccccugugcag

SEQ ID NO: 1226472 - RNA, 19 nt, Artificial Sequence
  Description of Artificial Sequence: Synthetic oligonucleotide
gcuaggauccucugagccg

SEQ ID NO: 1226473 - RNA, 19 nt, Artificial Sequence
  Description of Artificial Sequence: Synthetic oligonucleotide
gguaccgagugguucaggc

SEQ ID NO: 1226474 - RNA, 19 nt, Artificial Sequence
  Description of Artificial Sequence: Synthetic oligonucleotide
gcaaaguucacagugagua

SEQ ID NO: 1226475 - RNA, 19 nt, Artificial Sequence
  Description of Artificial Sequence: Synthetic oligonucleotide
uuggggaaaugguggauau

SEQ ID NO: 1226476 - RNA, 19 nt, Artificial Sequence
  Description of Artificial Sequence: Synthetic oligonucleotide
aaggugucaugauguacuu

SEQ ID NO: 1226477 - RNA, 19 nt, Artificial Sequence
  Description of Artificial Sequence: Synthetic oligonucleotide
caggcuagaguacauggca

SEQ ID NO: 1226478 - RNA, 19 nt, Artificial Sequence
  Description of Artificial Sequence: Synthetic oligonucleotide
uuucuggucccugacuggu

SEQ ID NO: 1226479 - RNA, 19 nt, Artificial Sequence
  Description of Artificial Sequence: Synthetic oligonucleotide
cuccaguggucaaagucac

SEQ ID NO: 1226480 - RNA, 19 nt, Artificial Sequence
  Description of Artificial Sequence: Synthetic oligonucleotide
uuuaaacaacuggccauaa

SEQ ID NO: 1226481 - RNA, 19 nt, Artificial Sequence
  Description of Artificial Sequence: Synthetic oligonucleotide
cuuauccuuuuaaacaacu

SEQ ID NO: 1226482 - RNA, 19 nt, Artificial Sequence
  Description of Artificial Sequence: Synthetic oligonucleotide
uagguagucuguccugaaa

SEQ ID NO: 1226483 - RNA, 19 nt, Artificial Sequence
  Description of Artificial Sequence: Synthetic oligonucleotide
caccauguaaagucgggca

SEQ ID NO: 1226484 - RNA, 19 nt, Artificial Sequence
  Description of Artificial Sequence: Synthetic oligonucleotide
caccacugacagaagugcc

SEQ ID NO: 1226485 - RNA, 19 nt, Artificial Sequence
  Description of Artificial Sequence: Synthetic oligonucleotide
ggauuagggauacggcugc

SEQ ID NO: 1226486 - RNA, 19 nt, Artificial Sequence
  Description of Artificial Sequence: Synthetic oligonucleotide
agggguacauaaaugaguu

SEQ ID NO: 1226487 - RNA, 19 nt, Artificial Sequence
  Description of Artificial Sequence: Synthetic oligonucleotide
ugggcaugcuagucccugg

SEQ ID NO: 1226488 - RNA, 19 nt, Artificial Sequence
  Description of Artificial Sequence: Synthetic oligonucleotide
gaagucagcaagacccgac

SEQ ID NO: 1226489 - RNA, 19 nt, Artificial Sequence
  Description of Artificial Sequence: Synthetic oligonucleotide
uggugcuaggauccucuga

SEQ ID NO: 1226490 - RNA, 19 nt, Artificial Sequence
  Description of Artificial Sequence: Synthetic oligonucleotide
ugaaacccuaguggagaag

SEQ ID NO: 1226491 - RNA, 19 nt, Artificial Sequence
  Description of Artificial Sequence: Synthetic oligonucleotide
auaugggaugccuuucauu

SEQ ID NO: 1226492 - RNA, 19 nt, Artificial Sequence
  Description of Artificial Sequence: Synthetic oligonucleotide
aaaccaaauugcagaccug

SEQ ID NO: 1226493 - RNA, 19 nt, Artificial Sequence
  Description of Artificial Sequence: Synthetic oligonucleotide
gguagaaguguguuucuga

SEQ ID NO: 1226494 - RNA, 19 nt, Artificial Sequence
  Description of Artificial Sequence: Synthetic oligonucleotide
guaaagucgggcagagaug

SEQ ID NO: 1226495 - RNA, 19 nt, Artificial Sequence
  Description of Artificial Sequence: Synthetic oligonucleotide
ggcuagaguacauggcaag

SEQ ID NO: 1226496 - RNA, 19 nt, Artificial Sequence
  Description of Artificial Sequence: Synthetic oligonucleotide
aaguuucuuauuacauaaa

SEQ ID NO: 1226497 - RNA, 19 nt, Artificial Sequence
  Description of Artificial Sequence: Synthetic oligonucleotide
ugacaggcuagaguacaug

SEQ ID NO: 1226498 - RNA, 19 nt, Artificial Sequence
  Description of Artificial Sequence: Synthetic oligonucleotide
gaaccgagaugaaauggga

SEQ ID NO: 1226499 - RNA, 19 nt, Artificial Sequence
  Description of Artificial Sequence: Synthetic oligonucleotide
aaccgagaugaaaugggau

SEQ ID NO: 1226500 - RNA, 19 nt, Artificial Sequence
  Description of Artificial Sequence: Synthetic oligonucleotide
caaaauaauugauccugua

SEQ ID NO: 1226501 - RNA, 19 nt, Artificial Sequence
  Description of Artificial Sequence: Synthetic oligonucleotide
auaugaccucaagugaaga

SEQ ID NO: 1226502 - RNA, 19 nt, Artificial Sequence
  Description of Artificial Sequence: Synthetic oligonucleotide
cacagugaguaacaggaaa

SEQ ID NO: 1226503 - RNA, 19 nt, Artificial Sequence
  Description of Artificial Sequence: Synthetic oligonucleotide
aacuggugggagacugagg

SEQ ID NO: 1226504 - RNA, 19 nt, Artificial Sequence
  Description of Artificial Sequence: Synthetic oligonucleotide
aaaugggauuagggauacg

SEQ ID NO: 1226505 - RNA, 19 nt, Artificial Sequence
  Description of Artificial Sequence: Synthetic oligonucleotide
agaaccccuccuuccaaga

SEQ ID NO: 1226506 - RNA, 19 nt, Artificial Sequence
  Description of Artificial Sequence: Synthetic oligonucleotide
agugaguaacaggaaaauu

SEQ ID NO: 1226507 - RNA, 19 nt, Artificial Sequence
  Description of Artificial Sequence: Synthetic oligonucleotide
cccaaguuagcauucugac

SEQ ID NO: 1226508 - RNA, 19 nt, Artificial Sequence
  Description of Artificial Sequence: Synthetic oligonucleotide
ugcagggugguuugugguc

SEQ ID NO: 1226509 - RNA, 19 nt, Artificial Sequence
  Description of Artificial Sequence: Synthetic oligonucleotide
gcuagaguacauggcaagg

SEQ ID NO: 1226510 - RNA, 19 nt, Artificial Sequence
  Description of Artificial Sequence: Synthetic oligonucleotide
gcagguucagagcuccagg

SEQ ID NO: 1226511 - RNA, 19 nt, Artificial Sequence
  Description of Artificial Sequence: Synthetic oligonucleotide
guuuaaguaacugcagggu

SEQ ID NO: 1226512 - RNA, 19 nt, Artificial Sequence
  Description of Artificial Sequence: Synthetic oligonucleotide
cagaaccccuccuuccaag

SEQ ID NO: 1226513 - RNA, 19 nt, Artificial Sequence
  Description of Artificial Sequence: Synthetic oligonucleotide
ugccuaagcugcuggcuac

SEQ ID NO: 1226514 - RNA, 19 nt, Artificial Sequence
  Description of Artificial Sequence: Synthetic oligonucleotide
cucccuuccaugcauggga

SEQ ID NO: 1226515 - RNA, 19 nt, Artificial Sequence
  Description of Artificial Sequence: Synthetic oligonucleotide
cuagaguacauggcaagga

SEQ ID NO: 1226516 - RNA, 19 nt, Artificial Sequence
  Description of Artificial Sequence: Synthetic oligonucleotide
ggccauaaaggcucuuuug

SEQ ID NO: 1226517 - RNA, 19 nt, Artificial Sequence
  Description of Artificial Sequence: Synthetic oligonucleotide
gaaccccuccuuccaagac

SEQ ID NO: 1226518 - RNA, 19 nt, Artificial Sequence
  Description of Artificial Sequence: Synthetic oligonucleotide
ccuuuuaaacaacuggcca

SEQ ID NO: 1226519 - RNA, 19 nt, Artificial Sequence
  Description of Artificial Sequence: Synthetic oligonucleotide
uccccagauuugcauuaca

SEQ ID NO: 1226520 - RNA, 19 nt, Artificial Sequence
  Description of Artificial Sequence: Synthetic oligonucleotide
auacagaaccgagaugaaa

SEQ ID NO: 1226521 - RNA, 19 nt, Artificial Sequence
  Description of Artificial Sequence: Synthetic oligonucleotide
ggacgaaggugucaugaug

SEQ ID NO: 1226522 - RNA, 19 nt, Artificial Sequence
  Description of Artificial Sequence: Synthetic oligonucleotide
ugccuaaggcaaaguuucu

SEQ ID NO: 1226523 - RNA, 19 nt, Artificial Sequence
  Description of Artificial Sequence: Synthetic oligonucleotide
gggauuagggauacggcug

SEQ ID NO: 1226524 - RNA, 19 nt, Artificial Sequence
  Description of Artificial Sequence: Synthetic oligonucleotide
cuaggauccucugagccga

SEQ ID NO: 1226525 - RNA, 19 nt, Artificial Sequence
  Description of Artificial Sequence: Synthetic oligonucleotide
cucugagccgaccccuggg

SEQ ID NO: 1226526 - RNA, 19 nt, Artificial Sequence
  Description of Artificial Sequence: Synthetic oligonucleotide
ccucauaagggguacauaa

SEQ ID NO: 1226527 - RNA, 19 nt, Artificial Sequence
  Description of Artificial Sequence: Synthetic oligonucleotide
agggauacggcugcuucug

SEQ ID NO: 1226528 - RNA, 19 nt, Artificial Sequence
  Description of Artificial Sequence: Synthetic oligonucleotide
accugccuaaggcaaaguu

SEQ ID NO: 1226529 - RNA, 19 nt, Artificial Sequence
  Description of Artificial Sequence: Synthetic oligonucleotide
ugguggauaugggaugccu

SEQ ID NO: 1226530 - RNA, 19 nt, Artificial Sequence
  Description of Artificial Sequence: Synthetic oligonucleotide
gguagggcuagggauuggg

SEQ ID NO: 1226531 - RNA, 19 nt, Artificial Sequence
  Description of Artificial Sequence: Synthetic oligonucleotide
cucauaagggguacauaaa

SEQ ID NO: 1226532 - RNA, 19 nt, Artificial Sequence
  Description of Artificial Sequence: Synthetic oligonucleotide
agaguacauggcaaggaaa

SEQ ID NO: 1226533 - RNA, 19 nt, Artificial Sequence
  Description of Artificial Sequence: Synthetic oligonucleotide
agaagugccuaagcugcug

SEQ ID NO: 1226534 - RNA, 19 nt, Artificial Sequence
  Description of Artificial Sequence: Synthetic oligonucleotide
auugcagaccugugagaaa

SEQ ID NO: 1226535 - RNA, 19 nt, Artificial Sequence
  Description of Artificial Sequence: Synthetic oligonucleotide
gguguuuguccccugugca

SEQ ID NO: 1226536 - RNA, 19 nt, Artificial Sequence
  Description of Artificial Sequence: Synthetic oligonucleotide
cagucaguacacugcugac

SEQ ID NO: 1226537 - RNA, 19 nt, Artificial Sequence
  Description of Artificial Sequence: Synthetic oligonucleotide
agauggugcuaggauccuc

SEQ ID NO: 1226538 - RNA, 19 nt, Artificial Sequence
  Description of Artificial Sequence: Synthetic oligonucleotide
gcugagggguguuuguccc

SEQ ID NO: 1226539 - RNA, 19 nt, Artificial Sequence
  Description of Artificial Sequence: Synthetic oligonucleotide
aggacgaaggugucaugau

SEQ ID NO: 1226540 - RNA, 19 nt, Artificial Sequence
  Description of Artificial Sequence: Synthetic oligonucleotide
gagacugagaaggcaggga

SEQ ID NO: 1226541 - RNA, 19 nt, Artificial Sequence
  Description of Artificial Sequence: Synthetic oligonucleotide
aaagggcgcauucccucuu

SEQ ID NO: 1226542 - RNA, 19 nt, Artificial Sequence
  Description of Artificial Sequence: Synthetic oligonucleotide
caaaguucacagugaguaa

SEQ ID NO: 1226543 - RNA, 19 nt, Artificial Sequence
  Description of Artificial Sequence: Synthetic oligonucleotide
ugagccgaccccugggcau

SEQ ID NO: 1226544 - RNA, 19 nt, Artificial Sequence
  Description of Artificial Sequence: Synthetic oligonucleotide
gaccccauucuccaguggu

SEQ ID NO: 1226545 - RNA, 19 nt, Artificial Sequence
  Description of Artificial Sequence: Synthetic oligonucleotide
cuaagcugcuggcuacauc

SEQ ID NO: 1226546 - RNA, 19 nt, Artificial Sequence
  Description of Artificial Sequence: Synthetic oligonucleotide
uggcuacaucuguaggagu

SEQ ID NO: 1226547 - RNA, 19 nt, Artificial Sequence
  Description of Artificial Sequence: Synthetic oligonucleotide
aguuagcauucugacaguu

SEQ ID NO: 1226548 - RNA, 19 nt, Artificial Sequence
  Description of Artificial Sequence: Synthetic oligonucleotide
aggcaguuccuagguaguc

SEQ ID NO: 1226549 - RNA, 19 nt, Artificial Sequence
  Description of Artificial Sequence: Synthetic oligonucleotide
ggacuuuucuggccaacac

SEQ ID NO: 1226550 - RNA, 19 nt, Artificial Sequence
  Description of Artificial Sequence: Synthetic oligonucleotide
ucuggccaacaccugccua

SEQ ID NO: 1226551 - RNA, 19 nt, Artificial Sequence
  Description of Artificial Sequence: Synthetic oligonucleotide
agaagucagcaagacccga

SEQ ID NO: 1226552 - RNA, 19 nt, Artificial Sequence
  Description of Artificial Sequence: Synthetic oligonucleotide
gggaaaugguggauauggg

SEQ ID NO: 1226553 - RNA, 19 nt, Artificial Sequence
  Description of Artificial Sequence: Synthetic oligonucleotide
aggaacaacuccacacagu

SEQ ID NO: 1226554 - RNA, 19 nt, Artificial Sequence
  Description of Artificial Sequence: Synthetic oligonucleotide
uuggccucauaagggguac

SEQ ID NO: 1226555 - RNA, 19 nt, Artificial Sequence
  Description of Artificial Sequence: Synthetic oligonucleotide
aagacccgacuccgccuug

SEQ ID NO: 1226556 - RNA, 19 nt, Artificial Sequence
  Description of Artificial Sequence: Synthetic oligonucleotide
ugccucccuuccaugcaug

SEQ ID NO: 1226557 - RNA, 19 nt, Artificial Sequence
  Description of Artificial Sequence: Synthetic oligonucleotide
uggggaaaugguggauaug

SEQ ID NO: 1226558 - RNA, 19 nt, Artificial Sequence
  Description of Artificial Sequence: Synthetic oligonucleotide
agcaaaguucacagugagu

SEQ ID NO: 1226559 - RNA, 19 nt, Artificial Sequence
  Description of Artificial Sequence: Synthetic oligonucleotide
ggauuggggaaauggugga

SEQ ID NO: 1226560 - RNA, 19 nt, Artificial Sequence
  Description of Artificial Sequence: Synthetic oligonucleotide
aacaccugccuaaggcaaa

SEQ ID NO: 1226561 - RNA, 19 nt, Artificial Sequence
  Description of Artificial Sequence: Synthetic oligonucleotide
gaggucccagagaaaucug

SEQ ID NO: 1226562 - RNA, 19 nt, Artificial Sequence
  Description of Artificial Sequence: Synthetic oligonucleotide
cacacaguccgagaucaca

SEQ ID NO: 1226563 - RNA, 19 nt, Artificial Sequence
  Description of Artificial Sequence: Synthetic oligonucleotide
aaaugaguuugggcaccaa

SEQ ID NO: 1226564 - RNA, 19 nt, Artificial Sequence
  Description of Artificial Sequence: Synthetic oligonucleotide
gcucaugauguccagggua

SEQ ID NO: 1226565 - RNA, 19 nt, Artificial Sequence
  Description of Artificial Sequence: Synthetic oligonucleotide
cacaguccgagaucacaca

SEQ ID NO: 1226566 - RNA, 19 nt, Artificial Sequence
  Description of Artificial Sequence: Synthetic oligonucleotide
cuggugcacccuucccugc

SEQ ID NO: 1226567 - RNA, 19 nt, Artificial Sequence
  Description of Artificial Sequence: Synthetic oligonucleotide
cugaaacccuaguggagaa

SEQ ID NO: 1226568 - RNA, 19 nt, Artificial Sequence
  Description of Artificial Sequence: Synthetic oligonucleotide
agcccauacagaaccgaga

SEQ ID NO: 1226569 - RNA, 19 nt, Artificial Sequence
  Description of Artificial Sequence: Synthetic oligonucleotide
gguuggggaaagguuuaag

SEQ ID NO: 1226570 - RNA, 19 nt, Artificial Sequence
  Description of Artificial Sequence: Synthetic oligonucleotide
gcagauaaccagcaaaguu

SEQ ID NO: 1226571 - RNA, 19 nt, Artificial Sequence
  Description of Artificial Sequence: Synthetic oligonucleotide
gagguagaaguguguuucu

SEQ ID NO: 1226572 - RNA, 19 nt, Artificial Sequence
  Description of Artificial Sequence: Synthetic oligonucleotide
acuccgccuuguaaacagg

SEQ ID NO: 1226573 - RNA, 19 nt, Artificial Sequence
  Description of Artificial Sequence: Synthetic oligonucleotide
cuccaguuaacaccaggua

SEQ ID NO: 1226574 - RNA, 19 nt, Artificial Sequence
  Description of Artificial Sequence: Synthetic oligonucleotide
uuccccagauuugcauuac

SEQ ID NO: 1226575 - RNA, 19 nt, Artificial Sequence
  Description of Artificial Sequence: Synthetic oligonucleotide
ccaaguuagcauucugaca

SEQ ID NO: 1226576 - RNA, 19 nt, Artificial Sequence
  Description of Artificial Sequence: Synthetic oligonucleotide
agucgggcagagaugcacu

SEQ ID NO: 1226577 - RNA, 19 nt, Artificial Sequence
  Description of Artificial Sequence: Synthetic oligonucleotide
ggcaccaaguacaggauaa

SEQ ID NO: 1226578 - RNA, 19 nt, Artificial Sequence
  Description of Artificial Sequence: Synthetic oligonucleotide
aguuaacaccagguaccga

SEQ ID NO: 1226579 - RNA, 19 nt, Artificial Sequence
  Description of Artificial Sequence: Synthetic oligonucleotide
ggcaugcuagucccuggcc

SEQ ID NO: 1226580 - RNA, 19 nt, Artificial Sequence
  Description of Artificial Sequence: Synthetic oligonucleotide
cagcaagacccgacuccgc

SEQ ID NO: 1226581 - RNA, 19 nt, Artificial Sequence
  Description of Artificial Sequence: Synthetic oligonucleotide
gccuuguaaacagggcucc

SEQ ID NO: 1226582 - RNA, 19 nt, Artificial Sequence
  Description of Artificial Sequence: Synthetic oligonucleotide
aggcuagaguacauggcaa

SEQ ID NO: 1226583 - RNA, 19 nt, Artificial Sequence
  Description of Artificial Sequence: Synthetic oligonucleotide
aggggccccaaguuagcau

SEQ ID NO: 1226584 - RNA, 19 nt, Artificial Sequence
  Description of Artificial Sequence: Synthetic oligonucleotide
ugcaugggaaaagcccaua

SEQ ID NO: 1226585 - RNA, 19 nt, Artificial Sequence
  Description of Artificial Sequence: Synthetic oligonucleotide
cccugggcaugcuaguccc

SEQ ID NO: 1226586 - RNA, 19 nt, Artificial Sequence
  Description of Artificial Sequence: Synthetic oligonucleotide
agggcgcauucccucuucu

SEQ ID NO: 1226587 - RNA, 19 nt, Artificial Sequence
  Description of Artificial Sequence: Synthetic oligonucleotide
ugguuggggaaagguuuaa

SEQ ID NO: 1226588 - RNA, 19 nt, Artificial Sequence
  Description of Artificial Sequence: Synthetic oligonucleotide
gggcaugcuagucccuggc

SEQ ID NO: 1226589 - RNA, 19 nt, Artificial Sequence
  Description of Artificial Sequence: Synthetic oligonucleotide
cccugugcagucaguacac

SEQ ID NO: 1226590 - RNA, 19 nt, Artificial Sequence
  Description of Artificial Sequence: Synthetic oligonucleotide
cuggucccugacuggucug

SEQ ID NO: 1226591 - RNA, 19 nt, Artificial Sequence
  Description of Artificial Sequence: Synthetic oligonucleotide
ggcgcauucccucuucucu

SEQ ID NO: 1226592 - RNA, 19 nt, Artificial Sequence
  Description of Artificial Sequence: Synthetic oligonucleotide
guaccgagugguucaggcu

SEQ ID NO: 1226593 - RNA, 19 nt, Artificial Sequence
  Description of Artificial Sequence: Synthetic oligonucleotide
gagccgaccccugggcaug

SEQ ID NO: 1226594 - RNA, 19 nt, Artificial Sequence
  Description of Artificial Sequence: Synthetic oligonucleotide
acccgacuccgccuuguaa

SEQ ID NO: 1226595 - RNA, 19 nt, Artificial Sequence
  Description of Artificial Sequence: Synthetic oligonucleotide
auguaaagucgggcagaga

SEQ ID NO: 1226596 - RNA, 19 nt, Artificial Sequence
  Description of Artificial Sequence: Synthetic oligonucleotide
ggccaacaccugccuaagg

SEQ ID NO: 1226597 - RNA, 19 nt, Artificial Sequence
  Description of Artificial Sequence: Synthetic oligonucleotide
uuccacagugguggucccu

SEQ ID NO: 1226598 - RNA, 19 nt, Artificial Sequence
  Description of Artificial Sequence: Synthetic oligonucleotide
gcauuacaaaacaccaugu

SEQ ID NO: 1226599 - RNA, 19 nt, Artificial Sequence
  Description of Artificial Sequence: Synthetic oligonucleotide
cagguaccgagugguucag

SEQ ID NO: 1226600 - RNA, 19 nt, Artificial Sequence
  Description of Artificial Sequence: Synthetic oligonucleotide
caccugaagcaaguugaca

SEQ ID NO: 1226601 - RNA, 19 nt, Artificial Sequence
  Description of Artificial Sequence: Synthetic oligonucleotide
caaagggcgcauucccucu

SEQ ID NO: 1226602 - RNA, 19 nt, Artificial Sequence
  Description of Artificial Sequence: Synthetic oligonucleotide
aguuaacaguaaagaggua

SEQ ID NO: 1226603 - RNA, 19 nt, Artificial Sequence
  Description of Artificial Sequence: Synthetic oligonucleotide
gauuggggaaaugguggau

SEQ ID NO: 1226604 - RNA, 19 nt, Artificial Sequence
  Description of Artificial Sequence: Synthetic oligonucleotide
cgccuuguaaacagggcuc

SEQ ID NO: 1226605 - RNA, 19 nt, Artificial Sequence
  Description of Artificial Sequence: Synthetic oligonucleotide
agccgaccccugggcaugc

SEQ ID NO: 1226606 - RNA, 19 nt, Artificial Sequence
  Description of Artificial Sequence: Synthetic oligonucleotide
cccauacagaaccgagaug

SEQ ID NO: 1226607 - RNA, 19 nt, Artificial Sequence
  Description of Artificial Sequence: Synthetic oligonucleotide
gcccauacagaaccgagau

SEQ ID NO: 1226608 - RNA, 19 nt, Artificial Sequence
  Description of Artificial Sequence: Synthetic oligonucleotide
ccgacuccgccuuguaaac

SEQ ID NO: 1226609 - RNA, 19 nt, Artificial Sequence
  Description of Artificial Sequence: Synthetic oligonucleotide
cagugaguaacaggaaaau

SEQ ID NO: 1226610 - RNA, 19 nt, Artificial Sequence
  Description of Artificial Sequence: Synthetic oligonucleotide
augcuagucccuggcccca

SEQ ID NO: 1226611 - RNA, 19 nt, Artificial Sequence
  Description of Artificial Sequence: Synthetic oligonucleotide
agacccgacuccgccuugu

SEQ ID NO: 1226612 - RNA, 19 nt, Artificial Sequence
  Description of Artificial Sequence: Synthetic oligonucleotide
ccucaccucugacaagcug

SEQ ID NO: 1226613 - RNA, 19 nt, Artificial Sequence
  Description of Artificial Sequence: Synthetic oligonucleotide
cccgacuccgccuuguaaa

SEQ ID NO: 1226614 - RNA, 19 nt, Artificial Sequence
  Description of Artificial Sequence: Synthetic oligonucleotide
ccccugugcagucaguaca

SEQ ID NO: 1226615 - RNA, 19 nt, Artificial Sequence
  Description of Artificial Sequence: Synthetic oligonucleotide
cugacuggucugugccaca

SEQ ID NO: 1226616 - RNA, 19 nt, Artificial Sequence
  Description of Artificial Sequence: Synthetic oligonucleotide
cugaaucagagaggugucu

SEQ ID NO: 1226617 - RNA, 19 nt, Artificial Sequence
  Description of Artificial Sequence: Synthetic oligonucleotide
gauuagggauacggcugcu

SEQ ID NO: 1226618 - RNA, 19 nt, Artificial Sequence
  Description of Artificial Sequence: Synthetic oligonucleotide
ccauguaaagucgggcaga

SEQ ID NO: 1226619 - RNA, 19 nt, Artificial Sequence
  Description of Artificial Sequence: Synthetic oligonucleotide
guccgagaucacacaguga

SEQ ID NO: 1226620 - RNA, 19 nt, Artificial Sequence
  Description of Artificial Sequence: Synthetic oligonucleotide
ccgagaugaaaugggauua

SEQ ID NO: 1226621 - RNA, 19 nt, Artificial Sequence
  Description of Artificial Sequence: Synthetic oligonucleotide
ggcuacaucuguaggaguu

SEQ ID NO: 1226622 - RNA, 19 nt, Artificial Sequence
  Description of Artificial Sequence: Synthetic oligonucleotide
cugacaggcuagaguacau

SEQ ID NO: 1226623 - RNA, 19 nt, Artificial Sequence
  Description of Artificial Sequence: Synthetic oligonucleotide
gaccccugggcaugcuagu

SEQ ID NO: 1226624 - RNA, 19 nt, Artificial Sequence
  Description of Artificial Sequence: Synthetic oligonucleotide
gcuacaucuguaggaguua

SEQ ID NO: 1226625 - RNA, 19 nt, Artificial Sequence
  Description of Artificial Sequence: Synthetic oligonucleotide
ggcaguuccuagguagucu

SEQ ID NO: 1226626 - RNA, 19 nt, Artificial Sequence
  Description of Artificial Sequence: Synthetic oligonucleotide
cucaccuguuuaagauggu

SEQ ID NO: 1226627 - RNA, 19 nt, Artificial Sequence
  Description of Artificial Sequence: Synthetic oligonucleotide
gggcgcauucccucuucuc

SEQ ID NO: 1226628 - RNA, 19 nt, Artificial Sequence
  Description of Artificial Sequence: Synthetic oligonucleotide
ccgccuuguaaacagggcu

SEQ ID NO: 1226629 - RNA, 19 nt, Artificial Sequence
  Description of Artificial Sequence: Synthetic oligonucleotide
caagacccgacuccgccuu

SEQ ID NO: 1226630 - RNA, 19 nt, Artificial Sequence
  Description of Artificial Sequence: Synthetic oligonucleotide
cagagaaaucuggacuuuu

SEQ ID NO: 1226631 - RNA, 19 nt, Artificial Sequence
  Description of Artificial Sequence: Synthetic oligonucleotide
ggggccccaaguuagcauu

SEQ ID NO: 1226632 - RNA, 19 nt, Artificial Sequence
  Description of Artificial Sequence: Synthetic oligonucleotide
gcaagacccgacuccgccu

SEQ ID NO: 1226633 - RNA, 19 nt, Artificial Sequence
  Description of Artificial Sequence: Synthetic oligonucleotide
agggugguuugugguccaa

SEQ ID NO: 1226634 - RNA, 19 nt, Artificial Sequence
  Description of Artificial Sequence: Synthetic oligonucleotide
gcaggggccccaaguuagc

SEQ ID NO: 1226635 - RNA, 19 nt, Artificial Sequence
  Description of Artificial Sequence: Synthetic oligonucleotide
gguggauaugggaugccuu

SEQ ID NO: 1226636 - RNA, 19 nt, Artificial Sequence
  Description of Artificial Sequence: Synthetic oligonucleotide
cucugcuauccagcccaga

SEQ ID NO: 1226637 - RNA, 19 nt, Artificial Sequence
  Description of Artificial Sequence: Synthetic oligonucleotide
gggcuagggauuggggaaa

SEQ ID NO: 1226638 - RNA, 19 nt, Artificial Sequence
  Description of Artificial Sequence: Synthetic oligonucleotide
cacaugccacagcuccugu

SEQ ID NO: 1226639 - RNA, 19 nt, Artificial Sequence
  Description of Artificial Sequence: Synthetic oligonucleotide
ggccucauaagggguacau

SEQ ID NO: 1226640 - RNA, 19 nt, Artificial Sequence
  Description of Artificial Sequence: Synthetic oligonucleotide
ccuuguaaacagggcucca

SEQ ID NO: 1226641 - RNA, 19 nt, Artificial Sequence
  Description of Artificial Sequence: Synthetic oligonucleotide
gccucauaagggguacaua

SEQ ID NO: 1226642 - RNA, 19 nt, Artificial Sequence
  Description of Artificial Sequence: Synthetic oligonucleotide
gaugccccucuggcccucu

SEQ ID NO: 1226643 - RNA, 19 nt, Artificial Sequence
  Description of Artificial Sequence: Synthetic oligonucleotide
ccacaccagaccccauucu

SEQ ID NO: 1226644 - RNA, 19 nt, Artificial Sequence
  Description of Artificial Sequence: Synthetic oligonucleotide
ggcuagggauuggggaaau

SEQ ID NO: 1226645 - RNA, 19 nt, Artificial Sequence
  Description of Artificial Sequence: Synthetic oligonucleotide
cgacuccgccuuguaaaca

SEQ ID NO: 1226646 - RNA, 19 nt, Artificial Sequence
  Description of Artificial Sequence: Synthetic oligonucleotide
gccucaccucugacaagcu

SEQ ID NO: 1226647 - RNA, 19 nt, Artificial Sequence
  Description of Artificial Sequence: Synthetic oligonucleotide
ccgaccccugggcaugcua

SEQ ID NO: 1226648 - RNA, 19 nt, Artificial Sequence
  Description of Artificial Sequence: Synthetic oligonucleotide
ccuaagcugcuggcuacau

SEQ ID NO: 1226649 - RNA, 19 nt, Artificial Sequence
  Description of Artificial Sequence: Synthetic oligonucleotide
gugcaggcugagggguguu

SEQ ID NO: 1226650 - RNA, 19 nt, Artificial Sequence
  Description of Artificial Sequence: Synthetic oligonucleotide
gccgaccccugggcaugcu

SEQ ID NO: 1226651 - RNA, 19 nt, Artificial Sequence
  Description of Artificial Sequence: Synthetic oligonucleotide
acaacauacacacacacac

SEQ ID NO: 1226652 - RNA, 19 nt, Artificial Sequence
  Description of Artificial Sequence: Synthetic oligonucleotide
ugguaaaugacuuauuggg

SEQ ID NO: 1226653 - RNA, 19 nt, Artificial Sequence
  Description of Artificial Sequence: Synthetic oligonucleotide
aauacaggaacagagauug

SEQ ID NO: 1226654 - RNA, 19 nt, Artificial Sequence
  Description of Artificial Sequence: Synthetic oligonucleotide
aauaaacccagccucagag

SEQ ID NO: 1226655 - RNA, 19 nt, Artificial Sequence
  Description of Artificial Sequence: Synthetic oligonucleotide
uucaguacaagaagaaucg

SEQ ID NO: 1226656 - RNA, 19 nt, Artificial Sequence
  Description of Artificial Sequence: Synthetic oligonucleotide
auauaauaagcucccagcc

SEQ ID NO: 1226657 - RNA, 19 nt, Artificial Sequence
  Description of Artificial Sequence: Synthetic oligonucleotide
aaaacagcuagcuaccauc

SEQ ID NO: 1226658 - RNA, 19 nt, Artificial Sequence
  Description of Artificial Sequence: Synthetic oligonucleotide
acuauuuaaaguuucaaca

SEQ ID NO: 1226659 - RNA, 19 nt, Artificial Sequence
  Description of Artificial Sequence: Synthetic oligonucleotide
agaacuugagcacuguucc

SEQ ID NO: 1226660 - RNA, 19 nt, Artificial Sequence
  Description of Artificial Sequence: Synthetic oligonucleotide
ugucaauauaauaagcucc

SEQ ID NO: 1226661 - RNA, 19 nt, Artificial Sequence
  Description of Artificial Sequence: Synthetic oligonucleotide
uauuagugagagcugaugg

SEQ ID NO: 1226662 - RNA, 19 nt, Artificial Sequence
  Description of Artificial Sequence: Synthetic oligonucleotide
aacauacacacacacacag

SEQ ID NO: 1226663 - RNA, 19 nt, Artificial Sequence
  Description of Artificial Sequence: Synthetic oligonucleotide
ucacaaauaaaaguggugg

SEQ ID NO: 1226664 - RNA, 19 nt, Artificial Sequence
  Description of Artificial Sequence: Synthetic oligonucleotide
aaggauugcaugcaguuuc

SEQ ID NO: 1226665 - RNA, 19 nt, Artificial Sequence
  Description of Artificial Sequence: Synthetic oligonucleotide
aaucaguuggaacaacgac

SEQ ID NO: 1226666 - RNA, 19 nt, Artificial Sequence
  Description of Artificial Sequence: Synthetic oligonucleotide
ucuuuauaaaauucagccg

SEQ ID NO: 1226667 - RNA, 19 nt, Artificial Sequence
  Description of Artificial Sequence: Synthetic oligonucleotide
auaauaagcucccagccac

SEQ ID NO: 1226668 - RNA, 19 nt, Artificial Sequence
  Description of Artificial Sequence: Synthetic oligonucleotide
aaccucuugaguuuugugg

SEQ ID NO: 1226669 - RNA, 19 nt, Artificial Sequence
  Description of Artificial Sequence: Synthetic oligonucleotide
gaagaaucguuucuuaggg

SEQ ID NO: 1226670 - RNA, 19 nt, Artificial Sequence
  Description of Artificial Sequence: Synthetic oligonucleotide
uauacauuugcuaucuggc

SEQ ID NO: 1226671 - RNA, 19 nt, Artificial Sequence
  Description of Artificial Sequence: Synthetic oligonucleotide
auaguaauacuggaaagcc

SEQ ID NO: 1226672 - RNA, 19 nt, Artificial Sequence
  Description of Artificial Sequence: Synthetic oligonucleotide
uauaagacgauuucuuugc

SEQ ID NO: 1226673 - RNA, 19 nt, Artificial Sequence
  Description of Artificial Sequence: Synthetic oligonucleotide
aaaagugguggauggacgg

SEQ ID NO: 1226674 - RNA, 19 nt, Artificial Sequence
  Description of Artificial Sequence: Synthetic oligonucleotide
uuugcuuugguaaaugacu

SEQ ID NO: 1226675 - RNA, 19 nt, Artificial Sequence
  Description of Artificial Sequence: Synthetic oligonucleotide
acaacgacugaucaacugc

SEQ ID NO: 1226676 - RNA, 19 nt, Artificial Sequence
  Description of Artificial Sequence: Synthetic oligonucleotide
uacacacacacacagagca

SEQ ID NO: 1226677 - RNA, 19 nt, Artificial Sequence
  Description of Artificial Sequence: Synthetic oligonucleotide
uuuaaagaaagcugggugu

SEQ ID NO: 1226678 - RNA, 19 nt, Artificial Sequence
  Description of Artificial Sequence: Synthetic oligonucleotide
uugguaaaugacuuauugg

SEQ ID NO: 1226679 - RNA, 19 nt, Artificial Sequence
  Description of Artificial Sequence: Synthetic oligonucleotide
uugggugucaauauaauaa

SEQ ID NO: 1226680 - RNA, 19 nt, Artificial Sequence
  Description of Artificial Sequence: Synthetic oligonucleotide
caguguaacaaaauuacag

SEQ ID NO: 1226681 - RNA, 19 nt, Artificial Sequence
  Description of Artificial Sequence: Synthetic oligonucleotide
ugaccucaauauuagaagg

SEQ ID NO: 1226682 - RNA, 19 nt, Artificial Sequence
  Description of Artificial Sequence: Synthetic oligonucleotide
aacagaauacacuauuuaa

SEQ ID NO: 1226683 - RNA, 19 nt, Artificial Sequence
  Description of Artificial Sequence: Synthetic oligonucleotide
uguggcauauucuugaacu

SEQ ID NO: 1226684 - RNA, 19 nt, Artificial Sequence
  Description of Artificial Sequence: Synthetic oligonucleotide
caacgcuucauccagacgg

SEQ ID NO: 1226685 - RNA, 19 nt, Artificial Sequence
  Description of Artificial Sequence: Synthetic oligonucleotide
uuauaagacgauuucuuug

SEQ ID NO: 1226686 - RNA, 19 nt, Artificial Sequence
  Description of Artificial Sequence: Synthetic oligonucleotide
ugaguucacagcuaaaucu

SEQ ID NO: 1226687 - RNA, 19 nt, Artificial Sequence
  Description of Artificial Sequence: Synthetic oligonucleotide
guaaaugacuuauugggcc

SEQ ID NO: 1226688 - RNA, 19 nt, Artificial Sequence
  Description of Artificial Sequence: Synthetic oligonucleotide
aagaagaaucguuucuuag

SEQ ID NO: 1226689 - RNA, 19 nt, Artificial Sequence
  Description of Artificial Sequence: Synthetic oligonucleotide
aggggauccacauaggagg

SEQ ID NO: 1226690 - RNA, 19 nt, Artificial Sequence
  Description of Artificial Sequence: Synthetic oligonucleotide
ucuaaaacagcuagcuacc

SEQ ID NO: 1226691 - RNA, 19 nt, Artificial Sequence
  Description of Artificial Sequence: Synthetic oligonucleotide
gaguucaaaccccagagcc

SEQ ID NO: 1226692 - RNA, 19 nt, Artificial Sequence
  Description of Artificial Sequence: Synthetic oligonucleotide
uaaaagugguggauggacg

SEQ ID NO: 1226693 - RNA, 19 nt, Artificial Sequence
  Description of Artificial Sequence: Synthetic oligonucleotide
uggggaacaacauacacac

SEQ ID NO: 1226694 - RNA, 19 nt, Artificial Sequence
  Description of Artificial Sequence: Synthetic oligonucleotide
gacuuauugggccagggag

SEQ ID NO: 1226695 - RNA, 19 nt, Artificial Sequence
  Description of Artificial Sequence: Synthetic oligonucleotide
cauacacacacacacagag

SEQ ID NO: 1226696 - RNA, 19 nt, Artificial Sequence
  Description of Artificial Sequence: Synthetic oligonucleotide
uuuaaaccaauaucugugc

SEQ ID NO: 1226697 - RNA, 19 nt, Artificial Sequence
  Description of Artificial Sequence: Synthetic oligonucleotide
aguguaacaaaauuacagu

SEQ ID NO: 1226698 - RNA, 19 nt, Artificial Sequence
  Description of Artificial Sequence: Synthetic oligonucleotide
uuaacucguauacauuugc

SEQ ID NO: 1226699 - RNA, 19 nt, Artificial Sequence
  Description of Artificial Sequence: Synthetic oligonucleotide
uuauaagugaggccaaugu

SEQ ID NO: 1226700 - RNA, 19 nt, Artificial Sequence
  Description of Artificial Sequence: Synthetic oligonucleotide
acagcuagcuaccaucagc

SEQ ID NO: 1226701 - RNA, 19 nt, Artificial Sequence
  Description of Artificial Sequence: Synthetic oligonucleotide
ugccauuucacuugagugg

SEQ ID NO: 1226702 - RNA, 19 nt, Artificial Sequence
  Description of Artificial Sequence: Synthetic oligonucleotide
ucuauuugagggcccaggg

SEQ ID NO: 1226703 - RNA, 19 nt, Artificial Sequence
  Description of Artificial Sequence: Synthetic oligonucleotide
aguggguuguauaagagac

SEQ ID NO: 1226704 - RNA, 19 nt, Artificial Sequence
  Description of Artificial Sequence: Synthetic oligonucleotide
cuucaguacaagaagaauc

SEQ ID NO: 1226705 - RNA, 19 nt, Artificial Sequence
  Description of Artificial Sequence: Synthetic oligonucleotide
ucucauaaucaccauuugc

SEQ ID NO: 1226706 - RNA, 19 nt, Artificial Sequence
  Description of Artificial Sequence: Synthetic oligonucleotide
aguaucuaaugccuuuugg

SEQ ID NO: 1226707 - RNA, 19 nt, Artificial Sequence
  Description of Artificial Sequence: Synthetic oligonucleotide
aacgcaaacauucaacauu

SEQ ID NO: 1226708 - RNA, 19 nt, Artificial Sequence
  Description of Artificial Sequence: Synthetic oligonucleotide
auaaucaccauuugcaaaa

SEQ ID NO: 1226709 - RNA, 19 nt, Artificial Sequence
  Description of Artificial Sequence: Synthetic oligonucleotide
uuaucuuauaagacgauuu

SEQ ID NO: 1226710 - RNA, 19 nt, Artificial Sequence
  Description of Artificial Sequence: Synthetic oligonucleotide
accuguaugacucauagua

SEQ ID NO: 1226711 - RNA, 19 nt, Artificial Sequence
  Description of Artificial Sequence: Synthetic oligonucleotide
uuguaaguaucuaaugccu

SEQ ID NO: 1226712 - RNA, 19 nt, Artificial Sequence
  Description of Artificial Sequence: Synthetic oligonucleotide
auaauacaggaacagagau

SEQ ID NO: 1226713 - RNA, 19 nt, Artificial Sequence
  Description of Artificial Sequence: Synthetic oligonucleotide
aguacaguugggaaagugc

SEQ ID NO: 1226714 - RNA, 19 nt, Artificial Sequence
  Description of Artificial Sequence: Synthetic oligonucleotide
ucuucuaaaacagcuagcu

SEQ ID NO: 1226715 - RNA, 19 nt, Artificial Sequence
  Description of Artificial Sequence: Synthetic oligonucleotide
ugucuccucacuaucauac

SEQ ID NO: 1226716 - RNA, 19 nt, Artificial Sequence
  Description of Artificial Sequence: Synthetic oligonucleotide
gauugcaugcaguuucagg

SEQ ID NO: 1226717 - RNA, 19 nt, Artificial Sequence
  Description of Artificial Sequence: Synthetic oligonucleotide
gaaacgcaaacauucaaca

SEQ ID NO: 1226718 - RNA, 19 nt, Artificial Sequence
  Description of Artificial Sequence: Synthetic oligonucleotide
cauaguaauacuggaaagc

SEQ ID NO: 1226719 - RNA, 19 nt, Artificial Sequence
  Description of Artificial Sequence: Synthetic oligonucleotide
uuaaaguuucaacagugua

SEQ ID NO: 1226720 - RNA, 19 nt, Artificial Sequence
  Description of Artificial Sequence: Synthetic oligonucleotide
cuuccauuaacucguauac

SEQ ID NO: 1226721 - RNA, 19 nt, Artificial Sequence
  Description of Artificial Sequence: Synthetic oligonucleotide
ucuuauaagacgauuucuu

SEQ ID NO: 1226722 - RNA, 19 nt, Artificial Sequence
  Description of Artificial Sequence: Synthetic oligonucleotide
uccauuaacucguauacau

SEQ ID NO: 1226723 - RNA, 19 nt, Artificial Sequence
  Description of Artificial Sequence: Synthetic oligonucleotide
ugggugucaauauaauaag

SEQ ID NO: 1226724 - RNA, 19 nt, Artificial Sequence
  Description of Artificial Sequence: Synthetic oligonucleotide
agucguucacuuuuacuac

SEQ ID NO: 1226725 - RNA, 19 nt, Artificial Sequence
  Description of Artificial Sequence: Synthetic oligonucleotide
uacaagaagaaucguuucu

SEQ ID NO: 1226726 - RNA, 19 nt, Artificial Sequence
  Description of Artificial Sequence: Synthetic oligonucleotide
uauuauucuggaagcaagu

SEQ ID NO: 1226727 - RNA, 19 nt, Artificial Sequence
  Description of Artificial Sequence: Synthetic oligonucleotide
gauuuuaugcgcuguuccc

SEQ ID NO: 1226728 - RNA, 19 nt, Artificial Sequence
  Description of Artificial Sequence: Synthetic oligonucleotide
agaguuuguauuauucugg

SEQ ID NO: 1226729 - RNA, 19 nt, Artificial Sequence
  Description of Artificial Sequence: Synthetic oligonucleotide
cacuauuuaaaguuucaac

SEQ ID NO: 1226730 - RNA, 19 nt, Artificial Sequence
  Description of Artificial Sequence: Synthetic oligonucleotide
agaaacgcaaacauucaac

SEQ ID NO: 1226731 - RNA, 19 nt, Artificial Sequence
  Description of Artificial Sequence: Synthetic oligonucleotide
cuagcuaccaucagcugcc

SEQ ID NO: 1226732 - RNA, 19 nt, Artificial Sequence
  Description of Artificial Sequence: Synthetic oligonucleotide
caugcuuauaaucucagca

SEQ ID NO: 1226733 - RNA, 19 nt, Artificial Sequence
  Description of Artificial Sequence: Synthetic oligonucleotide
aacaacgacugaucaacug

SEQ ID NO: 1226734 - RNA, 19 nt, Artificial Sequence
  Description of Artificial Sequence: Synthetic oligonucleotide
acuacuggcacuauugcuc

SEQ ID NO: 1226735 - RNA, 19 nt, Artificial Sequence
  Description of Artificial Sequence: Synthetic oligonucleotide
gcuaaaucugcauagcugc

SEQ ID NO: 1226736 - RNA, 19 nt, Artificial Sequence
  Description of Artificial Sequence: Synthetic oligonucleotide
uggguuguauaagagacgc

SEQ ID NO: 1226737 - RNA, 19 nt, Artificial Sequence
  Description of Artificial Sequence: Synthetic oligonucleotide
gaagggaaauaccuguaug

SEQ ID NO: 1226738 - RNA, 19 nt, Artificial Sequence
  Description of Artificial Sequence: Synthetic oligonucleotide
ugcuacuuucauaagguuc

SEQ ID NO: 1226739 - RNA, 19 nt, Artificial Sequence
  Description of Artificial Sequence: Synthetic oligonucleotide
cuucuuauaagugaggcca

SEQ ID NO: 1226740 - RNA, 19 nt, Artificial Sequence
  Description of Artificial Sequence: Synthetic oligonucleotide
uuaaagaaagcugggugug

SEQ ID NO: 1226741 - RNA, 19 nt, Artificial Sequence
  Description of Artificial Sequence: Synthetic oligonucleotide
agauuggugcagcugcuac

SEQ ID NO: 1226742 - RNA, 19 nt, Artificial Sequence
  Description of Artificial Sequence: Synthetic oligonucleotide
agcugcuacuucuuuacuc

SEQ ID NO: 1226743 - RNA, 19 nt, Artificial Sequence
  Description of Artificial Sequence: Synthetic oligonucleotide
uauaagagacgcucuuuca

SEQ ID NO: 1226744 - RNA, 19 nt, Artificial Sequence
  Description of Artificial Sequence: Synthetic oligonucleotide
aaguaucuaaugccuuuug

SEQ ID NO: 1226745 - RNA, 19 nt, Artificial Sequence
  Description of Artificial Sequence: Synthetic oligonucleotide
cagagauuggugcagcugc

SEQ ID NO: 1226746 - RNA, 19 nt, Artificial Sequence
  Description of Artificial Sequence: Synthetic oligonucleotide
ucuuccauuaacucguaua

SEQ ID NO: 1226747 - RNA, 19 nt, Artificial Sequence
  Description of Artificial Sequence: Synthetic oligonucleotide
aacaugagcauuaucuuau

SEQ ID NO: 1226748 - RNA, 19 nt, Artificial Sequence
  Description of Artificial Sequence: Synthetic oligonucleotide
aagaaacgcaaacauucaa

SEQ ID NO: 1226749 - RNA, 19 nt, Artificial Sequence
  Description of Artificial Sequence: Synthetic oligonucleotide
uccuaacucuucaucagca

SEQ ID NO: 1226750 - RNA, 19 nt, Artificial Sequence
  Description of Artificial Sequence: Synthetic oligonucleotide
ucuaaugccuuuugguagu

SEQ ID NO: 1226751 - RNA, 19 nt, Artificial Sequence
  Description of Artificial Sequence: Synthetic oligonucleotide
uggaaauuuccugugaauc

SEQ ID NO: 1226752 - RNA, 19 nt, Artificial Sequence
  Description of Artificial Sequence: Synthetic oligonucleotide
gaccucaauauuagaaggg

SEQ ID NO: 1226753 - RNA, 19 nt, Artificial Sequence
  Description of Artificial Sequence: Synthetic oligonucleotide
guauuauucuggaagcaag

SEQ ID NO: 1226754 - RNA, 19 nt, Artificial Sequence
  Description of Artificial Sequence: Synthetic oligonucleotide
uucuucuaaaacagcuagc

SEQ ID NO: 1226755 - RNA, 19 nt, Artificial Sequence
  Description of Artificial Sequence: Synthetic oligonucleotide
aaacgcaaacauucaacau

SEQ ID NO: 1226756 - RNA, 19 nt, Artificial Sequence
  Description of Artificial Sequence: Synthetic oligonucleotide
gagacgaaccaagaaacgc

SEQ ID NO: 1226757 - RNA, 19 nt, Artificial Sequence
  Description of Artificial Sequence: Synthetic oligonucleotide
uauaagugaggccaauguu

SEQ ID NO: 1226758 - RNA, 19 nt, Artificial Sequence
  Description of Artificial Sequence: Synthetic oligonucleotide
ucuuagggccucuuuauaa

SEQ ID NO: 1226759 - RNA, 19 nt, Artificial Sequence
  Description of Artificial Sequence: Synthetic oligonucleotide
aguccaacgcuucauccag

SEQ ID NO: 1226760 - RNA, 19 nt, Artificial Sequence
  Description of Artificial Sequence: Synthetic oligonucleotide
agggaaauaccuguaugac

SEQ ID NO: 1226761 - RNA, 19 nt, Artificial Sequence
  Description of Artificial Sequence: Synthetic oligonucleotide
acgcaaacauucaacauuc

SEQ ID NO: 1226762 - RNA, 19 nt, Artificial Sequence
  Description of Artificial Sequence: Synthetic oligonucleotide
ugauggguuguaucuaucu

SEQ ID NO: 1226763 - RNA, 19 nt, Artificial Sequence
  Description of Artificial Sequence: Synthetic oligonucleotide
uaguaauacuggaaagccu

SEQ ID NO: 1226764 - RNA, 19 nt, Artificial Sequence
  Description of Artificial Sequence: Synthetic oligonucleotide
acagcuaaaucugcauagc

SEQ ID NO: 1226765 - RNA, 19 nt, Artificial Sequence
  Description of Artificial Sequence: Synthetic oligonucleotide
ggaaauaccuguaugacuc

SEQ ID NO: 1226766 - RNA, 19 nt, Artificial Sequence
  Description of Artificial Sequence: Synthetic oligonucleotide
accguguucccuuuauuag

SEQ ID NO: 1226767 - RNA, 19 nt, Artificial Sequence
  Description of Artificial Sequence: Synthetic oligonucleotide
uaucugaguucacagcuaa

SEQ ID NO: 1226768 - RNA, 19 nt, Artificial Sequence
  Description of Artificial Sequence: Synthetic oligonucleotide
aaccguguucccuuuauua

SEQ ID NO: 1226769 - RNA, 19 nt, Artificial Sequence
  Description of Artificial Sequence: Synthetic oligonucleotide
aaccaauaucugugcagag

SEQ ID NO: 1226770 - RNA, 19 nt, Artificial Sequence
  Description of Artificial Sequence: Synthetic oligonucleotide
ucauacaacucuccaaguu

SEQ ID NO: 1226771 - RNA, 19 nt, Artificial Sequence
  Description of Artificial Sequence: Synthetic oligonucleotide
aaucucuuuguaaguaucu

SEQ ID NO: 1226772 - RNA, 19 nt, Artificial Sequence
  Description of Artificial Sequence: Synthetic oligonucleotide
augacucauaguaauacug

SEQ ID NO: 1226773 - RNA, 19 nt, Artificial Sequence
  Description of Artificial Sequence: Synthetic oligonucleotide
gacgauuucuuugcuuugg

SEQ ID NO: 1226774 - RNA, 19 nt, Artificial Sequence
  Description of Artificial Sequence: Synthetic oligonucleotide
uguaugacucauaguaaua

SEQ ID NO: 1226775 - RNA, 19 nt, Artificial Sequence
  Description of Artificial Sequence: Synthetic oligonucleotide
uucuauuugagggcccagg

SEQ ID NO: 1226776 - RNA, 19 nt, Artificial Sequence
  Description of Artificial Sequence: Synthetic oligonucleotide
cucaauauuagaagggaaa

SEQ ID NO: 1226777 - RNA, 19 nt, Artificial Sequence
  Description of Artificial Sequence: Synthetic oligonucleotide
uauaaaauucagccgccuu

SEQ ID NO: 1226778 - RNA, 19 nt, Artificial Sequence
  Description of Artificial Sequence: Synthetic oligonucleotide
aaaaccguguucccuuuau

SEQ ID NO: 1226779 - RNA, 19 nt, Artificial Sequence
  Description of Artificial Sequence: Synthetic oligonucleotide
auacauuugcuaucuggca

SEQ ID NO: 1226780 - RNA, 19 nt, Artificial Sequence
  Description of Artificial Sequence: Synthetic oligonucleotide
uacauggcauguuccaggc

SEQ ID NO: 1226781 - RNA, 19 nt, Artificial Sequence
  Description of Artificial Sequence: Synthetic oligonucleotide
acacacagagcauauuaga

SEQ ID NO: 1226782 - RNA, 19 nt, Artificial Sequence
  Description of Artificial Sequence: Synthetic oligonucleotide
uguaaguaucuaaugccuu

SEQ ID NO: 1226783 - RNA, 19 nt, Artificial Sequence
  Description of Artificial Sequence: Synthetic oligonucleotide
aucaguuggaacaacgacu

SEQ ID NO: 1226784 - RNA, 19 nt, Artificial Sequence
  Description of Artificial Sequence: Synthetic oligonucleotide
aaucguuucuuagggccuc

SEQ ID NO: 1226785 - RNA, 19 nt, Artificial Sequence
  Description of Artificial Sequence: Synthetic oligonucleotide
cuauuugagggcccagggg

SEQ ID NO: 1226786 - RNA, 19 nt, Artificial Sequence
  Description of Artificial Sequence: Synthetic oligonucleotide
acgacugaucaacugcauc

SEQ ID NO: 1226787 - RNA, 19 nt, Artificial Sequence
  Description of Artificial Sequence: Synthetic oligonucleotide
ucuccucacuaucauacaa

SEQ ID NO: 1226788 - RNA, 19 nt, Artificial Sequence
  Description of Artificial Sequence: Synthetic oligonucleotide
guuguaucuaucugaguuc

SEQ ID NO: 1226789 - RNA, 19 nt, Artificial Sequence
  Description of Artificial Sequence: Synthetic oligonucleotide
uugcuaucuggcaaagaac

SEQ ID NO: 1226790 - RNA, 19 nt, Artificial Sequence
  Description of Artificial Sequence: Synthetic oligonucleotide
acuugaguggguuguauaa

SEQ ID NO: 1226791 - RNA, 19 nt, Artificial Sequence
  Description of Artificial Sequence: Synthetic oligonucleotide
auuuuccagauaauacagg

SEQ ID NO: 1226792 - RNA, 19 nt, Artificial Sequence
  Description of Artificial Sequence: Synthetic oligonucleotide
aguucacagcuaaaucugc

SEQ ID NO: 1226793 - RNA, 19 nt, Artificial Sequence
  Description of Artificial Sequence: Synthetic oligonucleotide
gaacuugagcacuguuccg

SEQ ID NO: 1226794 - RNA, 19 nt, Artificial Sequence
  Description of Artificial Sequence: Synthetic oligonucleotide
ucguucacuuuuacuacug

SEQ ID NO: 1226795 - RNA, 19 nt, Artificial Sequence
  Description of Artificial Sequence: Synthetic oligonucleotide
cagcaauaaacccagccuc

SEQ ID NO: 1226796 - RNA, 19 nt, Artificial Sequence
  Description of Artificial Sequence: Synthetic oligonucleotide
uuucuuagggccucuuuau

SEQ ID NO: 1226797 - RNA, 19 nt, Artificial Sequence
  Description of Artificial Sequence: Synthetic oligonucleotide
ucguauacauuugcuaucu

SEQ ID NO: 1226798 - RNA, 19 nt, Artificial Sequence
  Description of Artificial Sequence: Synthetic oligonucleotide
ugcuucaguacaagaagaa

SEQ ID NO: 1226799 - RNA, 19 nt, Artificial Sequence
  Description of Artificial Sequence: Synthetic oligonucleotide
acgguuuagcuucuuauaa

SEQ ID NO: 1226800 - RNA, 19 nt, Artificial Sequence
  Description of Artificial Sequence: Synthetic oligonucleotide
acugcuacuuucauaaggu

SEQ ID NO: 1226801 - RNA, 19 nt, Artificial Sequence
  Description of Artificial Sequence: Synthetic oligonucleotide
aguuuugacagagccuggg

SEQ ID NO: 1226802 - RNA, 19 nt, Artificial Sequence
  Description of Artificial Sequence: Synthetic oligonucleotide
gaacagaauacacuauuua

SEQ ID NO: 1226803 - RNA, 19 nt, Artificial Sequence
  Description of Artificial Sequence: Synthetic oligonucleotide
ucuggaagcaagucgucuc

SEQ ID NO: 1226804 - RNA, 19 nt, Artificial Sequence
  Description of Artificial Sequence: Synthetic oligonucleotide
uaaaacagcuagcuaccau

SEQ ID NO: 1226805 - RNA, 19 nt, Artificial Sequence
  Description of Artificial Sequence: Synthetic oligonucleotide
aacagcuagcuaccaucag

SEQ ID NO: 1226806 - RNA, 19 nt, Artificial Sequence
  Description of Artificial Sequence: Synthetic oligonucleotide
aaugacuuauugggccagg

SEQ ID NO: 1226807 - RNA, 19 nt, Artificial Sequence
  Description of Artificial Sequence: Synthetic oligonucleotide
uacuggaaagccugggacu

SEQ ID NO: 1226808 - RNA, 19 nt, Artificial Sequence
  Description of Artificial Sequence: Synthetic oligonucleotide
aucacugccagcgcucccc

SEQ ID NO: 1226809 - RNA, 19 nt, Artificial Sequence
  Description of Artificial Sequence: Synthetic oligonucleotide
caauaucugugcagagacg

SEQ ID NO: 1226810 - RNA, 19 nt, Artificial Sequence
  Description of Artificial Sequence: Synthetic oligonucleotide
ucuuucuauuugagggccc

SEQ ID NO: 1226811 - RNA, 19 nt, Artificial Sequence
  Description of Artificial Sequence: Synthetic oligonucleotide
gagcauuaucuuauaagac

SEQ ID NO: 1226812 - RNA, 19 nt, Artificial Sequence
  Description of Artificial Sequence: Synthetic oligonucleotide
aaacagcuagcuaccauca

SEQ ID NO: 1226813 - RNA, 19 nt, Artificial Sequence
  Description of Artificial Sequence: Synthetic oligonucleotide
ugacuuauugggccaggga

SEQ ID NO: 1226814 - RNA, 19 nt, Artificial Sequence
  Description of Artificial Sequence: Synthetic oligonucleotide
auacacacacacacagagc

SEQ ID NO: 1226815 - RNA, 19 nt, Artificial Sequence
  Description of Artificial Sequence: Synthetic oligonucleotide
ucagucguucacuuuuacu

SEQ ID NO: 1226816 - RNA, 19 nt, Artificial Sequence
  Description of Artificial Sequence: Synthetic oligonucleotide
cagagcauauuagaguuug

SEQ ID NO: 1226817 - RNA, 19 nt, Artificial Sequence
  Description of Artificial Sequence: Synthetic oligonucleotide
auaagugaggccaauguua

SEQ ID NO: 1226818 - RNA, 19 nt, Artificial Sequence
  Description of Artificial Sequence: Synthetic oligonucleotide
cucugcccgauuuuaugcg

SEQ ID NO: 1226819 - RNA, 19 nt, Artificial Sequence
  Description of Artificial Sequence: Synthetic oligonucleotide
gcaucagccacucaauagc

SEQ ID NO: 1226820 - RNA, 19 nt, Artificial Sequence
  Description of Artificial Sequence: Synthetic oligonucleotide
uuauaaaauucagccgccu

SEQ ID NO: 1226821 - RNA, 19 nt, Artificial Sequence
  Description of Artificial Sequence: Synthetic oligonucleotide
agcuaaaucugcauagcug

SEQ ID NO: 1226822 - RNA, 19 nt, Artificial Sequence
  Description of Artificial Sequence: Synthetic oligonucleotide
caggggauccacauaggag

SEQ ID NO: 1226823 - RNA, 19 nt, Artificial Sequence
  Description of Artificial Sequence: Synthetic oligonucleotide
uuguauuauucuggaagca

SEQ ID NO: 1226824 - RNA, 19 nt, Artificial Sequence
  Description of Artificial Sequence: Synthetic oligonucleotide
ucauccucgucgauucucu

SEQ ID NO: 1226825 - RNA, 19 nt, Artificial Sequence
  Description of Artificial Sequence: Synthetic oligonucleotide
ccaauaucugugcagagac

SEQ ID NO: 1226826 - RNA, 19 nt, Artificial Sequence
  Description of Artificial Sequence: Synthetic oligonucleotide
auugggugucaauauaaua

SEQ ID NO: 1226827 - RNA, 19 nt, Artificial Sequence
  Description of Artificial Sequence: Synthetic oligonucleotide
cuccucacuaucauacaac

SEQ ID NO: 1226828 - RNA, 19 nt, Artificial Sequence
  Description of Artificial Sequence: Synthetic oligonucleotide
auuuuaugcgcuguucccu

SEQ ID NO: 1226829 - RNA, 19 nt, Artificial Sequence
  Description of Artificial Sequence: Synthetic oligonucleotide
cucguauacauuugcuauc

SEQ ID NO: 1226830 - RNA, 19 nt, Artificial Sequence
  Description of Artificial Sequence: Synthetic oligonucleotide
auuaucuuauaagacgauu

SEQ ID NO: 1226831 - RNA, 19 nt, Artificial Sequence
  Description of Artificial Sequence: Synthetic oligonucleotide
agacgguuuagcuucuuau

SEQ ID NO: 1226832 - RNA, 19 nt, Artificial Sequence
  Description of Artificial Sequence: Synthetic oligonucleotide
uuagggccucuuuauaaaa

SEQ ID NO: 1226833 - RNA, 19 nt, Artificial Sequence
  Description of Artificial Sequence: Synthetic oligonucleotide
aguuggaacaacgacugau

SEQ ID NO: 1226834 - RNA, 19 nt, Artificial Sequence
  Description of Artificial Sequence: Synthetic oligonucleotide
gaaucucuuuguaaguauc

SEQ ID NO: 1226835 - RNA, 19 nt, Artificial Sequence
  Description of Artificial Sequence: Synthetic oligonucleotide
ucugcccgauuuuaugcgc

SEQ ID NO: 1226836 - RNA, 19 nt, Artificial Sequence
  Description of Artificial Sequence: Synthetic oligonucleotide
cuuauaagugaggccaaug

SEQ ID NO: 1226837 - RNA, 19 nt, Artificial Sequence
  Description of Artificial Sequence: Synthetic oligonucleotide
uauuagaguuuguauuauu

SEQ ID NO: 1226838 - RNA, 19 nt, Artificial Sequence
  Description of Artificial Sequence: Synthetic oligonucleotide
gguuguauaagagacgcuc

SEQ ID NO: 1226839 - RNA, 19 nt, Artificial Sequence
  Description of Artificial Sequence: Synthetic oligonucleotide
auuaacucguauacauuug

SEQ ID NO: 1226840 - RNA, 19 nt, Artificial Sequence
  Description of Artificial Sequence: Synthetic oligonucleotide
gcuagcuaccaucagcugc

SEQ ID NO: 1226841 - RNA, 19 nt, Artificial Sequence
  Description of Artificial Sequence: Synthetic oligonucleotide
gaguggguuguauaagaga

SEQ ID NO: 1226842 - RNA, 19 nt, Artificial Sequence
  Description of Artificial Sequence: Synthetic oligonucleotide
agaauugggugucaauaua

SEQ ID NO: 1226843 - RNA, 19 nt, Artificial Sequence
  Description of Artificial Sequence: Synthetic oligonucleotide
auaagacgauuucuuugcu

SEQ ID NO: 1226844 - RNA, 19 nt, Artificial Sequence
  Description of Artificial Sequence: Synthetic oligonucleotide
accucaauauuagaaggga

SEQ ID NO: 1226845 - RNA, 19 nt, Artificial Sequence
  Description of Artificial Sequence: Synthetic oligonucleotide
aucauacaacucuccaagu

SEQ ID NO: 1226846 - RNA, 19 nt, Artificial Sequence
  Description of Artificial Sequence: Synthetic oligonucleotide
uccucgucgauucucuuuu

SEQ ID NO: 1226847 - RNA, 19 nt, Artificial Sequence
  Description of Artificial Sequence: Synthetic oligonucleotide
uucuuauaagugaggccaa

SEQ ID NO: 1226848 - RNA, 19 nt, Artificial Sequence
  Description of Artificial Sequence: Synthetic oligonucleotide
acauggcauguuccaggcc

SEQ ID NO: 1226849 - RNA, 19 nt, Artificial Sequence
  Description of Artificial Sequence: Synthetic oligonucleotide
agagacgcucuuucaaagu

SEQ ID NO: 1226850 - RNA, 19 nt, Artificial Sequence
  Description of Artificial Sequence: Synthetic oligonucleotide
aagugguggauggacggug

SEQ ID NO: 1226851 - RNA, 19 nt, Artificial Sequence
  Description of Artificial Sequence: Synthetic oligonucleotide
aauugggugucaauauaau

SEQ ID NO: 1226852 - RNA, 19 nt, Artificial Sequence
  Description of Artificial Sequence: Synthetic oligonucleotide
agacgcucuuucaaaguac

SEQ ID NO: 1226853 - RNA, 19 nt, Artificial Sequence
  Description of Artificial Sequence: Synthetic oligonucleotide
cuaucauacaacucuccaa

SEQ ID NO: 1226854 - RNA, 19 nt, Artificial Sequence
  Description of Artificial Sequence: Synthetic oligonucleotide
cuggggaacaacauacaca

SEQ ID NO: 1226855 - RNA, 19 nt, Artificial Sequence
  Description of Artificial Sequence: Synthetic oligonucleotide
agacgaaccaagaaacgca

SEQ ID NO: 1226856 - RNA, 19 nt, Artificial Sequence
  Description of Artificial Sequence: Synthetic oligonucleotide
uggccauccaucaccuaca

SEQ ID NO: 1226857 - RNA, 19 nt, Artificial Sequence
  Description of Artificial Sequence: Synthetic oligonucleotide
caagaaacgcaaacauuca

SEQ ID NO: 1226858 - RNA, 19 nt, Artificial Sequence
  Description of Artificial Sequence: Synthetic oligonucleotide
gaguccaacgcuucaucca

SEQ ID NO: 1226859 - RNA, 19 nt, Artificial Sequence
  Description of Artificial Sequence: Synthetic oligonucleotide
aaauaccuguaugacucau

SEQ ID NO: 1226860 - RNA, 19 nt, Artificial Sequence
  Description of Artificial Sequence: Synthetic oligonucleotide
aagguucaucugucccagg

SEQ ID NO: 1226861 - RNA, 19 nt, Artificial Sequence
  Description of Artificial Sequence: Synthetic oligonucleotide
aaguuuugacagagccugg

SEQ ID NO: 1226862 - RNA, 19 nt, Artificial Sequence
  Description of Artificial Sequence: Synthetic oligonucleotide
augacuuauugggccaggg

SEQ ID NO: 1226863 - RNA, 19 nt, Artificial Sequence
  Description of Artificial Sequence: Synthetic oligonucleotide
uuccauuaacucguauaca

SEQ ID NO: 1226864 - RNA, 19 nt, Artificial Sequence
  Description of Artificial Sequence: Synthetic oligonucleotide
uuucuuuguuacugcuacu

SEQ ID NO: 1226865 - RNA, 19 nt, Artificial Sequence
  Description of Artificial Sequence: Synthetic oligonucleotide
gccauuucacuugaguggg

SEQ ID NO: 1226866 - RNA, 19 nt, Artificial Sequence
  Description of Artificial Sequence: Synthetic oligonucleotide
cauuaacucguauacauuu

SEQ ID NO: 1226867 - RNA, 19 nt, Artificial Sequence
  Description of Artificial Sequence: Synthetic oligonucleotide
gcauuaucuuauaagacga

SEQ ID NO: 1226868 - RNA, 19 nt, Artificial Sequence
  Description of Artificial Sequence: Synthetic oligonucleotide
gguuguaucuaucugaguu

SEQ ID NO: 1226869 - RNA, 19 nt, Artificial Sequence
  Description of Artificial Sequence: Synthetic oligonucleotide
cagccacucaauagcuugg

SEQ ID NO: 1226870 - RNA, 19 nt, Artificial Sequence
  Description of Artificial Sequence: Synthetic oligonucleotide
aaagugguggauggacggu

SEQ ID NO: 1226871 - RNA, 19 nt, Artificial Sequence
  Description of Artificial Sequence: Synthetic oligonucleotide
uguaucuaucugaguucac

SEQ ID NO: 1226872 - RNA, 19 nt, Artificial Sequence
  Description of Artificial Sequence: Synthetic oligonucleotide
guggguuguauaagagacg

SEQ ID NO: 1226873 - RNA, 19 nt, Artificial Sequence
  Description of Artificial Sequence: Synthetic oligonucleotide
ucaguacaagaagaaucgu

SEQ ID NO: 1226874 - RNA, 19 nt, Artificial Sequence
  Description of Artificial Sequence: Synthetic oligonucleotide
acuuauugggccagggaga

SEQ ID NO: 1226875 - RNA, 19 nt, Artificial Sequence
  Description of Artificial Sequence: Synthetic oligonucleotide
gacgguuuagcuucuuaua

SEQ ID NO: 1226876 - RNA, 19 nt, Artificial Sequence
  Description of Artificial Sequence: Synthetic oligonucleotide
acgauuucuuugcuuuggu

SEQ ID NO: 1226877 - RNA, 19 nt, Artificial Sequence
  Description of Artificial Sequence: Synthetic oligonucleotide
agggccucuuuauaaaauu

SEQ ID NO: 1226878 - RNA, 19 nt, Artificial Sequence
  Description of Artificial Sequence: Synthetic oligonucleotide
uucuuagggccucuuuaua

SEQ ID NO: 1226879 - RNA, 19 nt, Artificial Sequence
  Description of Artificial Sequence: Synthetic oligonucleotide
uaguuaccacuucuucuaa

SEQ ID NO: 1226880 - RNA, 19 nt, Artificial Sequence
  Description of Artificial Sequence: Synthetic oligonucleotide
cuugagcacuguuccgaag

SEQ ID NO: 1226881 - RNA, 19 nt, Artificial Sequence
  Description of Artificial Sequence: Synthetic oligonucleotide
cugcauagcugcuggcuug

SEQ ID NO: 1226882 - RNA, 19 nt, Artificial Sequence
  Description of Artificial Sequence: Synthetic oligonucleotide
aucugaucccagguuuaac

SEQ ID NO: 1226883 - RNA, 19 nt, Artificial Sequence
  Description of Artificial Sequence: Synthetic oligonucleotide
uacaguugggaaagugcuu

SEQ ID NO: 1226884 - RNA, 19 nt, Artificial Sequence
  Description of Artificial Sequence: Synthetic oligonucleotide
cuuagggccucuuuauaaa

SEQ ID NO: 1226885 - RNA, 19 nt, Artificial Sequence
  Description of Artificial Sequence: Synthetic oligonucleotide
aguuaccacuucuucuaaa

SEQ ID NO: 1226886 - RNA, 19 nt, Artificial Sequence
  Description of Artificial Sequence: Synthetic oligonucleotide
caacauacacacacacaca

SEQ ID NO: 1226887 - RNA, 19 nt, Artificial Sequence
  Description of Artificial Sequence: Synthetic oligonucleotide
auaagcucccagccacuca

SEQ ID NO: 1226888 - RNA, 19 nt, Artificial Sequence
  Description of Artificial Sequence: Synthetic oligonucleotide
caauagcuugguugggauc

SEQ ID NO: 1226889 - RNA, 19 nt, Artificial Sequence
  Description of Artificial Sequence: Synthetic oligonucleotide
acucaauagcuugguuggg

SEQ ID NO: 1226890 - RNA, 19 nt, Artificial Sequence
  Description of Artificial Sequence: Synthetic oligonucleotide
gccucuuuauaaaauucag

SEQ ID NO: 1226891 - RNA, 19 nt, Artificial Sequence
  Description of Artificial Sequence: Synthetic oligonucleotide
gaaagccugggacuugucu

SEQ ID NO: 1226892 - RNA, 19 nt, Artificial Sequence
  Description of Artificial Sequence: Synthetic oligonucleotide
aauaccuguaugacucaua

SEQ ID NO: 1226893 - RNA, 19 nt, Artificial Sequence
  Description of Artificial Sequence: Synthetic oligonucleotide
cacagagcauauuagaguu

SEQ ID NO: 1226894 - RNA, 19 nt, Artificial Sequence
  Description of Artificial Sequence: Synthetic oligonucleotide
ugucucugcccgauuuuau

SEQ ID NO: 1226895 - RNA, 19 nt, Artificial Sequence
  Description of Artificial Sequence: Synthetic oligonucleotide
ugguugggaucuuccauua

SEQ ID NO: 1226896 - RNA, 19 nt, Artificial Sequence
  Description of Artificial Sequence: Synthetic oligonucleotide
cgauuuuaugcgcuguucc

SEQ ID NO: 1226897 - RNA, 19 nt, Artificial Sequence
  Description of Artificial Sequence: Synthetic oligonucleotide
gguaguuaccacuucuucu

SEQ ID NO: 1226898 - RNA, 19 nt, Artificial Sequence
  Description of Artificial Sequence: Synthetic oligonucleotide
gacgaaccaagaaacgcaa

SEQ ID NO: 1226899 - RNA, 19 nt, Artificial Sequence
  Description of Artificial Sequence: Synthetic oligonucleotide
ucuuauaagugaggccaau

SEQ ID NO: 1226900 - RNA, 19 nt, Artificial Sequence
  Description of Artificial Sequence: Synthetic oligonucleotide
cuccaaguuuugacagagc

SEQ ID NO: 1226901 - RNA, 19 nt, Artificial Sequence
  Description of Artificial Sequence: Synthetic oligonucleotide
uggaaagccugggacuugu

SEQ ID NO: 1226902 - RNA, 19 nt, Artificial Sequence
  Description of Artificial Sequence: Synthetic oligonucleotide
ucccuuuauuagugagagc

SEQ ID NO: 1226903 - RNA, 19 nt, Artificial Sequence
  Description of Artificial Sequence: Synthetic oligonucleotide
aacgcuucauccagacggu

SEQ ID NO: 1226904 - RNA, 19 nt, Artificial Sequence
  Description of Artificial Sequence: Synthetic oligonucleotide
cuuauaagacgauuucuuu

SEQ ID NO: 1226905 - RNA, 19 nt, Artificial Sequence
  Description of Artificial Sequence: Synthetic oligonucleotide
uaccuguaugacucauagu

SEQ ID NO: 1226906 - RNA, 19 nt, Artificial Sequence
  Description of Artificial Sequence: Synthetic oligonucleotide
cagggagaguacaguuggg

SEQ ID NO: 1226907 - RNA, 19 nt, Artificial Sequence
  Description of Artificial Sequence: Synthetic oligonucleotide
uuaugcgcuguucccucau

SEQ ID NO: 1226908 - RNA, 19 nt, Artificial Sequence
  Description of Artificial Sequence: Synthetic oligonucleotide
auuacaguuuggacaucug

SEQ ID NO: 1226909 - RNA, 19 nt, Artificial Sequence
  Description of Artificial Sequence: Synthetic oligonucleotide
gcauauuagaguuuguauu

SEQ ID NO: 1226910 - RNA, 19 nt, Artificial Sequence
  Description of Artificial Sequence: Synthetic oligonucleotide
ugcccgauuuuaugcgcug

SEQ ID NO: 1226911 - RNA, 19 nt, Artificial Sequence
  Description of Artificial Sequence: Synthetic oligonucleotide
guacaguugggaaagugcu

SEQ ID NO: 1226912 - RNA, 19 nt, Artificial Sequence
  Description of Artificial Sequence: Synthetic oligonucleotide
uugcucuggccacuaucac

SEQ ID NO: 1226913 - RNA, 19 nt, Artificial Sequence
  Description of Artificial Sequence: Synthetic oligonucleotide
guaaguaucuaaugccuuu

SEQ ID NO: 1226914 - RNA, 19 nt, Artificial Sequence
  Description of Artificial Sequence: Synthetic oligonucleotide
cuguaugacucauaguaau

SEQ ID NO: 1226915 - RNA, 19 nt, Artificial Sequence
  Description of Artificial Sequence: Synthetic oligonucleotide
uugucuccucacuaucaua

SEQ ID NO: 1226916 - RNA, 19 nt, Artificial Sequence
  Description of Artificial Sequence: Synthetic oligonucleotide
agcuagcuaccaucagcug

SEQ ID NO: 1226917 - RNA, 19 nt, Artificial Sequence
  Description of Artificial Sequence: Synthetic oligonucleotide
cuuucuauuugagggccca

SEQ ID NO: 1226918 - RNA, 19 nt, Artificial Sequence
  Description of Artificial Sequence: Synthetic oligonucleotide
aguuagcuucauugguuuu

SEQ ID NO: 1226919 - RNA, 19 nt, Artificial Sequence
  Description of Artificial Sequence: Synthetic oligonucleotide
cucucgcuugcugcgagag

SEQ ID NO: 1226920 - RNA, 19 nt, Artificial Sequence
  Description of Artificial Sequence: Synthetic oligonucleotide
agcacuguuccgaaggauu

SEQ ID NO: 1226921 - RNA, 19 nt, Artificial Sequence
  Description of Artificial Sequence: Synthetic oligonucleotide
cagcuagcuaccaucagcu

SEQ ID NO: 1226922 - RNA, 19 nt, Artificial Sequence
  Description of Artificial Sequence: Synthetic oligonucleotide
aucucuuuguaaguaucua

SEQ ID NO: 1226923 - RNA, 19 nt, Artificial Sequence
  Description of Artificial Sequence: Synthetic oligonucleotide
cacuguuccgaaggauugc

SEQ ID NO: 1226924 - RNA, 19 nt, Artificial Sequence
  Description of Artificial Sequence: Synthetic oligonucleotide
acauacacacacacacaga

SEQ ID NO: 1226925 - RNA, 19 nt, Artificial Sequence
  Description of Artificial Sequence: Synthetic oligonucleotide
caaugaccucaauauuaga

SEQ ID NO: 1226926 - RNA, 19 nt, Artificial Sequence
  Description of Artificial Sequence: Synthetic oligonucleotide
caauaaacccagccucaga

SEQ ID NO: 1226927 - RNA, 19 nt, Artificial Sequence
  Description of Artificial Sequence: Synthetic oligonucleotide
cuucuaaaacagcuagcua

SEQ ID NO: 1226928 - RNA, 19 nt, Artificial Sequence
  Description of Artificial Sequence: Synthetic oligonucleotide
auuugcuaucuggcaaaga

SEQ ID NO: 1226929 - RNA, 19 nt, Artificial Sequence
  Description of Artificial Sequence: Synthetic oligonucleotide
aacgacugaucaacugcau

SEQ ID NO: 1226930 - RNA, 19 nt, Artificial Sequence
  Description of Artificial Sequence: Synthetic oligonucleotide
cuaaaacagcuagcuacca

SEQ ID NO: 1226931 - RNA, 19 nt, Artificial Sequence
  Description of Artificial Sequence: Synthetic oligonucleotide
gcaauaaacccagccucag

SEQ ID NO: 1226932 - RNA, 19 nt, Artificial Sequence
  Description of Artificial Sequence: Synthetic oligonucleotide
aucuuccauuaacucguau

SEQ ID NO: 1226933 - RNA, 19 nt, Artificial Sequence
  Description of Artificial Sequence: Synthetic oligonucleotide
uccagacgguuuagcuucu

SEQ ID NO: 1226934 - RNA, 19 nt, Artificial Sequence
  Description of Artificial Sequence: Synthetic oligonucleotide
ccugggaaucaguuggaac

SEQ ID NO: 1226935 - RNA, 19 nt, Artificial Sequence
  Description of Artificial Sequence: Synthetic oligonucleotide
ugguggauggacggugccu

SEQ ID NO: 1226936 - RNA, 19 nt, Artificial Sequence
  Description of Artificial Sequence: Synthetic oligonucleotide
cuaucugaguucacagcua

SEQ ID NO: 1226937 - RNA, 19 nt, Artificial Sequence
  Description of Artificial Sequence: Synthetic oligonucleotide
gaaucguuucuuagggccu

SEQ ID NO: 1226938 - RNA, 19 nt, Artificial Sequence
  Description of Artificial Sequence: Synthetic oligonucleotide
auggacggugccuggggaa

SEQ ID NO: 1226939 - RNA, 19 nt, Artificial Sequence
  Description of Artificial Sequence: Synthetic oligonucleotide
agucgucuccuaacucuuc

SEQ ID NO: 1226940 - RNA, 19 nt, Artificial Sequence
  Description of Artificial Sequence: Synthetic oligonucleotide
uggacggugccuggggaac

SEQ ID NO: 1226941 - RNA, 19 nt, Artificial Sequence
  Description of Artificial Sequence: Synthetic oligonucleotide
gucguucacuuuuacuacu

SEQ ID NO: 1226942 - RNA, 19 nt, Artificial Sequence
  Description of Artificial Sequence: Synthetic oligonucleotide
gggagaguacaguugggaa

SEQ ID NO: 1226943 - RNA, 19 nt, Artificial Sequence
  Description of Artificial Sequence: Synthetic oligonucleotide
gaggccaauguuauacagu

SEQ ID NO: 1226944 - RNA, 19 nt, Artificial Sequence
  Description of Artificial Sequence: Synthetic oligonucleotide
caguacaagaagaaucguu

SEQ ID NO: 1226945 - RNA, 19 nt, Artificial Sequence
  Description of Artificial Sequence: Synthetic oligonucleotide
cuaaaucugcauagcugcu

SEQ ID NO: 1226946 - RNA, 19 nt, Artificial Sequence
  Description of Artificial Sequence: Synthetic oligonucleotide
caucagccacucaauagcu

SEQ ID NO: 1226947 - RNA, 19 nt, Artificial Sequence
  Description of Artificial Sequence: Synthetic oligonucleotide
uaugcgcuguucccucauu

SEQ ID NO: 1226948 - RNA, 19 nt, Artificial Sequence
  Description of Artificial Sequence: Synthetic oligonucleotide
cugggacuugucuccucac

SEQ ID NO: 1226949 - RNA, 19 nt, Artificial Sequence
  Description of Artificial Sequence: Synthetic oligonucleotide
cacacacacacagagcaua

SEQ ID NO: 1226950 - RNA, 19 nt, Artificial Sequence
  Description of Artificial Sequence: Synthetic oligonucleotide
auggcauguuccaggccag

SEQ ID NO: 1226951 - RNA, 19 nt, Artificial Sequence
  Description of Artificial Sequence: Synthetic oligonucleotide
gcacuauugcucuggccac

SEQ ID NO: 1226952 - RNA, 19 nt, Artificial Sequence
  Description of Artificial Sequence: Synthetic oligonucleotide
cauuaucuuauaagacgau

SEQ ID NO: 1226953 - RNA, 19 nt, Artificial Sequence
  Description of Artificial Sequence: Synthetic oligonucleotide
agccacucaauagcuuggu

SEQ ID NO: 1226954 - RNA, 19 nt, Artificial Sequence
  Description of Artificial Sequence: Synthetic oligonucleotide
cguucacuuuuacuacugg

SEQ ID NO: 1226955 - RNA, 19 nt, Artificial Sequence
  Description of Artificial Sequence: Synthetic oligonucleotide
cagccgccuucucauaauc

SEQ ID NO: 1226956 - RNA, 19 nt, Artificial Sequence
  Description of Artificial Sequence: Synthetic oligonucleotide
gggccucuuuauaaaauuc

SEQ ID NO: 1226957 - RNA, 19 nt, Artificial Sequence
  Description of Artificial Sequence: Synthetic oligonucleotide
gagccccuuuaaagaaagc

SEQ ID NO: 1226958 - RNA, 19 nt, Artificial Sequence
  Description of Artificial Sequence: Synthetic oligonucleotide
cuggaaauuuccugugaau

SEQ ID NO: 1226959 - RNA, 19 nt, Artificial Sequence
  Description of Artificial Sequence: Synthetic oligonucleotide
gcaagucgucuccuaacuc

SEQ ID NO: 1226960 - RNA, 19 nt, Artificial Sequence
  Description of Artificial Sequence: Synthetic oligonucleotide
ccucacuaucauacaacuc

SEQ ID NO: 1226961 - RNA, 19 nt, Artificial Sequence
  Description of Artificial Sequence: Synthetic oligonucleotide
ccuguaugacucauaguaa

SEQ ID NO: 1226962 - RNA, 19 nt, Artificial Sequence
  Description of Artificial Sequence: Synthetic oligonucleotide
gggacuugucuccucacua

SEQ ID NO: 1226963 - RNA, 19 nt, Artificial Sequence
  Description of Artificial Sequence: Synthetic oligonucleotide
ccaucaccuacauggcaug

SEQ ID NO: 1226964 - RNA, 19 nt, Artificial Sequence
  Description of Artificial Sequence: Synthetic oligonucleotide
agaguacaguugggaaagu

SEQ ID NO: 1226965 - RNA, 19 nt, Artificial Sequence
  Description of Artificial Sequence: Synthetic oligonucleotide
gaacaacgacugaucaacu

SEQ ID NO: 1226966 - RNA, 19 nt, Artificial Sequence
  Description of Artificial Sequence: Synthetic oligonucleotide
gcuuugguaaaugacuuau

SEQ ID NO: 1226967 - RNA, 19 nt, Artificial Sequence
  Description of Artificial Sequence: Synthetic oligonucleotide
uuauugggccagggagagu

SEQ ID NO: 1226968 - RNA, 19 nt, Artificial Sequence
  Description of Artificial Sequence: Synthetic oligonucleotide
gaaggauugcaugcaguuu

SEQ ID NO: 1226969 - RNA, 19 nt, Artificial Sequence
  Description of Artificial Sequence: Synthetic oligonucleotide
acagagcauauuagaguuu

SEQ ID NO: 1226970 - RNA, 19 nt, Artificial Sequence
  Description of Artificial Sequence: Synthetic oligonucleotide
agccgccuucucauaauca

SEQ ID NO: 1226971 - RNA, 19 nt, Artificial Sequence
  Description of Artificial Sequence: Synthetic oligonucleotide
ugagagcugauggguugua

SEQ ID NO: 1226972 - RNA, 19 nt, Artificial Sequence
  Description of Artificial Sequence: Synthetic oligonucleotide
cuuugguaaaugacuuauu

SEQ ID NO: 1226973 - RNA, 19 nt, Artificial Sequence
  Description of Artificial Sequence: Synthetic oligonucleotide
aucguuucuuagggccucu

SEQ ID NO: 1226974 - RNA, 19 nt, Artificial Sequence
  Description of Artificial Sequence: Synthetic oligonucleotide
acacacacacacagagcau

SEQ ID NO: 1226975 - RNA, 19 nt, Artificial Sequence
  Description of Artificial Sequence: Synthetic oligonucleotide
gagauuggugcagcugcua

SEQ ID NO: 1226976 - RNA, 19 nt, Artificial Sequence
  Description of Artificial Sequence: Synthetic oligonucleotide
acggugccuggggaacaac

SEQ ID NO: 1226977 - RNA, 19 nt, Artificial Sequence
  Description of Artificial Sequence: Synthetic oligonucleotide
aucccagguuuaacaugag

SEQ ID NO: 1226978 - RNA, 19 nt, Artificial Sequence
  Description of Artificial Sequence: Synthetic oligonucleotide
ggcauguuccaggccagac

SEQ ID NO: 1226979 - RNA, 19 nt, Artificial Sequence
  Description of Artificial Sequence: Synthetic oligonucleotide
gcuaccaucagcugccauu

SEQ ID NO: 1226980 - RNA, 19 nt, Artificial Sequence
  Description of Artificial Sequence: Synthetic oligonucleotide
acgaaccaagaaacgcaaa

SEQ ID NO: 1226981 - RNA, 19 nt, Artificial Sequence
  Description of Artificial Sequence: Synthetic oligonucleotide
caucugaucccagguuuaa

SEQ ID NO: 1226982 - RNA, 19 nt, Artificial Sequence
  Description of Artificial Sequence: Synthetic oligonucleotide
ccaggggauccacauagga

SEQ ID NO: 1226983 - RNA, 19 nt, Artificial Sequence
  Description of Artificial Sequence: Synthetic oligonucleotide
cagacgguuuagcuucuua

SEQ ID NO: 1226984 - RNA, 19 nt, Artificial Sequence
  Description of Artificial Sequence: Synthetic oligonucleotide
ccgauuuuaugcgcuguuc

SEQ ID NO: 1226985 - RNA, 19 nt, Artificial Sequence
  Description of Artificial Sequence: Synthetic oligonucleotide
cagcugccauuucacuuga

SEQ ID NO: 1226986 - RNA, 19 nt, Artificial Sequence
  Description of Artificial Sequence: Synthetic oligonucleotide
gcugauggguuguaucuau

SEQ ID NO: 1226987 - RNA, 19 nt, Artificial Sequence
  Description of Artificial Sequence: Synthetic oligonucleotide
caguuggaacaacgacuga

SEQ ID NO: 1226988 - RNA, 19 nt, Artificial Sequence
  Description of Artificial Sequence: Synthetic oligonucleotide
cugcccgauuuuaugcgcu

SEQ ID NO: 1226989 - RNA, 19 nt, Artificial Sequence
  Description of Artificial Sequence: Synthetic oligonucleotide
gccagcgcuccccucucgc

SEQ ID NO: 1226990 - RNA, 19 nt, Artificial Sequence
  Description of Artificial Sequence: Synthetic oligonucleotide
ucguuucuuagggccucuu

SEQ ID NO: 1226991 - RNA, 19 nt, Artificial Sequence
  Description of Artificial Sequence: Synthetic oligonucleotide
cugcuacuuucauaagguu

SEQ ID NO: 1226992 - RNA, 19 nt, Artificial Sequence
  Description of Artificial Sequence: Synthetic oligonucleotide
ccguguucccuuuauuagu

SEQ ID NO: 1226993 - RNA, 19 nt, Artificial Sequence
  Description of Artificial Sequence: Synthetic oligonucleotide
cuggaggaccugaguucaa

SEQ ID NO: 1226994 - RNA, 19 nt, Artificial Sequence
  Description of Artificial Sequence: Synthetic oligonucleotide
acgcuucauccagacgguu

SEQ ID NO: 1226995 - RNA, 19 nt, Artificial Sequence
  Description of Artificial Sequence: Synthetic oligonucleotide
cacugccagcgcuccccuc

SEQ ID NO: 1226996 - RNA, 19 nt, Artificial Sequence
  Description of Artificial Sequence: Synthetic oligonucleotide
cacuauugcucuggccacu

SEQ ID NO: 1226997 - RNA, 19 nt, Artificial Sequence
  Description of Artificial Sequence: Synthetic oligonucleotide
ccgaaggauugcaugcagu

SEQ ID NO: 1226998 - RNA, 19 nt, Artificial Sequence
  Description of Artificial Sequence: Synthetic oligonucleotide
ggacggugccuggggaaca

SEQ ID NO: 1226999 - RNA, 19 nt, Artificial Sequence
  Description of Artificial Sequence: Synthetic oligonucleotide
ggguuguauaagagacgcu

SEQ ID NO: 1227000 - RNA, 19 nt, Artificial Sequence
  Description of Artificial Sequence: Synthetic oligonucleotide
cauccucgucgauucucuu

SEQ ID NO: 1227001 - RNA, 19 nt, Artificial Sequence
  Description of Artificial Sequence: Synthetic oligonucleotide
gccacucaauagcuugguu

SEQ ID NO: 1227002 - RNA, 19 nt, Artificial Sequence
  Description of Artificial Sequence: Synthetic oligonucleotide
gcgcuccccucucgcuugc

SEQ ID NO: 1227003 - RNA, 19 nt, Artificial Sequence
  Description of Artificial Sequence: Synthetic oligonucleotide
ccucucgcuugcugcgaga

SEQ ID NO: 1227004 - RNA, 19 nt, Artificial Sequence
  Description of Artificial Sequence: Synthetic oligonucleotide
gcccgauuuuaugcgcugu

SEQ ID NO: 1227005 - RNA, 19 nt, Artificial Sequence
  Description of Artificial Sequence: Synthetic oligonucleotide
cccgauuuuaugcgcuguu

SEQ ID NO: 1227006 - RNA, 19 nt, Artificial Sequence
  Description of Artificial Sequence: Synthetic oligonucleotide
gccacucaaugaccucaau

SEQ ID NO: 1227007 - RNA, 19 nt, Artificial Sequence
  Description of Artificial Sequence: Synthetic oligonucleotide
gcugcuggcuugggcaaau

SEQ ID NO: 1227008 - RNA, 19 nt, Artificial Sequence
  Description of Artificial Sequence: Synthetic oligonucleotide
ccagcgcuccccucucgcu

SEQ ID NO: 1227009 - RNA, 19 nt, Artificial Sequence
  Description of Artificial Sequence: Synthetic oligonucleotide
cugcuggcuugggcaaauu

SEQ ID NO: 1227010 - RNA, 19 nt, Artificial Sequence
  Description of Artificial Sequence: Synthetic oligonucleotide
ccagacgguuuagcuucuu

SEQ ID NO: 1227011 - RNA, 19 nt, Artificial Sequence
  Description of Artificial Sequence: Synthetic oligonucleotide
uauaagauccccgagagca

SEQ ID NO: 1227012 - RNA, 19 nt, Artificial Sequence
  Description of Artificial Sequence: Synthetic oligonucleotide
uguccaacauuccaaaugc

SEQ ID NO: 1227013 - RNA, 19 nt, Artificial Sequence
  Description of Artificial Sequence: Synthetic oligonucleotide
uggaguggcauacuuaggg

SEQ ID NO: 1227014 - RNA, 19 nt, Artificial Sequence
  Description of Artificial Sequence: Synthetic oligonucleotide
aaagcuuuggguggugggc

SEQ ID NO: 1227015 - RNA, 19 nt, Artificial Sequence
  Description of Artificial Sequence: Synthetic oligonucleotide
uguagugccuggaaaaucu

SEQ ID NO: 1227016 - RNA, 19 nt, Artificial Sequence
  Description of Artificial Sequence: Synthetic oligonucleotide
guuuccagguauaagaucc

SEQ ID NO: 1227017 - RNA, 19 nt, Artificial Sequence
  Description of Artificial Sequence: Synthetic oligonucleotide
aguagguaguaaugagugc

SEQ ID NO: 1227018 - RNA, 19 nt, Artificial Sequence
  Description of Artificial Sequence: Synthetic oligonucleotide
ugugguaauggugagcugc

SEQ ID NO: 1227019 - RNA, 19 nt, Artificial Sequence
  Description of Artificial Sequence: Synthetic oligonucleotide
gagauagcuccacacgugg

SEQ ID NO: 1227020 - RNA, 19 nt, Artificial Sequence
  Description of Artificial Sequence: Synthetic oligonucleotide
acuagcccagcuuugaucu

SEQ ID NO: 1227021 - RNA, 19 nt, Artificial Sequence
  Description of Artificial Sequence: Synthetic oligonucleotide
ugaccuuccugccaucgcg

SEQ ID NO: 1227022 - RNA, 19 nt, Artificial Sequence
  Description of Artificial Sequence: Synthetic oligonucleotide
acuuuguggcacuccaccc

SEQ ID NO: 1227023 - RNA, 19 nt, Artificial Sequence
  Description of Artificial Sequence: Synthetic oligonucleotide
agagcagccaaacacacaa

SEQ ID NO: 1227024 - RNA, 19 nt, Artificial Sequence
  Description of Artificial Sequence: Synthetic oligonucleotide
cagccugaggcauaggucg

SEQ ID NO: 1227025 - RNA, 19 nt, Artificial Sequence
  Description of Artificial Sequence: Synthetic oligonucleotide
uccagguauaagauccccg

SEQ ID NO: 1227026 - RNA, 19 nt, Artificial Sequence
  Description of Artificial Sequence: Synthetic oligonucleotide
cuugccgucacaaggcucc

SEQ ID NO: 1227027 - RNA, 19 nt, Artificial Sequence
  Description of Artificial Sequence: Synthetic oligonucleotide
aguccccuagggcaaagcc

SEQ ID NO: 1227028 - RNA, 19 nt, Artificial Sequence
  Description of Artificial Sequence: Synthetic oligonucleotide
gguauaagauccccgagag

SEQ ID NO: 1227029 - RNA, 19 nt, Artificial Sequence
  Description of Artificial Sequence: Synthetic oligonucleotide
guagcugccgcauacacuc

SEQ ID NO: 1227030 - RNA, 19 nt, Artificial Sequence
  Description of Artificial Sequence: Synthetic oligonucleotide
cacauucuguccaacauuc

SEQ ID NO: 1227031 - RNA, 19 nt, Artificial Sequence
  Description of Artificial Sequence: Synthetic oligonucleotide
ugagggcugaaccaaggug

SEQ ID NO: 1227032 - RNA, 19 nt, Artificial Sequence
  Description of Artificial Sequence: Synthetic oligonucleotide
auagguuguccuccagggc

SEQ ID NO: 1227033 - RNA, 19 nt, Artificial Sequence
  Description of Artificial Sequence: Synthetic oligonucleotide
aaaagggcccagcccagag

SEQ ID NO: 1227034 - RNA, 19 nt, Artificial Sequence
  Description of Artificial Sequence: Synthetic oligonucleotide
uucugcguggccaacacau

SEQ ID NO: 1227035 - RNA, 19 nt, Artificial Sequence
  Description of Artificial Sequence: Synthetic oligonucleotide
gaaccuugaggggacaggg

SEQ ID NO: 1227036 - RNA, 19 nt, Artificial Sequence
  Description of Artificial Sequence: Synthetic oligonucleotide
uccccuagggcaaagccug

SEQ ID NO: 1227037 - RNA, 19 nt, Artificial Sequence
  Description of Artificial Sequence: Synthetic oligonucleotide
acaacugucagcguuugug

SEQ ID NO: 1227038 - RNA, 19 nt, Artificial Sequence
  Description of Artificial Sequence: Synthetic oligonucleotide
uuuguggcacuccacccgc

SEQ ID NO: 1227039 - RNA, 19 nt, Artificial Sequence
  Description of Artificial Sequence: Synthetic oligonucleotide
agguauaagauccccgaga

SEQ ID NO: 1227040 - RNA, 19 nt, Artificial Sequence
  Description of Artificial Sequence: Synthetic oligonucleotide
agucgaacaucuccagcac

SEQ ID NO: 1227041 - RNA, 19 nt, Artificial Sequence
  Description of Artificial Sequence: Synthetic oligonucleotide
caaccugucccacaggcag

SEQ ID NO: 1227042 - RNA, 19 nt, Artificial Sequence
  Description of Artificial Sequence: Synthetic oligonucleotide
ugcaacaacugucagcguu

SEQ ID NO: 1227043 - RNA, 19 nt, Artificial Sequence
  Description of Artificial Sequence: Synthetic oligonucleotide
uagguaguaaugagugcug

SEQ ID NO: 1227044 - RNA, 19 nt, Artificial Sequence
  Description of Artificial Sequence: Synthetic oligonucleotide
agcagccaaacacacaagu

SEQ ID NO: 1227045 - RNA, 19 nt, Artificial Sequence
  Description of Artificial Sequence: Synthetic oligonucleotide
agguaguaaugagugcugc

SEQ ID NO: 1227046 - RNA, 19 nt, Artificial Sequence
  Description of Artificial Sequence: Synthetic oligonucleotide
guuauugguggagaaguug

SEQ ID NO: 1227047 - RNA, 19 nt, Artificial Sequence
  Description of Artificial Sequence: Synthetic oligonucleotide
agugagugaggugagcaag

SEQ ID NO: 1227048 - RNA, 19 nt, Artificial Sequence
  Description of Artificial Sequence: Synthetic oligonucleotide
uuuccagguauaagauccc

SEQ ID NO: 1227049 - RNA, 19 nt, Artificial Sequence
  Description of Artificial Sequence: Synthetic oligonucleotide
caaagcuuugggugguggg

SEQ ID NO: 1227050 - RNA, 19 nt, Artificial Sequence
  Description of Artificial Sequence: Synthetic oligonucleotide
uggacgugugggccgaggg

SEQ ID NO: 1227051 - RNA, 19 nt, Artificial Sequence
  Description of Artificial Sequence: Synthetic oligonucleotide
ucccagucgaacaucucca

SEQ ID NO: 1227052 - RNA, 19 nt, Artificial Sequence
  Description of Artificial Sequence: Synthetic oligonucleotide
auacuuagggucugaggca

SEQ ID NO: 1227053 - RNA, 19 nt, Artificial Sequence
  Description of Artificial Sequence: Synthetic oligonucleotide
uuuagggcagacccuugcu

SEQ ID NO: 1227054 - RNA, 19 nt, Artificial Sequence
  Description of Artificial Sequence: Synthetic oligonucleotide
uagcgcuccagguaagcag

SEQ ID NO: 1227055 - RNA, 19 nt, Artificial Sequence
  Description of Artificial Sequence: Synthetic oligonucleotide
augagugcugcugaccuuc

SEQ ID NO: 1227056 - RNA, 19 nt, Artificial Sequence
  Description of Artificial Sequence: Synthetic oligonucleotide
auaggucgaacaguggcag

SEQ ID NO: 1227057 - RNA, 19 nt, Artificial Sequence
  Description of Artificial Sequence: Synthetic oligonucleotide
uucuugcccaagucaagcc

SEQ ID NO: 1227058 - RNA, 19 nt, Artificial Sequence
  Description of Artificial Sequence: Synthetic oligonucleotide
gaguggcauacuuaggguc

SEQ ID NO: 1227059 - RNA, 19 nt, Artificial Sequence
  Description of Artificial Sequence: Synthetic oligonucleotide
gucccagucgaacaucucc

SEQ ID NO: 1227060 - RNA, 19 nt, Artificial Sequence
  Description of Artificial Sequence: Synthetic oligonucleotide
ggguggaaggaauagguug

SEQ ID NO: 1227061 - RNA, 19 nt, Artificial Sequence
  Description of Artificial Sequence: Synthetic oligonucleotide
cuuccugccaucgcggacg

SEQ ID NO: 1227062 - RNA, 19 nt, Artificial Sequence
  Description of Artificial Sequence: Synthetic oligonucleotide
ugucaucaccuccuggggu

SEQ ID NO: 1227063 - RNA, 19 nt, Artificial Sequence
  Description of Artificial Sequence: Synthetic oligonucleotide
uguagcugccgcauacacu

SEQ ID NO: 1227064 - RNA, 19 nt, Artificial Sequence
  Description of Artificial Sequence: Synthetic oligonucleotide
uguggcacuccacccgcgg

SEQ ID NO: 1227065 - RNA, 19 nt, Artificial Sequence
  Description of Artificial Sequence: Synthetic oligonucleotide
cuugcccaagucaagccug

SEQ ID NO: 1227066 - RNA, 19 nt, Artificial Sequence
  Description of Artificial Sequence: Synthetic oligonucleotide
auacacuccugcuguagug

SEQ ID NO: 1227067 - RNA, 19 nt, Artificial Sequence
  Description of Artificial Sequence: Synthetic oligonucleotide
uagggcagacccuugcucu

SEQ ID NO: 1227068 - RNA, 19 nt, Artificial Sequence
  Description of Artificial Sequence: Synthetic oligonucleotide
auagcuccacacguggacg

SEQ ID NO: 1227069 - RNA, 19 nt, Artificial Sequence
  Description of Artificial Sequence: Synthetic oligonucleotide
cuuuagggcagacccuugc

SEQ ID NO: 1227070 - RNA, 19 nt, Artificial Sequence
  Description of Artificial Sequence: Synthetic oligonucleotide
gcauaggucgaacaguggc

SEQ ID NO: 1227071 - RNA, 19 nt, Artificial Sequence
  Description of Artificial Sequence: Synthetic oligonucleotide
cagucgaacaucuccagca

SEQ ID NO: 1227072 - RNA, 19 nt, Artificial Sequence
  Description of Artificial Sequence: Synthetic oligonucleotide
uugcccaagucaagccugg

SEQ ID NO: 1227073 - RNA, 19 nt, Artificial Sequence
  Description of Artificial Sequence: Synthetic oligonucleotide
cugucagcguuuguggugg

SEQ ID NO: 1227074 - RNA, 19 nt, Artificial Sequence
  Description of Artificial Sequence: Synthetic oligonucleotide
uggcuugccgccacccugg

SEQ ID NO: 1227075 - RNA, 19 nt, Artificial Sequence
  Description of Artificial Sequence: Synthetic oligonucleotide
cugcguggccaacacaucc

SEQ ID NO: 1227076 - RNA, 19 nt, Artificial Sequence
  Description of Artificial Sequence: Synthetic oligonucleotide
cuccagguaagcagggcgc

SEQ ID NO: 1227077 - RNA, 19 nt, Artificial Sequence
  Description of Artificial Sequence: Synthetic oligonucleotide
ucagcguuuguggugggca

SEQ ID NO: 1227078 - RNA, 19 nt, Artificial Sequence
  Description of Artificial Sequence: Synthetic oligonucleotide
aacagcgccggguggguga

SEQ ID NO: 1227079 - RNA, 19 nt, Artificial Sequence
  Description of Artificial Sequence: Synthetic oligonucleotide
ugugcagaacagcgccggg

SEQ ID NO: 1227080 - RNA, 19 nt, Artificial Sequence
  Description of Artificial Sequence: Synthetic oligonucleotide
guaagcagggcgcuccggc

SEQ ID NO: 1227081 - RNA, 19 nt, Artificial Sequence
  Description of Artificial Sequence: Synthetic oligonucleotide
uagagagccggugugguaa

SEQ ID NO: 1227082 - RNA, 19 nt, Artificial Sequence
  Description of Artificial Sequence: Synthetic oligonucleotide
uguuauugguggagaaguu

SEQ ID NO: 1227083 - RNA, 19 nt, Artificial Sequence
  Description of Artificial Sequence: Synthetic oligonucleotide
cauaggucgaacaguggca

SEQ ID NO: 1227084 - RNA, 19 nt, Artificial Sequence
  Description of Artificial Sequence: Synthetic oligonucleotide
ggcaguagguaguaaugag

SEQ ID NO: 1227085 - RNA, 19 nt, Artificial Sequence
  Description of Artificial Sequence: Synthetic oligonucleotide
agagccggugugguaaugg

SEQ ID NO: 1227086 - RNA, 19 nt, Artificial Sequence
  Description of Artificial Sequence: Synthetic oligonucleotide
cugccaucgcggacgaugg

SEQ ID NO: 1227087 - RNA, 19 nt, Artificial Sequence
  Description of Artificial Sequence: Synthetic oligonucleotide
gaagcgcugauagcgcucc

SEQ ID NO: 1227088 - RNA, 19 nt, Artificial Sequence
  Description of Artificial Sequence: Synthetic oligonucleotide
uccggcaguagguaguaau

SEQ ID NO: 1227089 - RNA, 19 nt, Artificial Sequence
  Description of Artificial Sequence: Synthetic oligonucleotide
guagguaguaaugagugcu

SEQ ID NO: 1227090 - RNA, 19 nt, Artificial Sequence
  Description of Artificial Sequence: Synthetic oligonucleotide
accggcuugccucuuccuc

SEQ ID NO: 1227091 - RNA, 19 nt, Artificial Sequence
  Description of Artificial Sequence: Synthetic oligonucleotide
guauaagauccccgagagc

SEQ ID NO: 1227092 - RNA, 19 nt, Artificial Sequence
  Description of Artificial Sequence: Synthetic oligonucleotide
uggaucacuuguggagugg

SEQ ID NO: 1227093 - RNA, 19 nt, Artificial Sequence
  Description of Artificial Sequence: Synthetic oligonucleotide
aguggcauacuuagggucu

SEQ ID NO: 1227094 - RNA, 19 nt, Artificial Sequence
  Description of Artificial Sequence: Synthetic oligonucleotide
gucgaacaguggcaguggg

SEQ ID NO: 1227095 - RNA, 19 nt, Artificial Sequence
  Description of Artificial Sequence: Synthetic oligonucleotide
gugagugaggugagcaagg

SEQ ID NO: 1227096 - RNA, 19 nt, Artificial Sequence
  Description of Artificial Sequence: Synthetic oligonucleotide
aggauacaggggccagccc

SEQ ID NO: 1227097 - RNA, 19 nt, Artificial Sequence
  Description of Artificial Sequence: Synthetic oligonucleotide
guggcagccgagcaguggc

SEQ ID NO: 1227098 - RNA, 19 nt, Artificial Sequence
  Description of Artificial Sequence: Synthetic oligonucleotide
ugauagcgcuccagguaag

SEQ ID NO: 1227099 - RNA, 19 nt, Artificial Sequence
  Description of Artificial Sequence: Synthetic oligonucleotide
ugcuggccuacccuucugc

SEQ ID NO: 1227100 - RNA, 19 nt, Artificial Sequence
  Description of Artificial Sequence: Synthetic oligonucleotide
cagguauaagauccccgag

SEQ ID NO: 1227101 - RNA, 19 nt, Artificial Sequence
  Description of Artificial Sequence: Synthetic oligonucleotide
gagcuagagagccggugug

SEQ ID NO: 1227102 - RNA, 19 nt, Artificial Sequence
  Description of Artificial Sequence: Synthetic oligonucleotide
uacuuagggucugaggcaa

SEQ ID NO: 1227103 - RNA, 19 nt, Artificial Sequence
  Description of Artificial Sequence: Synthetic oligonucleotide
gcauacuuagggucugagg

SEQ ID NO: 1227104 - RNA, 19 nt, Artificial Sequence
  Description of Artificial Sequence: Synthetic oligonucleotide
ugcguggccaacacauccu

SEQ ID NO: 1227105 - RNA, 19 nt, Artificial Sequence
  Description of Artificial Sequence: Synthetic oligonucleotide
uuagggucugaggcaaagc

SEQ ID NO: 1227106 - RNA, 19 nt, Artificial Sequence
  Description of Artificial Sequence: Synthetic oligonucleotide
aaccuugaggggacagggg

SEQ ID NO: 1227107 - RNA, 19 nt, Artificial Sequence
  Description of Artificial Sequence: Synthetic oligonucleotide
cucccaaccugucccacag

SEQ ID NO: 1227108 - RNA, 19 nt, Artificial Sequence
  Description of Artificial Sequence: Synthetic oligonucleotide
uuguggaguggcauacuua

SEQ ID NO: 1227109 - RNA, 19 nt, Artificial Sequence
  Description of Artificial Sequence: Synthetic oligonucleotide
cuuagggucugaggcaaag

SEQ ID NO: 1227110 - RNA, 19 nt, Artificial Sequence
  Description of Artificial Sequence: Synthetic oligonucleotide
uccacacguggacgugugg

SEQ ID NO: 1227111 - RNA, 19 nt, Artificial Sequence
  Description of Artificial Sequence: Synthetic oligonucleotide
aaugagugcugcugaccuu

SEQ ID NO: 1227112 - RNA, 19 nt, Artificial Sequence
  Description of Artificial Sequence: Synthetic oligonucleotide
uuccucaccugagggagcc

SEQ ID NO: 1227113 - RNA, 19 nt, Artificial Sequence
  Description of Artificial Sequence: Synthetic oligonucleotide
gauagcgcuccagguaagc

SEQ ID NO: 1227114 - RNA, 19 nt, Artificial Sequence
  Description of Artificial Sequence: Synthetic oligonucleotide
ucuagccacuagcccagcu

SEQ ID NO: 1227115 - RNA, 19 nt, Artificial Sequence
  Description of Artificial Sequence: Synthetic oligonucleotide
aaagccuggggcacacucu

SEQ ID NO: 1227116 - RNA, 19 nt, Artificial Sequence
  Description of Artificial Sequence: Synthetic oligonucleotide
gugugcagaacagcgccgg

SEQ ID NO: 1227117 - RNA, 19 nt, Artificial Sequence
  Description of Artificial Sequence: Synthetic oligonucleotide
cgagcaguggcccucaggg

SEQ ID NO: 1227118 - RNA, 19 nt, Artificial Sequence
  Description of Artificial Sequence: Synthetic oligonucleotide
aaccugucccacaggcagg

SEQ ID NO: 1227119 - RNA, 19 nt, Artificial Sequence
  Description of Artificial Sequence: Synthetic oligonucleotide
cccgagagcagccaaacac

SEQ ID NO: 1227120 - RNA, 19 nt, Artificial Sequence
  Description of Artificial Sequence: Synthetic oligonucleotide
acuuggggcuugucaucac

SEQ ID NO: 1227121 - RNA, 19 nt, Artificial Sequence
  Description of Artificial Sequence: Synthetic oligonucleotide
gcagcaggcggccugagac

SEQ ID NO: 1227122 - RNA, 19 nt, Artificial Sequence
  Description of Artificial Sequence: Synthetic oligonucleotide
aucuugccgucacaaggcu

SEQ ID NO: 1227123 - RNA, 19 nt, Artificial Sequence
  Description of Artificial Sequence: Synthetic oligonucleotide
gcacacucuagccacuagc

SEQ ID NO: 1227124 - RNA, 19 nt, Artificial Sequence
  Description of Artificial Sequence: Synthetic oligonucleotide
ggaccuugucugcuggccg

SEQ ID NO: 1227125 - RNA, 19 nt, Artificial Sequence
  Description of Artificial Sequence: Synthetic oligonucleotide
cacuuguggaguggcauac

SEQ ID NO: 1227126 - RNA, 19 nt, Artificial Sequence
  Description of Artificial Sequence: Synthetic oligonucleotide
gugguaauggugagcugcc

SEQ ID NO: 1227127 - RNA, 19 nt, Artificial Sequence
  Description of Artificial Sequence: Synthetic oligonucleotide
cuguuauugguggagaagu

SEQ ID NO: 1227128 - RNA, 19 nt, Artificial Sequence
  Description of Artificial Sequence: Synthetic oligonucleotide
gacagggguucccggggag

SEQ ID NO: 1227129 - RNA, 19 nt, Artificial Sequence
  Description of Artificial Sequence: Synthetic oligonucleotide
ggauagguacccggggugg

SEQ ID NO: 1227130 - RNA, 19 nt, Artificial Sequence
  Description of Artificial Sequence: Synthetic oligonucleotide
ucccaaccugucccacagg

SEQ ID NO: 1227131 - RNA, 19 nt, Artificial Sequence
  Description of Artificial Sequence: Synthetic oligonucleotide
guggcuugccgccacccug

SEQ ID NO: 1227132 - RNA, 19 nt, Artificial Sequence
  Description of Artificial Sequence: Synthetic oligonucleotide
gcuguuauugguggagaag

SEQ ID NO: 1227133 - RNA, 19 nt, Artificial Sequence
  Description of Artificial Sequence: Synthetic oligonucleotide
agcguuuguggugggcagg

SEQ ID NO: 1227134 - RNA, 19 nt, Artificial Sequence
  Description of Artificial Sequence: Synthetic oligonucleotide
ugccgcauacacuccugcu

SEQ ID NO: 1227135 - RNA, 19 nt, Artificial Sequence
  Description of Artificial Sequence: Synthetic oligonucleotide
ugguggccgagccccuggg

SEQ ID NO: 1227136 - RNA, 19 nt, Artificial Sequence
  Description of Artificial Sequence: Synthetic oligonucleotide
cucgguggcagccgagcag

SEQ ID NO: 1227137 - RNA, 19 nt, Artificial Sequence
  Description of Artificial Sequence: Synthetic oligonucleotide
ggggcuugucaucaccucc

SEQ ID NO: 1227138 - RNA, 19 nt, Artificial Sequence
  Description of Artificial Sequence: Synthetic oligonucleotide
aucgcggacgaugggcagg

SEQ ID NO: 1227139 - RNA, 19 nt, Artificial Sequence
  Description of Artificial Sequence: Synthetic oligonucleotide
auagcgcuccagguaagca

SEQ ID NO: 1227140 - RNA, 19 nt, Artificial Sequence
  Description of Artificial Sequence: Synthetic oligonucleotide
cagcguuuguggugggcag

SEQ ID NO: 1227141 - RNA, 19 nt, Artificial Sequence
  Description of Artificial Sequence: Synthetic oligonucleotide
cccaaccugucccacaggc

SEQ ID NO: 1227142 - RNA, 19 nt, Artificial Sequence
  Description of Artificial Sequence: Synthetic oligonucleotide
ggcacugagggcugaacca

SEQ ID NO: 1227143 - RNA, 19 nt, Artificial Sequence
  Description of Artificial Sequence: Synthetic oligonucleotide
gcuggccuacccuucugcg

SEQ ID NO: 1227144 - RNA, 19 nt, Artificial Sequence
  Description of Artificial Sequence: Synthetic oligonucleotide
cugccgcauacacuccugc

SEQ ID NO: 1227145 - RNA, 19 nt, Artificial Sequence
  Description of Artificial Sequence: Synthetic oligonucleotide
cugaggcauaggucgaaca

SEQ ID NO: 1227146 - RNA, 19 nt, Artificial Sequence
  Description of Artificial Sequence: Synthetic oligonucleotide
ggugugguaauggugagcu

SEQ ID NO: 1227147 - RNA, 19 nt, Artificial Sequence
  Description of Artificial Sequence: Synthetic oligonucleotide
aggucacauucuguccaac

SEQ ID NO: 1227148 - RNA, 19 nt, Artificial Sequence
  Description of Artificial Sequence: Synthetic oligonucleotide
ccggagauagcuccacacg

SEQ ID NO: 1227149 - RNA, 19 nt, Artificial Sequence
  Description of Artificial Sequence: Synthetic oligonucleotide
ugucagcguuugugguggg

SEQ ID NO: 1227150 - RNA, 19 nt, Artificial Sequence
  Description of Artificial Sequence: Synthetic oligonucleotide
ggagauagcuccacacgug

SEQ ID NO: 1227151 - RNA, 19 nt, Artificial Sequence
  Description of Artificial Sequence: Synthetic oligonucleotide
agcccucgggccgggagcc

SEQ ID NO: 1227152 - RNA, 19 nt, Artificial Sequence
  Description of Artificial Sequence: Synthetic oligonucleotide
uucccaucuugccgucaca

SEQ ID NO: 1227153 - RNA, 19 nt, Artificial Sequence
  Description of Artificial Sequence: Synthetic oligonucleotide
ggacgugugggccgagggg

SEQ ID NO: 1227154 - RNA, 19 nt, Artificial Sequence
  Description of Artificial Sequence: Synthetic oligonucleotide
gugagcuagagagccggug

SEQ ID NO: 1227155 - RNA, 19 nt, Artificial Sequence
  Description of Artificial Sequence: Synthetic oligonucleotide
ccagguauaagauccccga

SEQ ID NO: 1227156 - RNA, 19 nt, Artificial Sequence
  Description of Artificial Sequence: Synthetic oligonucleotide
uggcagccgagcaguggcc

SEQ ID NO: 1227157 - RNA, 19 nt, Artificial Sequence
  Description of Artificial Sequence: Synthetic oligonucleotide
cacccgcggccgaagaccc

SEQ ID NO: 1227158 - RNA, 19 nt, Artificial Sequence
  Description of Artificial Sequence: Synthetic oligonucleotide
gccuacaggggcucccugg

SEQ ID NO: 1227159 - RNA, 19 nt, Artificial Sequence
  Description of Artificial Sequence: Synthetic oligonucleotide
gcgcugauagcgcuccagg

SEQ ID NO: 1227160 - RNA, 19 nt, Artificial Sequence
  Description of Artificial Sequence: Synthetic oligonucleotide
cugguugcagcaggcggcc

SEQ ID NO: 1227161 - RNA, 19 nt, Artificial Sequence
  Description of Artificial Sequence: Synthetic oligonucleotide
uggggcuugucaucaccuc

SEQ ID NO: 1227162 - RNA, 19 nt, Artificial Sequence
  Description of Artificial Sequence: Synthetic oligonucleotide
ccuagggcaaagccugggg

SEQ ID NO: 1227163 - RNA, 19 nt, Artificial Sequence
  Description of Artificial Sequence: Synthetic oligonucleotide
cuccacacguggacgugug

SEQ ID NO: 1227164 - RNA, 19 nt, Artificial Sequence
  Description of Artificial Sequence: Synthetic oligonucleotide
ggaucacuuguggaguggc

SEQ ID NO: 1227165 - RNA, 19 nt, Artificial Sequence
  Description of Artificial Sequence: Synthetic oligonucleotide
ugguaauggugagcugcca

SEQ ID NO: 1227166 - RNA, 19 nt, Artificial Sequence
  Description of Artificial Sequence: Synthetic oligonucleotide
uccccgagagcagccaaac

SEQ ID NO: 1227167 - RNA, 19 nt, Artificial Sequence
  Description of Artificial Sequence: Synthetic oligonucleotide
gaucacuuguggaguggca

SEQ ID NO: 1227168 - RNA, 19 nt, Artificial Sequence
  Description of Artificial Sequence: Synthetic oligonucleotide
gaggcauaggucgaacagu

SEQ ID NO: 1227169 - RNA, 19 nt, Artificial Sequence
  Description of Artificial Sequence: Synthetic oligonucleotide
cugguggccgagccccugg

SEQ ID NO: 1227170 - RNA, 19 nt, Artificial Sequence
  Description of Artificial Sequence: Synthetic oligonucleotide
caucgcggacgaugggcag

SEQ ID NO: 1227171 - RNA, 19 nt, Artificial Sequence
  Description of Artificial Sequence: Synthetic oligonucleotide
ccaacauuccaaaugccua

SEQ ID NO: 1227172 - RNA, 19 nt, Artificial Sequence
  Description of Artificial Sequence: Synthetic oligonucleotide
gguugcagcaggcggccug

SEQ ID NO: 1227173 - RNA, 19 nt, Artificial Sequence
  Description of Artificial Sequence: Synthetic oligonucleotide
gccggagauagcuccacac

SEQ ID NO: 1227174 - RNA, 19 nt, Artificial Sequence
  Description of Artificial Sequence: Synthetic oligonucleotide
ccggcaguagguaguaaug

SEQ ID NO: 1227175 - RNA, 19 nt, Artificial Sequence
  Description of Artificial Sequence: Synthetic oligonucleotide
agauagcuccacacgugga

SEQ ID NO: 1227176 - RNA, 19 nt, Artificial Sequence
  Description of Artificial Sequence: Synthetic oligonucleotide
auagguacccgggguggca

SEQ ID NO: 1227177 - RNA, 19 nt, Artificial Sequence
  Description of Artificial Sequence: Synthetic oligonucleotide
aggucccagucgaacaucu

SEQ ID NO: 1227178 - RNA, 19 nt, Artificial Sequence
  Description of Artificial Sequence: Synthetic oligonucleotide
ccacacguggacguguggg

SEQ ID NO: 1227179 - RNA, 19 nt, Artificial Sequence
  Description of Artificial Sequence: Synthetic oligonucleotide
uagguacccgggguggcac

SEQ ID NO: 1227180 - RNA, 19 nt, Artificial Sequence
  Description of Artificial Sequence: Synthetic oligonucleotide
ucaguccccuagggcaaag

SEQ ID NO: 1227181 - RNA, 19 nt, Artificial Sequence
  Description of Artificial Sequence: Synthetic oligonucleotide
gcauacacuccugcuguag

SEQ ID NO: 1227182 - RNA, 19 nt, Artificial Sequence
  Description of Artificial Sequence: Synthetic oligonucleotide
gccggugugguaaugguga

SEQ ID NO: 1227183 - RNA, 19 nt, Artificial Sequence
  Description of Artificial Sequence: Synthetic oligonucleotide
agggcugaaccaaggugug

SEQ ID NO: 1227184 - RNA, 19 nt, Artificial Sequence
  Description of Artificial Sequence: Synthetic oligonucleotide
ucgcggacgaugggcagga

SEQ ID NO: 1227185 - RNA, 19 nt, Artificial Sequence
  Description of Artificial Sequence: Synthetic oligonucleotide
ccagucgaacaucuccagc

SEQ ID NO: 1227186 - RNA, 19 nt, Artificial Sequence
  Description of Artificial Sequence: Synthetic oligonucleotide
ggcauacuuagggucugag

SEQ ID NO: 1227187 - RNA, 19 nt, Artificial Sequence
  Description of Artificial Sequence: Synthetic oligonucleotide
gcugauagcgcuccaggua

SEQ ID NO: 1227188 - RNA, 19 nt, Artificial Sequence
  Description of Artificial Sequence: Synthetic oligonucleotide
gugugguaauggugagcug

SEQ ID NO: 1227189 - RNA, 19 nt, Artificial Sequence
  Description of Artificial Sequence: Synthetic oligonucleotide
cauacacuccugcuguagu

SEQ ID NO: 1227190 - RNA, 19 nt, Artificial Sequence
  Description of Artificial Sequence: Synthetic oligonucleotide
gguggaaggaauagguugu

SEQ ID NO: 1227191 - RNA, 19 nt, Artificial Sequence
  Description of Artificial Sequence: Synthetic oligonucleotide
ggcauaggucgaacagugg

SEQ ID NO: 1227192 - RNA, 19 nt, Artificial Sequence
  Description of Artificial Sequence: Synthetic oligonucleotide
agagagccggugugguaau

SEQ ID NO: 1227193 - RNA, 19 nt, Artificial Sequence
  Description of Artificial Sequence: Synthetic oligonucleotide
gguaguaaugagugcugcu

SEQ ID NO: 1227194 - RNA, 19 nt, Artificial Sequence
  Description of Artificial Sequence: Synthetic oligonucleotide
guagugccuggaaaaucuc

SEQ ID NO: 1227195 - RNA, 19 nt, Artificial Sequence
  Description of Artificial Sequence: Synthetic oligonucleotide
augcuggccuacccuucug

SEQ ID NO: 1227196 - RNA, 19 nt, Artificial Sequence
  Description of Artificial Sequence: Synthetic oligonucleotide
uggguggcuugccgccacc

SEQ ID NO: 1227197 - RNA, 19 nt, Artificial Sequence
  Description of Artificial Sequence: Synthetic oligonucleotide
acuuguggaguggcauacu

SEQ ID NO: 1227198 - RNA, 19 nt, Artificial Sequence
  Description of Artificial Sequence: Synthetic oligonucleotide
uggcauacuuagggucuga

SEQ ID NO: 1227199 - RNA, 19 nt, Artificial Sequence
  Description of Artificial Sequence: Synthetic oligonucleotide
agcagggcgcuccggcagu

SEQ ID NO: 1227200 - RNA, 19 nt, Artificial Sequence
  Description of Artificial Sequence: Synthetic oligonucleotide
gucgaacaucuccagcacu

SEQ ID NO: 1227201 - RNA, 19 nt, Artificial Sequence
  Description of Artificial Sequence: Synthetic oligonucleotide
gccaucgcggacgaugggc

SEQ ID NO: 1227202 - RNA, 19 nt, Artificial Sequence
  Description of Artificial Sequence: Synthetic oligonucleotide
ggcacacucuagccacuag

SEQ ID NO: 1227203 - RNA, 19 nt, Artificial Sequence
  Description of Artificial Sequence: Synthetic oligonucleotide
ccgagagcagccaaacaca

SEQ ID NO: 1227204 - RNA, 19 nt, Artificial Sequence
  Description of Artificial Sequence: Synthetic oligonucleotide
gucagcguuuguggugggc

SEQ ID NO: 1227205 - RNA, 19 nt, Artificial Sequence
  Description of Artificial Sequence: Synthetic oligonucleotide
agaacagcgccgggugggu

SEQ ID NO: 1227206 - RNA, 19 nt, Artificial Sequence
  Description of Artificial Sequence: Synthetic oligonucleotide
ggaguggcauacuuagggu

SEQ ID NO: 1227207 - RNA, 19 nt, Artificial Sequence
  Description of Artificial Sequence: Synthetic oligonucleotide
agauccccgagagcagcca

SEQ ID NO: 1227208 - RNA, 19 nt, Artificial Sequence
  Description of Artificial Sequence: Synthetic oligonucleotide
ccgggcagccccucggugg

SEQ ID NO: 1227209 - RNA, 19 nt, Artificial Sequence
  Description of Artificial Sequence: Synthetic oligonucleotide
gguaagcagggcgcuccgg

SEQ ID NO: 1227210 - RNA, 19 nt, Artificial Sequence
  Description of Artificial Sequence: Synthetic oligonucleotide
cuuguggaguggcauacuu

SEQ ID NO: 1227211 - RNA, 19 nt, Artificial Sequence
  Description of Artificial Sequence: Synthetic oligonucleotide
gagccggugugguaauggu

SEQ ID NO: 1227212 - RNA, 19 nt, Artificial Sequence
  Description of Artificial Sequence: Synthetic oligonucleotide
ccucaccugagggagccgg

SEQ ID NO: 1227213 - RNA, 19 nt, Artificial Sequence
  Description of Artificial Sequence: Synthetic oligonucleotide
caccuccugggguugggga

SEQ ID NO: 1227214 - RNA, 19 nt, Artificial Sequence
  Description of Artificial Sequence: Synthetic oligonucleotide
cuucugcguggccaacaca

SEQ ID NO: 1227215 - RNA, 19 nt, Artificial Sequence
  Description of Artificial Sequence: Synthetic oligonucleotide
gguccaggccaccggcuug

SEQ ID NO: 1227216 - RNA, 19 nt, Artificial Sequence
  Description of Artificial Sequence: Synthetic oligonucleotide
caggucacauucuguccaa

SEQ ID NO: 1227217 - RNA, 19 nt, Artificial Sequence
  Description of Artificial Sequence: Synthetic oligonucleotide
caguccccuagggcaaagc

SEQ ID NO: 1227218 - RNA, 19 nt, Artificial Sequence
  Description of Artificial Sequence: Synthetic oligonucleotide
ggccuacccuucugcgugg

SEQ ID NO: 1227219 - RNA, 19 nt, Artificial Sequence
  Description of Artificial Sequence: Synthetic oligonucleotide
agguacccgggguggcacu

SEQ ID NO: 1227220 - RNA, 19 nt, Artificial Sequence
  Description of Artificial Sequence: Synthetic oligonucleotide
cuagagagccgguguggua

SEQ ID NO: 1227221 - RNA, 19 nt, Artificial Sequence
  Description of Artificial Sequence: Synthetic oligonucleotide
agccacuagcccagcuuug

SEQ ID NO: 1227222 - RNA, 19 nt, Artificial Sequence
  Description of Artificial Sequence: Synthetic oligonucleotide
gggccgggagccuggauca

SEQ ID NO: 1227223 - RNA, 19 nt, Artificial Sequence
  Description of Artificial Sequence: Synthetic oligonucleotide
ggggaccuguagcugccgc

SEQ ID NO: 1227224 - RNA, 19 nt, Artificial Sequence
  Description of Artificial Sequence: Synthetic oligonucleotide
caggucccagucgaacauc

SEQ ID NO: 1227225 - RNA, 19 nt, Artificial Sequence
  Description of Artificial Sequence: Synthetic oligonucleotide
gggguccuggaaccuugag

SEQ ID NO: 1227226 - RNA, 19 nt, Artificial Sequence
  Description of Artificial Sequence: Synthetic oligonucleotide
gggaccuguagcugccgca

SEQ ID NO: 1227227 - RNA, 19 nt, Artificial Sequence
  Description of Artificial Sequence: Synthetic oligonucleotide
cucaccugagggagccgga

SEQ ID NO: 1227228 - RNA, 19 nt, Artificial Sequence
  Description of Artificial Sequence: Synthetic oligonucleotide
ugguuccuuuagggcagac

SEQ ID NO: 1227229 - RNA, 19 nt, Artificial Sequence
  Description of Artificial Sequence: Synthetic oligonucleotide
ccgucacaaggcuccuucc

SEQ ID NO: 1227230 - RNA, 19 nt, Artificial Sequence
  Description of Artificial Sequence: Synthetic oligonucleotide
ggggauagguacccggggu

SEQ ID NO: 1227231 - RNA, 19 nt, Artificial Sequence
  Description of Artificial Sequence: Synthetic oligonucleotide
ggcacucggggaggggagg

SEQ ID NO: 1227232 - RNA, 19 nt, Artificial Sequence
  Description of Artificial Sequence: Synthetic oligonucleotide
ccacccgcggccgaagacc

SEQ ID NO: 1227233 - RNA, 19 nt, Artificial Sequence
  Description of Artificial Sequence: Synthetic oligonucleotide
ccaucgcggacgaugggca

SEQ ID NO: 1227234 - RNA, 19 nt, Artificial Sequence
  Description of Artificial Sequence: Synthetic oligonucleotide
cuggccuacccuucugcgu

SEQ ID NO: 1227235 - RNA, 19 nt, Artificial Sequence
  Description of Artificial Sequence: Synthetic oligonucleotide
gggccucccgaaggaagcg

SEQ ID NO: 1227236 - RNA, 19 nt, Artificial Sequence
  Description of Artificial Sequence: Synthetic oligonucleotide
uugccgucacaaggcuccu

SEQ ID NO: 1227237 - RNA, 19 nt, Artificial Sequence
  Description of Artificial Sequence: Synthetic oligonucleotide
ccgagcaguggcccucagg

SEQ ID NO: 1227238 - RNA, 19 nt, Artificial Sequence
  Description of Artificial Sequence: Synthetic oligonucleotide
ccggcuugccucuuccuca

SEQ ID NO: 1227239 - RNA, 19 nt, Artificial Sequence
  Description of Artificial Sequence: Synthetic oligonucleotide
ccgggugggugagugagug

SEQ ID NO: 1227240 - RNA, 19 nt, Artificial Sequence
  Description of Artificial Sequence: Synthetic oligonucleotide
ccuacaggggcucccugga

SEQ ID NO: 1227241 - RNA, 19 nt, Artificial Sequence
  Description of Artificial Sequence: Synthetic oligonucleotide
guacccgggguggcacuug

SEQ ID NO: 1227242 - RNA, 19 nt, Artificial Sequence
  Description of Artificial Sequence: Synthetic oligonucleotide
ccuuccugccaucgcggac

SEQ ID NO: 1227243 - RNA, 19 nt, Artificial Sequence
  Description of Artificial Sequence: Synthetic oligonucleotide
gccgugccgccucuugccc

SEQ ID NO: 1227244 - RNA, 19 nt, Artificial Sequence
  Description of Artificial Sequence: Synthetic oligonucleotide
auccccgagagcagccaaa

SEQ ID NO: 1227245 - RNA, 19 nt, Artificial Sequence
  Description of Artificial Sequence: Synthetic oligonucleotide
cugggcccugccagaagaa

SEQ ID NO: 1227246 - RNA, 19 nt, Artificial Sequence
  Description of Artificial Sequence: Synthetic oligonucleotide
ugguugcagcaggcggccu

SEQ ID NO: 1227247 - RNA, 19 nt, Artificial Sequence
  Description of Artificial Sequence: Synthetic oligonucleotide
ggaggcacucggggagggg

SEQ ID NO: 1227248 - RNA, 19 nt, Artificial Sequence
  Description of Artificial Sequence: Synthetic oligonucleotide
guggccgagccccuggguu

SEQ ID NO: 1227249 - RNA, 19 nt, Artificial Sequence
  Description of Artificial Sequence: Synthetic oligonucleotide
ggugagcaagguggggcuc

SEQ ID NO: 1227250 - RNA, 19 nt, Artificial Sequence
  Description of Artificial Sequence: Synthetic oligonucleotide
ccuacccuucugcguggcc

SEQ ID NO: 1227251 - RNA, 19 nt, Artificial Sequence
  Description of Artificial Sequence: Synthetic oligonucleotide
ccccuagggcaaagccugg

SEQ ID NO: 1227252 - RNA, 19 nt, Artificial Sequence
  Description of Artificial Sequence: Synthetic oligonucleotide
cccaagucaagccuggcuu

SEQ ID NO: 1227253 - RNA, 19 nt, Artificial Sequence
  Description of Artificial Sequence: Synthetic oligonucleotide
ggagccggagauagcucca

SEQ ID NO: 1227254 - RNA, 19 nt, Artificial Sequence
  Description of Artificial Sequence: Synthetic oligonucleotide
gcaacaacugucagcguuu

SEQ ID NO: 1227255 - RNA, 19 nt, Artificial Sequence
  Description of Artificial Sequence: Synthetic oligonucleotide
cagggcgcuccggcaguag

SEQ ID NO: 1227256 - RNA, 19 nt, Artificial Sequence
  Description of Artificial Sequence: Synthetic oligonucleotide
ugccgucacaaggcuccuu

SEQ ID NO: 1227257 - RNA, 19 nt, Artificial Sequence
  Description of Artificial Sequence: Synthetic oligonucleotide
ggacgaugggcaggauaca

SEQ ID NO: 1227258 - RNA, 19 nt, Artificial Sequence
  Description of Artificial Sequence: Synthetic oligonucleotide
cgccgggugggugagugag

SEQ ID NO: 1227259 - RNA, 19 nt, Artificial Sequence
  Description of Artificial Sequence: Synthetic oligonucleotide
cggugugguaauggugagc

SEQ ID NO: 1227260 - RNA, 19 nt, Artificial Sequence
  Description of Artificial Sequence: Synthetic oligonucleotide
cucaguccccuagggcaaa

SEQ ID NO: 1227261 - RNA, 19 nt, Artificial Sequence
  Description of Artificial Sequence: Synthetic oligonucleotide
ggucccagucgaacaucuc

SEQ ID NO: 1227262 - RNA, 19 nt, Artificial Sequence
  Description of Artificial Sequence: Synthetic oligonucleotide
cacucggggaggggaggca

SEQ ID NO: 1227263 - RNA, 19 nt, Artificial Sequence
  Description of Artificial Sequence: Synthetic oligonucleotide
gguggcuugccgccacccu

SEQ ID NO: 1227264 - RNA, 19 nt, Artificial Sequence
  Description of Artificial Sequence: Synthetic oligonucleotide
ccagguaagcagggcgcuc

SEQ ID NO: 1227265 - RNA, 19 nt, Artificial Sequence
  Description of Artificial Sequence: Synthetic oligonucleotide
ccucgguggcagccgagca

SEQ ID NO: 1227266 - RNA, 19 nt, Artificial Sequence
  Description of Artificial Sequence: Synthetic oligonucleotide
gccuacccuucugcguggc

SEQ ID NO: 1227267 - RNA, 19 nt, Artificial Sequence
  Description of Artificial Sequence: Synthetic oligonucleotide
cacuccacccgcggccgaa

SEQ ID NO: 1227268 - RNA, 19 nt, Artificial Sequence
  Description of Artificial Sequence: Synthetic oligonucleotide
gcuccacacguggacgugu

SEQ ID NO: 1227269 - RNA, 19 nt, Artificial Sequence
  Description of Artificial Sequence: Synthetic oligonucleotide
gccgagcaguggcccucag

SEQ ID NO: 1227270 - RNA, 19 nt, Artificial Sequence
  Description of Artificial Sequence: Synthetic oligonucleotide
caccggcuugccucuuccu

SEQ ID NO: 1227271 - RNA, 19 nt, Artificial Sequence
  Description of Artificial Sequence: Synthetic oligonucleotide
cccgggcagccccucggug

SEQ ID NO: 1227272 - RNA, 19 nt, Artificial Sequence
  Description of Artificial Sequence: Synthetic oligonucleotide
gcggccugagacugggcau

SEQ ID NO: 1227273 - RNA, 19 nt, Artificial Sequence
  Description of Artificial Sequence: Synthetic oligonucleotide
gggcacacucuagccacua

SEQ ID NO: 1227274 - RNA, 19 nt, Artificial Sequence
  Description of Artificial Sequence: Synthetic oligonucleotide
gcagccgagcaguggcccu

SEQ ID NO: 1227275 - RNA, 19 nt, Artificial Sequence
  Description of Artificial Sequence: Synthetic oligonucleotide
cggccugagacugggcauc

SEQ ID NO: 1227276 - RNA, 19 nt, Artificial Sequence
  Description of Artificial Sequence: Synthetic oligonucleotide
gccugaggcauaggucgaa

SEQ ID NO: 1227277 - RNA, 19 nt, Artificial Sequence
  Description of Artificial Sequence: Synthetic oligonucleotide
ggugagcuagagagccggu

SEQ ID NO: 1227278 - RNA, 19 nt, Artificial Sequence
  Description of Artificial Sequence: Synthetic oligonucleotide
uccugccaucgcggacgau

SEQ ID NO: 1227279 - RNA, 19 nt, Artificial Sequence
  Description of Artificial Sequence: Synthetic oligonucleotide
gcguggccaacacauccuu

SEQ ID NO: 1227280 - RNA, 19 nt, Artificial Sequence
  Description of Artificial Sequence: Synthetic oligonucleotide
gccccuggguugcuguuau

SEQ ID NO: 1227281 - RNA, 19 nt, Artificial Sequence
  Description of Artificial Sequence: Synthetic oligonucleotide
cgcugauagcgcuccaggu

SEQ ID NO: 1227282 - RNA, 19 nt, Artificial Sequence
  Description of Artificial Sequence: Synthetic oligonucleotide
ccgugccgccucuugccca

SEQ ID NO: 1227283 - RNA, 19 nt, Artificial Sequence
  Description of Artificial Sequence: Synthetic oligonucleotide
ccgcggccgaagacccagc

SEQ ID NO: 1227284 - RNA, 19 nt, Artificial Sequence
  Description of Artificial Sequence: Synthetic oligonucleotide
ggccgaagacccagcccaa

SEQ ID NO: 1227285 - RNA, 19 nt, Artificial Sequence
  Description of Artificial Sequence: Synthetic oligonucleotide
gcuugggguccuggaaccu

SEQ ID NO: 1227286 - RNA, 19 nt, Artificial Sequence
  Description of Artificial Sequence: Synthetic oligonucleotide
cucgggccgggagccugga

SEQ ID NO: 1227287 - RNA, 19 nt, Artificial Sequence
  Description of Artificial Sequence: Synthetic oligonucleotide
gccugagacugggcaucuc

SEQ ID NO: 1227288 - RNA, 19 nt, Artificial Sequence
  Description of Artificial Sequence: Synthetic oligonucleotide
gccgggagccuggaucacu

SEQ ID NO: 1227289 - RNA, 19 nt, Artificial Sequence
  Description of Artificial Sequence: Synthetic oligonucleotide
gguacccgggguggcacuu

SEQ ID NO: 1227290 - RNA, 19 nt, Artificial Sequence
  Description of Artificial Sequence: Synthetic oligonucleotide
cguggacgugugggccgag

SEQ ID NO: 1227291 - RNA, 19 nt, Artificial Sequence
  Description of Artificial Sequence: Synthetic oligonucleotide
gccgggugggugagugagu

SEQ ID NO: 1227292 - RNA, 19 nt, Artificial Sequence
  Description of Artificial Sequence: Synthetic oligonucleotide
ccccgggcagccccucggu

SEQ ID NO: 1227293 - RNA, 19 nt, Artificial Sequence
  Description of Artificial Sequence: Synthetic oligonucleotide
ggccaccggcuugccucuu

SEQ ID NO: 1227294 - RNA, 19 nt, Artificial Sequence
  Description of Artificial Sequence: Synthetic oligonucleotide
uuaggaaucaauuuugccg

SEQ ID NO: 1227295 - RNA, 19 nt, Artificial Sequence
  Description of Artificial Sequence: Synthetic oligonucleotide
aauuauaaccccuuaagga

SEQ ID NO: 1227296 - RNA, 19 nt, Artificial Sequence
  Description of Artificial Sequence: Synthetic oligonucleotide
aaagcuaacaauaucacag

SEQ ID NO: 1227297 - RNA, 19 nt, Artificial Sequence
  Description of Artificial Sequence: Synthetic oligonucleotide
auaucuaaaagagauacac

SEQ ID NO: 1227298 - RNA, 19 nt, Artificial Sequence
  Description of Artificial Sequence: Synthetic oligonucleotide
aaaagagauacacuuaaga

SEQ ID NO: 1227299 - RNA, 19 nt, Artificial Sequence
  Description of Artificial Sequence: Synthetic oligonucleotide
auuauaaccccuuaaggag

SEQ ID NO: 1227300 - RNA, 19 nt, Artificial Sequence
  Description of Artificial Sequence: Synthetic oligonucleotide
gaauuauaaccccuuaagg

SEQ ID NO: 1227301 - RNA, 19 nt, Artificial Sequence
  Description of Artificial Sequence: Synthetic oligonucleotide
aaaacguaggcccugguug

SEQ ID NO: 1227302 - RNA, 19 nt, Artificial Sequence
  Description of Artificial Sequence: Synthetic oligonucleotide
cauucgaacaauaugcucc

SEQ ID NO: 1227303 - RNA, 19 nt, Artificial Sequence
  Description of Artificial Sequence: Synthetic oligonucleotide
aaaauggcaggguccaggc

SEQ ID NO: 1227304 - RNA, 19 nt, Artificial Sequence
  Description of Artificial Sequence: Synthetic oligonucleotide
aacaauaucacaggaacug

SEQ ID NO: 1227305 - RNA, 19 nt, Artificial Sequence
  Description of Artificial Sequence: Synthetic oligonucleotide
cuaacaauaucacaggaac

SEQ ID NO: 1227306 - RNA, 19 nt, Artificial Sequence
  Description of Artificial Sequence: Synthetic oligonucleotide
ugaccuucaccauagaugc

SEQ ID NO: 1227307 - RNA, 19 nt, Artificial Sequence
  Description of Artificial Sequence: Synthetic oligonucleotide
aauagugcgggccuugcuc

SEQ ID NO: 1227308 - RNA, 19 nt, Artificial Sequence
  Description of Artificial Sequence: Synthetic oligonucleotide
aguguagggauucagcagg

SEQ ID NO: 1227309 - RNA, 19 nt, Artificial Sequence
  Description of Artificial Sequence: Synthetic oligonucleotide
agaucaggaacugaguucc

SEQ ID NO: 1227310 - RNA, 19 nt, Artificial Sequence
  Description of Artificial Sequence: Synthetic oligonucleotide
uguggacugccucauaugg

SEQ ID NO: 1227311 - RNA, 19 nt, Artificial Sequence
  Description of Artificial Sequence: Synthetic oligonucleotide
cagcauucgaacaauaugc

SEQ ID NO: 1227312 - RNA, 19 nt, Artificial Sequence
  Description of Artificial Sequence: Synthetic oligonucleotide
ugaguauguaccacagugg

SEQ ID NO: 1227313 - RNA, 19 nt, Artificial Sequence
  Description of Artificial Sequence: Synthetic oligonucleotide
auucgaacaauaugcuccc

SEQ ID NO: 1227314 - RNA, 19 nt, Artificial Sequence
  Description of Artificial Sequence: Synthetic oligonucleotide
aucaauuuugccgaccagc

SEQ ID NO: 1227315 - RNA, 19 nt, Artificial Sequence
  Description of Artificial Sequence: Synthetic oligonucleotide
ucuucccaugagaagaggg

SEQ ID NO: 1227316 - RNA, 19 nt, Artificial Sequence
  Description of Artificial Sequence: Synthetic oligonucleotide
uuuaggaaucaauuuugcc

SEQ ID NO: 1227317 - RNA, 19 nt, Artificial Sequence
  Description of Artificial Sequence: Synthetic oligonucleotide
cauuuaggaaucaauuuug

SEQ ID NO: 1227318 - RNA, 19 nt, Artificial Sequence
  Description of Artificial Sequence: Synthetic oligonucleotide
gucaaagacacgcagcucc

SEQ ID NO: 1227319 - RNA, 19 nt, Artificial Sequence
  Description of Artificial Sequence: Synthetic oligonucleotide
uggacugccucauaugggg

SEQ ID NO: 1227320 - RNA, 19 nt, Artificial Sequence
  Description of Artificial Sequence: Synthetic oligonucleotide
gacauucuuggccaaaagc

SEQ ID NO: 1227321 - RNA, 19 nt, Artificial Sequence
  Description of Artificial Sequence: Synthetic oligonucleotide
agcagaaguacaccuggcc

SEQ ID NO: 1227322 - RNA, 19 nt, Artificial Sequence
  Description of Artificial Sequence: Synthetic oligonucleotide
aaagacacgcagcucccgg

SEQ ID NO: 1227323 - RNA, 19 nt, Artificial Sequence
  Description of Artificial Sequence: Synthetic oligonucleotide
gucacauccccuuggaugg

SEQ ID NO: 1227324 - RNA, 19 nt, Artificial Sequence
  Description of Artificial Sequence: Synthetic oligonucleotide
gaguauguaccacaguggc

SEQ ID NO: 1227325 - RNA, 19 nt, Artificial Sequence
  Description of Artificial Sequence: Synthetic oligonucleotide
uuauaaccccuuaaggaga

SEQ ID NO: 1227326 - RNA, 19 nt, Artificial Sequence
  Description of Artificial Sequence: Synthetic oligonucleotide
aagggcacaugucacuagg

SEQ ID NO: 1227327 - RNA, 19 nt, Artificial Sequence
  Description of Artificial Sequence: Synthetic oligonucleotide
ugucauagcagaaguacac

SEQ ID NO: 1227328 - RNA, 19 nt, Artificial Sequence
  Description of Artificial Sequence: Synthetic oligonucleotide
ggaauuauaaccccuuaag

SEQ ID NO: 1227329 - RNA, 19 nt, Artificial Sequence
  Description of Artificial Sequence: Synthetic oligonucleotide
ucuuauaaggugauuuguc

SEQ ID NO: 1227330 - RNA, 19 nt, Artificial Sequence
  Description of Artificial Sequence: Synthetic oligonucleotide
cuagaguaagccaaccagc

SEQ ID NO: 1227331 - RNA, 19 nt, Artificial Sequence
  Description of Artificial Sequence: Synthetic oligonucleotide
auugccaacauacacccga

SEQ ID NO: 1227332 - RNA, 19 nt, Artificial Sequence
  Description of Artificial Sequence: Synthetic oligonucleotide
uuccaguccguauacaagc

SEQ ID NO: 1227333 - RNA, 19 nt, Artificial Sequence
  Description of Artificial Sequence: Synthetic oligonucleotide
gaucuguguagguaaaaug

SEQ ID NO: 1227334 - RNA, 19 nt, Artificial Sequence
  Description of Artificial Sequence: Synthetic oligonucleotide
agucacauccccuuggaug

SEQ ID NO: 1227335 - RNA, 19 nt, Artificial Sequence
  Description of Artificial Sequence: Synthetic oligonucleotide
uauaaccccuuaaggagag

SEQ ID NO: 1227336 - RNA, 19 nt, Artificial Sequence
  Description of Artificial Sequence: Synthetic oligonucleotide
uaucagucgaaguccacag

SEQ ID NO: 1227337 - RNA, 19 nt, Artificial Sequence
  Description of Artificial Sequence: Synthetic oligonucleotide
uaucuaaaagagauacacu

SEQ ID NO: 1227338 - RNA, 19 nt, Artificial Sequence
  Description of Artificial Sequence: Synthetic oligonucleotide
uaaaauggcaggguccagg

SEQ ID NO: 1227339 - RNA, 19 nt, Artificial Sequence
  Description of Artificial Sequence: Synthetic oligonucleotide
aguaaaggugguguuggcc

SEQ ID NO: 1227340 - RNA, 19 nt, Artificial Sequence
  Description of Artificial Sequence: Synthetic oligonucleotide
ugaucugaugaccuucacc

SEQ ID NO: 1227341 - RNA, 19 nt, Artificial Sequence
  Description of Artificial Sequence: Synthetic oligonucleotide
uuaauccagacuuggccag

SEQ ID NO: 1227342 - RNA, 19 nt, Artificial Sequence
  Description of Artificial Sequence: Synthetic oligonucleotide
aggaacugaguuccagucc

SEQ ID NO: 1227343 - RNA, 19 nt, Artificial Sequence
  Description of Artificial Sequence: Synthetic oligonucleotide
ucaaucacauucugugugc

SEQ ID NO: 1227344 - RNA, 19 nt, Artificial Sequence
  Description of Artificial Sequence: Synthetic oligonucleotide
agaguguagggauucagca

SEQ ID NO: 1227345 - RNA, 19 nt, Artificial Sequence
  Description of Artificial Sequence: Synthetic oligonucleotide
aagaaagucauggaauuau

SEQ ID NO: 1227346 - RNA, 19 nt, Artificial Sequence
  Description of Artificial Sequence: Synthetic oligonucleotide
uggccaaaagcuaacaaua

SEQ ID NO: 1227347 - RNA, 19 nt, Artificial Sequence
  Description of Artificial Sequence: Synthetic oligonucleotide
uaaauaucuaaaagagaua

SEQ ID NO: 1227348 - RNA, 19 nt, Artificial Sequence
  Description of Artificial Sequence: Synthetic oligonucleotide
ugcacguucacuuggugga

SEQ ID NO: 1227349 - RNA, 19 nt, Artificial Sequence
  Description of Artificial Sequence: Synthetic oligonucleotide
uuauaaggugauuugucau

SEQ ID NO: 1227350 - RNA, 19 nt, Artificial Sequence
  Description of Artificial Sequence: Synthetic oligonucleotide
cucaaucacauucugugug

SEQ ID NO: 1227351 - RNA, 19 nt, Artificial Sequence
  Description of Artificial Sequence: Synthetic oligonucleotide
cuuaaggagagccagaugu

SEQ ID NO: 1227352 - RNA, 19 nt, Artificial Sequence
  Description of Artificial Sequence: Synthetic oligonucleotide
auauggggugucuucauug

SEQ ID NO: 1227353 - RNA, 19 nt, Artificial Sequence
  Description of Artificial Sequence: Synthetic oligonucleotide
gaaucaauuuugccgacca

SEQ ID NO: 1227354 - RNA, 19 nt, Artificial Sequence
  Description of Artificial Sequence: Synthetic oligonucleotide
aacuuggaggcuggaauac

SEQ ID NO: 1227355 - RNA, 19 nt, Artificial Sequence
  Description of Artificial Sequence: Synthetic oligonucleotide
uugacauuaggccccacaa

SEQ ID NO: 1227356 - RNA, 19 nt, Artificial Sequence
  Description of Artificial Sequence: Synthetic oligonucleotide
aaggagagccagauguagc

SEQ ID NO: 1227357 - RNA, 19 nt, Artificial Sequence
  Description of Artificial Sequence: Synthetic oligonucleotide
aaucaauuuugccgaccag

SEQ ID NO: 1227358 - RNA, 19 nt, Artificial Sequence
  Description of Artificial Sequence: Synthetic oligonucleotide
ucauggaauuauaaccccu

SEQ ID NO: 1227359 - RNA, 19 nt, Artificial Sequence
  Description of Artificial Sequence: Synthetic oligonucleotide
uggaauuauaaccccuuaa

SEQ ID NO: 1227360 - RNA, 19 nt, Artificial Sequence
  Description of Artificial Sequence: Synthetic oligonucleotide
gugaguugggaccaaagac

SEQ ID NO: 1227361 - RNA, 19 nt, Artificial Sequence
  Description of Artificial Sequence: Synthetic oligonucleotide
gcaugguugacauucuugg

SEQ ID NO: 1227362 - RNA, 19 nt, Artificial Sequence
  Description of Artificial Sequence: Synthetic oligonucleotide
guagaagucucucaugauc

SEQ ID NO: 1227363 - RNA, 19 nt, Artificial Sequence
  Description of Artificial Sequence: Synthetic oligonucleotide
agguaaaauggcagggucc

SEQ ID NO: 1227364 - RNA, 19 nt, Artificial Sequence
  Description of Artificial Sequence: Synthetic oligonucleotide
uaagccaaccagcaugagu

SEQ ID NO: 1227365 - RNA, 19 nt, Artificial Sequence
  Description of Artificial Sequence: Synthetic oligonucleotide
guauacaagccucaaucac

SEQ ID NO: 1227366 - RNA, 19 nt, Artificial Sequence
  Description of Artificial Sequence: Synthetic oligonucleotide
aaacguaggcccugguugu

SEQ ID NO: 1227367 - RNA, 19 nt, Artificial Sequence
  Description of Artificial Sequence: Synthetic oligonucleotide
aauaucuaaaagagauaca

SEQ ID NO: 1227368 - RNA, 19 nt, Artificial Sequence
  Description of Artificial Sequence: Synthetic oligonucleotide
augaccuucaccauagaug

SEQ ID NO: 1227369 - RNA, 19 nt, Artificial Sequence
  Description of Artificial Sequence: Synthetic oligonucleotide
gaguguagggauucagcag

SEQ ID NO: 1227370 - RNA, 19 nt, Artificial Sequence
  Description of Artificial Sequence: Synthetic oligonucleotide
gaaacggauuuuaauccag

SEQ ID NO: 1227371 - RNA, 19 nt, Artificial Sequence
  Description of Artificial Sequence: Synthetic oligonucleotide
ugcacccagagaauagugc

SEQ ID NO: 1227372 - RNA, 19 nt, Artificial Sequence
  Description of Artificial Sequence: Synthetic oligonucleotide
ucgaaguccacagggaccc

SEQ ID NO: 1227373 - RNA, 19 nt, Artificial Sequence
  Description of Artificial Sequence: Synthetic oligonucleotide
aacacauccaccagcccag

SEQ ID NO: 1227374 - RNA, 19 nt, Artificial Sequence
  Description of Artificial Sequence: Synthetic oligonucleotide
auggaaaaucacugauuuc

SEQ ID NO: 1227375 - RNA, 19 nt, Artificial Sequence
  Description of Artificial Sequence: Synthetic oligonucleotide
uguugguacugacaguaaa

SEQ ID NO: 1227376 - RNA, 19 nt, Artificial Sequence
  Description of Artificial Sequence: Synthetic oligonucleotide
gacauuaggccccacaacu

SEQ ID NO: 1227377 - RNA, 19 nt, Artificial Sequence
  Description of Artificial Sequence: Synthetic oligonucleotide
gaguugggaccaaagacag

SEQ ID NO: 1227378 - RNA, 19 nt, Artificial Sequence
  Description of Artificial Sequence: Synthetic oligonucleotide
agcacgugcauccaagcca

SEQ ID NO: 1227379 - RNA, 19 nt, Artificial Sequence
  Description of Artificial Sequence: Synthetic oligonucleotide
gaccgugcuccacagaagc

SEQ ID NO: 1227380 - RNA, 19 nt, Artificial Sequence
  Description of Artificial Sequence: Synthetic oligonucleotide
cauagcagaaguacaccug

SEQ ID NO: 1227381 - RNA, 19 nt, Artificial Sequence
  Description of Artificial Sequence: Synthetic oligonucleotide
acagaagcugggauggccc

SEQ ID NO: 1227382 - RNA, 19 nt, Artificial Sequence
  Description of Artificial Sequence: Synthetic oligonucleotide
aguauguaccacaguggcc

SEQ ID NO: 1227383 - RNA, 19 nt, Artificial Sequence
  Description of Artificial Sequence: Synthetic oligonucleotide
agcuaacaauaucacagga

SEQ ID NO: 1227384 - RNA, 19 nt, Artificial Sequence
  Description of Artificial Sequence: Synthetic oligonucleotide
ucaugagaccauuuaggaa

SEQ ID NO: 1227385 - RNA, 19 nt, Artificial Sequence
  Description of Artificial Sequence: Synthetic oligonucleotide
aggcaagacauggaaaauc

SEQ ID NO: 1227386 - RNA, 19 nt, Artificial Sequence
  Description of Artificial Sequence: Synthetic oligonucleotide
ugucacuagggguagcccu

SEQ ID NO: 1227387 - RNA, 19 nt, Artificial Sequence
  Description of Artificial Sequence: Synthetic oligonucleotide
acguucacuugguggaugg

SEQ ID NO: 1227388 - RNA, 19 nt, Artificial Sequence
  Description of Artificial Sequence: Synthetic oligonucleotide
cuuaagaaagucauggaau

SEQ ID NO: 1227389 - RNA, 19 nt, Artificial Sequence
  Description of Artificial Sequence: Synthetic oligonucleotide
ugggaccaaagacaggccu

SEQ ID NO: 1227390 - RNA, 19 nt, Artificial Sequence
  Description of Artificial Sequence: Synthetic oligonucleotide
ggucaugagaccauuuagg

SEQ ID NO: 1227391 - RNA, 19 nt, Artificial Sequence
  Description of Artificial Sequence: Synthetic oligonucleotide
agacauggaaaaucacuga

SEQ ID NO: 1227392 - RNA, 19 nt, Artificial Sequence
  Description of Artificial Sequence: Synthetic oligonucleotide
agcuguguggaugaccacg

SEQ ID NO: 1227393 - RNA, 19 nt, Artificial Sequence
  Description of Artificial Sequence: Synthetic oligonucleotide
cagaguguagggauucagc

SEQ ID NO: 1227394 - RNA, 19 nt, Artificial Sequence
  Description of Artificial Sequence: Synthetic oligonucleotide
ugguacugacaguaaaggu

SEQ ID NO: 1227395 - RNA, 19 nt, Artificial Sequence
  Description of Artificial Sequence: Synthetic oligonucleotide
aaaauggcgcugugccuug

SEQ ID NO: 1227396 - RNA, 19 nt, Artificial Sequence
  Description of Artificial Sequence: Synthetic oligonucleotide
uccaguccguauacaagcc

SEQ ID NO: 1227397 - RNA, 19 nt, Artificial Sequence
  Description of Artificial Sequence: Synthetic oligonucleotide
ugacauuaggccccacaac

SEQ ID NO: 1227398 - RNA, 19 nt, Artificial Sequence
  Description of Artificial Sequence: Synthetic oligonucleotide
gccaaaauggcgcugugcc

SEQ ID NO: 1227399 - RNA, 19 nt, Artificial Sequence
  Description of Artificial Sequence: Synthetic oligonucleotide
caugguugacauucuuggc

SEQ ID NO: 1227400 - RNA, 19 nt, Artificial Sequence
  Description of Artificial Sequence: Synthetic oligonucleotide
aacauacacccgaccgugc

SEQ ID NO: 1227401 - RNA, 19 nt, Artificial Sequence
  Description of Artificial Sequence: Synthetic oligonucleotide
aggaaucaauuuugccgac

SEQ ID NO: 1227402 - RNA, 19 nt, Artificial Sequence
  Description of Artificial Sequence: Synthetic oligonucleotide
gugccuaucagucgaaguc

SEQ ID NO: 1227403 - RNA, 19 nt, Artificial Sequence
  Description of Artificial Sequence: Synthetic oligonucleotide
uuuggacuggccuucccaa

SEQ ID NO: 1227404 - RNA, 19 nt, Artificial Sequence
  Description of Artificial Sequence: Synthetic oligonucleotide
gucucucaugaucugauga

SEQ ID NO: 1227405 - RNA, 19 nt, Artificial Sequence
  Description of Artificial Sequence: Synthetic oligonucleotide
uuaaggagagccagaugua

SEQ ID NO: 1227406 - RNA, 19 nt, Artificial Sequence
  Description of Artificial Sequence: Synthetic oligonucleotide
aucacauucugugugcccu

SEQ ID NO: 1227407 - RNA, 19 nt, Artificial Sequence
  Description of Artificial Sequence: Synthetic oligonucleotide
augaccacgugagaucccg

SEQ ID NO: 1227408 - RNA, 19 nt, Artificial Sequence
  Description of Artificial Sequence: Synthetic oligonucleotide
ggggcuuguagccaaaaug

SEQ ID NO: 1227409 - RNA, 19 nt, Artificial Sequence
  Description of Artificial Sequence: Synthetic oligonucleotide
gaugcccgugggucgaagg

SEQ ID NO: 1227410 - RNA, 19 nt, Artificial Sequence
  Description of Artificial Sequence: Synthetic oligonucleotide
auagugcgggccuugcucu

SEQ ID NO: 1227411 - RNA, 19 nt, Artificial Sequence
  Description of Artificial Sequence: Synthetic oligonucleotide
caggaacugaguuccaguc

SEQ ID NO: 1227412 - RNA, 19 nt, Artificial Sequence
  Description of Artificial Sequence: Synthetic oligonucleotide
agcucuuauaaggugauuu

SEQ ID NO: 1227413 - RNA, 19 nt, Artificial Sequence
  Description of Artificial Sequence: Synthetic oligonucleotide
ucaugaucugaugaccuuc

SEQ ID NO: 1227414 - RNA, 19 nt, Artificial Sequence
  Description of Artificial Sequence: Synthetic oligonucleotide
uggacuggccuucccaaac

SEQ ID NO: 1227415 - RNA, 19 nt, Artificial Sequence
  Description of Artificial Sequence: Synthetic oligonucleotide
gcagaaguacaccuggccc

SEQ ID NO: 1227416 - RNA, 19 nt, Artificial Sequence
  Description of Artificial Sequence: Synthetic oligonucleotide
augaucugaugaccuucac

SEQ ID NO: 1227417 - RNA, 19 nt, Artificial Sequence
  Description of Artificial Sequence: Synthetic oligonucleotide
aagacacgcagcucccgga

SEQ ID NO: 1227418 - RNA, 19 nt, Artificial Sequence
  Description of Artificial Sequence: Synthetic oligonucleotide
uggaugaccacgugagauc

SEQ ID NO: 1227419 - RNA, 19 nt, Artificial Sequence
  Description of Artificial Sequence: Synthetic oligonucleotide
cucagaucuguguagguaa

SEQ ID NO: 1227420 - RNA, 19 nt, Artificial Sequence
  Description of Artificial Sequence: Synthetic oligonucleotide
uaaggugauuugucauagc

SEQ ID NO: 1227421 - RNA, 19 nt, Artificial Sequence
  Description of Artificial Sequence: Synthetic oligonucleotide
gaccacgugagaucccgcc

SEQ ID NO: 1227422 - RNA, 19 nt, Artificial Sequence
  Description of Artificial Sequence: Synthetic oligonucleotide
ucucgggccaccagcacgu

SEQ ID NO: 1227423 - RNA, 19 nt, Artificial Sequence
  Description of Artificial Sequence: Synthetic oligonucleotide
caugucacuagggguagcc

SEQ ID NO: 1227424 - RNA, 19 nt, Artificial Sequence
  Description of Artificial Sequence: Synthetic oligonucleotide
cauuaggccccacaacuuc

SEQ ID NO: 1227425 - RNA, 19 nt, Artificial Sequence
  Description of Artificial Sequence: Synthetic oligonucleotide
ugccuuguugguacugaca

SEQ ID NO: 1227426 - RNA, 19 nt, Artificial Sequence
  Description of Artificial Sequence: Synthetic oligonucleotide
aguaagccaaccagcauga

SEQ ID NO: 1227427 - RNA, 19 nt, Artificial Sequence
  Description of Artificial Sequence: Synthetic oligonucleotide
augcccgugggucgaaggg

SEQ ID NO: 1227428 - RNA, 19 nt, Artificial Sequence
  Description of Artificial Sequence: Synthetic oligonucleotide
acaauaucacaggaacuga

SEQ ID NO: 1227429 - RNA, 19 nt, Artificial Sequence
  Description of Artificial Sequence: Synthetic oligonucleotide
caguccguauacaagccuc

SEQ ID NO: 1227430 - RNA, 19 nt, Artificial Sequence
  Description of Artificial Sequence: Synthetic oligonucleotide
uagcagaaguacaccuggc

SEQ ID NO: 1227431 - RNA, 19 nt, Artificial Sequence
  Description of Artificial Sequence: Synthetic oligonucleotide
acauacacccgaccgugcu

SEQ ID NO: 1227432 - RNA, 19 nt, Artificial Sequence
  Description of Artificial Sequence: Synthetic oligonucleotide
caacauacacccgaccgug

SEQ ID NO: 1227433 - RNA, 19 nt, Artificial Sequence
  Description of Artificial Sequence: Synthetic oligonucleotide
ccuccguugaccuuccucc

SEQ ID NO: 1227434 - RNA, 19 nt, Artificial Sequence
  Description of Artificial Sequence: Synthetic oligonucleotide
gccaucaccgggcugaacc

SEQ ID NO: 1227435 - RNA, 19 nt, Artificial Sequence
  Description of Artificial Sequence: Synthetic oligonucleotide
gcucuuauaaggugauuug

SEQ ID NO: 1227436 - RNA, 19 nt, Artificial Sequence
  Description of Artificial Sequence: Synthetic oligonucleotide
augucacuagggguagccc

SEQ ID NO: 1227437 - RNA, 19 nt, Artificial Sequence
  Description of Artificial Sequence: Synthetic oligonucleotide
ucgaagggcacaugucacu

SEQ ID NO: 1227438 - RNA, 19 nt, Artificial Sequence
  Description of Artificial Sequence: Synthetic oligonucleotide
caccauagaugcccguggg

SEQ ID NO: 1227439 - RNA, 19 nt, Artificial Sequence
  Description of Artificial Sequence: Synthetic oligonucleotide
cagucaccugcacaggccc

SEQ ID NO: 1227440 - RNA, 19 nt, Artificial Sequence
  Description of Artificial Sequence: Synthetic oligonucleotide
cuugagucacauccccuug

SEQ ID NO: 1227441 - RNA, 19 nt, Artificial Sequence
  Description of Artificial Sequence: Synthetic oligonucleotide
agcaugguugacauucuug

SEQ ID NO: 1227442 - RNA, 19 nt, Artificial Sequence
  Description of Artificial Sequence: Synthetic oligonucleotide
uccaaggucugcacccaga

SEQ ID NO: 1227443 - RNA, 19 nt, Artificial Sequence
  Description of Artificial Sequence: Synthetic oligonucleotide
uccguauacaagccucaau

SEQ ID NO: 1227444 - RNA, 19 nt, Artificial Sequence
  Description of Artificial Sequence: Synthetic oligonucleotide
agcgcuuugcugcaaggau

SEQ ID NO: 1227445 - RNA, 19 nt, Artificial Sequence
  Description of Artificial Sequence: Synthetic oligonucleotide
uugccaacauacacccgac

SEQ ID NO: 1227446 - RNA, 19 nt, Artificial Sequence
  Description of Artificial Sequence: Synthetic oligonucleotide
gggcacaugucacuagggg

SEQ ID NO: 1227447 - RNA, 19 nt, Artificial Sequence
  Description of Artificial Sequence: Synthetic oligonucleotide
ugccaacauacacccgacc

SEQ ID NO: 1227448 - RNA, 19 nt, Artificial Sequence
  Description of Artificial Sequence: Synthetic oligonucleotide
gguguguacagcaccagug

SEQ ID NO: 1227449 - RNA, 19 nt, Artificial Sequence
  Description of Artificial Sequence: Synthetic oligonucleotide
caaucacauucugugugcc

SEQ ID NO: 1227450 - RNA, 19 nt, Artificial Sequence
  Description of Artificial Sequence: Synthetic oligonucleotide
ggaaacggauuuuaaucca

SEQ ID NO: 1227451 - RNA, 19 nt, Artificial Sequence
  Description of Artificial Sequence: Synthetic oligonucleotide
gcauccaagccacauugcc

SEQ ID NO: 1227452 - RNA, 19 nt, Artificial Sequence
  Description of Artificial Sequence: Synthetic oligonucleotide
auguagcagaagccagguc

SEQ ID NO: 1227453 - RNA, 19 nt, Artificial Sequence
  Description of Artificial Sequence: Synthetic oligonucleotide
acugaguuccaguccguau

SEQ ID NO: 1227454 - RNA, 19 nt, Artificial Sequence
  Description of Artificial Sequence: Synthetic oligonucleotide
gcaugcgugaguugggacc

SEQ ID NO: 1227455 - RNA, 19 nt, Artificial Sequence
  Description of Artificial Sequence: Synthetic oligonucleotide
acucaggugcaggucaaag

SEQ ID NO: 1227456 - RNA, 19 nt, Artificial Sequence
  Description of Artificial Sequence: Synthetic oligonucleotide
agcauucgaacaauaugcu

SEQ ID NO: 1227457 - RNA, 19 nt, Artificial Sequence
  Description of Artificial Sequence: Synthetic oligonucleotide
uccguugaccuuccuccca

SEQ ID NO: 1227458 - RNA, 19 nt, Artificial Sequence
  Description of Artificial Sequence: Synthetic oligonucleotide
aagcgcuuugcugcaagga

SEQ ID NO: 1227459 - RNA, 19 nt, Artificial Sequence
  Description of Artificial Sequence: Synthetic oligonucleotide
uagggguagcccuccguug

SEQ ID NO: 1227460 - RNA, 19 nt, Artificial Sequence
  Description of Artificial Sequence: Synthetic oligonucleotide
agggguagcccuccguuga

SEQ ID NO: 1227461 - RNA, 19 nt, Artificial Sequence
  Description of Artificial Sequence: Synthetic oligonucleotide
gguaaaauggcagggucca

SEQ ID NO: 1227462 - RNA, 19 nt, Artificial Sequence
  Description of Artificial Sequence: Synthetic oligonucleotide
cagaagccaggucugaaga

SEQ ID NO: 1227463 - RNA, 19 nt, Artificial Sequence
  Description of Artificial Sequence: Synthetic oligonucleotide
auggaauuauaaccccuua

SEQ ID NO: 1227464 - RNA, 19 nt, Artificial Sequence
  Description of Artificial Sequence: Synthetic oligonucleotide
caauuuugccgaccagcug

SEQ ID NO: 1227465 - RNA, 19 nt, Artificial Sequence
  Description of Artificial Sequence: Synthetic oligonucleotide
uuguugguacugacaguaa

SEQ ID NO: 1227466 - RNA, 19 nt, Artificial Sequence
  Description of Artificial Sequence: Synthetic oligonucleotide
ggaugaccacgugagaucc

SEQ ID NO: 1227467 - RNA, 19 nt, Artificial Sequence
  Description of Artificial Sequence: Synthetic oligonucleotide
gugagaucccgccacggca

SEQ ID NO: 1227468 - RNA, 19 nt, Artificial Sequence
  Description of Artificial Sequence: Synthetic oligonucleotide
gugggugccuaucagucga

SEQ ID NO: 1227469 - RNA, 19 nt, Artificial Sequence
  Description of Artificial Sequence: Synthetic oligonucleotide
ucauauggggugucuucau

SEQ ID NO: 1227470 - RNA, 19 nt, Artificial Sequence
  Description of Artificial Sequence: Synthetic oligonucleotide
cugcacccagagaauagug

SEQ ID NO: 1227471 - RNA, 19 nt, Artificial Sequence
  Description of Artificial Sequence: Synthetic oligonucleotide
gaugaccuucaccauagau

SEQ ID NO: 1227472 - RNA, 19 nt, Artificial Sequence
  Description of Artificial Sequence: Synthetic oligonucleotide
guggacugccucauauggg

SEQ ID NO: 1227473 - RNA, 19 nt, Artificial Sequence
  Description of Artificial Sequence: Synthetic oligonucleotide
guagaucaggaacugaguu

SEQ ID NO: 1227474 - RNA, 19 nt, Artificial Sequence
  Description of Artificial Sequence: Synthetic oligonucleotide
cuaucagucgaaguccaca

SEQ ID NO: 1227475 - RNA, 19 nt, Artificial Sequence
  Description of Artificial Sequence: Synthetic oligonucleotide
uugccccuguagaaggggu

SEQ ID NO: 1227476 - RNA, 19 nt, Artificial Sequence
  Description of Artificial Sequence: Synthetic oligonucleotide
ggugggugccuaucagucg

SEQ ID NO: 1227477 - RNA, 19 nt, Artificial Sequence
  Description of Artificial Sequence: Synthetic oligonucleotide
gagaauagugcgggccuug

SEQ ID NO: 1227478 - RNA, 19 nt, Artificial Sequence
  Description of Artificial Sequence: Synthetic oligonucleotide
caguaaaggugguguuggc

SEQ ID NO: 1227479 - RNA, 19 nt, Artificial Sequence
  Description of Artificial Sequence: Synthetic oligonucleotide
auaaccccuuaaggagagc

SEQ ID NO: 1227480 - RNA, 19 nt, Artificial Sequence
  Description of Artificial Sequence: Synthetic oligonucleotide
ucccauuggccuccaggac

SEQ ID NO: 1227481 - RNA, 19 nt, Artificial Sequence
  Description of Artificial Sequence: Synthetic oligonucleotide
gccaaaagcuaacaauauc

SEQ ID NO: 1227482 - RNA, 19 nt, Artificial Sequence
  Description of Artificial Sequence: Synthetic oligonucleotide
caggucugaagauggcauc

SEQ ID NO: 1227483 - RNA, 19 nt, Artificial Sequence
  Description of Artificial Sequence: Synthetic oligonucleotide
accacgugagaucccgcca

SEQ ID NO: 1227484 - RNA, 19 nt, Artificial Sequence
  Description of Artificial Sequence: Synthetic oligonucleotide
aggcucaggaccugaguau

SEQ ID NO: 1227485 - RNA, 19 nt, Artificial Sequence
  Description of Artificial Sequence: Synthetic oligonucleotide
cuccguugaccuuccuccc

SEQ ID NO: 1227486 - RNA, 19 nt, Artificial Sequence
  Description of Artificial Sequence: Synthetic oligonucleotide
acuagggguagcccuccgu

SEQ ID NO: 1227487 - RNA, 19 nt, Artificial Sequence
  Description of Artificial Sequence: Synthetic oligonucleotide
gaacccuccaaggucugca

SEQ ID NO: 1227488 - RNA, 19 nt, Artificial Sequence
  Description of Artificial Sequence: Synthetic oligonucleotide
acaugucacuagggguagc

SEQ ID NO: 1227489 - RNA, 19 nt, Artificial Sequence
  Description of Artificial Sequence: Synthetic oligonucleotide
cacgugagaucccgccacg

SEQ ID NO: 1227490 - RNA, 19 nt, Artificial Sequence
  Description of Artificial Sequence: Synthetic oligonucleotide
ugagaccauuuaggaauca

SEQ ID NO: 1227491 - RNA, 19 nt, Artificial Sequence
  Description of Artificial Sequence: Synthetic oligonucleotide
uaauccagacuuggccaga

SEQ ID NO: 1227492 - RNA, 19 nt, Artificial Sequence
  Description of Artificial Sequence: Synthetic oligonucleotide
ugaccacgugagaucccgc

SEQ ID NO: 1227493 - RNA, 19 nt, Artificial Sequence
  Description of Artificial Sequence: Synthetic oligonucleotide
ggaaucaauuuugccgacc

SEQ ID NO: 1227494 - RNA, 19 nt, Artificial Sequence
  Description of Artificial Sequence: Synthetic oligonucleotide
gcauucgaacaauaugcuc

SEQ ID NO: 1227495 - RNA, 19 nt, Artificial Sequence
  Description of Artificial Sequence: Synthetic oligonucleotide
gagaccauuuaggaaucaa

SEQ ID NO: 1227496 - RNA, 19 nt, Artificial Sequence
  Description of Artificial Sequence: Synthetic oligonucleotide
gauggucuuuggacuggcc

SEQ ID NO: 1227497 - RNA, 19 nt, Artificial Sequence
  Description of Artificial Sequence: Synthetic oligonucleotide
uucgaacaauaugcucccc

SEQ ID NO: 1227498 - RNA, 19 nt, Artificial Sequence
  Description of Artificial Sequence: Synthetic oligonucleotide
uuggacuggccuucccaaa

SEQ ID NO: 1227499 - RNA, 19 nt, Artificial Sequence
  Description of Artificial Sequence: Synthetic oligonucleotide
aauggcgcugugccuuguu

SEQ ID NO: 1227500 - RNA, 19 nt, Artificial Sequence
  Description of Artificial Sequence: Synthetic oligonucleotide
aacugaguuccaguccgua

SEQ ID NO: 1227501 - RNA, 19 nt, Artificial Sequence
  Description of Artificial Sequence: Synthetic oligonucleotide
guaaaauggcaggguccag

SEQ ID NO: 1227502 - RNA, 19 nt, Artificial Sequence
  Description of Artificial Sequence: Synthetic oligonucleotide
uagcccuccguugaccuuc

SEQ ID NO: 1227503 - RNA, 19 nt, Artificial Sequence
  Description of Artificial Sequence: Synthetic oligonucleotide
gguggauggucuuuggacu

SEQ ID NO: 1227504 - RNA, 19 nt, Artificial Sequence
  Description of Artificial Sequence: Synthetic oligonucleotide
gcuaacaauaucacaggaa

SEQ ID NO: 1227505 - RNA, 19 nt, Artificial Sequence
  Description of Artificial Sequence: Synthetic oligonucleotide
caugcgugaguugggacca

SEQ ID NO: 1227506 - RNA, 19 nt, Artificial Sequence
  Description of Artificial Sequence: Synthetic oligonucleotide
aguccguauacaagccuca

SEQ ID NO: 1227507 - RNA, 19 nt, Artificial Sequence
  Description of Artificial Sequence: Synthetic oligonucleotide
aacuuccaugcugcuugug

SEQ ID NO: 1227508 - RNA, 19 nt, Artificial Sequence
  Description of Artificial Sequence: Synthetic oligonucleotide
gguuguagaagucucucau

SEQ ID NO: 1227509 - RNA, 19 nt, Artificial Sequence
  Description of Artificial Sequence: Synthetic oligonucleotide
acgugagaucccgccacgg

SEQ ID NO: 1227510 - RNA, 19 nt, Artificial Sequence
  Description of Artificial Sequence: Synthetic oligonucleotide
gaugaccacgugagauccc

SEQ ID NO: 1227511 - RNA, 19 nt, Artificial Sequence
  Description of Artificial Sequence: Synthetic oligonucleotide
acuuggaaacggauuuuaa

SEQ ID NO: 1227512 - RNA, 19 nt, Artificial Sequence
  Description of Artificial Sequence: Synthetic oligonucleotide
cuggccuucccaaacacau

SEQ ID NO: 1227513 - RNA, 19 nt, Artificial Sequence
  Description of Artificial Sequence: Synthetic oligonucleotide
aucaccgggcugaacccuc

SEQ ID NO: 1227514 - RNA, 19 nt, Artificial Sequence
  Description of Artificial Sequence: Synthetic oligonucleotide
cauggaauuauaaccccuu

SEQ ID NO: 1227515 - RNA, 19 nt, Artificial Sequence
  Description of Artificial Sequence: Synthetic oligonucleotide
cucuuauaaggugauuugu

SEQ ID NO: 1227516 - RNA, 19 nt, Artificial Sequence
  Description of Artificial Sequence: Synthetic oligonucleotide
gugccuuguugguacugac

SEQ ID NO: 1227517 - RNA, 19 nt, Artificial Sequence
  Description of Artificial Sequence: Synthetic oligonucleotide
gugccuguggacugccuca

SEQ ID NO: 1227518 - RNA, 19 nt, Artificial Sequence
  Description of Artificial Sequence: Synthetic oligonucleotide
gaucccgccacggcagcug

SEQ ID NO: 1227519 - RNA, 19 nt, Artificial Sequence
  Description of Artificial Sequence: Synthetic oligonucleotide
aaacccuguccuagaacuu

SEQ ID NO: 1227520 - RNA, 19 nt, Artificial Sequence
  Description of Artificial Sequence: Synthetic oligonucleotide
acguaggcccugguuguag

SEQ ID NO: 1227521 - RNA, 19 nt, Artificial Sequence
  Description of Artificial Sequence: Synthetic oligonucleotide
gucacuagggguagcccuc

SEQ ID NO: 1227522 - RNA, 19 nt, Artificial Sequence
  Description of Artificial Sequence: Synthetic oligonucleotide
gagugccgcccgcugcucc

SEQ ID NO: 1227523 - RNA, 19 nt, Artificial Sequence
  Description of Artificial Sequence: Synthetic oligonucleotide
guagccaaaauggcgcugu

SEQ ID NO: 1227524 - RNA, 19 nt, Artificial Sequence
  Description of Artificial Sequence: Synthetic oligonucleotide
agccaguagggcagcagug

SEQ ID NO: 1227525 - RNA, 19 nt, Artificial Sequence
  Description of Artificial Sequence: Synthetic oligonucleotide
ccuguagaagggguggccc

SEQ ID NO: 1227526 - RNA, 19 nt, Artificial Sequence
  Description of Artificial Sequence: Synthetic oligonucleotide
cguauacaagccucaauca

SEQ ID NO: 1227527 - RNA, 19 nt, Artificial Sequence
  Description of Artificial Sequence: Synthetic oligonucleotide
ugggcggagcagccacugc

SEQ ID NO: 1227528 - RNA, 19 nt, Artificial Sequence
  Description of Artificial Sequence: Synthetic oligonucleotide
cggauuuuaauccagacuu

SEQ ID NO: 1227529 - RNA, 19 nt, Artificial Sequence
  Description of Artificial Sequence: Synthetic oligonucleotide
ccucauauggggugucuuc

SEQ ID NO: 1227530 - RNA, 19 nt, Artificial Sequence
  Description of Artificial Sequence: Synthetic oligonucleotide
cacguucacuugguggaug

SEQ ID NO: 1227531 - RNA, 19 nt, Artificial Sequence
  Description of Artificial Sequence: Synthetic oligonucleotide
cagagaauagugcgggccu

SEQ ID NO: 1227532 - RNA, 19 nt, Artificial Sequence
  Description of Artificial Sequence: Synthetic oligonucleotide
cugaacccuccaaggucug

SEQ ID NO: 1227533 - RNA, 19 nt, Artificial Sequence
  Description of Artificial Sequence: Synthetic oligonucleotide
acauuaggccccacaacuu

SEQ ID NO: 1227534 - RNA, 19 nt, Artificial Sequence
  Description of Artificial Sequence: Synthetic oligonucleotide
ugccgaccagcuggcaugc

SEQ ID NO: 1227535 - RNA, 19 nt, Artificial Sequence
  Description of Artificial Sequence: Synthetic oligonucleotide
uggccagaguguagggauu

SEQ ID NO: 1227536 - RNA, 19 nt, Artificial Sequence
  Description of Artificial Sequence: Synthetic oligonucleotide
gaauagugcgggccuugcu

SEQ ID NO: 1227537 - RNA, 19 nt, Artificial Sequence
  Description of Artificial Sequence: Synthetic oligonucleotide
ggcucaggaccugaguaug

SEQ ID NO: 1227538 - RNA, 19 nt, Artificial Sequence
  Description of Artificial Sequence: Synthetic oligonucleotide
ccaucaccgggcugaaccc

SEQ ID NO: 1227539 - RNA, 19 nt, Artificial Sequence
  Description of Artificial Sequence: Synthetic oligonucleotide
gcccugcacguucacuugg

SEQ ID NO: 1227540 - RNA, 19 nt, Artificial Sequence
  Description of Artificial Sequence: Synthetic oligonucleotide
guaagccaaccagcaugag

SEQ ID NO: 1227541 - RNA, 19 nt, Artificial Sequence
  Description of Artificial Sequence: Synthetic oligonucleotide
cacuagggguagcccuccg

SEQ ID NO: 1227542 - RNA, 19 nt, Artificial Sequence
  Description of Artificial Sequence: Synthetic oligonucleotide
acgugcauccaagccacau

SEQ ID NO: 1227543 - RNA, 19 nt, Artificial Sequence
  Description of Artificial Sequence: Synthetic oligonucleotide
ggcauugaggguagccagc

SEQ ID NO: 1227544 - RNA, 19 nt, Artificial Sequence
  Description of Artificial Sequence: Synthetic oligonucleotide
aaauggcgcugugccuugu

SEQ ID NO: 1227545 - RNA, 19 nt, Artificial Sequence
  Description of Artificial Sequence: Synthetic oligonucleotide
auggcccgaaacagccgac

SEQ ID NO: 1227546 - RNA, 19 nt, Artificial Sequence
  Description of Artificial Sequence: Synthetic oligonucleotide
agagaauagugcgggccuu

SEQ ID NO: 1227547 - RNA, 19 nt, Artificial Sequence
  Description of Artificial Sequence: Synthetic oligonucleotide
ccaaccagcaugaguucuc

SEQ ID NO: 1227548 - RNA, 19 nt, Artificial Sequence
  Description of Artificial Sequence: Synthetic oligonucleotide
guugacauucuuggccaaa

SEQ ID NO: 1227549 - RNA, 19 nt, Artificial Sequence
  Description of Artificial Sequence: Synthetic oligonucleotide
ccagcacgugcauccaagc

SEQ ID NO: 1227550 - RNA, 19 nt, Artificial Sequence
  Description of Artificial Sequence: Synthetic oligonucleotide
ugccucauauggggugucu

SEQ ID NO: 1227551 - RNA, 19 nt, Artificial Sequence
  Description of Artificial Sequence: Synthetic oligonucleotide
cgggcugaacccuccaagg

SEQ ID NO: 1227552 - RNA, 19 nt, Artificial Sequence
  Description of Artificial Sequence: Synthetic oligonucleotide
uuuugccgaccagcuggca

SEQ ID NO: 1227553 - RNA, 19 nt, Artificial Sequence
  Description of Artificial Sequence: Synthetic oligonucleotide
gcaucuagaguaagccaac

SEQ ID NO: 1227554 - RNA, 19 nt, Artificial Sequence
  Description of Artificial Sequence: Synthetic oligonucleotide
gcccuugacauuaggcccc

SEQ ID NO: 1227555 - RNA, 19 nt, Artificial Sequence
  Description of Artificial Sequence: Synthetic oligonucleotide
gcacgugcauccaagccac

SEQ ID NO: 1227556 - RNA, 19 nt, Artificial Sequence
  Description of Artificial Sequence: Synthetic oligonucleotide
ccaaacccuguccuagaac

SEQ ID NO: 1227557 - RNA, 19 nt, Artificial Sequence
  Description of Artificial Sequence: Synthetic oligonucleotide
ccccacaacuuccaugcug

SEQ ID NO: 1227558 - RNA, 19 nt, Artificial Sequence
  Description of Artificial Sequence: Synthetic oligonucleotide
guaggcccugguuguagaa

SEQ ID NO: 1227559 - RNA, 19 nt, Artificial Sequence
  Description of Artificial Sequence: Synthetic oligonucleotide
caaggucugcacccagaga

SEQ ID NO: 1227560 - RNA, 19 nt, Artificial Sequence
  Description of Artificial Sequence: Synthetic oligonucleotide
ggugcaggucaaagacacg

SEQ ID NO: 1227561 - RNA, 19 nt, Artificial Sequence
  Description of Artificial Sequence: Synthetic oligonucleotide
acacccgaccgugcuccac

SEQ ID NO: 1227562 - RNA, 19 nt, Artificial Sequence
  Description of Artificial Sequence: Synthetic oligonucleotide
ccacgugagaucccgccac

SEQ ID NO: 1227563 - RNA, 19 nt, Artificial Sequence
  Description of Artificial Sequence: Synthetic oligonucleotide
gaguuccaguccguauaca

SEQ ID NO: 1227564 - RNA, 19 nt, Artificial Sequence
  Description of Artificial Sequence: Synthetic oligonucleotide
gcccgaaacagccgacccc

SEQ ID NO: 1227565 - RNA, 19 nt, Artificial Sequence
  Description of Artificial Sequence: Synthetic oligonucleotide
ccagaguguagggauucag

SEQ ID NO: 1227566 - RNA, 19 nt, Artificial Sequence
  Description of Artificial Sequence: Synthetic oligonucleotide
gaucaggaacugaguucca

SEQ ID NO: 1227567 - RNA, 19 nt, Artificial Sequence
  Description of Artificial Sequence: Synthetic oligonucleotide
ggacuggccuucccaaaca

SEQ ID NO: 1227568 - RNA, 19 nt, Artificial Sequence
  Description of Artificial Sequence: Synthetic oligonucleotide
aacguaggcccugguugua

SEQ ID NO: 1227569 - RNA, 19 nt, Artificial Sequence
  Description of Artificial Sequence: Synthetic oligonucleotide
gcauugaggguagccagca

SEQ ID NO: 1227570 - RNA, 19 nt, Artificial Sequence
  Description of Artificial Sequence: Synthetic oligonucleotide
ccuuaaggagagccagaug

SEQ ID NO: 1227571 - RNA, 19 nt, Artificial Sequence
  Description of Artificial Sequence: Synthetic oligonucleotide
agcccuccguugaccuucc

SEQ ID NO: 1227572 - RNA, 19 nt, Artificial Sequence
  Description of Artificial Sequence: Synthetic oligonucleotide
ccgggcugaacccuccaag

SEQ ID NO: 1227573 - RNA, 19 nt, Artificial Sequence
  Description of Artificial Sequence: Synthetic oligonucleotide
caaaacguaggcccugguu

SEQ ID NO: 1227574 - RNA, 19 nt, Artificial Sequence
  Description of Artificial Sequence: Synthetic oligonucleotide
ggugccuaucagucgaagu

SEQ ID NO: 1227575 - RNA, 19 nt, Artificial Sequence
  Description of Artificial Sequence: Synthetic oligonucleotide
uagugcgggccuugcucuc

SEQ ID NO: 1227576 - RNA, 19 nt, Artificial Sequence
  Description of Artificial Sequence: Synthetic oligonucleotide
uacacccgaccgugcucca

SEQ ID NO: 1227577 - RNA, 19 nt, Artificial Sequence
  Description of Artificial Sequence: Synthetic oligonucleotide
ugucaccuggugggcuuga

SEQ ID NO: 1227578 - RNA, 19 nt, Artificial Sequence
  Description of Artificial Sequence: Synthetic oligonucleotide
ucugugugcccugcacguu

SEQ ID NO: 1227579 - RNA, 19 nt, Artificial Sequence
  Description of Artificial Sequence: Synthetic oligonucleotide
agaugcccgugggucgaag

SEQ ID NO: 1227580 - RNA, 19 nt, Artificial Sequence
  Description of Artificial Sequence: Synthetic oligonucleotide
gaggcaagacauggaaaau

SEQ ID NO: 1227581 - RNA, 19 nt, Artificial Sequence
  Description of Artificial Sequence: Synthetic oligonucleotide
gugggcggagcagccacug

SEQ ID NO: 1227582 - RNA, 19 nt, Artificial Sequence
  Description of Artificial Sequence: Synthetic oligonucleotide
ccuaucagucgaaguccac

SEQ ID NO: 1227583 - RNA, 19 nt, Artificial Sequence
  Description of Artificial Sequence: Synthetic oligonucleotide
cacccgaccgugcuccaca

SEQ ID NO: 1227584 - RNA, 19 nt, Artificial Sequence
  Description of Artificial Sequence: Synthetic oligonucleotide
gugcccugcacguucacuu

SEQ ID NO: 1227585 - RNA, 19 nt, Artificial Sequence
  Description of Artificial Sequence: Synthetic oligonucleotide
gcgugaguugggaccaaag

SEQ ID NO: 1227586 - RNA, 19 nt, Artificial Sequence
  Description of Artificial Sequence: Synthetic oligonucleotide
cugcaaggauaggggugcc

SEQ ID NO: 1227587 - RNA, 19 nt, Artificial Sequence
  Description of Artificial Sequence: Synthetic oligonucleotide
gguagcccuccguugaccu

SEQ ID NO: 1227588 - RNA, 19 nt, Artificial Sequence
  Description of Artificial Sequence: Synthetic oligonucleotide
cagcaagcgcuuugcugca

SEQ ID NO: 1227589 - RNA, 19 nt, Artificial Sequence
  Description of Artificial Sequence: Synthetic oligonucleotide
gagucacauccccuuggau

SEQ ID NO: 1227590 - RNA, 19 nt, Artificial Sequence
  Description of Artificial Sequence: Synthetic oligonucleotide
cagaucuguguagguaaaa

SEQ ID NO: 1227591 - RNA, 19 nt, Artificial Sequence
  Description of Artificial Sequence: Synthetic oligonucleotide
cuagggguagcccuccguu

SEQ ID NO: 1227592 - RNA, 19 nt, Artificial Sequence
  Description of Artificial Sequence: Synthetic oligonucleotide
cucaugaucugaugaccuu

SEQ ID NO: 1227593 - RNA, 19 nt, Artificial Sequence
  Description of Artificial Sequence: Synthetic oligonucleotide
cgugagaucccgccacggc

SEQ ID NO: 1227594 - RNA, 19 nt, Artificial Sequence
  Description of Artificial Sequence: Synthetic oligonucleotide
ccgaccgugcuccacagaa

SEQ ID NO: 1227595 - RNA, 19 nt, Artificial Sequence
  Description of Artificial Sequence: Synthetic oligonucleotide
ggccagaguguagggauuc

SEQ ID NO: 1227596 - RNA, 19 nt, Artificial Sequence
  Description of Artificial Sequence: Synthetic oligonucleotide
agaucccgccacggcagcu

SEQ ID NO: 1227597 - RNA, 19 nt, Artificial Sequence
  Description of Artificial Sequence: Synthetic oligonucleotide
ccuuggauggcagucaccu

SEQ ID NO: 1227598 - RNA, 19 nt, Artificial Sequence
  Description of Artificial Sequence: Synthetic oligonucleotide
guccguauacaagccucaa

SEQ ID NO: 1227599 - RNA, 19 nt, Artificial Sequence
  Description of Artificial Sequence: Synthetic oligonucleotide
gguugacauucuuggccaa

SEQ ID NO: 1227600 - RNA, 19 nt, Artificial Sequence
  Description of Artificial Sequence: Synthetic oligonucleotide
gcuugagucacauccccuu

SEQ ID NO: 1227601 - RNA, 19 nt, Artificial Sequence
  Description of Artificial Sequence: Synthetic oligonucleotide
cauauggggugucuucauu

SEQ ID NO: 1227602 - RNA, 19 nt, Artificial Sequence
  Description of Artificial Sequence: Synthetic oligonucleotide
gggugccuaucagucgaag

SEQ ID NO: 1227603 - RNA, 19 nt, Artificial Sequence
  Description of Artificial Sequence: Synthetic oligonucleotide
gccuaucagucgaagucca

SEQ ID NO: 1227604 - RNA, 19 nt, Artificial Sequence
  Description of Artificial Sequence: Synthetic oligonucleotide
gaggggcuuguagccaaaa

SEQ ID NO: 1227605 - RNA, 19 nt, Artificial Sequence
  Description of Artificial Sequence: Synthetic oligonucleotide
gcuuugcugcaaggauagg

SEQ ID NO: 1227606 - RNA, 19 nt, Artificial Sequence
  Description of Artificial Sequence: Synthetic oligonucleotide
ccaacauacacccgaccgu

SEQ ID NO: 1227607 - RNA, 19 nt, Artificial Sequence
  Description of Artificial Sequence: Synthetic oligonucleotide
ggaaaaucacugauuucuu

SEQ ID NO: 1227608 - RNA, 19 nt, Artificial Sequence
  Description of Artificial Sequence: Synthetic oligonucleotide
ggguagcccuccguugacc

SEQ ID NO: 1227609 - RNA, 19 nt, Artificial Sequence
  Description of Artificial Sequence: Synthetic oligonucleotide
ugagugccgcccgcugcuc

SEQ ID NO: 1227610 - RNA, 19 nt, Artificial Sequence
  Description of Artificial Sequence: Synthetic oligonucleotide
ggaccaaagacaggccugu

SEQ ID NO: 1227611 - RNA, 19 nt, Artificial Sequence
  Description of Artificial Sequence: Synthetic oligonucleotide
cccuccguugaccuuccuc

SEQ ID NO: 1227612 - RNA, 19 nt, Artificial Sequence
  Description of Artificial Sequence: Synthetic oligonucleotide
gggguggcccuugacauua

SEQ ID NO: 1227613 - RNA, 19 nt, Artificial Sequence
  Description of Artificial Sequence: Synthetic oligonucleotide
ccaagccacauugccaaca

SEQ ID NO: 1227614 - RNA, 19 nt, Artificial Sequence
  Description of Artificial Sequence: Synthetic oligonucleotide
ggguguguacagcaccagu

SEQ ID NO: 1227615 - RNA, 19 nt, Artificial Sequence
  Description of Artificial Sequence: Synthetic oligonucleotide
gggucgaagggcacauguc

SEQ ID NO: 1227616 - RNA, 19 nt, Artificial Sequence
  Description of Artificial Sequence: Synthetic oligonucleotide
gggguagcccuccguugac

SEQ ID NO: 1227617 - RNA, 19 nt, Artificial Sequence
  Description of Artificial Sequence: Synthetic oligonucleotide
ccaugagugccgcccgcug

SEQ ID NO: 1227618 - RNA, 19 nt, Artificial Sequence
  Description of Artificial Sequence: Synthetic oligonucleotide
uagaugcccgugggucgaa

SEQ ID NO: 1227619 - RNA, 19 nt, Artificial Sequence
  Description of Artificial Sequence: Synthetic oligonucleotide
gugggucgaagggcacaug

SEQ ID NO: 1227620 - RNA, 19 nt, Artificial Sequence
  Description of Artificial Sequence: Synthetic oligonucleotide
ugccaucaccgggcugaac

SEQ ID NO: 1227621 - RNA, 19 nt, Artificial Sequence
  Description of Artificial Sequence: Synthetic oligonucleotide
gcgcuuugcugcaaggaua

SEQ ID NO: 1227622 - RNA, 19 nt, Artificial Sequence
  Description of Artificial Sequence: Synthetic oligonucleotide
cgaccgugcuccacagaag

SEQ ID NO: 1227623 - RNA, 19 nt, Artificial Sequence
  Description of Artificial Sequence: Synthetic oligonucleotide
cacgugcauccaagccaca

SEQ ID NO: 1227624 - RNA, 19 nt, Artificial Sequence
  Description of Artificial Sequence: Synthetic oligonucleotide
ccccuguagaagggguggc

SEQ ID NO: 1227625 - RNA, 19 nt, Artificial Sequence
  Description of Artificial Sequence: Synthetic oligonucleotide
gcccgugggucgaagggca

SEQ ID NO: 1227626 - RNA, 19 nt, Artificial Sequence
  Description of Artificial Sequence: Synthetic oligonucleotide
ggcccugguuguagaaguc

SEQ ID NO: 1227627 - RNA, 19 nt, Artificial Sequence
  Description of Artificial Sequence: Synthetic oligonucleotide
caucaccgggcugaacccu

SEQ ID NO: 1227628 - RNA, 19 nt, Artificial Sequence
  Description of Artificial Sequence: Synthetic oligonucleotide
ggcuugagucacauccccu

SEQ ID NO: 1227629 - RNA, 19 nt, Artificial Sequence
  Description of Artificial Sequence: Synthetic oligonucleotide
gcccugguuguagaagucu

SEQ ID NO: 1227630 - RNA, 19 nt, Artificial Sequence
  Description of Artificial Sequence: Synthetic oligonucleotide
guagcccuccguugaccuu

SEQ ID NO: 1227631 - RNA, 19 nt, Artificial Sequence
  Description of Artificial Sequence: Synthetic oligonucleotide
cucgggccaccagcacgug

SEQ ID NO: 1227632 - RNA, 19 nt, Artificial Sequence
  Description of Artificial Sequence: Synthetic oligonucleotide
cguaggcccugguuguaga

SEQ ID NO: 1227633 - RNA, 19 nt, Artificial Sequence
  Description of Artificial Sequence: Synthetic oligonucleotide
cagcuggcaugcgugaguu

SEQ ID NO: 1227634 - RNA, 19 nt, Artificial Sequence
  Description of Artificial Sequence: Synthetic oligonucleotide
cccgugggucgaagggcac

SEQ ID NO: 1227635 - RNA, 19 nt, Artificial Sequence
  Description of Artificial Sequence: Synthetic oligonucleotide
gaccaaagacaggccuguu

SEQ ID NO: 1227636 - RNA, 19 nt, Artificial Sequence
  Description of Artificial Sequence: Synthetic oligonucleotide
gcucaggaccugaguaugu

SEQ ID NO: 1227637 - RNA, 19 nt, Artificial Sequence
  Description of Artificial Sequence: Synthetic oligonucleotide
cccuuaaggagagccagau

SEQ ID NO: 1227638 - RNA, 19 nt, Artificial Sequence
  Description of Artificial Sequence: Synthetic oligonucleotide
cccgccacggcagcuguca

SEQ ID NO: 1227639 - RNA, 19 nt, Artificial Sequence
  Description of Artificial Sequence: Synthetic oligonucleotide
cacuugguggauggucuuu

SEQ ID NO: 1227640 - RNA, 19 nt, Artificial Sequence
  Description of Artificial Sequence: Synthetic oligonucleotide
gccgaccagcuggcaugcg

SEQ ID NO: 1227641 - RNA, 19 nt, Artificial Sequence
  Description of Artificial Sequence: Synthetic oligonucleotide
ccaugcugcuuguguagau

SEQ ID NO: 1227642 - RNA, 19 nt, Artificial Sequence
  Description of Artificial Sequence: Synthetic oligonucleotide
ccgccacggcagcugucac

SEQ ID NO: 1227643 - RNA, 19 nt, Artificial Sequence
  Description of Artificial Sequence: Synthetic oligonucleotide
ccgugggucgaagggcaca

SEQ ID NO: 1227644 - RNA, 19 nt, Artificial Sequence
  Description of Artificial Sequence: Synthetic oligonucleotide
gccucauauggggugucuu

SEQ ID NO: 1227645 - RNA, 19 nt, Artificial Sequence
  Description of Artificial Sequence: Synthetic oligonucleotide
ccacaacuuccaugcugcu

SEQ ID NO: 1227646 - RNA, 19 nt, Artificial Sequence
  Description of Artificial Sequence: Synthetic oligonucleotide
gccuguggacugccucaua

SEQ ID NO: 1227647 - RNA, 19 nt, Artificial Sequence
  Description of Artificial Sequence: Synthetic oligonucleotide
gcacguucacuugguggau

SEQ ID NO: 1227648 - RNA, 19 nt, Artificial Sequence
  Description of Artificial Sequence: Synthetic oligonucleotide
cccgaccgugcuccacaga

SEQ ID NO: 1227649 - RNA, 19 nt, Artificial Sequence
  Description of Artificial Sequence: Synthetic oligonucleotide
cccaugagugccgcccgcu

SEQ ID NO: 1227650 - RNA, 19 nt, Artificial Sequence
  Description of Artificial Sequence: Synthetic oligonucleotide
gcccuccguugaccuuccu

SEQ ID NO: 1227651 - RNA, 19 nt, Artificial Sequence
  Description of Artificial Sequence: Synthetic oligonucleotide
uguaguauaucuacaauag

SEQ ID NO: 1227652 - RNA, 19 nt, Artificial Sequence
  Description of Artificial Sequence: Synthetic oligonucleotide
uaguauaucuacaauaggc

SEQ ID NO: 1227653 - RNA, 19 nt, Artificial Sequence
  Description of Artificial Sequence: Synthetic oligonucleotide
cuagaucuaauauaggacc

SEQ ID NO: 1227654 - RNA, 19 nt, Artificial Sequence
  Description of Artificial Sequence: Synthetic oligonucleotide
agcacaaguaccuagaacu

SEQ ID NO: 1227655 - RNA, 19 nt, Artificial Sequence
  Description of Artificial Sequence: Synthetic oligonucleotide
aaacccauccacuaucuuc

SEQ ID NO: 1227656 - RNA, 19 nt, Artificial Sequence
  Description of Artificial Sequence: Synthetic oligonucleotide
cuaauauaggaccuggucc

SEQ ID NO: 1227657 - RNA, 19 nt, Artificial Sequence
  Description of Artificial Sequence: Synthetic oligonucleotide
aaacgaggaaguuccaaac

SEQ ID NO: 1227658 - RNA, 19 nt, Artificial Sequence
  Description of Artificial Sequence: Synthetic oligonucleotide
agguguaucauccauuggg

SEQ ID NO: 1227659 - RNA, 19 nt, Artificial Sequence
  Description of Artificial Sequence: Synthetic oligonucleotide
uauacuauuugucaccgga

SEQ ID NO: 1227660 - RNA, 19 nt, Artificial Sequence
  Description of Artificial Sequence: Synthetic oligonucleotide
agauaauccacuucagcac

SEQ ID NO: 1227661 - RNA, 19 nt, Artificial Sequence
  Description of Artificial Sequence: Synthetic oligonucleotide
auccauuggggcuaaaggc

SEQ ID NO: 1227662 - RNA, 19 nt, Artificial Sequence
  Description of Artificial Sequence: Synthetic oligonucleotide
uaauauaggaccugguccc

SEQ ID NO: 1227663 - RNA, 19 nt, Artificial Sequence
  Description of Artificial Sequence: Synthetic oligonucleotide
auacuugcuucucagcucc

SEQ ID NO: 1227664 - RNA, 19 nt, Artificial Sequence
  Description of Artificial Sequence: Synthetic oligonucleotide
uguugcauuuaccaaugcg

SEQ ID NO: 1227665 - RNA, 19 nt, Artificial Sequence
  Description of Artificial Sequence: Synthetic oligonucleotide
ucuagaucuaauauaggac

SEQ ID NO: 1227666 - RNA, 19 nt, Artificial Sequence
  Description of Artificial Sequence: Synthetic oligonucleotide
aacgacagguguaucaucc

SEQ ID NO: 1227667 - RNA, 19 nt, Artificial Sequence
  Description of Artificial Sequence: Synthetic oligonucleotide
uauuccucaacacauuucu

SEQ ID NO: 1227668 - RNA, 19 nt, Artificial Sequence
  Description of Artificial Sequence: Synthetic oligonucleotide
uccuuuuguaagcagacgc

SEQ ID NO: 1227669 - RNA, 19 nt, Artificial Sequence
  Description of Artificial Sequence: Synthetic oligonucleotide
uauguauuccucaacacau

SEQ ID NO: 1227670 - RNA, 19 nt, Artificial Sequence
  Description of Artificial Sequence: Synthetic oligonucleotide
uccuccauugauuuguacg

SEQ ID NO: 1227671 - RNA, 19 nt, Artificial Sequence
  Description of Artificial Sequence: Synthetic oligonucleotide
aaguaccuagaacuucugc

SEQ ID NO: 1227672 - RNA, 19 nt, Artificial Sequence
  Description of Artificial Sequence: Synthetic oligonucleotide
cuuucgauagccuucaauc

SEQ ID NO: 1227673 - RNA, 19 nt, Artificial Sequence
  Description of Artificial Sequence: Synthetic oligonucleotide
uuguccagaaaacuuguag

SEQ ID NO: 1227674 - RNA, 19 nt, Artificial Sequence
  Description of Artificial Sequence: Synthetic oligonucleotide
uguauacuauuugucaccg

SEQ ID NO: 1227675 - RNA, 19 nt, Artificial Sequence
  Description of Artificial Sequence: Synthetic oligonucleotide
cuacaauaggcucagcagg

SEQ ID NO: 1227676 - RNA, 19 nt, Artificial Sequence
  Description of Artificial Sequence: Synthetic oligonucleotide
aagacuaccuccugaaccu

SEQ ID NO: 1227677 - RNA, 19 nt, Artificial Sequence
  Description of Artificial Sequence: Synthetic oligonucleotide
aauaggcucagcaggaagg

SEQ ID NO: 1227678 - RNA, 19 nt, Artificial Sequence
  Description of Artificial Sequence: Synthetic oligonucleotide
ucuaauauaggaccugguc

SEQ ID NO: 1227679 - RNA, 19 nt, Artificial Sequence
  Description of Artificial Sequence: Synthetic oligonucleotide
acuauguauuccucaacac

SEQ ID NO: 1227680 - RNA, 19 nt, Artificial Sequence
  Description of Artificial Sequence: Synthetic oligonucleotide
gagaaggacuuuuccaugg

SEQ ID NO: 1227681 - RNA, 19 nt, Artificial Sequence
  Description of Artificial Sequence: Synthetic oligonucleotide
uccacuucagcacaaguac

SEQ ID NO: 1227682 - RNA, 19 nt, Artificial Sequence
  Description of Artificial Sequence: Synthetic oligonucleotide
agugaaucuucauucuuuc

SEQ ID NO: 1227683 - RNA, 19 nt, Artificial Sequence
  Description of Artificial Sequence: Synthetic oligonucleotide
acuuguagaagcugaagug

SEQ ID NO: 1227684 - RNA, 19 nt, Artificial Sequence
  Description of Artificial Sequence: Synthetic oligonucleotide
aguaccuagaacuucugcu

SEQ ID NO: 1227685 - RNA, 19 nt, Artificial Sequence
  Description of Artificial Sequence: Synthetic oligonucleotide
uucccaagaaaucuaaguc

SEQ ID NO: 1227686 - RNA, 19 nt, Artificial Sequence
  Description of Artificial Sequence: Synthetic oligonucleotide
uguccagaaaacuuguaga

SEQ ID NO: 1227687 - RNA, 19 nt, Artificial Sequence
  Description of Artificial Sequence: Synthetic oligonucleotide
gacuccuuaaacgaggaag

SEQ ID NO: 1227688 - RNA, 19 nt, Artificial Sequence
  Description of Artificial Sequence: Synthetic oligonucleotide
aagaaaucuaaguccacaa

SEQ ID NO: 1227689 - RNA, 19 nt, Artificial Sequence
  Description of Artificial Sequence: Synthetic oligonucleotide
caagacuaccuccugaacc

SEQ ID NO: 1227690 - RNA, 19 nt, Artificial Sequence
  Description of Artificial Sequence: Synthetic oligonucleotide
uguaucauccauuggggcu

SEQ ID NO: 1227691 - RNA, 19 nt, Artificial Sequence
  Description of Artificial Sequence: Synthetic oligonucleotide
uccuguauacuauuuguca

SEQ ID NO: 1227692 - RNA, 19 nt, Artificial Sequence
  Description of Artificial Sequence: Synthetic oligonucleotide
ucuucugcgaguuccuuag

SEQ ID NO: 1227693 - RNA, 19 nt, Artificial Sequence
  Description of Artificial Sequence: Synthetic oligonucleotide
gaucuaauauaggaccugg

SEQ ID NO: 1227694 - RNA, 19 nt, Artificial Sequence
  Description of Artificial Sequence: Synthetic oligonucleotide
ggcucaaggacacacaagg

SEQ ID NO: 1227695 - RNA, 19 nt, Artificial Sequence
  Description of Artificial Sequence: Synthetic oligonucleotide
uaccuagaacuucugcugg

SEQ ID NO: 1227696 - RNA, 19 nt, Artificial Sequence
  Description of Artificial Sequence: Synthetic oligonucleotide
agaaaucuaaguccacaag

SEQ ID NO: 1227697 - RNA, 19 nt, Artificial Sequence
  Description of Artificial Sequence: Synthetic oligonucleotide
guaguauaucuacaauagg

SEQ ID NO: 1227698 - RNA, 19 nt, Artificial Sequence
  Description of Artificial Sequence: Synthetic oligonucleotide
auugauuuguacgcgaucu

SEQ ID NO: 1227699 - RNA, 19 nt, Artificial Sequence
  Description of Artificial Sequence: Synthetic oligonucleotide
uuucgauagccuucaauca

SEQ ID NO: 1227700 - RNA, 19 nt, Artificial Sequence
  Description of Artificial Sequence: Synthetic oligonucleotide
acgcgaucuucucaaaccc

SEQ ID NO: 1227701 - RNA, 19 nt, Artificial Sequence
  Description of Artificial Sequence: Synthetic oligonucleotide
uagaucuaauauaggaccu

SEQ ID NO: 1227702 - RNA, 19 nt, Artificial Sequence
  Description of Artificial Sequence: Synthetic oligonucleotide
cuguauacuauuugucacc

SEQ ID NO: 1227703 - RNA, 19 nt, Artificial Sequence
  Description of Artificial Sequence: Synthetic oligonucleotide
uuuucuucggcaugggccu

SEQ ID NO: 1227704 - RNA, 19 nt, Artificial Sequence
  Description of Artificial Sequence: Synthetic oligonucleotide
uacaauaggcucagcagga

SEQ ID NO: 1227705 - RNA, 19 nt, Artificial Sequence
  Description of Artificial Sequence: Synthetic oligonucleotide
uacgcgaucuucucaaacc

SEQ ID NO: 1227706 - RNA, 19 nt, Artificial Sequence
  Description of Artificial Sequence: Synthetic oligonucleotide
ccuuaaacgaggaaguucc

SEQ ID NO: 1227707 - RNA, 19 nt, Artificial Sequence
  Description of Artificial Sequence: Synthetic oligonucleotide
cucuagaucuaauauagga

SEQ ID NO: 1227708 - RNA, 19 nt, Artificial Sequence
  Description of Artificial Sequence: Synthetic oligonucleotide
aguacuucguguugagguc

SEQ ID NO: 1227709 - RNA, 19 nt, Artificial Sequence
  Description of Artificial Sequence: Synthetic oligonucleotide
gauaauccacuucagcaca

SEQ ID NO: 1227710 - RNA, 19 nt, Artificial Sequence
  Description of Artificial Sequence: Synthetic oligonucleotide
acagguguaucauccauug

SEQ ID NO: 1227711 - RNA, 19 nt, Artificial Sequence
  Description of Artificial Sequence: Synthetic oligonucleotide
aguauaucuacaauaggcu

SEQ ID NO: 1227712 - RNA, 19 nt, Artificial Sequence
  Description of Artificial Sequence: Synthetic oligonucleotide
uacuauuugucaccggaac

SEQ ID NO: 1227713 - RNA, 19 nt, Artificial Sequence
  Description of Artificial Sequence: Synthetic oligonucleotide
ccagaaaacuuguagaagc

SEQ ID NO: 1227714 - RNA, 19 nt, Artificial Sequence
  Description of Artificial Sequence: Synthetic oligonucleotide
ucucuagaucuaauauagg

SEQ ID NO: 1227715 - RNA, 19 nt, Artificial Sequence
  Description of Artificial Sequence: Synthetic oligonucleotide
aacgaggaaguuccaaacu

SEQ ID NO: 1227716 - RNA, 19 nt, Artificial Sequence
  Description of Artificial Sequence: Synthetic oligonucleotide
ugcuugaggaauucaagac

SEQ ID NO: 1227717 - RNA, 19 nt, Artificial Sequence
  Description of Artificial Sequence: Synthetic oligonucleotide
uagcuugagcuuuucuucg

SEQ ID NO: 1227718 - RNA, 19 nt, Artificial Sequence
  Description of Artificial Sequence: Synthetic oligonucleotide
uaaacgaggaaguuccaaa

SEQ ID NO: 1227719 - RNA, 19 nt, Artificial Sequence
  Description of Artificial Sequence: Synthetic oligonucleotide
ugacacaggaucauccaga

SEQ ID NO: 1227720 - RNA, 19 nt, Artificial Sequence
  Description of Artificial Sequence: Synthetic oligonucleotide
cuugcuacguacuugggca

SEQ ID NO: 1227721 - RNA, 19 nt, Artificial Sequence
  Description of Artificial Sequence: Synthetic oligonucleotide
agugaauggauuugcauuu

SEQ ID NO: 1227722 - RNA, 19 nt, Artificial Sequence
  Description of Artificial Sequence: Synthetic oligonucleotide
agccuugcuacguacuugg

SEQ ID NO: 1227723 - RNA, 19 nt, Artificial Sequence
  Description of Artificial Sequence: Synthetic oligonucleotide
acgaggaaguuccaaacug

SEQ ID NO: 1227724 - RNA, 19 nt, Artificial Sequence
  Description of Artificial Sequence: Synthetic oligonucleotide
aaggagaccucuuggcuca

SEQ ID NO: 1227725 - RNA, 19 nt, Artificial Sequence
  Description of Artificial Sequence: Synthetic oligonucleotide
uacuguaguauaucuacaa

SEQ ID NO: 1227726 - RNA, 19 nt, Artificial Sequence
  Description of Artificial Sequence: Synthetic oligonucleotide
acguacuugggcaaucucc

SEQ ID NO: 1227727 - RNA, 19 nt, Artificial Sequence
  Description of Artificial Sequence: Synthetic oligonucleotide
auuuguacgcgaucuucuc

SEQ ID NO: 1227728 - RNA, 19 nt, Artificial Sequence
  Description of Artificial Sequence: Synthetic oligonucleotide
ugcucuuaggaucucggcu

SEQ ID NO: 1227729 - RNA, 19 nt, Artificial Sequence
  Description of Artificial Sequence: Synthetic oligonucleotide
ucaccauccaugauaggcu

SEQ ID NO: 1227730 - RNA, 19 nt, Artificial Sequence
  Description of Artificial Sequence: Synthetic oligonucleotide
cugauucuccuuuuguaag

SEQ ID NO: 1227731 - RNA, 19 nt, Artificial Sequence
  Description of Artificial Sequence: Synthetic oligonucleotide
guaccuagaacuucugcug

SEQ ID NO: 1227732 - RNA, 19 nt, Artificial Sequence
  Description of Artificial Sequence: Synthetic oligonucleotide
guauaucuacaauaggcuc

SEQ ID NO: 1227733 - RNA, 19 nt, Artificial Sequence
  Description of Artificial Sequence: Synthetic oligonucleotide
ugaugagaaggcuccagca

SEQ ID NO: 1227734 - RNA, 19 nt, Artificial Sequence
  Description of Artificial Sequence: Synthetic oligonucleotide
aaagcuagcgccucugcuu

SEQ ID NO: 1227735 - RNA, 19 nt, Artificial Sequence
  Description of Artificial Sequence: Synthetic oligonucleotide
gacacaggaucauccagag

SEQ ID NO: 1227736 - RNA, 19 nt, Artificial Sequence
  Description of Artificial Sequence: Synthetic oligonucleotide
uuuguacgcgaucuucuca

SEQ ID NO: 1227737 - RNA, 19 nt, Artificial Sequence
  Description of Artificial Sequence: Synthetic oligonucleotide
uguaagcagacgcagugau

SEQ ID NO: 1227738 - RNA, 19 nt, Artificial Sequence
  Description of Artificial Sequence: Synthetic oligonucleotide
uugcauuuaccaaugcguc

SEQ ID NO: 1227739 - RNA, 19 nt, Artificial Sequence
  Description of Artificial Sequence: Synthetic oligonucleotide
ugcauuuaccaaugcgucc

SEQ ID NO: 1227740 - RNA, 19 nt, Artificial Sequence
  Description of Artificial Sequence: Synthetic oligonucleotide
ucggcaugggccuucagug

SEQ ID NO: 1227741 - RNA, 19 nt, Artificial Sequence
  Description of Artificial Sequence: Synthetic oligonucleotide
uggauuugcauuugugccu

SEQ ID NO: 1227742 - RNA, 19 nt, Artificial Sequence
  Description of Artificial Sequence: Synthetic oligonucleotide
gaugagaaggcuccagcac

SEQ ID NO: 1227743 - RNA, 19 nt, Artificial Sequence
  Description of Artificial Sequence: Synthetic oligonucleotide
aguggacucucuuucagga

SEQ ID NO: 1227744 - RNA, 19 nt, Artificial Sequence
  Description of Artificial Sequence: Synthetic oligonucleotide
caugauaggcucugguccc

SEQ ID NO: 1227745 - RNA, 19 nt, Artificial Sequence
  Description of Artificial Sequence: Synthetic oligonucleotide
aacggcuccagcacuggcc

SEQ ID NO: 1227746 - RNA, 19 nt, Artificial Sequence
  Description of Artificial Sequence: Synthetic oligonucleotide
cucggcugcuaucugaacg

SEQ ID NO: 1227747 - RNA, 19 nt, Artificial Sequence
  Description of Artificial Sequence: Synthetic oligonucleotide
uccagaaaacuuguagaag

SEQ ID NO: 1227748 - RNA, 19 nt, Artificial Sequence
  Description of Artificial Sequence: Synthetic oligonucleotide
ugaggaauucaagacuacc

SEQ ID NO: 1227749 - RNA, 19 nt, Artificial Sequence
  Description of Artificial Sequence: Synthetic oligonucleotide
ucccugaugagcaggcucc

SEQ ID NO: 1227750 - RNA, 19 nt, Artificial Sequence
  Description of Artificial Sequence: Synthetic oligonucleotide
aagcuagcgccucugcuug

SEQ ID NO: 1227751 - RNA, 19 nt, Artificial Sequence
  Description of Artificial Sequence: Synthetic oligonucleotide
ugagcuuuucuucggcaug

SEQ ID NO: 1227752 - RNA, 19 nt, Artificial Sequence
  Description of Artificial Sequence: Synthetic oligonucleotide
uucaagacuaccuccugaa

SEQ ID NO: 1227753 - RNA, 19 nt, Artificial Sequence
  Description of Artificial Sequence: Synthetic oligonucleotide
gagaccucuuggcucaagg

SEQ ID NO: 1227754 - RNA, 19 nt, Artificial Sequence
  Description of Artificial Sequence: Synthetic oligonucleotide
ucaaacccauccacuaucu

SEQ ID NO: 1227755 - RNA, 19 nt, Artificial Sequence
  Description of Artificial Sequence: Synthetic oligonucleotide
ucuuucucuagaucuaaua

SEQ ID NO: 1227756 - RNA, 19 nt, Artificial Sequence
  Description of Artificial Sequence: Synthetic oligonucleotide
cugcgaguuccuuaguucc

SEQ ID NO: 1227757 - RNA, 19 nt, Artificial Sequence
  Description of Artificial Sequence: Synthetic oligonucleotide
auaucuacaauaggcucag

SEQ ID NO: 1227758 - RNA, 19 nt, Artificial Sequence
  Description of Artificial Sequence: Synthetic oligonucleotide
acggcuccagcacuggccc

SEQ ID NO: 1227759 - RNA, 19 nt, Artificial Sequence
  Description of Artificial Sequence: Synthetic oligonucleotide
uggggcuaaaggcagcuga

SEQ ID NO: 1227760 - RNA, 19 nt, Artificial Sequence
  Description of Artificial Sequence: Synthetic oligonucleotide
cuugccugcaaagcuagcg

SEQ ID NO: 1227761 - RNA, 19 nt, Artificial Sequence
  Description of Artificial Sequence: Synthetic oligonucleotide
uuucuggccguacuguagu

SEQ ID NO: 1227762 - RNA, 19 nt, Artificial Sequence
  Description of Artificial Sequence: Synthetic oligonucleotide
cuauguauuccucaacaca

SEQ ID NO: 1227763 - RNA, 19 nt, Artificial Sequence
  Description of Artificial Sequence: Synthetic oligonucleotide
uugccugcaaagcuagcgc

SEQ ID NO: 1227764 - RNA, 19 nt, Artificial Sequence
  Description of Artificial Sequence: Synthetic oligonucleotide
agagaaggacuuuuccaug

SEQ ID NO: 1227765 - RNA, 19 nt, Artificial Sequence
  Description of Artificial Sequence: Synthetic oligonucleotide
aaggacuuuuccauggagu

SEQ ID NO: 1227766 - RNA, 19 nt, Artificial Sequence
  Description of Artificial Sequence: Synthetic oligonucleotide
aggggaugagaacggcucc

SEQ ID NO: 1227767 - RNA, 19 nt, Artificial Sequence
  Description of Artificial Sequence: Synthetic oligonucleotide
gugaaucuucauucuuucg

SEQ ID NO: 1227768 - RNA, 19 nt, Artificial Sequence
  Description of Artificial Sequence: Synthetic oligonucleotide
gaccucuuggcucaaggac

SEQ ID NO: 1227769 - RNA, 19 nt, Artificial Sequence
  Description of Artificial Sequence: Synthetic oligonucleotide
uggcucacuaagaggggcg

SEQ ID NO: 1227770 - RNA, 19 nt, Artificial Sequence
  Description of Artificial Sequence: Synthetic oligonucleotide
uccauugauuuguacgcga

SEQ ID NO: 1227771 - RNA, 19 nt, Artificial Sequence
  Description of Artificial Sequence: Synthetic oligonucleotide
gucagagaaggacuuuucc

SEQ ID NO: 1227772 - RNA, 19 nt, Artificial Sequence
  Description of Artificial Sequence: Synthetic oligonucleotide
cuucagcacaaguaccuag

SEQ ID NO: 1227773 - RNA, 19 nt, Artificial Sequence
  Description of Artificial Sequence: Synthetic oligonucleotide
aguuccuuaguuccuucug

SEQ ID NO: 1227774 - RNA, 19 nt, Artificial Sequence
  Description of Artificial Sequence: Synthetic oligonucleotide
gaauggauuugcauuugug

SEQ ID NO: 1227775 - RNA, 19 nt, Artificial Sequence
  Description of Artificial Sequence: Synthetic oligonucleotide
ucuuucgauagccuucaau

SEQ ID NO: 1227776 - RNA, 19 nt, Artificial Sequence
  Description of Artificial Sequence: Synthetic oligonucleotide
ucugcgaguuccuuaguuc

SEQ ID NO: 1227777 - RNA, 19 nt, Artificial Sequence
  Description of Artificial Sequence: Synthetic oligonucleotide
aguucaggucugcaguaag

SEQ ID NO: 1227778 - RNA, 19 nt, Artificial Sequence
  Description of Artificial Sequence: Synthetic oligonucleotide
caucauaggcucugguccc

SEQ ID NO: 1227779 - RNA, 19 nt, Artificial Sequence
  Description of Artificial Sequence: Synthetic oligonucleotide
uccaucauaggcucugguc

SEQ ID NO: 1227780 - RNA, 19 nt, Artificial Sequence
  Description of Artificial Sequence: Synthetic oligonucleotide
uccaugauaggcucugguc

SEQ ID NO: 1227781 - RNA, 19 nt, Artificial Sequence
  Description of Artificial Sequence: Synthetic oligonucleotide
uuguacgcgaucuucucaa

SEQ ID NO: 1227782 - RNA, 19 nt, Artificial Sequence
  Description of Artificial Sequence: Synthetic oligonucleotide
uucggcaugggccuucagu

SEQ ID NO: 1227783 - RNA, 19 nt, Artificial Sequence
  Description of Artificial Sequence: Synthetic oligonucleotide
uccucauuugcuagcuuga

SEQ ID NO: 1227784 - RNA, 19 nt, Artificial Sequence
  Description of Artificial Sequence: Synthetic oligonucleotide
acuguaguauaucuacaau

SEQ ID NO: 1227785 - RNA, 19 nt, Artificial Sequence
  Description of Artificial Sequence: Synthetic oligonucleotide
uucagugccugguaccucu

SEQ ID NO: 1227786 - RNA, 19 nt, Artificial Sequence
  Description of Artificial Sequence: Synthetic oligonucleotide
cacuauguauuccucaaca

SEQ ID NO: 1227787 - RNA, 19 nt, Artificial Sequence
  Description of Artificial Sequence: Synthetic oligonucleotide
ucggcugcuaucugaacga

SEQ ID NO: 1227788 - RNA, 19 nt, Artificial Sequence
  Description of Artificial Sequence: Synthetic oligonucleotide
gauggcuggcugcagucag

SEQ ID NO: 1227789 - RNA, 19 nt, Artificial Sequence
  Description of Artificial Sequence: Synthetic oligonucleotide
acaaguaccuagaacuucu

SEQ ID NO: 1227790 - RNA, 19 nt, Artificial Sequence
  Description of Artificial Sequence: Synthetic oligonucleotide
uccaaguacuucguguuga

SEQ ID NO: 1227791 - RNA, 19 nt, Artificial Sequence
  Description of Artificial Sequence: Synthetic oligonucleotide
ugcguccaggucuuucugg

SEQ ID NO: 1227792 - RNA, 19 nt, Artificial Sequence
  Description of Artificial Sequence: Synthetic oligonucleotide
aggcugacuccuuaaacga

SEQ ID NO: 1227793 - RNA, 19 nt, Artificial Sequence
  Description of Artificial Sequence: Synthetic oligonucleotide
ugauuuguacgcgaucuuc

SEQ ID NO: 1227794 - RNA, 19 nt, Artificial Sequence
  Description of Artificial Sequence: Synthetic oligonucleotide
ugccugcaaagcuagcgcc

SEQ ID NO: 1227795 - RNA, 19 nt, Artificial Sequence
  Description of Artificial Sequence: Synthetic oligonucleotide
accuagaacuucugcuggg

SEQ ID NO: 1227796 - RNA, 19 nt, Artificial Sequence
  Description of Artificial Sequence: Synthetic oligonucleotide
aguuccaaacuguuccaga

SEQ ID NO: 1227797 - RNA, 19 nt, Artificial Sequence
  Description of Artificial Sequence: Synthetic oligonucleotide
cagaucuucuccaccuuag

SEQ ID NO: 1227798 - RNA, 19 nt, Artificial Sequence
  Description of Artificial Sequence: Synthetic oligonucleotide
cagugauuguuuucuaguc

SEQ ID NO: 1227799 - RNA, 19 nt, Artificial Sequence
  Description of Artificial Sequence: Synthetic oligonucleotide
gguguaucauccauugggg

SEQ ID NO: 1227800 - RNA, 19 nt, Artificial Sequence
  Description of Artificial Sequence: Synthetic oligonucleotide
agcuugagcuuuucuucgg

SEQ ID NO: 1227801 - RNA, 19 nt, Artificial Sequence
  Description of Artificial Sequence: Synthetic oligonucleotide
cauacuugcuucucagcuc

SEQ ID NO: 1227802 - RNA, 19 nt, Artificial Sequence
  Description of Artificial Sequence: Synthetic oligonucleotide
uaucugaacgacaggugua

SEQ ID NO: 1227803 - RNA, 19 nt, Artificial Sequence
  Description of Artificial Sequence: Synthetic oligonucleotide
uccuuaaacgaggaaguuc

SEQ ID NO: 1227804 - RNA, 19 nt, Artificial Sequence
  Description of Artificial Sequence: Synthetic oligonucleotide
ugagaacggcuccagcacu

SEQ ID NO: 1227805 - RNA, 19 nt, Artificial Sequence
  Description of Artificial Sequence: Synthetic oligonucleotide
ccuccauugauuuguacgc

SEQ ID NO: 1227806 - RNA, 19 nt, Artificial Sequence
  Description of Artificial Sequence: Synthetic oligonucleotide
cuauuugucaccggaacca

SEQ ID NO: 1227807 - RNA, 19 nt, Artificial Sequence
  Description of Artificial Sequence: Synthetic oligonucleotide
uuaaacgaggaaguuccaa

SEQ ID NO: 1227808 - RNA, 19 nt, Artificial Sequence
  Description of Artificial Sequence: Synthetic oligonucleotide
caauaggcucagcaggaag

SEQ ID NO: 1227809 - RNA, 19 nt, Artificial Sequence
  Description of Artificial Sequence: Synthetic oligonucleotide
guugcauuuaccaaugcgu

SEQ ID NO: 1227810 - RNA, 19 nt, Artificial Sequence
  Description of Artificial Sequence: Synthetic oligonucleotide
ucaagacuaccuccugaac

SEQ ID NO: 1227811 - RNA, 19 nt, Artificial Sequence
  Description of Artificial Sequence: Synthetic oligonucleotide
auccuguauacuauuuguc

SEQ ID NO: 1227812 - RNA, 19 nt, Artificial Sequence
  Description of Artificial Sequence: Synthetic oligonucleotide
ucuuuagucuuguguucca

SEQ ID NO: 1227813 - RNA, 19 nt, Artificial Sequence
  Description of Artificial Sequence: Synthetic oligonucleotide
guguaucauccauuggggc

SEQ ID NO: 1227814 - RNA, 19 nt, Artificial Sequence
  Description of Artificial Sequence: Synthetic oligonucleotide
guauacuauuugucaccgg

SEQ ID NO: 1227815 - RNA, 19 nt, Artificial Sequence
  Description of Artificial Sequence: Synthetic oligonucleotide
gcugcuaucugaacgacag

SEQ ID NO: 1227816 - RNA, 19 nt, Artificial Sequence
  Description of Artificial Sequence: Synthetic oligonucleotide
cugcagucagaucuucucc

SEQ ID NO: 1227817 - RNA, 19 nt, Artificial Sequence
  Description of Artificial Sequence: Synthetic oligonucleotide
cguacuguaguauaucuac

SEQ ID NO: 1227818 - RNA, 19 nt, Artificial Sequence
  Description of Artificial Sequence: Synthetic oligonucleotide
cuaaaggcagcugauucuc

SEQ ID NO: 1227819 - RNA, 19 nt, Artificial Sequence
  Description of Artificial Sequence: Synthetic oligonucleotide
gaggucaccauccaucaua

SEQ ID NO: 1227820 - RNA, 19 nt, Artificial Sequence
  Description of Artificial Sequence: Synthetic oligonucleotide
guccagaaaacuuguagaa

SEQ ID NO: 1227821 - RNA, 19 nt, Artificial Sequence
  Description of Artificial Sequence: Synthetic oligonucleotide
uugagcuuuucuucggcau

SEQ ID NO: 1227822 - RNA, 19 nt, Artificial Sequence
  Description of Artificial Sequence: Synthetic oligonucleotide
agaucuaauauaggaccug

SEQ ID NO: 1227823 - RNA, 19 nt, Artificial Sequence
  Description of Artificial Sequence: Synthetic oligonucleotide
uuaggaucucggcugcuau

SEQ ID NO: 1227824 - RNA, 19 nt, Artificial Sequence
  Description of Artificial Sequence: Synthetic oligonucleotide
cucacuaagaggggcgagg

SEQ ID NO: 1227825 - RNA, 19 nt, Artificial Sequence
  Description of Artificial Sequence: Synthetic oligonucleotide
agacgcagugauuguuuuc

SEQ ID NO: 1227826 - RNA, 19 nt, Artificial Sequence
  Description of Artificial Sequence: Synthetic oligonucleotide
caguggacucucuuucagg

SEQ ID NO: 1227827 - RNA, 19 nt, Artificial Sequence
  Description of Artificial Sequence: Synthetic oligonucleotide
uggcucaaggacacacaag

SEQ ID NO: 1227828 - RNA, 19 nt, Artificial Sequence
  Description of Artificial Sequence: Synthetic oligonucleotide
cuucacuauguauuccuca

SEQ ID NO: 1227829 - RNA, 19 nt, Artificial Sequence
  Description of Artificial Sequence: Synthetic oligonucleotide
cuugagccuugcuacguac

SEQ ID NO: 1227830 - RNA, 19 nt, Artificial Sequence
  Description of Artificial Sequence: Synthetic oligonucleotide
uuguugcauuuaccaaugc

SEQ ID NO: 1227831 - RNA, 19 nt, Artificial Sequence
  Description of Artificial Sequence: Synthetic oligonucleotide
guucccaagaaaucuaagu

SEQ ID NO: 1227832 - RNA, 19 nt, Artificial Sequence
  Description of Artificial Sequence: Synthetic oligonucleotide
ccuguauacuauuugucac

SEQ ID NO: 1227833 - RNA, 19 nt, Artificial Sequence
  Description of Artificial Sequence: Synthetic oligonucleotide
uccgcauccuguauacuau

SEQ ID NO: 1227834 - RNA, 19 nt, Artificial Sequence
  Description of Artificial Sequence: Synthetic oligonucleotide
gcucuuaggaucucggcug

SEQ ID NO: 1227835 - RNA, 19 nt, Artificial Sequence
  Description of Artificial Sequence: Synthetic oligonucleotide
ugauuguuuucuaguccaa

SEQ ID NO: 1227836 - RNA, 19 nt, Artificial Sequence
  Description of Artificial Sequence: Synthetic oligonucleotide
cugaacgacagguguauca

SEQ ID NO: 1227837 - RNA, 19 nt, Artificial Sequence
  Description of Artificial Sequence: Synthetic oligonucleotide
caggaggggaugagaacgg

SEQ ID NO: 1227838 - RNA, 19 nt, Artificial Sequence
  Description of Artificial Sequence: Synthetic oligonucleotide
ugcuucucagcuccaaguu

SEQ ID NO: 1227839 - RNA, 19 nt, Artificial Sequence
  Description of Artificial Sequence: Synthetic oligonucleotide
uucugcgaguuccuuaguu

SEQ ID NO: 1227840 - RNA, 19 nt, Artificial Sequence
  Description of Artificial Sequence: Synthetic oligonucleotide
cucugaaauucucuuucuc

SEQ ID NO: 1227841 - RNA, 19 nt, Artificial Sequence
  Description of Artificial Sequence: Synthetic oligonucleotide
uugagccuugcuacguacu

SEQ ID NO: 1227842 - RNA, 19 nt, Artificial Sequence
  Description of Artificial Sequence: Synthetic oligonucleotide
agaaggacuuuuccaugga

SEQ ID NO: 1227843 - RNA, 19 nt, Artificial Sequence
  Description of Artificial Sequence: Synthetic oligonucleotide
aggggcgaggucaccaucc

SEQ ID NO: 1227844 - RNA, 19 nt, Artificial Sequence
  Description of Artificial Sequence: Synthetic oligonucleotide
uggcccaacaggaggugcc

SEQ ID NO: 1227845 - RNA, 19 nt, Artificial Sequence
  Description of Artificial Sequence: Synthetic oligonucleotide
gaucucggcugcuaucuga

SEQ ID NO: 1227846 - RNA, 19 nt, Artificial Sequence
  Description of Artificial Sequence: Synthetic oligonucleotide
guacuucguguugaggucc

SEQ ID NO: 1227847 - RNA, 19 nt, Artificial Sequence
  Description of Artificial Sequence: Synthetic oligonucleotide
auccgcauccuguauacua

SEQ ID NO: 1227848 - RNA, 19 nt, Artificial Sequence
  Description of Artificial Sequence: Synthetic oligonucleotide
agaccucuuggcucaagga

SEQ ID NO: 1227849 - RNA, 19 nt, Artificial Sequence
  Description of Artificial Sequence: Synthetic oligonucleotide
cauugauuuguacgcgauc

SEQ ID NO: 1227850 - RNA, 19 nt, Artificial Sequence
  Description of Artificial Sequence: Synthetic oligonucleotide
uauuugucaccggaaccac

SEQ ID NO: 1227851 - RNA, 19 nt, Artificial Sequence
  Description of Artificial Sequence: Synthetic oligonucleotide
cuccauugauuuguacgcg

SEQ ID NO: 1227852 - RNA, 19 nt, Artificial Sequence
  Description of Artificial Sequence: Synthetic oligonucleotide
cuuucucuagaucuaauau

SEQ ID NO: 1227853 - RNA, 19 nt, Artificial Sequence
  Description of Artificial Sequence: Synthetic oligonucleotide
ucacuaagaggggcgaggu

SEQ ID NO: 1227854 - RNA, 19 nt, Artificial Sequence
  Description of Artificial Sequence: Synthetic oligonucleotide
gcugacuccuuaaacgagg

SEQ ID NO: 1227855 - RNA, 19 nt, Artificial Sequence
  Description of Artificial Sequence: Synthetic oligonucleotide
ugcgaguuccuuaguuccu

SEQ ID NO: 1227856 - RNA, 19 nt, Artificial Sequence
  Description of Artificial Sequence: Synthetic oligonucleotide
auuuaccaaugcguccagg

SEQ ID NO: 1227857 - RNA, 19 nt, Artificial Sequence
  Description of Artificial Sequence: Synthetic oligonucleotide
ugagccuugcuacguacuu

SEQ ID NO: 1227858 - RNA, 19 nt, Artificial Sequence
  Description of Artificial Sequence: Synthetic oligonucleotide
cucuuaggaucucggcugc

SEQ ID NO: 1227859 - RNA, 19 nt, Artificial Sequence
  Description of Artificial Sequence: Synthetic oligonucleotide
ggcuaaaggcagcugauuc

SEQ ID NO: 1227860 - RNA, 19 nt, Artificial Sequence
  Description of Artificial Sequence: Synthetic oligonucleotide
ucaccggaaccacuggcau

SEQ ID NO: 1227861 - RNA, 19 nt, Artificial Sequence
  Description of Artificial Sequence: Synthetic oligonucleotide
cagucagaucuucuccacc

SEQ ID NO: 1227862 - RNA, 19 nt, Artificial Sequence
  Description of Artificial Sequence: Synthetic oligonucleotide
cuaucugaacgacaggugu

SEQ ID NO: 1227863 - RNA, 19 nt, Artificial Sequence
  Description of Artificial Sequence: Synthetic oligonucleotide
caccauccaucauaggcuc

SEQ ID NO: 1227864 - RNA, 19 nt, Artificial Sequence
  Description of Artificial Sequence: Synthetic oligonucleotide
uucguguugagguccucau

SEQ ID NO: 1227865 - RNA, 19 nt, Artificial Sequence
  Description of Artificial Sequence: Synthetic oligonucleotide
cauccuguauacuauuugu

SEQ ID NO: 1227866 - RNA, 19 nt, Artificial Sequence
  Description of Artificial Sequence: Synthetic oligonucleotide
guacgcgaucuucucaaac

SEQ ID NO: 1227867 - RNA, 19 nt, Artificial Sequence
  Description of Artificial Sequence: Synthetic oligonucleotide
gugggccugacacaggauc

SEQ ID NO: 1227868 - RNA, 19 nt, Artificial Sequence
  Description of Artificial Sequence: Synthetic oligonucleotide
cugcucuuaggaucucggc

SEQ ID NO: 1227869 - RNA, 19 nt, Artificial Sequence
  Description of Artificial Sequence: Synthetic oligonucleotide
cugcuugagccuugcuacg

SEQ ID NO: 1227870 - RNA, 19 nt, Artificial Sequence
  Description of Artificial Sequence: Synthetic oligonucleotide
gacgcagugauuguuuucu

SEQ ID NO: 1227871 - RNA, 19 nt, Artificial Sequence
  Description of Artificial Sequence: Synthetic oligonucleotide
gaccuggucccugaugagc

SEQ ID NO: 1227872 - RNA, 19 nt, Artificial Sequence
  Description of Artificial Sequence: Synthetic oligonucleotide
caaguaccuagaacuucug

SEQ ID NO: 1227873 - RNA, 19 nt, Artificial Sequence
  Description of Artificial Sequence: Synthetic oligonucleotide
cauuggguuucccaagcca

SEQ ID NO: 1227874 - RNA, 19 nt, Artificial Sequence
  Description of Artificial Sequence: Synthetic oligonucleotide
aggaggggaugagaacggc

SEQ ID NO: 1227875 - RNA, 19 nt, Artificial Sequence
  Description of Artificial Sequence: Synthetic oligonucleotide
aggucuuucuggccguacu

SEQ ID NO: 1227876 - RNA, 19 nt, Artificial Sequence
  Description of Artificial Sequence: Synthetic oligonucleotide
uccuuaguuccuucuguuu

SEQ ID NO: 1227877 - RNA, 19 nt, Artificial Sequence
  Description of Artificial Sequence: Synthetic oligonucleotide
cacaaguaccuagaacuuc

SEQ ID NO: 1227878 - RNA, 19 nt, Artificial Sequence
  Description of Artificial Sequence: Synthetic oligonucleotide
gauuuguacgcgaucuucu

SEQ ID NO: 1227879 - RNA, 19 nt, Artificial Sequence
  Description of Artificial Sequence: Synthetic oligonucleotide
uacguacuugggcaaucuc

SEQ ID NO: 1227880 - RNA, 19 nt, Artificial Sequence
  Description of Artificial Sequence: Synthetic oligonucleotide
cuuuagucuuguguuccac

SEQ ID NO: 1227881 - RNA, 19 nt, Artificial Sequence
  Description of Artificial Sequence: Synthetic oligonucleotide
gaacgacagguguaucauc

SEQ ID NO: 1227882 - RNA, 19 nt, Artificial Sequence
  Description of Artificial Sequence: Synthetic oligonucleotide
caacaggaggggaugagaa

SEQ ID NO: 1227883 - RNA, 19 nt, Artificial Sequence
  Description of Artificial Sequence: Synthetic oligonucleotide
cagguguaucauccauugg

SEQ ID NO: 1227884 - RNA, 19 nt, Artificial Sequence
  Description of Artificial Sequence: Synthetic oligonucleotide
aggacacacaagggugggc

SEQ ID NO: 1227885 - RNA, 19 nt, Artificial Sequence
  Description of Artificial Sequence: Synthetic oligonucleotide
ggacacacaagggugggcc

SEQ ID NO: 1227886 - RNA, 19 nt, Artificial Sequence
  Description of Artificial Sequence: Synthetic oligonucleotide
caccauccaugauaggcuc

SEQ ID NO: 1227887 - RNA, 19 nt, Artificial Sequence
  Description of Artificial Sequence: Synthetic oligonucleotide
cccaagaaaucuaagucca

SEQ ID NO: 1227888 - RNA, 19 nt, Artificial Sequence
  Description of Artificial Sequence: Synthetic oligonucleotide
gagaacggcuccagcacug

SEQ ID NO: 1227889 - RNA, 19 nt, Artificial Sequence
  Description of Artificial Sequence: Synthetic oligonucleotide
cuccaaguacuucguguug

SEQ ID NO: 1227890 - RNA, 19 nt, Artificial Sequence
  Description of Artificial Sequence: Synthetic oligonucleotide
aucugaacgacagguguau

SEQ ID NO: 1227891 - RNA, 19 nt, Artificial Sequence
  Description of Artificial Sequence: Synthetic oligonucleotide
ggcaugggccuucagugcc

SEQ ID NO: 1227892 - RNA, 19 nt, Artificial Sequence
  Description of Artificial Sequence: Synthetic oligonucleotide
ugcaguaaguuggucucuc

SEQ ID NO: 1227893 - RNA, 19 nt, Artificial Sequence
  Description of Artificial Sequence: Synthetic oligonucleotide
gcauuuaccaaugcgucca

SEQ ID NO: 1227894 - RNA, 19 nt, Artificial Sequence
  Description of Artificial Sequence: Synthetic oligonucleotide
cugacuccuuaaacgagga

SEQ ID NO: 1227895 - RNA, 19 nt, Artificial Sequence
  Description of Artificial Sequence: Synthetic oligonucleotide
cagagaaggacuuuuccau

SEQ ID NO: 1227896 - RNA, 19 nt, Artificial Sequence
  Description of Artificial Sequence: Synthetic oligonucleotide
uggccguacuguaguauau

SEQ ID NO: 1227897 - RNA, 19 nt, Artificial Sequence
  Description of Artificial Sequence: Synthetic oligonucleotide
ccuugcuacguacuugggc

SEQ ID NO: 1227898 - RNA, 19 nt, Artificial Sequence
  Description of Artificial Sequence: Synthetic oligonucleotide
cugcuaucugaacgacagg

SEQ ID NO: 1227899 - RNA, 19 nt, Artificial Sequence
  Description of Artificial Sequence: Synthetic oligonucleotide
acucucuuucaggagggga

SEQ ID NO: 1227900 - RNA, 19 nt, Artificial Sequence
  Description of Artificial Sequence: Synthetic oligonucleotide
ggucuuucuggccguacug

SEQ ID NO: 1227901 - RNA, 19 nt, Artificial Sequence
  Description of Artificial Sequence: Synthetic oligonucleotide
uggcccaacaggaggggau

SEQ ID NO: 1227902 - RNA, 19 nt, Artificial Sequence
  Description of Artificial Sequence: Synthetic oligonucleotide
acgacagguguaucaucca

SEQ ID NO: 1227903 - RNA, 19 nt, Artificial Sequence
  Description of Artificial Sequence: Synthetic oligonucleotide
auacuauuugucaccggaa

SEQ ID NO: 1227904 - RNA, 19 nt, Artificial Sequence
  Description of Artificial Sequence: Synthetic oligonucleotide
gagccuugcuacguacuug

SEQ ID NO: 1227905 - RNA, 19 nt, Artificial Sequence
  Description of Artificial Sequence: Synthetic oligonucleotide
ugcuugagccuugcuacgu

SEQ ID NO: 1227906 - RNA, 19 nt, Artificial Sequence
  Description of Artificial Sequence: Synthetic oligonucleotide
cugaaccucaccuucugcu

SEQ ID NO: 1227907 - RNA, 19 nt, Artificial Sequence
  Description of Artificial Sequence: Synthetic oligonucleotide
gaacggcuccagcacuggc

SEQ ID NO: 1227908 - RNA, 19 nt, Artificial Sequence
  Description of Artificial Sequence: Synthetic oligonucleotide
uugcuacguacuugggcaa

SEQ ID NO: 1227909 - RNA, 19 nt, Artificial Sequence
  Description of Artificial Sequence: Synthetic oligonucleotide
aucuaauauaggaccuggu

SEQ ID NO: 1227910 - RNA, 19 nt, Artificial Sequence
  Description of Artificial Sequence: Synthetic oligonucleotide
ggcacauuguccagaaaac

SEQ ID NO: 1227911 - RNA, 19 nt, Artificial Sequence
  Description of Artificial Sequence: Synthetic oligonucleotide
guaucauccauuggggcua

SEQ ID NO: 1227912 - RNA, 19 nt, Artificial Sequence
  Description of Artificial Sequence: Synthetic oligonucleotide
uguacgcgaucuucucaaa

SEQ ID NO: 1227913 - RNA, 19 nt, Artificial Sequence
  Description of Artificial Sequence: Synthetic oligonucleotide
ccauuggggcuaaaggcag

SEQ ID NO: 1227914 - RNA, 19 nt, Artificial Sequence
  Description of Artificial Sequence: Synthetic oligonucleotide
cuuaaacgaggaaguucca

SEQ ID NO: 1227915 - RNA, 19 nt, Artificial Sequence
  Description of Artificial Sequence: Synthetic oligonucleotide
ggcgaggucaccauccaug

SEQ ID NO: 1227916 - RNA, 19 nt, Artificial Sequence
  Description of Artificial Sequence: Synthetic oligonucleotide
ggggaggucaccauccaug

SEQ ID NO: 1227917 - RNA, 19 nt, Artificial Sequence
  Description of Artificial Sequence: Synthetic oligonucleotide
ucguguugagguccucaua

SEQ ID NO: 1227918 - RNA, 19 nt, Artificial Sequence
  Description of Artificial Sequence: Synthetic oligonucleotide
gauaggcucuggucccuga

SEQ ID NO: 1227919 - RNA, 19 nt, Artificial Sequence
  Description of Artificial Sequence: Synthetic oligonucleotide
cucugcuugagccuugcua

SEQ ID NO: 1227920 - RNA, 19 nt, Artificial Sequence
  Description of Artificial Sequence: Synthetic oligonucleotide
ucuggccguacuguaguau

SEQ ID NO: 1227921 - RNA, 19 nt, Artificial Sequence
  Description of Artificial Sequence: Synthetic oligonucleotide
auaggcucuggucccugau

SEQ ID NO: 1227922 - RNA, 19 nt, Artificial Sequence
  Description of Artificial Sequence: Synthetic oligonucleotide
agacuaccuccugaaccuc

SEQ ID NO: 1227923 - RNA, 19 nt, Artificial Sequence
  Description of Artificial Sequence: Synthetic oligonucleotide
ggaucauccagaguuccca

SEQ ID NO: 1227924 - RNA, 19 nt, Artificial Sequence
  Description of Artificial Sequence: Synthetic oligonucleotide
ggaggggaggucaccaucc

SEQ ID NO: 1227925 - RNA, 19 nt, Artificial Sequence
  Description of Artificial Sequence: Synthetic oligonucleotide
acuggcccaauaggagggg

SEQ ID NO: 1227926 - RNA, 19 nt, Artificial Sequence
  Description of Artificial Sequence: Synthetic oligonucleotide
cuaaguccacaagcuuggc

SEQ ID NO: 1227927 - RNA, 19 nt, Artificial Sequence
  Description of Artificial Sequence: Synthetic oligonucleotide
agacagaggguuggugaug

SEQ ID NO: 1227928 - RNA, 19 nt, Artificial Sequence
  Description of Artificial Sequence: Synthetic oligonucleotide
gcuaucugaacgacaggug

SEQ ID NO: 1227929 - RNA, 19 nt, Artificial Sequence
  Description of Artificial Sequence: Synthetic oligonucleotide
uccacaagcuuggcuucca

SEQ ID NO: 1227930 - RNA, 19 nt, Artificial Sequence
  Description of Artificial Sequence: Synthetic oligonucleotide
ucucagccuccuccauuga

SEQ ID NO: 1227931 - RNA, 19 nt, Artificial Sequence
  Description of Artificial Sequence: Synthetic oligonucleotide
ccuuuuguaagcagacgca

SEQ ID NO: 1227932 - RNA, 19 nt, Artificial Sequence
  Description of Artificial Sequence: Synthetic oligonucleotide
ugauaggcucuggucccug

SEQ ID NO: 1227933 - RNA, 19 nt, Artificial Sequence
  Description of Artificial Sequence: Synthetic oligonucleotide
gcagugauuguuuucuagu

SEQ ID NO: 1227934 - RNA, 19 nt, Artificial Sequence
  Description of Artificial Sequence: Synthetic oligonucleotide
cuccuccauugauuuguac

SEQ ID NO: 1227935 - RNA, 19 nt, Artificial Sequence
  Description of Artificial Sequence: Synthetic oligonucleotide
ccaaguacuucguguugag

SEQ ID NO: 1227936 - RNA, 19 nt, Artificial Sequence
  Description of Artificial Sequence: Synthetic oligonucleotide
ucugaacgacagguguauc

SEQ ID NO: 1227937 - RNA, 19 nt, Artificial Sequence
  Description of Artificial Sequence: Synthetic oligonucleotide
auaauccacuucagcacaa

SEQ ID NO: 1227938 - RNA, 19 nt, Artificial Sequence
  Description of Artificial Sequence: Synthetic oligonucleotide
guaaguuggucucucucuu

SEQ ID NO: 1227939 - RNA, 19 nt, Artificial Sequence
  Description of Artificial Sequence: Synthetic oligonucleotide
ucucggcugcuaucugaac

SEQ ID NO: 1227940 - RNA, 19 nt, Artificial Sequence
  Description of Artificial Sequence: Synthetic oligonucleotide
aggaggugccaccggcaca

SEQ ID NO: 1227941 - RNA, 19 nt, Artificial Sequence
  Description of Artificial Sequence: Synthetic oligonucleotide
cauuggccgcaguggacuc

SEQ ID NO: 1227942 - RNA, 19 nt, Artificial Sequence
  Description of Artificial Sequence: Synthetic oligonucleotide
ggcgaggucaccauccauc

SEQ ID NO: 1227943 - RNA, 19 nt, Artificial Sequence
  Description of Artificial Sequence: Synthetic oligonucleotide
gcuaaaggcagcugauucu

SEQ ID NO: 1227944 - RNA, 19 nt, Artificial Sequence
  Description of Artificial Sequence: Synthetic oligonucleotide
cuggcccaacaggaggugc

SEQ ID NO: 1227945 - RNA, 19 nt, Artificial Sequence
  Description of Artificial Sequence: Synthetic oligonucleotide
caaugcguccaggucuuuc

SEQ ID NO: 1227946 - RNA, 19 nt, Artificial Sequence
  Description of Artificial Sequence: Synthetic oligonucleotide
cuucguguugagguccuca

SEQ ID NO: 1227947 - RNA, 19 nt, Artificial Sequence
  Description of Artificial Sequence: Synthetic oligonucleotide
cucauccgcauccuguaua

SEQ ID NO: 1227948 - RNA, 19 nt, Artificial Sequence
  Description of Artificial Sequence: Synthetic oligonucleotide
cuggccguacuguaguaua

SEQ ID NO: 1227949 - RNA, 19 nt, Artificial Sequence
  Description of Artificial Sequence: Synthetic oligonucleotide
uaucuacaauaggcucagc

SEQ ID NO: 1227950 - RNA, 19 nt, Artificial Sequence
  Description of Artificial Sequence: Synthetic oligonucleotide
ggcuugccugcaaagcuag

SEQ ID NO: 1227951 - RNA, 19 nt, Artificial Sequence
  Description of Artificial Sequence: Synthetic oligonucleotide
ggcugacuccuuaaacgag

SEQ ID NO: 1227952 - RNA, 19 nt, Artificial Sequence
  Description of Artificial Sequence: Synthetic oligonucleotide
uuggggcuaaaggcagcug

SEQ ID NO: 1227953 - RNA, 19 nt, Artificial Sequence
  Description of Artificial Sequence: Synthetic oligonucleotide
uucuggccguacuguagua

SEQ ID NO: 1227954 - RNA, 19 nt, Artificial Sequence
  Description of Artificial Sequence: Synthetic oligonucleotide
cgcagugauuguuuucuag

SEQ ID NO: 1227955 - RNA, 19 nt, Artificial Sequence
  Description of Artificial Sequence: Synthetic oligonucleotide
gaggggaggucaccaucca

SEQ ID NO: 1227956 - RNA, 19 nt, Artificial Sequence
  Description of Artificial Sequence: Synthetic oligonucleotide
ugcuacguacuugggcaau

SEQ ID NO: 1227957 - RNA, 19 nt, Artificial Sequence
  Description of Artificial Sequence: Synthetic oligonucleotide
auaggaccuggucccugau

SEQ ID NO: 1227958 - RNA, 19 nt, Artificial Sequence
  Description of Artificial Sequence: Synthetic oligonucleotide
cacuaagaggggcgagguc

SEQ ID NO: 1227959 - RNA, 19 nt, Artificial Sequence
  Description of Artificial Sequence: Synthetic oligonucleotide
caagggugggccugacaca

SEQ ID NO: 1227960 - RNA, 19 nt, Artificial Sequence
  Description of Artificial Sequence: Synthetic oligonucleotide
aggggaggucaccauccau

SEQ ID NO: 1227961 - RNA, 19 nt, Artificial Sequence
  Description of Artificial Sequence: Synthetic oligonucleotide
agcagacgcagugauuguu

SEQ ID NO: 1227962 - RNA, 19 nt, Artificial Sequence
  Description of Artificial Sequence: Synthetic oligonucleotide
uuggccgcaguggacucuc

SEQ ID NO: 1227963 - RNA, 19 nt, Artificial Sequence
  Description of Artificial Sequence: Synthetic oligonucleotide
cccaacaggaggugccacc

SEQ ID NO: 1227964 - RNA, 19 nt, Artificial Sequence
  Description of Artificial Sequence: Synthetic oligonucleotide
augauaggcucuggucccu

SEQ ID NO: 1227965 - RNA, 19 nt, Artificial Sequence
  Description of Artificial Sequence: Synthetic oligonucleotide
uaucauccauuggggcuaa

SEQ ID NO: 1227966 - RNA, 19 nt, Artificial Sequence
  Description of Artificial Sequence: Synthetic oligonucleotide
caaagcuagcgccucugcu

SEQ ID NO: 1227967 - RNA, 19 nt, Artificial Sequence
  Description of Artificial Sequence: Synthetic oligonucleotide
acuugcuucucagcuccaa

SEQ ID NO: 1227968 - RNA, 19 nt, Artificial Sequence
  Description of Artificial Sequence: Synthetic oligonucleotide
gggaugagaacggcuccag

SEQ ID NO: 1227969 - RNA, 19 nt, Artificial Sequence
  Description of Artificial Sequence: Synthetic oligonucleotide
acuucguguugagguccuc

SEQ ID NO: 1227970 - RNA, 19 nt, Artificial Sequence
  Description of Artificial Sequence: Synthetic oligonucleotide
accauccaugauaggcucu

SEQ ID NO: 1227971 - RNA, 19 nt, Artificial Sequence
  Description of Artificial Sequence: Synthetic oligonucleotide
guaccucuggccuuccuuu

SEQ ID NO: 1227972 - RNA, 19 nt, Artificial Sequence
  Description of Artificial Sequence: Synthetic oligonucleotide
auuggccgcaguggacucu

SEQ ID NO: 1227973 - RNA, 19 nt, Artificial Sequence
  Description of Artificial Sequence: Synthetic oligonucleotide
cauaggcucuggucccuga

SEQ ID NO: 1227974 - RNA, 19 nt, Artificial Sequence
  Description of Artificial Sequence: Synthetic oligonucleotide
ggucaccauccaugauagg

SEQ ID NO: 1227975 - RNA, 19 nt, Artificial Sequence
  Description of Artificial Sequence: Synthetic oligonucleotide
accaaugcguccaggucuu

SEQ ID NO: 1227976 - RNA, 19 nt, Artificial Sequence
  Description of Artificial Sequence: Synthetic oligonucleotide
ccaagccagccucauccgc

SEQ ID NO: 1227977 - RNA, 19 nt, Artificial Sequence
  Description of Artificial Sequence: Synthetic oligonucleotide
gccguacuguaguauaucu

SEQ ID NO: 1227978 - RNA, 19 nt, Artificial Sequence
  Description of Artificial Sequence: Synthetic oligonucleotide
cuuaggaucucggcugcua

SEQ ID NO: 1227979 - RNA, 19 nt, Artificial Sequence
  Description of Artificial Sequence: Synthetic oligonucleotide
acgcagugauuguuuucua

SEQ ID NO: 1227980 - RNA, 19 nt, Artificial Sequence
  Description of Artificial Sequence: Synthetic oligonucleotide
guccucauacuugcuucuc

SEQ ID NO: 1227981 - RNA, 19 nt, Artificial Sequence
  Description of Artificial Sequence: Synthetic oligonucleotide
agcuagcgccucugcuuga

SEQ ID NO: 1227982 - RNA, 19 nt, Artificial Sequence
  Description of Artificial Sequence: Synthetic oligonucleotide
cagacagaggguuggugau

SEQ ID NO: 1227983 - RNA, 19 nt, Artificial Sequence
  Description of Artificial Sequence: Synthetic oligonucleotide
ccgcaguggacucucuuuc

SEQ ID NO: 1227984 - RNA, 19 nt, Artificial Sequence
  Description of Artificial Sequence: Synthetic oligonucleotide
caggucuuucuggccguac

SEQ ID NO: 1227985 - RNA, 19 nt, Artificial Sequence
  Description of Artificial Sequence: Synthetic oligonucleotide
accauccaucauaggcucu

SEQ ID NO: 1227986 - RNA, 19 nt, Artificial Sequence
  Description of Artificial Sequence: Synthetic oligonucleotide
uugcuagcuugagcuuuuc

SEQ ID NO: 1227987 - RNA, 19 nt, Artificial Sequence
  Description of Artificial Sequence: Synthetic oligonucleotide
gcuagcgccucugcuugag

SEQ ID NO: 1227988 - RNA, 19 nt, Artificial Sequence
  Description of Artificial Sequence: Synthetic oligonucleotide
cagaggguuggugauggcu

SEQ ID NO: 1227989 - RNA, 19 nt, Artificial Sequence
  Description of Artificial Sequence: Synthetic oligonucleotide
gcucacuaagaggggcgag

SEQ ID NO: 1227990 - RNA, 19 nt, Artificial Sequence
  Description of Artificial Sequence: Synthetic oligonucleotide
ggccguacuguaguauauc

SEQ ID NO: 1227991 - RNA, 19 nt, Artificial Sequence
  Description of Artificial Sequence: Synthetic oligonucleotide
gcuacguacuugggcaauc

SEQ ID NO: 1227992 - RNA, 19 nt, Artificial Sequence
  Description of Artificial Sequence: Synthetic oligonucleotide
cuucggcaugggccuucag

SEQ ID NO: 1227993 - RNA, 19 nt, Artificial Sequence
  Description of Artificial Sequence: Synthetic oligonucleotide
cuacguacuugggcaaucu

SEQ ID NO: 1227994 - RNA, 19 nt, Artificial Sequence
  Description of Artificial Sequence: Synthetic oligonucleotide
ccugcaaagcuagcgccuc

SEQ ID NO: 1227995 - RNA, 19 nt, Artificial Sequence
  Description of Artificial Sequence: Synthetic oligonucleotide
cccaauaggaggggagguc

SEQ ID NO: 1227996 - RNA, 19 nt, Artificial Sequence
  Description of Artificial Sequence: Synthetic oligonucleotide
ggcauuggccgcaguggac

SEQ ID NO: 1227997 - RNA, 19 nt, Artificial Sequence
  Description of Artificial Sequence: Synthetic oligonucleotide
caccuucugcucuuaggau

SEQ ID NO: 1227998 - RNA, 19 nt, Artificial Sequence
  Description of Artificial Sequence: Synthetic oligonucleotide
ggcugcuaucugaacgaca

SEQ ID NO: 1227999 - RNA, 19 nt, Artificial Sequence
  Description of Artificial Sequence: Synthetic oligonucleotide
ggcucacuaagaggggcga

SEQ ID NO: 1228000 - RNA, 19 nt, Artificial Sequence
  Description of Artificial Sequence: Synthetic oligonucleotide
gguaccucuggccuuccuu

SEQ ID NO: 1228001 - RNA, 19 nt, Artificial Sequence
  Description of Artificial Sequence: Synthetic oligonucleotide
gcauuggccgcaguggacu

SEQ ID NO: 1228002 - RNA, 19 nt, Artificial Sequence
  Description of Artificial Sequence: Synthetic oligonucleotide
cacaagcuuggcuuccauu

SEQ ID NO: 1228003 - RNA, 19 nt, Artificial Sequence
  Description of Artificial Sequence: Synthetic oligonucleotide
cugguaccucuggccuucc

SEQ ID NO: 1228004 - RNA, 19 nt, Artificial Sequence
  Description of Artificial Sequence: Synthetic oligonucleotide
cagacgcagugauuguuuu

SEQ ID NO: 1228005 - RNA, 19 nt, Artificial Sequence
  Description of Artificial Sequence: Synthetic oligonucleotide
ccguacuguaguauaucua

SEQ ID NO: 1228006 - RNA, 19 nt, Artificial Sequence
  Description of Artificial Sequence: Synthetic oligonucleotide
gcuugagccuugcuacgua

SEQ ID NO: 1228007 - RNA, 19 nt, Artificial Sequence
  Description of Artificial Sequence: Synthetic oligonucleotide
ggaggggaucaaauuucaa

SEQ ID NO: 1228008 - RNA, 19 nt, Artificial Sequence
  Description of Artificial Sequence: Synthetic oligonucleotide
guaagcagacgcagugauu

SEQ ID NO: 1228009 - RNA, 19 nt, Artificial Sequence
  Description of Artificial Sequence: Synthetic oligonucleotide
gcgaucuucucaaacccau

SEQ ID NO: 1228010 - RNA, 19 nt, Artificial Sequence
  Description of Artificial Sequence: Synthetic oligonucleotide
ccauugauuuguacgcgau

SEQ ID NO: 1228011 - RNA, 19 nt, Artificial Sequence
  Description of Artificial Sequence: Synthetic oligonucleotide
ggcccaacaggaggggcga

SEQ ID NO: 1228012 - RNA, 19 nt, Artificial Sequence
  Description of Artificial Sequence: Synthetic oligonucleotide
ggccugacacaggaucauc

SEQ ID NO: 1228013 - RNA, 19 nt, Artificial Sequence
  Description of Artificial Sequence: Synthetic oligonucleotide
cuccagcacuggcucacua

SEQ ID NO: 1228014 - RNA, 19 nt, Artificial Sequence
  Description of Artificial Sequence: Synthetic oligonucleotide
cagcuccaaguucuccugu

SEQ ID NO: 1228015 - RNA, 19 nt, Artificial Sequence
  Description of Artificial Sequence: Synthetic oligonucleotide
cgcgaucuucucaaaccca

SEQ ID NO: 1228016 - RNA, 19 nt, Artificial Sequence
  Description of Artificial Sequence: Synthetic oligonucleotide
cugcaaagcuagcgccucu

SEQ ID NO: 1228017 - RNA, 19 nt, Artificial Sequence
  Description of Artificial Sequence: Synthetic oligonucleotide
cugcaguaaguuggucucu

SEQ ID NO: 1228018 - RNA, 19 nt, Artificial Sequence
  Description of Artificial Sequence: Synthetic oligonucleotide
ccaucuccaaguacuucgu

SEQ ID NO: 1228019 - RNA, 19 nt, Artificial Sequence
  Description of Artificial Sequence: Synthetic oligonucleotide
ggcccaacaggaggugcca

SEQ ID NO: 1228020 - RNA, 19 nt, Artificial Sequence
  Description of Artificial Sequence: Synthetic oligonucleotide
cuucugcgaguuccuuagu

SEQ ID NO: 1228021 - RNA, 19 nt, Artificial Sequence
  Description of Artificial Sequence: Synthetic oligonucleotide
gcacaaguaccuagaacuu

SEQ ID NO: 1228022 - RNA, 19 nt, Artificial Sequence
  Description of Artificial Sequence: Synthetic oligonucleotide
cgcaguggacucucuuuca

SEQ ID NO: 1228023 - RNA, 19 nt, Artificial Sequence
  Description of Artificial Sequence: Synthetic oligonucleotide
gccgcaguggacucucuuu

SEQ ID NO: 1228024 - RNA, 19 nt, Artificial Sequence
  Description of Artificial Sequence: Synthetic oligonucleotide
gcagacgcagugauuguuu

SEQ ID NO: 1228025 - RNA, 19 nt, Artificial Sequence
  Description of Artificial Sequence: Synthetic oligonucleotide
ggcuuccauuggguuuccc

SEQ ID NO: 1228026 - RNA, 19 nt, Artificial Sequence
  Description of Artificial Sequence: Synthetic oligonucleotide
aggagaccucuuggcucaa

SEQ ID NO: 1228027 - RNA, 19 nt, Artificial Sequence
  Description of Artificial Sequence: Synthetic oligonucleotide
ggggcuaaaggcagcugau

SEQ ID NO: 1228028 - RNA, 19 nt, Artificial Sequence
  Description of Artificial Sequence: Synthetic oligonucleotide
caccggaaccacuggcauu

SEQ ID NO: 1228029 - RNA, 19 nt, Artificial Sequence
  Description of Artificial Sequence: Synthetic oligonucleotide
gccugcaaagcuagcgccu

SEQ ID NO: 1228030 - RNA, 19 nt, Artificial Sequence
  Description of Artificial Sequence: Synthetic oligonucleotide
aucauccauuggggcuaaa

SEQ ID NO: 1228031 - RNA, 19 nt, Artificial Sequence
  Description of Artificial Sequence: Synthetic oligonucleotide
gcccaauaggaggggaggu

SEQ ID NO: 1228032 - RNA, 19 nt, Artificial Sequence
  Description of Artificial Sequence: Synthetic oligonucleotide
cauccgcauccuguauacu

SEQ ID NO: 1228033 - RNA, 19 nt, Artificial Sequence
  Description of Artificial Sequence: Synthetic oligonucleotide
ccuccuccauugauuugua

SEQ ID NO: 1228034 - RNA, 19 nt, Artificial Sequence
  Description of Artificial Sequence: Synthetic oligonucleotide
gggcuaaaggcagcugauu

SEQ ID NO: 1228035 - RNA, 19 nt, Artificial Sequence
  Description of Artificial Sequence: Synthetic oligonucleotide
cggcugcuaucugaacgac

SEQ ID NO: 1228036 - RNA, 19 nt, Artificial Sequence
  Description of Artificial Sequence: Synthetic oligonucleotide
gcaugggccuucagugccu

SEQ ID NO: 1228037 - RNA, 19 nt, Artificial Sequence
  Description of Artificial Sequence: Synthetic oligonucleotide
cgauagccuucaaucacuu

SEQ ID NO: 1228038 - RNA, 19 nt, Artificial Sequence
  Description of Artificial Sequence: Synthetic oligonucleotide
cgcauccuguauacuauuu

SEQ ID NO: 1228039 - RNA, 19 nt, Artificial Sequence
  Description of Artificial Sequence: Synthetic oligonucleotide
ggccgcaguggacucucuu

SEQ ID NO: 1228040 - RNA, 19 nt, Artificial Sequence
  Description of Artificial Sequence: Synthetic oligonucleotide
ccucauccgcauccuguau

SEQ ID NO: 1228041 - RNA, 19 nt, Artificial Sequence
  Description of Artificial Sequence: Synthetic oligonucleotide
ccgcauccuguauacuauu

SEQ ID NO: 1228042 - RNA, 19 nt, Artificial Sequence
  Description of Artificial Sequence: Synthetic oligonucleotide
ccggcacauuguccagaaa

SEQ ID NO: 1228043 - RNA, 19 nt, Artificial Sequence
  Description of Artificial Sequence: Synthetic oligonucleotide
ccacaagcuuggcuuccau

SEQ ID NO: 1228044 - RNA, 19 nt, Artificial Sequence
  Description of Artificial Sequence: Synthetic oligonucleotide
ccaaugcguccaggucuuu

SEQ ID NO: 1228045 - RNA, 19 nt, Artificial Sequence
  Description of Artificial Sequence: Synthetic oligonucleotide
aaaacuguaccuucuaagc

SEQ ID NO: 1228046 - RNA, 19 nt, Artificial Sequence
  Description of Artificial Sequence: Synthetic oligonucleotide
uaugaaaagcuacugaugc

SEQ ID NO: 1228047 - RNA, 19 nt, Artificial Sequence
  Description of Artificial Sequence: Synthetic oligonucleotide
aaucaauucucaucugugc

SEQ ID NO: 1228048 - RNA, 19 nt, Artificial Sequence
  Description of Artificial Sequence: Synthetic oligonucleotide
cuuaacaagaauuucguag

SEQ ID NO: 1228049 - RNA, 19 nt, Artificial Sequence
  Description of Artificial Sequence: Synthetic oligonucleotide
uauucugucaccauugaag

SEQ ID NO: 1228050 - RNA, 19 nt, Artificial Sequence
  Description of Artificial Sequence: Synthetic oligonucleotide
gauaucucgaauuucuagg

SEQ ID NO: 1228051 - RNA, 19 nt, Artificial Sequence
  Description of Artificial Sequence: Synthetic oligonucleotide
auuuaaaugaucaucacag

SEQ ID NO: 1228052 - RNA, 19 nt, Artificial Sequence
  Description of Artificial Sequence: Synthetic oligonucleotide
uuuaauaccagauuuggaa

SEQ ID NO: 1228053 - RNA, 19 nt, Artificial Sequence
  Description of Artificial Sequence: Synthetic oligonucleotide
uggauaaguacuaucagcc

SEQ ID NO: 1228054 - RNA, 19 nt, Artificial Sequence
  Description of Artificial Sequence: Synthetic oligonucleotide
aaaagcaugccacaaauaa

SEQ ID NO: 1228055 - RNA, 19 nt, Artificial Sequence
  Description of Artificial Sequence: Synthetic oligonucleotide
uguggaaucgaacuucugg

SEQ ID NO: 1228056 - RNA, 19 nt, Artificial Sequence
  Description of Artificial Sequence: Synthetic oligonucleotide
uuuacauauaucugaaagc

SEQ ID NO: 1228057 - RNA, 19 nt, Artificial Sequence
  Description of Artificial Sequence: Synthetic oligonucleotide
uuguacuccauuuaaauga

SEQ ID NO: 1228058 - RNA, 19 nt, Artificial Sequence
  Description of Artificial Sequence: Synthetic oligonucleotide
auaagauagaugcaggcag

SEQ ID NO: 1228059 - RNA, 19 nt, Artificial Sequence
  Description of Artificial Sequence: Synthetic oligonucleotide
aucauaaguaagcuguggc

SEQ ID NO: 1228060 - RNA, 19 nt, Artificial Sequence
  Description of Artificial Sequence: Synthetic oligonucleotide
ugccuuaacaagaauuucg

SEQ ID NO: 1228061 - RNA, 19 nt, Artificial Sequence
  Description of Artificial Sequence: Synthetic oligonucleotide
guaacuaucaugcacacga

SEQ ID NO: 1228062 - RNA, 19 nt, Artificial Sequence
  Description of Artificial Sequence: Synthetic oligonucleotide
agaaauauuugcaaguaac

SEQ ID NO: 1228063 - RNA, 19 nt, Artificial Sequence
  Description of Artificial Sequence: Synthetic oligonucleotide
auaucucgaauuucuaggc

SEQ ID NO: 1228064 - RNA, 19 nt, Artificial Sequence
  Description of Artificial Sequence: Synthetic oligonucleotide
uuucuauccgaauucgugg

SEQ ID NO: 1228065 - RNA, 19 nt, Artificial Sequence
  Description of Artificial Sequence: Synthetic oligonucleotide
aacuaucaugcacacgagc

SEQ ID NO: 1228066 - RNA, 19 nt, Artificial Sequence
  Description of Artificial Sequence: Synthetic oligonucleotide
gauaaguacuaucagcccc

SEQ ID NO: 1228067 - RNA, 19 nt, Artificial Sequence
  Description of Artificial Sequence: Synthetic oligonucleotide
aauguagaagccugucugg

SEQ ID NO: 1228068 - RNA, 19 nt, Artificial Sequence
  Description of Artificial Sequence: Synthetic oligonucleotide
aaauuauugaaauguacuu

SEQ ID NO: 1228069 - RNA, 19 nt, Artificial Sequence
  Description of Artificial Sequence: Synthetic oligonucleotide
agaauuucguaguuggagg

SEQ ID NO: 1228070 - RNA, 19 nt, Artificial Sequence
  Description of Artificial Sequence: Synthetic oligonucleotide
agugguaauaucaucauuc

SEQ ID NO: 1228071 - RNA, 19 nt, Artificial Sequence
  Description of Artificial Sequence: Synthetic oligonucleotide
uuaacaagaauuucguagu

SEQ ID NO: 1228072 - RNA, 19 nt, Artificial Sequence
  Description of Artificial Sequence: Synthetic oligonucleotide
uugcaaguaacauaaauuc

SEQ ID NO: 1228073 - RNA, 19 nt, Artificial Sequence
  Description of Artificial Sequence: Synthetic oligonucleotide
uucagcauacguaagagaa

SEQ ID NO: 1228074 - RNA, 19 nt, Artificial Sequence
  Description of Artificial Sequence: Synthetic oligonucleotide
uuacauauaucugaaagcu

SEQ ID NO: 1228075 - RNA, 19 nt, Artificial Sequence
  Description of Artificial Sequence: Synthetic oligonucleotide
uuuggaauuaacaccacaa

SEQ ID NO: 1228076 - RNA, 19 nt, Artificial Sequence
  Description of Artificial Sequence: Synthetic oligonucleotide
acuaucagccccaauagcc

SEQ ID NO: 1228077 - RNA, 19 nt, Artificial Sequence
  Description of Artificial Sequence: Synthetic oligonucleotide
uuaaccuugucaaacacau

SEQ ID NO: 1228078 - RNA, 19 nt, Artificial Sequence
  Description of Artificial Sequence: Synthetic oligonucleotide
aaaguaacuaucaugcaca

SEQ ID NO: 1228079 - RNA, 19 nt, Artificial Sequence
  Description of Artificial Sequence: Synthetic oligonucleotide
ucaguaauacuccacggca

SEQ ID NO: 1228080 - RNA, 19 nt, Artificial Sequence
  Description of Artificial Sequence: Synthetic oligonucleotide
aaaagcuacugaugcgcgc

SEQ ID NO: 1228081 - RNA, 19 nt, Artificial Sequence
  Description of Artificial Sequence: Synthetic oligonucleotide
accacaauugcauucuuuc

SEQ ID NO: 1228082 - RNA, 19 nt, Artificial Sequence
  Description of Artificial Sequence: Synthetic oligonucleotide
gaauuucguaguuggaggg

SEQ ID NO: 1228083 - RNA, 19 nt, Artificial Sequence
  Description of Artificial Sequence: Synthetic oligonucleotide
gauagaugcaggcagcagc

SEQ ID NO: 1228084 - RNA, 19 nt, Artificial Sequence
  Description of Artificial Sequence: Synthetic oligonucleotide
aauauaggcuucuucacuu

SEQ ID NO: 1228085 - RNA, 19 nt, Artificial Sequence
  Description of Artificial Sequence: Synthetic oligonucleotide
acaacuggguaugaaaagc

SEQ ID NO: 1228086 - RNA, 19 nt, Artificial Sequence
  Description of Artificial Sequence: Synthetic oligonucleotide
aacaauaauucuccguccu

SEQ ID NO: 1228087 - RNA, 19 nt, Artificial Sequence
  Description of Artificial Sequence: Synthetic oligonucleotide
ucaugcucaagcaacaaaa

SEQ ID NO: 1228088 - RNA, 19 nt, Artificial Sequence
  Description of Artificial Sequence: Synthetic oligonucleotide
aaguaacuaucaugcacac

SEQ ID NO: 1228089 - RNA, 19 nt, Artificial Sequence
  Description of Artificial Sequence: Synthetic oligonucleotide
uuucaugucguucucagua

SEQ ID NO: 1228090 - RNA, 19 nt, Artificial Sequence
  Description of Artificial Sequence: Synthetic oligonucleotide
uaguuuauuuaguccacgg

SEQ ID NO: 1228091 - RNA, 19 nt, Artificial Sequence
  Description of Artificial Sequence: Synthetic oligonucleotide
aauuaaucugcucuucaau

SEQ ID NO: 1228092 - RNA, 19 nt, Artificial Sequence
  Description of Artificial Sequence: Synthetic oligonucleotide
ucuugacucuuuaauacca

SEQ ID NO: 1228093 - RNA, 19 nt, Artificial Sequence
  Description of Artificial Sequence: Synthetic oligonucleotide
aguacuaucagccccaaua

SEQ ID NO: 1228094 - RNA, 19 nt, Artificial Sequence
  Description of Artificial Sequence: Synthetic oligonucleotide
ugugcuucagcauacguaa

SEQ ID NO: 1228095 - RNA, 19 nt, Artificial Sequence
  Description of Artificial Sequence: Synthetic oligonucleotide
auuguacuccauuuaaaug

SEQ ID NO: 1228096 - RNA, 19 nt, Artificial Sequence
  Description of Artificial Sequence: Synthetic oligonucleotide
agagaauauaggcuucuuc

SEQ ID NO: 1228097 - RNA, 19 nt, Artificial Sequence
  Description of Artificial Sequence: Synthetic oligonucleotide
ucuaggccaaccaucaaca

SEQ ID NO: 1228098 - RNA, 19 nt, Artificial Sequence
  Description of Artificial Sequence: Synthetic oligonucleotide
ucuggauaaguacuaucag

SEQ ID NO: 1228099 - RNA, 19 nt, Artificial Sequence
  Description of Artificial Sequence: Synthetic oligonucleotide
uuuaaccuugucaaacaca

SEQ ID NO: 1228100 - RNA, 19 nt, Artificial Sequence
  Description of Artificial Sequence: Synthetic oligonucleotide
gguaauaucaucauucaug

SEQ ID NO: 1228101 - RNA, 19 nt, Artificial Sequence
  Description of Artificial Sequence: Synthetic oligonucleotide
ugagauccaugucugauac

SEQ ID NO: 1228102 - RNA, 19 nt, Artificial Sequence
  Description of Artificial Sequence: Synthetic oligonucleotide
aauaauucuccguccuucu

SEQ ID NO: 1228103 - RNA, 19 nt, Artificial Sequence
  Description of Artificial Sequence: Synthetic oligonucleotide
uuaauaccagauuuggaaa

SEQ ID NO: 1228104 - RNA, 19 nt, Artificial Sequence
  Description of Artificial Sequence: Synthetic oligonucleotide
cuggauaaguacuaucagc

SEQ ID NO: 1228105 - RNA, 19 nt, Artificial Sequence
  Description of Artificial Sequence: Synthetic oligonucleotide
uuuauuccggguaucugug

SEQ ID NO: 1228106 - RNA, 19 nt, Artificial Sequence
  Description of Artificial Sequence: Synthetic oligonucleotide
cuucuauucugagugaagg

SEQ ID NO: 1228107 - RNA, 19 nt, Artificial Sequence
  Description of Artificial Sequence: Synthetic oligonucleotide
caggaagcuaagaacagcc

SEQ ID NO: 1228108 - RNA, 19 nt, Artificial Sequence
  Description of Artificial Sequence: Synthetic oligonucleotide
ugcaaguaacauaaauucu

SEQ ID NO: 1228109 - RNA, 19 nt, Artificial Sequence
  Description of Artificial Sequence: Synthetic oligonucleotide
guauaagauagaugcaggc

SEQ ID NO: 1228110 - RNA, 19 nt, Artificial Sequence
  Description of Artificial Sequence: Synthetic oligonucleotide
uuaucugucaacucuggau

SEQ ID NO: 1228111 - RNA, 19 nt, Artificial Sequence
  Description of Artificial Sequence: Synthetic oligonucleotide
ucucaguaauacuccacgg

SEQ ID NO: 1228112 - RNA, 19 nt, Artificial Sequence
  Description of Artificial Sequence: Synthetic oligonucleotide
gagacuagugguaauauca

SEQ ID NO: 1228113 - RNA, 19 nt, Artificial Sequence
  Description of Artificial Sequence: Synthetic oligonucleotide
auacugcgccauuuuaugc

SEQ ID NO: 1228114 - RNA, 19 nt, Artificial Sequence
  Description of Artificial Sequence: Synthetic oligonucleotide
gaggaauauuuauuccggg

SEQ ID NO: 1228115 - RNA, 19 nt, Artificial Sequence
  Description of Artificial Sequence: Synthetic oligonucleotide
augcacacgagcuuguaag

SEQ ID NO: 1228116 - RNA, 19 nt, Artificial Sequence
  Description of Artificial Sequence: Synthetic oligonucleotide
uuaacgaaguguccauuug

SEQ ID NO: 1228117 - RNA, 19 nt, Artificial Sequence
  Description of Artificial Sequence: Synthetic oligonucleotide
gaacuucuggagaagacag

SEQ ID NO: 1228118 - RNA, 19 nt, Artificial Sequence
  Description of Artificial Sequence: Synthetic oligonucleotide
acuagugguaauaucauca

SEQ ID NO: 1228119 - RNA, 19 nt, Artificial Sequence
  Description of Artificial Sequence: Synthetic oligonucleotide
agugauggauauucaaaug

SEQ ID NO: 1228120 - RNA, 19 nt, Artificial Sequence
  Description of Artificial Sequence: Synthetic oligonucleotide
uacugaugcgcgcugagca

SEQ ID NO: 1228121 - RNA, 19 nt, Artificial Sequence
  Description of Artificial Sequence: Synthetic oligonucleotide
uucaaugagcagauuguac

SEQ ID NO: 1228122 - RNA, 19 nt, Artificial Sequence
  Description of Artificial Sequence: Synthetic oligonucleotide
uucuccguccuucuaaugu

SEQ ID NO: 1228123 - RNA, 19 nt, Artificial Sequence
  Description of Artificial Sequence: Synthetic oligonucleotide
cugugguucuacaagggcc

SEQ ID NO: 1228124 - RNA, 19 nt, Artificial Sequence
  Description of Artificial Sequence: Synthetic oligonucleotide
ucagcauacguaagagaag

SEQ ID NO: 1228125 - RNA, 19 nt, Artificial Sequence
  Description of Artificial Sequence: Synthetic oligonucleotide
uaauaccagauuuggaaaa

SEQ ID NO: 1228126 - RNA, 19 nt, Artificial Sequence
  Description of Artificial Sequence: Synthetic oligonucleotide
augcaaauuucuuaaaauu

SEQ ID NO: 1228127 - RNA, 19 nt, Artificial Sequence
  Description of Artificial Sequence: Synthetic oligonucleotide
uuaucagcagguguaaaga

SEQ ID NO: 1228128 - RNA, 19 nt, Artificial Sequence
  Description of Artificial Sequence: Synthetic oligonucleotide
auuaacaccacaauugcau

SEQ ID NO: 1228129 - RNA, 19 nt, Artificial Sequence
  Description of Artificial Sequence: Synthetic oligonucleotide
ucugguuucuauccgaauu

SEQ ID NO: 1228130 - RNA, 19 nt, Artificial Sequence
  Description of Artificial Sequence: Synthetic oligonucleotide
uguugcauguagcuacuug

SEQ ID NO: 1228131 - RNA, 19 nt, Artificial Sequence
  Description of Artificial Sequence: Synthetic oligonucleotide
augucguucucaguaauac

SEQ ID NO: 1228132 - RNA, 19 nt, Artificial Sequence
  Description of Artificial Sequence: Synthetic oligonucleotide
uucucuuaucagcaggugu

SEQ ID NO: 1228133 - RNA, 19 nt, Artificial Sequence
  Description of Artificial Sequence: Synthetic oligonucleotide
uaucucgaauuucuaggcc

SEQ ID NO: 1228134 - RNA, 19 nt, Artificial Sequence
  Description of Artificial Sequence: Synthetic oligonucleotide
guacuaucagccccaauag

SEQ ID NO: 1228135 - RNA, 19 nt, Artificial Sequence
  Description of Artificial Sequence: Synthetic oligonucleotide
uacuccacggcaucuuugg

SEQ ID NO: 1228136 - RNA, 19 nt, Artificial Sequence
  Description of Artificial Sequence: Synthetic oligonucleotide
guaaagagaugucuucuug

SEQ ID NO: 1228137 - RNA, 19 nt, Artificial Sequence
  Description of Artificial Sequence: Synthetic oligonucleotide
gaaucaauucucaucugug

SEQ ID NO: 1228138 - RNA, 19 nt, Artificial Sequence
  Description of Artificial Sequence: Synthetic oligonucleotide
cucaguaauacuccacggc

SEQ ID NO: 1228139 - RNA, 19 nt, Artificial Sequence
  Description of Artificial Sequence: Synthetic oligonucleotide
uuaugccggaaauuaaggu

SEQ ID NO: 1228140 - RNA, 19 nt, Artificial Sequence
  Description of Artificial Sequence: Synthetic oligonucleotide
uccacggcaucuuuggcag

SEQ ID NO: 1228141 - RNA, 19 nt, Artificial Sequence
  Description of Artificial Sequence: Synthetic oligonucleotide
ucgaagcagagcauguuca

SEQ ID NO: 1228142 - RNA, 19 nt, Artificial Sequence
  Description of Artificial Sequence: Synthetic oligonucleotide
aucucgaauuucuaggcca

SEQ ID NO: 1228143 - RNA, 19 nt, Artificial Sequence
  Description of Artificial Sequence: Synthetic oligonucleotide
aaguugcuauucugucacc

SEQ ID NO: 1228144 - RNA, 19 nt, Artificial Sequence
  Description of Artificial Sequence: Synthetic oligonucleotide
aggaauauuuauuccgggu

SEQ ID NO: 1228145 - RNA, 19 nt, Artificial Sequence
  Description of Artificial Sequence: Synthetic oligonucleotide
acuggguaugaaaagcuac

SEQ ID NO: 1228146 - RNA, 19 nt, Artificial Sequence
  Description of Artificial Sequence: Synthetic oligonucleotide
uccgucuuaauuuccaaau

SEQ ID NO: 1228147 - RNA, 19 nt, Artificial Sequence
  Description of Artificial Sequence: Synthetic oligonucleotide
uuuaucugucaacucugga

SEQ ID NO: 1228148 - RNA, 19 nt, Artificial Sequence
  Description of Artificial Sequence: Synthetic oligonucleotide
uggauguuuucgaagcaga

SEQ ID NO: 1228149 - RNA, 19 nt, Artificial Sequence
  Description of Artificial Sequence: Synthetic oligonucleotide
gaaaagcuacugaugcgcg

SEQ ID NO: 1228150 - RNA, 19 nt, Artificial Sequence
  Description of Artificial Sequence: Synthetic oligonucleotide
ugcauguagcuacuuguca

SEQ ID NO: 1228151 - RNA, 19 nt, Artificial Sequence
  Description of Artificial Sequence: Synthetic oligonucleotide
uuuaacgaaguguccauuu

SEQ ID NO: 1228152 - RNA, 19 nt, Artificial Sequence
  Description of Artificial Sequence: Synthetic oligonucleotide
aaagagaauauaggcuucu

SEQ ID NO: 1228153 - RNA, 19 nt, Artificial Sequence
  Description of Artificial Sequence: Synthetic oligonucleotide
cauacugcgccauuuuaug

SEQ ID NO: 1228154 - RNA, 19 nt, Artificial Sequence
  Description of Artificial Sequence: Synthetic oligonucleotide
aaagcuacugaugcgcgcu

SEQ ID NO: 1228155 - RNA, 19 nt, Artificial Sequence
  Description of Artificial Sequence: Synthetic oligonucleotide
caacaauaauucuccgucc

SEQ ID NO: 1228156 - RNA, 19 nt, Artificial Sequence
  Description of Artificial Sequence: Synthetic oligonucleotide
auuuaguccacggagacua

SEQ ID NO: 1228157 - RNA, 19 nt, Artificial Sequence
  Description of Artificial Sequence: Synthetic oligonucleotide
aaguaugcuuucaauuuug

SEQ ID NO: 1228158 - RNA, 19 nt, Artificial Sequence
  Description of Artificial Sequence: Synthetic oligonucleotide
uucuauccgaauucgugga

SEQ ID NO: 1228159 - RNA, 19 nt, Artificial Sequence
  Description of Artificial Sequence: Synthetic oligonucleotide
agcaacaauaauucuccgu

SEQ ID NO: 1228160 - RNA, 19 nt, Artificial Sequence
  Description of Artificial Sequence: Synthetic oligonucleotide
uguacuccauuuaaaugau

SEQ ID NO: 1228161 - RNA, 19 nt, Artificial Sequence
  Description of Artificial Sequence: Synthetic oligonucleotide
gaaucgaacuucuggagaa

SEQ ID NO: 1228162 - RNA, 19 nt, Artificial Sequence
  Description of Artificial Sequence: Synthetic oligonucleotide
gguuugaugaaucuaaugu

SEQ ID NO: 1228163 - RNA, 19 nt, Artificial Sequence
  Description of Artificial Sequence: Synthetic oligonucleotide
guuucuauccgaauucgug

SEQ ID NO: 1228164 - RNA, 19 nt, Artificial Sequence
  Description of Artificial Sequence: Synthetic oligonucleotide
gcaacaauaauucuccguc

SEQ ID NO: 1228165 - RNA, 19 nt, Artificial Sequence
  Description of Artificial Sequence: Synthetic oligonucleotide
uucgaagcagagcauguuc

SEQ ID NO: 1228166 - RNA, 19 nt, Artificial Sequence
  Description of Artificial Sequence: Synthetic oligonucleotide
aucuauuggaucaugaguu

SEQ ID NO: 1228167 - RNA, 19 nt, Artificial Sequence
  Description of Artificial Sequence: Synthetic oligonucleotide
uuucguaguuggagggagg

SEQ ID NO: 1228168 - RNA, 19 nt, Artificial Sequence
  Description of Artificial Sequence: Synthetic oligonucleotide
aauuaacaccacaauugca

SEQ ID NO: 1228169 - RNA, 19 nt, Artificial Sequence
  Description of Artificial Sequence: Synthetic oligonucleotide
auaucaucauucauggcug

SEQ ID NO: 1228170 - RNA, 19 nt, Artificial Sequence
  Description of Artificial Sequence: Synthetic oligonucleotide
uccuucuaauguagaagcc

SEQ ID NO: 1228171 - RNA, 19 nt, Artificial Sequence
  Description of Artificial Sequence: Synthetic oligonucleotide
cuuuaaccuugucaaacac

SEQ ID NO: 1228172 - RNA, 19 nt, Artificial Sequence
  Description of Artificial Sequence: Synthetic oligonucleotide
uaccuucuaagccauacuu

SEQ ID NO: 1228173 - RNA, 19 nt, Artificial Sequence
  Description of Artificial Sequence: Synthetic oligonucleotide
gaucuauuggaucaugagu

SEQ ID NO: 1228174 - RNA, 19 nt, Artificial Sequence
  Description of Artificial Sequence: Synthetic oligonucleotide
uugaagguuugaugaaucu

SEQ ID NO: 1228175 - RNA, 19 nt, Artificial Sequence
  Description of Artificial Sequence: Synthetic oligonucleotide
uguaccuucuaagccauac

SEQ ID NO: 1228176 - RNA, 19 nt, Artificial Sequence
  Description of Artificial Sequence: Synthetic oligonucleotide
ugguuucuauccgaauucg

SEQ ID NO: 1228177 - RNA, 19 nt, Artificial Sequence
  Description of Artificial Sequence: Synthetic oligonucleotide
gaaguguccauuuggauau

SEQ ID NO: 1228178 - RNA, 19 nt, Artificial Sequence
  Description of Artificial Sequence: Synthetic oligonucleotide
gaugaaucuaaugugauuu

SEQ ID NO: 1228179 - RNA, 19 nt, Artificial Sequence
  Description of Artificial Sequence: Synthetic oligonucleotide
augcucaagcaacaaaacu

SEQ ID NO: 1228180 - RNA, 19 nt, Artificial Sequence
  Description of Artificial Sequence: Synthetic oligonucleotide
uuauuccggguaucugugg

SEQ ID NO: 1228181 - RNA, 19 nt, Artificial Sequence
  Description of Artificial Sequence: Synthetic oligonucleotide
cuugacucuuuaauaccag

SEQ ID NO: 1228182 - RNA, 19 nt, Artificial Sequence
  Description of Artificial Sequence: Synthetic oligonucleotide
uaacuaucaugcacacgag

SEQ ID NO: 1228183 - RNA, 19 nt, Artificial Sequence
  Description of Artificial Sequence: Synthetic oligonucleotide
ccaauagccagccuggucc

SEQ ID NO: 1228184 - RNA, 19 nt, Artificial Sequence
  Description of Artificial Sequence: Synthetic oligonucleotide
uaguccacggagacuagug

SEQ ID NO: 1228185 - RNA, 19 nt, Artificial Sequence
  Description of Artificial Sequence: Synthetic oligonucleotide
uguagucuuuguaguuucc

SEQ ID NO: 1228186 - RNA, 19 nt, Artificial Sequence
  Description of Artificial Sequence: Synthetic oligonucleotide
ucuucacuuacuauuccuu

SEQ ID NO: 1228187 - RNA, 19 nt, Artificial Sequence
  Description of Artificial Sequence: Synthetic oligonucleotide
ucgaauuucuaggccaacc

SEQ ID NO: 1228188 - RNA, 19 nt, Artificial Sequence
  Description of Artificial Sequence: Synthetic oligonucleotide
auucguggaauucucuuau

SEQ ID NO: 1228189 - RNA, 19 nt, Artificial Sequence
  Description of Artificial Sequence: Synthetic oligonucleotide
ugaaucuaaugugauuuuc

SEQ ID NO: 1228190 - RNA, 19 nt, Artificial Sequence
  Description of Artificial Sequence: Synthetic oligonucleotide
uccauuuggauaucucgaa

SEQ ID NO: 1228191 - RNA, 19 nt, Artificial Sequence
  Description of Artificial Sequence: Synthetic oligonucleotide
auuucguaguuggagggag

SEQ ID NO: 1228192 - RNA, 19 nt, Artificial Sequence
  Description of Artificial Sequence: Synthetic oligonucleotide
uucuaauguagaagccugu

SEQ ID NO: 1228193 - RNA, 19 nt, Artificial Sequence
  Description of Artificial Sequence: Synthetic oligonucleotide
uguaaagagaugucuucuu

SEQ ID NO: 1228194 - RNA, 19 nt, Artificial Sequence
  Description of Artificial Sequence: Synthetic oligonucleotide
uaggcuucuucacuuacua

SEQ ID NO: 1228195 - RNA, 19 nt, Artificial Sequence
  Description of Artificial Sequence: Synthetic oligonucleotide
aauuucguaguuggaggga

SEQ ID NO: 1228196 - RNA, 19 nt, Artificial Sequence
  Description of Artificial Sequence: Synthetic oligonucleotide
ggaagcuaagaacagccug

SEQ ID NO: 1228197 - RNA, 19 nt, Artificial Sequence
  Description of Artificial Sequence: Synthetic oligonucleotide
ucaccauugaagugaugga

SEQ ID NO: 1228198 - RNA, 19 nt, Artificial Sequence
  Description of Artificial Sequence: Synthetic oligonucleotide
cugguuucuauccgaauuc

SEQ ID NO: 1228199 - RNA, 19 nt, Artificial Sequence
  Description of Artificial Sequence: Synthetic oligonucleotide
agccccaauagccagccug

SEQ ID NO: 1228200 - RNA, 19 nt, Artificial Sequence
  Description of Artificial Sequence: Synthetic oligonucleotide
aaauggcugaugaggaaca

SEQ ID NO: 1228201 - RNA, 19 nt, Artificial Sequence
  Description of Artificial Sequence: Synthetic oligonucleotide
agcuuguaaguaugcuuuc

SEQ ID NO: 1228202 - RNA, 19 nt, Artificial Sequence
  Description of Artificial Sequence: Synthetic oligonucleotide
auguacuuaaaaguaacua

SEQ ID NO: 1228203 - RNA, 19 nt, Artificial Sequence
  Description of Artificial Sequence: Synthetic oligonucleotide
uggaaaagcaugccacaaa

SEQ ID NO: 1228204 - RNA, 19 nt, Artificial Sequence
  Description of Artificial Sequence: Synthetic oligonucleotide
ugguaauaucaucauucau

SEQ ID NO: 1228205 - RNA, 19 nt, Artificial Sequence
  Description of Artificial Sequence: Synthetic oligonucleotide
cuaagaacagccugggaaa

SEQ ID NO: 1228206 - RNA, 19 nt, Artificial Sequence
  Description of Artificial Sequence: Synthetic oligonucleotide
aaagcaugccacaaauaau

SEQ ID NO: 1228207 - RNA, 19 nt, Artificial Sequence
  Description of Artificial Sequence: Synthetic oligonucleotide
agauccaugucugauacuu

SEQ ID NO: 1228208 - RNA, 19 nt, Artificial Sequence
  Description of Artificial Sequence: Synthetic oligonucleotide
agcagauuguacuccauuu

SEQ ID NO: 1228209 - RNA, 19 nt, Artificial Sequence
  Description of Artificial Sequence: Synthetic oligonucleotide
ugcgcgcugagcauacugc

SEQ ID NO: 1228210 - RNA, 19 nt, Artificial Sequence
  Description of Artificial Sequence: Synthetic oligonucleotide
uccgaauucguggaauucu

SEQ ID NO: 1228211 - RNA, 19 nt, Artificial Sequence
  Description of Artificial Sequence: Synthetic oligonucleotide
uggguaugaaaagcuacug

SEQ ID NO: 1228212 - RNA, 19 nt, Artificial Sequence
  Description of Artificial Sequence: Synthetic oligonucleotide
ucuaauguagaagccuguc

SEQ ID NO: 1228213 - RNA, 19 nt, Artificial Sequence
  Description of Artificial Sequence: Synthetic oligonucleotide
uggccuaguuuauuuaguc

SEQ ID NO: 1228214 - RNA, 19 nt, Artificial Sequence
  Description of Artificial Sequence: Synthetic oligonucleotide
cugcagaucuauuggauca

SEQ ID NO: 1228215 - RNA, 19 nt, Artificial Sequence
  Description of Artificial Sequence: Synthetic oligonucleotide
gcuaagaacagccugggaa

SEQ ID NO: 1228216 - RNA, 19 nt, Artificial Sequence
  Description of Artificial Sequence: Synthetic oligonucleotide
auaaguacuaucagcccca

SEQ ID NO: 1228217 - RNA, 19 nt, Artificial Sequence
  Description of Artificial Sequence: Synthetic oligonucleotide
uuaacaccacaauugcauu

SEQ ID NO: 1228218 - RNA, 19 nt, Artificial Sequence
  Description of Artificial Sequence: Synthetic oligonucleotide
caauaauucuccguccuuc

SEQ ID NO: 1228219 - RNA, 19 nt, Artificial Sequence
  Description of Artificial Sequence: Synthetic oligonucleotide
ucucgaauuucuaggccaa

SEQ ID NO: 1228220 - RNA, 19 nt, Artificial Sequence
  Description of Artificial Sequence: Synthetic oligonucleotide
auaaguaagcuguggcuuu

SEQ ID NO: 1228221 - RNA, 19 nt, Artificial Sequence
  Description of Artificial Sequence: Synthetic oligonucleotide
acguaagagaaguccuuug

SEQ ID NO: 1228222 - RNA, 19 nt, Artificial Sequence
  Description of Artificial Sequence: Synthetic oligonucleotide
aguaacuaucaugcacacg

SEQ ID NO: 1228223 - RNA, 19 nt, Artificial Sequence
  Description of Artificial Sequence: Synthetic oligonucleotide
uguugaagguuugaugaau

SEQ ID NO: 1228224 - RNA, 19 nt, Artificial Sequence
  Description of Artificial Sequence: Synthetic oligonucleotide
uaacaagaauuucguaguu

SEQ ID NO: 1228225 - RNA, 19 nt, Artificial Sequence
  Description of Artificial Sequence: Synthetic oligonucleotide
gugguaauaucaucauuca

SEQ ID NO: 1228226 - RNA, 19 nt, Artificial Sequence
  Description of Artificial Sequence: Synthetic oligonucleotide
auauaucugaaagcuugug

SEQ ID NO: 1228227 - RNA, 19 nt, Artificial Sequence
  Description of Artificial Sequence: Synthetic oligonucleotide
gacuagugguaauaucauc

SEQ ID NO: 1228228 - RNA, 19 nt, Artificial Sequence
  Description of Artificial Sequence: Synthetic oligonucleotide
gugaagguaucucaucauc

SEQ ID NO: 1228229 - RNA, 19 nt, Artificial Sequence
  Description of Artificial Sequence: Synthetic oligonucleotide
ugucguucucaguaauacu

SEQ ID NO: 1228230 - RNA, 19 nt, Artificial Sequence
  Description of Artificial Sequence: Synthetic oligonucleotide
uucaugucguucucaguaa

SEQ ID NO: 1228231 - RNA, 19 nt, Artificial Sequence
  Description of Artificial Sequence: Synthetic oligonucleotide
gccuaguuuauuuagucca

SEQ ID NO: 1228232 - RNA, 19 nt, Artificial Sequence
  Description of Artificial Sequence: Synthetic oligonucleotide
gcauacguaagagaagucc

SEQ ID NO: 1228233 - RNA, 19 nt, Artificial Sequence
  Description of Artificial Sequence: Synthetic oligonucleotide
augagcagauuguacucca

SEQ ID NO: 1228234 - RNA, 19 nt, Artificial Sequence
  Description of Artificial Sequence: Synthetic oligonucleotide
ugaagguuugaugaaucua

SEQ ID NO: 1228235 - RNA, 19 nt, Artificial Sequence
  Description of Artificial Sequence: Synthetic oligonucleotide
cuguauccgucuuaauuuc

SEQ ID NO: 1228236 - RNA, 19 nt, Artificial Sequence
  Description of Artificial Sequence: Synthetic oligonucleotide
uuuaguccacggagacuag

SEQ ID NO: 1228237 - RNA, 19 nt, Artificial Sequence
  Description of Artificial Sequence: Synthetic oligonucleotide
acagaaauauuugcaagua

SEQ ID NO: 1228238 - RNA, 19 nt, Artificial Sequence
  Description of Artificial Sequence: Synthetic oligonucleotide
gguucuacaagggccaugc

SEQ ID NO: 1228239 - RNA, 19 nt, Artificial Sequence
  Description of Artificial Sequence: Synthetic oligonucleotide
gcaugccacaaauaauagg

SEQ ID NO: 1228240 - RNA, 19 nt, Artificial Sequence
  Description of Artificial Sequence: Synthetic oligonucleotide
ugucaacucuggauaagua

SEQ ID NO: 1228241 - RNA, 19 nt, Artificial Sequence
  Description of Artificial Sequence: Synthetic oligonucleotide
acaguguauaagauagaug

SEQ ID NO: 1228242 - RNA, 19 nt, Artificial Sequence
  Description of Artificial Sequence: Synthetic oligonucleotide
ugucugguuucuauccgaa

SEQ ID NO: 1228243 - RNA, 19 nt, Artificial Sequence
  Description of Artificial Sequence: Synthetic oligonucleotide
ggauaaguacuaucagccc

SEQ ID NO: 1228244 - RNA, 19 nt, Artificial Sequence
  Description of Artificial Sequence: Synthetic oligonucleotide
agugaagguaucucaucau

SEQ ID NO: 1228245 - RNA, 19 nt, Artificial Sequence
  Description of Artificial Sequence: Synthetic oligonucleotide
uguagcuacuugucaaguu

SEQ ID NO: 1228246 - RNA, 19 nt, Artificial Sequence
  Description of Artificial Sequence: Synthetic oligonucleotide
ucuauccgaauucguggaa

SEQ ID NO: 1228247 - RNA, 19 nt, Artificial Sequence
  Description of Artificial Sequence: Synthetic oligonucleotide
aucaugcucaagcaacaaa

SEQ ID NO: 1228248 - RNA, 19 nt, Artificial Sequence
  Description of Artificial Sequence: Synthetic oligonucleotide
agccugucugguuucuauc

SEQ ID NO: 1228249 - RNA, 19 nt, Artificial Sequence
  Description of Artificial Sequence: Synthetic oligonucleotide
acccauugagauccauguc

SEQ ID NO: 1228250 - RNA, 19 nt, Artificial Sequence
  Description of Artificial Sequence: Synthetic oligonucleotide
guugaagguuugaugaauc

SEQ ID NO: 1228251 - RNA, 19 nt, Artificial Sequence
  Description of Artificial Sequence: Synthetic oligonucleotide
caauugcauucuuucuuac

SEQ ID NO: 1228252 - RNA, 19 nt, Artificial Sequence
  Description of Artificial Sequence: Synthetic oligonucleotide
ugcacacgagcuuguaagu

SEQ ID NO: 1228253 - RNA, 19 nt, Artificial Sequence
  Description of Artificial Sequence: Synthetic oligonucleotide
cacgagcuuguaaguaugc

SEQ ID NO: 1228254 - RNA, 19 nt, Artificial Sequence
  Description of Artificial Sequence: Synthetic oligonucleotide
uucguaguuggagggaggu

SEQ ID NO: 1228255 - RNA, 19 nt, Artificial Sequence
  Description of Artificial Sequence: Synthetic oligonucleotide
cauacguaagagaaguccu

SEQ ID NO: 1228256 - RNA, 19 nt, Artificial Sequence
  Description of Artificial Sequence: Synthetic oligonucleotide
uauuuaguccacggagacu

SEQ ID NO: 1228257 - RNA, 19 nt, Artificial Sequence
  Description of Artificial Sequence: Synthetic oligonucleotide
gguaugaaaagcuacugau

SEQ ID NO: 1228258 - RNA, 19 nt, Artificial Sequence
  Description of Artificial Sequence: Synthetic oligonucleotide
cuuuggaauuaacaccaca

SEQ ID NO: 1228259 - RNA, 19 nt, Artificial Sequence
  Description of Artificial Sequence: Synthetic oligonucleotide
uguuuucgaagcagagcau

SEQ ID NO: 1228260 - RNA, 19 nt, Artificial Sequence
  Description of Artificial Sequence: Synthetic oligonucleotide
uagugguaauaucaucauu

SEQ ID NO: 1228261 - RNA, 19 nt, Artificial Sequence
  Description of Artificial Sequence: Synthetic oligonucleotide
ccaaccaucaacagcaaca

SEQ ID NO: 1228262 - RNA, 19 nt, Artificial Sequence
  Description of Artificial Sequence: Synthetic oligonucleotide
uggauaucucgaauuucua

SEQ ID NO: 1228263 - RNA, 19 nt, Artificial Sequence
  Description of Artificial Sequence: Synthetic oligonucleotide
aguguauaagauagaugca

SEQ ID NO: 1228264 - RNA, 19 nt, Artificial Sequence
  Description of Artificial Sequence: Synthetic oligonucleotide
cagcaacaauaauucuccg

SEQ ID NO: 1228265 - RNA, 19 nt, Artificial Sequence
  Description of Artificial Sequence: Synthetic oligonucleotide
augaaucuaaugugauuuu

SEQ ID NO: 1228266 - RNA, 19 nt, Artificial Sequence
  Description of Artificial Sequence: Synthetic oligonucleotide
ucuccguccuucuaaugua

SEQ ID NO: 1228267 - RNA, 19 nt, Artificial Sequence
  Description of Artificial Sequence: Synthetic oligonucleotide
uauccgucuuaauuuccaa

SEQ ID NO: 1228268 - RNA, 19 nt, Artificial Sequence
  Description of Artificial Sequence: Synthetic oligonucleotide
ggccuaguuuauuuagucc

SEQ ID NO: 1228269 - RNA, 19 nt, Artificial Sequence
  Description of Artificial Sequence: Synthetic oligonucleotide
aagcuacugaugcgcgcug

SEQ ID NO: 1228270 - RNA, 19 nt, Artificial Sequence
  Description of Artificial Sequence: Synthetic oligonucleotide
acaauaauucuccguccuu

SEQ ID NO: 1228271 - RNA, 19 nt, Artificial Sequence
  Description of Artificial Sequence: Synthetic oligonucleotide
cuccguccuucuaauguag

SEQ ID NO: 1228272 - RNA, 19 nt, Artificial Sequence
  Description of Artificial Sequence: Synthetic oligonucleotide
ggaaucgaacuucuggaga

SEQ ID NO: 1228273 - RNA, 19 nt, Artificial Sequence
  Description of Artificial Sequence: Synthetic oligonucleotide
accauggaauuuguuucuc

SEQ ID NO: 1228274 - RNA, 19 nt, Artificial Sequence
  Description of Artificial Sequence: Synthetic oligonucleotide
auccgucuuaauuuccaaa

SEQ ID NO: 1228275 - RNA, 19 nt, Artificial Sequence
  Description of Artificial Sequence: Synthetic oligonucleotide
uccguccuucuaauguaga

SEQ ID NO: 1228276 - RNA, 19 nt, Artificial Sequence
  Description of Artificial Sequence: Synthetic oligonucleotide
aacucuggauaaguacuau

SEQ ID NO: 1228277 - RNA, 19 nt, Artificial Sequence
  Description of Artificial Sequence: Synthetic oligonucleotide
aucagcagguguaaagaga

SEQ ID NO: 1228278 - RNA, 19 nt, Artificial Sequence
  Description of Artificial Sequence: Synthetic oligonucleotide
uuuuaacgaaguguccauu

SEQ ID NO: 1228279 - RNA, 19 nt, Artificial Sequence
  Description of Artificial Sequence: Synthetic oligonucleotide
ugaugcgcgcugagcauac

SEQ ID NO: 1228280 - RNA, 19 nt, Artificial Sequence
  Description of Artificial Sequence: Synthetic oligonucleotide
guaucucaucaucauaagu

SEQ ID NO: 1228281 - RNA, 19 nt, Artificial Sequence
  Description of Artificial Sequence: Synthetic oligonucleotide
gauacuucaggaggaauau

SEQ ID NO: 1228282 - RNA, 19 nt, Artificial Sequence
  Description of Artificial Sequence: Synthetic oligonucleotide
gaauuucuaggccaaccau

SEQ ID NO: 1228283 - RNA, 19 nt, Artificial Sequence
  Description of Artificial Sequence: Synthetic oligonucleotide
uacguaagagaaguccuuu

SEQ ID NO: 1228284 - RNA, 19 nt, Artificial Sequence
  Description of Artificial Sequence: Synthetic oligonucleotide
cagaagcacaguguauaag

SEQ ID NO: 1228285 - RNA, 19 nt, Artificial Sequence
  Description of Artificial Sequence: Synthetic oligonucleotide
acgaaguguccauuuggau

SEQ ID NO: 1228286 - RNA, 19 nt, Artificial Sequence
  Description of Artificial Sequence: Synthetic oligonucleotide
augccggaaauuaagguuu

SEQ ID NO: 1228287 - RNA, 19 nt, Artificial Sequence
  Description of Artificial Sequence: Synthetic oligonucleotide
cguaguuggagggaggugg

SEQ ID NO: 1228288 - RNA, 19 nt, Artificial Sequence
  Description of Artificial Sequence: Synthetic oligonucleotide
augcgcgcugagcauacug

SEQ ID NO: 1228289 - RNA, 19 nt, Artificial Sequence
  Description of Artificial Sequence: Synthetic oligonucleotide
aguaugcuuucaauuuugu

SEQ ID NO: 1228290 - RNA, 19 nt, Artificial Sequence
  Description of Artificial Sequence: Synthetic oligonucleotide
uugcagaagcacaguguau

SEQ ID NO: 1228291 - RNA, 19 nt, Artificial Sequence
  Description of Artificial Sequence: Synthetic oligonucleotide
auucucuuaucagcaggug

SEQ ID NO: 1228292 - RNA, 19 nt, Artificial Sequence
  Description of Artificial Sequence: Synthetic oligonucleotide
ugcgccauuuuaugccgga

SEQ ID NO: 1228293 - RNA, 19 nt, Artificial Sequence
  Description of Artificial Sequence: Synthetic oligonucleotide
auucuccguccuucuaaug

SEQ ID NO: 1228294 - RNA, 19 nt, Artificial Sequence
  Description of Artificial Sequence: Synthetic oligonucleotide
aacuggguaugaaaagcua

SEQ ID NO: 1228295 - RNA, 19 nt, Artificial Sequence
  Description of Artificial Sequence: Synthetic oligonucleotide
gaauucguggaauucucuu

SEQ ID NO: 1228296 - RNA, 19 nt, Artificial Sequence
  Description of Artificial Sequence: Synthetic oligonucleotide
uuaguccacggagacuagu

SEQ ID NO: 1228297 - RNA, 19 nt, Artificial Sequence
  Description of Artificial Sequence: Synthetic oligonucleotide
ugagcagauuguacuccau

SEQ ID NO: 1228298 - RNA, 19 nt, Artificial Sequence
  Description of Artificial Sequence: Synthetic oligonucleotide
agcauacugcgccauuuua

SEQ ID NO: 1228299 - RNA, 19 nt, Artificial Sequence
  Description of Artificial Sequence: Synthetic oligonucleotide
gccugucugguuucuaucc

SEQ ID NO: 1228300 - RNA, 19 nt, Artificial Sequence
  Description of Artificial Sequence: Synthetic oligonucleotide
ggauguuuucgaagcagag

SEQ ID NO: 1228301 - RNA, 19 nt, Artificial Sequence
  Description of Artificial Sequence: Synthetic oligonucleotide
agcauacguaagagaaguc

SEQ ID NO: 1228302 - RNA, 19 nt, Artificial Sequence
  Description of Artificial Sequence: Synthetic oligonucleotide
ugccuucuauucugaguga

SEQ ID NO: 1228303 - RNA, 19 nt, Artificial Sequence
  Description of Artificial Sequence: Synthetic oligonucleotide
auguagcuacuugucaagu

SEQ ID NO: 1228304 - RNA, 19 nt, Artificial Sequence
  Description of Artificial Sequence: Synthetic oligonucleotide
cuaauguagaagccugucu

SEQ ID NO: 1228305 - RNA, 19 nt, Artificial Sequence
  Description of Artificial Sequence: Synthetic oligonucleotide
uucguggaauucucuuauc

SEQ ID NO: 1228306 - RNA, 19 nt, Artificial Sequence
  Description of Artificial Sequence: Synthetic oligonucleotide
guucuacaagggccaugcg

SEQ ID NO: 1228307 - RNA, 19 nt, Artificial Sequence
  Description of Artificial Sequence: Synthetic oligonucleotide
aauggcugaugaggaacau

SEQ ID NO: 1228308 - RNA, 19 nt, Artificial Sequence
  Description of Artificial Sequence: Synthetic oligonucleotide
accauugaagugauggaua

SEQ ID NO: 1228309 - RNA, 19 nt, Artificial Sequence
  Description of Artificial Sequence: Synthetic oligonucleotide
cauuuggauaucucgaauu

SEQ ID NO: 1228310 - RNA, 19 nt, Artificial Sequence
  Description of Artificial Sequence: Synthetic oligonucleotide
ccacaaauaauaggucucc

SEQ ID NO: 1228311 - RNA, 19 nt, Artificial Sequence
  Description of Artificial Sequence: Synthetic oligonucleotide
acacgagcuuguaaguaug

SEQ ID NO: 1228312 - RNA, 19 nt, Artificial Sequence
  Description of Artificial Sequence: Synthetic oligonucleotide
aagccauacuuuggaauua

SEQ ID NO: 1228313 - RNA, 19 nt, Artificial Sequence
  Description of Artificial Sequence: Synthetic oligonucleotide
agacuagugguaauaucau

SEQ ID NO: 1228314 - RNA, 19 nt, Artificial Sequence
  Description of Artificial Sequence: Synthetic oligonucleotide
uggacuuggcugccuuaac

SEQ ID NO: 1228315 - RNA, 19 nt, Artificial Sequence
  Description of Artificial Sequence: Synthetic oligonucleotide
ggaaaagcaugccacaaau

SEQ ID NO: 1228316 - RNA, 19 nt, Artificial Sequence
  Description of Artificial Sequence: Synthetic oligonucleotide
aaguguccauuuggauauc

SEQ ID NO: 1228317 - RNA, 19 nt, Artificial Sequence
  Description of Artificial Sequence: Synthetic oligonucleotide
cguggaauucucuuaucag

SEQ ID NO: 1228318 - RNA, 19 nt, Artificial Sequence
  Description of Artificial Sequence: Synthetic oligonucleotide
auaggcuucuucacuuacu

SEQ ID NO: 1228319 - RNA, 19 nt, Artificial Sequence
  Description of Artificial Sequence: Synthetic oligonucleotide
cuacugaugcgcgcugagc

SEQ ID NO: 1228320 - RNA, 19 nt, Artificial Sequence
  Description of Artificial Sequence: Synthetic oligonucleotide
cauauaucugaaagcuugu

SEQ ID NO: 1228321 - RNA, 19 nt, Artificial Sequence
  Description of Artificial Sequence: Synthetic oligonucleotide
gcauguagcuacuugucaa

SEQ ID NO: 1228322 - RNA, 19 nt, Artificial Sequence
  Description of Artificial Sequence: Synthetic oligonucleotide
cuggguaugaaaagcuacu

SEQ ID NO: 1228323 - RNA, 19 nt, Artificial Sequence
  Description of Artificial Sequence: Synthetic oligonucleotide
guagaagccugucugguuu

SEQ ID NO: 1228324 - RNA, 19 nt, Artificial Sequence
  Description of Artificial Sequence: Synthetic oligonucleotide
aaguacuaucagccccaau

SEQ ID NO: 1228325 - RNA, 19 nt, Artificial Sequence
  Description of Artificial Sequence: Synthetic oligonucleotide
ggagacuagugguaauauc

SEQ ID NO: 1228326 - RNA, 19 nt, Artificial Sequence
  Description of Artificial Sequence: Synthetic oligonucleotide
cugucugguuucuauccga

SEQ ID NO: 1228327 - RNA, 19 nt, Artificial Sequence
  Description of Artificial Sequence: Synthetic oligonucleotide
agcuaagaacagccuggga

SEQ ID NO: 1228328 - RNA, 19 nt, Artificial Sequence
  Description of Artificial Sequence: Synthetic oligonucleotide
acgagcuuguaaguaugcu

SEQ ID NO: 1228329 - RNA, 19 nt, Artificial Sequence
  Description of Artificial Sequence: Synthetic oligonucleotide
ccuucuauucugagugaag

SEQ ID NO: 1228330 - RNA, 19 nt, Artificial Sequence
  Description of Artificial Sequence: Synthetic oligonucleotide
ugcagaucuauuggaucau

SEQ ID NO: 1228331 - RNA, 19 nt, Artificial Sequence
  Description of Artificial Sequence: Synthetic oligonucleotide
gcuguauccgucuuaauuu

SEQ ID NO: 1228332 - RNA, 19 nt, Artificial Sequence
  Description of Artificial Sequence: Synthetic oligonucleotide
cacuguccauguggaaucg

SEQ ID NO: 1228333 - RNA, 19 nt, Artificial Sequence
  Description of Artificial Sequence: Synthetic oligonucleotide
cuucaggaggaauauuuau

SEQ ID NO: 1228334 - RNA, 19 nt, Artificial Sequence
  Description of Artificial Sequence: Synthetic oligonucleotide
gcagagcauguucagaaaa

SEQ ID NO: 1228335 - RNA, 19 nt, Artificial Sequence
  Description of Artificial Sequence: Synthetic oligonucleotide
cacaauugcauucuuucuu

SEQ ID NO: 1228336 - RNA, 19 nt, Artificial Sequence
  Description of Artificial Sequence: Synthetic oligonucleotide
ugucaccauugaagugaug

SEQ ID NO: 1228337 - RNA, 19 nt, Artificial Sequence
  Description of Artificial Sequence: Synthetic oligonucleotide
guguaaagagaugucuucu

SEQ ID NO: 1228338 - RNA, 19 nt, Artificial Sequence
  Description of Artificial Sequence: Synthetic oligonucleotide
cagcauacguaagagaagu

SEQ ID NO: 1228339 - RNA, 19 nt, Artificial Sequence
  Description of Artificial Sequence: Synthetic oligonucleotide
acuucaggaggaauauuua

SEQ ID NO: 1228340 - RNA, 19 nt, Artificial Sequence
  Description of Artificial Sequence: Synthetic oligonucleotide
aggaagcuaagaacagccu

SEQ ID NO: 1228341 - RNA, 19 nt, Artificial Sequence
  Description of Artificial Sequence: Synthetic oligonucleotide
caacucuggauaaguacua

SEQ ID NO: 1228342 - RNA, 19 nt, Artificial Sequence
  Description of Artificial Sequence: Synthetic oligonucleotide
ucguaguuggagggaggug

SEQ ID NO: 1228343 - RNA, 19 nt, Artificial Sequence
  Description of Artificial Sequence: Synthetic oligonucleotide
ugccggaaauuaagguuuu

SEQ ID NO: 1228344 - RNA, 19 nt, Artificial Sequence
  Description of Artificial Sequence: Synthetic oligonucleotide
cauguggaaucgaacuucu

SEQ ID NO: 1228345 - RNA, 19 nt, Artificial Sequence
  Description of Artificial Sequence: Synthetic oligonucleotide
auacguaagagaaguccuu

SEQ ID NO: 1228346 - RNA, 19 nt, Artificial Sequence
  Description of Artificial Sequence: Synthetic oligonucleotide
cuagugguaauaucaucau

SEQ ID NO: 1228347 - RNA, 19 nt, Artificial Sequence
  Description of Artificial Sequence: Synthetic oligonucleotide
ccggaaauuaagguuuuac

SEQ ID NO: 1228348 - RNA, 19 nt, Artificial Sequence
  Description of Artificial Sequence: Synthetic oligonucleotide
cacaaauaauaggucucca

SEQ ID NO: 1228349 - RNA, 19 nt, Artificial Sequence
  Description of Artificial Sequence: Synthetic oligonucleotide
gcaaguaacauaaauucuu

SEQ ID NO: 1228350 - RNA, 19 nt, Artificial Sequence
  Description of Artificial Sequence: Synthetic oligonucleotide
caugucguucucaguaaua

SEQ ID NO: 1228351 - RNA, 19 nt, Artificial Sequence
  Description of Artificial Sequence: Synthetic oligonucleotide
cuucaaugagcagauugua

SEQ ID NO: 1228352 - RNA, 19 nt, Artificial Sequence
  Description of Artificial Sequence: Synthetic oligonucleotide
uaaguacuaucagccccaa

SEQ ID NO: 1228353 - RNA, 19 nt, Artificial Sequence
  Description of Artificial Sequence: Synthetic oligonucleotide
gcgcgcugagcauacugcg

SEQ ID NO: 1228354 - RNA, 19 nt, Artificial Sequence
  Description of Artificial Sequence: Synthetic oligonucleotide
uccggguaucugugguucu

SEQ ID NO: 1228355 - RNA, 19 nt, Artificial Sequence
  Description of Artificial Sequence: Synthetic oligonucleotide
cacaguguauaagauagau

SEQ ID NO: 1228356 - RNA, 19 nt, Artificial Sequence
  Description of Artificial Sequence: Synthetic oligonucleotide
agccauacuuuggaauuaa

SEQ ID NO: 1228357 - RNA, 19 nt, Artificial Sequence
  Description of Artificial Sequence: Synthetic oligonucleotide
caugcacacgagcuuguaa

SEQ ID NO: 1228358 - RNA, 19 nt, Artificial Sequence
  Description of Artificial Sequence: Synthetic oligonucleotide
gcuacugaugcgcgcugag

SEQ ID NO: 1228359 - RNA, 19 nt, Artificial Sequence
  Description of Artificial Sequence: Synthetic oligonucleotide
acggagacuagugguaaua

SEQ ID NO: 1228360 - RNA, 19 nt, Artificial Sequence
  Description of Artificial Sequence: Synthetic oligonucleotide
guagucuuuguaguuuccu

SEQ ID NO: 1228361 - RNA, 19 nt, Artificial Sequence
  Description of Artificial Sequence: Synthetic oligonucleotide
gccccaauagccagccugg

SEQ ID NO: 1228362 - RNA, 19 nt, Artificial Sequence
  Description of Artificial Sequence: Synthetic oligonucleotide
ccgaauucguggaauucuc

SEQ ID NO: 1228363 - RNA, 19 nt, Artificial Sequence
  Description of Artificial Sequence: Synthetic oligonucleotide
gcuauucugucaccauuga

SEQ ID NO: 1228364 - RNA, 19 nt, Artificial Sequence
  Description of Artificial Sequence: Synthetic oligonucleotide
uuccaccauggaauuuguu

SEQ ID NO: 1228365 - RNA, 19 nt, Artificial Sequence
  Description of Artificial Sequence: Synthetic oligonucleotide
cucgaauuucuaggccaac

SEQ ID NO: 1228366 - RNA, 19 nt, Artificial Sequence
  Description of Artificial Sequence: Synthetic oligonucleotide
guaagcuguggcuuugguu

SEQ ID NO: 1228367 - RNA, 19 nt, Artificial Sequence
  Description of Artificial Sequence: Synthetic oligonucleotide
guaauacuccacggcaucu

SEQ ID NO: 1228368 - RNA, 19 nt, Artificial Sequence
  Description of Artificial Sequence: Synthetic oligonucleotide
cacacgagcuuguaaguau

SEQ ID NO: 1228369 - RNA, 19 nt, Artificial Sequence
  Description of Artificial Sequence: Synthetic oligonucleotide
guaccuucuaagccauacu

SEQ ID NO: 1228370 - RNA, 19 nt, Artificial Sequence
  Description of Artificial Sequence: Synthetic oligonucleotide
ggcugcugaaucaauucuc

SEQ ID NO: 1228371 - RNA, 19 nt, Artificial Sequence
  Description of Artificial Sequence: Synthetic oligonucleotide
guguccauuuggauaucuc

SEQ ID NO: 1228372 - RNA, 19 nt, Artificial Sequence
  Description of Artificial Sequence: Synthetic oligonucleotide
guaguuggagggaggugga

SEQ ID NO: 1228373 - RNA, 19 nt, Artificial Sequence
  Description of Artificial Sequence: Synthetic oligonucleotide
uacaagggccaugcggauu

SEQ ID NO: 1228374 - RNA, 19 nt, Artificial Sequence
  Description of Artificial Sequence: Synthetic oligonucleotide
caccauggaauuuguuucu

SEQ ID NO: 1228375 - RNA, 19 nt, Artificial Sequence
  Description of Artificial Sequence: Synthetic oligonucleotide
guacuccauuuaaaugauc

SEQ ID NO: 1228376 - RNA, 19 nt, Artificial Sequence
  Description of Artificial Sequence: Synthetic oligonucleotide
aucaugcacacgagcuugu

SEQ ID NO: 1228377 - RNA, 19 nt, Artificial Sequence
  Description of Artificial Sequence: Synthetic oligonucleotide
gcuggauguuuucgaagca

SEQ ID NO: 1228378 - RNA, 19 nt, Artificial Sequence
  Description of Artificial Sequence: Synthetic oligonucleotide
uggcugccuuaacaagaau

SEQ ID NO: 1228379 - RNA, 19 nt, Artificial Sequence
  Description of Artificial Sequence: Synthetic oligonucleotide
caguaauacuccacggcau

SEQ ID NO: 1228380 - RNA, 19 nt, Artificial Sequence
  Description of Artificial Sequence: Synthetic oligonucleotide
cgaaguguccauuuggaua

SEQ ID NO: 1228381 - RNA, 19 nt, Artificial Sequence
  Description of Artificial Sequence: Synthetic oligonucleotide
cacggcaucuuuggcagga

SEQ ID NO: 1228382 - RNA, 19 nt, Artificial Sequence
  Description of Artificial Sequence: Synthetic oligonucleotide
gcagaucuauuggaucaug

SEQ ID NO: 1228383 - RNA, 19 nt, Artificial Sequence
  Description of Artificial Sequence: Synthetic oligonucleotide
acuguccauguggaaucga

SEQ ID NO: 1228384 - RNA, 19 nt, Artificial Sequence
  Description of Artificial Sequence: Synthetic oligonucleotide
gguggagcuggauguuuuc

SEQ ID NO: 1228385 - RNA, 19 nt, Artificial Sequence
  Description of Artificial Sequence: Synthetic oligonucleotide
gccaaccaucaacagcaac

SEQ ID NO: 1228386 - RNA, 19 nt, Artificial Sequence
  Description of Artificial Sequence: Synthetic oligonucleotide
cuuuggcaggaagcuaaga

SEQ ID NO: 1228387 - RNA, 19 nt, Artificial Sequence
  Description of Artificial Sequence: Synthetic oligonucleotide
cuaucaugcacacgagcuu

SEQ ID NO: 1228388 - RNA, 19 nt, Artificial Sequence
  Description of Artificial Sequence: Synthetic oligonucleotide
caccauugaagugauggau

SEQ ID NO: 1228389 - RNA, 19 nt, Artificial Sequence
  Description of Artificial Sequence: Synthetic oligonucleotide
ccugguccaaagagucagc

SEQ ID NO: 1228390 - RNA, 19 nt, Artificial Sequence
  Description of Artificial Sequence: Synthetic oligonucleotide
cuauccgaauucguggaau

SEQ ID NO: 1228391 - RNA, 19 nt, Artificial Sequence
  Description of Artificial Sequence: Synthetic oligonucleotide
gagcauacugcgccauuuu

SEQ ID NO: 1228392 - RNA, 19 nt, Artificial Sequence
  Description of Artificial Sequence: Synthetic oligonucleotide
ccuuaacaagaauuucgua

SEQ ID NO: 1228393 - RNA, 19 nt, Artificial Sequence
  Description of Artificial Sequence: Synthetic oligonucleotide
cccaauagccagccugguc

SEQ ID NO: 1228394 - RNA, 19 nt, Artificial Sequence
  Description of Artificial Sequence: Synthetic oligonucleotide
cugaugcgcgcugagcaua
